United States Patent Application Publication US 2015/0240253 A1 - sequence listing, part 35

SEQ ID NO: 165089 - DNA, 835 bp, Zea Mays
aattcgacccaatcctcctaagatcatcctcaaccccttgcaggtgatgaacccctgccaaaacccagcagctgaactcttgaagaaagctttgctgcaccttcccaagggccagttgatccctatcaaacacacatctgttgcgctgaatgcaccaagcacctaggatgctgctgctgctgtttatgcctttttatttatccttctgaacaagcttgatcactttcctccaccattccgcaaaggatgcctcctctacctccggagtcaggtgtcctaatccgagaggatccaatagactaaaccataattgttgtgctaagacacaggaggtcaatatatgttggacagtttcatcttcttgaccacaaagtgggcaggtctcaggatggtttaatcctctctgttgcaatctatcggctgtccatcatttgttctgaattgctaaccacaagaacatcttacatttaggtggcacccaggatttccacaacctccttccaaggttaaaaaaatgatagaaccatttaagaaagcctcataacatgatttgtaagtgaatatgtagatcattatctggagagggaattaccacctccagagcttcccatagagagtgttattcccatttccgacctgtgtaaccactgaaactgcgaagaaatttctgacctgtgattgtacagggatgtcaagatcgaaccacggcctggtagggtcgattttgctcaaccacagccaccttagttgtaaggctcatcccttaaactgtaggttcggtataccaagaccttccagtttcagaggccttgtcaccttatctcaggaagctaag

SEQ ID NO: 165090 - DNA, 351 bp, Zea Mays
gtcttgtcaggaccgaggaaagggagttgtcaccaagtcaccgcttatattgaggagattaaaccattagaggctatcggtgtagtatcagaattcccagatgtgtttcccgaggagttaccaggtatgccacctgaaaggaaggttgaatttgccatagagcttattccaggcaccgcccctatttccaagagagcctatcgagtgtccggaccggaattggtggaactcaagaagcagattgatgagttgtcggagaaaggttatatccgaccgagtacctcgccttaggcagccccagcgctatttgtggagaagaaggatggaacaaagaggatgtgcattgactac

SEQ ID NO: 165091 - DNA, 624 bp, Zea Mays
gaagtccttgctttaaccacctcaaatttctttgttttagattgcaattactgtagcacatgagctggctcatcagtggtttggcaatcttgtaaccatggagtggtggacccacttgtggctaaatgaaggttttgctacatgggtaatcaattttagaacctaacatttcgatgtttcagttcgtaggctgccactatatattgagtaaatagaattttcttttaacagatgagtaatctagctgtaaattctttctttccgcaatggaatatctggacacaatttcttgatgacacaaccgctggtctcaaattggattcacttgaagagtctcaccctattgaggtaaccctcctttgggatttactatgagctatggccctgtccaatagtttgaaagttaactgtttttcatacgttctgctttttcatcgctttgtatacaactaaagacattacatgcttttaagtttgaccacaatctagtggtaaatgtttactgaggtccagcagaaatatacgagttcattgtggtgcacaattgttgataattaaaataacaaggatatatatgataaactcctgtctcctcacattaaaacaattggctattcatgtacc

SEQ ID NO: 165092 - DNA, 1320 bp, Zea Mays
caaaaccaataacatcaaatactctatttagccttttcttgccacgggcaccaaaagcaatgttcatggcttcatcttcagcttttgtgtatgcccccaacaaatcatcagtagtcatctcaatggcctcaagccattcgtcatctggctcccaagctggcttctgtagcggtatgtatacttcaaataactagaccaccttcgcttgaactgtcagtggtctccttcatcattttccattcattaacaagggtccataccttaaaagctatgtgctcttggaccaagtctctggtgctaatgtaactgcacacagtgttgaacgccaccaggcaggcatgagccttatcactgttcacaatcgagggccttcgaatgccgaagcgtgattgtattagacgctgaattatatctttcacatcctccctctcaatcaaatcattcttaacataaaaccattgcctcatccaagatcctggccatttcttccgaaacgttggcacaaggcgtcttgcatcagagcggtatacgaaggaataatagccaaagttgttatggtactgtcccttccccattgccttcgtctggtaagataattcatgtatattgcagaaacagtcggcgtttggttccagcccctgactcctaattgcccaaataaaaatcccaattttaattaaggcttcaggggtaagctgatgaaggtatatctcgaaccttttaagtacttcaaccagtatcttatgtagagggaaccgaataccagccttcataaaagcccttgaaaactaccacttcgtcagctttaggaagaggaacaatgttctctcctccggccctcaccatacttgtatcacggaaatatttgctcttcatcgtctcaatttgtcctttttaacagtggattttccaaaaacaactagtgcggggtcttcactaggcctccatggccgatctttgacatcatcgttgtcactctcaatatcaaaatcaccactgtcactagaatctccaggcagtccagctaaaatttcatcagtaatcttttcaacattggtcctttccatagcttcgtaaaaaccaactagtgtggggtcctcacttctcttgtcttcggccatctcagcgttgattgaaaccaaaggctgaagctccaaaagcaaccatggttacagaattagcaagctaaaaaacaaactcaacacaagcttgatagcacgaaaaatattcttcatcgtaaccctcatatatagatgcaaatcaccactgcacgatgggccccacgatacagaaggtttcgctattctagcgaagggaagg

SEQ ID NO: 165093 - DNA, 649 bp, Zea Mays
ccatattcctttttcagggccttattcttagcaacgccctcagggcacaaaaaagcgctgaagatgagggatgtaccatggcctccccctaacaaacattagttaaaaatgggtagcaagaaatgagttggaatagataaatctaagttgatccacctcctttaaaacttaagcacacttatctccttactgctaccttaacacttacatttaaccctctttcactgatgtcttcatccacccccgccaatggaggagacacccgcttcagctttgactacctttcccatgagggctttccctctatcttgtgggaggttctctgctccgctggataccccacatcccctctgtacatggtgcagctatatgaggagcatcgggtgccacgttgcagggtttggctgaccctggagtctcacccctgtagcctaggtggcgttcccttgattacgagactgtcgggttcagggcggacgacaccactgaggccacagcgctaaaggccttgacgaccttctatggatttcatcccctggagatgatgatgcacccacttggactcttccccgccgagaagagggatgacccaatgtggtgcaacagagtgagtcacgtgaaggatgtgtgggccatgcatcctcaccag

SEQ ID NO: 165094 - DNA, 324 bp, Zea Mays
ccttgcagcatgtggaccgggccaaaaatgaggaggccgacacattggccaaggctgccgctagaggcgagtccctgccctccgatgtgttctaccatgtgattggcacgccagccgtccgcagccccgaagggctccaaataaccaatgacagcgagggccaccgcatagtcaaccttattatgaccgaagactggcgggcaccaataaccctgttcctacaggggtactaccatccaaccgacatcaacgaggccaagcgcctcaaacatcgaagccgggacttcgcgctgattgaaggccagctttacaagaagggggtca

SEQ ID NO: 165095 - DNA, 520 bp, Zea Mays
gtttaaacacgaccagcaaaccaaccaaaaacaacgacttagaaggctgtcaccagaaggaagctagcagaattaatcgtagacataaagccttcatgaaaaggaaaatacacaaaaccatgcatgaccatttctagctaagtctgagtttattacaggggggaatcacaaaccccggcgggttgcagctaaccacgccacacctagagtcgcaaactttttaggggagagttttacatcatctgccatccaggtaggataatatgcatcagaaaaaacatcaacagttaaaagttccgaaggtggaagtctaccagaagaacaacaaaacgcaaacaccatctgagacattaacatttttaactacagatgcgtctgtctaccggtctccatccaaaatttctattgaaaatttctttaaccagtcttcggatttgcaagcttccttcctgtagggtccttccttccgtctttgtgtggatcatggcattaacattttttaaccacagatatgtttgcc

SEQ ID NO: 165096 - DNA, 395 bp, Zea Mays
gcagggctcctctcttccacgctgcgaaggtgacttataggtcctcttctctcccttagattgcactcaaaactagactctaattcctatgtaccggaaatagtataatttcaaatttcataattactgaagttttttatcacgcttaaatatttgtcaacaggtgtacttagcaatggtgcaaatcatgcccatccacgagatcttggcctcaacgccgattgagaagatgacgttgcaaatatttcagacttgtagagccctcgagcacctccatctcttgttcagttgcttatattagtcatctgttccctatgtttaaatttgatagtagattgaggcaacatataaacttcaggtcaagataagaagagacaaaggaagaacagtcaaat

SEQ ID NO: 165097 - DNA, 276 bp, Zea Mays
tttctgtccaaacgtcgtcgtgcagacgattcaggctgtaaccctgccacagactttgaagcccaatcatcagctagggcagtgtttcattggatactgaagatgctccccattctcatctagactaccccattgacattataggatggactgatcccaagatgcgtttttcaatggctgagtattcctctaggaggactgtggatcaattctctctgcccagtgacacaaacatccagtacttccatactcagttgcagtttgatgtgttctagg

SEQ ID NO: 165098 - DNA, 463 bp, Zea Mays
tctggcactcccaacggcccaaacacattataccgaaagtcaccaggggtgtcgaattatgggcctggcaccccaacggcccaaacacattataccagaagtccttcacgaagcctggtactagtagcttgcagccactatatatactagtagctaccgcttgtccagcgcgcggcctgctgctggctcgctacagaagatgaagagtggtcatgcgacatgaatcttaatcataccaagtgaaaaaagaacaccgacgtagatattgctgggagctatctgggagcgtagtttgttttatataactaatctaacaatgattatgtatacacacacacgttgtttttagtagttgtggtggtctatgtacgattagaattgacattgatcctccaacattatcatccaacagccgataggaaggaagattgagtttagtaggccctatacactattctaaagt

SEQ ID NO: 165099 - DNA, 476 bp, Zea Mays
ctcgagtacacgccgcaacatggttgtattcatgacaaggaggtgtaggttttactcaattagaagtttggttgatgtggctaggaaattgtttcggcttgggtagtgaagtggtgacgtgaccaagtagtcaccccccggttatgagtctagtctagatgtgttatgccttcactgtgatacccatcacatatgctaactggatgtatatgaaaaatgaaatagacacatcatatgatttagtggtgctgggattatgttctaagtacattatatatgtgtgatgaatgttgggcttgaggattgtcattcgggcaaaggtgtaatagacttgtatgcgtagtatgattaagctagtaatacaaaatactctgtttagttcctctagcacttcgtcggtaagaataattagcgtcgttgtatgagagcataaatatcttgtctcagaagcatcaccctctatgtggttgctcaag

SEQ ID NO: 165100 - DNA, 530 bp, Zea Mays
gtttctttcgctgttaccatgactttgtgtagtaggctgtagagataacccttgcattaacaaccgttgcttggacgacataaggagattccaggcctcttggaggattcccgcatttgtttgtgctaaattgctggtggctaattaacgactctgaccggcgaagcaagtgaaagacaagtagcatacagaagcagaactcccgtgcagactctagtctagtctactaacagtattagtgcacagcatacgtgcagtagcgcaccaacatatggcatgaaactgccgcccggaacggtctgaacaatctcagttcttggcgcaacacacctttaattatcctgcttccacattgcaggaatgcatgatctctcccccaatttgacgaggcgccaaatagcagtatgcatgatctctcatcatcaccttgattagaataagatggtaagtcagcaacttgagcatagcagaaaatgacatgctccatcatcatcggtatcgggaatccccatccgttaattggaaggccg

SEQ ID NO: 165101 - DNA, 574 bp, Zea Mays
gaccgcatcaacggtcttcggcattcgaccacaacgaagtcaccgcgaggggcagcgctggctaccctcgcgtgcgacactccgtgcaaaagtcgcccaagggtgcagccggactagcacaacaagtgcgcaaaatcgaagtcttcaccaaaaagactatccatgcaaaagtcgcccaagggtgcagccggactagcacaacaagtgcgcaaaatcgaagtcttccccaaaaagactatccgtgcaaaagtcgcccaagggtgcagccggactagcacaacaagtgcgcaaaattgaagtcttccccaaaagactatccgtgcaaaagttgcccaagggtgcagccaaactaccacaacaagtgcgcaaaatcgaagtcttccccaaaagactatccgtgcaaaagtcgcctaagggtgcagccgaactaccacaacaagtgtgcaaaatcaaggtctccctcaaaaagaccatccgtacaaaaaccgactacaggtgcagccggaccgacataataaacgcgctagatcaagtgcacaagtcccccacgggcacggccaaatcagcgtacgca

SEQ ID NO: 165102 - DNA, 906 bp, Zea Mays
aggagttgcccaaggggcggatagataccatagggaccagcacaagtgctccaaggacctgtacatgaagtgccatgggggttaaaaatagatgctccccatggtggccagtcatgagagaacggtgacctactgcaccttgaggtcgatcaactgctagatgacctcgaagaaggcctttatttatatcatcaagggcggatggtggcactccctacgatgtcaatggcataagctactatgccaatgaagaaaacatcttagcatccatcacagtagtagcttccaaaccaaagatctttgatacaagatagctgaaggattatggggaggctacactagcgcaaaacaaattttcgaccacataaaccaagatctattgttgttatatgtcatgcaattaccactagacgtgcagggcagcggaagcatctcgacgtagacgaacatgtcgagcagtgtcgtgcaatcgccgacatccttcacgtcctcgcatagttcatcctagtgctccagatgtatcacctttgaggtatccacacgtacagggaggaagcacagtgtattgaactgctaggttcgagacgttggcttgatgagggagagaggggcgcgactgctggtttgctggtggcgaattaggttaacctaaccgtgtcactatccctcattatataggcattcttgtgggcttctgactcataggtccatcaacaaccctaaaacccaatcttattttggatccttatccgagttaggcttcctttcacttaagtgtatgaccctataggttcatgtacacaaagacatggtccgagtactcttactcgagggggccagagatatctctctcaagaagagagagacaaattccatcttgactgaccatgcctcacaacatgcttc

SEQ ID NO: 165103 - DNA, 564 bp, Zea Mays
aggcatactatagacaaatccacaagatggaggagaggctcgatggattcgaactctaccatgtgcttcgacacgacaatgaggcggtggatgccctcacaaaggtagcctatactagggatgtagttccccttgggagtttttcttgacgtgttcctgacctctaaatctgactcgagaataagactgttgtagcctcaacctccgacctatgcaaggctaccccaaaggaccaacagatggatggtcggatgaggtgcatcagtgaaagccctagtttggttttgataattgagtgccaaacatgtggactaatgcttgcaatgggtttatttaggtagggttcacttaaaagtgatgaacaaggcataagagatggagatcacaaccatatgtgtgcaagtgttcatccaatagagagaagatagagtggaaaacaagtcctaaggcaaaggtataatgttagggtgttgattttgacaaccaatgtgcaatagagggtacaactggatttaggatagatagtcatactataaagaggtgagctcttgagttgcaatggtt

SEQ ID NO: 165104 - DNA, 1161 bp, Zea Mays
tcgcttttgtgccttgcttctagtggagcacgcgggttgtgtgcccatgttgctgggcacgtcgggggcggcgaggttgagctcactggtggcagtggcgaagaagacgagggtgccgaacgtgatacaacttcctagggcgaatgtcttgccttcggcagaagttgtcgattgggccatcggagtggagggcgtcacctaatatgatagcactcccctacttgctgcgccaactatcgtggttttgtaaccgggggacaataagatttgtgttcggtgagggatgctagcgcagactcactctgaatggtgaatctctaggactcgaacgagagatctgagacacggggcttatactggttcaggccggggccctagtctagtgtagtgttgatcgtagtattgcgatggaatgtgttacagcttgtgtgctcgtgttctagaaaaaggagagcctgccttttatagtttaagggtaggaccttacagaggtgacttgttctctacaggtatgagggagatccattgttctggtttgatgtagtgctcctgatgtagtctgtagggtcgtgcgtaggcgtactcctggtatggcatatcgtctacttgtccgtcatgtgggttcttgtagcgactcctctgctgacatcatcgtagtagtgcatggtgggtcccgtgggtcagccccttatggtgctgtcatgcatagcacgaccttgcctattctcacggacctgcaccacttaccggcgtgcgtaggcatacaccggtatggtgtacctgtcgcatcccttctggtatgcgggtcactgtaaagattccgacgctaaggtccctacgaccggagttgactggccctatatgttagtgtgggtttgcctggtacagtacgtgacgacgtactgtctgacctttattggggacccttcaacatcgtacccgaggcctggatgtggtttggtgatgatccgtcatgtcacgctgacgtgggcctgtatcattgggttgttccttttcttacaccggttagattggcacgagacctggttgcttgtcccgcctcatggggttgctcgtcatgaagttggtcgtccgcttcgttttgcgaggttgctcgacagggacttggtcgcccgctctgtctcgcggggttgctcggca

SEQ ID NO: 165105 - DNA, 623 bp, Zea Mays
cgacatcaagaaactgatggtatatggtgactcgctagtgctcataagccagataaacaaagactgggactgctcgactgattccatgggcaagtactgtgtagctgtgcgaaaactggaggacaaattcaaagggttggagttccatcacgtggaaagagaccccaacgtagcaacagaagctgggatccagtcgggcccatgccccacctaggatcttcgtccaagaaatatcacaaccgagcatcctctcggatcaggtggaagagtgcaacaccttgagccagctggaggcggaccctaacgactggagagagcctatcatcagatacattaaaaaacgaagaagagtcggatgacaaggctgcagcggaacgcattgcgaggcagtcggcccactacaccatcatagggggcttactgtacaggagaggtgcagcaggagtcctcatgaaatgcattcactccgctactgggaaacaattgttagatgaaatccatgccgggcagtgcggggtacatgcagcatcaaggactctagtcgggaaagctttcagatccagtttcaactggccaactgcgaagaacaatgttgccgagttagtccagaagtgtgaggcatg

SEQ ID NO: 165106 - DNA, 617 bp, Zea Mays
ctgtcaggtgccctgaatggcgatctaatggtatagtagactgacatagatcctaggtttggtgcacctcgccaccgatgaccctcgcaccgtgatccacgctgtcgccacatttcgtgctctctagcgaggagataaccacgacagagtaaaaatcttggcaccagattggctcggacccggtcgacggtgaggtcgccgtacccacttgggctgcggtcggccgaaatggtcctcgccggtgttggccgcttaccaaccgtgtgccacgtgccttacggcgttaccacgtagtagtaaaccaatgaagcatgtccgttcatcaccggtggccttgccacggtgaaagccacgaatcccttgcgctagcaaccttccttctctccggccgccagcacgccattccaaaattaggagccaccgcccttggactctataaattgagcataccgccagctccgttaggtaatcacgcatccagcgcacccacccgtgtctcggaatgtccacagagagctctaatttggagttcccccaattcagttctccacgccaccatgagtgagctcgctgtggtcatccttctgtaggtccgttcacgccctcctcgctctcgt

SEQ ID NO: 165107 - DNA, 437 bp, Zea Mays
ccttaacgacagaaagggcaaatgggtcgaccaatttcccaaagttgtatgggccttgaacacgacagagtgtcgggcaaccgggttcacaaccttccgcctaatgtatggatctgaggccctgacgccgcagaagttaaagcatgggtccccccgaacaaacaaatcagtcgtaccctatgtcgacgaaccaacttccaaagatctcatcgacggagaccgtatcctcgccctacaggccctcgacaaatatcaggttcaaaccaaggcctggcgcgaccacacagtcgtcccaagagaactcaacgaaggggacctcgtactcgtaagaaccacccggacagagtcacggggcaagctagagccgaagtgggaaggtccattcatagtcaatacgaaggcatcccccagtgcttacaggttggcaacatcatccg

SEQ ID NO: 165108 - DNA, 445 bp, Zea Mays
tactagcagaaaaccatctctatctgacctcctgtaaacagcatgctctagtggatttctcacaaaaccaagcttcatcagttcactgtcaagttttgcattccatgccctaggagcctgacgcaaaccataaagggcctttttcagtttgagcactttgtcacctccacatttgacaacaaatcctggaggttgttgaacatacacctcctccctcaactcaccattcaagaaagctgacttgacatccatgtggtgcacttgccaacccttctgagcagccagagcaatcaacaatctcactgtctcaattcttgcaaccggtgcaaaaacctcatcaaaatccaccccctcacgctgagcatatcccttcgctaccaaccgagctttgtgcttaaccacattgccctctggatcttttttcactttgaatacccatttcagg

SEQ ID NO: 165109 - DNA, 666 bp, Zea Mays
ataaaagaaaaaggaaagaggcccatacccctgcccccctcggcctttcggcccaaccggcccacctcgcgcgcgcacgcctccccccttcctctctctgccctggcagggcccgcccgtcagcgcagccgctttccccgcgcgtgcgctcgctccctcgctctctctgctcgcgggcccgggctgtcagctccctcgtccccgcgtaaccgccgcccgagctgcgcgtgccgcggtctccgcgcccacatcgcgcgtgaagctcgcaaccaccccgccctcggccacttgagcccagagcctagcccaccctctctccctccctcatttgcgcacctgcagacccctcttccacctcccccacgctgcgcgcacgccaaagcgccgccgccattaaccgccgccgtcccgagctcgtttctccgtcgacgtcggagcccccgccgtgccctctgccacggtgagcttcgcctcgacgtccgcaacccgggacatgccccaattcctcctccccctctctaatttcctctgcccgcgctcacccgccgtcctccgtgcagccgcagaggtccgccaccgtcgacccgggccgtcgccgcgccattgccgccaccgagaggtccctggggttcgccttgaggtaaggaacctcctctgccccctccc

SEQ ID NO: 165110 - DNA, 548 bp, Zea Mays
caagcagttgcagcttcggtcgtaagggagtagaaggtcttgacgtggaactcgtacatggcttcgacgagctggatgctaggcaccagcaggcgcacgggtgacaacgaggcatggcagatttcgacgaggcgaagaatgacggccaagcgagcaacagcacgactgacgctggcgtaggagatcggcacaacactggcaaactgcgaaatctggcgagggttgacagtgctcgacgtgagcagagcggtggacacggccgtgtagcagcacgtcgtagatgcggaggaatcccagcaacgcggtaggaagacgacggtgagatagctgcacagtgttggtcttcggtacagggggactgagtattagtggagaggtgtgagcaggggcatcggcgaacttcggtgagcagaggtatagactccggcgaggcaccataacgaaccgagagcaatgcaaaggacggtgcagcagcacgcgtgtaccaacaccacgcggcgagcagcacaatagggaggcatggaggagtcttcgagaatcggttcgca

SEQ ID NO: 165111 - DNA, 1353 bp, Zea Mays
taagtgtggcttcgcgaaagggtactatgaactttgggccgcaggatcgcacaccaacggtgtggattagatcggccccggtccgaaccggtatgcgctagacaccgtccgatctggatccaacgctcccaatctaaataccctaaatcaattctaagccggtcatcgacagatcgacggcgcacatcggctatgatgaaacggtatgcgatcttctaatctgagccgtccgttcgggatctgacggcgttggggtatcgtcttccccacgcagacaccgacggcagtgccgcgcctgcacggcggcggtagcgccggcgaacaacgcatcgcacgcacgggtgataatcctaggtttcgacagcgtctacaccaagcgtagattacagtgaattcgtgggtgggtgacataccggccctgatgtcgtggtagcgcctggtcgcggagcgaggcagtctgcagcggaagtcagtcgacggtgataaattgccgcgggtccgcggcctccccttccaattgcggacacgaacaacaacccggagtgcagacgaccctccccggcactacaccgagaccagacgagacacggtgacgagattcgtcggtggcggcgcgaatcggtgtggtggcgctgttaggaactagcaatgagggctcgggtcggtgctgggtagatgggagaggtggagaagggcgcataggccgccaatttaactcctgtggactcggcacgagggtggaaggaggtcttccacgttccaccgacaatggcagcgagatgtgcgcgaggtgggtgagtcccgcgaggagtccgggcgctgacgaacggcgggatgacgtgtgggtccacacggcaggcagccagtggcatgcgcggactaagcgtaactagagcgtgcgcggtggtttgctatggccgagagcgtgcgaattcaccggcggaatcgatggagtccgcgctcagcggcgaatcctccgcgaggtgagtgacgagcccgactgaggggccgcacacaatagtgaaaggcgaacaagatgcgcggtagggaggtgtggggctgacaattggttcccaccagtcagtggtcggatgggcgtgcgctgaggaaccgagaattgggcctgcgcgaggtgagaaagagataatgggccagaaatgaggtgggcggcccatttaggtcggttttgctttattcttttcctttctatttcttttcttctctatttctaagtttaatttgaatccgaattttaaattcaaagttgttccaaatttattctcaatcatattgtgaaattaagaataccaactttggaaatataactatattatgtatatcattcctcctctt

SEQ ID NO: 165112 - DNA, 1327 bp, Zea Mays
tcagaccaactagaggtatggtgggaattcacagaatcgtcaaggtggcaccgtaaacgcgcagcccagaagcaacaacgcaccagtccaacccaatggctatttcaagtgcggtgagctgggccactatgctaacaactgcctaaagcgcaaccagtagacacctcagaggagcaacactcagaggaatcaccagagcacccccgcttgtggatctgttcagaacaaagctcagcagaaccagagtagaggaagggtcaatcacgtcacagcggaatcagtgcctaaggatgccgacgtagtgtatggtatgttccttgttaactccatacctacatcagttttatttgactctggagcatcgcattcgtttataactgagtcatttgtggaaaaacatagcatacctaagtaccctcttaagaagatattacatattagttcaccgggaggtgacatgaaggccacacactcatgcccccatgttaatctcaagattcaaggaatagatttctcagtcaacctagtggtcctaggatccaatggtattgatgtgattcttggatgcaattggttgaagagttgtgatggagtgatacagtgtgccaacggaacaattacgttgacaagtccgcaaggcgaaagagtccaagttagcacagacatgtcaacaaatgcaaaagggaagacagtgataaatcacttggaagaaaagctcttggaaaatatcaaggtagtgtgtgagtacccagacgtatttccagaggaattaccaggtatgccacctaaccgtgatattgagttttctattgaaatattacccaaaactgcacctatctcgaaaagaccttatagaatggacgtcaaagatttagttgaactgaagaaacaaatagaagaattattagaaaaaggtttcattcacccaagttcatccccttggggagccccagttctatttgtgagcaagaaagatggttcgaggagaatgtgcattgattatagaagtttgaatgaagtaaccatcaagaataaatacccattaccttggattgaagatttatttgatcagatgaagggagctaagatattctcgaagatagatctgagatcgagatatcatcagttaaaaattcgagtagaagatgtacccaagacagccttcacgacgagatatggattatatgagtttttggtcatgtcgtttggactaactaatgcaccagcatactatatgaacttgatgaataaagtattcatggaatatctggatcagtttgtggtcgtattcattgacgacatactgatatactctccgaatgaagaa

SEQ ID NO: 165113 - DNA, 491 bp, Zea Mays
cccgccatggataacaaacagtatccacatccgttacccgcgggtaacggatatccgcggatatatccgtttgcccactacacatacaaaatatttaaatccagcaaattcaaacaatcaacaagtcgttgcatctggaataacctgtacttgcatttgggtgaaaaaataatcaacaagtcgttgcatctggaataacctgtactttacaccgggacagccgcgcaggagccggggactgaggggaggtagcacacgcagggactgaggggagcaggccgcaggcggccaggcccgtagggagtcagcgatgcagggactgaggacgagctgcgcagggagtcagcgatgcagggactaaggacaagctggagatctgcgctctgtgcccgggagccgcgcagggagccagggacctagaccggtagcgggcagcggcagcgggagtctgggagaggtgagatggagtgggcggcggcggtaggagtggg

SEQ ID NO: 165114 - DNA, 713 bp, Zea Mays
cgaatttcttgttggggaccttctgtgtagccatgccgcattgatccatgggcggtcctaatcacaactgtattccgggtaagaacctttgacatatgtttgaaattgcatccacatgtgatagcgggggccgcttttggttttggtgctctagcgcgtcgagttggttggctcgccggagtgcgcctccatggggtagggcgttgcctctgtgctcggggccagggagagaggaggggaggaagaaaggatttagcctgttagatgtcgatccgacggccatgatcgcgtgtagcgtaccccttcatcaattgtatccgagccgtaggatggtagttcgatgaccgggattagatcacatcttcataaaaccctagccgtaggatcttaatctgatgccccacgccgcgtaccggttcggttatgaccatgttgtaatccgagccgtccggatcagatcgtgcggccctaatttctccataccccttcggccctggttgtttttcaaaagaacccctccacttttcaataaccaacccgcagtccacactgtgcggaagcttgagtcttagggtaattgtgattatgacccctgtgtttttctgttattggctcccagtccagagctcagggaaaatcaggaaaatgaatttagaatttgattttcaatacacaaataaatccagaaacttatataattcatattaaattca

SEQ ID NO: 165115 - DNA, 567 bp, Zea Mays
attatgtgtccatgcaataaatgtagaatatgacgagctaccaagaggtaggccacactacacctgtgctcacatgatttcgtgccaggctataaggtctggtatctccacggtgaagatgttgaacgagcagcagaagtagaagttgatgacggtgaagatgttgataggatggaccagatgcttgaggatctgtagcctgaactagccccagatcatcatgattcacctacaccgaaggtttagaagtttttcgacctcctcaaagcgtcagaagagcctcttcacgggcacactgacgtgaccgtcctcgaattcgtgacccggctgatgtcaattaagtccaagtttgcattctcaattaattgttacaaggagcttgtggatttgattagcgaggttcttcctacgggtcacaagatgcccaaagatatgtaccagtccaagaaattgcttgaaggtcttggtatggagtatgagaagattgatgtttgttaggacaactgtatgcttttttggaaggaacatggtagagagcagaaatgcttaaaatgtgggaagtcgagg

SEQ ID NO: 165116 - DNA, 538 bp, Zea Mays
ccctccccgcgcccctcccagcggccgcccacaacgccgcctcagccctcctcgcttcgccccaccctgcagtcgccgcgcacgctgcggcctccatcgcccgtctcaccgccacccaccccgatctcctcccctcggatgtcgccctcccgctcctcatcgcgcccctcgtggcctcaccgtcccccctgctcgcctcctgcctcgtcaaggcagtctccgcgctcgcaacctgcgccctccgctccggctctcgcttcccggcccacgaccaccccttcatccaggcgctcgcgtagggggctgacggcgctcgagcggagctgatgcggtaggcagccgggatggttgccgaccgggtggattgggtggtcaagtttctgatggggaggaggatgtcgcatggctgagggacagcgaggcgggcgcccatgcgcgagcagcggaggatcctgaaatgttgccgaccgatggttgaggaggagtatggcaatgcgagcaacggaggatgcggtgcgcggacgatgcggaggacacc

SEQ ID NO: 165117 - DNA, 433 bp, Zea Mays
aagatcatgagttgggtaattcccctcatgcttcctcaactgtcttgagccataagcgatcacgctgccttcctgcatcaacacacaaccaagaccaatacgcgaagcatccgtataaactgtgaaacgcttaccgctctcaggcaaagctaggataggggcgtccaccaacttgctcttcaatgtctgataactgacctcacaatcgccagaccagacgaagggaacacccttctccaagagtctagtcaaaggcttagcaatgctggagaaatttggtatgaagcgccgataatatccagcgagccccaagaaacttcagatttcagagacactagagggtctcttccacttcaccacagccgcaacattgttgggatcaaccgcaatgccctgttgattaatcacatgccccaggaaagccacttcggac

SEQ ID NO: 165118 - DNA, 820 bp, Zea Mays
gtataaagcacggtagtgagtggtgacacacattattactccaccacattcgctagcaagactagtaccacaccgtacagacagcaagccctatctaagcatataaaccgtgccatcaagattaactaacaagggtataacaagctgtgatgaaatgcattagcactggtaggtccggtgcgatcttctgaactttgtggagatgacactcgctactctgagcttgttctcttttttatttggtaactaaatttaccttgttcttttttttggtaactaaatttcaaagtcatttcaataagctctggcgagtggtgacacacagacatagtatcacttcgccacatttttggtaactaaatttagcttgttctctttttttggtaactaaatttcaaagtcatttcaataagctctcgcgagtggtgacacacagacacagtatcacttcgccacattcactagcaagactagtaccacatcgtccagacaacaagccctatctgagcatataaatcgtgccatcaagattaattaacaagggtataacaagttgtgatgaataagtataaagcacggtggtgagtggtgacacacagtattactccgccacattcgctagcaagactagtaccacaccgtacagacagcaagccctatctgagcatataaatagtgccataaagattaactaacaagggtataacaagctatgatgaaatacattagcactggtgggtccggtgcgatcttctgaactttgtggagatgacactcgctactctgagcttgttctcttttttatttggtaactaaattt

SEQ ID NO: 165119 - DNA, 311 bp, Zea Mays
aattttctgatttcattgatctctggactgggcgtcaaaaacagagaaacaaaggggctaactcgaaatatttctcagactcaggctaacccacggtctggactacgggttgtttatagggttttacgggggctctttagtaaatgttacaccgcgaaggggtacgctctaatttggaccgtcagatcgattccaacggtcgggattagatctatctctttataaaccagcatttgaccagagcccttggatcccgagatcaacggtctcgatcacacacaggcaaaggggcatggctgcgccaatctggg

SEQ ID NO: 165120 - DNA, 353 bp, Zea Mays
gcgccaggattaaaccccaaactgcgcgaatcggtatgcaatcagggtccctggatcccgatccgacggtccgcgtttaatgagttcaagatcggatctccaccaccggataccgcatcaacggtcactgtttgtttcggctgaatcggtatcaggatctaatcctacccgttgccactggaatcaacggttatgaacccgtctgctttcttcccccggccaccagtggcgctgcctaccggaacacggcggcccatggccggactccctacggtctcgcgcatagagcgctaactttcaaaatcgaactactctacacacctaccagtgaaacgcgaagatcatggtacact

SEQ ID NO: 165121 - DNA, 651 bp, Zea Mays
ggctcccctattgcttcaaatttgagagacagttcaagaaaccatgcaatgaatggctagaaatgattgaaaccatgtgcaatgaaattcttggcaattatacgaaggaggaccagctaatgactgctgtctttggtagtcggccgaaacgaaagttgaaccgggtaatggatgcaatgaactttgaatatccagattatgagcggtttgacaaaggggccgagggtgtgaaaagaaaaagggttgttagcatcctaagcaggcaagatgcccagtcaataaaagaagatgaaaaaactttgaagaaaacaaaaacaatgctagagccaaaggcaacaatttcttagaagcaaaagcttgaccaagcaccttctactgaaccgaaggtcgataaagcagtagagaaaacccctccgtcgccaattgctgccgaagtgattgaaatttcgaaggtaatgaccgattctccgcccttcaagctgctaagtcctctgggattggaactgacaaaacttttacagaggaacgaaacgccctcggctacagaagagaagactgaagggcagaagaaacgatgaattgtgaacatactgcaagccattgaacgaacaccgccttcggcttcagcgacaaaagtagcaattcctgcgg

SEQ ID NO: 165122 - DNA, 615 bp, Zea Mays
cagggatccagacattagttgccgttaccatgaccttggtgtgacagtgagataatcgccacggttactgcatgagctgagagcccccggccccgtcaacattcggaagggaaggtacctgtgcacttcaccagacctgtagactgtaccagtacgttgcagagtgagccttccctccaccggtcgctcctagcccggactaggcggcctcccagtctccaccgggccggggctgcccacccccaagtccccaactgcatccgcgccgccgccatccgtcgcagtcgcagtcgcactgctggctgcccgccgtaccgtaccaacaagcttcttctacttctcttcctcgcccagtctcccctccttccctaccatccccgcatttcgaaaggagctagctaagctagcgcaccggcctgcttcccttccctcccgccgtccgcgcttcttccatttcccttcgcaacggcctctcggtcacacccgagcccgtagctgcgccgtactccgtccgtccgtccgtgccacaccgccacccaccaggccagagccaaccgggagtggccacgcagagtggttttggcggcttgctggctagctctgcctctgcccgcc

SEQ ID NO: 165123 - DNA, 574 bp, Zea Mays
taccgacttaagccgattgctccgttagtagggtatagtggccaccctaagtcaagtaagcgcgagcatgttgcaccatcttaagtcattgccgacttaagtctattgctctgttagtagggtatagtggtcaccctaagtcgagtaagcgcgagcatgttgcatcgtcttaagtcattgccaacttaagccgattgctccgttagtagggtatagtggtcaccctaagtcgagtaagtgtgttgattccaagtctaatcaagtcgaagtcgattgataaccaatagtttgaatgccttcgagaatgaaatcttttattgatgatgtattttccaattacagagtacaacgttgctccgatagctcttgttaagggtaaaacttcctgagatgctctatattccatgaatactccacttccgtgccatccatttgagtaagccgatatgatcatgaccgagtgacttctaataccatgaatggcccttcccatagcggtgataatttgtgccgtccttctcccgttagaattcgacgaaggaccaagtctctcactagaaaggatcgatgtcgt

SEQ ID NO: 165124 - DNA, 665 bp, Zea Mays
caaacaaatgcttagataaagtcaatgcacgcggtgacgcaggacgagacgatgcggccaacttatatgttcttggctgtctgtgtccatgtcgtcgccttttattacgacgacgacggcggcacaagatggacgtagcagatatcgcactgctgtgttttcagatgttgatgagtgtgccgccgtcaatgttccacggccatgccctgtccaatgcaccaacataccttgcccaaaatgctagtctacgagtgcgttcccaacggcaccctgatcgcgcttgagtcttctgctctttaagcttaccttcattcatgggcttcacctccaacaatccttcatcgtgctgtcaaatcttctaatacaactcttcgtctcctcgatgagaaagaactatgctgcgatggtatcagactttgcggcctccatactggcaggcaccgactgggactggcagtggcaggtcctcagttcacgactcttgagtctgagcacacgcatacttgccagctgacggataagagtgacatgtactatacagctttggtgttgttcttctagaacatgaccctgaacgaagagatggagcctgttcgggcaatcgtcgctcggcagcttggagattgtccagcactcggaaatttcagcatgtgcatggagacgag

SEQ ID NO: 165125 - DNA, 571 bp, Zea Mays
ggagcagagccagttgacgctggcggggcggagcagccactccgcggcggaaacaaattagcaggagcagcttcatctaatacacactcctaaccaacttgcaagcaacatcaccatcaaagaacgcgtccagccagtcgaactactcctcgatctgtgacgccttagtcgcgagggacctgcgagagggagaggggatctgtaaattgatggcgaggaggaagtgcacaatgggacccttcctgaggtgcttgcggcgtcgcgggcgagcacgtggtcgagggatgcgtgggagctgagctagtcgacggcaccttgtcgtgcttcccgccgccgcggaagaagtagccgcgcgcggacgcccaagccttacaacctctggatggcgtggggcaaggtggcaggaaggaaggtggcgactgtgaatgggacaggaggggtggcggcagtggcaaggacgggtttaggtcatttagagatgggatgagaaagattggatggcgggttcatttgaaagaagtataaggttttttttgcaaagaaaatgatgcacgatgaccgttgaaactgg

SEQ ID NO: 165126 - DNA, 486 bp, Zea Mays
gatatgatcctagggatgttgaggatgatgaaaagaagcaggagctctttctggacggtttaattggacccttgcaatatcaactggtatcgcacacattcccgtccttctagaggctacttgacaaagctattgctgtggaaaacaagaggagtatgtttggagagaaaagaagggctgctaaccaagggcaggctggaagtagttcccgtcctcgctatactaccactccaagtacaccatctggtggcagttccggacgaaaaactcaacgggcaccaactgctcctccgcaagcaagcaccccagcaggacctgttgctcctaacacatccaccaacagggcatgcttcagtgtggacaaccgggacactacgccaactactgtcccaacagggctgcctacactacaccagctccaatgaagcaaggtcaggcttcggcaggaaagagtcagcccctatctatcaaccggggacaaagccc

SEQ ID NO: 165127 - DNA, 685 bp, Zea Mays
gccaccgctcttgggaacgatatagaggcatgccagagaagcttcaacactgtgtgtacttttattggcacaagagatctggttcaagaacacatcgcctacagagtatggccgcttgtgaatgaattggagatgccgaagaaggctattgccgggtctagtcagggcggcctggtctatttaaaatatagtttcaggtatagaggcgagtttgatgagccaaatgatgaatggttgagcagtattgaggcaaccattgacgaattgcttggggcctacacaagggccgaagatgatgtaatgacattggccttcgaagaccgaggcaagaaaagattgaatagcgtttttgacgtcattggtttcatataccctgattattgctatccctcgcgaaagcagggaaagaaaaggaaaactgccgcttcgaccatctctgttgtgccgaagggcaaaaagatcaaggtcttaacacaccggccaagatacattgaaacggccatagtgccaaagcttagcgaagggacatcttccactactgaggcagaacagattgaattgccgaaggtgcctacagccgagccagtcgaaacgctaaaaaatggtgccgaagccaaagaagaggcggccaaaaaggcagagctagggaaagcaatagtgctgccagaaatcttgagcccaccag

SEQ ID NO: 165128 - DNA, 1522 bp, Zea Mays
gtttgatgcagcgaagcatgagttctcgctgggagagccaagcactgagatcgacatgtgacactgaatcatctgcagacaaaccaaaatgacggggagtgcgccatatagaacttcaaatggagatcgtcccaaagaagagtgtgggcaagtgttataccaaaactccgccactgacaaccatgcagaccacttagacgggtaggattgcacaaagctgcgcagaaatgtttccaagcattggtttacccgctccgtctgaccgccggtctgtgggtggtaggatgaactcctctgtagctgtgtgcctgacaaacggaacaattcacgccaaatgttgctggtgaaaatgcgatcccggtcagagacgatagacttcggcataccatgaagtcggtagacattagacatgaaagcttgggccactataagagcagtaaaaggatggcgcaacggcacaaaatgaccatatttagtgagacagtcgaccaccactagaatggtgttgtattggccagaggaaggcaatccttcgatgaaatccatggagatcgcctgccatgcctaggtaggaacgggcagaggttgcaacaatccagggtagcgagtccggtctggtttggcctgatgacatacagtacacgcagccacatagtccttaatgatttgtttcatgtgaggccaatagaacaactgtttgatccgggcgtacgtgactgggaaaccggagtggcctcctagagcactggcatgaagtgccatgatgaccttggtttgcaattgagaattattatcgagccaaatacgctgcttgtaccgaatgactccatctttgagggtgtagtgcaactgatcagacagcgccagagcagacaacaacttcatcgcacgagggtcagagatgtagccataaattacctcctggaaccaagcgggagaagccactgacaaggaatagaggtgaccagtaggatgtggacgacgcgaaagggcatcaacagctgtattatcagtgcccttcttgtattgaattcgataatgtaatctgagcaacttggtgaacaccttgtgttgccatggggtgtggagtcgctgctctgtaaggtgggaaagactacactgatcagtataaatgacaaattcagtgtgctgcaagtatggtagccactgatccacgaccaacaagattgtgagatactctttttcatatgtggacagtcccaagtttccagggcccaaagccttgctaacaaacgctagaggatggccattttgctgcaacactgctccaatgcctgaacccgaggcgtccgtctcaattgtgaaaggacgagaaaaatctggtaaagccagtaccggtgctgaagttagtgcttgtttaagggccacaaatgctgattcctgcacagatgtccagacaaaaactgaatgcttcttgaggagggaagtaagaggcttggccaaaaggccaaaattgcgcgcaaacttgtgataataacccgcgagaccgagaaaccctcgc

SEQ ID NO: 165129 - DNA, 678 bp, Zea Mays
ttcctctcttttttgttctctacagccatacctcatttttaccttgcgctcgccactgatccttagtgtggtaatgtgacgatgaaggtgacaatattttgttcatccttcattcatccctcatcacgaaaccaaataagagacggtgcagcttcaatccacttcaaccctgtaatcaaacaagaaattaggtttaacctgtcacttaaaccaaacaaggaacgagtccgacccaacctaaaaaatagatcggttttgactcaacccactttgtttcgaaaccaaacgcactactagagagtgtgaggaggcagcgacggcaggcgacgcccgcgccggcatcacaatagcgcgcgggaggaaggaggggctcatggcagcgtgcggctggcggtttgcgttgtctgttgtgtgagaaggtagtgacggtctcgctgggccattgaaacgcaatcctacggcgggatattaaagatctacgtggataccaccaagattaggaacgcaagcgttagcgacaatatttcttcctatttttttgttctctacagccatacctcatttttaccttgtgcccgccacttatccttagtgtggtaatgtgacgaggaaggtgaccatattcttttcatccttcattcatccctcaccatgaaaccaaataagagacagtgcagc

SEQ ID NO: 165130 - DNA, 641 bp, Zea Mays
gagcgcatttcctccagcgccacgagacggtcgtcgccgcggagagccaccacgtcgacctgctcctggatcttgtcacagcgcgtcgtgaagtgggagtggatatcctcaacacgccgttcgatgttgtcacagcgtccggcgaacttctcggagagccgcgcttccatcaggcgcatttcctcgagcacctgacggttactggcgtcggtgtactccatagctgcggtggtggcacgagtacgccgtggacagttgttactgggatccagagtgcctgagtctgataccaaattgttagcgcgtggtggagaagggagcagcagagggaagaatcagaggtagaagaagaagactggggaggaggcggcggccagaacagccagccaccagaggtagtatattatcttcttctgtttcatcatgctctcgatcgttcctagggtctgattatttataccacttcattacaatacggcccatccagccttacacggcccattccggcccagaaactctcacgttccggcgtttcacccgtggcgtccgtgtagcagctccttcctctggctcgccaccagctttgttgtctgctcccacgttgtcttgggtgtcggtgctgacagatcgctagacgccag

SEQ ID NO: 165131 - DNA, 1754 bp, Zea Mays
gccgatttatgtcattaccaacttaaaccgaccgctccgttggtagggtatagtgatcaccccgagtcaaataagcgtgagcatgttgcaccgccttaagccgttgccgacttaagacgatagcttcgttagtagggtatagtggtcaccccgagttgagtaagcgtgagcatgtcacaccgtcttaagtcattgccgacttaagtcgattgctccgttagtagggtatagtggtcaccccgagttaagtaagcgtgagcatgtcgcatcgtcttaagccattgccgacttaagccgattgctccgttagtagggtatagtggtcaccccgagttaagtaagtgtgagcatgtcgcatcgtcttaagtcattgccaacttaagtcgattgctccgttagtagggtatagtggtcaccccgagttaagtaggtatgcaggttgacagtgaacaatttgagtgcccttgaagtctttttattgatgatatatttcctagtttacagaatacattgtcgtcccaatagcttttgagatatagctaggggtaaaacttcctgagatgttctatgttccatgagttcccaatttccgtgccatccatttgagtgagacgatatgatctaggccgagtgacttctgctactatgaacggtccttcccatagtggtgacaatttgtgccgtccctcccccgttagaattcggcggaggacgaggtcacccactgcaaaggatcgatgccatatggtcttgtcatgatagcgcctcagagtttgctgatatcgggctgactgaatcaccgtattcaatcgttcttcttctagtacatcgacatcttccagcctagtagcctcagcttctgctatgttttcaaagattaaccttggtgccccgaacttgagatcatcaggtagcactgcttccgaaccatagaccataaagaaaggtgtgtttccatgcagagctcgactaggttgagttatcaggctccaaacaacatacgacagctctctgatccactttcctgcgaacttttcattcttgtcgaagactttctttctgagcgcttccaatatcatctcgttggctctttctacctgcccgttggctcttgggtgtgccaccgaggcatatttgatctgaatgctcttttgctcgcagaaatcaaagaattctgaacttgtgaagttggatcccaggtcggttatgatgctattcgttattccaaacctgaatattatgtcttgtatgaattccactgccttagctgaagttagagaagcaatgagtttgaactctatccatttagtgaatttgtcgatagcaaccagtacatgagtgtatcctccttgagctttcttgaaaggtccaatcatatccaatccccagcatgcgaatgaccaagttatgggtatggtttgtagttgctgcactggtagattttgctgttttgacaagtactggcaggctttgcacctctggactaactcggttgcatcattctttgctgttggccagtagaaacccgaccggaagaccttcccaaccagggttctggatgctgcgtgtatcccacattatccagcatggacttcttctaacaactgctttcctgtatctgagagaatgcatttcatgaggactcctgatgcgccccttctgtaaagcgtttccccaatgagagtataatgagctgactaccttgcaattctttctgctgcatttttgtcatctgtttcctcctcattttttat

SEQ ID NO: 165132 - DNA, 702 bp, Zea Mays
aggttgaggaggcatgtgtttggtacaaatctgaagatgaacaacagaaggcatttcaattcatgcgttgttggaacaagttaaagacacggccaaaatggcttacaaaaattaatgatttggctacggctaaaacctcgaacaagagacagaagaccagtcatgatggtgttactattggaagggtaccaagtgaaacatgtgcaggtgaggtccaaggcatagaggataatcacttgacaaggcctctaagaaagaaaaaaagctacaacaatactgctacaagagaataagaaaagtgtgacaataacattggaaaatatgtggacacaaagaaataaaccaaagttgataaagatctcaaaaaaagaggagaggtttagtaaagcctttctgtggtggaaccgcccagattaatccagcttaagtgcttaggtcccacctcaatgttgatgccacacttaaatcagattaaactgttagtcccttgaatctagtctgattacccacttacaccaaattggtaaccacttctcacatgaaggtgagtctatagaaatacaacaagtcataagaaccatcatcttaacggtagtacgatctttacatcatcggagtttttggaattacaaaaatagtagttcattgttcattgcagtggaataactatcaacaataaaagaggattatggttaagcctag

SEQ ID NO: 165133 - DNA, 779 bp, Zea Mays
gcacactaatggcgtcaatgccaactgatgatgcacgcatgtaccagtcattcaaccttttagtactagcagggaccttcctcagtttctcaagagttagtagaggtctgcccgacacatattgtttaggcacatttttataatctgccttagttgggatctttatctttgcggccattgccttagccttttctgcagactccttgtgctcggccaaatcaatagtatgtgacgtgaggtcccgtgcaatccatttcaaaaatcgaactatgccagtagtagtagctttactcttctttttctcgaatgtggacaccaattttggtacatggattttagatttcattgattgtcgtgaatcccttgatggctgtggagaaggtggtggtgtcctaaatattgatgcttgtggcggagacggtggattagaaagaggatgaggagcagcatgtgaagattgtggaggtgatgatggatgtacaagtactaaagtttgaggaggcagagatggttggggatgagacgacgacggcgttggtggatcaaccaattcgacatcccttcgaggccaaaggatgaaatttttatggcttgtccaagtgtctcgattttaatgtcttaaatcactcttctttttcggcatagttcctacataaggttgcccaatctggcaccttcattcatttattcttgttccccggacaaacctactcagtacaacctgtgatgcaagacaactgcacctactcagtacaacctacgccagaagcgtgccaaaa

SEQ ID NO: 165134 - DNA, 658 bp, Zea Mays
gctagaagaccttatatgcaaggctcaacgcctggacacggagacaacaagatttatggaaaaagctggcaaagaaccacttccggacctcaggacaaatgaaggagtcctttggttcaagaaccgtctgtgtgtaccaaaaggagaggcacgagaagtcctgctcgatgaagctcacaactcagcctactccatccacccaggaaccaccaagatgtacctagacctcaaaaccagatactggtggagagggatgaagaaagagatagtacattatgtggcccggtgtgacacttgccaacgaacaaaagctgagcaccagaagcctgcaggcctattgcaaccccttccagtgcccgaatggaagtgggaggaaatagccatggatttcgtaaccggactaccccggacgcaaaaagggaacgactctatctgggtgataatagaccgtcttaccaaggtagcccacttcatcccagtgaaaactacctttggaggagccacccttgcccggatttatcttaaagagatagtcagactccatggcattccaaggaagatagtgtcagacaggggaacccagttcacctccaaattttggatgagccttcagcaagctatggacactaagctagacttcatcacatcctatcacccc

SEQ ID NO: 165135 - DNA, 693 bp, Zea Mays
cacacagggacggattgctctctaaccatttctagcaaaaaaaaacttgtcttgtggttgttgaggttggttcgaaggcaatagagtgtttagagcaagctttgaaggtagagcaaactattgaaagcaaagagtgcaaactacaaatgtcatgccaacgcctacggacatcgttccttttatatgggagagttttaatttcaaacagttgcaatcactgagaaaccaaacccactaaccagaatggtccaaaaagtaacatttcataacgagcttcgggatggtgttttttggacctttggcacaaggcctcccaagtgtgttttttgcgatctaagctcgttatgaagaaacaaactcattactcatggggctactgttgggggcctaccttgtagaagatcctcaaatcactttaccttcaattttagaaagtatgtttcaggtgttgtataaacgattgacgaagctggtcttcgactagagcatcctgcaaaatatttcgtctcgaatatgacctaccgaaggtgtataccgaagatgccaccctcagcgtcaagaaaagctttgcatacaaatcaatagaaagggaaagcattgaacacttgggcggcaagaaagagaaaaaagatgatgacacccctatgatatttgtaaatctagtgagcatgtatttagttccatacaaagttg

SEQ ID NO: 165136 - DNA, 830 bp, Zea Mays
ccttagattgctgagccggtgtatggttggataactgatgaagtaggtgctctttgagatgctagtataacattttgctcgattcattaggcatcatttatgaaggcatgtgtggaagggactgagcaacaaaaggtaaaggcaggtacacaatggccgctcgaccgctcgtagacattgtatttttttcagggggaacgcaccaaaggtttgcaatatcctagaaaaaggaaaaaaggatgtgtttttgccgctttagattgagagcaaactgcaaaacggaatggaacactcagtatcggaaggcgacgacgtaacgaatgctgaagctacaatgagcaacgtgtgtcgagaagcgaagaaaacatgtaaagcctatctttaacctggaagagcgacagtgaccggaggtagacaactagcggaggaagccgcgtgcagcgtcattgcttccctgcgtggctgattcgaaacggatgaggaagctatagcgagcactgagcaacgtacggcggaaagcgaagggaagtatagaaaacacttgtcacctggaaaattggcggtcgcgagaggatgcggaggaagctgcggcgtcactgttgtcgtcggcggtagtcgcgagagcatgcggcgtcgctgttgccgtcggcggcagcgtcgcctccctggctggccgcttctagatcggccggtttgtagcgtcgtcacctttttttttatcttttactcagaagctgaagctgcgggtcacggactcacggactcacggtaaagtgaaagaagcagcagccaatacacgtacggccaagttatttttacgacggtgctgg

SEQ ID NO: 165137 - DNA, 595 bp, Zea Mays
tttcaccacggccgcggcctttgtgtggcctccgtctcgtgttatcccttcttcgagttcttccgcctccccgcccctcccttcattccttccttcctccctcccccctcggcaaagcccgccctctctcccggtctcgacgcgactcgccgctccctgcagctgcgcgctcgattcgcgtccactggagacggcggcgaccgcacgagggcctcagcgccgccgatgagattgcgccgccccgcgccatgcagaccccgccgcccaccgtgcccggtaacagataccgttcccttcgccgctgtggcttcacaattctgccccgctttatgattccttccgctgcctagggttgttgattgccgcctcatcagggtctgatgcttttgtggtgcccgcgtgcagtagagtgcgtgagctcgtgcaggtccgcctcgtggaaggggggtggaaggccctacgaatgcagcgtactcttgtgcgcgtggaacgcgccgcgcgcgctcacgggcgcgctcgccagcaccgcgcagtgctcctcgtgcggccacgccgaggccggaagcagctggaggaggcgcgggcggtcaagtcg

SEQ ID NO: 165138 - DNA, 600 bp, Zea Mays
aaaagacatccgtgcaaaagccgcctaagggtgcagccggacaagcacaacaagtgcgcaacacgaagtctttactaaaagacatccgtgcaaaagtcgcctacgggtgcagccggacaagcgcaacaagcgcatgattcgaagccttcactaacaggcatccgcgcaaaaagccgcccaagggtgcagccggatatacactacacgtgcgccgaaagccaagaatcaccctaatggcgaagggcacgttacaatcgccgctgtctgagtcgatcagaacacctacggattcaaccaagcacgtgtcttcggcacccacatatcgccgcagcaagcaaagtccccttctcatttcacaacaaacaatatcatagtttacatacacacaacaaaaggccaccagccactttgcacaaacaaatacctaccgcattctgctgccctccctctttatcgcgagctgggggagggcagcgttttcactcactaccgcaatacaagagcgagggcagcataaacgctacattgtctcagccttcgggataaggcctgcttcacgaaaattaaacagcatcatcctcaactcctcaccctcaaata

SEQ ID NO: 165139 - DNA, 919 bp, Zea Mays
atactgtcttgttgactgcaggccctgaaggttgatcagttcgacgcaacactgttctcaaacaggagcctttgctggcttcgcctgggtgatggaaagaaggctttgctcgatgctatagagtgcaaacatctgcgtccgaattggggaaaagcctactaccggcaaggagctgccctgatgtctctggaggtgcagcaacagaagattacattacagattaagaacctctgctgttcctcatctgctacctaagtcagtactatgcacttgctttgctcaggattacagcagtgcttatgatgcgttctctcatggcttggagttggacccagaaagcgaagagatggagaaaatgctttggtaggagaaatcactagctgtagctccactgtgctccaatgcccttgtcttggcaccctcttttgcttcatgtccttatggccatctggttgctgcagggaggcgatggacctgaagtagtagttgatgtcttggatcgtaagaagatgacttgagaactggaatctcttcaattttggtgtcgtagaattgacacgaacactcggatggttgcctacttttgcattgacctaagtttgctagtcctgaaacgatgctgcctctttttttctgtcgtgtgtaattcacggagggtagcggcagtttagagaccaccgcaggctgctaactatctttgatatgatcgtggtagccgcagctacaacgcttctgacgccctgttaactgaaacgatgtgttcaccgagatgcctttgccgacatgcttggtcccccttcacatgtttttgcttggctaactcgtgttgtttgatcggagcaaagtacttacaaagtaggaagtgtgccaaggtcgtagcatatcttccttctattgctgaggtgatatgacagaactg

SEQ ID NO: 165140 - DNA, 746 bp, Zea Mays
aggcgcttgaggctgaacaccagcgcctcagcgactagtgtacccagctggaggagcgcaccaaggcgatgtcctgctagttcacctccgagcggtctgagcttgagtgggaccgcaaggactacaaaaatgacctccagaaggtgtacgcccaggagctggaggtgggccggaaggagaagaggttggccaagaaggaggagcacttgaaccagagggaggaggttgtcacagagctccaggccaagctgagtgccttcaacaaaatcctagaggagcagcgggttcagcagaccgtggctgtgaagtcgctgcagaagctgcagcgagagctcaagagcaaggcccgtgacgccgccctcgccaaggagaagctcaaagcgaaaggagaagctcaaagcgaaaggagaatccttggacaggcgggagacggacctcgccaggcgggaggcggacctcgccaggcgggagaaggatctcgccttcaaggaggaaatgcttgaaaggcgggagaagttgctggccgagcatgagctcaaggcggaggagaaggagcggatactggaggagcaggtccactagttccaggcggtggaggcgatgaagaaaacgcttgaagatctccaggcggagcatcgcgccagggtctagcgcatcgccgcatgggccggcgaggcgagcacgacattggtgccgttaggcatgagtcccatctcggtgtcgcagttgccgacatccatctccga

SEQ ID NO: 165141 - DNA, 499 bp, Zea Mays
tccaaaatttgatttaccctttctgtctggccatctgtttgaggatggtatgctgagcttcgtattacatgggtcccaagtgattcttgcaattgctcccaaaatcgtgccacaaatggtgctcctctgtctgatactatagtccttggtattccatgcaaacgaactatctggtcaatgtagatctccgcatacttctccgtcctgtgggtggtgtgtactggcaagaaatgagctgacttggtcaatctgtccacaatgacccaaatggaatcatggtgcttggaggtgttgggcaatcccacgataaagtccatgcaaatgtcctcccatttccaagatggtatgggaaggggttgcaaagggcctgctgccttcaaatgactggctttgatcctctggcaggtgtcacactcggatatgtacttggcaatctccctcttcattctggtccaccagtataaggatctgagatcctgatacatcttgttgctgccgg

SEQ ID NO: 165142 - DNA, 762 bp, Zea Mays
gtcgattgctccgttagcagggcatagtggtcaccccgagttaagtaagaatgtaagtcaaccgtaaacaaattgagtatccttgaaaccttttctttattgataacatatttccactttacagagtacaccatcattatcccagcagttttgaggtacggctaaggataaaactttctcaagtgttctatgttccaagagttcccgacttccgtgccatccatctgagtgaggcggtatgatccgggccgagtgacttctgctactatgaagggtccttcccataaaggtgataacttgtgtcgtccttctcccgttagaattcggcgaaggacgagctcccctactgaaaaggatcgttgccgcacagccttgtcgtgatagcgccttagagtctgctggtatcttgctgattggattactgtgtttaaccgttcttcctcgagtacgtctatgtcctccagtctggtagtctcagcttctgctatactctcaaatatcagccttggcgccccaaacctgagatcagccggcaatacttcctccgacccatagaccatgaagaaaggagtgttcccatgcaaggctcggctaggctgtgttcttaggctccaaacaacataaggtaattcccttatccactttcctgcgaacttttcattcttatcgaaaatcttcttcctgagtgcatctaatatcatcccgttggctcgctcaacctgcccgttggctcttggatgagctacagacgcatacttgatt

SEQ ID NO: 165143 - DNA, 1054 bp, Zea Mays
tccgtctgttggtaattcgggtagggtcattgaacccagtatacaataggcagggtagactctatccttcagatgttgaatattcttgaagacaaaatcaacaacaatagcttcagcattcaagcttctgtccttcaacgcacatatctcagcaagcaaaactctagactcagcaagctctgaatctgtaggggcctctgtccagctaggcattcggacgtcaggctacctccctgatcgggaagggagggacttgttgtgattctccatggtaaaccactcgaggcaccatcccttaatactgtccttccacaggatgtcaagatattcaactttcctgcctcggtgatgttccaggctagcaccaccaacaagctgatgctgtcctccagccatcccggaccgacagtggtagaggtacttccaaagcctaaaatgaggaataattctaaggaaagcttcgcaaagatgaacaaacatagcaatttgaagaacatatttggggtttaaatgggtaagatttagagaataaaagtcaagaaggtcgtggaagaaaggagaagctggcagggctagtccccggatgagaaatggcatgaagataacagccttgtgggtatcctctgtcggaacagtaacccacaccagattcgccaggagcacaattcttttggcggaagaacaccaatttcaacgaggtgcagaaggtcagcttcggaaataacagacatgtggttacaggcgaatgggagttggctgttgggatcgattggcaggatgatcggaatagcaatactctgtttcctcttcttgggcgccattgtggtctctcaaacgatgtgggcgaattcaggaacttcagaaattggaaagaggtagaggaaaaagcgagaactagggttcagaactcaagcggggacgtcagcagaagtatgggttggcgtgttaagtcgggcgcaaaacggcaggccgataactcgggaaaagttgggattgcaggaaagcaaacatcactcaggcattacctccaaaatgctaatgagacatcaaatgc

SEQ ID NO: 165144 - DNA, 408 bp, Zea Mays
atctgagggttccagtgacagtgaaggttttgatgtagaaagcgagaatgaaggcaccgaagatcggccctggagcaaaagccaggttgtctttgggaaatcaaccatcaacaagggcaaattgatgcaatgaagggaaggtacttccgtgatatttcaattgtgagggctggaggggaaaataatgtccctctgcctgaagctgacgaggtggtagtttatagaagcttcatgaaggcagggcttcagttccctctggataaattgctagttgaagttttgaagactttcaaaatttaccttcatcaccttacccccgaggctatcatcaagatgggaatctttatttgggccatgaggagccaggggttggaaccaaatgcaaaatgcttctacaacatccacgag

SEQ ID NO: 165145 - DNA, 327 bp, Zea Mays
tagctatgcactacctgatccatgcactgaggtactattgaagtaacatgaaacagtgaggaatcaggatgtggtcttctagatagggcatcagctgccccattgtcagcgccctttttgtataccactctatattgcaagcccagaagtttagagaacactctttgctgccaaggtgtactcagcctctgttcagtgagatgggacagacttctgtggtatgaatatatcaagaattcagaatgttggaggtactgacgccatttatccacagctaacaaggtggctagatattccttctcatatgttgacaatccttgattttta

SEQ ID NO: 165146 - DNA, 678 bp, Zea Mays
gagttgttcacctccaggagcaataaagagaatccctgcacctgctccttgcaacttcagcgagccatcaaagtacattctccatacttcggtagtctccgggttgtctgggacctggtgctcagtccactctgatatgaagtcaatcagtgcttgagtctttattgccgtgcaaggtcggaactctatgtcgtgagctcccagctcacacgcccacttagctatccttctgatagcttctttgttgtggagaatgtcccctattggaaatcctgtgactactatgactttgtggtcatcaaagtagtgacggagcttgcgagcggttagaagtaccgcgtatagcagtttctggacttggggatacttcatttttgaggggccgagaactttgctgatgaagtagaccagatgttgcgccgggtatgtatgtccttcctccacccgctcgactactaacgaggtgctcaccacatgagttgtgcaggagatgtataacaatagatcttatgctggctgattcggcgtggctcggcgtggtggcttgagtactggtggtgtagtcaggaacttttttagtgcctctagagcttcccgtgcctctgtggtccactaaaacttgtccacctttttgagcaacttgtagaatggcatgcctttctcgcctagccttgatat

SEQ ID NO: 165147 - DNA, 347 bp, Zea Mays
gtcaaaaggctttcagcaacgtctatgctttcattggcacaagagacataatccaagagcatatagcctacagagtgtggccacttgtggatagttgggagatgccgaaggagattgttgttggatccaacgaaggtggattagttcaattgaaatataccttcagattcagagagaagttcgacgaaccaaatgatgactggttgaaatgcattgaggctactagcgacgagttgcttgggacatataccagggccgaagatgatgccttgtcctcagccttcgggggtcggggcaagaaaagattgaacagggtttttgatgcaattggcttcatataccctgat

SEQ ID NO: 165148 - DNA, 358 bp, Zea Mays
cgctttggcccctctagctgagagaacgctactactagctcgctaggacagttgccaaaaaccatggaagcacatatctgtttgggacttaaggagaatggcttcggctgaatgcctgaatcgggccgggaagcacggagcagatagaagtgcactttccaatgcagttagacagagaaggcatggctgtgatgttataatgctgaaggaccccaagaagagattatggcctgtcgtttaccacaacagcctgttatttgttggcttcaccgagggctggaaacatttggtggcagcaaacgaccttcgggctggggacgtctgcgagcttgttaaggggccagacgatggtgagccg

SEQ ID NO: 165149 - DNA, 444 bp, Zea Mays
ttgcgcactccctcagaaatcatgtgtgttatttctgtgacatcagtcccatatttgctagctacagcggtatcaatcatgtgagctagttcttcacaagtgacagatgaacttaccttcttgttggacgtgcttgccccaccaatctgtttgatcacaccattcttggtttttcgaaagcaagacaatctctcgttccgtttctcctccatctctcgtgcgatttcttcttcaatctccttctggtccgcctctgtaaggtcctccatcgtgaccttgatcacgttcaagggatgaactttagatttgtccggcgccgccttcttcgctgtcttttcctccatagccctgactatgattggcgataaggacgccaatcaccagcagtttgtctctgtgcaatgattgcaaatcgctccccagcggagtcgccaaatctgttgc

SEQ ID NO: 165150 - DNA, 436 bp, Zea Mays
ccggctatgtcggtagcaggaccccgagaagcgaacgcgggtgcatgtaagtggcaaggttgactgagtcgagggattcctacgcctctgggttacggatacctcactccgcacctaccacgaaaaatgactcctactcgggcaagccaccctgctgctgacgagcggagccagacacgcaaaatgaaaaggaaaaggggcacgactttatactacgataataaagtgttcaggcctcagcggccgcaaaagacacacgtgcattcaaaggaaactactccgacagagttaggcgccgcccggggaaggagccgcgccttcggcttcgtcctcgccctcggcaaagtccaccccgacttcggacgacggcgcgggcgggaggatctctgcctcgaaggtggtcgccagcactgcgctcgggcccgcggcggccgcg

SEQ ID NO: 165151 - DNA, 564 bp, Zea Mays
gtcaccaggatgttgcttcgtgtccgtgtcacttcccttgaagaagtccctcagttcattgttttttcggaagcggatggtttcattagggattcctagacagtccagtgtgaaatcatccaacaaaacatgcttggtgggcaagctcaagatgatgacccaatcccgcttgctctagaagatggtcaacagcttcctctggtattttttagtttgggtcaacctatgcaaccagctggcctcgacctcaacttcccgtcggttcctttgggaggagaaatgccagcccgtcaagaggacaatgtccagtgggagtgggatcaatggatagaaaatattcaacctgaacagcaggtccagcagcccattcaaccggatgagcagcaactcagcaaccaacactctggattgtcgtcggacaactccattggacccattcaggatgcaccccttcagaatggccacattttagaggttgggcctgtgatgccaggtgatgggcctgctctaaatgatgctcctattaatgggccacaagaagttgatggccatgttattcagatg

SEQ ID NO: 165152 - DNA, 1267 bp, Zea Mays
agggaggttccatagaaattgatcttccatctattcccaggtctgtcaaagatgtgagattgcccaagtagctcagagtgacaccagagaaatgtgtatcctgtagattcaaagtttccagcgagctcccatggagaaattttggaataagccccgagagttgatcgttatttgacacatccaatactgccagattcttcagttgaaagattttcggtggaaaggtgcctctcaagttattaaagctgagttgaagaactcttaaattgagaaaatctgcaaagaattctggaaccacgccggaaattccattcatttttagattaatcacttcgatagagcggagacgtagaaaatgtcgatggataggaccaacaagcctgcattcctccatgctaagaacctgaagatgaggaacgtattttccaagagttctgccccaatcttctctgccactactacttatgtccacgccatcaaggtagagctctctcagatttgtgaggtttgacaatagtgtctcgaaacttggttcttgtaggaccaaaaggttatagctgtcaaaaagattatacaatgtgtctatttcagcaccatcaatgttatggattgaagaaatatccagcgatatgagactcgggagtttgcctattacaaccggaatgtgtccatagaaacctgcgtaagaaaggttgaggtgtgtgagtaccgaaagcctctcaaagccagccgccggaataggggatccaccgaagtcattcttgctcaggtcgagtcgctggagtgaggtgaggttgaagagcgcgccgtcaagactgtagctgtacaagccacggccaccgaggtcaagaacagtgacatggccggagacactgtcgcatccaacaccctcccagaggcagcagtccgtgcctgcttcccatgaagcaagggtggtggtggagtagtcgaagagaaaggatcgcttgagctggaggagtgctgcagcatggtctggatggcaccaaggagctgtgaggttaccataccaagtggatgaagctagtgatgagcggaggtggtgtatcagtatcaggaagaggggaaggagataactagcacgagccatgcatcattgtctttgcactccagaaggaaagcaaaagaagatagttctatatagtagtactagagatggacacatcccattgacgatgccacccagtccaccgtaatgactttgaagttttcaatgtcaagccgccgaaataattaagggctgtttggg

SEQ ID NO: 165153 - DNA, 687 bp, Zea Mays
aggaactctaacagactctccttaaaaaacagactccttaatattaggatctctaaacagattctccttatctaaggatcctcctaatccttatctatatgtccctctataatgggccgactagagggctgtttaggcctcctactataaaccataacatgtgcctactgcccaagtggcgtacacaccaagggaagaccgtcaccgtcagtcgggatccagtatcaaacctgatgacaacagactcacagctttgaaagcatacagaagggccaagggattgtgtttcaagtgtggagatagatgggggcataaccgtaaatgctctactagtgttcccttgcacctagtggaggaaatgttgtcaattcagctgaagaagaggatggcaatgaagagacagaggattaaactgacaaaacaaccgaggaagcagtgttggctatctcagctgctgcagtgagtggaggaggagagggtaacagagccatctgactatgggcttcaattcactgtcaacaggtcctaatacttgttgattccggtagctcagccagcttcatgggaagtcatctaatgggggtcatgtctgattcacagaaattgaaacagcccctgcaagtaaaagtagctgatggcggttgcatgtggagcaattatctggtgtctaattgccaatggctgtgt

SEQ ID NO: 165154 - DNA, 545 bp, Zea Mays
atgtcgtcttcggaatgtctgaaggtcaaatcctgagctggtgataacctaacctcagatctatctttgaaaacacgctggctcctctcaattggccgaacagatcttctattctgggcaaggggtacttgttcttgatcgtgacctcattcagagctcgataatcgatgcacatcctcctggtgccatctttcttctccacgaacaggacaggggcggcccaaggcgaggtgcttggcctaatataacctttctctgacagttcatcgatctgcttcttgagttcaaccaactatggtccagataccgtataagctcttttagaaatgggggcggtgccaggaagaagctctatggcaaactcaactttccgctcaggtggcatgcccggtaagtcttccgggaacacatctggaaactctgacacaaccttgatagtttcaagtgaatctgcctccttgctatcaatagtcatctgatgacaacctcctttccttggctcaggtgagactaattcagataccacttcttctcctagtggggac

SEQ ID NO: 165155 - DNA, 747 bp, Zea Mays
gctggatattgtcggaccattacctacggctcaagggaacctgaaattcaccttcatcgtcgtcgagtacttcaccaagtggatcgaggccagggcagtatccacaataacgtcgaagaccgcccaaaagttcttctggcaaaacattgtttgccgattcagagtcccgtctgagctcacagtcgacaacgacaaacagtttgacaaccaggacttcagggatttctgcctctccatcggcaccaagcctgccttcgcctcggtatatcacccgcaatccaacgacatcgtcgagcgcgccaacagtaagattttcactgccatcaagaaaagacttatcgacaacagaaagggtaaatgggccgaccaactacctgaagtggtctgggacctaaacacaaccgaatggtgggcaaccagattcacaccttttcgtctattatatggatcggaggccatgacgccgcaggagataaagcatgggtcgccccgaacaagcgcatcagcggtccctgatgtcgacgaaccaacgtctaaagacctcattgatggagatcgcgtccttgccctgcaggccctcaacaaataccaagctcaaaccaaggcctggcgcgacaacacggtcgtcccaagagagttcaacaaaggagacctcgtactcgtccggaccacccggacagaatcacggggcaagctggagccgaaatgggagggtccattcatcgtcaagacgaaggtatcccccag

SEQ ID NO: 165156 - DNA, 573 bp, Zea Mays
taggtgcagcaccacagtggaatgagacatcaacgtcgaaaaaatgaacagtgtatgtcggagatgatgattcatctggtagagagtagaataccataagatttatgataaaattatattctggatgtaaatgtgattcctatgtttaattgacaatgcacagaaagcgtcataaatatgcttacaaactggcataaacgtatgtgaaatttatcataagcagttaacagttctgtagcaatctgaatgtacatcgacttgttttatagcatatgacgttgtcgtatgtagcatacatgtaagttcgaaaatacataacactggccataaactgttcagattgtgaaacttataaagcatattacgttgtcgaatgtagcatacatgtatgtgcaactatgcataacacggcgttgtttattgcataaactggtcagactgtgaagcatgactgtacaaatagatgtttccagtataaaacagtgataattatatcataaacttgagacaaaacaagcataatgtatgggcatagaacggtgataattgtatcataaatgtatgggcaacaat

SEQ ID NO: 165157 - DNA, 1261 bp, Zea Mays
gttgtgtgatcacaaacaactctgggagtcagggactacgccactaccgagagctccgggagggatattgctggccaacggcggccaggcgatcgcctccatggcatggaagcttgaggggtcatgtccattagggagagcagaggagatccgatgagtccattctctagagtccagactccagactaggatagaacaaggctgaggcatccagtttcatcagttcatcacgtcagttaccaggcgcacgccacatggctgattaccaaggtgggcctttcctatcctcttcacacctttcttgatgcagtgtcaatctttaaataatctcgacatatatcttctcctttcattttctatgctagagttaccttcattcgatatattttttccttttatttatctttgcttcaaacaaatatattattttctaaagtactgactttttgtgtcctgtaaaagtaaaacctatttgaatagtcaaatcttagttgtatctataacaagatgaaagtggtggcagccaagatgaaagtggtggtggccgcatcaaaggagaaggtgcaacaagacgaaccgaaaggtgagaagatttcttttcccaaatcaacttgcatctacctgtgattgtttgtgaacaagtttttatgctaatttttttatgtagctgctatctcagatgtgaaatgtgacaacccaaaagaggagggcaatgtgcagcaaaccaaaaggttagaggatttcacttcctcaatttctttggttacactgtttgtttgatgctgattttgttatcatgtagttgttgcctcagatgtgaaatgtgatgacctagagcaggaggaagattccaataaaaatggggaactggaggagtgtaacaaatgtgtaatttatttttttccactctatatgctatcttagaagtttcaaaagttccttgtttgtgcgtaattcaaaatttactattagtcattgttcctgaacaacccttgattttatttcttgaatgtgcacctgattcgtctaatggaatcatagaaccacatgttgtgctactattttggttaagaattacaatgatcttaaggcatttgttttgtatgttgtctcttaattttgtctactttttatatttcatttttcatctgtattgttgtgtgctgattacaaaatgaaaaatgtatgataccaaccattaatattttaggactcactaagcaaagccaaagataagtgtttgaacaactatccatctacc

SEQ ID NO: 165158 - DNA, 707 bp, Zea Mays
tgctctaaggttaggatgctctctgcatgctcgttcataacttgtggcaagatttgagcacagctgtggtattgtggcaatgtgactacaacacaacagaacaaaagcgatattctgaaacaggtaaaacacctctaatggcatgacaagagtatggcaacatacattgttaaactgaaacttgtgaatcacttggaaatttgaatctggactgaattaagatattgggaggatgtttagttaggcagtgtagcatttagagaccaattcctagtctctataacattgtagggaaaaagagtgcttctgttaatgcgtctctatgctctaaccctttaagcgtctcttttagaagctccttagttagaaataatttattggcatggcaccattcagtagctcgtgtgatgaatgttcaactaatagatcaaagtgtcagacttccttttatttgattttacccttgcagggcttgcgaaatttgtgctttttggttggttgaaacttcagacaactatatgtatcgatcaatacaaaggctggaatattattgcacattcgcttttctaataaaacaccagtttaaaacacacatggcgttatttcacagaagcaacgaagaagacagaacttaggttctgatttcagacttcaaaactagccatgatgatttctacaataactctttccccagaaaggttcaatca

SEQ ID NO: 165159 - DNA, 819 bp, Zea Mays
gtggttcaggatcttcagagatagataaaatgaaatcttctagactcttggttgaggtatctggaatgccgcaagatggatcgacagaggctaattctggatttaataaactatgcggcatggctggtgagctaataaagtctgagtgttgaggatcatgagattctaaaatcaacatctgatttgaaataaaaggggctgttgtcacccttgctgcctcaaccagttgcaaacttgcgttactgcgcggaatgactgaagtattattaaaaacagcatgttcagagtccatagacaacagctggtttgatgatttaagagttgctgccatccattgtgtatctggtagttgagaaaaacacttctgaattttaaaagaaagagatttcagtggggatgggagttgagatttatctgtcaggcaattctcagcactttctaaatcttggctgatattatcggatgaatcgtggatgggtgaggcatccagcctaccgacctgatcaacaccaggatcattaacctcccctacgcaatgaggctctaagaaaccagcgagcagcccaggtgacgtgctggccggcagagcagctcccagcagcacgccagagccatccaccagtgcactggctaaacgattgtgaacagcaacctcatttgtgaagacagctggggtactggccggtaacacagtgcccagattgtgcgggataactctaggggaatgtgtcagcactctgtctaaacttttgtggattgaggtgaaaacagtagagagatcaacagtattgtttaccttgcacgtggttgtagcagggc

SEQ ID NO: 165160 - DNA, 413 bp, Zea Mays
ccaggtctacgcctcacatgcagaggcgtggtgataagtccataatgttagcttatcaaataagtgtgtgatggactgtcatggtctcttcgtgggtgatgggctggtggtctgcctaggctgattttgagtgcgatcgagaacgtggacggagccagagcgcgaaaattgtgctcggcgacgcgcttcgtgccgacctttgtttagcttctggtccctacgggttttgtggcactggcactagtacagcgaccaagcagcttagccgtcactgtcgcagtgtgaacccggtgcggttttttcccgttcgacatcgaggggacctgagccgatgaatgcctcgcctcgtgtaccttgacccccaccggattccgccggccaattgatggcaccaccggccggcagctcgcccg

SEQ ID NO: 165161 - DNA, 875 bp, Zea Mays
ctcgctgatttaatagttatgggtaaccaagatacaactatagatgtcatcctagggatgaattggttaaccaagtatcaatccagtcttagttgtgataagagaacagtgaagttagtgtccctatcaggagaagtgttagtggaattggtcttgtcaggaccaaggaaagggagttgtcaccaagtcactgctcatattgaggagattaaaccatcagaggctatcactgtagtatcagatttcctagatgtgtttcccgaggagttaccaggtatgccacctgaaaggaaggttgaatttgccatagagcttattccaggcaccgcccctatttcgaagagagcctatcgagtgtccggaccagagtcagtggaactcaagaagcagattgatgagttgttggagaaaggttacatcagaccgagtacctcgccttgggcagccccaatgctatttgtggagaaaaaggatggaacaaagaggatgtgcattgactgcagatccttgaatgaggttactatcaagaacaagtaccccttgcccagaattgaaaatttattcgatcagttgaggggagccagtgtgttctcaaagatagatctgaggttaggctaccatcagctcagaatccaaccctcagatataccgaagacaacattcatcaccaagtatggactatatgagttcacagtcatgtcgttcggtttgacgaatgcgccagcctacttcatgtacctgatgaacagtgtgttcatagactaccttgacaagttcatagtagtgttcattgatgacattcttatatattcccagaatgaacaagaacatgaggagcatttgaggaaagtacttcagaggctacgagattgtca

SEQ ID NO: 165162 - DNA, 573 bp, Zea Mays
ggactagtgcgccgccgacgcagcaggcgtcctcctcctcatcctactcttccgggaaagcgaggtgctccttgaaccttgacttgtgaaggcatggcagccggagaagccgcgtggtcgtcgttctcctactccgtactcgtacgatctatctctacagcagcagcctactactactactacttgctccccggccggcggccgcttctggcgccactgcagtgcactgaagacggcaccaacggtcgtcgtcgtggagagtgaggggatcgagatccaatccagtccaagtaaacaaaggcggcggcggcggtacgtggccggccggtgcaagtaaggatcgatcgagctggagtggaggagcactgcgctgcgctgcaccaacaagtcttcactcgtaacccgtatatagctcatctctcccaatttctttttagcaattccggtgtgaagggggaaacaaggaaattaagaacaaagcagcagcaacaagttataaaaaaatgatttcttcttctcgatggttaatttgtcgcctcgatttgcctttcttgatttcctcgtctgctcgaa

SEQ ID NO: 165163 - DNA, 354 bp, Zea Mays
cgggcctcctccagtcctcttcctcaccccgacgactccgcctcaaatccaatcccactcccacctagcggtccggctggcctcgcctcctcctcctcgcttctctcagcctcaggacgacgcctgcctaggcttccaccgctgatctgaccccgaaacctcgttcccttgtccgcttcctgccgtctcagtcgtcgatacttgtcccccaaaaccccgggctccggccgatctctgcgcgttgaccggggcgccgctgatggtggcgaggatgatgcggtggccgcggccgccggcggcgcgcaagttccgcgtgcggctgttggtgcggcgtgcggaggggctcccgcctcc

SEQ ID NO: 165164 - DNA, 769 bp, Zea Mays
catcatctttgacttcactcagctgtcggtcgagaccctcattctctttctcaagtgagccgaccttctccataaggttctggctcttattctcggtcgtagacttgtccctgatggcttcagtattttgcatccacagacactcaatcttgtcctcaagtcgcttcctttcggaacacaactatgaaaccaacaacctgccattccacagacttcggttaaaaaaactcatgtagcacagttgttgcatgacagttgccgccacaacatctgtcgtagacacgctggcgacctctctgtccccatcaacagtggcgcagaatcgtgcctaggggtccagcaaagtcaccatcgcggtcttcacttgagccctctctttaaccggctttgcaggtattgccaccacctgcccagacctagcccctacaatcgaaaaaaacaatagaagaacacataccatcataaaaaaacctacacaacaataaacacactcatcgctagccggcagccccgtatgagcatcgaacatgcccacatcttcgatcaagtagtcgaccatagacaactcctggctagcttctccaatcttggcccatttcgcccccatcacctcgtcagccctcgcaggtgagggcaccctcctggcagccactgcaggcagaggcatcatagcagctgcggtggagcccttcgcgctggggcgtggcgccttcacattgcgttgcgggtccatgaaccgtagcggcgccttccgcttcttccgcgcaga

SEQ ID NO: 165165 - DNA, 617 bp, Zea Mays
gtcatcgcttcctctatgattataagtcgaggtcatgtgtggtgatgttatttatgtggtgaatgcgtattgaaatggtttatgttgtacggtatgagtagaaacgtgaaggatggataatgtgttttggaggagtagcaaatagggttggcaagcatggtagtggttgaatcacttatgttgtagaattgatgctcgacatgttagatctcctaaaatatggtgttttatgtgacttgtgtgttatccaatttaagttgagaaatggttaagaaaagctaattaatctgctcccacccatgttttgagtcgcaatgtctaaaatggtttgctaagttttatgttctgttagccaactcctgttaagtaggagtcaattgcgttaagtgattgttatatatgttgtgtctcggattgcgataataataggcaagccgacgtgtatgttgtatagccggctatatcgttgctctggatagccgacttgttagatggtttggttaagctcgcggtcacgatgattttcttgttgtggtctaaatgcacatggttatggtcgcggatgaaaagtagtagtgctcatgtgatgtctaaattaaaatgcaaattattgtgtg

SEQ ID NO: 165166 - DNA, 636 bp, Zea Mays
ataatccaaggtgttctaggcaatttaaggcggtctagttcaatcgaatgggtcggtgagcttcaggggacatgaggaaagctagaacaccaattaagaaagcttgaactgacctgcagaagggtggccacgacgaggtgttcacgcggtggtattttggctgatttgggggaaatctgaaattggcgagctctggtgagcatttggaggcacggcttggtggcttgggtgcttgactaccttacggacccgaaggcacgctcaatttataggctccaggggcggtggcgcgtgaatttggaatggtgcggtggcggccgtagaaggagagttgcactcgtgcgagcgattagtggctgcaaccgtggcaacctcaccggcgatcactggataggtgagtacgagtcacggtggcgtggttaaagtgccgaggaacgtggcacaagaccgcgaggtgtctaactccggtgagggttgattcaaagcgatcggggcagagcagacacggcgggcgggcggaacagtgtcttaagctcatccgtggtggagatattttcaccgcaagatgttatccgggcaccggtgagcacgaatcacctcgccggcgtgaatccaggcgctggggtcgccggcggc

SEQ ID NO: 165167 - DNA, 482 bp, Zea Mays
caccgttcgagactctgtatggcaggaaatgcaggattcctctatattggatcagactagaggaagacagctctttggacctgaacttattcaagaggcagaagaacaaattcgtataattcgagagaatttgagggtatctcagaccagacaaaagagctacgctgatgatagaagaagaccactggaatttgaggaaagaaatcatgtgtacctcaaggtgtcaccactccggggtatgaggagattcaaagtcaaaggaaagttgtcccctcgctttattggacccttcttaatcttaaagcgagtgggtgaggttgcatatcgattggagctaccggatcatcttgcggatgttcatgatgtatttcatgtatctcagctgaagaaatgtctcagggtgcctgaagaacagttgccaatggaggaccttaatgttcaagaggatctgacttatgctgagtaccccatcaagattctgg

SEQ ID NO: 165168 - DNA, 564 bp, Zea Mays
tgcaaaccaagaaggcgaatctcctgaatcgaggaggccgacgccatgagtgcgaagaatgacttgtgtggacgcaaaatcacagggagacacaatggcagagggcttctgaggaaacaaaggggaaaatacttgggcataggaattcagtaagtgaaactgacctggggtatctttcttttcgatttatatgcaggcaaagggaatccaagcagtgtttataggtgcccctccacgaacaacatgggaggatccaccgtttcaagcccacaactgcctcgggccttgtgtgaaaaatattcatattgcaggttccacaccgcctcgaacagagcgccaaggggacacacgataggggaggcaccagtaatgggtgagacggttaaccaccttatcacgccacctacgcatgatacagagggaaggccattttctgtcccatcaagtcgtccacaccgagcaacgtcatgatggccccctcttttaccacattgccgcaataacaacctcaggtcgactaggtaaaaaccaaatactttccccaacttaccatgtagagcaaag

SEQ ID NO: 165169 - DNA, 334 bp, Zea Mays
ggacgttgacatgaaaaacgtcgtggatgcgagcctgtggaggaagagccaggcgaaccgcaacatcgttgatcaactcctcaacgcgatacagcccgatatagcgtggtttcagcttgcctgtggtagcttgcggtagggaagacatggtgcgctgacggaggcgaagcagcacccaatcgcccacttggtaggacacttgtcgatggcgacggtcatagtggcgcttatgcacctgatgcgcctgttccaggcggaagtggacatcggcgaggaaggcagaacgctcctccatgtcacgagctagagcagccacccgagtctctccaggctc

SEQ ID NO: 165170 - DNA, 291 bp, Zea Mays
gggggctgggtaagtgtcaacaccatccttgaggaccaaattctctggagtagccgcctctaaggctgagggtccctcagttacttccatgggaacaagacgatccaagtcagtttcctgaccctcaagaccgcgctataaggtcgatgaggcgcgggacactgcccgggatgaccccaacccggcgtcgagcacatcagcacaaacatccgtcgcaccatcatccgctggctctgataacagatcctctggaaccatatcttcaagagtctgatcaaagttcgccaggga

SEQ ID NO: 165171 - DNA, 726 bp, Zea Mays
cgaggccattaaagccaaagagatggaggcgtgaaagatggagccgcagctcagctcgcttcccacctaatggagttggagctagaccagttcatggaggtgtaccatgggatgctggtgaagctcacgcgaaagatggagccgcagctcagctcgctttccacccccagaaggttgctgcacaacacctttccgtccgaatgctggcggaagaagcgtcgcccccacggacatctcgcagaggtaggcgaagttggctacctggaggatgaagtgggacatgaggtgctgaggttggaggccgagcccctccagcagcagcacgaagaaagacgagatcggaagcgccaacccacatgagaggttggaaacgaagagcacgaactccccagcggcgagatcgtcggggggagaggcaccggtgcggatccttccggcgaacaccggcgcgtcccacccgagcaggttgtgcaccaggttgagtgccacctcggactggaagcgctcgggatggactagcaaggccatggcgaatacagcggcagaagaagtgcaaatccaaaggggcgcggagaactcgaaggcgaaagttcgcagcggttgggagaaaaatgcggaagcataaccgctgcacacggggtgaacccctttttaaaggaagattcccttgctcgtgccccgagacgccacagaaaagctcacccgacgtgcaccgaagcaacccag

SEQ ID NO: 165172 - DNA, 436 bp, Zea Mays
caggagtaggcgcaaccagatactgaggaaaaccctgcaccggcacgaactgagaagtcccaggcacacaaaactgctgcggaggaagtggaactgaaaattgctgctcagcgcttgacatcatgttgacagtgccctgagaagaggaggaagtcactggctcccatgtgagcttcccactgggattcctcctacacaccacatccttatggtcttgactgcagattgaacacctgccgttccactggcactctgcacggcgatgcgcatcaccacaacggaaacacaccagccccagcccaggcttaggaacagcccgaaacctctgagtacttcctcctgaagtacccgagtcaaaggatttgacacgatagggatggtggcactgatgctgagacttgcccctcttgtgggctggacctccagtgttgcccct

SEQ ID NO: 165173 - DNA, 458 bp, Zea Mays
tccggacacacaacttggcttcccagactaaatcctgcaggtcccgtgcctgtatcaaaggatggctagtatcaggcgatgggccctatgggtgtgctactaacgctccctagccgaagttgtgttcaggtccaggtcccagtcgaggttgcctcctaggggccgttgccaactcttttaggtatgctggtatccagccttgacacgtcgagcctacatcccaggggcccaggtaccagggaggagtcgacaacgccacacacagcaagaacaagcgtcatacagataagagctatttaattgatagttcccaaaagtatcttacaaaaacaaagttattacatccgccttcaagcggggccctagccttatgtctacaggtatgacctactcgacattagtagggtcgcgctggaagcgcgcggccgccatctccacgaggctgatgaacatccttg

SEQ ID NO: 165174 - DNA, 651 bp, Zea Mays
ttatctgttgtccaacttaatgtattcctgtatttcattccagaatggctgacaacaacacaaacacaccttttcgacctcctgctgctagccccaattcaggtaaccagattttcccccacccatgtgggatcctcagatgtggcaggcccaaggtttcgacccaacgcaggcttctacatttactaatcctacatcccatatgaccaatcctacctggtcccagggacctcatgacccatcttcatatacctttcgtaatccatggaacccattttttggtatgacgaatcctgggggtcctgctacacaaacatcattcggtcaaccacagttggtaccactcattccatgtccacaggtttccacccatgttcccaaccagactgaccctatcaattttgaatccgaagcagaacatagtgtccaggaagttaacagccctagcaaaccttcagatacacctgggacatttaggaggacaaaggaacagaacttcaaaccagatgaagacctgttgctttgcaaaacatggctagagattagtagtgacccagtcattaacacagggcagaggaaggagggtttatgggctagaattgagaaaaggtacaatgaacttagaggtgagtttccattgagacttaatag

SEQ ID NO: 165175 - DNA, 513 bp, Zea Mays
agtcgaagaggctcgtaatgtacgtgttgcgctggccacagatggattcaatccctttgggatgagcgctgccccgtacacatgttggcccgtgtttgttatcccaatcaatttccccctcgatgtgtgctttcaaaggcagaacatattcatgtcgttgataattcccggacacccgggcaataaaatgggcgtgtacatggagcctttgattgatgaattggtacgtgcttgggaggaaggggtatggacgtatgaccaagctacgaaagacaaacttaaaaatgcatgtttggtaccagtattccatgcatgacttgccggcgtatgggctattctgtgtctggtttgttcagggaaagttcccatgcccgatttgctaggaagctcttaggttcataaagggtggcaaatattcgtcgtttgataaacatcgacaatttctccctcctgaccatccattctgcctagacatcaagaactttacgaaagatgtcgtagtgacagaccgcc

SEQ ID NO: 165176 - DNA, 515 bp, Zea Mays
tctagcacgaatctaatttgccgtcctttcaccaagttgctcggaaagcatcggcaaccctgcggccttcttctcggcgtcttcttgtctccatttagaaacttgacgcttgtaaccacctgtgcctaagtggtggtggtacttgttcttcttagatagttctgattttgcctcgcttagagatatgaattcagggctgctcctctactctagaaatactgcccacttaccttctaagattttatatttttttgtcgggtgtaggcctttctttgcaaattttgtattcatcttagacctccagtttcgaaaattgattgcaagctgcttcatcgtgtattccttcacgagttcttctgaaccccgaggtagaacaaacctcgttaatagcttattccatatttgattcttgacatcatctgacacatctttccaatgtcggattgtgatgtcaagattatccctaattaagaacccaagtgcattccagaacttagggagtgcctcttctggag

SEQ ID NO: 165177 - DNA, 925 bp, Zea Mays
caacaatttagtagggagcatcccaccgtcacttggtaaccttaccctgcttcagattcttgatgtccttgagaacaaactggtaggcagcatacctgtaagcctttcccatttagatcgtctggtagactttgaggtgggtagaaataatctctccggcacaattccaccactgctcttcaacaagtcatcgctcctgtatctcggagttgcatcgaacaagctgcatggaagcttgccagctgatgcaggcaccaacctgcctggtgtcaaaaagctcctcctaggtaacaacaggctgtccggaacacttcctagttcacttggtaacgctaccatggtcgaaatattaggtcttggattgaacagattccaagggagggtggcacctgagataggaaagctgtgcccgtttaatgtcgagatgagtgcaaatgaactgcaagcagaagatgaacagggttgggagttcttcacgctgttcacgaactgcacccgtcttcaactgatcgatctacccctgaacaggttaggaggagtgcttcctacttccatcactaacttttcaacacagatccaatggctcagcatcgcggccaatggcatatctggggtggtcccctcaggcttaggaaaccttatcaaccttagcaacctagacatgggtgaaaacgacctgcatggtgtaattcctgaagatatcgcaaaacttacaaatctgcaagtattgttgctagcaaataatcagttctcaggaaatataccatcctcctttggcaacctcacacagctgcagttgttttccttgtcgaacaacagccttgatggccccatccctagaagccttggtaacttgaaaaacttacctagcctggatttgtcctccaatctactcacgggcttcatccctactgagatctttggc

SEQ ID NO: 165178 - DNA, 342 bp, Zea Mays
ggaggaggttgttacggcgctatcggaaaagatgaaggcctataatgtgatgttggagaaacagcgggacgagcagaccgcggctgaggcgagtctgcaaaagctgcagcgggagcttgatgacagggccagcaacatcgctctcgccgaggagaacctcaaggcataggatgcctccctggagaagcgggcgacagatctcgcctggcaggagaaggacctcgccttcatggaggagatgtgggaaaggcaggacaagttgctggccgatcatgagctcgaggcagaggagaaggagaagagactggaggagaaagagcggacactggaggagcgggtccg

SEQ ID NO: 165179 - DNA, 1217 bp, Zea Mays
accatacatatgtataagaatggatgccatgggatgctcatgagggtacaaagataatataaacttattatctaagtcttgaatacaactttccttcacggtactccgagaacttagggtttccggagtcaataaaggagttcatagggcagggggtgttttggggtttggtaatcaaacaaagtccaaatcaacccaaattctacccaaggcttctaaataatatgaggaactataaaaaaattttgagcatttttgggattacaacttatattttaaaaatccaaaactactactttgaactactttaaatgccttaaaattccttatttaacctaaaaatcacaaaactatttttattaaattctagggaaaataagaaacctaggaaaattggtttcacaattttaccatttttctacatttttctacatatttctaaagctgggtagaaaaagaaaaggagaaaagatgtaacagtgctgggccaaatctggtccagacggcccaacaacacaggaaacgcgcgcccgcgcccacgcgcgatggcagaattgcaccggggtcctcgcgtttttatctaattgtgaacaggttcagccactattcctacgggtttctgacactttgcaaatcggtcccccatgttctaattctttacagggggaagtccccgacgacggcagcgtgttgaggagctccggcgaggtcctgcactggccgattaaggcgacgaccggcgctcccgagcggcgaacatcacatcggacctaccctgagtgtttcccctaacctaattgcacaagtggtgagctgtcaagctctgtccgcgtgaaccgaataggtggcggacagatgaatgcattcccggtgatctagagctatcccgtcccaattggcggttcggtcagcatcactaagtgacaagagtgctcgaacaaaggagaaggagggatgaactgacctagaatgggttggccgtggtgagcttgattctacggtggcggaaacccgatttggggcgaacacgaaattcccgagctccggcgaacgattgtggctaattggcggtgggtggttagctgataaccctacagagctggtcataggctcaatttataggagggcaaggcggtggccagtgaattttgggaggacgcgcggcggccggaaatgaagaagaagacggttgcagtgaatacgtgttccacgacgtg

SEQ ID NO: 165180 - DNA, 451 bp, Zea Mays
ttcacagctttgttgctgatgcgatatgatgtatgatgtaatggtatgcgaaatgatgcgatgatatgatacaacatgatgtttatgccaaagacacatgcccacacgaaaacacacccagactctacatccccttaggaacgacttttgagagctttggaagttttgttaaggggatgcgccctacactcgatggtgtgaccacaatattattacatcaaattggaatttaatccttcgtgaattatttttcatacaaaataaaatggtggaaagaactaagatacaccatggtaggatattctttaatcgaatcactatggcacctttaataaatgtgcttcgactcaggcacagtgttgttgactgtgcgagctttgaactcctcccgaaggtcgcgctgttgttgagcgtggtgatgcccttctggctgttgaccgcgaaccatggc

SEQ ID NO: 165181 - DNA, 506 bp, Zea Mays
gaaagattagggctctcggtgtaagtttcctaaagcacagagaacaacagccatggactgcgggttcatttcttggttatagagggctcttatgaaaacgtgctcgcgaaggggtattcggagatctcggccacccgattacaaacaagcggcccagatcaagtacaaaaggtagtgtttgagctgtcaacgcggaccgccgatgccatgatggacggttcgaattttaaaatggctagatccaatcgcgctcgtcagatccgaatcgaacgctgcagatttacttggacgaaccgttagctagggtctaatctcgaccgcacacggtttaatctatggctagcagctgtcttccttcctcagacgaaccagcaaggcggcgcgacacggaccgtggcggcgacggcggccattgccggcgatcccataccccacgatttcgcccatgcaagtcctaaatttctagcacatctcaatgctaggattcaattttagtcgagggcgag

SEQ ID NO: 165182 - DNA, 360 bp, Zea Mays
aagaaaaggaaaaagagtacagcgaacaggggggcgcccactcgcgcccgcgtgcgctctggcagatttgcgaaaacgccctcagggttttcactaactggaatccggtttctttattgttgtccagggtcactgacaacttacggaaaggtccctctactttcttttcttccccacgagtacccctggccatggcgtgcacacagatcaaccctggtgcaacccgtactggtcatggcgggtgttggctactacggctagcgatcgggaaggcattagcgacctacagggatctcggaacacccaacaatttgacacgaacaccctgagaacggcttgtccatgtgcacggcggaaacc

SEQ ID NO: 165183 - DNA, 387 bp, Zea Mays
gccgcacgtcgttttccgccaccgtgcctgatacggacccctccagtcagcctcatcgtcgtcatcgaagttcgcaacgtcattgtgctgccgcgctcgcccttttctccattccccgtttgatgccacctccatgcgctcgagctccacagttttgtcggatgttttcctactacatcgctgttccttgctatccatcgtcggtcgtcgttcatcgtccctcgccagagcacttcttcggacgtttgtcacctccgccgtcgcctcttcgccactgtgtcgtgctgctccacgccgcgatgttgctgaccacaacttgactgagttcgtcgacccccctctcagccccaccatgttgaagtttgtcaacgcgcgacgacaatgccc

SEQ ID NO: 165184 - DNA, 514 bp, Zea Mays
ctaaattcacgggtataaagcctagagcaacaaatcaaggaattaaaggaagaaaaggcgtcccttcaagacaatctcgagatggcggaggcgaagaagccaacactcgtgaagcataccagactctgaagatggactatgctaagaaattaaagaagctcgcccccgccaagaagatccaaaagcggttcaagagccaaggatgccagactgaccgaaaagaggaagccccgccaacactgcctccctcagggatagaaaacttttccgacgttgaggaggtgtccctagatagccttgacgatcttcttagggagtttggggacaccctagaaaacgctcgtgcgtagtgtgatctgtggcaattgtatgcttgtaatgaacttgagtgctaaacaaaataacgtgtttgagaaaaaaatatggcatatgcatagtagtaatcctttctcccctctagcagatggcctcggataaaaccacgcctaccgccttagggattggagcaaggtct

SEQ ID NO: 165185 - DNA, 628 bp, Zea Mays
ggtaaattggattcctcgatccgatccgatcatctttggtacttcgtgcagacaaacaattcttgacatgtataactcttctaactgggcccctgagtaagttgtcttcacaggtataaagtgtgccactttagtcaacttgtccactataacccatattgaatcatagccatctcgagtacggggtagtccaactatgaaatccatacttatttcttcccatttccattctggtactctgagaggttgtagcaatcctgctggtctttgatgttcggcattaacttgctgacacatgtcacatagtgaaacatgagtagccacatctcatttcaaaccataccaccaatacttttccttaagatcctggtacatcttagtacttccagggtgaatagaataagctgaatcatgggattctcttaagataagttggcgtaggtgttcgatttctggtacacagattctctttttaaacatatcatgccttgatcatcttctgtgaaatctagggcttttcccaaactaatttgtgtcttaatttctttgattttctcatcagactcttgtcctttatgaatctcttctctcaaagtagtttcaacttccataaatgttgcttccatac

SEQ ID NO: 165186 - DNA, 651 bp, Zea Mays
ccgagccaatcaacttgattctcctgctgatgagcagaaaaagaaaaagagacgtcttcggcgagtatctagtttggatcgggacgttggtccttcggttcctgctgctgaggaagtacctgtgcctgaatttactgatgctgaccccaatgggtgtgatccatctgtcgctgatcccaatgggtgtgctccatctgctgctgatcccaatgggggtgttgtctgtgttgctgatgaaaacgacggggaggaagaagatgaggtccctttgactcggaagaacagtcgtcaatatgtcgctagtggggaaagtagtggagtttcttctcccgctctgtctgccctcattggtctacaagaattgtccctggcgaactttgatcagactcttaaagatatggttccagaggatctgttatcagagccagcggatgatggtgcgacagatgtttgtgctgatgtgctcgacgccgggttggggtcatcccgggcagtgtcccgcgcctcatcgaccttggagcgtggtcttgagggtcaggaaactgacttggatcgtcttgttcccatggaagtaactgagggaccttcagccttagaggcggctactgcagagaacttggtcctcaaggatggtgttgacacttacccagc

SEQ ID NO: 165187 - DNA, 560 bp, Zea Mays
tattcccttgccaccctaagggctgtgaccaagctaggattacacccatcaaagacacatctattcctatgcttccatatggtccaagcacctaggattactagagaattgaaacccttcctcagaagatcagatgtccgagagctgctagtcttccactacgactcgaaagaatccttgtgagctggacagagctcttgcagcccactgaactagggaaatcataccagaactgcttggcaaaaacacattgaccaacaagtgatttatagtttcagcctcttggtcgcacaaggggcagtgctctggccgctctagccctcttttttctgagcttgtcagctgtccagcacctatttgctccacaagccaaataaagaacttgcacttcccaggagcccaagatctccacactcgttctgctggttcgaactgaactgaacatggaagagagctttataagcagaactagctgtataatcccctgaagcactgaatttccatatatgtgatatgtcgatccaggctgaagaacaactgcctcaagcacttcacaaagt

SEQ ID NO: 165188 - DNA, 619 bp, Zea Mays
aaatgacgtgcccatggtgatcgcatgggcaacagaagaacacggacgttcacgacaatccagggcgatctaattcaatcaaaggggtcgaggagcttgaggaggacctaaggacgctagaacaaatgatcaaagcgctggaactgacctggagaaagctgtccacggcgagggtgaccgtgcggggtttttgagcagattgggggaagtccaaaattggagctcactggtgatcgttagagggcaatacttggtggatgggtgcgtgatgatcctacggagctcatggtggcctcaatttatagtaagcaagagcggtggccgggaatttgagcgacgacgcgcggcggccggaaggacaaggagttactggcgcgcgattagtgtccggttaccgtggccatctccccagcgatggacataggattacagcgggtcacgacgactcggtggaggtgccagggtacgtggcgtcaagtcgtgaggcggctgtcgtcagcgagcttatccaaatccaccgtggcgagctcggtacgatggccggaattgtttaccggccggagttatccacggcgacgatatttacgtgaccccgatcgctatccaatcaatccgagca

SEQ ID NO: 165189 - DNA, 384 bp, Zea Mays
atacaaagatctgagatcatgatacatcttgttactgccggggtgcatggaaaatttggaaagatgagcttcatccaatattttctgcctgagttctggattcttaggaacaaccagtcggtcttcaaaccatagaactcccttgctgtcctgacaaaagcatttgtacttatccaccttttgctcgagcatctctttaatgacttgaacacccttgtcacccatctgtgccatgattatctgctcctgtagagtgggctccactgagataaatttcaaggtacttggggaaataacttccaggttcagcttgcgcaactcgtcaaacaaagtggtgatcttagagtccatagttacacagttgcactaggcctttcgacttaa

SEQ ID NO: 165190 - DNA, 416 bp, Zea Mays
cggccatactctgtaggcgatgtgttcttgaacaaggtctcttgtgctaataaaagtacacacagtgttgaagcttctccggcatgcctctatatcgttcccaagagcggtggctggcctcctgatgccgaagcgagaccagatggggcgttgaataatttcttttatatcttccctctcaattaatttattcttaacatagaaccactcctccatctaggccctgggccacctttttcggaatgttggaactgagtaacttacatcgtgacggggcatgaagccataacaaccaaagttgttgtgatactactccttgcctgtagccttcgtctcgtacaacaactcgtgcatgttgcagaagcattttgcgcttggctctagcccctggcttcttacggcccacataaaacccc

SEQ ID NO: 165191 - DNA, 380 bp, Zea Mays
aagatcgaaaggcagagctccactttgttaaaaaaaggcatgacaaacatggtaaccaaggaatccacagtttttttacaaaatgaactacatgaatgtatgtgactcctaaccatgttcttttggagagattcttaaaatgtgtacatagacacgagctgttatttcttagacctttttttgttgctagagcattttacacatgcatgtaggcatgtacagataaaacttgggggatgtaactacattttattttttgttgcagagagtataatgatattacatagtgaattaaagcgccagaggaagctcgtgaaaaatctgaagaagaaatccttgtggtctaggaccttggaagaggtaaattttcaaccatactc

SEQ ID NO: 165192 - DNA, 483 bp, Zea Mays
gtgatagagagagtggtatcgttacctacaatgataggagttgtggaatcaagaggatggagagtagaaatgttaccggacgtcggggttgtgtggttggaggccccggagtcgggaatccaatcggtgatggcaaggggaggtcgcagcgtcatggtgttgaaggtgctggctagttgttgttgatcccatgaaccagtccagggagtccagttggaaggggccagatcctggattggaaacgcggttgggggaagaggcgtcgcctgatgctgtagaggtggaagaagcgtctgttggggaggaggtccaaaaagaccaggaagaggaccatagagaccagggccgcgagaagggcttgagggagagggcgcatggggggttgctcggagcgttgctgttgtccaccagaggagttgtcgggccacatttggatggtgcccgtccatggattgaaggacggccagggggcaccaccgtgac

SEQ ID NO: 165193 - DNA, 719 bp, Zea Mays
cgaacctgttccagatcttgtgctctttttcgcgagatcattgaactgctccttctcacgaacgacatgttgctcgcgtcggcaatcctcgtctatccccgtctaccccttcggcgtccacctcgttatcttgggcccatgagtcaccgctgaccgtcttcgtctaattttatctaactctgtttgccacccgcctaacccagtcttcgtcgtacactgtgtcacataactcgtcgcacaactgtctctttcgctcgaccaggacgtgatctgcgacaaattttgcaaccgcctttcgcatcctatcttgtctataaaaacatccctagccgtcgcataacccctcgtctcgcctagatccagatcgcaggccgtgaagggcaacacttaccaggtacggggacatccctcctcttgtttccaatcgccaaaccgcctccgatttcccgagacccagatcacacgagcatgcccgttcggttaccggcgacgcaggtaagccttctcttctcccttttccttccggcgacgtgtagcagccctttcccccaacgaagcccctcccacggacgcctgtctcgaagcccattgccgacggatccgtccagccaacccccctagtctcattcccacacctcgccgaagccccttggtacaagcacgagcctaggccatggatgtcgtctgcacgtcccaaacctgcattccggccaacctcg

SEQ ID NO: 165194 - DNA, 566 bp, Zea Mays
catccaagcattcgacgtctcgggcgtcgaaggtcaatggcacgtgggaccactttgtctgcacgaccgggccggtgacggcgacgtggttgatgctgcggtagtgatccctcttctgccactttgtgtcgaagtcggcgctggaccccccggtgatcatatgtatgactccgcgatacggctgatcggcgaagtcctcttgtttcggggcatgggggtggtggatgttttgttgctgctgatgtggaagagggggtgggggaggtacgatttgtacttcctggtggcgttggtatgagtggtgcggtggatgcggagcgggggcgtggatgtatggtggagggggctgctgatatgtgtgtgcgacaactctagggttgtcggctggttgcgcccatgccatcctgtctctggtggccttcgtctctgggcagtctctggtttggtggacgcagtcttcgccgtgaaacaggcagtaaaatcggagcggcggttgcgcacgtccccggcctcgtccgcgagttccgtttctgtggccctgggggggtattcctggcgccgagggg

SEQ ID NO: 165195 - DNA, 726 bp, Zea Mays
ttactcagacagtgatcatgcaggtgatcttgaaaagaggaagagcaccagtggtgttgtatttttcttgggaaggaacttaatcacttggacctcccagaaacaaagagtggtgtccctgtcctcctgcgagtctgaatatattgcagctgctactgcgacctgtcaaggagtgtggctgagcagattgttgagtgatctgctagatgtaaatgtgaagaagttcagtttactgattgataacagatcagctcaagaactctccaaaaatcctgtctatcatgaaagaagcaaacacattgatacccggtatcattacatccgagagtgcgtcagcaatgggatggtagatgtggctcatgtgagttctgaaggtcagttagccgacgctctgacaaagccacttggccggatgaaattctcagaacttaggaggcaattgggcgtcgtcaagatagaaggttgacaagattaagggggtgaatgttgcatttagccattctgtaatcatgtcaatatgttatcagtgcatttagctgcattagctcgggtagttaaattataaatctgtttgtgtaccgcgtagaatcgctggtgtactggagactgcccagtatgcgcagtgaccgcgtccagccctggttttccgccacgccgtgcatgccgtgcaagtcgcgcgagctcccgcttgaaaggggcgtcgtgcagctgtaaggagtggcgggg

SEQ ID NO: 165196 - DNA, 920 bp, Zea Mays
gttcactctctccccccccccttacctagggttttggaagatacggtttaggagaggtctagggttcttctcccccctgatccaaggtagtaagtgtgcaaggattagagtaatgcttcttatgtcattggcaactttattagcacttggtctccaagttctcaagtgttgccctaagcctttactccttgtgatcacagcttctagtgccaaggtggctctagccaaggtaacacctggggtgttacaattaacacatggcataaaactccataagacttacattggctactgaaggacctaaagcacttatgtgcatatgttatctgattgttcttcgattttaaccaggaccaacttatgaacgctactcgcctccaataattattgggctgcgataacgctcatataagacctctaatcgatcaacacgacatttatttatccaaaggggcatggaatgtaatgattgacaaagcaaggcatcgatccgccatacaacagaaaccatgccgacaccgatggatttttactagactcatcatgtgcataaccccgtctcgcatacaaccatattatggcgtgcactcgagacattaccgtttaacttaacgcaatcactactacaatgtacttcgacatacacgttcaacaacacagtgctcaacaaacccacacttccaatctacttatcacatccaaccaacaccacgtgcccactgcactcttatgacaaaattttagcgcaattatttatgaaaacatttatcaactagacgagtgaaacaccaaactgattatttgcacatctcgtcttcaaacaccaataacatgtcgcataatttatattttcaacccactctaacctacaccaacgatgaatacataaaatataattatcttagactaactcattcgca

SEQ ID NO: 165197 - DNA, 442 bp, Zea Mays
aagagcatccttgagttgttcacctctaggggcaatgaagaggattcctgcgcctgctccctgcagtttcagcgagccatcaaaatacattcgtcatacttctgtagcctccgggttgtcaggtacttgttgctcggtccattctgatacatagtcgaccagtgcttgagtctttattgctgtgcgaggccgaaactcgatgtcgtgagctcctagctcgcaggcccacttggctattcttccgatggcttctttgttgtgaagaatatctcctattgaaaatccggtgactactatgattttgtggtcattaaagtagtgacggagtttgcaagcagttagaagtactgcgtacaatagtttttgaacttggggatatttctttttagagggtcctaggacctcgctgatgaagtagatcgaatgttgtactggatatgcg

SEQ ID NO: 165198 - DNA, 303 bp, Zea Mays
atgctcagcgtaccaagccgtcccttggttacacccattggggaggggacgtccaggaattttcaatagattttcccaagtagtcacatccatatagtatatgcaatgaatgtatcaagacagaaagaaagatatcgacggagatcggaggaaagccaaatatagctactgaagtacaagtctaatcaacagaagcattgaagcacgaaacgaaatgaagaccagctaagaaccatctaccagacgtccaatctgtcgccgatcaaataaatttcaaacctaacaggacatgggtagatctcg

SEQ ID NO: 165199 - DNA, 1018 bp, Zea Mays
aggaaaaataaaatagaaaagaaagaggaagggagaaaatgtgcgcctgagctcaatttacccgcctcggcccacttccctcttattccttctgtgcagcccacccaactgcctatccgcgtcgacatgtgggccccattcgccagctgtgtttgacccgcgcgctgctcgctctagctcgctggacccacctagcacgcgcatctcacacgtcatcccactgctccgcgggacacaccatgcaggcgtagctctcttcttctccgtgcttctcggtgtggtagttgactaacggattccgtgtagctcggctcgcgggggaagtggaggggggtggtcgacccggtataaagcagtgccctgctcggctgccttgacctccataacctagatccagcgcagccgtagtcgaacaccgccgcccaatcgtcccaccgccgccgcagtcgaaccacaccgacagtgcctcattaacagtaagaacccacgctggtggttcgccgacatgtctggaacccgttcgtggcaatcgtcgtgagtgtggagttcgtgctgacgacgaatcgctcgacgtgattcctcctccaccgcagtgccgccatcctgtggaccgagcctgcgctgccatactccggtatgcgttcgttttagttgagtccattgtcgtgctcggggcgtgtagaagctatcgatttgggttaattcgtgcgctggcgccgatctggtgaactccggcgaggaatccactgcgaccgtggcggcgctgccagtgccggttgggggaaggggacgatggtctcgcgccgttcgattggaatcacgtggaggggattaaatttgggtgtaatctgttcagaaccctcgatcggtggatgtgtggctaggatttgatgctaggaacatttcgcagtatggaaccatagtccacgaccactatgttctgagtctaggaaatcttgcgcagaggcctctgttgttctcttattttgtgcgcacagtccaagggatagaaaatcca

SEQ ID NO: 165200 - DNA, 360 bp, Zea Mays
gcgatgacgattcctcgctgcccaatccttttgcgtcaacaagagtttgccaatcttgtctgtgacagcctcgacgccgaggcgatcctcggccagcttcagtctcccgacaagatcctcaaccgtcagctccttcagatcgagcattatctcgattgagatcgcgatctgcgtgtagcgcttcggcaacacacgcagcatcttcttgaccacacggatttcatctaggttctcaccagatgtacgcagatctgccgctagcgcgttgatacgcattgcgaaatcatccaccgcctcgctttccttgaactcgatattctcgaattcccggagcaggcgctgagcattggcttccttcac

SEQ ID NO: 165201 - DNA, 647 bp, Zea Mays
gcgtgtgcatgtcgcaccgacttaagtcattgccgacttaaaccgattcttccgttagtagggtatagtggtcagcctaagtcgaataagtgtgttgatttcaagtccaatccaatcgaagtcagctgaaagtcaagagtctgaatgcctttgaaaacgaaaactttattgatgatgaagtccccaaattacagagtacaatgtttcttcaagaatttttgaggcgtcgctagggatagaactttctgaggtgctttatgttccatgagttccccacttctgtgccatccatttgagtaagccggtatgatcctggccgagtgacctctgatatgatgaatggcccttcccatagtggtgacagctggtgtcgtccttcccccgctagaattcggcaaaggaccaagtctcccactacaaaggaccggtgtcgcacgactttatcatgatagcgcctcaaggtctgctagtacctagccgactgaattactgtgttcaatcgttcttcctccagcacatcaatatcttctagcctggtagcttctgcttcagctatgctattgaaagtcaacctcggcgccccaaatattaggtcggcgggcagcactgcctctgacccataaaccatgaagaacagggtatttcca

SEQ ID NO: 165202 - DNA, 442 bp, Zea Mays
gaaaaaaatatttgatgtaatcataaatttgtcatcgcacttgaaagttttttaaaaaataaataatcttttttcgaaaacttgtagatatttgatttgaaagggttttcataactgtcctaaaggagtagtttacgccgggcatgatctagaatttagccgtatattagatttagatctacaacgtctaggtttcttctatgcaacagaatttaactttgtacgagctggaaaacagattttattttatttctaagaaaacactgttatccttggataacttgcgattggataagaacgattttacacaaagtctgtttgcggccgggctggaatattctagtccgcttcgctgccatgccaccctataaaaccagggcaccacgcccacgttccatgatcaaaacgtctcgctaatatacacggccaccggtagcaatgg

SEQ ID NO: 165203 - DNA, 758 bp, Zea Mays
tgagtacacactccatctccatcgtccataagaaataagtggtgacgatgcactgattttcatgtgttgacctggcatacgcatgagctgatgatgagcaaagcatgattggttagcaaagaaagccgggttcctacctactactaaaccattgcagtactacgtactagcagtacataagctcacatacgaaaccagcgcggcggaatcattagaaagaatgcttgtgtgtgcagggaagagcagcattcattcattcattgcacactagctagctaggtttccccttccttgagccatcttccaagctttgactagtaatggtaggctgctttgcttgcccaaatgcaggtctgaccaagccaagatttgactgtactcgctgcccaaatgcaggacgcatggcgttgttattgtattattagcaggatgccgagctagcatttgaccagtaatggtaggctgcttgcttgcttgcttgcacagcacgcaggatagggacaggggctcccgcgcgggtcagaagctggtgaagtcacgtatagttgctggatcaatgtcgacgatcaccggctgatccgttcttgcccgtaaggaaatcgcccaacgcgttgactgcatccatcttcgcattgttatatactagcagtatctagactctagctgtgggttaaaccaaaaaattttatagagccaaggattaggtcgtctgtctgtctgtctgtctgtctgtctatctgctgccacgtactgctcct

SEQ ID NO: 165204 - DNA, 353 bp, Zea Mays
gggcgatggcgttcaattggaagagattgcgctggcggtcggagagggaagaagctactggcacaagcgattcgtggactttaccgtggcaagacaaccggcaatgaacgggtgggctaaggcgattcactgcgacgtggttaaagggtcatagcgtgtcgtgatcacggtggacgacgcataccttgacatcggttgcttggccacgacgccggcgcaagtggacgagcgatagagcggccatagtgtcccgagttcatccgagacgagatctttttatcatcgagcgtaatccatacatctgaggcacgaatcgcgacggccgatgcgaatctgagcgggggatcgccagc

SEQ ID NO: 165205 - DNA, 362 bp, Zea Mays
aattcctgaactgcatagcaaactccacccatgtgatagtatcagcagcatcgtgggcagcagtgtatgaatcccaccaatcagcagcaggtcctatcagacgaccaaaggcatatagaaccttctcccgatcagagcattgtgcaatattcaacatcttttccacagacttcagccaatcatcagtgtccagtggattgggagaactagcgaatgtcggtggcttatggctcatgaactcccggtgcttatcccggggtggaactggtggtggaggaggaggcagtggtgcttgctgatgttgatgttgttgttgctgctgctgcgcccttctctcctggcgtatctcctctcgctcgtcg

SEQ ID NO: 165206 - DNA, 713 bp, Zea Mays
cctcatcggagcttcaccagaggggaggggtgttttggtcctgcttccatcgctgccgtccctgggtgccacggtggtgatcactcaacctgaggcggcgacgtcgttggttgtggcctctttttcttcaacaagggtcgtggtccctccaccaccggagggacacccttctcctccccctagatgtcggggcggacgtggaggatggaagtgaggcaagtcaacatcgtaccagggcgacctcagccttggcactatgaggagaggctcgatagctttcgggacatggtctcgattgctcgggcgtcgatgacacagaatttcatcccctttgggcaggtaattgtcgcttatcggttactccttgtttcttgccattttatcgtcacctaagatgatcaccgggttaccatttcgtaatgtctctttgcgcgatcaagggccagggcggaggagtttctatccgttcagtgggaggtggagcagctccatgtggtggccacccatttggtggcgaagcagcgcaagctagtcgagcttcgctctagggccgagcgtcttgagagcgaggaggcccaacttcgctctaagggcgagggtgctcggacagaagccgatcacctctggggagatgagacacaacttctggcggtccttcgtgaggtgagtcttcaggtcggtgaggtcgagtcttcccttggtgaggccaacac

SEQ ID NO: 165207 - DNA, 691 bp, Zea Mays
acaagtttgaattgaaactagaatttaaatttgaatttggaaaagagggaaaggaaaaatgaaaatataaaagaaaaagtagaactgtgcagtttgggcctaagcttctctattccggcccattcccccccccctcacctcgccagcccaccattctccctgacgctggcaacaatgccccactgcccaacaccccaccacgcgcgctcctgtggccactgaacggtgggacccgcgggttgggcgcttgacgttgtgcgcgcgatgacaatgacatatggggcccgctatgtcggattcgtcccgaccgtggagatcctggcgaacacgcgattccctggccggtcttcttctccaatggttacgcctggaccgattctctcgccgggaattttgcccctcgcatctagctcgggtcgttcgtcacgtgaacctccactccgcgccgtatcgctgccagcgggaccgtgcggttaggcctgtcttccccgcaggccgttcagaaacagacccccgcgcatcgcgcgctccattgaccgacctcctctccaactcggattcagccttgggtataaaaccgtgccctcctctcgtacatccgtaccttgggcacccacaccttcgattgtgccgccagggacgagcaaggcttgtcgccaaacaaaagacggagcgccaccgcgggatcgag

SEQ ID NO: 165208 - DNA, 712 bp, Zea Mays
ccagcctcacatctgaagaaatccaacatataaagacgatgtatccatacattatttcaagaatggtctcgtatccttcaagtttttctaagtcattctcattttgtacctcatcatcctccttatcaacaaccatttcaatatctatttccattctgatagcttcgactaagtctatctcaagtctcccttctagcccatcttcttggaagaactctctgtcatatgtgtctgggtccaagttataatcttcatcgtttggaacagataattaaccgtgtggtgataccttatacacaacatcctaaccttaagatgttctttcgtttggcacgcatatgggagataatacacttgtgtggcctgttgggccacgatatagacattgtgtcctggtaaggtggaatcctatcgaattttgactgtcccaagattataatgtatccgtctcgtcacttcagggtcaaaccaatgacatttgaatatcactggagtaagaggtttggaaccatgaatatttagttcatatatttcttcgattcatccataatactcgaccttgtcaaggccgggcgtaaagactccagaacacgttgtttttcgattggactgactttggtcataactttttgtgtgaaaacggtatccattgacatcatacccagaatatttcctgaccctataagcaaagccattggctacttgtctcaac

SEQ ID NO: 165209 - DNA, 836 bp, Zea Mays
gttaggttgcactagttatcgctgcttgcagcaagttatcttggcttctttgatgctaggtatctgaagattgatcctacgtcgtgaagatcgggcatcgtgacgcatcagagcttcttcacattttatttcggtggcatattggctctgcattcctttaggaacgacttttgagcttcggaacttactctgcgctcccttaggaacgactttgtagcttcgaaacttactctgcgctccactaggaacaacttttgtagcttcagaacttactctgcgctcccttaggaatgacttttgagcttcagaacttactccgctccactaggaacgacttttgtagcttcgggacttactttgctcgtttaggaacgacttttataggttcggaagcgttgttgaagggtggcattctagactcgatagtgaggccacaatattattacatcaagttggagattaaacctccatgaactggtttccatgcaatgaaataaaatgacaaataaaacgaaagtacaataggttaggatatcctttagtaaatgtgcttcaactcgggcacaatgatgttaactgtgcgagcttcggactcctcctagaaatcgtgttgttgttgagcgtggtggtgcccttctggctgctgactgcggactagagtaggtgctagcggtggcaactgggcccaagaagcttgagagtgacttgccgaagcaacaaaggtcgttggttgttgattgcctacatactatgggacatactgagagtagcatgaagcagtatgcaaaacctacttcggctgactctgttgcgctttagcttcagcaatttccttc

SEQ ID NO: 165210 - DNA, 676 bp, Zea Mays
ccttgacaaccggactaaaagtatcttcataatctatgccatagcgctgtttaaatcctttggctaccaatctagccttgtacctatcaagggtgccatctgcctttgttttaattctgtatacccatttacaatctataacatttttcactcccttttgtggaactagatgccaagtgttgttcttaactagagcatcaaattcagcattcatagcaggtctccaatttttatcagctagagcttcagacaaaccttctggttctccagtattagtaaggcaacaatatcggattcgaggcacagttccgtcttgaagccttgtacgaggacgctgatctgtgtagagaacaggagacaacattgattctgaacttccagacatatcaggtgctgggttctcatcttctgcaggttccagacctgctgcagtagtatcatcagctgcaggttcagatgctgcatcagattctgcagtaatatgctcccgccttttatgtcgacgctgatagacaatgcttggtgttggcttctgttcatacaccttgtcacgttatgcagtagcaggtcgtggggctgaggcagactgatgagaagatggtgatgtatgtactagaacctcctgagccttgcttgcatctgaatcctgcgcatcagtatatatatctccaggagt

SEQ ID NO: 165211 - DNA, 739 bp, Zea Mays
gcttcgcctgaagggtttctaacgtcatcagtcgagaaggcaaaatctagctgagctacagccttagcgtgatcacaaccagccttctccaaaatggatgcagccctacaagcaccgggaaaggcgcaaaagtcccctctgtcactaagaatttcctcaaaagcttcgacctcgccattgatccattgaataatttcatcagggctgccacgaatgaatttctgctgggaagaaaatgccccaactttagaaaagctgatcttcagacttttagcacattccatagctatttcatagcatttttccttagcagcacgaagctcataaacatttttctgttcccttgatcttttaatttcacatatctcatgttttacttcttcaaccttaaagttctcagttgcttcgataactttcttctttagctcttgcatctcggcttcatgagttttatcttgaacagaaagcctggcctcgctagattttaatctttccaccaaggagagaaggatttttatcattctcaagagcttcgtttctcaatgttatgacctccgaacgaaggtttccaagtgctattcgatagctcgcatcctctgcatctttttgggcctttagagccttgcttagaatcaagccctagcaaacgaagagtgaacacataacgacgataagaactaccacaaaaatagttcaccgtaacacaaattacaaaatgatgagccaaagtatacaaacc

SEQ ID NO: 165212 - DNA, 507 bp, Zea Mays
gcggcgacggcgcccgactcctcggcgaggtttcgccggaggcgagggtacgaccacggcgagggtctagggcactgggaagggctcaggcgaactcgggttgacacgacggactgatttgtgggcacgacaccgatgcaggggcaccagagggcgcggtccgtggtggagcagcccaacgatggcgcggttcactccggcgagcgattgcgcggacaataaggcagtacacgaaaaattaaggttgtgggggaactgctcacctcgagaggggactctagagcgcttgagcaacgacgaggacgcagggaggccttgggtcgacggcggtggagctttggctatacagggagaaggtcggtgagcgcagaccaggcgaaatagagtggcagggggcaaaccagagggtgtctcgcgttgctggtgaggaggcacagctcaccgagggaacagacgtggtagaagctcaatggcaaccatggaacgaacgacggaccacggcaaagc

SEQ ID NO: 165213 - DNA, 673 bp, Zea Mays
gcgtacgcccgcgcgcactggcgactctacacagggaccctcgggtttcaagctaaaccggagtagggtcatttactatttaatacggtcactgacagtttgcaaaaatgtcctcggtcttctattcctttacatcacgcggtccccgacggcgttcacgcccagccgagctccggcgagcgcctgcaccggccgaatgaggcaacggctagggttcccgagcgacgggcatcaaattggacctagcccgagcatttcccctaacctaattccatctatggcccaatggcttgctctggccacggtggccgtgaacatcacggcgagacaaccgtgttcccggcgaccagagagctcttagcgcaattacgtgggtcagagagcatcgtagatctatgagtgtacttaaacggggaagaagatggtatgagcggacctgatttgggctggccacgacgagattgagttcacgatgttctagaaccggattggggagaatccaaaatttgtgctcgctagtgagggatttgggatgcaggtgggtgcagcagctgcttgagtacatggcggagctgggggcgcggtcaatttatagagtccgcgcgcgatgaccgtgaatttgggtgctgacgcgcggtggccggaggtgaagaagaactggcgcgcgtgagtg

SEQ ID NO: 165214 - DNA, 665 bp, Zea Mays
ctgtcaatgaaataccagctggcttgtagtatttctttcttatcttaaatacatcagaaaaaggttcaatggagtagttctctttgttttttttttccttccactatcgttggaaactcgagcacagtgtgtgcggttttcagtcggtcacttcccttccccggacggcaggtggacattttttgagctggacaagcactacattttttacatgctggcctggccgcgatgatggctgcttgcctgcttgctgctagtcatgcggcagggcacccaaccaggcaaccaaatgggagaaggccggaccaattcttggactgcagctcgctcaagagcgcgctccgtcctccttctccctcctacagcctacagcaggtaaacaaacataacaactgcatctactagtacgtggccgtgtttgtccgtttcaaacggccaaaactggcgagatatataggcctttatctcaattacccacccaacgccatgtgatcgggttagggtaccttggggtattttttgagagagcggggggggggggggtgctcctgtggtaccttgaggtagtgaaccaaacagaccctaaatctcccaggccagtctagatattttgagagagcccaatgacctttatctcagtttaaccgggacagcttataatctaa

SEQ ID NO: 165215 - DNA, 790 bp, Zea Mays
ctaggggctcgttcagcttaaggaagacgaattccgggaactgactcaagacggaagatctgtcagtgaatatgtgcacaagtttcacggagttagcccgctacgcgccagatgacgtcagtaccgagggcaagaagatggcccgtttcctgaagggactcaggtcggaactcaagacaattctggctaaccaagacttcctcagtttctctcacctctccaacaaggccatgcaagttgaaagggcaaaggaggaagaaaaggggcatcttaaaaggaaattccaagtcctccgggctcagcagcaagatcggcaccagaagactcgatcctttggatttccacccaagggaccaagcttcagtagaccagctggacccaccccgtcatggttcagtcagcagagtcagagctctttccatgccccctcagttgcaagcaaccaacccccggcgaatgcatgttggcactgcagagatcctagtcatttcaagaataactgtccccagctgaagccgccaggacccgcctactccaactcggtgaatggccccaagaatgcctcggcatccgcccccaaggcgccctcctccatcagccagcagaacaagacccagtatcaaggaagggcacgagtgaatcacgtcgatgcccaagaggctcagcaagctccgggagtagtgctcggtgagttccttgttgaatttactcctgctaccgtacttttcgattctggagcatcccactctttcatagccactagttttgtggagaaacgtggcattccctc

SEQ ID NO: 165216 - DNA, 448 bp, Zea Mays
ccttgtcccccgccaccaccgccactcagactgctcctccaaacaacatctacccacctactccacccagcgccctagccgcccctcggaaacagccagctttagcaaccctcctctctttgaccgccagggttttcgtgaggtgttccttcctccggggcggtatgccaatgtagccacctctgccatgcacgtgtgtttgttgccctaaccgctacaggcttcccgctaatgcattggcatgacaccttcattcgccaagccttccaagtcttcggttcagttgctgaaattgattggcgctgcctgtccggttgggactactcctccctctaggttgttgtgcaagttgatggcactgcctctttctcgggagatctctaggccctggatgtcttcactggcgctggttacgtctgccagctccagatcattcactcctggtcct

SEQ ID NO: 165217 - DNA, 731 bp, Zea Mays
ccgaaattttgttcggaccatcgggcacgtcacgagtcgcatgcggccgcctccattctcgggtgggtttatggcctttcctatagtagggttatcacctaagccacgtgcatcgctcttatatgctgaatttttggttggtggtttacacaacagcaaaactgagccatcctggtccacaaacatggaagatgaccgtgagtggatgtatgctggttggaagaagggcggatgtcacacaaaggaatggtttcagaagacagaaaagtttttagagaacgctcgtggagagtcaacccacgctgtgattaggtgcccatgcaccaaatgtgggaacatccagtcacatgacaagagaactgtggcactacacctttgcagtcatgggtatgttcaaggttataaggtttgggataagcacggcgagtcacggagtatagtatcagcacagatggaggtggatgacggtgaaaacgttgatcggttggatcatatgttagaagatacgcaggcagagtttgtcaacaatcctgaagatccgcctacaaaagaggttgaagagttgttcaaactcctccaagacttagaaatgcctctgcacggacacacaacggttaccatcctgcagttcatgacccgtctaatgggcataaagtcaaagtttggttgctcagccaaatgttataaggtgattttggaattgtttagtgatgtccttcctgccgatcata

SEQ ID NO: 165218 - DNA, 483 bp, Zea Mays
gcacccgagcatttcactagatcgggtagaggaatgcaatattctgagccaaccagagtcagactctgatgactggagggagccaatcatcaggtacataaagaatgaggaggagccggatgacaaaaatgcagcagagcgcattgcaaggcagtcatctcattatactctcattggggaaacgctatacagaaggggcgcatccggagtcctcatgaaatgcattctttcggctactgggaagcaactgctagatgaggtccatgctgggcaatgcgagatacacgcagcatccaggactctggttgggaaggtctttaggtctggtttctactggccaatggcaaagagtgatgcagctgagttagtccagaggtgcgaagcttgtcagtacttatcaaaacagcagcatctaccagcacagcaactgcaaaccatacctgtaacttggtcgttcgcgtgctggggactggatatgattgg

SEQ ID NO: 165219 - DNA, 898 bp, Zea Mays
ccaatgtcgggattgcgcggctatggccgagcgccgtgcctggtcttccggggtctgtactgcaacgacttgggcggtcttctcggcggtaaaacggggtggtccgcgagataagtagtagtgcaccgctcccctttcctttgtcttctgtagcaccatggagagagttcagtaaaaaagcggagagctcgcgccgccaccattgaaacgctctcggtcggccatccccagtcacggtgtattgttccgggggcatcttggggtcccgcctcgaggtttggggcagccctcacattaggatcgggtatcgagcgagcgcaatttctcgtcggcgttggcggctcaccaggaactcgcggtcgccgtggacagccctcctgcgttcacgattcgtggtatgtattcgtcgccggggattcgccttgccggagttgggttttccactgtggtcgggccgcggcggacggggggaaacaaggagcgacgaagatgatggcggggtaccgttggatctccttttgatggccggatgtggtgactgcgtagcgtttcggataggggtaaccagaaccgtccgatcgggatcggatgatggtcatcactctgggatccattaaaccgggaccgtcagatctagatccgaggggccaggctgcgtaccggttcgctcgatttatgatctaatccgggtcgtaggtataggatcgggcggctcagaaggaagggtacacccttcagccgagtaaattattaaaaaaagaccctaggttctctggatttaaacccgtcgtccatgtattactattcactgtgtctaggctatcttgtgcagagacccctggaatttccagaaattgaggcccaatcccgaatagtgttaaaccagaggatttaaatt

SEQ ID NO: 165220 - DNA, 414 bp, Zea Mays
ctccttgtcgtttgttgctttgagagtgacatgttgcggtttgttgtagtgggggcccccatttgtggcagcgtcaatgtaccttgcctccttggccatcatttgttgactcactaacttaccaaggacctcctcaagcatcatttttcgatacctggtgttctcacggatcaagtttacaaggttaggatctaaaacagtaaacaaacttagcatgagtcggacaacatcatggtcggtccatctcgtgctcccatagttccgcacttggttcaccaaggatttgagtcagttgtacgtttcttgtggctcttctcctctcttcatggcgaacctcccaattctccttcaataagctctatctttgtgatcatggtcatgtcattgccttcgtgagcgatctttaatgtatcc

SEQ ID NO: 165221 - DNA, 402 bp, Zea Mays
ccccaacacttgtattgaagaaaggcggtgagatcagttgaggttgaatctaggcattggatagctaggtgccttggtggatacccatacagtgcttcaaatggagtatgaccaattgaggagtggtggctggtgttgtactagaactcaactgtacttaatcagagtgcccacttcgatggacaagtgtggacaaaacagcgtaagtaagtttccaagcactgattcaccctttcagtctagccgtctgattgagggtgataagaactgctcatatgaaggttgacacctgcctgcttaaatagttccttctagaagttgctggtgaaaattttgtcgcggtcggaaactatggcagcaggaagcccatgaagcttatagatatgttggaagaatacttgt

SEQ ID NO: 165222 - DNA, 357 bp, Zea Mays
accttcctccaggcaaatgccgacatattcacatgggaatcatcgcagatgcctgggatccctagggaggtgattgagcaccatctgaagatccaccctgatgccaaaccggtgagccagaagcctcagagacagtccgttgagcggcaggacttcatccgtaaggaggtccggaagctgctggacgctggcttcatcgaagaggtccatcacccagtatggctggccaatccagtcatcatccccaaggcaaacgggaagcttcatatgtgcatcgactacaccagcctcaataaggcctgtcccaaggacccatatctacttcacgaatagatcaaatcgtggactctacttctg

SEQ ID NO: 165223 - DNA, 502 bp, Zea Mays
catagatgtcgccttaggatgagtagttgcagacgtgctggtgttggactaagtaggcgtgagggtaccgagccaatttaagtcgttaacgacttcgaccgatcgtcccgttagtagggtatagtgatcaccccgaattaagtaagcgcgagcatgtcgcgccgccttaagtccttgccgacttaagccgattgctccgttggtagggtatagtggtcaccccgagttaagtaagcgcgagcatgttgcaccgtcttaaatcgttgccgacctaagccgattgctccgttagcagggtatagtggtcaccccaagttaggtaagcgtgagcatgttgcaccgtcttaagtcgttgccgacctaagccgattgctccgttagtagggtatagtggtcaccccgagttaggtaagcgtgagcatgttgcatcgtcttaagtcgttgccgacttaagacgattgctccgttagtagggtatagtggtcaccccgagttaggtaag

SEQ ID NO: 165224 - DNA, 766 bp, Zea Mays
ggcagctttcgtcctcagcactcttttgtgcccttaaggcattgctcaagattaaaccctacaaaaggggggatcagcacaatggtaaaagatacaaaaaaataatctgattatgtcaaaacatctttaccttcagactattgtaagcgaggctgtctgtgaggtcatccttcgacatagcagagaggccaacttcgagcttcgaaaaccctatatttctagccatctctcggcaaacagatatttccttgttgtccgggaggcagtacagaaagtcatcttcatcagtgccattatacaccaaggatcctttctggtacttcagttcttgggcatagtgtttagcttcggcaatttcctcttccgacaattttttacccgaagcgtgtcgaatgataaagtccagttcttcagtagacgcttcgggagtaggaggttcaacgttcttggtgcgtcttctttttccaagaccacagcggcacccaaagatccttgttcaatgctctgtctcgtttcaataggccatgtttcaatgggcactgaaggcccagcttcgacttcagcacgagttgtagtagcttcgacagcctcctttgcaggagcaggagttgatgcccttgtcgactccaagacaacgtccagcacgctagccatcctcctcttgggagttattgcaggagctttggacaccttcggcaactccggctctggtggcgggctcaggatttttggcaatcctgccgactcctctagctctagctcttcg

SEQ ID NO: 165225 - DNA, 1125 bp, Zea Mays
agggaaaagcaaggcacaccgaaccgaatcgcgatcgccccgtctcggcagtcggcggctcacaccaaccggcaccgccaaacctcgccgacgaatcaaccacccccgcactctctcgtctccccccacccccaccaagcgcgatcgatcgagaatgaatggcaatgcagtgctggacccggtgcaaattaataaacgctagggaacggaacgggacggggcagaggagcagcagcagcagaaggaaaaacaacggcgtccgctcacctcgccgatggcgcggaagagcgtggcgttgaacgacgccgccgtgaggatgggctgcgggaagctggtggccccgggcaccagcggcgagaaccgggtgccgggccccacgtaggagacgccgtgcagcgcctccgaccaccactcgtacagcgggacgcccagccggggcagcgccgcctgcttgtccaccaggaaccccaccttctccgccagcgtcagccgcgacaccaggtccgccgcgcgcgccgccgccgccgccgaccggttgcagaacccgtacgacgccagcgtcgcgttcgacgcgtcgcacgcgaacgccggcgtctgcgcgcgcgccacattggggcagcagagcagcagcagcagcagcagcgccgccgccgccgccacggtggccgccagcgcggccgaggccggggacgacgcggacatggtatatagctaggcagctactagctcgctgcacctccccaaacctctcgaatgagattgattcttggtcaccaccagcaccaccccgctcccgctcgtagcacaggcgctggcagcggcataaatagagtgctcagagtggcgctcgcggcacggtggtgcgtggtgcgagctattgcgatagctagtgaggtgagggactgggggcgtccccgtgaccgtgaagggagggccgacgtgggaggcgcccttatttttctcgtcctgctctgctgttttttcttcacaaacaaatcgttaagttctcttctttgctagcactgtgctcgcgccttgtactctaccgagcccgtgacgagattcttggagccatccttcgaggcttccagctatcctcctcccctgaccgtccctctcgataaa

SEQ ID NO: 165226 - DNA, 579 bp, Zea Mays
gacctggggtccaatttcacaagctcagagtttttttgatttctgcgaacaaaaaagcattcagatcaaatatgcctcggtggcgcacccaagagccaacgggcaggtagaaagagccaacgggatgatattggaagcactcagaaagaaagttttcgacaagaatgaaaagttcgcaggaaagtggattagagagctgtcgtatgttatttggagcctgagaactcaacctagccgagctttgcatggaaacactcctttcttcatggtctatggttcggaggcagtgctacccgctgatctcaagtttaggacaccgaggttaatctttgaaaaaatagcagaagctgaggctaccagactggagaatattgatatactagaagaagaacgattgaatacggtgattcagtcagcccggtatcagcaaactctaaggcgctatcatgacaaggccatacggcatcgatccttcgcggtaggagacctcatcctccgccgaattctaacgggggagggacggcacaaactgtcaccactatgggaaggaccattcaaagtagcagaagtcactcggcc

SEQ ID NO: 165227 - DNA, 788 bp, Zea Mays
agacggcccaacaacacaggaaacgcgcgcccgcgcccgtgcgcgatggcagaattgcaccgaggtcctcgcgtttttatctaactgtgaacgggttcaaccactattcctacgggtctctgacgctttacaccgagcccccccggatttctaattctttgcacgcccaagtccacgacgacgacagcgcggggagcactccggcaagcacctgtaccggccgactggggccacggctggattctccgagcatcagacaccaaattggatctacctcgagtattttccccaacccaattgcacgaatggtgaactaatttggtctggccacggagagcgcgcggatgaactctagacccatgcgttgccgacggtcagtagacccatggcccaattggacgggtcagtaagcatcgcagacgcatgagaaagcttaaacgaaggaaagggagggatgaactaaccaagaaagggctggccgcggtgagcttgattctacggtggcggaaacccgatttggggcgaacgcgaaattcccgagctccggcgaacgattgtggctaattggcggtggctggttagctgatgaccctacggagctggtcacggggtcaatttataggagggcagggccgtggccagtgaatttcgggaggacgcgcggcggccggaaatgaagaagaaggcgggcgcggtgaattcgtgtcccacggcgtggcaggcttcccggcgacgatgggacagccttaaggtgtcacgacggtgctgtagaacggctaggccacgcg

SEQ ID NO: 165228 - DNA, 405 bp, Zea Mays
ctgcgggatgccaagcaaacctagtcatttggactttggaaagtccaccatctctgaagctgatcttccaaaaatggtgaagctgggctatcttagtgaggcaaaaaaggagctggttcgtttcggcggagaggaaactattccgaagccagaaaagaatgaggttgtggtgttcaaaagcttctttaaagctggcctaagattcccctgaatgagatgattgctattgtgttgaagaagtttggggtttaccttcatcagctgacccctaacgctattgttagattaagtgtttatatttgggcccttcgtagccagggagtggaaccgttcggtgaaggtttctgccaagtccatgaactacactatcagactaaagccagaggagatggtattcatgagaat

SEQ ID NO: 165229 - DNA, 750 bp, Zea Mays
aaattatggtccgttcccgtccgttacattggtcaggtcgagttggtcggatcgggtggcttgacttacactgtaggatacaatctgtgttccctatccctgttctggtgtcctgtcttctttgtgtaggataataagttgatgacatcatcatgcgagctggaatatatccggtgcgtatgccaaacttggtccatgtgggcttaagcagagctttcggatgcagtagcaggagggctggaattataccaaggtcgattttgcaagtaactagttcttttgatgctaccaaaggtgcaaagcagcctcactcgctggacagtttcaagtgcaagttaagtatacatcgtctcgtgtcatatatataggaactgtcgtcctaatccttagggtaccctgtcatcagtgctgaaacattcatgtccaccagctgaactagtttttgcatgcgcccctggccctctcatacctttcttgtactgacattagcttgaaagaaacgatcactgttcgatcagcagtttgcgaggcatggatggcgagggagagaggcgcatggtggatagcgagggagagatacacatggatccggcgttgtacatggcggcgacgcaggggaaagtgtcgatcctgaagcaactggcggatccggaggaacccagtgtcctcagcgccacgacgccccagctgaacacggcgctccacctcgccgcgctgcacggccacgccgagttcgccggcgaggtcctg

SEQ ID NO: 165230 - DNA, 396 bp, Zea Mays
gcacacaacattactaaatggaaggggtagaaggcgaaggaggtggatactagggcaacttcgggtaggaatggtgtcaatatcttgatcgacatgagccttaaggatggagtagttgatgttaggaggcaaggtgacgtgattgtcctagtttggttgatagttggagatgtggctctaaatgtgatcaacgcctatgcctctcaggtaggtatcggtgagagcaccaagaggaagttttaggaagatatggataacatggttaataccgtgcttattagtgagagactcttcataggagacctcaacgaccatgtgggtgtgactaatgtaggttgcgagcgacttcacgaggggttcgggtacggtagtaggaaccaagagggaggatggccc

SEQ ID NO: 165231 - DNA, 514 bp, Zea Mays
aaatacctcgtgtagtcgtgccctcgcccgccgtggtcgtataaccctaaccctaacaccactccgcacactcgccccactcctattctcatgcctctccgctcgtggctcgcctcttgctcagtcactctcgatctctccgctgcgctcttgtgtctcctctcgtcatctctcgaaccctccggattttggtgctccctgcctccgtgcgaccggctgaccttgcctccggcgtcgttgcctcatcggtctcagtcattccgacgtgctagtgctcgggtggtctggtgctcgtgctccctgctcctccagtcctccccctctgacctctgtacctcgacctcaaaggcaccggcgctggcggttttaaattggtgcttggtgctctagatcttctcctgactatgaggtgtgtggatccgtgaggaaccagtgtgcgtcggctccatccatctccacgacgagtcggcgatgaaaccagtgctccgaatctactgctcactggtgccatctc

SEQ ID NO: 165232 - DNA, 339 bp, Zea Mays
catcgatcttccgtgccgctctatatatgattccatttttatctctcattattaaccgtttcacaagttgcaagcaaatctgtatagtacgttaggtcagacccaccgcatcaacccgcattaacggaaaccagcccaccaccgtatcaacccgcatcaacggaaaccgtatcaacggaaaaagaagacaagaaacattttctttcttagttagcttagggcaccaatatatagatgatttattttacaaaataataatctaagtttaagttaatatatctacactataaagcaccattattagaaaaaaaattatgtacactattttttgattctcgc

SEQ ID NO: 165233 - DNA, 892 bp, Zea Mays
atatattctttctttattacttctcttgtgttgagtaagtttggtgggtggggtttgtggtattatccattgtgtgtgaccagtggggtgttacagttggtattagagcataggctgtaggtcctagcaagtggagtagtaataatttcacacactgcacatgtaggatgggatttctgtcttgctattgatatgattatgttatggtctgtgctagctttgacattatctgaagagatgctatgcctatctcatttacttattattctcatccctgtggctgcagctatgccgcctcgtagggctcggggtagtccgcaagctcctagtggggactcaatgagtccggcggcaatgttagccgcaatgcaggccatgcagcaggagttggcccttctgaggcaagccattcctgtcgcccctgcgggtgctgcttagggtgctggaggtggagaagtgcctgggggcgccgtccctgtgggtgctgctccaggtggcggggccgaggtgccccttccagtcagtggtctttctctgatgcagtggatgggcatgaagttggattcttttgatggcagtggtactccgagcaaggcggcagattggttgacttatgtggaggataagatgaatgtcttcgagattgcatatggagatcgggttcgctttggcactcagctgctgaagggagaggcgtaaatttggtggagaggcgtgcaggcagcgcactcctcctcaccaggagtcctatcatgggatgttttcatcaggcagttcgaaaggagattctacccggtcacctttctggagaagatgaagattgacttgcagtcctacaggcaggagaagaagtctgtcacagagtatgaggtgggctgcaacaagatggtcc

SEQ ID NO: 165234 - DNA, 1072 bp, Zea Mays
aatctcctttgtttcttctgggttggtgtggtaggcagcatgatttgggagggaagcaccaaacacgaggtctatttgatgttcaattcctctcttgggtggtagccctggtggtacttcattaggaaacacgtcctcatattcctataatgcatcaaagacaatacttggcaaagtagagggtaagttgttagtagaaagaaggttgtccttgtacaggagcacaaagaacatggcactaggttcactcaattctttttaatcccccttcctagtcatcatgactaatccctcttttcccggtgtcttggttattggaggctgtggagttttattttgctttggaaactcttccttactatttttgtgggtcactctcaagtgcttctcgctctctcactgtttcttatttagatcatccttcatactttcctctgatgtcaaaggaagcaaagagattcgctctcctttgtacaagaaagacaacttgttggttcttccaaaaatctggacatcacgatcatataaccaaggtcgacctagcagtaattgacatgcttgcatagggaccacatcacattccacgtgatcattgtacttctcaacagaaaaaggatcattcaccacgtggctaacacgcaacgctccacaattattaagccactgcatcttatatggactaggatgacgccttggttttaattccaatctgtccaccaattcttgactagcaatgttgttgcagctaccattatcaacaatgatgcgacatagcttatctttgatcataccttgggtattggaaagattgtggcgctgtccattttcttctttttcagcagtcacacttagcactcaaagagagataaaacagttatgatctccttcttctgactggatctcattctcttccttttgaatttcttcatcaaactttggtccgttgtcttctggatcactatctgattcccattcacctttttcattcaacaacattgttcttctacttggacattgagcagcaatgtgctcgcgaccatggcacttatggcatacgatttctcttgtacgg

SEQ ID NO: 165235 - DNA, 713 bp, Zea Mays
gaggaatttgaagatctcatgagtcaggcccatgaagtggcgaaggaaaaaaattgtcacacttagtgcaccggcaccaaaagatcaccaagtagggagagatcaacctcgagtccttcctacattcgcctccgaccaccactataagtaaatttgatgacatccaaatccttaaatagtatgtagatttataaagggggtagttagaacaacacatggggggaatataagaattgctcaagaatctcgcacgtgcatttgaaaaatctactattccaaggttcccatcatgtgatgctagcaccgagatgtctatgccaaacacattgacaacaaatggggtttctcagccccaaccattatatggtattgctaatgaattcatatccagggcaaccacaaccaccaccttcattatacgataaactggtgccactaagcatgacaagatagtctagatacgatctcaaaccatttgaccgtactgcggaccgcccggcactgaatgccaggctctatgttgccgcccaagtccatagcatgacaggccgatgatgtggagcataatcagacagtccatgcacagccagaaaatgtctacccatatcatgggtcgttcggcgtcacactagaccgtttggccacctaggttggactgtccggacacacatatcctaaacatgctgctatgcataacacctaattgtttctcg

SEQ ID NO: 165236 - DNA, 431 bp, Zea Mays
gataaccagacctagtgccgcaccatttggatacaccatatcctacgctgaagccctcgtcggcaacatggatggtggaggactgcggagtggggaggacgaaactgggcgtggttcggctgcgggcaatcgtggtggccgcaccaacgggcaaggcagtttgatgaaccacaatggctttagaagaccgaactttgaggctcgtcgcgggggttacaaccgtttcgggagaggtcaccgcaataagcacagagaaggcatggggaggtatgatcgccctagttcttcatatgggtttcaaggtggcacaggctctaggaatgcagctaacttacctgtcattccatctctgaattctgctggagttctgggggcgtcatccgtagacacgcttgctcaggcagtggcacttttgagtcaggcgttgggac

SEQ ID NO: 165237 - DNA, 619 bp, Zea Mays
cttgaaggctgacaaggcttgcgcgtgaatctcgttgtccctgtggcgatgactgttcttgcggatcaacggaatttcttctccttcctcctcttcttcctcattaggcacaccgcgagcagcatgagcatcatcacaacccctagcattttccttggggatggtgcccaccgggccattgccaaggaataatgtggaggggccagcatcatgttccaggcatgacaaccgccggagtcgccttttcttcctcttctcctcaataggtgcagttggatggttcactcggcgtgaacgtttccgacgagcaccctctggtgtctgaatttcctcgtcttcgccaaactcttgcctagtcacaattgtcgtcggctcagtgcgggcagagttagatgattctccggccagcaggctaagaatagcatccatttcagcatcatcggtagtggacgccatctcaaagtgagtttgcttctcagccttgggaagattctggaggggagcaattaaggcctcaatgtcctctgaggagggtcgcactctatggcccgggctaccatctcgaacaggaagattggagacaaagccagagaagggactatgcagaggcaggttccat

SEQ ID NO: 165238 - DNA, 463 bp, Zea Mays
attaagagccctgggcttccaataatagaggaagcccaggctagtcaacatgggcattttggttgaaccacaccgagtcaacaggtcctagtcacggcgccgttacctccgtcagccagtcacctctcccacgtttcctgtttctaaaaccatagtcgtgcattcaacggagacaaaccagcgccgatttgaagaaaacccgagccgcgcagattttcctttcgtcaggcgactccccaggcgatttccgcgccagcgcagcgccaatccaccgccgctctaatccagcgcccttccattccaccttacatccttcaatctcccagcattggagcgcgattcaagaagttccaggtaatccaacattgaaatacaccgagtttgccgtcgattttttgaagcctatcggtcgattgaagtggatttgattgtaacccttattctccagctaaatgtgtgattt

SEQ ID NO: 165239 - DNA, 366 bp, Zea Mays
gcattcacgaaagggtatgaagcatcacgggccgtccgatctatgccgtgcggtccagattagactgccacttgcctgaaccggtacgcgttaaggatcgcaagatctgagatcgacgaccaaggttttatgaaccgcgatccgcgcctgacctttggattcaatccctatggttacgattccataactccgaaacggtatcctacaccaaatccgagctacaattgaacaatctaacggcccgcacgatcccagccaacgtcttccccaagtcccctattcgcgcacggcggcgcacaagccacacggcggtccgctcgccggagctcgtcaaacccacaaccaagcgccctaattcccagcgaa

SEQ ID NO: 165240 - DNA, 599 bp, Zea Mays
gttttgcttcggcagttgaagatgtcccttcaccaaattcaggcactacgaccggttcaatatatcgtggccggtgggtcaggaccttcattttcttgcccttcggtacagcagtggtggccaaagcggcaatttttctcttcttccattgccttcgcaatgggtagtgataatcagggtacacgaagccaattgcatcaaacactctgttcaatcttttcttgccccgacccccaaaggctgcggacaaggcatcatcttcggccttcaaatatgtcccaagcagctcgtcgctggtagcttcaatgcatttcaaccagtcatcatttggttcgtcaaacttctctctgaatctgaaggtatatttcaatcgaaccaggccaccttcactcggttcagtagtagtttcctttggcatttcccagctatccacaagtggccacaccctataggctatgtgctcttggactatatctcttgtgccaatgaaggcacaaacattgctaaaggccttctggcatgcttcgatgtcaccttcaatagccaccttcagccttcggaggccgaagtgagaccagatggggtgctggataatttcc

SEQ ID NO: 165241 - DNA, 473 bp, Zea Mays
caccgacggcgagagagagagagagaaaaggagaagggagaaggtacgcgtggtcttgtatgccatcctgggctccataccgtcgcgctgggggatctacgacaccttacacgtggaccggagccgtggccgtggtcagggactggcagaatcactcaccggcgttcattggcgccgcttctccgccccgcgtcgaggactgtcctcatcaccacaaatcctctggtatggttgctttcgttggggtcgttagctaattccggtggtgtagaatcacgcgggggaggaaattactcgtcattggggcgagaattgcacaccggtgttcacctagcttcggtcgccgtgactcaccatggatgtgaagctaggcatgtcaatcggttacctgctgtcggtcttcgagttcaggggggtcgggtggttgtgcgcgggcaagtaatcatgggattcgggctcgggggcgtcgaacg

SEQ ID NO: 165242 - DNA, 786 bp, Zea Mays
ttcacattaaaaatcattttccaatcacttttactgaatttctaattccctgaatagggcgccaaattctggaaaatccaggggccaaatcccaactctcccaagacacagagcacagtcaggcaggactgcaggttgttttctgataattatggggtctcttatgcaaagttacaaggccgaagaggtatggaatactactggccgtccgatcgcgcaccaaccgcccagattagatgctacttccattgaaccggtatgcgctatcagcccttggatctaggatccacggtcagagcatcacgtgacctaaaaaccatccgatcgaagatctgcggtcatgattcaatgccgcgaatggttatcctcttctctaatcacatccgtccgttaagatcagacggccgaacggccttgctcctattctccggccgacccgacggcctcgccgccagaccccacggcggaggccattaccggcgatagcgttcctgcgacctgagatccccactcgccgaccaactagcgcaaatcgaatcagggaacatggagaatctaaagaagtaattctcaccgcgatcggagcagtgggatttcctgcccacggtgagccacggccctgaagatccgacgagcagttcgccgcgcgcccttgcaccgttttgcccgcgaagacccgaaggagaaacttggtggcgtggtgaagctcactgggtcgagctcgtgctccgaatggcaacaggaatttggacccatggcggcggcgtggatttcgcccgcggcggc

SEQ ID NO: 165243 - DNA, 409 bp, Zea Mays
tcctcattgattgtatgggacgaagcgccaatgacgcatcgacattgctttgaggccttagacagaaccatgcgcgatatcctctcggaggacgaacctgcgaacgcaattatcccgtttggtggcaaagtcgttgttttgggcggcgattttcgtcagattctaccagttgttcgtaagggatcacgatctgcagttgttaatgcttgcattaccaactctaggctttggcgccatgtcagcttcttgagcctacatacgaacatgcgtcttaccaacccatgcctaccatcggaaaagcgtgttgctcttgctgaatttagcaaatgggttctgtccatcggagatggtactgttcctgttgagaagatggacggcgaggccgagccttcgtggatcacgatccctc

SEQ ID NO: 165244 - DNA, 491 bp, Zea Mays
aaactctcgagatttccgggctcggttccgtcttcgttccaccgtgaagctcggcccactcagcatcgcgcgcgcagcgccaacctcacccatggcctctgctggtgggaccctgttgtctgctgacccagtccgagtttgcgcgaaacgcggtagctgttgcgaatcgatcgcggtagttgggatttggtagcctcgacctgcctctacgtgcctatatttacgtcagtggaggtaccgtcgacctgagtgtcccagaatctttcgcgacggtggacaatagagtgaaattgagcatccgcgaaggaagaaggtgggagtgcgagcaatcggtggttgcgccatcaattgagctaaggaaaagggacctggggcttcggttgttgacgtggggcgtgtcctcgggcggctgcgtgggggtttgtggcggaatcggagtgaattgctcgccggacccccttcatcgcctctgtgtcgctgctcgtcgcggg

SEQ ID NO: 165245 - DNA, 698 bp, Zea Mays
ttttttaccatttaaacatgggcagaagaggtgaacaacaggtaagaggtgatgcacaaagaaagaaagtcctgatttatattcgataaaataacactagtacaatatttgtgtgtcgcgaaggcacataaatattcgataaaataatagcattgtatgaaaacaaatagtgtatatattatcatcgacatcaatatcttacaagctctttgccaataacaaatataaactttccagagcgccaacacatttaatatgcatgtattattatttaatttaataaaaaatatgtcatatccctattaaatttaacataaaagcacaaactttctgtgtcctatgtcacttgtacttagatctatttttctctctcatatcttgcgtaagataagataagacttacctctacatacgcaatcaaccactcccaacttctcatctcttttccgtctctgcctctctctcttttccttatctgtgtctcccttatcacccagattctttcacaccaccaaagattggaggacatcgagcaggccatcctgctagcttccgaatcaccagtcgtcgtcgacgcaccccacgtgtggcaccgcctttaccttctccaatcagcaagcgcctcgaacgtacaacagccacaactctctgccaccactctctgccaccatacacctctgcagatagtgcttagttac

SEQ ID NO: 165246 - DNA, 386 bp, Zea Mays
cgcagatgattcgccgcaataatccagcagtatttttggtttccttctaccctaagcagaccgattaagtgttttgggccagcccactaaaaaccctaaccctagggcttctctataaatatggacccccttcacttgcacttggcttttattcatctaccccctagccaccactctttatttttctcccagtcgtctctcccgtggagcttcttcttccctatgacagccaccagcgactcctctgcgctctggccgagccactgctcctaggccgagtcttctctagcgcagggccgtccccatggcgccaaccctaccttgcatgttttctcccatggccaagctcaccccctgctaggagctcggcagcgcttccacccccg

SEQ ID NO: 165247 - DNA, 639 bp, Zea Mays
aaccgaggtaccagcgtcccgatccaaactggatactcgccggaggcgtcttcttttcttcttctgctcatcagcagaaggatcaggctgattggctcggcaagggcgcctcgggcgagtactggcaggtttctgagtatccaaagttgtatcagcctctaggaggggcgccactaccagtgtcccagcaggagcagcatcagaagaatcctcagccagcaaatcaagcatagtgcttatctctgcatcactagggttcaggggcacctcaaaatggacctgccgttcatcatcaggaatctccccaagcgaggcaaccaaggcactaacttcttcagcagagggtcgcactctaaggcccaaactgccatcagtgacaggtggattcgacacaaaaagggtgaaggctttgggaggaggcaggttctaggccgagtatgccactggagcaccaacatttgacactttgcctctaaggatcatctcaagtcggctcaccaagtctgcagagggaatttttctgttggtaacccgagttgagtcggctaggcctcgatacatataagctgggtatgccctgtctttcaacgactgaatattcttgaaaacaaaatcagtaaccacagcttcagcagtcag

SEQ ID NO: 165248 - DNA, 297 bp, Zea Mays
cggggatggtcggagtaggccggtccacgtgcgcaggcgggggagctcgtcgacggtgagggctccggcctatccagggcggtagagttcaattaaaccggtcagcgagcttcactaggtgccaggggaggcatggacacgaggaattgaagaatggttcacctgatagctcggtctacgtgcggtggcgggcggccgaagtccggcgacggtgatctcactgttccggtggggcagggcctcgatccttgtttggagaagcttcacggctcctcggggaagctgtccagaggcttg

SEQ ID NO: 165249 - DNA, 405 bp, Zea Mays
aggcggttctgggcagatgcaggagcttgtgccgcggatgctcaagcggatgatcatggagatgaagtcgaagggggtgctggtgccgcgggaaggcgatgagctctgggagattacccacatccagattcagtggatcgcaccggccgtcatggacgagctattcccgtagtccatagatagacagctgactgacttggttagaagtttgggagttattgattgtgtcatttaaacttggcgctacacattatcacatggaataaaatgttgcggatcaggatgagaaattcgtggtcgttctacaacaaacttattgcggcatattcggctagtttagaaacccatatcttcatgggaccccctcatttcctattgtgagcactgacggacctaagaccggca

SEQ ID NO: 165250 - DNA, 821 bp, Zea Mays
aaaattctcccctcgcttgggcagcccctcacagttcaccaaactaatcgcccacacatggccacttcagcgctgggggctggacatcgtcggaccactgcctacagctcaagggaaccttaagtttgccttcgtcgctgtcgaatatttcacaaaatggatcgaggccagggcagtatccaccataacgtcgaagaccgcacaaaaattcttctagcaaaacatcgtttgccgcttcggagtcccgtccgaactcacagtcaacaatggcaaacaattcgacaacctagacttcagggatttctgtttttccatcggcaccaagctcgtcttcgcctcagtataccacccacagtccaacggcgtcgttgagtgcgccaatggcaagatttttaccgccatcaagaaaagacttctcgacgataaaaggggaaaatgggccgacaaactacctgaagtggtacgggccctaaacactacagaatgccgggcaaccgggttcacaccttttcgcctattgtatggatccgaagccatgacgccacaggagataaagcatggatcacctaggacaaacgtatcagcagtccccgacgtcgacgaaccaacttccaaagacctcatcgacagagaccgcgtcctcgccctacagactctcgacggatatcaagcccaaaccaaggcctggcgcgacaacgcagtcgtcccaagggaattcaacaaaggagacctcgtactcatccggacaacccggacagagtcacggggcaagctggagctgaagtgggaaggcccattcattgtcaagacgaaggcgtccc

SEQ ID NO: 165251 - DNA, 691 bp, Zea Mays
gtctccggccggggtcctcaccgtgcggggcgaccgtgccgctgcgcttgcggctgtggaaaagctgcacgccctggcggcagaagctgctcgcccagacgacggagggaggaacccctcgacctctaggaccaaggcgcctaccaaggtgccaaaggtgcggccatccggagcggacgacgtccccgtcaaggctgtccagctcagcgcgggttcctcccagaccactcgaattgcgggtgatctggaggaaaaataggaactcgtgctcgtcgccttcccccaagcaaatgccgacgtgttcacatgggagccgtcgcagatgcctgggatccccagggaggtgatcgagcaccatatgaagatcaaccctgacgccaagccggtgagtcacaagcctcgcagacagtctatcgagcggcaggacttcatctgaaaggaggtctggaagctgctagacgccagcttcatcgaagaggttcatcacccagtgtggctggccaacccagtcatcatccctaaggcgaatgggaagcttcagatgtgcatcgattacaccagccttaataaggcttgtcccaaggacccgtatccacttccgcgaatagatcaaatcgtggattctacctccgggtgcgaccttttgtctttcttagatgcttattctggtttccatcaaatccagatgtct

SEQ ID NO: 165252 - DNA, 654 bp, Zea Mays
agtctctactcttgagattatgtttagttgcttgtatgcaggttaatataatcaaaatggcttattttgcatccactcatacgctcaaaattatcgtatctggttggtcaggacggcgccagcctgcgcatggacacacataggctgattgtgttccagcaggaatctgtacaactgcatctaggctggggggatgggagcggcacacgtcgttggttggagcaacctttcatgtgtgtagagatgagacttgagagcatggtggttcctgttggcggcagcggtatggaggaatgtgagggcgggggcggttcgtgcaaggtgggtgaagaaggtgacaacggcagacgggtagaatggaggtgagagactgaggacgacaccgtcgaaatcgaccagaagtggagatagggcaggccgagggtgtccatctttgagacactctcgaccatgttgtattcgaaattggacggtacaagattttccatcctcgtgcacacgagtttagttagacttcatgcgcgcttcgtccctaagtatgtctagccaattttgatgagggttgggcaaccacgtagccagcaaaatcggcttggacggttctaatgcaaacgcagcgccgaaaatcatctaaaaaatcgtatttattcactt

SEQ ID NO: 165253 - DNA, 633 bp, Zea Mays
gtggaattcggtcaccggtaggctgggcggtctcatccgtcgggattcgggggcggagctctgcctcgccgtcgtgcgcagactgccggtggtgagggaggaaagccgggaccattgactcctcgatctacggtggagattggtctggggtaccgcttctggttgcggtgatctttaccgttgatcgaccgatggagggatcagggccgatcgtggtatggcttatcgtgggccatgggatcttgggtgtgtggccaagattgggagtgggcaatgtagatcgtggctgttggatcgcttatgtgcggtgcagatgagatcctagtgtaaccctgcatctcttctaatcggcgccatcggatccgtatcatgcggtcctgattagaagccacgtagtgtgtcctcctctgttgatctcggccatagatctagcatcgggtggctgatacggaataccggttcatttaaaggccaaacagatccgtgccatccggatctaatctaacgaccagaagatcgataccccttcgctacgtcacatttgctaaagagtccctgtgcttaattgaaataaactcgcggtccacatagctgagtcctgagtcttagaattgtttatgaaatagaccctgc

SEQ ID NO: 165254 - DNA, 623 bp, Zea Mays
tgcacatccgatagattatcaggtagtccgagttggtatgcaatctccccaactcgcctaaaaactcataatggtccaccatagcgaggggacaatttttcccttgactttgactctcctcattccacgaagtggtgacaccttgaggtacacatgatcaccttcctcaaattccagtggtcttcttctattatctgcgtagctcttttgcctggtttgagctagctaccctcaaattctcccgaattatcaaattctccctaattatatggacttgttcttctgtctcttgaataagttcaggcccaaagaattgtcttcctctagtctggtcccaatatagaggagtcctgcacttcttgccatatagagtctcgaacggtgacgtcttcagactggcctggtaactattattatatgagaactcagcataaggtagactcttgtcccaactactaccatgctgaagggcacaagctctcacacgtcctccaatactcgagtagtcctttcggtcagtccatcagtctgaggtaggttgaactaaaattcaacttcgcatccattttctcatgtaaacttttccaaaatctcggggtaaactgtgatcttctatccaaaat

SEQ ID NO: 165255 - DNA, 442 bp, Zea Mays
accattaaacaaagtcaaattgacgccatgaagggaagatactttcgtgacctgtctattgttagggttggaggggacaacactgcccctgctcctgaagaaaatgaggttgttgtgtacaaaagctttatgaaggcgggtcttcggttcccattgagcaaatttgtggttgaagtgttgaagatatttcagatctttcttcatcaaattactcctgaagctataattagaatgggtttgtttgtttgggctgtgagaagccaagggctggaaccgagcgtgaagtgtttttgcaatatgcacgaactattgtacgagacgaaggccactcgaaaagtgcagtatcacaacaactttggttgttatggatttagtgctcgttctaatgcaagttacccagttccaccatttcagaaaaggtggcctgggtcctggatggagg

SEQ ID NO: 165256 - DNA, 584 bp, Zea Mays
gcgatcgcacactaggtgccccacatgttagtagttgtcgtctcctaccataatttgcgatcaagccagattcccccctcctccccctaatggaaacttgccaaccgccccaattctcccaagagtcagcgtgttacccatgcctttcccgtataaaagtagaggagccctgccacccagcactaatgaagtcattatacatgtttgaatctcactagagtgaggtcatagtcgtcggcaccaagttgtcatttgctccctagtcgttgccttttgggtcattgttgtgctttgttgtgaggtgacaaagctccaccaagctctttatctccgtttgtcatttaatgtcgccaacattagtagggaactatagttcaccctaaccagccccactcttatcatgcattcgtcacctacaccaacccccatcgtgagttttgtagtgttcccatgtctgccccatgcggttggtttgcttagctaagctcttgagccctcgaacagataatgccgatcacttcctcgtcagattctagggcatcgctgtccaccacatggtcctagctatcacaaccaccgaggcc

SEQ ID NO: 165257 - DNA, 686 bp, Zea Mays
gagctggtgggttgtggtcatggccctgctttgcggagaggagcctcgggttgagggcaatttctcaacggtgcttagatgccaccgtggagctcctacgcaccgtgaacagaagctatcacaacgcaattcaaggtaaggtatttgccctatcgttcatcatactcccttgcgtgttctgcacttgtgttggagcgggtcgtggtgttgggtaatgtggtggtgccttgccgcggttgagtgccgccgtggcaccacgcggtgtcgtagtcaggaatttgatcttgatgttaggatttgtgcggtaggccatgtgattcggggtggtcatggcttcgttgaccctaggtctagagtgagattagaacctggagtcgcctatccatgtgctccggctgggtttgcggcagtgctctggctcactatcgtggtgtatggagggaagaagaagacgagacttggattgttgatcggatgatgggcagaccagatcagtggagctcaacactttggccaggtgcaatggtgttcgtagatcatctagtgagagaacgagattaaaaaggaagaaaacgattcaggtacatgaatcgtggttgtcgatctatgatcctacgggcacagttgcataccggttcagtggatggatctgtgccgttgattgaacaatgcgtggtcaagatcat

SEQ ID NO: 165258 - DNA, 905 bp, Zea Mays
agattcagacggggctcgagaaaaggtaagggtattccctcctcatagagtcctcactttcccaggtagcttcctcttccccttctctgctccactgaaccttacagagtcttacttctgagttgtgggtcttcccgactgctgagtcaagaatctttattggcttttcccggtattggagatctttttgaatctgaactgtctctgcctcaatgtggttctctggtacttgcaagcacttacggagctgggacacatgaaacacattgtgaataccggacatggattctggtagttcaaggcggtatgctgcgggtcccactctgccaatgacgggatagggaccaacgaatcgtggtgctaactttcctttcatttggaaccttttgacaccacgcatcagggagaccttgaggtatacgaaatctccttcctcaaatttgagttccctctgtctgttgtctgcataacttttctggcgactctgagcttcaagtaacctcttgcggatcagggcaaccttctcttcggcctctttaacaaagtcgggtccttccagtgtcctttcccctacattggaccacattaggggggtctggcactttcgtccatacaatgcttcgaacggtgacatcttgatactggcctgatggctgttattatatgagaattcggtatacggcaaactggactcccaattcctgtcgaacgtcaacacataggctcttagtaaatcttcgaggaccttgttgaccctctccatttgaccatctgactgagggtgataggcggtgctgaaatctaacttggtgcccatagcttactgaaggctcttccaaaattttgaggtgaactgcatccctctatctgacactattttccgaggaataccatggagcctaact

SEQ ID NO: 165259 - DNA, 600 bp, Zea Mays
gatctagatctagcttgttaggtgcgtgtagcatttgtcctagcttgaagactaagctagcagagagagacgctagaatagccttgcttaagaaggctagctcagtgagtgccccgcacttgcgcagtgtgcactttgtaagggtttaaagtctgttcttgagttctgcagacacgacaagactaggatcaaggaagaaaacacataccttcgatcggtcttgagatgggtgtcatgcattgagccccagttgggcatgatggtcagtcagttcaataggggaactggcggaccggggttatgctttactgctaaggatgggagtgctatttgctttggaaaggttggtggtgagtggagtagactgaagccatcagtgaaaccttcagtcacttctaaggtggcatacttggtctacaaagttgtgatgttcgacatatgtagagcgcactcgtcacacttagtcttgttagacaccacaattgaagctctagtagactcaagctcctaagactattgtgactatgatagatggtgtgattgaggagcctatgagagcccctccttagaaacaagtgtgggttccagaccaaatcattt

SEQ ID NO: 165260 - DNA, 391 bp, Zea Mays
accgatcttcagaaaaatcgcgccggcgataagaacgccaccgcagcgtggatggtcgtcggcggccacggtaaaaggcttttgcaacgtggcgttaaaacggggaggtgccaggctctggttaatcggcggccaccgtgccatcaccgtggttctaccgtagctaggctcgccgtacctcccttgcgcgtcgactgatcggataagacctcaccgccggccgattactgtcgctcatcgtggtgactcatcggttgcatgcccggcgatcaccggagccactgccacggtgaaagccacttttccccgtactgagctcgcctcttttctccggccgccagcacccctcagccaaattcttcaccgtcgctcgatgcgcctataaattgag

SEQ ID NO: 165261 - DNA, 341 bp, Zea Mays
cacgcagctccggcgaaatccgccgccgcgggtgcgcgtggcgccgccgtcctggccgtcggccgaagtgagatgctaggagccgtagatctaggatcgtagggccgctggtacgcgtaatatattaaccgtagatcttggatcggacgaatgcgatcgcgtaccggttcattacagtatggatctaatcctgaccgctgattcagaatccatcggtcgagatcgagtcctacccctttgcggtgcacttttgcataaagagcccctctggaattgcagattagaacccgcggtccattataattattcactgagtcgtagaaaacttcggtttaggcccc

SEQ ID NO: 165262 - DNA, 564 bp, Zea Mays
agtaggaggtgtgagttcgagtactcgctatatactatttttgcacggtgtggtgggtgggaatagagcgttagcgcggagggtgaagtcgtggtgtcattaggtttccatattatactcttaatagattagtataagtatagagatagagatatagatatagatacatacgtacttcttttcccccgtggaagcaacgtgcaagtgacagcaaacaaatcacacatgagatgcattttatctatatctaaaaggcagatttgaagatggaagctttgggagtacaatgcgcgaggccatttctgttctgttctgtccatgatcaaacagacaaagacatcagcgaattaactgcaccgagatccaatgaaccgaagaacacaaggtcaaatcagtcctcaaaaccatctgcggagcactcgcgcgccagatccatcgtctagccggcccaagatttccctccccaccgcgccgctccaacgccactaagaagccagccagccatgtcgtcggtctccggcgccggcggccggcgcatgtccatcaagtccatctcctgccgcg

SEQ ID NO: 165263 - DNA, 668 bp, Zea Mays
ccagattcccccatgcagcgcatatatattcgcgccatgctcgcctctcccacaaacctagctcagctctcgcgttcgacatcgagagtgcatgattcaccatagcagaagggcggtgaaggagagcagagagatgagagaggtaccgccgtggtggattcgaagcctacgacgacgtcgagtagtcaaaactgggccgggagcttctccgggacgcttgagtacttgggcgaccaccaatttggcatggggtgcgggcgacggccgatgaatttctcaacagaatgatcgccaccaccacaaacgacactccatcggggtcgtatgtctccgcgccgcaattgctggtaagaaccatgccgttgtgttcacctaggttccctttctgtgtagcggagtcgaatcgaagcgtagcaagtcgggggggcttcacggtgctgtgggaaggttgggtgctggagcatggggaactccgaagtcaacgacaccaaggccttcggtattgcgtcaacatcctctgcaagactggagaagggggggtggtggccggaccgcctggaattcgtctccggcgccgctctaattactcgttggagcgtttcctcgctttgcatcgccgctgcgtcgtcggcggcatcaccggtgcgacaaactgtggtaaagaccct

SEQ ID NO: 165264 - DNA, 358 bp, Zea Mays
agcagagcagtttgaggtgaggtgcagaccaacgccgaagatggggcatggcgaccggagatggggaagagacgaggacgacctcggatccggcgagcagagcacacggtcgtcggcaacaggggagttagacgtgagctgggtgagcacaggggcgagctagactggggcgttggagacaacgaacagagggtgaggagcagctgagagcaggggctgaccggtggtcaaagcttgaagaagacagcacaaactgctcacaggcgtacggtatagaagtcactagagttggagataggaacgactggtttcagctgttgccaaggggagcagggacgatcaccaaggaggagagaat

SEQ ID NO: 165265 - DNA, 500 bp, Zea Mays
atgctatcatgttacacatcgttatgcagtcgtaaacggtttattttacgcatcgttatgcagtcgttaaccaccgccaatatcacagatacgaacgtggacgagcagttgtaaatgagaatttgtttcctcccgtaactgtgcctttatttacgcgaacgtggggcacgtctttccttatctcaaaccggtggatatttaaatgttgcatggtttacgctatcatgttacacaacgttatgcagtcgtaaacggtgtacacatggtaatattcgttcccgtgattcgtggcccaaaaggttccttctatgcatgatttatgcacatttatacatatatttatgcatgcgtatatcgcctgtcacgtctcatccaggattcgtgactatcatatgcatggctgacgcatgctcgcgtacagtggtccgaccacgacctggttggcgtcctggctggggcttcccccactaacggaagcccagggcttccattacctcttc

SEQ ID NO: 165266 - DNA, 978 bp, Zea Mays
ccgacaggctgtcggacgtaagtttttgttggaacggatcccgaaggatcagccacatccaagccaggagtaatctccatattaatagccatctttggctcgcgaatatctttagagatcttcgacgttgtaggtggtgtcatctttgtaggcctcataatagcttctagcacattggccatcctttttcctttcctaggagttcctactggggcagacaccatcctcagctgatcttgcatctcaggctattcttctttcttcgaatgctcttccggtttcgtttccataacagttacagtcgttccagccactatggttattttgttttccttgaacttttgttaaaaaattctagaataacataacattagagcgttaacaattcaactcaaagttaaagaaaaatcaaaacttattaccttcggagatgcagtagccacttcgattatctcgacagtttttgtcttgctagctttagcaactgtcagtgcaggcagttttgatgatctctcaatgtagtacgtctttggccggtgggtcagaattttggctctcttttgctttgacgtggaggaggtctttggtgcactctttcgtttcaccacctttttcatgcaggaaagcggcagtcacgataaataaatccgatgacatcaaacactctatttaatttcctttttcctcgaccaccaaaagcaatatttaaggcttcgtcttcagccttcgtaaaagcacctaacatttcgtcacaagttgattcaatagcttcaagccactcgtcatctggttcgccaaactgatttatgtaatgatatgtatatttcagatgcactaatccaccctttccagcactttggcttgagctagcgtcaacatccttctacatctcccatttgttgacgaggggccgtactttaaaagttatgtgctcttgaaccaaatccctggtgcaaatgtagctgcacacaacgttaa

SEQ ID NO: 165267 - DNA, 437 bp, Zea Mays
ttagcagagagtctgctgtttcttctctctgaatttagatggagagactgagctccgaattcagtttcgacacggacgcgggacgatgaatcagttggtctttttttcttgtgctgctattgggttttctgagattgaggtggtggcacgcccaaagttcttccttccctcgctctaccgaaccacgtagtatccctgttcctttgaattctctttctgtttctagcgttggggcccttggggttggatttatgacctggatggatgaattctccgagttcccccttcctctttggatgtttctaccattggaagaaagccaagctctgttccctttactcctgccccctttttttatgtggttctacttgtgctgtgttgcaattacttattactgcaccccaagtgcgtttttcgaccaaggaaatcttacgtct

SEQ ID NO: 165268 - DNA, 773 bp, Zea Mays
gaagtactccaaggcggcacggactttccggcaatggccacggacgggaacggagctggcgggtgctccctgccgctatccaagcccgagcagtgagttcccacagccacgattccgcccgacgaagccacgaccacatccggtgagcaccgcaaatccacccagccaccacacaggggaactagttcatcagcgtaggcgtgggtcgacggcggcttcatgttttctctctccccgcaacagtggcttggcaatgatactaccggctcggatagactgagggggatggggccgcttggcactactctttatggtccgcagaccgagccgcaatactagggtaacggtggttgaaacggcttgcccgagaaatccggccctgcgattcggtcaacggagtgcagtgcaagcggtggatccgaaaactgggggggggggagaagaagcttctgacgtgcgggtcccacccgtcatcgccacagcccgaagatcccacgcgctcgtttgactggcacacaggccccacgtgtcggcacgccacccagggcgcgcggacggccaagttgggccgcgcgggatgaactgtggggatgggccagaaatgagggccgcgacccatataagttgttttccctttttctttttatattttcctttctcttttcccttttagattttccaattcaaatttaaattctagttttaaattcaaacttgtgacaaatttatccttttattatattgtgccatgacaagttccaatttggagatat

SEQ ID NO: 165269 - DNA, 549 bp, Zea Mays
catgggtagtggcccgacagtgtctagcccccagcgttgaagtggccatgtgtggacgatcagctttgtgaattgcgaggggttgcccgaacggggagagaacttctggcaggcttcgcacgacctcgtgactcgatttgcggcgcagattatagcgagccagtagaaaccttgacggatcaccttggcagcgagggccctaggccctgagtgccgcaagtgccgctgtggacttcgcgcaggatctggaggccttcgatctctgtgacacatttgagcatgggttgactgatccctttcttgtatagctggccctcaataagtgtgaagccccggcttcggtgtttgaggggcttggcctcgttgacatcacctggatggtaatatccttgcaagaacagggttattgggcccaccagtcttcggccatgatgaggttgacaatgcgatggccctcggcgttggtggttatttgcagaccctctgggttgcggatggctggtgtgccaatgacgtggtagaacacgtcggagggcagggctttgcctc

SEQ ID NO: 165270 - DNA, 467 bp, Zea Mays
acctaggtcgctgatagtgcaaaaaggccctaaggtttctaaggttctcaacccgcgctccctcctcccctcgccggaacaatgcttagagtacgacgtgaaattgtggctcacctggtgcggtagcctgtcgggggctgggtcatggagctttgggttggtcaggggaactcgagggaggcggtgatcggccgacgacgagcggagcaagccagtccacggccgcaggcgggtgtaggtcgttggtgagcttcaatccgggggcctagtgcagtagagcttcgcggcaatgctcggggagctttgcggggccttggttaagctttccacgggctcagattgggcaatggaggctcggagtggccggtcctcgtgctccggcggcatgcagtgagtggtgggctatgccggggcctcctcggcgtggcagagttcaatcgaacgaggatacaagctttgagaggatg

SEQ ID NO: 165271 - DNA, 472 bp, Zea Mays
gtcctcgaggtcttgttgcatccttaaggctttgcttagcagtaagctctgacaaaataaccttcatcagaaaacatcttcatatcaaaacaataaaaagttaagggaagaatttcaccttaaagttagaataaaataggctaccggccatatgttgtcgtcggtatctgctaagatcagtttcgagcttcgggaaaccaacacttttcgataaagtgctgacaaccttcgccccaactcggtccagtaggcatcctaagctctcttcggcaacaccgccgaagagcagtgcccctggctggtacccgcacgatatggcatagtccttgacaattcttgcccaattatgttttgaaagttgaaattttcttcttccgaagtatcttcggcaggctccttctcttttccaggcatcttctcccctttttcaggcactacggccggggtttcctcggcagctgcagcagtttct

SEQ ID NO: 165272 - DNA, 423 bp, Zea Mays
cgacgacccgcctccgtctgcgcgttcggtcgagacgttgtggcgcgtcctaaagcgatacacagatggtggtcccccatgcacacggctcaccgtgtactaaaaaaaccacacaactagcgttgcctgtaatatcataacaccccatgacatagtgtcgcttcgcctccaatccacccttctggtaagcacctccactccaccaccagtaatatcacaacaccccatgacacagattctgctcaagactctacccatccatatattgccattctgaccactatactaaatatttgatgatatacttgctcgtttgtatgtttgcttgttcatgttgcatagttatcggagtgttcatgtcgtctcgtgaaggccagttttacaagtctacgccagacggtggatccagaagttagttccacg

SEQ ID NO: 165273 - DNA, 953 bp, Zea Mays
gaatgctgtcggcactactgtaaatttgcgttcctgatgacctgtagctactgcaagagcaatagtacagccgtagctgcatagtactagcagggataattgtagagcagaagccatggcgtgggattgattaacgactagtgatgcttatgattcgtcgatgagtgagttaaataggagatgggagcgagttcctgaggacttggtccatcgcttgaggtgcagcgccaaaataatgtgacaaaataagcgcggccctttctacttgtgggaacatggtctttcatcgcttcatgctgctgccaaatgtatgctatagctagccatatgtccagtgaggtttttcttttataagccttattttcagaatgcttataaaagtagcatatagtataaatgtagcatatatatttacaaaatcaatttatctctctctcaccccataaatttcagacttatatctacacttcgaaaagttatgaaatattaagttccaagctatatattgtagatcataaagtacattctagatactcccaatataatagggtttttatggatatgaaccgctgttaggttcttatgatttagcgaaaagatagttgaactggctataatacaccctaaaaatatatcttgtcttttttcctccctgacaagaagtgtacatacccatgtcaaatcattctattaatactaaatattaacatttgggcaaaattctaacatcaggcattgacacagggccaccttaccaatctgcacaataaaaacacttctaacctaacatatatccaattccaaattttaggaagcgcacatagctagaaagacagcaagatttgaaggtgaccaatggatcgagttaggtacacgggactgttgttggtcacttgttcttatttctgtaaattatcaaaacaaggcaacaaaattaagaatatgagatctcc

SEQ ID NO: 165274 - DNA, 451 bp, Zea Mays
cgatctttcgttctccatcttcatcaatcccttcaccattggaattgagtagcaccagagtaagcatgctggttcgaagatgcattactatggctacttggagacactattgtgtctatagtaggacaaaatagaggacgagcaccatatgggtgaggaacaccaaatgagggaggagcaccatatgaagcagcatatggagaaggagcaccatacgaccgtaaggaggagcatcatatggatacccatatacgaatatgaaggacggtatgaacaagcaaaaggtggaggaacgttggtggtagaagctttagtggtagaaggaggagaatcagtggtaggatttttattgacaggtggagtatccatagataatatggatatagaggaggagggtatgaatatagaaatagagattgccaagacttagggaacgagggcgagtaggaat

SEQ ID NO: 165275 - DNA, 631 bp, Zea Mays
tgtacaccggagaagtttgagaaaagtcccgatgatgaaggtggagagagctcatagattatgcggtacagtgacattggtgggacaaactccatcaacgtaatcaagcttcctgaagcacaagaagaaaaataaaattaagtcagtgtagttttattttccaatttgtacaaccacaaccatcttaaaaagcctttcttaataaaactgtgggtggtaccgtcttaccaacaatggtgccaaatgtaaccagcaagaacacataaagtaatgatatgtgaagaaagtagcaaaatataatatatatttggaaacagctcggccccgttcggcagcataggaacagttccaagccaggaactgtttcaagcctatatttagtgcatctggctctttcgctctttctagtacaaaattaatccaattggaacacttttgcctagaacgcttcttctccttgttcggcagcctaggattggaaaaggttgtttgagaaaaaaatatgatttacaggcttacaacttcagaatgtgatagccaaacatgaatcaaccaaaagcatgtatgaacaaatgcaaagaaccatcttgatagcgaacttacaaacacaaagaataatcaaccaaaggca

SEQ ID NO: 165276 - DNA, 403 bp, Zea Mays
atgattaaaacaagtaactgctgtattgctgtccaaaaaaattctgctagtgcttatttaattgttagttcacccttttggctaaaaatggttggttagcactaaattaatatagacttgccatgactaagcgtaataacgcatgtgtgtcatgttttatatgtttcttctttagttgattgtgatatagaaattccatagacattgatgtctacgtcatcggttaaacttgtgttggatgctttggtgtgataaatagaagaactaaagaaaagccatagcaaattaaataaacgcgtgtacctatggggtcgtatttgtgttgcgtaaatatacaaaatgtttgtcgtcttttagtggtgttaacgttgtgcgctcgatgataggtagttagctaacgcta

SEQ ID NO: 165277 - DNA, 810 bp, Zea Mays
ccagggcccactagtgagtaggaaggcgtgagaaaggtccactccagatggacccgcctctggataaacccgaggcactgagccgagggtcgagcgaggtggagccgaaaggggggtcgggtggatcgaggggaagccactcgagtggatttcacacatgatctggactgaccctttgtgccacattaactactcctggcgttgagccacagagggtgagtcggtccacttaccactcataacctatggacccctaggcatgcgacccactcatgatctataaagccgaagcctgagtgcgctagccacctccacgccccacaacacgacgagcgtgccgagacccaggctacgacagcaaggggtcgcacggcatagaggcaacaatgatgactctgggacccttcaccgcccacactacatgtcataaaaagtacgaccagggaagcccagacgaccagggcatgcatggataaacacgaccttaccagggtaagacgtcctattttaccacagcgcagtagctccttccttgggaagctaccgatagctgaccccaccttggcctataaaagggagaggtcggccagaacacgagggaggcacatatgcaaagaagagatgcacccgagacgacagacacacacactcgacaaaaccaaaagactcgaaggctagagccaaggcgtgagctaccatgacatccaaggcttagcttagaactactgtcctttagtgtttaggtccacccacgcacaagagacgtgtgagatcctccctctctcgcccgcttgtaacccctactacgag

SEQ ID NO: 165278 - DNA, 1356 bp, Zea Mays
cagaaaacatgatttggtttatcaaacaaacagagcttctatataattcaagaattgccgcattctagagacttgaatcattctagcactttaccatttcttagagttaaattaattaaatgaggactaacaagtagacttacaaattttatccaaatcatttagtgcactaaaattactacaaccaattaacaacgcattcttcacgataatcacccaacaatttgcgttttaaattagacatcacatgagcactactactttttacccgcgatcataaccatacgcatttagactataacaagtaatccatcataactacgagcttaaccaaagccatctaacaagttaattaaccaaaggaatggcatagcccgccatacgacatacacatcggcttgcctattattaacgcagtccgagacaccacatgtatatatatcacaatcacttacgccatcgactcttacttaacatcagttggctaacgccgtataagacttagcaaaccattttagacattgtaactcgaaacatgggttgaagcaggttaattagtttttcttaaccatttctccacttgaattagttaacacacaagtcacttaaaataccatattttaggaggtctaacatggaggcatttacacatggcgtaaaactccataagactacatttgctactgacaccaatagtacctactaacctattattcaccatacgaacacaattactcgccgcctactagtttctaacataatccttacataactcgtaatcccactactaactaacaataaatcacgcacgacaactaccacatcaaccggttaatttatttggacaccgtctgcctagcttgccactagtaccccacattttgactaatgctcaaaaatacatcctttattcgattatacaacagcgacctaagcgtcatgttacccagtgcatacatctttcttcgtcgcgagtataaccatattacggcatacacccgcacacctcaatcaaatatcttacgccaccaccactataatacaccacggcacacacacgcatacgtgtccccactgcattctcatgaccaattttagcacaattaattatgacaatgtttatcgactagtcaagtgaaacactaaccgatccttcgcacatctcatctttaaaacacgaatcacatgtcacataatttatatttccgatccactctatcctacaccacgatgaatacataaaatatttttaacatagacgaacatcttagccgactacggaaattaccaagcatgttttacgctttattaatttaccacagctaacacactactttacgacgaagtgttttaaca

SEQ ID NO: 165279 - DNA, 512 bp, Zea Mays
ggacggcgggttgatttctataaactacagggactcttttgaatgtttgctcggccgaaagggtgcgggccacgatccaccgtccgatctacaacggacgcatcagattagattgcctactctgcgaaccggtacgctattcccgcccgcaagattaggaatcgacggcacagattttattcaccccaaagtcatttgatccgcccgatcggatctgaacggatcggatttcttgacctaagcgtaacaccccagggttccatcgtagccgatcagagggcatccaacggtcctaaacacgccatcgtcctcgagctcccgtgttacggccgcgcacccagagccacggcggcgctcgctaccggcgggcatccaccccgcgctcccgcttccccattcgtcgctgctacactatgcgcaatgcataacgaggacaaggatgggcttgttaccggtaatcgatgccacggcgacgctggccgcgacgaagagcggaccgcggcggagatttg

SEQ ID NO: 165280 - DNA, 458 bp, Zea Mays
cgacgaaggactcggttcacgcttccgtttgtcaccggagcgacgcggcgagccttgacctttcttgtccttgcccatggctagatagaagagaagagggggtcgagaaagaagcaactgatgataaaaggatgtgtgaagataataacggggcaagcaggctatttatagaggccggaggcaactgttcatctcctatcacactcaccgaacagtcgcaagtattcaataagcaattcaaatcgcctgaaggcaagtcaggcagcagacgtcgcttcgcgtaacatgacaccatttggaataaggtcaactgcttgggtgatatgattacactccgcggtcacgtcaagttaccactccaggacagtgtgctaaacgctctacgtactaagacgtcccttggtcacacccattggggagtggacggctaggaattttcaatagattttctgaagcag

SEQ ID NO: 165281 - DNA, 529 bp, Zea Mays
ctttgttctaagcaatgtgctgttacaaatttgatcgcattttcagtaacgttttgctggttggagctaatggatgtcttgatcatactaaaccattaacaaaagttagtcaagctaaaatattttaaaatccatgcattccacaaagatgattcacaacgtggagcatcagtgtggtatgaagggatgaggtagagtgcagctcagctgatgcattctagccttctgaccccattctagggacagaccccatcactcgtgcttctgaccccattctacgacggtgctgaggccaaattcagcacccaccagtctgcgaacctgtgatgccccgtcgctgccgtgagctgtctgtcctccagcgacccttgcagaaccgtcctcggtcagagcagaacggcaaagctctgttcaacaacggtaggctccctcgcccagctggagctggtgctgcagcaacagcaacatgtcgtcgctctccccgtccccggacggacccgtcggtaggccggctgctaccgtcggtctg

SEQ ID NO: 165282 - DNA, 563 bp, Zea Mays
gcagaacactccttcggcatttcccagtcattaacgagtgaccaaaccttgtaagcattatgctcctgtaccaaatctctggtaccgatgtaagtacacacagtgttgaaagccatcaaacacgcttgcacttcgtttccacttgtaattgatggccttctgatgccgaagcgtgaccgtatgggacgctggataatacccttcacatcttccctctcactcagatcattcttcacatagaaccactgtttcatccaagtgtccgaccacttcttttggaatgtcggcacgggatacctcacatcaaagcggtgcacaaagctgtagcacccgaagttgttgtgatactgtttcttcccagttgcttttgtctggtaggataattcatgaatgttgcagaaacatttggcatctggctccagcccttggctcctcatggcccaagtaaaagcccccactttaattaaagcttcgggagtaagctgatgaaggtatatctcaaatgtctttaacacttcaaccagcatctcgtgcaagggaaaacaaaacccagccttcataaa

SEQ ID NO: 165283 - DNA, 472 bp, Zea Mays
gcccggccgatgtgtcttggccggatgcccaccaccaaggcggccatcactgcctgctggatttaagctcgagaatggcatggtaacagttcctgccacagaagctgcagtggttgacaagaaggcagatgccaaggagattactgggttggaggtcaaggaggaaaaggcagtgaaaggatgcgtctttgggactaagaggaagttccctagcagacaagtgctggaggaatcgccatatttgatgaacttcatgaggagaggaagcgtacaacagtttgtaaagagcccccctctgtttccccggcaacaataaagattaacgggaagccagcatgtacatatatcatggactatgttctccagaaggtgagaggcttgttcattgttgaatttgtaagaattatttctattgttgcaaatttgcaatgtgaacaaatggaagtaatctgactacattgtctaacctgat

SEQ ID NO: 165284 - DNA, 765 bp, Zea Mays
atgggcttgagccaaccattcggcccactcccaaattcaaccgcacggcccaactctccacccgcctgcgctgacgacctggtcccacactcccacctggcagccgttacgcttcttgccgactgacatctggggcccattggcagtcgcgcctactgtccgttcggggtgagcgtttcacaggccgctggggcccgttcgttaggatcttaccgaactctccgcgcggtccgcgcccacctcgcgcagaagctcgccgaagatctcggcctccgtggacgaccccactacctagcctgggcggcataagactctcgatcgactcccccttctccttgtcgcagctgaaacacttcttcctttccacctccctccagatgtcaccagagaggaacaccggtggttcatcgccgccgtagtcgaaccacgttatctccgcccatctgcctcgatagcctcgtcctggacgttcgtgtggttgcgcggatcacactcggggcagaagccaggaggacgcgacatcaactgggcgggaattcctcgtcgtagtcaagtcttccccgcggacctgcaccgtcgcgtggccagcatcgctgggacttcgatcgccgttacgtgttttcccattcgattcctataagcgcccgcatagagtaggacccttttggatgtcgagttagggcatatttggggcgattgccgaacgtcgggggcgcaccaccgtacgtagcagatgggcggcgccgccggggttttaaccggagg

SEQ ID NO: 165285 - DNA, 469 bp, Zea Mays
aaaactctcgttcactcgagcggagccataagacattaccttacctctagaattatccacgaatgtgatgtattccttaccaataacggggtcaagactggagaaccattttttttgcttccggtcatgtggcgcgaacagtcgaaatccatgagccatatgttctctaggcttccttcctgcatcaatagaaagacacggggtgaacaaatggcacaacactggggttaggatattgagaataataccagtgcttcggcatctacccacaaaaagtgttaggaaaacaccacccatcccccgtctagaagggaagcgatcaccataaggaaactatggtccactagggaagtaagaaccaaagccactgccacgaggtccttgaccatatgacacatgactagcacctcgtcgggcatgaccaccatgtggtcttgctgtctcaggctagcagcaagaggcaaagcac

SEQ ID NO: 165286 - DNA, 804 bp, Zea Mays
ttggtctcccccctgaccccttctgatgataggtctcatctggaattgtcagggtcttggggcgagttctaaagttcagtttctgaaagaactcattagagatgagaaagttgatctaattggtctgcaagaaacccaaaaaagccattttaatgattcctggcttgattcgctggcgggcaacaagccttttgcttggttttttgcccccctaatggcaggtctggtggtttattggttggttttaatactaatgtgtttgatgtacgtgaaaacgaaattggtgaattcatgattcgtactttgatttttcatagagaaaaaaatcttatatggaactttgtcaatgtgtatggtgctgctcagaaggagaacaagagcagattcttgagtgagctttcttccttttgttcgagaagtcgtgctcctttgcttgttggaggtgactttaatattattagaaaagcaaatgaaaaaaacaaaccgggtggtgttaataagtggagcttcctttttaacagtataattgagcagaatggtcttgtggaatttgatttgaacaacagattgttcacatggtctaataataggatggaccctacttttgaaaagttggatagattcctggctagtcctgagtgggatcttgcttacaataatattattgttcgaggtctcaacagatccttttctgaccatgttcctttgtgcattcaaacggatgttgtctcgattggaagtagagatttcaagtatgaattatgctggaggactagaccagactttcacaaaaaagtgatagat

SEQ ID NO: 165287 - DNA, 707 bp, Zea Mays
ctcaccccccgggaggaaaagagtgcgggccggaataaaattgttttgcgaattacaagggcgagctggccctgaggagtcaaacaaaaaatttgtggagattatcaatgttccaagaatgctccaagtcctcgccggatggcgttgtgagcctgtacgcgctgggggacgccttcgtcttgacgatgaaagggccctcccacttgggctccagcttgccccgggactctgtccgtgctgtccggacgagtacgaggtctccttcgctgaattcccttaggatgactgtgtggtcgcgccatgcttttgtttgagcttggtatttttttagagcctgtagggcgaagacacggtctccgtcgatgaggtccttcgaagtgggctcgtccacgtcggggacgactgacgggactgtccgtggtgacccatgttttatttcttgcggggtcatggcctccgatccatatagaaggcggaaaggggtgaacccagttgccgtgcactcagtcgtgttcagtgcccagaccgcttcaggtaacaggtcggcccacttgccctttttgtcgtcgaggagcatcttcttgacggctgtgaaaattttgccatttgcgcgttccacaactccgttggattgcgggtggtacactgaggcgaaggcaagcttggtgccaatggagaagcagaaatccttgaagtcttggctgtca

SEQ ID NO: 165288 - DNA, 562 bp, Zea Mays
ccgagtgctgggcgtaggcggcgaagggcggtggtgaagcgtagagtgagtggggtggatggtggtcggcttcgtgtgggcagggatggcaggcgggaattgttgtcctcgccggttggggtgagtgtaggtgagggggagttgcgaagtctttttgagggtgaggagctgaggatgatgctatttaactatagggagatgggtatcattctgaaggttgaaccaatgtaaggtgtgatgccctcgctatacgtatgtaactgtaatttgtgtgaagaggctgagtgccttcgctgatctggtcgtgcccgtagtcggttgttgcacgtttattatgccctcgctgtacgaggtctagcgcgtttattaggttggtccggcggcacctgtagtcggttgttgcacgggtagtcttttgagagagacttcggtttttgcgcacttgttgtgctagtccggctgcacccttaggcgtcttttgcacggatagtcttttggggaagacttcggtttttgcgcacttgttgtgctagtccggctgcacccttaggcgactttgcac

SEQ ID NO: 165289 - DNA, 541 bp, Zea Mays
gggattttctaggtgtcctctgtttaggagagcttgttttttaatgatatttgacttgacatctatatcaaactttgatctgcttgtcacattcggaacttgtggggaagggacttttatcttctttgcacgatttttttctgaaggggaaggtgcagctgatctgaattggcgcttcaaagttggagcatccatgaaatcatcatcggacaatgtggatggagctgaaggaggatttttttacacgacaagctagtgcctttctacggacacgatgaactggtgctggttgtggatcagtctgctgctggatatgtggattatcagcatgatgtgctgagctgctagatcgagtttgtcttgaaatgtcaacggaaaaaacctcctgacttgactcaatcgttaatctttttgcattagttggagggcgatcaacagatctcatggttaaacgctaaatatatctgttgaaaaaaaaatgtttttaaatacaatgatttatgcatgaatatatgcataaaaatcgaatgttgtctctaac

SEQ ID NO: 165290 - DNA, 664 bp, Zea Mays
ttgatttgcagtctttcaagcaagagaagaagtccgtcacagagtatgaagtgggctttaacaaaatggtctgctttgttcctcatgtggcttacaatgagttggagaaggcgagccagttccatcagggtctgaaacctttctatcaagcatgctctaggcgcctttctgttggtggattttcgtactacagtggagtaggccttgggtgtggggatgcaacatcagtacaccatggagtcttagaagtcttcgggtgttgatcaacctcatggccaggatgcgaggaggggcaacactgggggtccagcccacaagaggggaaagtcacagcaccagcgccaccatccctaccatggcaaaccttctgaatcgagtacttcaggacggagtactcagaggtatcgggctgttcctaagcccaggctggggctagtgtgtttctgttgtggtgaagtgcatcgtcgtgccgagtgtcaggggagtggcaggtgctctatctacagccaagatcacaaggatgtggtgtgtaggaggaatcccaatgggaatctcagatgggagccagtgacttcttcctcttctcagggcactgtcaacatgatgtcaagcactgagcagcaattttcagtaccaccccctccgcagcagttttatgtgcccg

SEQ ID NO: 165291 - DNA, 673 bp, Zea Mays
tgactttggagcttcgtgacttttgttgttacactcgatggtataactacagatttattacaacgtgtcaatggttgcaccttctcaaattgtttatgaggaaggaacatgaagtgaaagaaatgaaaattacaaaagaggcatatcaagctcttagtccagcccctttgtagtttcagtaaatgtgcctggactctggaacaatactgttgactggttgagcttcggactccttccttgcatcgtgctgctactgaacttggcgctatccttcaagttgttgattgtgggacgaagttggagccagtgcaggtggttgtggtaagcgcacgcagctggagagtgacttgccgaagccactgaaattgtaggttgtgaaaatggctgttggttgactacatactctggaatgtatgggaaataacatgaagcagtatgcaggacttgctttggtggattctgtcgtgcttcggcctcagctatttccttctgcttctgtattgtaacttggcatgtgtgccccttatcctctccatagaacaagcaaaatagtcttcttggctgagagttgaatcttcctccgaagctttgtccccctttgtctcttggggctggtggtccaaaggagttatgttgtgcccctgatgactgagaactgtgatgttgccattgg

SEQ ID NO: 165292 - DNA, 307 bp, Zea Mays
gtcaagtggatatgaatgttcgtttctttcatttgctacatctatggttctattgattctctattcggtatgtgtggagtgtggacaccaccatgcatcgagttccaacagaaattttactgctacagatgcaagagcacaactatagtgcaaggttgccaaaggaatggtagatctatgcagattgattagatcgagccataagtcatgtgagaaggaaaatccagatgtgtcaacttcctagtgtaaaatatcaatctttttacctttttccttctttacttgagactatcagattacttccatt

SEQ ID NO: 165293 - DNA, 779 bp, Zea Mays
attcaccacaatcatcaaatccggcatacatatatatcgatgcgctcttcacatagtaatttgcattttaacttgggcatcacatgaacactactaatttttacctgcgaccgtaaccatacacatttagactacaacaagcaaatcatcgtgattacgagcttaaccaacccatctaacacttcggctaactagagcaacgacatagcccgctaaataacatacacgtcggcttgcctattattatcactatctaaggcacaacatacaccacaacatttttataaacatacatattcacatgtatattcacatatcgaccaaatcatacgaaccgtaaaccactaatctctaactcgaaaccatcatgcgcttacttcccaattcatgaacacataacacgtattgacccgactcaagatatagaggaagcgataactactttggcatgtcaccacctcactatataagccaaaacaatttctaccatcgactaagagttctaagtattaaacacattattactttccacgcacaaataaacctcaacgtaacactagtggcaccgatggatttttactaaactcatcatgcgcataacctcgtctcgtatgcaaccatatggtggcgtgcactcgagacacttcgatcaacgtggcacgaccactaatatgaactccgacactcacgtcttaataacacatcctccacgcaaactagcattttctaaactactcgtcacattactaaatatattcccaatataatcacgaatccca

SEQ ID NO: 165294 - DNA, 553 bp, Zea Mays
gttaactctcgaccgtccgatcaaatatcgaaggccaggattagatcttggcccatagtgaactgttacgcgagcatagccctcggatcacagatctacgactcgaacattgtccacgacaccgctcaatctgatccatccgatcacaaatcagtgggcagattttaatgagccgaaagggtatgctaagcctaatcgtagccgttcacacagatccaacgattgcaagctctcttccccaacccgacggcgtccaggcggtggagcgattctagccacggaggagacatcgccggagttcgtcatcatcgtgcacaaacgtccagaccttgattccctagcgctacacatggcagagacaaaagcaaactcaatggaggtcttcttaccgtgcatggcagcgagcggagccctaccaacagcacgacgcggcggacatgttggtcacggcggtgacccattctctctcttggctagaatggcgctcaagggaagggcgtctgggcactttgagtcggcagggtattgcgagggagagtcgcgccacggtgtg

SEQ ID NO: 165295 - DNA, 1147 bp, Zea Mays
cagaatgcgtttcttcatgcattcttgaggaggatgtatatatgaagcaaccaccaggttacgaagacaagctgcagccacaccacatttgcaaacttgacaaggccatttatggtctgaagcaggcacctagagcctggtattccagactcagtgacaaactattgtagctaggttttcaagcatccaaaggagacacctctttgttcttttacatcaaggaaggtatcaccatcttcttgcttgtatatgtcgaggacataattgtagcaagttcatctcaagatgttgtctcagctttgctcaaggatctgaaaactgattttgcactaaaagaccttggcccattacattattttcttggaatagaagtgcagaaggtagataattgtattcacctctcgcagagtaagtatgcctcagatattcttagtcgagttgatatgataaattgcaagcctaccactacaccactctctacttcagaaaagttaagccttcacaatggtgaaccccttgggcctgaagattcaacacagtatagaagcatagtaggtgccctacaatatctaactttgactcgtccggatcttagttttgtagtgaaagtgtgccaatatttgcattcacctacaacagatcactggacagcaatcaagcgtaccttcgatacactcttcactatgggttgaagatttcaatcaaagtcaccttctctgccagtcagtgccttcactgatggagattgggctagagatattgatgacaggtgctctacagggggatttgttgtctttttgggcagtaatttggtatcctggagcgcccgcaaacaaccaaccgtgtcaagatctagtactgaggctgaatacaaagctattgcaaatgccacttctgagttgatgtggattcagtccctattgaaggaactgaaaatttcttgtccccctaaagcaagtatctggtgtgacaatattggagctacctatctgtcatgtacggtcacacctataggcgtcgtcatgacgccaggagggctgtggagcgcgcgaccaaggcaggtgccaccgtcagtggctaagttttggaaagttaggatctagtttccttttgcatgccttaattataggagagattggagtttcct

SEQ ID NO: 165296 - DNA, 795 bp, Zea Mays
aacgacgtttgaacgataaacagtgccataggaggtttggaatttgaattgaggcacgaaacgacatggaattgagccgatacttcacgaataggtttatataggtgaatatgagtgaagtgtgtgcttggtttgaatttaggcgaagaaaaagagatttgggcactcggctcggaaatgatcgctcgaaacggggaatttggtgaaattaaagcctggaatctcggattggcgtgaaatttggcaaatatgttactggaagtgttgtgaaggtgcttgaaaaatttgggttcaatcggggcatttttggctggtttgggcatttcaccgaacacgtggtgggcggagttttagggtttcgggaaaatggctatttgaggtggaaaaaccctcccgaaggagctaggaacctgcaagaatactcaaggcacacagagggacacatatgaccacttggtttcactggatttcacagaaattggaattgaactcaaggggtggaaaaaggggtgctcagcctagagaacagagagagagaagatagaggaagaaaggaggctgctcaccgagcgaggggaggagcactggtcgaggtcgctagagagcagtggacgccagtgagggagatcgccggtgagagggtggatcgccggagagagagagcaaacacagagaacagagagctcagaggaagaaaagagcctctggctcggtctcgggctggaggccgttttttttaaaacgcgatatgggcgcaccggacagtctacagtgcctttccggtgcacaccggac

SEQ ID NO: 165297 - DNA, 907 bp, Zea Mays
ggcgggttgattcttctataacagaaggtctctttagcaaaatgtacccgcgaaggggtatctagggtttctggccgttggattataaaccgacgcataggattaaatctaaacagcgccaaaccggtacactacgcatcccgttggattggagatctgtggcccaaatttaatgaatcgcttaaccatcccctgccaccggatttgggatcgacgaccgctagaggcccaggccgaatcagttttctttggtttgatctagaccatccatctatcaacccatggctagcgatttctgttaaatcccccactcacaagacggtggcgccggcgccagtcacggcagccgccattgccgacctgcgccgcctagggattaagtgcctagaacttctatccgaagggtgctacgctatgcagaagtgagggaaaaacactgggagcgaactcaccgaagacggcgaccgagatgatgctggcaacgacgaggggcgataacgcggtggaggaggaacgccgacgagaaattgcccaagcgtgaggcgatttcacacacctgaggctctcggtttgagtacagcgaccccaggcggaggtccaagacacttcgacggaactgatttggcgagggaccgcggttggactggtgctgatgtcgccctcccacacggcgatagctgtagtttacgcgacacagcctggcgaatggagctgttgggtctcgagaggttggccccagcgccctttatcccggtcagcggaggttggcacatgcccacatgcgccgcatgcaacagccacacccgagtctcccggcgtcaccgtgagtccgtgaaccatggcgagaagaaaggagaggtggagacactgctccttgggtcccacatggcggtgtaatagggtcgcg

SEQ ID NO: 165298 - DNA, 450 bp, Zea Mays
cataagggtagcattagcatggactgtagagaacatatgcaattcccttttccaaggccctggcaacaggtgaaatgtattctacaatccaaaaggggcttaacaagccttgctttggtacatattcttccaatctctcatcatgcatggggcaaggatacagcccggatgaggtcgtttcaggcgtacaaaaggctaggctttccttttcactaactacccaaaagttaaacccgtttacagacaatgtaccttgatgaagaagacaaaagacgacaataagggattcagcagtcactacttacagagcgattgtaattttgctcgactatacgtgcattcatccacagcagacaacactacacccttataggcctctgcaagtatacaaaacagctgctggatacaatgacagtgcatttaatttgattactaacactgatcttaccc

SEQ ID NO: 165299 - DNA, 401 bp, Zea Mays
taaagaaactggattaggttcaagagtataactagtagatgcctcactacgtgctgcaactctatccttcataaggaatatatcttcgaaaaaggaggcatcacgagattcagtcacggtgttaacatgcacatctggaaaatcagatttaatcaccagaaatctataggctgcactattatgcgcatatcctagaaagacacaatcaacggttttttgtcccaatttacgtttcttccacgcaggcactttaactttggctaaacaaccccatgcacgtagaaatccaagagcaggctttctacctttccatccttcatagggtgttttatcacccttagctgatggaactcggtttagaacaaagcatgtgaccaaaatagcttcgccccaccatgact

SEQ ID NO: 165300 - DNA, 919 bp, Zea Mays
ttatcaatccacatttgatctaaatagccacttgtatatattctgcgagccttcaaccaagcagcgtggaatagctcagtccatttattaatcttatgccaacggtctttagcttgcttctgagttctcattctatttttttggcgttgtcaggttgtacttcttaacaacatcaccccaatactgttcatttctcttatcagctccattaattgaatccatcgaattctctaaccaagcactcatctataaagtaatatttatgttaaagctaaatggcagcaactcacaacagaaaaatagatttaagtaatactaaccagcctaacatcttcttcttgtgtccaaaggatccgtttctcagttcgaacagcttcatcctcgttgtccacatcaatttgattctggtttgcttctgcagtcgaagtacatgtcctcatgccaacaaaatagaaattctgcgataatgggttgttcactaggtttataaatccacctggggggtgtggattgttatccctgaaagcatggatcgaacaacatcataaacttactaagaaaaaggaaggacatcactcctgttagttacagtttaatctgcaaataaattatagttgaataagcaactactacatggttcgtgtaacaagacatatatgaaaaccacaagctaaacaaagtgatgaatcgagcaattaccaagttgttggatcggattgtggagtgactggagaagatgaaccaggactggatgcaatatcggaggaagccatagttgcaactcttctcttcagcccaagtgttcatgtagaatcaatggctgctgttgcttgcccagccagcagtggtggtcttccaaacaggaccgatgccaccggtggctggcctgtccgaggaagtcctgccgctgccgtatggc

SEQ ID NO: 165301 - DNA, 829 bp, Zea Mays
cttagataaatctgatgatgaaactaaaaatcagtctctaaaaaatgttgagtgtgagattggaccatctgtgcatggcgcctgaaatatggcttacgttttgatatatcatgaatttgtggttctgatcgcatgatatataccactctatccggtggtacattttatcttaccattgagtataagcaacaatatattactttgttactggcgggaagaaacctgtattttaagggttaaaggagtggaatgtatggaacatttgaaatagcagtgtcaaatgaaaggtacatgctacgagatgtcactgttatatattgcagaggactatatgtttctcagtccagatacgaacgttgggcaaactaggatgagacctgatgctctaagagattcgttcgagagtctatacaagtgctaaggaaaaaagtacagggatatcaaacgtgctattggaatcttcacagttcatatttctgaggcagtacgtatccaatgtgtctacaaggccgtgtgcagatcatttttgacttctgaccagcctacattagttgccacaatcgaaaactcattcgggaatatgagtattgtggtaaaaagaatatgaaagatataaaaaacagacttgtaaggttagcttcttcatgtgtagaagatcttgaaggtgctaacgtaagaacatcaatattagtttttagagagatcaagatcattctacgagatgtttgtactaaagatgttgatgaggagaagcctccaatggttgagaatctagacgactattataatagaatgaaattctctgaagtgtttaaagcaggaagcaagc

SEQ ID NO: 165302 - DNA, 545 bp, Zea Mays
gtgctggtgcgttggatgcgtaattacctagcggagttccttaaggcttcaatttatacaactcaacagcggtggcgctcaatttggaggagaagcgctggcgaccggggagaggggtgagtcactgtggtgatcaaccgtggcgatcgtagggcaaggagctatggcggtcactgggcagtcactacagctcacgatgacgcgataaatgtcctaaggcatggcgcccccatggtgaatggcgaacacgccggtgatggccgctcggccacgtcgccggtgcgaacagatgaataaccgagcgcatagtaattccaagctcatccgcggcaagatcttttatccagggattgttatccgtgtttatccaagcatgaatcacggcattggcacgaatccacgcgcaagatcgccggcggcgaggtgcactacacctgtgattatatcgagtgcactgtaccatcagtttctcattcagtcatcctgacagaccactttgtggagcctagatctcaaattttcatgtgaatacttactaatccgtc

SEQ ID NO: 165303 - DNA, 485 bp, Zea Mays
gggataatagctgagttatggcaggccctgtcggcgtttaagaggtaacgaccgagtggtatttgactctatcgacgatttagagataacaaccgagctatggcagatactgtcgacgttttagaggtaacggccgagtggtgttggaaatctcgttttcccgagtgatgacttggcactttttagaaatggtgcccaacctgggaaaaccccatttatactcatgtcgtcgtgcgctcttgagttctgagccctaacttcacatttccacctcgaaccactctgttttcctctgatttcgcccttgtccgacccgccggcgagattgcaatggcgcccaagcgaaagaaccagaattctgttgcggtagtgattcctcccatcgaccccaagagccagttgtcgtttgcaggtaaccacatgtctgttgtctcggaatcagatctcctccaccttgttgatgtcaaagttcttcctccaaaaaa

SEQ ID NO: 165304 - DNA, 338 bp, Zea Mays
caaccagctgggagatcagttatctcccaagttccattcgagatgattgaatccatctcgctacggacagcctccctctagtactctgcatccggagatgtatatgcctctgtaagggagcgtggttcttcatccactagataaataatataatcatcacccaatgacttttcagtcctttgtctcttactcctccttaactccaaatatggagtctggtcatggacactcgagggcagagaatatgcctgagatggaccatctggagctactacttccttatcccgcataggtaagatgctctcaaagaatgtcacatcacgagattccattatgac

SEQ ID NO: 165305 - DNA, 350 bp, Zea Mays
atatatcgaaggtatgtgttttcttccctgattcttgtcttgtcgtgtctgcaagactcaagggcagattacaaaccctcacaaactgcacactgcgcagatgcaggggcactcactgagctagccttctcaagaaaagctatcctagctctctctctgctagctcagactgcaagccaggacaaacggtacatgcacccaataggatagacctagatctcagctcatcacgctcatctagcaaggtggagtacttggtctgcaaagtggtgatgttcgacatgtgtagagcgcactcatcacattcagtctcgtcggacacctcaactgaagctctagcagactcaagt

SEQ ID NO: 165306 - DNA, 443 bp, Zea Mays
ttcaagagaacattaaggtggtgtacacgcaattttgcaatgtgtattgagccttaggggaggttgaacctttcaatgaggacaagaaggatttggggaattgttttgtaagctggttgtaggacgaatttatcaaccatcctagcgtcatcgagggtttgatggcatactctgcccttgtcacaaatgagggtagtggaaatgcccttgcatgtaaaggctaccaccactttgcggcactccgatgaaatttataggtttttattcagaaaagtgaattgtctaactaactttgcggcactagccgaaaggtcctcaacccctctagttgtgtatgaggggcacaatcttcgtgtgtaaagaaggggcactattggacaagggggtgattacctaagggtgttctaagtttgaaaggtaccaaagcggcaaaggcccctcgg

SEQ ID NO: 165307 - DNA, 653 bp, Zea Mays
tagatatcatcgtggaaatctaagggtagaagcgacgtagttgttcaatgttcgaggcattctcgtagacttctccttgttcgttgcaaagcttgtaagtccccggtttcagcatcttctcgatgatgaagggtatttcctagggaggagtgagcttgtggcgtccttggttgtcttgtcgtaacagaagtaccatgtctccctcctggaatccttgaggccggacacaccttgcatggtagccccggagcgactgttggtacctggcggagtgtatgagtgctacgtcccgagcttcttcctgctgatcaagtgagtcctcacggataatttgattgttgtgctcgttgtatgctcgtaaccttggggagacgtgctctatgtccgtgggcaagattgcctcgcccccatagactaggcgtctgactactagctcgatggcaatgcgcaggccattaaccaaggcttcgtattcgactgcgttgttggatgcagcaaagtggaggcgtattatatagcgcagatgtacgcctaggggtgagatgaagaggaggcttgcgctcgctcccgttttcatcagtgacctatcgaagtacacagtccatagctcggcatgtatcagagtcgtcggcaactgggtgtcacatttatcc

SEQ ID NO: 165308 - DNA, 509 bp, Zea Mays
agaacatcaagaatgtctcctgcaacaaggaccaaacaagaataaaatggcgagaatgaaaagaacaaagtaggtatgctcgaaaatgatgatcggctacaaagagacttactgcaggggtccctgccaaagggataccctcggtagaatctaggtggaggtcatgagtgccacaatcatttgtaggctcacttaatgggatcatattgggggtagattgagcatcaggcacggttggcacgacctcaacaccacgatcatagttttcgtcttcagggcgagtggcaactaacaaacatcgtaccactacatccatgacttgcttttgtgtcttcatagctgatttaacataattatcccactctcactgacactcaattgggaagataagtctttgcacgttgggtagaggacctatgtttagcaccccatcaacgacgatgtcgtcagcatcatgacaacaaatcttctccttagccttagcaaccacctcactaaaggagggtcta

SEQ ID NO: 165309 - DNA, 808 bp, Zea Mays
aagaaaacagaaaattaaaacaaaagaaaagaaaaagggataaaagactacctgggctttgctacctcatttcggcccatttagtgatccctgtgcgcagcccaactcacccgcgcccacacctcactgcacaccggagcccatctgtcggtcgctgctggtgattctgcgcgcctactctcgcttccacgtgggtcccacgggacagtccaccgttttctcgcgtgcgcgcacgggtacccttccgcgcggcccatcccgtgtgcggacaccaatcaactgacgggtggggcccgcttgctgtctcccaggtgcgcagatcaccctttctcagacaagtgggcccataccgtcagctctactcctcccctttcttcgctgcttccgttctactcctcgctcgaatctcgctcagacgtcgccgcatccttgggagccgttgttcagctccaggtaatcttgcgcctatattaagtgccacagcctcctccccagaggcctcttgctcagccgcctgtacacgccgagtcgcctccaatttccacccgcaagctgtgaagtagagaggcactgccgcccggattactcgcccacgttgactttctaagcgcgtggtcaggtcagggtgcgtcgcgggaggttggtgagatcgttcgtggactcggcggtaaggttcgaccatcggtgcggcggtgattgctcaccggaggcgctgcgccgccgtggagctattgtccatcgtgggcagaggagtctgctcctcagtgccaggtgaggtattattctgtagattcgtaggagtttctac

SEQ ID NO: 165310 - DNA, 399 bp, Zea Mays
ggactctagccctgttctccttggcgatcggaggcccaagcccccctcctatcaagccatgattcatgctccttcggtggcgcatctccttcccacgatgaggccttgaacaccgcgagtcctacgacgccttctgatgtgctagacgaggggactggctccaattggcaagtggttgtgaggcgcaaggatcgttgtcagtgctctcatccttctcggctccgttggtcagtcctggtggatttgcatgggaggtgtttcaactgtttttcaacctcccatagggccgccctctactgtcgttgtccacgttgtttctgctgtctgggtcatcgcgtggggagcgaccgcaaggggtccatgacttgcgatgaaggggagaacaacggtggcgtccat

SEQ ID NO: 165311 - DNA, 739 bp, Zea Mays
tagccctcttctgcggggtgtgtgtgcgtcgtgccagaaggacccgcccactgaaatctcggaaggaatggctttccatcgtgttgttcccgacccttttctccctcatggcttcacgacacaacctattgatcatcgggagatcatggtacgtaccgtcactcgcccgcaaccatctgctcatgatgattggggtattgtcctggttcaaccgccccctgaacatgaggtcaatttccactttttcgatgacattgtctgtgagtatctattggagattagacatgtctagattaggagtgttcagcgctcccacttgggtaaggctttggtgaggttccggtttatttttgatagggacaatctcgtggctatgggtccgcaacaagcttagggctttactttcactgtgattaggcacaatgcggcttggaaccaacgagtgttatattttaatcatgaatgttggttgatgcttcttgggtttcccctagatttctggacacacgagcacattcataatgctattgggtcatttggtcgggtgctcatgtgggatcctgatatttctaatgctactagattgcttgttaaagcaagggtgacatctctgcaggaagtcccccattttattgtattttcagtggctgaaggttttcatggggtttcctggactgttcagtgcgacatagttcaacagttcatgcttggtgccttgcctcaggacgaagagcctgtg

SEQ ID NO: 165312 - DNA, 568 bp, Zea Mays
gcacagactgcatcagcacactgttagaaacaagttcctcctatgcatacaattacatcaaggagggacctcatagtatattactgtttgtggtccatatggaaaaatgagatgaacgaaaaggaaacagaatcatcagacagcaagcttacatagctaggattgtagcagggaagcaataccaagcaaaacacaaacccaaaagagaagatacaattagaaacaatattatttcacttagctgctcctagaacttgaggtcagatcagaatggcacaaatcagtatcaaaaaatgcagtatcaaaatacagaaatgaatgcatttcaaacattgaaaacagtacagcagaagcagctaacatcacagtcaaaaaaatcaagtattaccagtccaaatacaggaagagaaatcttacacagaggaatgccaagggaagacgggaaggaaggcggtgcggtggatcttgtcgccggcgagatgaggctagtggatagatgaagaagacatggtggcatcgacagcgacctcacctgggtcaagtgtcgtggcgccgacgcaggtgcacc

SEQ ID NO: 165313 - DNA, 818 bp, Zea Mays
attttgcattcgccccaattcagttcaagcacacccgaaatccaacctcatcgtggccagcgcccctccggtcagtaatgatcaaattactctttgttttagttagtatgtgatctcttattgcccctggatgcaacaatttggagttttaccgaagcccatcgccggaacgcacccgtgcactgtcaaacaccgccatggcaccccctccgtcgccccacctttccgctcgtgtctagcccaaaatttggcgtgtgtgtcatctctagtaaacccaggaacctttctctagcttcaatttagccagcccagccctcgctgatccggaacactttgatccacttaatcacccgcgctgacaccgtgggcagaagggtgtagagcttcaattcagaaattgagtgaggggaaaggtgcggtaggtagctaatttggttcctgtcgcttgagaactccagtcatggcgttatccggccggaattggctcgccggggtgcggcgagagctgttcctcgtcgtggactttggtctgcgaaggaatagaagtttaaggacctttctgcaatctgtcagtgacacaaagaaatagtaaccgagccccttcccagttagttaaaagcccgagggtctttctgcaagatttccacgcgggcacacgcgcgagcgcacttctgctgtggttgggccgtcctggattagattgggtccagtactattcacagatttcccttttctttttcttccagagccaaataaattctagaaaatggtagaaaaatcctaaaaatgtcaaactaattttcctagattccttattt

SEQ ID NO: 165314 - DNA, 354 bp, Zea Mays
acacatgctcgctgctgcctctcgccctctccttcctctcctcggcaagtgagataggtatgaaccaacgaggaagagcacccatccccactgcgcatcttcgattcgattccgtccccttgcctcttgcctcttgggcgtctccgtggctagatggcgtctccccctcccttcgacctctgcggcgatctcaacgacgacgacatcgatgaacccgtcaccaccgtccctaaggatcgtcgtctccctgccgccacccctacgatgaacggcctcaacgaccacctccttcgcttcacctgcagactccagcgccccgcccaaaaccctaaccctagccccaatccgccaccg

SEQ ID NO: 165315 - DNA, 335 bp, Zea Mays
gttgtgtgccctcgcgtgcctgtgcctgcgagggctgtgtactttgtctggtgtgattggttatgctgtgccagcatgattatgataggtcttggtgtcgtttctgcttttgttgtactgggtcggctgcgcctttaggcggctcttgcgcgaagtctctgcgataggcttcgagtttgcgtgcttgcgtttagtccggctgcacctttcggcgacttctgcgcggatagtcttctgatttttgcgcacttgttgtgcttagtccggctgcacccttaggcgacttctgcgcggatagtcttcgcgatagacttcggatttttgcgcacttgttg

SEQ ID NO: 165316 - DNA, 427 bp, Zea Mays
aaaaactaggttttgatctatttttctctcgatgcttcactgctcggtccactcttcacatgagtcatttgtttctcttccctagcacaagctcactcgcttcttcggtcatcgacagaccagtaagtcggtgacctaacccgcccgctgcagcgcaccttgcctgacatcacatgtccctcgctaactcattagagtcccaccgcgccgtcgcaagaaaaaattcgatgactcgccagaacgacgcgccgatacggctgctccgtcctagtgccttgtccttagttagtccacctatttttatctctttagtgccctacctagaactttgttttaggtccgctactgcctcgtccaagtttgggcatgggcgcttccagacaaacagaggttctttggcaagctcaaggcctaagctttctgctgc

SEQ ID NO: 165317 - DNA, 984 bp, Zea Mays
gctacggcggcgcacaccaaagccacagcggaagttcgccggcgagcgcacgattctccgcccaagcgtcctcaacactgaaattgattggtgctacacgaagtggaggacgaggcgagccatttggatgggtttcttaccgggattaaaggcggcgagcaccctgctcgcggcgtggggcggatccgtggcggcgttgtaactcaagcgagcaattcccgccggtcggtggctcctccatcgattggctccggtatcaacgtctgccaccgcatcccgatgaagcacgagggcctattgcatcggttcaccgcagcggccgcccgactcgcactcctctacacacggcggcgcagacacagctcagtccgagcttccctatggcaatggcgaggggcgattatggaatctgagcgatccgcggccagtttgattgcggtgcgacggtagaatcgcagctatggcttcagggcgttttgtggctagataagggcatgggcgacctggcggcttgagtttcccctgatgagagatcccgacggtggttaaggatggctcgaccatggattcagagaggcgaagtccgcatgggtatatatgtggacgaggggcgatcccgaggtgtggggacggggtcctcaaccaatgcccgcgcggattctagggagggcgttgagctcgggcgttagttaagcgcacgatccgattcctactccgaggtgggagaacaaactgcgcaaggggccccacacgcagcggctaacaaagggagcacgcgagcaaggaggctgaccagtgggccccgcgacgcagtgaaaggggaaatgttgtgtgcgctggcgcgactgccctgtgggcccaccatgtcggcgccgagagtgagtggtgggctgcgcggatcaaaagagatggtgggccgaattgagggttttgggcccaacagtgggattttgcttttccttttcttttcatctcccattttct

SEQ ID NO: 165318 - DNA, 350 bp, Zea Mays
ggcagaagagataggggatgggcctaggagttgagcccctccatcttgatcttgcccctcctccttgtatgtttgttggatcatggggtggagcctcattggtcagcgatgtccgttaagatctatcggtgttatgggtttgattgggagatttctatttactaaggcgctaaataggagtttgagtcctttgtattttgtggttgctagggtttggtagaagtgtggaagcgttgacttccatgttagccctatcctcgctattataatgtttgtgactggggccacaaccacgggagcttagcgtctccgatcagggcatgtaggatagatcttggaatggtcccttg

SEQ ID NO: 165319 - DNA, 913 bp, Zea Mays
gggcaataattagggacgcctggattatcccactaacaaacgcactcagagaaataaggactaaacctcatcccactaacaaacgcactcagagaaataaggactaaacctctgaggagtgacagccgagccacctataaaaactaaagacatcttctcgagggtctcccacctcgagcaggactccgcctcgtccgaggtcgccgccgctcagtccgtctagcctgagccaggctcaggcagataagacaagggcgaggtcgccgccgctcgctccacctcgtctgagatcgctgccactcagtccgtttagcctgagccaggctcaggcagataagacatgagtgcccaaaaacaggcaagggacagacgcatttaatgcgtgtgccaacccacacagcgacagtggagcacagtgactgacaaaacagcgatcacgtctggtgcaacagcatgattacgtctatgccacagtgtgcgcatgccgcctaccaccctctgatgggacgctaaatacgacaagacgagcggactggcctttgggtgcaatctctccgcctcgcctgaccccgggtccagccttcgagcgatttttctgcttcacccgacgtcaagaccaaacctcgagtgaattctccgcctcgcccgagcttggcctcggccaccaactacaccgcgaatcctgcgaatcccgcccggctgtagcgcacgtcaagggacggcttggctaacacctcggtaagacttccgcctcaaccaagcagaggctctgatctcgataagcgtagcagagaatctcgacgtcatcacgagccaggacactgacgcaccccgtaagcagcttttggcccataccccggcgctgttacaacaactacggcatgggcgacctctctcttggggacacgggcgc

SEQ ID NO: 165320 - DNA, 468 bp, Zea Mays
atccttgcaggttcctagctccttcgggagggttttcccacctcaaatagccatttccccgaaaccctaaaactccgccccccccccacgtgttcggtgaaatgcccaaaccagccaaaaatgctccaattgaacccaaatttttcaggcaccttcacaacatctccagtaacttattcgcaaaatttcacgcccatccgatattccaggctttaatttttccaaattccccatttcgagcgatcgtttccgagccgtgtgcccaaatctctttttcttcgcctaaattcaaaccaagcacacacttcactcctattcacccacataaacctattcgtgaagtatcggctcaattccacgtcgtttcatgcctcaattcgaattccaaacctcctatggcactttttatcgttcaaacgccgttttcacgtcgtttgacctctcgatcgtctcatctcttgttttctg

SEQ ID NO: 165321 - DNA, 638 bp, Zea Mays
tagaaagagagaattaccataaaatacaaaataaaaacctataaagttcatatcatgttcaaattgaacatttgatgagaagatagatttgccacaaaaaaatctggaattttaaacttgggactgatttgaatttgggataaaaaggaagaaaagaaaaaaaataaaagggataaaaccctgcagctgggccaaattcactcctcttggcccatctcccttttccactcctgtaccgtgcctacgcgccttgggtcgctgccttgtggggtcaagccgtcaggatggtctccctcctctggttgtggagcttgggtcgtaacgaccgggaggaaagtccgcctggactgcacacccgggcttgtcgccatcgtgcgatgcctgtacctctgtcgcggtgggccccactcgtcatgcttatctccctcaacaaaccgctcggcatcccgggatttttgagctccatggctcaaccacccgcgcgattcacggttgagctcaacgtactccgaagccgccgccacctgatgtattgacgctcccaacggcgtataaaggatcccagaaacctatctctgcctcccgtgtcgccattaaccatccaccttgcctccatcactggaatttcaagccaccgt

SEQ ID NO: 165322 - DNA, 647 bp, Zea Mays
cacccattggggtcagcaacaggtggagcacccccattggggtcagcagcagaaggagcacccccattggggtcagcagcaggtagagcacccccatcgagttcggcgtcagtaaattcaggaacaggcacttcttcagcagcaggaaccgaaggaccaacatcccgatccaaactagatactcgccggagacgtctctttttccttttcggctcgtcagcaggaggatcaagttgattggctcgggaagggcgccttgggtgagtactgacaggcttctgaatatccaaggttatatcagtttctgggggaggtgccaccaccaatgtcccagcaggagcagcatcagaagagtcctcagccagcaaatcaagcatagcacttatctctgcgtcactaggatccaaaggtacctcaaagtggacttgccgctcatcatcaggaatttccccgagcgaggcaaccaaagcgttaacttcttcagcagagggtcgcactctaaggcccaaactgccatcagcaacagttggatttgaaacaaaatgagtgaaggctttggaaggaggcaggttccaggtcgagtatgccaccggggcaccaacgtttgatactttgcctctaagaatcatctcaagtcgattcaccaa

SEQ ID NO: 165323 - DNA, 731 bp, Zea Mays
gaagaagtcactggtgaactgctcacggaatcaagctcggctgcaacgcaagacctctaggtcgtcgctgggagtctcactgcatcaccggtggtgcgcccgcgactgttggtgggaaatcgtctactggggcggcatcaattgctcatcggagatcttgcaccgccgccacacagctgtgcgtcgtggtcgcgtcctctactgcatcgagacacggtaagaactccccatactgatccgcccatgcacctacatcgtgtagcaccagattgatttgggaatcgcgcaccggaacgcgcatattgggtgggccggccatggtgaccaccgcgggcggaacgctgtgcgccgctgcgttgatagcttggggtggaagaggggtgagggtcgttggatcctcggtgaagggtggaggtgtggcgatgggtatgaccgttggatcagccacagacgctccgtatcagtcgagtggataccccttcggatatttgaatcgtgaccgttttgtcgatcctgcgcacctcatagcatacccttttgtgttatatctgtgaccatcagatctagatcggatggctctgggtccccggtacctcttcgccgttgccgatttgctaaagagcccctgggttttggtgaaaccaacccgcagtccattgtggctgtttactgagtctcgggaacctttgcgtttcaaccctgaactctctgcaaattgcgcgcgtagtcca

SEQ ID NO: 165324 - DNA, 490 bp, Zea Mays
gttccatggaaacgacattccagaagaatattgcagggtagaagtgacgacagtcgtccaaggatccgaggacgacatgctagacatccctgtgcccgaaggtatcgagacacttggacaagctatcaagaattttatcctttggcctcgaagggatgtcgaattggttgatccaccatgacagccgtcgtcgcaggcccaaccatctctgccttctcaaattgttgttcctattgtacatccatcatcacctcctcaaacttcacatgctgctcctcatcctctttctgaccctcctcctcatcctcatggtggcccaccgtctctgccacatacattgcccttcagggatccaccttctccatagccatcaagggatccacgaccatcaaagaaatctaaagtttctataccaaaattagtgtccccgttcgagaagaaaaagaagagtaaatccactgctggcacagttcgtttttgaaagggattg

SEQ ID NO: 165325 - DNA, 1366 bp, Zea Mays
ggactcacggggtattatagaaggtttgtgaagaattatggagtgatagccaaacctttgactaagctgctgcagcacaaatcttttgtgtgggacacgacaactgatatggattttcaagcattgaagcaggctaaggtgaccacacctgttttagctttaccttagttcaaggaaccttttgaagtggaaactgatgcatgtgctactggaattggggcagttttgatgcaacatcataggcctattgcatatctcagtaaagccttaagttccaagaatcagttgctttccatttatgagaaagagtttttggctctattgttggcagtcactaaatggaggcagtatttgtagcatactgaatttattattagaactgatcataaggctctaagttttttggaggatcaagtactccattcagagtggcagaaaaatgctatgaccaacttatggggttgcagtttcgaatggtgtatagagaagggaaggagaatgttgctgctgatgcactttctcaggtaggccatgcgatggtgatgcatgctgtgacagaagtgcaacctgtttggctacatgatgtgttgaactcttatatcacttatatggaggctcaagacttattggctcagctggctgttcatagtcctagtgagtaggggttttctttgcaaaatggtctcattcgaaaggatggtttaatatggattgcaaataatttagccttaaggacaaagctcatttcagctctgcatgatggggctgtgggtagtcattcggacagtttagccacttatcatcgtgtcaggcgtttgttttggtggaagggcttgaaagctgatgtggtggagtatgtgaaacaatgtgacatttgtcaaagggctaaagctgaaaggatacattctcctggtttgctgcaacctatgcccattccatagggagcttggcaagatcttgcaatggattttatagaaggtcttccaaagtccgaagggtatgacacaattttggtggtggttgatcagtacactaagtatgcccatttttttcactaaagcatcctttttcagcttctatggttgccaaagtgtttttggataatgtgattcgtcttcatgggactccaagatctgtggtctcggatagagataagatatttactagccatttttggaagtctgtttcaggttttaaacaccaagctagctcttactacaatatatcatccctagtccgatggacagttagagcgggttaatcaatgtttggagatgtatttgtgctgtgctattttggacagtcctaaacagtggaaaacttggttaccattggctgaattttggtacaactcttcatatcacac

SEQ ID NO: 165326 - DNA, 349 bp, Zea Mays
ttccatatatcttttcttatgctgaaagactgtagagttggatctgatttgtgtgtgctttctacagatgtctgagaacagacgccgaggtgcaaggtgtgctcagcaggggcagcaggcacccgaggaggaggcagctcagcagcagtttccaccgccacccccgatgaccattgagcagatgttcctgatgcagactcaagtagtccaagcaattggttagaccttagcagcaatgcagcaggtgcaacagcagccaccctcacctcaaccccaagtgcaagttcagatgccacaggcgcccagagaaaagcgggcagaattcatgaggggccatccccctgtcttt

SEQ ID NO: 165327 - DNA, 421 bp, Zea Mays
cataaaatcaattcataaaagttagaagtgtgaacagaaagcagcaacaagggaaaggagaatgtcgtctaaggagacatgcagcaaactatgttttgtctctaaagttttgtaacttacatatttagaaaaaagggaaatgagtggcaaacctggtcaactgcacaagcaaacaaatccagcacatgcccttggtgcacaagctgctttgcaatttgatcataaaacttaacagctttatcatagagtggtgccgagtctttatcaaggtctttgtgtgaacgaatgggctctgataaggatttggatacaatctgaaaattttgtaagataatcatcctactgaacaagaaagcatcctacagaagcatctcttgaccatataattacgttatatgaaaaacatagttggcaccagtgc

SEQ ID NO: 165328 - DNA, 521 bp, Zea Mays
tgtccctagtaattccttagaccatcaagtcaacgttggccaacaacagccacaaagttgacaataggtagctccacctccacatctctcgcctgctcgcgaggcaccgacaactccatctgcacacctccatggcatgtcaacgacgccgcagtggctccattgctataccgcccctacacatgagtatacgttcacgcccacacacctagtcccccactgccacccgtcaccacggccaacaattaggggcggatttaggccttgggccatagcccgaggcctggtccatgtaactaaagtaggcaaaccatctttattgggacttttctcttatttgctggcagctggcgctctcccgctctcccacagtcttcattcctcgccttaagccccgccgccactcgccaatttgctagacgccaagtatctcatcatcggcctatcgcaggacggttgcctcaccatgactcccagcgctgctccctccactgctctctccgagctccggccagcgctta

SEQ ID NO: 165329 - DNA, 804 bp, Zea Mays
gtcggtcggataacctcgccgtcgtcgagctgtcgtcgttgcgtgccacgtgcttaagcgctagcccttatcgtggtgactcactgggtgcatgtccggtgatcaccggagtaactgccacggtgaaagccacttattccacgcacagagctcgtctctcctccggccgccacactgctcggccgaattcgtcaccgccgctcgctacgtctataaattgaccccgccgcgagctccgtaaggtagttaagcgtccagccaccaaaaattagcctcgatcgttcaccagggtgtgcgaatttggaactttccccaaatctgcgcaagaacaccgtaggaaagacctcgccgcggccagctcaactcaggtcagtccaagtccctctgttgcttgttctagcgtccctaggccctcctaaagctcttagacccgcccaattgaattagaccgccacccatcgccgagaacgtttatgatcatccgcctcacccgcggtcaccatggtcagggcgtctctgtgtgtcgttcctgaaattaacctaggggaaacgttctctaggtcctgaatctggtttaagccgaagttgggcaccggtcatagccccaatcggccggtcctggagctcgccggacttcggccgcgcgtgaacgccgtcgtggaccttggtcagcgaagaaatagaacttggaggaccccgtgtaaactgtcagtgatacagaggaacagtgaacgaacgtgtatccagttagtctataacccgagggcccttctgcaaaaactccacagcgggcgcgggcgcggg

SEQ ID NO: 165330 - DNA, 308 bp, Zea Mays
gtgttacgcagggcagcgatcatgttcagttagtgcagttcagcaggtgagttccgagagacgctggacagtgataagacgcaccatgaccgactcaacgtttctgtggcatgcacgcgcgtgccccctccaacgaaaggctcagatccagatcttagggcgtatcggactactgcgtgtggttttgtttgataatttggtctgggatccatgcaccccgtcccggctcaatgattctggaaggggcaaaagcctgattagcagcgtgcgtgctcgctgctaaaggtcaaagtagtggtgtatcattg

SEQ ID NO: 165331 - DNA, 1239 bp, Zea Mays
atctggatgcaaaggaggtggaacagactgatcctgtccccaaaccacatcatcttcatcatcttttggagtgaaggggataccataatgatgttggtgccactgctcaatgtcttcaaagggttgatgcagagttacactacgggagactgactgacgacagatattgtcatctatctcccacggcggttagccaactcatgcacatctgtggagatgttgcgacacatcaaaaacagagcagcaataccattagaaaaacgcgagccaagacctctgcctcgacatctaccatgaccgctacgacccataggacgcgaagctgaagcaccccgagaagaagatggatgacgaggaggcataggaggaggctcatcagaagagtaatcttgcaagtgctctctttgatcttctagctggattggctggatgtatccaatagggggtgtaggcaacatgatgaacttctttctcaaaccagatctgagaaacaacctcaatcatcttcatggtaaaaggtgcatgaacacaacccttagttggatagaaagaaacataaattatttcctgccaaatccgatcaaaacattgagccactgggtcttgttgggttgcataaagaagagcagtgtctgactgtcaccaaggacattgacccgattccctcctttaggcaacaaagtcatccttaacaatgcattaagatatctgtaatagcaatgtacattgggagttttccagaactcgctatcaggagacacatgtatatccattacttgttcacggggcggttgattaaactcatgcacatgagccttgtctggagaaatgtctgagaatgtgtgcaaacctggcatagctgatcctggaccaagttccctcaatattgaaattcatataagggtgagataatcaccatcttcactaccatgtgtaatccaataggttgaatagaactgcacaatgatttcattattccaatcatatgtgaacgtcatgatatcccacatacctttgctttcacatttctgcagggcatttgtcaaatctggatctcccatgttttcgcattcctcacagtcgataggatgttgtagaatgatgggctgatgctttttcgacataatgactgaattgtagaagtctacatgaaagagcacccagaagtggttgtcgtcaattcgatcatccctcacgaagcgacgagggtttgcgtacctcttttcctgcagcagtttt

SEQ ID NO: 165332 - DNA, 403 bp, Zea Mays
gggtttagggtcctctagattctagctggtctcaggatttttctttgtttgggggcgcttttcatgcggctttcacccgtccgccatagtcatgcggggcgagcccctgagcctctgctcaatgcaaagatccatctgggggtcatcctgcctttttatcttactctcccccgcacatcccttcgcgtgaatgaggggaggtgagtcataccacgctttcctcaatgggttacaaatggcacttggtgagttacaaacgagtaattcgagtggggctctaattcctttcgtaggctccaagcgtggggttcgctaaggattgtcctcatattctaggcaccgactcatatagttgccgattccgttcaatcggaaccgatggcttgctgcctctctccgtgat

SEQ ID NO: 165333 - DNA, 392 bp, Zea Mays
cgaactttgagataaatggctagtaccttagcaacacgaagttgtgagtgcatcgaaagacaattctgagaatttttttcacaacattggtgtgaaaaaacattgtgtgttctcgtcgaaccacttactcggcctatctaggacctctatgcttgtgttgcatacatctcttagaatttaaatacttatagccgctgaattgacttgggatagtcctttgactggtatggtatatactataaaccaaatggtaaaggtcgactccgaatatacatatatctggggtttatgtagcagaactacattgtattccaccccttggcatgcttaccataatctatatctgatctaccagaagtgagaaaagtagacaaataactataaaatcccac

SEQ ID NO: 165334 - DNA, 423 bp, Zea Mays
tgatcaccctgaaacatagggtttaatgccccataaacccttctaacttgtccaaattttaaactttataatagttttttcatcctgacaagctttgggcctctcctaagacacctagatctagtgacactagtgtgcatcacactaaactaattagacatatctaggtcaaactactagttcatactcctctttgtagtacgatcaaagaaaaaacaaagtcctgaactactcttagtgtctctcagttccaatcgacaattatagtccattcttaatcttgttttcatcctttaaaaaccacaatgaataccataagcacacatggtaaccatatattgcccagaccattctccattattgtgacctaactcaagcttgtttgtacaaaacacacattagtcataataatattgtattgtc

SEQ ID NO: 165335 - DNA, 351 bp, Zea Mays
gaaaatcctagtaaaataactaatgagtattaatgtctagaaatttgtaccaagtcatgttatagcatcaaaatgccagcaaaaataagtcctagagaattacctacaattgaatgatagttgtagttcaaatcaccccttctgccctaaaatttggcaattttgtccagagaaactattcacttctagaaccttaaattttgagacagagaatcatacaccagtaataagccactgtaatttttacagaatttttggaaatttattaaggtgacttgtagttcaaacccaccctaaaaccctaaagaagatcaagggaaaaggaggaaagataaacctcactccaataag

SEQ ID NO: 165336 - DNA, 529 bp, Zea Mays
aaaaaaatggttggattcggttgtgcagagcgctaacctagcactctggatgttttctttacgggaggcccactttacaccgtccatttgtttcgcaggttcgttgtgagactagattcatggggcagcgaccatccggtaagggaccatctaatctaatcaccaactccatccgccgctctgtatatttctttttttgcatcactttgggtactgcatttttaaaacccccctgttgttggttctaaaattgctgttaattcttctttttgtttcgtcagaaacgtaacgatgagtaggtttgaggagtttctttttatatggttctggttgcatcagtagaatgcctattcagaactaaatgacactagtgttagcaagtaatctagcccggacctgtgccgtattgccgacacggcaggaggaaagagacatggacagggttttgatctgttcacgagcagtagacagtgagacaagtactacttggctgggggtacgccccacatggttagtctctctctctctc

SEQ ID NO: 165337 - DNA, 575 bp, Zea Mays
caggtttcccacgcattggacggcgggttcatttcggtgaaacccaggggctctttagcaagatgcaaccgcgaaggggtacaaagctttactagccgctggatcaccaatgtagggtccagattagatgcccatttacaacgaaccggtatttaacgccacccgtccgatcgaagatctatggtgaggatctttagacatcgagatcaactcagatccgctcattcaccgatcaacggcccagatgcgatggaacaaaaagttatctagaatctaatcgtagccctccattaagagaccgatggccagagaccatgtcttcctccccacgacggactgggcagcagcgcagctcacctcccgacggcgaacacaccggagcagcatgcccccacccaagtgcatagcttcccacacaatcgaatgctacacgagccaaaggacatggcgcattgaacggagaccttaccttgagcaaacatcaacgcaggaagctcgaccacgtcgccatgcggcttggtaatgaccagcaaagtccgacgagctatcccgggcgtccccggtgtcgatcccac

SEQ ID NO: 165338 - DNA, 911 bp, Zea Mays
cgccgacttaagtcgattgctccgttagtagggtatagtggtcaccctaagtcgagtaagcgtgagcatgttgcactgacttaagttgtcgccgacttaagctgattgctccgttagtagggtatagtggtcaccctaaattgagtaagcgcgagcatgtcacaccgacttaagtcatcgccgacttaagccgattgctccgttagtagggtatagtggtcaccctaagtcgagtaagcgcgagcatatcacaccgacttaagtcgtcgctgacttaagccgattgctccgttagtagggtatagtggtcaccctaagtcgagtaagcgtgctgatttcaagcccaacccaatcgaagtcagatgtaagtcaagagtctgaatgcctttgaaaatgaaaactttatttatgatgaagtccccagattatagagtacaatgtttcttcgagaatttttgaggcctcgctagggatagaactttctgaggtgctctatgttccatgagttctccacttccgtgccatccatttgagtaagccggtatgatcctagctgagtgatctctgatatgatgaatggaccttcccatagcggtgacagcttgtaccgtccttcctcgttagaattcggcgaaggaccaagtctcccactgcaaaggaccgatgtcgcacagctttatcatgatagcgcctcaaggtctgctggtacctagccgactgaattactgcgttcaatcgttcttcctccaacacatcgatatcttctagcctggtagcttctgcttcggctatgctttcgaaagtcaacctcggcgcccagaatattaggtcggcgggcagcactgcctctaacccataaaccatgaagaacggggtatttccatgcagagctcgactgggttgagttctca

SEQ ID NO: 165339 - DNA, 759 bp, Zea Mays
agtcactgatgcttgccatgccttcaatttgaactctaccgcgttgtcgtgttcggaacaggctcgtcggaatcttggttccgccattaccgagctcagaggggtttccggtgtgtgatcgtttaagcagtacatggggtagcgtcgtcttggctcagcaatggtgggatggcgctcggttttgctagtcttcgccaccgtcgtgagtccaagcgaggggcagggtggccggcggccgaccgcgccatgtcggggccgtgcgtttgtgaaagaataaaaacccagagacctaagtgaatccgtcagtgactcagccaaacagtggtcaggaccaatactggtttagttttagtgcagggttgttttcgcatgatggccagcacgggcgcgcgggctcccccgctgtgggccggttctgtgcgatgttgggccggtcgggctgattctggcccaggactattcacagatttaccttttcttttatctgtgagcgaagaaattgtggtagaaattgtagacaaatccaaaaatcatgggaccaattttagtgagtgcctaaaatcaatatatctctgataaaaatattaattggatttttaggatagttagaaattatttagtgacttaaaggtgcctttgtaaggactgtttggattttagaaataaaattataacaccaaaaattctggaaattcttggaaagtctttttatcagaagtggaacacttggtaaaattttggggctgtttggaagccttt

SEQ ID NO: 165340 - DNA, 299 bp, Zea Mays
tcttcatccactagttgtactctaataccctctcgtgctaatataatgcccttgacatcaggaaacgtcatttgtagtttaaaaggttatctattgtattgaattctttatattccaactttttgcatggtttaaaaaatatgccttacaatgttaacctatgtttggacaggtctcccatgcaatttggctaaaattttcatggtctttattttattttgagaaacgatgttgcaaattgaagtgtggtgttttacttgagtggacttaaacaccatttgagtatgccttgaatagag

SEQ ID NO: 165341 - DNA, 439 bp, Zea Mays
catgatgcggaagaaaggattgttcgactcgtggagctctgcggtggagatctcaaatgctcgtaggctcttcgggaaggtgatgttgatgctgcttccatcattaatcagcactctcttgacttgactcttgtcatccatttagctaacaagcaatggaaacttgcctgatgatcaaagttgatccattgatcggctcggctaaaggagatcaggcctcaaaccaccgatatggtgtcagggggggtcaatcatggctatcaggacctagcggttatatagcttttgctctctcttgtttcctaggagccatccccctgaaggttaagttgacttctctgttgaccagaggggacagatgatcgttgtcttcccactggtggccgctgctggggatcatgattctgccttggaggtggcgatggtagctcttggaatg

SEQ ID NO: 165342 - DNA, 434 bp, Zea Mays
catttctctcttgtgttccatcttgcatcaacccatctgggcaggggcacgcagcaacaaattcactggttggctgacggacctcgcgggtccgaaacgctgacagcactacaccaagtcctagcattgagagttgaagaagttgtaggagcttgtcgacccatcgtttacggtatcgattgttgtacccgcacttgtggctacaagtaccttaatggttatttaatcatgcccatgtcgattaagaacataccattgtttggaccttgtttgagattgaatgtaccttcacctaatagtcggatgactcatttttaccttgaagccaagttcctcattcggggtgagacagacatttggactatggtgcgcatcatggggagatgagaaagttgtggaggggcaggagtttaaacatgcatgtaggtatggcc

SEQ ID NO: 165343 - DNA, 1120 bp, Zea Mays
ggtggggcgaatttcgcctgcgggggcctatggcggccggtccgcggcacggtggcgggtgcccgcggcggtgatgccgccggtgaggtttccggccacaatagagtgggggaagtggcgtgtcgtgaccgtgagagtatggcggagctcttggcataacttaattgaacggaagatcgctagagagggagaggggagctcatcggagcggtgaagggagcacggcggcgctagcttgaacggctcggggaggagggcagtgggggtggccggagctgtgtggcgaatacggggctcgggcgggtccttttataggcgctcgggggagggagggggatgggggagacggcgagcaccggcgagctcgccatgatggcgggaatggtgctaacgccgatgcgatggctcgggcaggctggggggtgaggggtcggctcaagcacagtggcggggttgtcgcggaggctggcgagcattaatggcgaggcgacgaggcgagggggcgctcggcggcggacgcgccggtgagggatgggcgagggggatggaactgacgagtgggccctggctgccagcgagaggaagctgcgcgagagggagggggtgaggcgctgatgggcggggcccgggtgtcagcgggagggagccgcgcgcgggttgggccgcctgggccggggagagagggggaggaagtgtgggcgcgtgcgggttgggctggaattcggcctagccgtgggagggggggaagcttttctttttctttttctaattctaatccctttcttctcctttttctatttttgtttctttttgattctttttctttggagaccaaaaatattttctaagtgatcttgagtgagaaacatagtctatgtgaggtgctctaattatttcaagtgtatgcacatgagaaggggttctaagggtagggttaagggggaaaggtaaaataaggggggggggaattaggaggttagggtttcaaaccttgggtgggattttgggatgttacattatctaacaaactcataaacaataagttaaagggcctacccataacttgtttttgggtctcaatgcttcaaaggttcgaccagtaaaaggagtgcaggtttag

SEQ ID NO: 165344 - DNA, 602 bp, Zea Mays
tgggtaagtaccttcatctttttgcccgcagccttcagcacaggctcagctggggcggccaaagcagcagcttttctcttcttcccctgtccccgcagcggatagcggtagtcggggtagacgaagctgatgatgtcaaaaactctattcattctcttttttcctcgacccccgaaggttgcaaatagcgcattatcttttgccttggaataagctccaagcagctcatcacttgtagcttcgatgcatttcagccagtcattgtttggttcatcgaacttatccccatacctgaatgtatacttcagccggactagatcaccttcgctagacttggtgatggtctccttcgacatttcccagctctctacaagtggccatactctgaatgctatatgctcttgaattaaatctcttgtatcaatgaaggagcagacagtaccgaatgccttctgacacgcttcggcggcgtcatcattttcgacctccggctttcggagaccgaagtgggaccatatggggcgcatgataacctccttgatgtcctccctcggtgtcaagtcattcttcacataaaaccattcttccatccaagctccagg

SEQ ID NO: 165345 - DNA, 699 bp, Zea Mays
gtatagttcccttaggtcagtttgcaagcataaggcactggagagaggacacatggatagccgggcggccaagtcaaggccaaccgaccactctctcacctcgagcttttatccaatggtccataggacttcattgaggttggtttgatagttatttgtcgataccgttgggttgatcttgtgtttcttccttagccattggtgatgtgagctccaagggctatttatacttgccccaatcattgaatagtgatgtggcggtcttccaacccttttacatatcatccacgtggctacacatttaagttgtattggatgcatcgtgataagcatgcaggacaaaggggggtgtttgcttgatcaagtggtcgagcgaccttggaagtggctagccggccaattgcatgcctgatcaacgtatggggtggccgggtggccaggggtgactggtaggccatggttcttccatgacttagctgtttttactctttttgtatgttttatcaacctacattcaaatactccaaacaaaacttgtggaacaaaatttatagcaattttagttacttatcctatggctagttaaatgactgaatacatggaataacgaccatcaacacacgtgcaagtggtgctccacttctgacttctcttagatgctcctcgtcgtctccactatcgagcttcgggctaaaacgt

SEQ ID NO: 165346 - DNA, 664 bp, Zea Mays
gcaatctgtttttggatagcagcatacccggattcgaacagcgatatctcctaaaatataactccgaatcgagcgcataagtactcgttggaaaggtatgacaaagatctacatgattctccctctgattcccactaattacccacgaaaaattctcagaaactgctagaactactgctgttcgcccacccacaaaatttctggacaacacctctaccaattcgcatacgtaaacatctaatcgattgaattgcaacacaaataaacaagagttaaacacaaaatcaccttgacttctccccctttcctccctccttcttccttccaccaaattccaattggagatttgaacccacacgacgtagatcaagcgagagggctgcaactaggagaggagaagatggggaggcggctagggtttgtggaatggtggctgcaagagtttgagggaggaggagatgagaagggggggcatctacacaaaggctagagagaggggggcggctgcacaagggggaggggattagggggagggcggctagggttaggggggctagtgggccggatcgagtttcacggcccaactcgctcacacgacaactcccgaccccagcgcatgagtctaacaaaaaattctactgttttactattgaatgcttcccaa

SEQ ID NO: 165347 - DNA, 800 bp, Zea Mays
ctgatagagatcggctactacaagcacggaccacgccagaacgaacatccgctgctacagaagacgatgtgaaggcgagcagcaagcgtgacctgtagacgcaatgcaagcacgacgtacgtcgctacagatcacgtggaagcgagagcgcgacctacagatctacatacaatgtcggatatatgatttgcaactgataaaacccattgaattctgctagtgcgctaacagcagactgatgccctaaactgaaacacaggcattagtgcactaactaatacatgttgataaacttccgagcatcagtgcactataaactgatacacgagcattgggaggcttgccagcatgaatagtagggaactcaacgactaaacattgtaaaatctcgacacatgaatttggaaaaaatctcggaaacaagcaataacacattcatcagataatggtaggcctaatatgttgaactaaatggcatgcacaaaagcaaggccaaactaatagacggagtggaacaaagactcaccgtgctgatgtagtgatgtgcgatatggccgtcgtatgttcttctccactgctcaccctcgctctggacgacgcgccgctctgtagatagggtctcctgctcaccctcgctccgaccgatgctatgcctgataattagtaatggttaaatagaaaaatcatatctcggcggaggtcaaggaaaaacaacgacctctctctctgtgtgactgacctataggtcgcctagatttctcaagacgcttgcagagatcatggagccaccataggcggag

SEQ ID NO: 165348 - DNA, 823 bp, Zea Mays
tctgatctaggtagcatgcaaggtcacatcctctcgctcaaacgtgaacctcatccattgatgatctgggtctatccatactgtggcatagaagactctgacccactcctcaatatttatgccaccgaaggtcagaagagagtgtaaacctggcagatatgagatattaccctttggctctgcatcagctgctgaaaggaaggcagggagatccaaaagtcggtgcgctctcagggcaatctaagtagacagctgtgccctaaagaaggactcctgggtcctagtgctgaagagtggcgcagctgctgggtccctctgagccggtaaccaagaatccatgggtacatgtctaaactaatgtacccggatagctgtggctcgctgaagatcaagcaggcgaggatcagcagcaagcggtctcacctcggtctcatcacgctcccgaaagcgaggtggaggaataggtggagcgaaagcaggagcaagagcagtgaaagctagagtggagactgagtcggaaggagtggaacgagtagtggaggagcgagttcaagacgcgaggcgacgaattcggtaggcgatctgattagaggaaatccgcaactgccctccctgctcagcctgatctgctgctgctgttgcaagcgatgcacgagcggctctgtccagacgcctcttctttctgccctcttgctgctcaagatagacagtcttgcccttgacctgtccgaaggggcgaggagggtcctcatcatctcctccccctgacggtgtgacattcttcgtcctcaccatcctgaactgactgctgcaagataaggag

SEQ ID NO: 165349 - DNA, 610 bp, Zea Mays
gatactggagcaacacattcattcattactgcatcatgggtagaagcacataatcttccaataactaccatgtcaacccccattcaaattgactcagccggtggtagaattcaagccgatagcatttgcttgaatgtaagtgtggaaataagggggatagcgtttcccgctaatctcatagtaatgagtactcagggaatagatgtcatcctagggatgaattggctagataaatatcaggcagttatcagttgtgataagaggacaatcaagttgatgtccccgctaggagaggaagtagtgaccgagttagtcccgcctgagctgaagaaaggaagttgttatcagatggctatggatagcagtgaagcagacccaattgaggttatcaaggttgtgtctgagttcccagatgtgtttccaaaggacttaccaggtatgccaccagagcgaaaagttgagtttgccatagagcttcttcctagcaccgcccccatctttaaaagagcttacagagtatctggactggagttggttgagcttaagaagcagatcgatgagctgtcagagaaaggatacatccggccatgcaccttgccttgggccgccc

SEQ ID NO: 165350 - DNA, 1523 bp, Zea Mays
ctgggcctcaattactggtaagtacaggggctacgacgcaagtattctaagactcgatgaatagctagagtggatggcgggttaaatacgaaaaagagcaggggctcttatgcaaatccacacagccgaaggggtattggtggatttcggctgtttgatcataaatggatggcacaaattaaatctacttttaattgaaccggtatgccatgagatccttcggatctcaatctaacggtgctaactcattacccggagatccaatctcggccattggccaaagatctagtggcctggattaagtgaacgaagaggtgtgctccctgtctaatcacagccacacatccgccactcaacggcaccagtctcatccccatcccactcatcttccccggccagcagagcggcggccagacagcacacggcggcgcccttggcccgtgcggcggctccacccatctggcgacgaaatccgcgccctcttctagatacaaccaaattcactgccacccgaacctattgggataataattatcccggattgcgatcccagcggctcgggccaccatgatccgcggacaatggtgaagcggcggcggtgcccggccattcggtctacctgaattcgaattcaaacacagccaaggacaagggagcgaggtagaagtcttgaacgagatggaatgcttaccggtcaacagggtcgcgcaggaaccggttctcgacgccgggacgtgtgatttgctccgaccaccaattccagcccgccagtcggttaattcgccctaccgaagcaacgtacgcgccacgcgtgctctagtacagctctggtagacagccgacgaggccaaacccaggccaatcccaagccgacgctcgcggcactctccttccctttctactccgacggggcgctggggctttcaggtctaccgctgagctcgactggatggaggagggtgaggccctaggctttatcctccccccatcgcccgagatcacggtcaatttggttgcaacagctcgatccgagccccatggacccgagcgcttgcggttctgttgcgatttccacggcgagcaaaggacgaggatgaccaaggggacccgccagacagtgagacaagctgtgccaacaggaaacgcgggcacgggcagaatcaagcccaaggccgaccgatgggtcccaccccgccagtgacacacgcgcggattgggctggctgaaggaggaaagggagtgggccgccagggaggtttcagcccaagtgcttttgttctctttttttatttcctattttgtttcctaatcaaaaattcaaactaaattcgaattctggttttaatctctaggtttcaaacatcaaaacaaattctcaaataaagttctagtaggaagaattataggtactcatatatatttttccttgtatattttcttttcttatttctctttctattctcaagttctattttcaaacttaaacttgttttcacacttttgagtacaaaacaagaacctca

SEQ ID NO: 165351 - DNA, 699 bp, Zea Mays
gcgagttcatgaagtttgttgcatagcgatgtgctgagagcgaggagatcctatctttagaattggagctacaatagaggaagaatgaagatactactcggtcatatgtatgttctcttttttagtctttgtctttatgctctattttattttatatgatacacttgtactcttatcctattaaaaccggcatagggctttattaaatcctggatccaccactatgttaggtattttgatagacttgtgctttacccttggtgtggagcgtggtttcccctatttcgctgtgagccacaatcgatttcgttagtcatgcatgtgaggtgcgatattgcactctcgattctccctggctagtgtgctagatgcaatgtctggtaatatatttaagaaatagttcgttccttggcgatgatggacatgaatgttgttatacactcgaaattcttaggtgcagcatgtacttagcgcagggagagacgtggttgatagtttacgataacaaaagatgcagcaagtggtaaacacatgttgctttgatgccttgacgtggaagtagttctgaatttgtaggagccatgcaagccttgtgtagttgtgtgtactgcaccccttgttgcttgtagcaaagtttattagcaggtgagtggaacttgcatttcatactgttatatatgttgataccagaatgtgaag

SEQ ID NO: 165352 - DNA, 745 bp, Zea Mays
gtgtttggaagacgagatatgtttagttagaaaggtgtgttatcaaacgtggtgttggttggatgtgataagtaaattggaagtgtgggttgtctgagcactgtgttgtcgaatgtgtgtatcgaaatgcgttgtagtagtgattgcgttaacttgaacaaagagtctcaagtgcatgccgtgctatggttgtatttgagatagtaaattataagagttgcgcaatatgaggttcgatcaatgtagttaatattgattggactgtagagaggtggtgacatgccaaagtagtcatcgcttcctctacggttaagtcgaagtcatgtatgatcatgctatttacgtggtgaatgtgtttgttgaatgtatgtggtaattttagtgcactaaatgacacaggtaaaaattagtagtgctcatgtggtgtctaagctaaaatgcgaactagtgggtgaaaagtgcttcgatatacacatatgccggatttgatgattgtggtgaatgcgttgattaattgtgtatggtagttctagagcgcgaaataacttgtataaaaatttgtaagtctacttgttagttctcacttggttattttaactctaacaattgtcaaagtgttagaataattcaagtatctagaacgcggcaaattcttgaattatatagcagctgaaatttattaattgctgttttggactgcacgcagtgatttccccgtgctgtatgtttgatgaactaaattata

SEQ ID NO: 165353 - DNA, 417 bp, Zea Mays
atgatagtcttggctcaggtacctcagccagagggtcaccaatactgatgtggaaaccttagcgggtgattaggagcttgttgatctatttggggcacttgtgagagggccaagccttgtgtgcgatcaaccatgccatagtggtgaaaaatctgtccgtatggagcacttgattattacatagattaaggtggagttataccttgttcacatgctctaatgagaactagtggagagtcgcccaatgccttcagaaacatcaacatgtatgtaaaccgttttttattttgagcatctatatttgtgcaattacttcatgaatttatattttacttgaattgtatgctagtatagagttagaactaggttgttgtgtagttagatagaaaatactattacgcacgaagggtgaaatga

SEQ ID NO: 165354 - DNA, 1088 bp, Zea Mays
cgggttattaacctaaatccagaggggtctaaatgctaattttctcggccgaaggagtatggcgcgctcctgaccgcccgatcttggatgggcggcgcagattaaatcaagcaccaatcgaaacggtacacaacccgagccgcacaatagaacttcaacgtctcagatttaaatgacccatactaatttactaccggcctattgagatcggacggcgcacgatcctcacccgaagcggtacgcatcaggctcaatcgctaccgtaggtgctcgatccgacggcgagctcgtatctctcccctcccctcggtcagtgcggcggcgccgcccagaatggtggtggttcatggccagcgttcgcccgaatccagtgctagggccactaatcccccaattatgtcgacctacacaatgccacaagtgcgaccaagagggtgaatgacataccagggcaagagacggcctgagggaagctacccacggcgagaagcggattcgcggcggccctcctgctccggtgagcaattgattcccggtgactccgtcaaccgcgctccggagctcaagcaccgtcggtagcttcactcctatgacctagggcaactctccgaggctggcaaggtagaaatggcgaggttcaccgcggcggcgtgacgctcatagcttgcggcggaaacaccctctcccaggaccaggtctctctagcggcgggatggtggagggtttggctcggcgcacgacgcggctacttaagtctaaattcccgaggcaaaattgcaacggcaatcaccgggattgaaggcgcgacgcggtcggccatgcggggtagcagcgtgaagttcgcgggaggttgaggaaggagatgagatcgtggctgacggcgcaacagccgcggccgaatcggccgggagattgacgaggtttgggtcattagctccgcgcgacgagggcctggcttcgcgatttcaccgtggactctatgcacggggcgccgcggagcttggctggcggagaagaagggaagcctgactgataggtggggtcatcgtgtctgtgagctcacgattccgtgcatgacaggataactg

SEQ ID NO: 165355 - DNA, 352 bp, Zea Mays
tagtgttctagttctaatccaaatgagctaatatgttttatagagatttcatgataccaatataatggacagtgatgaaaatgaaagccaaatggtaagaacaatgaacatggtatatggctgaacatcatgatacaacagaagaaacattatgttcaagaatcgatcaaattaaaccaaaatggatatcctaataaacgaatggattaagatgtgttctcacaaaactagattgcgctagaaacagtgaactattttgagataataactaccaaatcggtaactcttccatcaagagggtgggccggtgattcgaggtgttgattaagatgtgttctcacttttaaccatc

SEQ ID NO: 165356 - DNA, 385 bp, Zea Mays
aaagggcgccagtgattggcggctaggaaggaaagggctagaaaggaaaggcctaggagtgattggcggctaggaaggaaaggcctaggaaagaaactaagttttgggcaggttatataatcaaggagagcttccccatttccgctggccgctggccttataaattgattgtaatcggatctttgaaggcaagcaataatcagttgtctctcacctttctacctctgttaagcctgtggttgggaggcataatccccaccggagaagatggctgacggctacgaactacgtagccgcggtcagccgagtcaagggtacacagtccttgacagcttggtatcagagcaccgtcatcgacgccctgtccagacgagacaccgaggag

SEQ ID NO: 165357 - DNA, 417 bp, Zea Mays
actacccgaggtgccatggggaggcacgccttgtcgggtacagcgacagcgaccacgccggtgacatcgacaccagcaagagcacaagcgagatcctcttcttcctcggcaagtgccccatcagctggaagtcagtcaagcagcaggtggaggccatgtccagctgcgaggccgagtacatagcggcctacaccgcttcaactcaggtgctctggcttgctcgcctgctcggtgatctcctcgggagagacgttggagcagtggaactctgggtggacagctagtccgccctggcattggccatgaaccccgtgtttcatgaacggagcaagcacatacgggtgaggtaccacttcatccgtgactgtttgacagaaggaagcatcaaggcgcgctacatcaacaccaaggatcagc

SEQ ID NO: 165358 - DNA, 872 bp, Zea Mays
tgatgctactatcattgttgcccaactttattccaatcaacttaaaagaagaagcaataacattattctgcaatggaagaattgaatgagttatgtgatttttaccttgtcctgtcgccatatctaggttccgtcctgctttgagacgttctgcccggcccagggatccctctcccgttgatgccgcgcgacgtttactccaacacagaaactcctggctgtcatcagctttcggaattgcaaccatcattttaacctcattctgtatccgaacttcttcagcaatataggactcaccaccccaacctgcttctgatccatgctgttttcctcaaccataatatgctcctgctcaactcgaacatcttctgtagcagaaaatagtacctgtttgaccaccttggaagaagaaattccctgctactcagttcccccttcttttcttctctattctgtttagcatcatacattgacttctcctctgcagcatcgccattagtggcctccccattgccatcctccgtaatatcatccatgtccattggctccggattggagtcctccaagttcttctccacacgaaaacgaagctcatataaaaagtcaccaatgactacatccacataccgtgggataatattaggatctaatactaacacttggagtcgacaccgaccatattgtctggtaaaaatcatatccacctcctttgacactccaaggattgagccaacagcccatataactgggaaatctcttaattcctctggcaatccagtaaattggacccacacttttggcataacatacttcacttcgtcatctacagtagcctctttgatttgcagttttgccttaaactttgtttgcac

SEQ ID NO: 165359 - DNA, 772 bp, Zea Mays
ggatttaatatcaaaacgaaggccatctagaaatcgcatggtgtaatacagtgggtctgacatttcctggtaactattgagctgatcgaccaactgagcaaaacgttccacatattcccccaccgacccttgctgccggatatgaaataattgacgcactaggctagcatgctgatctttcccaaatctctcacggatcaagttcccaaactctagccaagacaaactagcaagcttatgctcaactgaatttaaccaacgtgcagccgccccagcgaagtgcatggttgcaactttaacccacacacaagggtgcacggcgtacatgtcaaagtagtcttcacaatgtttttgccagagttttgggttttgaccatcgaacccaggaaaattgactttaggtaaatggcccaagtagggagagaactgggatccatgtgcatgactaccgaatgcatctggaggagggccatatggacgggtgggtctatggagcatgaaatcgggcataccattgtgtgggaggtgggttcgggtaaatatatgcccaaagccagtctcccgatgtttcaagtcattgcgatgccccataggaccatcggccgcgcaaacggtagcagacgggcgctacgtggttggtgggcgtggacccaagacgcccatctcagatctgaagcctggcggcgcagatcggagggctgatgcagagaacttggcgaagtcgtcgcagaggcggtcgacagagtacttgacgtcatccactgctgcctcc

SEQ ID NO: 165360 - DNA, 717 bp, Zea Mays
gccatattcagataaccttaatgaaaacagaatggacaacgttacaaaagctatcgagtgccattcaacactcgacggaatggacaacccaggttcacagtacttcagtaccaagttcagttaccttacacaagctaactattacacggataccttacacaagctgtcccttacacaaataacacatctagtgccgttaaacaacacccatattactctacttcatctgacgatccgaaagctcttcagaactgacatcatctagtgcccattccccaccacccatatgttcatcttcagcaaattggttgttgaaccactcagataatggtggcgatggaccagcttcgagatcttctaaacgttgtgcttcgtcctcaagtgactgagcaagctcatacacgcgccacattgcaaagttcactgacacctctttggccgtatctggcgaatccataatctcgtctccagccaaatctttcaactccttcccaactacacgcatctttgtaatggcttcggcgaggtcactacgaactgtttcaaatcgggtaatctgcgaaaccccaaaaattgctattggatttcaacatagtactgcatattattgaacttagttcaacccttaccgacactgaacgaggtgccgagcagtgattgacgccggctgtgagctctgttcgacagaaaacagttaacaattaaagccactcgccc

SEQ ID NO: 165361 - DNA, 1054 bp, Zea Mays
tagacctaactaattctagggatttgatatgacagagactactttcagcttccctactattttttcccaaatccacattcagaatattagctatatctattaattcagaatctgaggaattcagaacggagaaagggttatgcgaattacctttggatagaaaagcatctttggctgcaactctagaaatagctttctcagtcacattcatctcttcagaggtttccagtctgggactccttcttggaccttcagcctgctcacctactttttgcttccctttcttttcattctccgcttgattatacttcttagtaactgcatcctcttttttatcatccacctcttcttgtggtgtgcttatatcaaccccaacactttttgctagagcttccaattcttgagaactgagcaagtcttcttcactatcttcgagattcactttatcatcatcataatctgagccctccaccagaccctcggacacactagaccttatttttactttatcatcttctagagaaatgacagttttgtcaaaatctgtcccagcctgactgtttttagtttgtaagaacacatgtttctcctcatctgtctctttccttatctttttcccatttttccccttttcccaccaccccctatgctgggtatccacagaagctctctttcccaagttaccactctcttcattccaaccttcctcttcaacgccatcaattttgaaaaaaaatgtcaaacaggtaaggttttaccccaacttcaagcacaggggggatcatagagatgcttttgacatgcaccttgaacctcacgcaattttgcatttctaaagcttttagatccacctcctcaacagcacccaatgccgagcctagctcgcaaatagcctggaaattacgtaactcctcaggaacattttctgccaccacccatatcgtatgtagtcttgccttggcagtggctgaagatatccatggaaccactgagattttcactcctgacatcttcatttttaactctggaaattgaaccatttcatccagtctct

SEQ ID NO: 165362 - DNA, 893 bp, Zea Mays
tttatattaagaagataaggtccaaaatagactggtacaagagtaaaacaaccacccgacggtggccaaaacaatacataaagagaaacatatcacagaactaataactgaccttcttcccagaagtgcagtttataattaattcatctccttgtacctcctccaccaacccatcaatccaagccacctcagcatcctcaacccaaacttgagaacccactgtaaagcggactttggatgcctgaagcagaatatgcacaagaacacaaccaatgtcagttgacaagtcattacagtaaactaacaagtgtgaagaatgatgagtgaataaagaatggaaaagcctacaatatctcaatccaaaaatacagtgaggagaaacatttattgagaaagtaaatagttgagaagttcctgaatatcagatccttccattgtgtttgaacttacaaatgccatatgaggatccacatctggtaataataggacataactagggctggacaaaaatctcaaagctcggcagctcactcaactcagctcgttagtgcttagtggcttggttcggctcggctcgtttatattttcaatgagctgagacagcattttagcccatgtagttaacgagccaactcgtgagctggcttgcaaacctaacaagccaaagttattgatcttgaatttatattattttcaattacttcatgtcttgcactttacaattggttgatgactgatctagatcctgtaacttgggattattatgactttacactttgttcttaatgggcgtatggatgctttatgtatgtggtatagagtatggatcattgatgtatagtgcaatgctatagtatattgttacacttgtatatatgttagcatatatattt

SEQ ID NO: 165363 - DNA, 431 bp, Zea Mays
ttcaccggcactcaaaggcggcatcgggttgacctcagcctcgggcgacgtgccgaccagatctccaagatcctcgacatcctcggcacgcgccatctacaacaacagcacactcattcagcaaaaccacacatacccacacaaccacacaaaacaaaagataacctttacctgctctatcgcccggtcagaccgctccttaaccgcctcccgaccgtgcggaccccacatcctatcgaagagtgcccccgctgattgcttcaccacagggtcttcggccttgaaaatttcacgttcaaagttctcgtctaattggtcgaagacctcgtagtgtcggcaccccttgcgggacaacgcattcagggtcccctcgcaggtgacgagggaggcgaaggacatgaaaccctacacaatagtcgggagcaccagca

SEQ ID NO: 165364 - DNA, 615 bp, Zea Mays
cttccacacaacattgacgtgatgcacactgaaaagaatgttgtcgaggcactttgggcaacaattatggacattcctgataagtcaaaggataacgtaaaggcaagagtggatctgacagagttatgtgatacaccaaaccaagagatgaagccacctagtggtggaaatacatggagaatgcctaaggccgatttcgtcctaagcagggcctagaggaaggaagtacttcagtggatcaagaagtgatgttccctgatgggtatgcaactaacttgagtaggggggtgaacttagctactatgcgagtcttagggatgaagagtctatgaactcaattgagtgtcttttaacttgtgaatacttgcagggccaaagagatccatctatgagtgccgagttgagacaagtagccaacaactttgcttatagggtcaagaaatattctgggtatgacgtcaatggatattgttttcgcacaacaagctacgaccaaagttggcccaatcaaaaaacaacgtgttatggagtctttacgcccggccttgacgaggtcgattattttggatgaatcgaagaaatatatgaactcaattttcatggttccaaacctct

SEQ ID NO: 165365 - DNA, 870 bp, Zea Mays
ccaagggcacatttccctttcagtctcaacccggtgtaccgaagaagatcattttggatagaggatcatagtttacctccagattttggaaaagttttcatgagaatatggatacgaagttgaattttagttcggcctaccatcgtcagactgatggatagactaaaaagactaatcaagtgttggaggacatgttgagagcttgtgccctttagcgtggtagtagttgggacaagagtctaccttatactgagttctcataatagttgccaggccagtttgaagatgttaccgttcgagactctgtatggcaggaaatgcaggactcctctatattggatcagactaggggaagatagttctttgggtttgaacttattcaataggcagaaaaaaaccaagtccgtataattcgggagaatttgagggtagctcaaaccaggaaaaagagctatgctgataataaaaggaggccactagaatttgaggaaggagattatgtgtacctcaaagtgtcatcacttcgtggaatgaggatattcaaagtcaagggaaaattgtcccctcgctatattggacgaatcagaatttttaggcatgttggaaagatggcctatcaactcgagctacctaataatatatctggtgagcataatgtttatgtctcaacttaagaagtgtctccgtgtccctgaagaacagttaccaatggaagagctcggtgttcagggagatttaacttacacggagtatcctatcaagattcttgatacattgactcgagttgcaaggaatagggtgataaagatgtgcaaagtgcaatggagtcaccatggcaaagatgaagcaacacggggaaagagaagaaga

SEQ ID NO: 165366 - DNA, 659 bp, Zea Mays
ccgaaggaagccaccgctggctccagccaaggtggcctggtttatctgaagtatacttttcggttcagaaaccagtttgatgagccaaatgatgattggttgaatgctatagaagccacaagtgatgagatacttgcagcgtactcgaagacagaagatgaagctatggcagttgccttcggcgctcgcggcaagaagaggttgaatagagtatttgatgttattgggttcgtttacccggactactgctaccccgcccagaagcaagggaggaaaaggaaagccgctacctcggcatctactgatgtgtcgaagtcaaagaaaatcaaagttttgacacgtagacccaggcgcatcgagacggccgatgtgtagaagttaagtgaaaaggtggaaacaatcccctagccatagagactgctcctactgtgcctattgaagctatcgcagacccaacccgagagccagagccagaaaaggtagcagaaaaagcaccagagcagccgaagatgatggtgacaacactgctgaagctgccagctaccacaagaactccaaggaataggaggatggccagtgtcttggaagctgttatagaatcagttaaaactccgcctccttcttttgccaaagcttctggtagcaaaactgaagatgtc

SEQ ID NO: 165367 - DNA, 806 bp, Zea Mays
cgctcgccgatgccgccaacgtcgcttgcacgggaagggagagagcaatggaatagtctgggatgacgcgctagggagagcccaccggcgtataacgtatgttcctggtccgccacatttataggatgggaatcacaccttaaaatttagagtaggaaggggtagaggaggtctcgaaacatccaaaactgcaggcacacacaacttctaagattcgaacctcaacccatcaaaatcaaaagagagcgttagatgagttttgataactagttgggataagaaaattacttgttgaaaaaagcacgaatgatatgtgttaagggtacgactggaaattagcctccgccttggtatgtgaaattacttcttgttaaaagactctaggaattgaaggcatgtccgcgcttcatggaggctttgcccatcaacagatcgacgcgtggatggctgcgcggacgtgaatattttctagactacatctgatttctcctcagtcctcacccccgtgcttcacgcctaataccacatctccaaagcctgttggctgtgtccattcgtgccaggccagggacaggcacatactgtgtgaggcactgaggcatggacacgtcttgagtgatggctaaggccatgatgtggggtccgcctatgctcccaccacactcacgtctcatctccactccatcctctgtactcctcttcctcttcccttatctctactctctccttactccagccgcccacgcgtctcctccactcccgtagtggtgaggtttctctccctccattcctttcgcctgctctcc

SEQ ID NO: 165368 - DNA, 639 bp, Zea Mays
gacgttatgctgtcgtcggtatctgctgagatcggtttcaagctttgggaaaccaacacttttcgataaagtgctgacaactttcgccccagtccggtctcgaaggcaacctaagctctcttcgtctataccactgaagagcagcgcccctggataatacccgcaagatatagcatagtccttcaactcttctttttcagctttagacaaatcttgcccaattatgttttgaaagttgaaatttctttcttccgaagcatcttcggcaagctccttctcttttccaggcatcttctcccttttttcaggcactgcagtcggggtttcctcagcagctgcagcagtttcttcctcagccatattcaaaatcatttcatcaatgtcagaaagtgtgttttccaaatttgtggcttcggctgctgcagcttcggaagtagaagcttcggcaggagcagcttcggctgctgttgctttcggcactgaggccgacggcagtgtttcttcaatagcctcaatgacagtaataatccttcgcttttttggttcagcgggcttctcggcaaccgaaggctccttcttctataaaagcttcatcagttctggtcccagcggacttagcttatttggtagagattcggt

SEQ ID NO: 165369 - DNA, 833 bp, Zea Mays
ccctagttgactgcgaacgccgtaacaaaccaagcggatacgctggtgaagatcaaggattatgttggccgaactcgcatacctatgcctacaaaattcaagctaccgcactctgttcaccccaacctagcccgcaagtctcagagcaaatcaagtgctaacagagagagatcggtgtgagggaatctaccgccgccatcgaacctatgggggttggcgcagggacctcgtcgagcttctcgtgtgtgcgctagggcaggaggggagcgtccgcttcatcaattggtggggtgtggtcccagagccatcacaattgctcgctggatcgaggaaatccccaccgtaccgccatcctttgtcaccagggcgctgcgtggcgcaattaccggtaagaaatccctaatttggctcacctatgtctctgctacgtattgcacacctcggactggagtttagaactgggaagccatgaatgttgtggcccggccatggtctctgccgtgcggacaccaccaccgcctctggccatcgggggttgtggactgggtcctggtcatcggatccaagtgaacggtggagattagaatgacgcgtaccccttcggccaggattgatccgggtcgttagatcttgagggtgtggtcctgatttcagtgagcatgtcgtttcgatggttcgcttttgaccatcaaatctggatctggtggcctctgttccataccggttctgggatggccctttttaatcagggccgtcgatttatgatcgcgcgatagaaaacctccataccccttcgaccccatcaaaatgcagaagagcccctgtcctctctt

SEQ ID NO: 165370 - DNA, 1936 bp, Zea Mays
aaggcgggcgtttgatgacatcctgcaacccaatgacgttttcatggaacataatcatccggaggtatcgtcttgctggtatgggcgacatggcagttcatatgtttttcatgatgttacgggctggcgttaggcggccgctggtatatactgtcgcacatgcaatgcttgcttgccgggatagctgcgcacttaaagaagggaagtgcatacatagtttagttttgtgctccggcgagggtatgaccaccaccacatacatgtgcggagctctgttgtagacatgtatgccaagtgcggcgacattgatgcagcacaaaggctcttcaacctggccccaaagaaggatgtggtgatgtccacttcggttgtgtcagggtagagttggctgtttgtgggaggatcgctgatgcaaaactggtgtttgatggcatggaacaacacaatttggtgtcctggaatgctatgttgactggttatgtcaagcccatggatctggccggtgctttagatttgttccagcagatgaggcagaggagacgaaggagcttgatgtagttacactggcttctgtactcaatgcctgtacagggctgcttgaccttgggaaaggtgaggagctccatgcacttgtgaggttgtattccaaatgtggatgcctgaggactgcagaacgtcttcttctatttgaaatgggatcagagagagagagagagagagagagatactcctggaactcgatcatctcaggttacgaacgccactccatgagtgcggacgctctcagcatgccctacccctacgtgagatgcaatccgaggcaaaacctagccagtcaacgtttttcagctctgcccttgcagcctgtgcgaacatatttctgcttaagcatgggaagcacattcatgcatacatgatcagaaacaggaacgacattgacgatatactgcgaagtgcgctggttgatatgtattccaagtgtaggctgtttgattattccgcccgggtctttgagttagggtcatctaatgatgtcgtcctgtggaattctatgatctttgcatgcgcgtaccatagtgaaggtgactctggtttcgtgtatctgtgaggggcatgtcaggttgggaaggagttacttcactctgatgagtacaacagcatcgttccacggatcgaacaccatgaatgcatgatcgagctgttgggaaagcatatggatacatggttgagctagaggatttcgtggaccacatgccctttgagccaacaaccgccatgtggctcaggatctttgactgctgcagggaatatgggagcagaaaattaggggagagggctgcgcagcgcatcaatgatagcaaaccgtcatatttgttcagtccgctcctgtctacgaatgcagtggctgtgacgatgcagagcccatgtcattcttgctgaggctgacaaaactggtgatgattgattgagattcttgctgaactgtgaggggttttaggtggctgagaagctgaatgggctgtctgagatgccacaaacttgaatttgatcttttagctgcctatgaacgggtacaatcagcacttacgatagtgataccctgctaagacaagaattcaggctgaaaacagctcatgttccctcgccactccctcgcggctccatctgcgccgtgcccccccccccccccccccctcaaatcaccaggtccaccaccacggcacgcccacgcccaccgatcgggctcccaggatgatggcggtcggtggaagacacgacaccgtatgccctcctgtcggcggatcgatcgacccagatggatctgagagtctgagctgagtacgtacgtacgcacgttcactgttacagcgttacgcatccggtacacgtcacatgtcagtcagtggcacacggtgaaactcggcagccggattct

SEQ ID NO: 165371 - DNA, 721 bp, Zea Mays
gttccgtcacactattggatttgcctgccttcctgctagcagccggtgcagactctgaggttcacctctcctatttgcctggacttctgactcttctgactatcagcagcagatatgttgaggaatgggtccaagttttctatgcttctgtatggatcgaccctgatcaccagtggatgaggttctgctttgagcgagaggatgtcactattcttgccagccagattcgccagctatttggatttcccgagtcatcgactcgtcttcacagcttgtgctatggtacttctgatcctcctcggcgccctcacggtggagttgctcctgttatagctcacatcgtggctttgttccgatcgcccttctgagatgggtcgcgacgttctccgacagatttcaccataacgaccaagtttttatatcagctcatgagacggacgcttctaccgcggatgggttacagggaggctgccactcatatccagctctggctccttggtgccctagtctctcactccgagtttgatgttgtggatttcctcatttgtgagatcgaggacaccgtattggatggtctacgtgccaggcaacagctaccgtatgctcactatctttgccacatcttcgctcagctgattcggccaccacagtttcagggcactcttgaggcctctcgcctacactttggttcctaccgtccagcccttgaggaccctgtgtc

SEQ ID NO: 165372 - DNA, 1332 bp, Zea Mays
cagaaatcaaaactctatcatcaggtgcgccggcctctaaggcgacctcctgacccgaagctcgtgctgctgccatgcaaccagaatgtggaggagaagacccgacgtgaacatccatggaagtatgagaaggagaacccgctcggacaccctcgggggctgggtcatagctcgtgttgcccacccgagccggatcatcaccggcaacaccctcgggggctgggtaatcgcaagcgccatccttggggaccgagttctctgtagcagccacctctaaggctgaaggattttcaaccacttccataggaatggagcaatccagatcagcctcttgactcttaaaaccgcgctccaaggtcgatgaggcacgagacgctgctcaggataactctaccccgacagcaggcacatcagcacaaatttccatcattccaccatctgccggctccgacaacagatcttcagggaccatatcttcgagagtctgatcaaaatttgccagagacaattcttgcagaccaacgagagcagacaaagctggagaaggaacaccactactctccccactggctatatagcgccgactgttcttccgaattaagggtttttcctcctcctcttcctcatcctcatcaataatacggacagtacacccattgggttcagccctggccggattacacccattggggtcagcatcatcaaggtcacacccattggggtcgacaccagtcgggtcacacccattgggttcagcttcagtaaaaattggcactggcacttccccggaagcaggagcagaagggccaacatcctgattcaagcatgacactcgccgaagacgtctctttttctttttcttcccctcagcaggagaggttggatgattggtttggcgaggacgcttcgggcgaatactatcagatctctgaatgtccaaagtttttctagactctgggatgggtgctacagctagtgtttcagcagggaccgaatcagaggaatcctcagccagcatgtccagcatggcacttatttctgcgttgctcggattcaaaggcatctcaaaatgaacctgcctcttgtcatcggggatttcaccaagcgaaacaaccaatgcctcaacctcttcgggagaaggttgcactctaaggcccaagccactgtcaccagcaggaggatttgacacaaaactgataaaagccttggaaggaggcagattccaggctgagtatgcaacaagagcaccgatattcgacaccttgcctctaagaatcatctcaagctggcttaccagatccacagcaggaacccttctgttggtaacccggg

SEQ ID NO: 165373 - DNA, 466 bp, Zea Mays
cgagatccccgaccgtgggcggcagagcagcgacttcggcgagcccataccagccggaaaatgcaacggctatgcttccccgttgcacaacacctaattctacccctaacaaccatttcccctcactcaattgcaaggttctagctcataatcactttgtccacggtgacggcgcatccccgaggataatccaagatgttcccggtgatctagcgtgatctagttcaattggccaggctgctaagcatctacagtacacagggatgttgaaatgagagtgaggaaggcatgatcggacctgtggagagctagccacggcgagctaactcacggcggagttttgactgaattgtgggaactttgaaattggagcactctggtggacgatctgaggcatgggctggtgcgttgggtgcgtaactacctagaagagctcatgacatgctcaatttataaggcccgaggg

SEQ ID NO: 165374 - DNA, 959 bp, Zea Mays
gtcgcaacaagaatcgtcgtcacgacaatgtcgtggtggtggctctccttggcattccgtctacaatccctggacaagtacaatccacatgtggcctagatccatgtctacaggttcctctcctcgccctagacaacagcagcaccatcctcctgctccgtcgcagtcctacctggctgcgccaggactgcctaccttgcagctggcctgctcggacccctcctgtgcccctgtcggcccttcctgcaactcctgcaacatctccagctcctcaaccttggcctccttgggctggatcttgggatcagcgagctctcgccatcaccttcagtacaatgacacttcagccaccagccaccgttactgattggattccggaccaaccataccacagctcatgctggtaacatctctctctttcgacctcctggcctcgctactccttctatcattgttggaaatggtgccactctccctgtcacctcagtaggcgacacggttttgccaggacctttatatcttaaaaatattctccacactccccacattattcaaaaccttctctttgttcgtcgttttactactgataattgttgctctatggaatttgatccttttggtgtttctgtgaaggatctccgctccaatagcgtgattattaggtccaatagtgttggtccgcactacaccatgcgcctgtgcagttcatccccttcgacaacttgtgccctagctgcaatttcttctcccacatggcaccgtcgcctcggccaccccggcaccgatgttttgtcccaacttgatagttccttagccattcgatgttctcgtagttcccttgagttgtgtcatgcttgtcaattaggtcgtcacactagattacctttttctagctcatctacctgtactaagcaaccctttgatatcattcattgtgatctatggacatcttcaattgc

SEQ ID NO: 165375 - DNA, 629 bp, Zea Mays
gctgaaacagtggtgctctggctcaggctgctcgtcctcgcccgccaattctcgaagcacattggtgcccgacgccgtcagctgccgcacccaggggagctctccgtcaccgcgcgacatccgaccaccgcggaccgaccttttcgccgcgacgattgctggtgagaacacctcctccagtctcgccatggcctagtagagctatcgcacacgttcaattagaaaatgggggcagggatggcaaggccgggcaacaccagcgaggttggggaatggcgccgccgtgtggagacctggccaccgcgcgttggggaattaggcgagggggagagtctcctgtccgttcgtccaggatcgaacgacgtggattagatgcagctcgacggtaggctgttttgctctacttcgttggatggggatcaagtgtatgaggagccgtgctggattatgtgtgaccggttccgtccaaatccaatcggatggatcagatgattctgagtaaaaacaagatctgcgccgtcaattttagatctggtggccaggaacgcgtaccgttcgatatcaacctagatctaatctgggccaaccattcctaatcgggcggtccggattggccgataccctttcgt

SEQ ID NO: 165376 - DNA, 346 bp, Zea Mays
acgcagtatttgtgtcgtacgaacttggctgcgtcatgtgattgctatgtcgcgctctccattaattggatcgctcccgttgagtcagaccgccatcgctgagtcgcgtatttttcgcatgccctgtaggcactgtctgtctgccgtgatcatcgagccacaattgcgcatgttgcgcacattgcgtggacttatcgtgtaccccaattaccgagtcataattgtgtctgttatgcttattacgaaggcttgttgtgttgtcgtagccctgatggccgcacacgcgttgacaccagacgctagagcttgtactcgcgtggattgtggtgggttgttcaaggtcctg

SEQ ID NO: 165377 - DNA, 847 bp, Zea Mays
ggatgatgccctgctccagcatggcggcgcactgccgctcgagctcgtccttctgcatctgagggtaccggtacggccgcactgccaccggcgtggtctcgggcagcaggtgtatgcagtggtcgtaggggcgggctggtggaagaccgcgtggtgtgtcgaagacggcttcgtgctgacataggagctcgtccaacagcgcgtggtgcgggtccggaactaccgctagcagcgaccgctgctgggagggtgcacccggggcgcccacacactgccacgtgacgcggcggccctcgtgcaggaaggatacggtgagcccctcgaagtcccaggtgaggggacccagcgtgcccaggaagtcgacgccgaggatgaagtcgaagcagccgagcgcgaggcctacgcaggtgatggagaagggcgccccgaagatgtcgacgggcacgttgcgtgcaaggccttcacacggcacgcgctcgccgttggccactgtaacgcgaagctggtcgcccccctgaggagcgagtccaaggcgccgcatggccgcgccctggaggaacgtgtgggtggagctggtgtccaggagggcgaggaggcgctcgcccttgatcgtcacgggcaggagcatagtttggtacgtcctgatgcctgccagagcgtgtacagagaccacaagagcgtgatcgtgagcgtccgctgcggtggcggcttcttcaggcgaggccgcggccgcatcgtcgactgccgcctcctcgtcggtgtcgaggaaatcgtccacctccaggaagaacaagtgggggcatatgtgcccacgcacgtactgctcgtcgcagttgtagcagaggcc

SEQ ID NO: 165378 - DNA, 582 bp, Zea Mays
tcttatcaaaccaagaagcactactgtcaacggctaccgctgcaaaagtcgcaaagaacagcagaaatcatttcccagatctcactcttctgcgaacgatgtgcacattcatggtgtacttcatggtcttcagtggctcaaagaggcagatatctcccagctgcaaattgttgtcacgagcaaactctgcccacccaatgcgaagccttttggattcaccttgatctttccgaacctcaagaatcacttcccagctcttgccatgacactgaagaatcaccgctccgctcttgaatgggagacatacatcaggatattttctggagaagacctggttagagagggaaacatgtttttcaatttcagggttggaatcgaaatgcagtatcggtcctagaaccaaaagagagagagagagagaaagagaaacctaactcaccatatcttgagatcgtccaaaaatgtttgacttcttcacgacaaacacgtagattgggatttcagaacaaatagctcggagtctctctttcacttttctcctctgcatactatcaaggatggtgcctcgtgggagtatgcaac

SEQ ID NO: 165379 - DNA, 650 bp, Zea Mays
gttttggaattagaggatgaaaagaggggaggggtagattagggtttcaaacctaggttaggattttgggatgttacaaacctaccccacttaaaggaatctcgccctcgagattcagacagggctcgagaaaaggtaaggatattccttcctcagagagtcctcactttcctaggtggcttcctcttctccatctctgctccactgcaccttacagagtctcacttccaagttgcgcgtccttctgactgctgagtcgagaatcttcactggcttttcccggtattggagatccttttgaatctgaattgcatctgcctcgatgtggttttctggtacttttaggcatttgcggagctgagacacatggaacacattgtgaatacctgacatggattctggtagctcaagacggtatgctgcgggtcctactcgggcaatgacggggtagggaccgacgaaacgtggtgctagctttcctttcatttggaaccttttgacaccacacatcggggagaccttgagataaacgaaatctccttcctcgaatctgagttctcttcgtctattgtctgcgtaactcttctgtcgactctgagcttcaagtaacctcctgcggatcaaggtaactttctcttcggcttctttaa

SEQ ID NO: 165380 - DNA, 792 bp, Zea Mays
cgaccatcttggcgtccgggccgcgtgtgagctgaagttgggtcggtgatcgtcgcgggttcgcggtggagctttccgcgggtgagccaagtggagtcggtcggggaagcggcccaaattgctcaccgtcgtcgttgacccgcagacttccgccgtgcaccgtgggcgagcctcctgatgacctaatccccgataaagttcccacctctgtgctcgccaccttcccctcttcgtttcgcatcgaatcgcgttggacatagagccttcctggcgtgcccgggagttcgccggtgatggcgccgccgccctggccgtcggccgtcgctcggtattgagagaataggaagactgtacgtcggccgtagattggggaatcaacggttgtgatcgggcacacccatcgtttgcacaaggttcgatccgtgccgtacatcttagatccgtcggtgccgatcgcgcacggcttcattaaatcacggtcgtcgatctcacgatcaacgactctggtagtataccggttggatacaaatgtgcgatctgatctaggtcgtccagaaaggatccaacggctctgccgcgatgataccccttcgcggtgcgggttttgcaaaaggacccttacggttttggagattagaacccgccgtccaactctgggattcctgagtctgtgtaaaaaattatggtttagcccctggactatctagtaatgatgcgctcggtccagataatcagaaaatcgaataaattcatttggaaaatactttttagagcaaaaataaatgctagaat

SEQ ID NO: 165381 - DNA, 852 bp, Zea Mays
tgaattgattttgaaataatcaactcaaaggtcttcgcatcctgctttcaaaagagtttggagtagtttgacggtgacatctatccacacattgcttggtttagaatcactccgatcagaccccctgacgaattggagcccgaccggatgaacccaaaccaaggggagcctggttggacgacacttgaccgaagacttcaatgcttctactgattggacttgtgctcgatggagtctggacttccttcagtttgaccaatctctccctttgttgttgtgtatttattgtgtatatgttgcaggtcgtggtgctctagaaaacctcaaaatcccgatgatacacccaatgggtgtctatccactgaaaggtgtccattgtcttgtctcgaaatagtaaactaatgcgatggggaggtgtaacgctgtgtctgagcggttgactttgattccttctggtgccatgttatgtgaaacggtgccagccacctgactcatttcttggagacttgagccgctattgaagtcttgtgactgttcggcgaatgggcgagaaacgaacggtcgtcttccggctcctttaaataacccactcgcccccagttgccttcgtcacttgcacttgttaactcgtcctcttcccctccctcttcccttcacccccgagaacaatggctggaggcaaaggaggcaaggggaagcatcattcgtctgagggaaagcacaagcgccctctgagccctccatctgaggactttgggggcttggtggtctcggaggaggaattctcctcggagtacgatggctcgctggccccggtgtccccgcggcattgtccgacgactcagacgactc

SEQ ID NO: 165382 - DNA, 798 bp, Zea Mays
gtgtggagttgcggtcgggcctggggtcaattgctcgccggactcagggtccgtcgccgggccgcttcgcttcgtggtcggactccaccgcctacatcaagccctcggtggtcgatccgggaggaagcgcagagcacatgtattctgttcgcagcctcgtctgggcggaatttagctccaacccaccaagattcctcgccggtgtgggagcttcatcgcatcgccgccgtgtgccgtgggcagcctccctggcgtcgttcctgctcctggtatgccctcccatcttgcatgcgttagctcaggaacgcgtaggtctctcgggtttcaggaatagggcgtcggcgtgccgggacggtggccaccggtgggctccaccgtgtgtacatgtgtggtgctgcctcggagccgtggtaggatagctgaggagggtgaacgtttggttgccgttgatctggaatgtgcgaccaagatcagaacgtgcatacctctttgacgaaattaaatcttggccgttggggcgaatccgagggatgagtatggctgatggcgtgaacgtactacaaccgtggatctctgatcctgcagccatcattagataccgattcacccaattgatacgatctaatctgggcccctgaactgggatcggatggctaggattgttagataccctttcagccgcccatcttatataaaagcccctggacttattaagtataaacccgcggtcctcccctgggtggttctgagtcttggtgtcttttgcgcagaaccccctgggtttctattaaatagtgg

SEQ ID NO: 165383 - DNA, 333 bp, Zea Mays
tcttcttcttcttcgtttggcacccttggttggtggtcttcttctggattttcttcttgggagcgagcttctttagcttcttgtcatagtccaactttaaggttcgataggcctcacgggtgttggccttctcgccttctgctatgttgagacactcctggagagatgtcttttcttgcttaagctctttgacttgctgctctaggctttccacctgggagtttaggtgggtgcagtgggaggagagttcatcgtagtggttgtcaagggtgtggaggtatccggccatgtagacgatggtggggtcatcttctgtggggtctcctcctgaca

SEQ ID NO: 165384 - DNA, 1038 bp, Zea Mays
gttggacagctgattgtctagcacgacgagggctggaccatcctgagaggtgtcctctttgtgaccaggaggaggagacggcgcaacaccttttagtgttttgtgtatttgctaggcaaatctggtggcatgtctttttcccaatgggctggcaagccttgactcctcaacctcatgatcatgttttccaagactggtggaaaatgcagagaagcaggtggataaaaatcggcgcaatggcttcaattcagctgtcaatttagtcgcttggtggctgtgaaacatcgaaacgtttatgtcttcaaggggcaatcttcgtgtgcccagcaactgttacagttcatctggggtcacgccattaattggtctctagcaggagccattgggttgacaggcatttggcctgagtaatagtagttgtaggatagttctttcttatggcagtttttatgtgtctttgttttcgtcctccgtaaagaggcttgtattgtattggtgacttggtctatattggactcctcttcttaatataatgatgtgtagctctcctacacgttcgagaaaaaaaaagatggcgagtccagccagggccagaccactcatgcagaaaatggaactgtagttttttactttctcaacaactacatctcatgtattctgtatttctattattgtcaaagtaaaaccaataagaacaccatactaaaaacactttgataaccacatacacctttagggcttggatggtgagatgtaatgggaacaccacttcattatattgggaacaggagcaaaccaaccacttagtgtaaatcgtgcaagcagtcatgataatttttcaaaacagtcatctcaccgtgcatcagctttcaaaatgacccttccacctcccatggtacatttttaaatacaccctctcacctccaccaacgcacggtttgcaccaagcgtttgatttgcaccagatatgttcccaattctatttgggttgtcgtggaataccactgtagcatatttggacttttgtggaaacgaaag

SEQ ID NO: 165385 - DNA, 277 bp, Zea Mays
gaggaaaactactgcttcggccaagactgctgcttcggtcactccagatgagcctgtgccgaagagcaaaaagttgaaagtccttacccaccggccacattatattgaaccggccgtggtgcctgagtttggcggggagacttcttcagctgctgaaccaaaagagcccattcctcctacgtagaaggctgaagatccagctataatgctgaaggtacccttagccgagctagctgagtcgaagactgataaagataaggccgaagagccaaaaatt

SEQ ID NO: 165386 - DNA, 372 bp, Zea Mays
gcttttggaagctatgtcaggagcggagctgaaggtcaaggagcgttgggagaagatgatgcgaatggtggagagggtggatcggtgactggaggcgctggattcgagacaataatcggttgctgaggcgacaaagaaggaggaggaggaacatgccatactagcacgtcaggtggacgagaccgagaagacggtgtagcgccttcggctggagtgaatggtgaaggataagaaggtatggggagaatcatgattgaagggaatttggtagaaatgatcaggggagaggtgagagggaaggattcagaagaggtggtcgagaacgagaggagagggagcaacatcactttggagagagtagatatttttgtt

SEQ ID NO: 165387 - DNA, 562 bp, Zea Mays
aaagaattatttcgatctcttcattgttcagcaaaaagagaagctttgaaatagaacatacaaggccaaaaattcgttttatctaggaaaaatcaccatataactagcttttgatgaagcaaatgatgatatctgcttggcaagaacaaaacaagaccggtatccatctgggaccagaccttaacaatagataatactgctctcatacgaagaaatcatcaggagtagagaggatacaataggtctctacaatatcttcatatttctatcacaaattaccaacaccaacaacttagtggtcaagaattatggatctttcggtgccaagggccagtgacagattaatgcccaatttcgcttcaagctctatggtaatgtgggatttcatagttatttgtctactcttctcacttctggtagatcggaggtagataatggtaagcatgccaaagggtggaattcagtgtagtttggctacataaaccccaggtatgtgttgtgaatcatctaggcccctttggtaatgttttggtaattaatgacaactaccagtggactaacg

SEQ ID NO: 165388 - DNA, 715 bp, Zea Mays
tgccgcgaaggggtatccgatgatcctagccgtcagatcgactacctacggatcagattagatattcataactgtgaaccggtatgcaactcaagtcgttggatcaaagatctatgatctggattttattagggtgcgatcagatctagttcatccgatatctaatcaacggctcagatttaacctaccgaatgggtacaccacatctaatccagatcgcccaaaaccgattggacggctcctcacgtttctggctgggcaaatcaccgcaagccgatctcagccacacacagccgatcagacggccacaagatcatcccccttccgatggcgcaacaggcggcggtgccctgcaccacggtggcgcaatgccggcgagtgggcggaccggcgcacaagtgggtgagatcctacacgggcgtgtcctatacgtatagagggatgagtcgatctggacgagggagttctcaccgagtgttttgcagccctgagctctgcccacggccgagcgcagcgcagcggcggagcaagaagtgcggcgagaaatcccggcagccaccgccacccgcacagcgattacgagcttcaatcgacttcggcatgacccgaagactagccgagacgttccacaagccttccacggcgcatagcgcgtggtccgaccacggcgacggagcttcccaggcccggagcctatttctttggttttccgcgc

SEQ ID NO: 165389 - DNA, 321 bp, Zea Mays
aaaaagctcctgttgcaactcccaagaggaggaggacggccagcgtgctagacgctgttatagagaccacgaaggccttaactcctgctcttgccaagaaaactgccgaagctgccaaaatccaagtcaaagccaaagctgggccttcagggcctactgagacgaaggccgccgagcctgaagataaggtgggtcagcaaatttcagataccggcaagacgatagagcaagatatggcagaaaaagcaaaatctcctgtccccgaagccttagttgaagatattgattacattgttcggcatgcttcggggaaaaaattat

SEQ ID NO: 165390 - DNA, 656 bp, Zea Mays
atctaagtgctattaggcaactgattgttcgcaggcccaattccctcaccctctcgctggctcaattcctggttgtctgctccaagcatcccagactatataaaatacaacagactatataaaatacattaaatcggtaaaaaaagaaaaagcctgttgaagccgcatcaagcatcccacgccgctaggaaccaacagcgccgccaggaacaatcccacgccaccactcccatccgctccgctgttttggttgtcttcccacgctgtctctgtctttcgtcacccacatctcgccatgtatagacctctgcgtcccaattaatcggtagaaattggcttgttgaatgcatctgtagagattggtcgtgcttctccatttgcgccaggaagccaggatctgccccatgctaatgcaatcgacaggaaggaagaccgtacatgtgagacgatggttgcaatttatcatatattttccttgttgttttcaatttgcagagtgattgtatccacgctatgaacaaacaaacgaactgaattaggaacaggggcaattcgaccataaggaagaagcatattaaaagtaccataataacaaaaaaactcatatgcagcaacagaggtataaattgatctaactaaaacaataacaaaacatc

SEQ ID NO: 165391 - DNA, 625 bp, Zea Mays
gcgggcgagcttgcttctagccgaaggcttgtgccacgcgcccacgagccatgcggtggcactggacctctacccgagcagagaatgggaactaagagcgcatgctagcttgaagtcttggccccccttcccggcgctccatatggcatgcagggaggtccgagactctccacgggagttcgaatggtacacgtggaggtttgggacccacctataggggtccagacggcatacgtaggggtctggactcatgatagaagtcactgagcattttgacctcttggactcgtggcggcactgattttgtcctcgaacggtgagcagatattgaggccaatggccctgttagacgggttttgacccatggaccatgctgcttaattccttagtacacggttacagataaccacacggaccttgactcagtaggagatggtacctagttacggagtaccgacacacttcttgatctaacacaagactcatgcacacctcacaaacacatctagtttcagctcgtgggcactttgtcaaatgatctcttttgtcttctcttcgatgaccctcttctgcacaaacatatatgcatgatctagcctttccatcggacttccttttatttgtg

SEQ ID NO: 165392 - DNA, 1154 bp, Zea Mays
aatagaggctataaaaccatggtggcagtgggcttattggctttctcccttgatgtatggacaacgtgctatttcagttaacgaattctcagcatccagatggtcaaaggtctgtataccagcatgaatcattatttctcactatatctgtttattactaggaataaccttttctttctctttgtttttacttttcgaagtgtgtctaagaagggttacgattacaaaaattgaattattgttttttttcaacgtacgtaatgaggaattgaggatagagatagatagagcttgattttcaagagaaaaatattagcagcaccactgtctcaacagcatccaccacacactgtcacaaagcacaaaatacctcacaaagcctcgttgaagtttataagtaaattgcctaccctcttctagcttaagcttttgatttaaactggttattgtgttctaacatgatatcaaaatcagaggtcttaagttcaaatcttgttagagacttcatttgttcctgcgcccctttattttcagtttgtgcctttctctttggccccatgtgaatgagagtgttgaagtatataagtagattgactatcttctcctatcttaagttttgggttgaactggttagtgtgtccactttaacacctcgtaatacaatacaaaattaattgtgtggttgtgaaattggtctaaattgaactaaacactcctttgtcttttccactacctaatgtgttcttacatgctcattctaaaaaaacaatggttttattctttccacaaattccatatatatgatttagatagtcattgtattgcacgccattttttcggcactgaatgcttggaatttcatattattcaatctttttctttgtgggcgttcaaacataatttgattcatctacatgcatatctattgtattattctcttttagtagagaaataatttgacattgttttatgctgttagatatattttattttgacatgtaccattatataggtatttggcgttggcaacagtcccgttggatccaatgttcttattttacacaatctccctacacaagattactggtactggattggagtttgtgctttattagcttatgctatcttgttcaatgccttgtttactcttgctt

SEQ ID NO: 165393 - DNA, 545 bp, Zea Mays
agctgtcgtcccagtagaggaggggactcaagagagagtgaaatattcacctcagtctagagcagtagagcctttttgtcacaatgtcacccacctgatcttcacttgtgacaaaatccacgctgattaggctatattggctacagattcatgaacaaagtgatgcttcacctcgatatactcgctctgcccatgaaatactggggtcttcttcaacattgattgacgtgtctctctccttatacctgagatagccatattgcttgacatttgtagcagtgatatatctaccacctttttgtttcatggattggaacgtaactggaatattggccattattccagatgtgcttttcccaccatcaacatcttcagcgaaccacaccagtgttgttgggatcctctactaacatctacgcctggcccccttcttccttccaaaccaccaaatagcaaagaattcctccccaaaaaaacaaatgcaagatcggaacgaatcagcctgaaagcataagcatacattgaggctgacccgtcgtgacgca

SEQ ID NO: 165394 - DNA, 586 bp, Zea Mays
ttagcactgtgttaaccactatggtatgggcagccccttgagaggggggctcaagtatgtgaccgagccattggcctcggccttagctctcagcagaaaccaagcaggcgcaagtcaacaacaagtacaagaccataccactagccatacaatatactgggctatagagacatctcaaagtcgtggccaactcccgtcctctaggcagctccccctgggcctataaataggatagcctacgacttctggaggggcggcgaacacttcacgagttttctcctccatgcggtattggcacttgcctcaatcatctcctgggacttgggatccttccctctcctgctccgcttgtactccctactgcaagcacttaggtgggagtaatatctctcattccccttctgctggaagtagggcctctcctagctcgaaccaagataaaagacgtgttgccttgcatcaccatctaggtcaagggcacgcggtattatttcactagatggttaggtccatggatccaaacatcaacagttggcgcgcctggtaggggctcgtcgcgtgcaaaatatccagttcccatcaagac

SEQ ID NO: 165395 - DNA, 731 bp, Zea Mays
ttgtcatggtggaaagtcaatcaagtgaaatatcctattctctcgttgcttgctcgtgatgtgcttgttgttcaagtctctactatcgcctcagaatctgctttcagttctagtgagcgcattgttagcaaattccgtagtagtttggagcctgaggtcgttcaagcactagtctgtaccaaggattggaatatcgcatctaggaaaggtaaaatttgatacttcatagttcataattttgatatatgtcaattattgttgtggtactaattattgaataattttagttttagatcgcagggttgtgataggatcaattctcgatgagttagacgatacaaaatctaccttgaccaatgaggtttgttgaaacaatgacattgtttaacaagttgtaaacctttcgtacttgacaaatgaggtttgttgacattttgtaggaggagaacctgctgatgatgaggacaatgggaaggacagtgacatcgacgactacatggagatggatatttgaaactctatggatctgtgatggctattactagctctctgattttttgatggctatagttttgtagactctagccacttgttttgttgatggcctttcttttgtaaaatattggagtgttggtggttttggtaccatgctattgatgccttcatggccttgttgttcatactagtaaggtttgagtcccttggaacaattttaatagtaagacttcatg

SEQ ID NO: 165396 - DNA, 1078 bp, Zea Mays
tcatcacggaccagatggaagaatgcaacgccttgagtcagccagaggaagatcccaatgactggagggagtcaaccatcaggtacataaagaatgaagaggagtcgaatgacaaggctgcagcagaacgcattgcaagacagtcatcccactataccatcatagggggcttgctgtacagaagaggcgcaggaggggtcctcatgaagtgcatccactcagctaccgggagacacctgttagatgaaattcatgaagggtagtctggtgtgcatgttgcatcgatgactatagtgggaaaagcttttagatccgggttttactggccaacgccaagagtgatgctgctgagttagtccagaagtgtgaggcatgccaattcttgtcaaaacagtagtacttgcccacgcagcaggtgcagaccattcctgtaacctggtcgtttgcatgctgggggctggacatgattcgacctttcaggaaggctcaaggaggttatactcatatactggttgcaattgacaaatttatgaagtggatagaatacaagcacattgcttccttgacctcagcaaaggcagtgtaatttatccaggagataatgttcaggttcggaataacaaatagcataatcactgacctgggatccaacttcaccagctcggagttcttcgatttctgcgagcaaaggagcatctagatcaagtacacatcagtggtacacccaagagcaaatgggcaggtggaaagagtcaacggaatgatactggatgcactcagaaaaaaggtattcgacaagagcgagaagctcacaggaaagtggaccagggaactgccatacgtggtctggagcctgcgaacccagcctagccaagctctgcatggaaacaccccatttttcatggtgtatgggtcggaagcgctgctacctgccgatttgatctttggggcgcctaggctgacctttgaaagaatagctgaggcagaagcaaccaggcaagaggacattgatgtgctggaggaggaacgactaaacatggtaattgagtcggccagataccagcagactttgaggcgc

SEQ ID NO: 165397 - DNA, 529 bp, Zea Mays
atccctcactagcgagcacgaatttcggattctccccaatccagttctagaacaccgtgaactcaatctcgtcgtggtcagcccaactcaggtcagctcttcccctctgctcccttgtctaagcattctcatgcgtctgtgatgctcaccgacccacccaattgaaccgggtcgccagggatcgccgggaacacgaccgccaagccgcgatgctcacggccgccgtggccagagcttattagttagtcattgatgaaattaggttaggggaagtgatctggggtggttcaattccatgcccactgctcaggagtgccggtcatggccccgctcagccggtctgctagctcgccggagtacgtccctgtgcagttcgccgccggggacttcgaacggagaaaggatagaaacgcggggttgtttttgtagatgtcagtgagacgttgaacagtagccagggattcttagcatatatccaaaacgttgagggcctctgcgcaaatctgcccagcaggcgcgggcgcgcgcg

SEQ ID NO: 165398 - DNA, 545 bp, Zea Mays
gaatcgtctaagttcatggaggtagactctggtgatggacagaagaggcaactcgacatccccttgacaattctacggcgccttccgttcatatcgaggatccagcgtctatacatggcagaggaatccacgaaacaaatgacatgtcacaaaaatggaaaatgatacaatcctgacaagatggtgcacgcatccgatggtgaagcatggaaacactttgatgccattcaccgtgagaaagccgaagaggctcgtaatgtacatgttgcgctggccacagatgggttcaatccctatggaatgagcgctgccccgtgcacatgttggcccgtgtttgttatcccaatcaatctccccctggtgtgtgctttcaaaggcagaatatattcgtgtcgttgataattcccggacacccggggaataaaatgggtgtgtacatggagcctttgatcaatgaattggtacgtgcctgggaggaaggggtatggacgtatgaccgagctacgaagacaaacttcagaatgcatgtttggcaccagtactcc

SEQ ID NO: 165399 - DNA, 1245 bp, Zea Mays
gacttgggtgagtcgccatgtaaaatttggagaaaatcgaccctcaactccggctgtcaggtgctctgaatggggatcgccatggtacagtaaccatgcggatcaggacgccagcgcagcaaagaaatcttcaccgtcgacgaccctcgccgtgattcacgccaccgctgtaggattcgcgtcgccgatgacccgataaggccgccaggtaaaagccatcccctggggataactccggtgactcaccgtgactgcccttctgctttgcggctgttgccgataagctcaccgtcgaccgccgcctcccggccgtgcgccgcgtggctcaacccttccaccgcgtcgctgtaactcgctactgctgtcaaatcaactccagtgaggttgccacggcgtaggacactaattcgcgtgcgccagtgttcttctccacctccgaccgctgcgcgtcttgctcaaaattcacggccgccgcctctgtgatctataaattgagccctccacccgttccgcagagtcatcagctagccagcccccgctaatcgttagcaatcatccaccagtgagctcgaattcgagttttcccccaaatctctttccgccaccgtagaaccaagctcgccgcggcccgtcctttccaggttaattcatcgctttctctcctttgtttaagcactctggttactccatgatgcttgtcgagccatcaatttgaactagggtgccccctatcgtcgggaacacgacgatctagccgccaagttctcggtcaccgtggccggagctcctccgttggtcttagatgcaattgggttgggggaaaagctcggggttggtccgatgtgatgtccgccgctcgggagcgccggtcttggccccctccgaccggtctagctcgtcggtgttgcgctccctgtgctcaccgtcgtcggggagctagcacggtaaagaaatagaacctcagggactgttctgcaaactgtcagagactcgagaaaacagtaacggagcccacttcgagttatccaaaatgacgagggcctctgtgcaagtctgccagcgcgggcgcgggcgcgcgcacttctgcttgtagtgggccgacctgggctgaaatcagcccagtactattcatctgtttcctttttctttttactccagagccaaaacaattttagaaaatggtagaaaaatgataaaattgtgaaaccaattttcctaggcttgttattttccctagaatttaat

SEQ ID NO: 165400 - DNA, 707 bp, Zea Mays
tatttgtagcaagtctttggagacactggcttcaggtttcttacactacaaaaatgaggaacggataaaaataaatactatgcaacatctaaacttaagttagaaaaaagataggcatggaggaaattacatgctcgtggaaccactgcatgaaggacggaccaccgtgtaaccctttcaagcgtaggtcatccaactgcttttgagtaagttgtttgttgggtttatatatgctatcaaagatttggaaataaggatgaagttccggcatattgacatacaagaaaagcaaggtcttgttacgctcaatcgttcccacaagatttgatgtgtaagctccgacacctttgccgtcccacttaaaagcacttagatcggtgattggagcatgctcggcaacatggtaccgtgtcgtttgcgcattcacgttgtttgtgtctaaaaaatatttgcttgagaataatgtgatctctctggctgcgaatgcctctacaatacacccctcaacccttgccttattctgcaccattcctctaagttttttcaattctctttcttgactatacatccacctgaactgtgtaggtcctcctaccaacgcttcccaaggtagatgcacaagcaaatattgcatacaatttaaaaatctaggtgggaatactttttccatcttacatacaaggaccatgatttccttctcaaacctc

SEQ ID NO: 165401 - DNA, 565 bp, Zea Mays
atttaaatttaggctaaatcccaattttctaaattgtacttttgggttaacttcaaattataaactcaattagtatatttttatatgaagatgccttcttttaatctccttaaatattattatccccatgaaatgaggattggatggcaaaacaatcaagagggtccactcttatattatgttttacaattttggatattacaatatcgaatcatagccatcccgcgtatggggtagtccaactatgaaatccatactgatttcttcccatttccattccggtactctgagaggttgtagcaatcctgctggtctttgatgttcgactttaactcattgagacacatcacatagtgcaacatgagtagccacatctcttttcaaaccgtaccaccaatacttttccttaagatcctggtacatcttagtacttctagggtgaatagaataagctgaatcatgggcatctcttaagataagttggcgtaggtgctcgatttctggtacacagattctcgttttgaaccatactgtgccttgatcatcttctgtgaaatctggggct

SEQ ID NO: 165402 - DNA, 559 bp, Zea Mays
gaacaacagtgatgctgccaaaaattctgagtcctccggcagaggcagaaccgccgaaggtgacaagggctcccgccacaactcccatgaggagaagaatggcaagcgtgctagacgccgttgtggaaacaacaagagcactgactcctgctccagtgaagtaggttgccgaagctgctacaacacatacggaaaccgaagctgggccctcagtgcccactgaaacgaagctcgccacaaccgagcagagggccgaaaaagccaaatcccctgctctcgaagcaccgtccgaaggtcttgattatatcattcaacatgcttcaggaaaaagattatctgaagaataagtttttgaagccaaacactatgcccgggaactgaagtacccgaagggggccttagtgtttaacggtacagacgaagatgatttcttgtactgcctcctggacaacaaagagttattcgtctgttgggagatggccaagagtatgggatttccgaagctcgaagctagcctccgcgccatgacgaaggctgacctcgtagacagccttgcata

SEQ ID NO: 165403 - DNA, 702 bp, Zea Mays
gtatttttattattattattaatcaaggtttaggaatatacacgacgtacgcggcgtggcaaattaaaaagtagtatagctcaaatggcgagcagatgtatcggccacatacagttcttgacgcaggggaggtaggtttggtcgaggaagttgacgtatcccggctggcactcacaggtgtagctgaagccctggcccttcctgcactcgcccaggccgcagtcgatgatcacgcaggctgcacatatatagccatgcatagagagaagagcatgcatgagggctacggtacctgtactagctagtacatgctgctgtatatatactcacggtccgtgaggggtattcctctcaatgagaagaggctgaagttgtagcacgaggagtcgaaggtgcctgcatgcatcaagcaacgacaacaacaacacagatgcatggacggtcgcgcgcaggacgagctctaggttcaatcgagagtacaggtacttacagtcgggtatgatgcagggcatgaagggcaggaccgttaggttgagcaacttcggctgggaccagcccgggtcgcaggtgcacttgtaggaagccatgaccacggggaggatccccggcacctcgctgcaggtgcccttgccgcactcggctgtgtcgcagatggtgctactgtctgaacgtacatacacggcgtcaggaactcatggccac

SEQ ID NO: 165404 - DNA, 863 bp, Zea Mays
aggtgcagccgatcatacaatacatgcactttttcatgtaaggtattgcagtacacttgcaggttttcgaggggaaattaggggtggggttagatcagtaaccttgagagaaggctcgggggctcacgaacagcgtccgaggcatggtgtgggcacgggtcgatggcggtagagctgtagcgaagcagagagaggactggagagcatggaccgagagaaaaggagggggagggagcgaaccgaggggtattctgggtcgcgggtgacgaggcaaagctcctcgaggcaacaaacacggcgagggctcaatggcgaccacggaacgacacgagaccacgatgaactgtagcagtgctccctaggtccgcgcgcgatgcaaggcgagtgctcggcgttgcgagtgcgcgagtgtgggggaaggagagcgcgtggggcactgggcagctagaaaaggcctagagtggggacgggcgtggcctcgacgtgcgtcatgggcgtggagaccatggcgacgcgctggtcgtgcgtaggtggttcggggagaaggttccaacaagcgggacccatggaacagagagagtggcgagcgaacgggcagccaggctgacgagcggtgcctacgggacagtgagcgaaggtgcgtgcacgcgaaggagattagcgccgacaagtcggccccactgggccgcgagagggtgaagggggagcgcgctggtgcgggttggcgccgaaaggcggggaccaccaatcagggaggggcggacgtgcgcgcgcggggcttagatgggtcgagttgggctgtttgggttgaaatccgttttgtatttttcctggaatttccaaatgcttttccttttctattt

SEQ ID NO: 165405 - DNA, 1251 bp, Zea Mays
ggatagaagacgcccccatctctgaagacgaaccaaccatgcagggggaggaacccccgcagcgcgaggcatgcctccaccggaatcaacgtcgtaatgtccgacatcatcacatagtcagagaacgggacccacacatcctgtgtcccaggatgaggcgtccgaagcagaggaaacctcgaatgagcgggcgtcctgcgagcaacgaaactcacgacaacggaaccgttgtctcacccaagatcacgagctggaactgacagaacacaatgccaggaaccggtgcgaccacctgcctctttcgcaaaacctactacccgactttgctcaagccatgcaaacctgtcgggtttttggcctagatttccaacggccttcctcgcacacccaacaaagaaggttattggcagatcctcacacaagtagccaatcacctactcccgcctgctcacccaggagatgacatgcgctatgtcatcaacagtcgacgggatgcatggaggaacatcaatgcttcacatgatcatcgtcaagagagcaagctaaggcggcaggaggagtacaatcagaaccatagtgcaccatcgcaagagcggactcagtagcggcctcgacgaacatcccatcgctagaacggtcggcctgagaaagactacaggacccacgatcatcgtcaccacgacgaaacccttatcacaatgacacccgggaaggccaccacgagacggggatttgcgaggtatcgaccttctcccctgtctctgggagacacaatggtcgcctaacttcaaagttttgaacgtcgacaaatacaagcccaagcaaaaccctcacagatggttggttgtctacaccacggtttcccaagcagcaggggcaacggaggatgtcatgacggtgtacctgtcgatcgtacttggacaagactcaatctagttgctttgacatcttccccgccattgcatcaacgactgaactgacttctgccaccggtttgtcgcaaatttctagtcccttttcgaaaaacaggcgtagccctaggaccttaaatgcatcaagcgtcggaatgaagaaaccctccaatcatttctaaagagtttgcaaacaatgaggaaccgcatccccgacatggtcgaggtggccacgatcgaggacttctaccgtgggtgtaatgagtcggccttcgtccgagctttcctctagaaagctctagctaccttggagcatctcttccgggaagcagacatctat

SEQ ID NO: 165406 - DNA, 338 bp, Zea Mays
aacaaatgtgatacatatttccgtggcatgggagttcatcaggacgagagggtctggcaagcatcacttcaattggaagatgtggctgcagagtggttctatgccctagagcgcgatctaggcggcgtgcttgtgggaaaccctggattagggttgagtgttgtattaataggcttgagttaactgggccaggcccattacaaaggcttgagttaactgggccaggcccattacagaggggtgagactggattgaaagtctaaaaatacactcgacggtaactccttcgtgaagatgtcgacgaactgcagcgcggtggggacactgagaactcggac

SEQ ID NO: 165407 - DNA, 465 bp, Zea Mays
ctttgatgcgacattattggctcgatgatcagtggaaaactgttgttgtaggtgatgaccttctcaaggggagcaattcctgagtggtttgatggttgttagactgagaatgtgtgttaggttgaagatacaacacatagatcatcaaccagtgtcgcatggaagccaggtgccacgtgtcgcataggattttctttctatcgccacacctagtacaactttcatatgactggctacatgtggttatgtcaatgagattgctacacaaatcctaccagttcaaccatacacattatagattttgcttgacatattgtggcccctttgattcttgagacctcctagccctaatgaaagaaacaacactctctgcagtctattcgcgtgcgcgcacacacataggtacaaacttcctccctctccctctattttctttttctttcagccacagtaccatgtgtcatg

SEQ ID NO: 165408 - DNA, 556 bp, Zea Mays
gtgtcgaaattttgccttcagcagaggcaacacagtcaccaccctgcaaacctcactatcagtcagtcgcattcccctgcatgttttttctaatcaattctcaacttcccgttctttgcacaagaaaaatgatagcccagaaacatcaacctcctaatcacgcatcgccttttcggcgacaaaagcaagagcatattttgtgaaaacgaaaggagaagctagcactgcgaattggtggacaaacagaccaaacgaccgggttggaatggacggacagcgatggcagcttgtccgcagcttggctctgggcaaatattgcctcgcatgcctaaagaatatgtattatgagtatgaatttacgactgactcagccttaaactccaagcgacaagctctgcaaaggggcaattgtatactgcgctgttcgcttcctgcccaagccagcccagactgatctcattttttttttgttttttcaatttggaaggtcctgacaaagcaagggtaaaagataggaggattagatgccgcaaacacaagatggtttaccaaacac

SEQ ID NO: 165409 - DNA, 509 bp, Zea Mays
tgatcatcttctctggtcttgtctcattgattcgaggttagtgtatatcattggagttggggaacgtggttaagacagatatggatgagatagtctacatgatgtagatcataagtttgtgtgatgttaggtgggaatagacaaactatgcaattcttcatgactctgttggttggatcagatctcatgcatgtggctgagttggtttaaggcatttagtttagttttaagtgcatgaagggtatggccttatcttttgtaccatcattaagtaactcacactagtttagatcatattggattagatagaatccagattaggttggtatgactagattaaactagttaagattagctagatctaccagggtaggataaatattattaggatatgttagaatcttttaagataggatggattatttgatataggtaggccattgttcaaggatgagttggtataagacattaatttaggttaagatatatttgtagagacagtgtctaac

SEQ ID NO: 165410 - DNA, 725 bp, Zea Mays
gttcggatggaggttttggagctccatcccttagtagataaggatcccatgaatgaatggatgaataggaaatacatggccgcgctcataagaggaggcaaggacgaacacctcgtcgtcccacgaggccgaggcaccaccctcttcctgaaggcgccaccccaagacttcatggggagagaaaccatttcttctctaggttcttaggttggctacgggtcaaggagcaggcgggggaagtaatccatgggatcggcaaggagcgcaagcgaagaggaggaaagaacggaggaatgcaacaaggtttcaagggaaaggaaagggacaatgcatatgtgtgagattgtggtaagcgaaactaaacatagtcgacttccccctctttcttataacttgagaagtatgggacccaggcaacaaggtgggcccacgcatcatcgctctaaaaggatccaccgtttggagggacgatcttcggaaaccagtggattattgtgcattttgcaggaaacagacatatcaggcagagcaccaaagagagcatgagatgggaagcgataatgggcaggatgtttcctgcctatgcatgccacgcgcgcacgatgcaacaacaaggctatttcgcgtcccgtcagatcacccacgtagagcgacgtaatgatgaccccatgtattaccgtgctagcgagggcgccacaccaatcaggtaaaaaacaaaacacgcc

SEQ ID NO: 165411 - DNA, 929 bp, Zea Mays
tgcacaataatgtgacttcaaggggcttgaacaactcaccacaatccacgcgagtacgatctctaccgtatatggcgtcaatgcgtgtgcgaccatcagggcaacgataacacatcaaaccttcgtaaccagcgcaatagatgcagttgtggcttggtagttggggtacatgacaagtccatgaaacatgcgcaacagatgcaattatggcttgataatcacgacagacaaacaatgcctacagggcgtgcgaaaaatgtgtgactcgatgatggcggtctgactcaacgagagtggtccgattaagcgagagtgcgacatagcaatcaaataacgcagccaagttcgtacgatacaaatactgcgtcgtgttgccagggcgcagccagtgctcagccaatgccataactcggtcgattaataacgttgtctgatcggtgtgtccgagtacccattatacaatttaatcgctcgacgtgagtccaaaagctcaacacaatataaatatttagagcgatttgagtatgccctatatagactttacatgcattttaataattttctgctacgataaataaaagcagaaaaataaacactaaaattattgcatgagcataacacatcaggtgcatggagtcatttttcacatattagaacatgcatttctataaattatttgctgcgggaaataattaatcaaggtagagattgtaatcgaaaacatgcgactatttgttctcatgtggttcactcacatacggttctaatcatttccgattaaatatagccatataagggagataatcatttgcacttaaaatagccatcaattatcgatatgtatgtgctgacagtcagctatcacgcacgcctagtggctcatgcaggtctcggtggctatcctagcggtcaaacaccactgccgctca

SEQ ID NO: 165412 - DNA, 1049 bp, Zea Mays
agtgctcagggtagtagtctgaagtgggagcggctcagtcgggcgtggtagtgcttgcagagatcattgagtgcagccctcgtaacctgctggatcccctggtacactgtcgggactagctgagtgagctcaaacttggtgaagtggatccctggggcagcgtcgggcacctcgtcgataactagcttgaggatcattgggtcccaatcctccttgatcttggccgagtagtggatcttgtcggggccaactcccaggtaggcaagcaaatccttcagcatgtccaccatctttgtcaggtgcgctctatggtgaagtcctcccagctagccatcttcctaggaaaacaaggcagggtttagtgttagcattactttaaaaaggagataagattttcacaaatattagatagtgcatggtttggcttcctaactaacgccggttctatggttgcgggctacggtcaagtatggctctgataccaactgaaacgaccccgttttccgcggtgccggaaaactaggtttttacacaactacgatagtcccaggaaatcaagctatcgtagattatgagattccagttgccagcacatccataccaaaatttaagcgtgatagttcgcttacatcccctaacacttggggtaaatatcatcggctcgcaggccggcacacacacatgagtactcctagcatctagaagctcagagtagcagccgtggtcttcggtcctccacaggcatccttgagcgtagacccgcaacctagtcataccacccgtcgttggcgaagtcgtactccggctcgtcctctcctaaacctgccgataagcgtgcaggccacgttaacatcctcgagcatttagccagcggtggaatctagtagtttaggtggctgttggtttcctagcaggcatgcgacattatctaaaatactgctgtagtatattagatacaaatcaggaggtccggtctcacaccactggttcctggcttaactcaccacacacacacatcaccaaatctcccattcccaatccacactcgc

SEQ ID NO: 165413 - DNA, 720 bp, Zea Mays
cacaagcccgaactggtaggagatgatgacagcacgatcggggatctttggttccaatttcattagcacaagattgcatcgagtccgtccacccgaggatccatggtcataatccatcagggtgaagcggtatccagccttcaatcctaccccttcgatcgagaatctacagctatttcttggttcgactgaaacactacgaccgctcgatcaccaccgtcgatccacggacacatgaccacaacacatctcccccaaccctagtggtccaaaacaacggcacacgcatgcccagcggcgccatcgctgggaaactcgaactgatgcatgggcacagtacttccctaacccaagctggctacacgacgctacggactccacgaatcttacaaaggacttaccagagcgggagatgacccatagacgagtgcccacgacggatagaagattcgcagcatgggtcgatgcccgacgaggaattttatccgctccaaccaattatgcccgccttaccttctctatcgcaagtagcagcgaccgaagaacccgacgacgaaggcactcatggcctggcccctagcgcaacggcgcggcacacactctcttccacccgacgccggagctcccaatgcaaaatttgctcggctcaatggaaggatggagaaggaggcggtcggggatttatatatcccagtaggcggctccacggttaagcactac

SEQ ID NO: 165414 - DNA, 709 bp, Zea Mays
ctcagaaaatcccacaacggacggcgggttgttttcaagtaaaccgaggggcttatgtgcaaaaaggcctgggcgaaggggtacagggagatatcagccgcaggatccagaatcgagggcaaggattagatctggcgccccacgaaccggtatgcgctattggccgtgggatcaaaatccgatggcccagattctatgaaccccgatataaccacaaccgcatgatctgagatccatggctcccgcttgatctattctgtgccgtccgatttccatctaacggccaacccttctcttcttcctccgaccccacccgaggtagcgccgcccgcccatcgcggtggcacgccgccggcgcacgaccaactcgccaaaatgcgctcagaatcgaacaccgagaggtcctacactatgcggatgactacatgactcggatgggtagcatcataccgtcgatggtgccgtggggaatccggttcacgccgataggtggcttcacggcgccactgaattccggtgagaaattcaccaaactccggtgacccccaagtgttggagtgcgagcgcacgcaaccaccacccgctggcgaacctcaatctcttctgtgcggacaccgggaagagcaggagggaggaaaccaaggcagcggcgcgagctcctgctccggcgtgtatggcgatagcgcagagccacggcgtttgggtaact

SEQ ID NO: 165415 - DNA, 356 bp, Zea Mays
agctgtgtcactccttgagaaggttggctgcgaacatgcaaaggttgtggttcagccaggattcccgatctcaaccaacaacattaagaacctttcggtcgaagccgctgcgctaagtggaaagttttattccgaagtttggttgaggggtggccgagaggtagctgatgaagctattagaaaaactgagaaagagtctcatgctgccttggaagaggccaggaaaactgacgaagttgcagaacatgcaagacttataggtatatctatcgtgacctagcttcataaattattttagcttcgaaactaacatacacttgtgctatggtgcagctgaactctctccctcacgggag

SEQ ID NO: 165416 - DNA, 656 bp, Zea Mays
aattagaataaatatatatgataaaaatacgaacatatgtgcacttgttcaacgaaatgtttttatacaaataaactgcaaaccactacaatcctcgtagcgataaaacttgcatttccaaaaaatactgaccgagaatccatctctttatttttcataagtggttgcattggccactaaacctatagaaaaataacaatgattggttgtgtttgtgttaagtcttagagaactaacaagtgagtgagtatatagttatattacacaatgcaataaaaccaaggctgagagcttgccaattatttggataggaggattgggacccaaatttttaggatttcctattatcctaaaaaatcatcaaccaagtgccccttatactacagctagaacaaactacatagttcagttaaaacaaaaaaggtaagttattcaacagaataaaaatcctaataagcaaagaggggataacaaacacaaactaagattctgactacaaatcaagacatagcgaattggattgctgagctgtaagcaatgagaatttagcagttaggtcaggcggcagtggggtggacattgggtacctcgtcaatggcagaggagagctcggagaggcggtcaaagcagagcagcgcgctgtacacgttgggcag

SEQ ID NO: 165417 - DNA, 706 bp, Zea Mays
tgcctgttgagtggccaggacagtacttctgtattatgaactgaactaacctctatcagagagaactagaatggtgtatccctcatgaatagcttcacgagcttgatcacagagtttatccaaagtttgttctaaaccttcccttccatactctttaggataagttatgtcaagaaccttgctgcgccaaccacgaaagttcatatttttaatagcctccatttcatctatatgcagtaaaggaccttgaagtttcagtcgatgacactgatgttctgttgtttcagataagtcaccttctggaccaatcatacactccatggatgtgacaattttttctctaattgggtcgattggtgggtttgtaacctgagcaaacatttgcttgaaataatcaaaaggcagcttctctctgtttgacataacagcgagaggggtatcgtttcccatggatcctagagcttctacaccatttttggccattggtagcagcaacatttggagtgtttctaccgtgtacctgaagttcatcaactgggttatatgtaaaagaaaagaagtatataaaacactaaggttgagatgttgcttacccaaaggctttcagcggagccaaaattccatgaatacaaaaggcttccttgttctcgctcttttgctgcacaaaagtgtagaagaaccataaattagttcatctaagtttttc

SEQ ID NO: 165418 - DNA, 773 bp, Zea Mays
accatttgtggtcggagaggtacttcgtcaaggcacctacatgctgaaggacgaaaagggaaggacgcgcaccaacgcgtgaaacattgatcagttgcaataattctacttgtagcaaggccccaacactcccaagccgacctgctcctgacccaagaccatatgcctaagggctgaggggtaggaggaacaggaggaggggaaagtgcataagagagctagcctctcccgctaacaatttctgagtcctagtaggcgtgacatttatactcttctaattaaacatggcgatcaaatacctcccttttatttgttgtctacccgactcatgcaggggctcgagaaattcaaagggagcaagaaccgaccaagccacccttcgagaacgccctagtctaaggaactaggcgaacaccgaaggatcgctttccgacaaggatccgaacccgttcacgaacgtcaagggatcactttcggtaagtacctaaacccattcaaattcctttggcagggaccaaagagcaataaactcatggcaaggcgaccatgaatttctggagttcgaaggccggtgcgcgaagggatcacggtcgctctagcaaaaatagagtgaaggcagccgaagacaggcacactagcagccaggaccctgacgtataaaacgttgagggcatcatcaactcgtgttcaagtcttgggagggtctgactcatgatttatcgcggagagaggcaacgagccatcgatttcggtcaaacagagccgtctactat

SEQ ID NO: 165419 - DNA, 716 bp, Zea Mays
gtgaactcatataacccatacttggtaatgaatgttgtcttcggaatgtctgaaggtcgaatcctgagctggtgataacctgacctcaaatctatctttgagaacacgctggctcctctcaactggttgaacaggtcttctattctgggcaaggggtacttgttcttgatcgtgacctcattcagagctcgataatcgatgcacatcctcctagtgccatctttcttctccacgaacaggacaggggcggcccaaggcgaggtgcttggcctaatataacctttctctgacagcttatttatatgcttcttgagttcaaccaactctggtccagatactctgtaagctcttttagaaatgggggcggtgccaggaagaagctctatggcaaactcaactttccgctcaggtggtctgcccggtaagtctttcgggaacacatccggaaactctgacacaaccttgatattctcgagtggatatgcttccttgctatcaatagccatctgatgacaacctcctttccttggctcaggtgagactaactcagctaccacttcttctcctagtggggacaccaacttaattatcctcttatcatagttgataatttcttggtacttatctagccaattcatccctaggatgacatctattccttgagtacccattactatgagattagcgggaaactctatcccccttatttccacact

SEQ ID NO: 165420 - DNA, 363 bp, Zea Mays
aggttagtcatttcaaagtgtttggctgcagatgctttgtgctcaaacagggaaatttggacaaatttgagtctcggtcttctgatggggttttcttaggttatgcattacattctcatgcttattgtgttcttaacctggagactaaccgcattatggagacttgtgaggttacattcaatgagactgcaccttgtccatcccctgtctttgagcctacaagtccagatcacatgtgacataccatctttgtggaggaggagcacgatgacgccgattggggtgatcccgagccgactccaccggctgccccagtcgagcctgcttccactactttggctgatggactcgatcccacttctt

SEQ ID NO: 165421 - DNA, 897 bp, Zea Mays
cggagctgttaggttggctgcaggacgtgacccttagcctgatccaaaagtttttgagtccaaactattttcttaaaaaattcttgctctcatcccttcatttcaaaaatgcttcccctttccttctctcagaagtcagatggaggtccgctgccaaaccagcttttgccagaatgaagatggtttccccaagttgctgagagcatgcatagtttgcctcggaatcaggagctagccagagtatgatggtcgtgaattcgtcgagcatggcacagagaagtgtgtcgtgactgtatacattggatccagtccgcaccatgtggaatggagtgtcactgctgctgggcacagattcaaagacacctgtcaagtcgtcgctcgcaaggcattgagggccctgtgtcaaatttatgaagaagaagtggccgacacaccgctcagattctttccgccctttcagagagaccgtccagtttggatggccaggatgcgtgcattggaagggaagcagctgcttgaggataccccatagtcgtgcacctcactgcatacctgctcaccctggatgcgcagtatgatttcttggctcagcaccaccgtcagatgattgcccgagtagaagatgcagagaagcgcaaccgtcagctccatgtggatctcaccgcagctcaagcccgtgcaactgccttggaaagtcgtgaagtcattgctgttgaagccctgaagcaagccaaggatgagcacgtccagaagttgatggaggcctacttggtaacccataaccaacgtagagccctatggatccaagagcccgctccatctaacccagttcaaaccatgagagctgaagatccccagattcttgaaggtcacccggtctctatcagaggagagaag

SEQ ID NO: 165422 - DNA, 646 bp, Zea Mays
agaagaaaaggttgttatcgttttgcttgtagtgggtcatggcactaagatgaggatgattcgtagctcatacgggtggtcgcttgaaccaattagccgctatttcaatgaggtgttgagaggtgttctatcattatgtcatgaatttatcaagctacctaaccctttagctgtacaacctgaagattctaagtgggggtggtttgaagattgccttggatcactagatggtacacacgttgatgtttttgtacctttggctgattaagggaggtatagaaataggaagcaacaaatcaccaccaatgttttgggtgtttgagatcgacacaggaagtttgtttatgttctagctagatgggaagggacagcttcagatttacgtgtgctacatgatgccatatctcgggacgatgcatttgctattccaagtagaaaatattacctagtagatgctggatacactaatgaactaggctttcttgctccatatcgatccactcgctaccacttgaatgagtgggctgcccaagggaataacccatccaatgccaaggaattgttcaatttgcgccattcaacagctagaaatgtgatagagagaacgtttgggctattgaaaatgaggtgggctatattaaggaaa

SEQ ID NO: 165423 - DNA, 821 bp, Zea Mays
aagctttctgggaatggcaggatattaccgccgctttatcaagggattctctagcatagcaagacctatgaccgagctcctcaagaaagacaataagtttgtgtgggccccgaagtgtgaggaaagtttccagatcataaagaagaagctcacgactgcgcccgttttgacactaccagatatgcatcaggatttcgtcatcttctgtgatgcttcaaggcaaggcttagggtgtgttctgatgcaaaatgagaaagtcattgcttatgcatcacgcttactcaagccacatgagcagaattatcccacccatgatttggaattggcagccatagtacatgccctgaaaatatggaggcactaccgaattgggaacaaatgtcacatcttcaccgatcacaagagtctgaagtatatcttcactcagccaaatctcaacctccgtcagagaagatggctggaactgatcaaagactatgaccttgagatccattaccaccctggaaaggccgacgtggtatcagacgccctcagccgaaaacctttcgggataaaggggatcaactttttagaagattggaagaaggaatcagctcagttgaatgcatgtctgggaaacaacggcagcctagaagtcaaaccaatgctagaagaccttatatgcaaggctcaacgcctggacacggagacaacaagacttatggaaagagctcgcaaagaacaacttccagacctcaggacagatgaaaaggagtcctttggttcaagaattgtctgtgtgtaccaaaaggagaagcacgagaagtcctgctcgatgaagc

SEQ ID NO: 165424 - DNA, 591 bp, Zea Mays
gggcagagcagtctccacaataacagcgaagaccgcgcagaaattcttctggcagaacatcgtctgccggttcggagtcccattcgaactaacagtcgacaacggcaagcagtttaacaaccaagacttccgagaattttgcagttccattggcaccaaagcagtgttcgcctctgtctaccacccacagtccaacggtgtcgtcgaacgcgccaacggcaagatcttcagcgctatcaagaaaaggctcttcgacgacaaaaagggcaaatggacagaccaactactcgaagtcatatgggcgctgaatacaacagaatgccgagcaaccagattcacacccttctgcctgatgtacgggtccgaggcaatgacaccgcaagagttaaagcacagatccccatgaacaaaccaattaggcatccctgacgtcgacgaatcaactttcaaagatcttattgatggataccatgtcctcgccttgcaggccctgaataaatatcaagctcagactaaggcatggcatgaccacagtgtcgtcccaagagaattcaacgaaggggacctagtactcacaaggaccaccagaat

SEQ ID NO: 165425 - DNA, 587 bp, Zea Mays
ctagtgcttccttcaaggccgggtcagcttcagtaaaatttctcgcctagcgcagaaggtttagctgaagggttttttatatcatccactaaaaagacaaattctggctaaactacagccttggcatgttcgcagctagctttctctaagaccgatgtggcccctcgcacactagcaaaggcgcagaaatctcctcggtcacttaaaatttcgtcaaaagcttcggcctccccactaatccactggaacactccatcagggttgtcgcggatgaatttttgctcagaggaatatgccccaaccctagcaaagctgtcctttaatttcttggcgcactccagggatattttataacatttctctttcgaagcccgaagctcatcggtgttcttttgtgctcttgacctttcgatctcgcaaatttcatgtttcactgcctcaacttcaaatttttcagttgcttcagcaaccttcctttttagctcttccacttcggcttttcagttgcttcagcaagtttggcttcattagatttcagcctatccactaaggaacgtaatgtcttatcctttttgagagcttcgttc

SEQ ID NO: 165426 - DNA, 472 bp, Zea Mays
cccctacaccgctccttgtatatactagggatagagttacaagagatccgatcaactagtaaatgtgtttcctagttataagaaaactacactagatctcattgaatcatatcccgcaaagatcgaaatgcacactagatcatgtgtgctcctatacacccgtcgtatgtgcctcatagtaatcctctttggtccagttgatggatgtgggctagaattatggacggtgatgatctaaccatatggcttccctagcagtgtcagtcttcaacgatccttaggtgcagatgcttctcgtatagtgaaggtcttcctatgccaaagactcatcggtgttgagggctttcgagcatttggcttctttgcgtgatagatcttcctcaggcgatgataagatgtccaagagaaggatgatttgggctaatataaaattttactcaataattaaatcctacccgatagcgcagcccac

SEQ ID NO: 165427 - DNA, 418 bp, Zea Mays
ggcaactttctctggggtagagcttgaagtttttattgtctccaacacatctagaacattaatcatcctttttcttttgggggtcgctgctagacctttttgagtcttcggcacctcaactcctgccgaagggcttagaacttctaatgtttttgtctcttcggctctcagttcttcaattttgtcaacctttggcattgcagccgcatcttcaatcttctgcgtaagagcaggtcttttggcttcaatagtcaaagaggtctcaccgccaaattcgggcactatggccggttcaatgtagcgcggtcggtgagtaaggaccttcacctttttcctctttggcgcaggctcgcttggagcagctgaagcatcatccttctcggaagttgcacttttcttttttgcccccgtgatggga

SEQ ID NO: 165428 - DNA, 1071 bp, Zea Mays
atttgcagttctgtgacatttcaggaaatgggattcaaaggaatcttctgtaatttattggttgagaacaatattattactcgctatccaatctatttaaacctgatgtcagtctctctctggcagggcttgtaagcagcttccgaaggacacgagctttaaacatctagttcaacatttctagcagaatgaactggggtaaaaagttgtaccattagatctctgtaacttcagagttaccaccctaggaactattgtactaaagccccccttcgtaaactaggagtcgtgtgtaaataaaaagaaaaataagaagaagaaactgaaatcatggacaacaagggagtatccctgtatcaaagacaggttctaggatttcttgaagggaaatcgcaggcactagattactcacagatgatattctgaaggcgcagaatttaggcttccccctcttgccacatttcaggagatgtgcgcctttcttcagagcaacgatagcctgaacaaagcaacgagctgaagcaatcagtaggtgcatcccaatgctctgcgtttcatttccccccaaaaaaatgcagatatagaatcccccgaaaatggctaaggaaagaagaagtatcaagccttcccgctccaggctactaaaaatggtcgtgaaatcctccaagaactggagtggaaatgggtaagggggggaggagattttgactcacctgctcgacgcctctggttggcgtcctcaggtcgaagctccccgccattgcaggccaacaaatggagaaacaagcagatgggtgaaagcacttggatcagccctctcctccctcccccttcagtcctttctttgttggcagattcacaggcgccacaaagccaaagctcgagtccgtggagtgtgaagcgactgaaagaaaagggagcaaagggagcacgaaaaggagagagctgtccgtgtcttgcaaaatgagctgcaactgcaggttcatcagttcagggctacaggccggccgcaggggctcagggccctgcaaaggtgaacaggtgcccgtgtcacctgtgcctggatgaaga

SEQ ID NO: 165429 - DNA, 418 bp, Zea Mays
ctcgccacgaccgcgcagaccgcttccttcgccggcgaagacggactccgttcaaccatcgccagccttccctcgcgcctgcttcctcatctgtgcactgattcactgggcctacgcatcagtccccatttggccatctctactgtccgcgtgcttgacggtaacgacctcaccgccattgccgcgcaccaaccccacctccgatccctctgcgctcgggatctccagctgacccacgcctgcgccaatcccgcagataaatgagaaggcaccccccttgaccttgcgtacgtgccccattgtgggactcaccgccgagagagagagaacagggagccgccgcgggcctccaccaccgtctatcgtgtgcagcactaattttgtgctcggtgcgtggtctggggctccgtatcagtgc

SEQ ID NO: 165430 - DNA, 572 bp, Zea Mays
tgtttcggaggattttgtgtcgcgggctggtctttcggtgcagaggctgggtcacccaattttggttagatctgctaatggctctattagtagctgctcagcttgtcaagggtgttctgtcattcttgctgatgaggtcttttcgaccaatctggtggtgatttccttgggggcattcgatgttatcttgggtatggactggttatcccagtatcgcgcggttaaatcctgcttctggaagacagtgttattgcaggtgccgtcgggtaaggaggtggtattcttgggaagttccccaaagttctcgctatccttgttggcgcaattgcttcctgatcgccgatcaaggaagtcggggatctttttctccatggtggtggagggtgaggctgcctcgcgggtgcaggacatccgagtggtgtgtgactttgctgacgtgtttctggtagagcttccaggcattcctccggagcgcgatgcagcttttgagattaagatgatcccgggtatgcagcctattcataaggccccgtatcgaatggccccaaaggagcagattgaattgaagcggc

SEQ ID NO: 165431 - DNA, 831 bp, Zea Mays
ctttttcttcggcattccccaaccaccagagattggaaatgtcctgttcgtcaagtattcttgcaccatgtccgtggtgctaacgtgctcaaccataactctaaactcgacttcaccaagttggcatggagaccctaactgcatattgcacagaggtcgagtcatgctgaagttcagtttcaagagactcattaccatggttatgagcttctcccttttcttctcatcggccttcacgtaaaaccattcatttgtccacccggtcggtcacttggtgcggtaaccaatcacgagggcctttgtgtccttctagtatgcaaagttgtagcatccgaaattcttgtgcatgccgtcagctcttgccttcatctgataatgaagctcatgcacctggcagaatccttcggcgttggcactttttccttggcttcgaagagcccaaatatacacgctgagcctaacgatggtgttggggtcagctagtgtaggtagatttcaaactttttcaaaacctcaccaatcatctcataaagggggaaccaaagtcctgccctgaaaaagctcctaaaaactacaacttcatcttcttttggctctggaatcgtctcctctccagcaaaacgaaccagttcatcatcattttctccaaaatatcctagcttcttcattagaactaggtcctcagctttaactgtggatctcccgaattcaatatggctgggcttggtcagacataggatactatcatcatcctcgctttcattttcactctcagcctcaggcacggtctgtttagcttcagcattagtaataccttcagcaataatttcc

SEQ ID NO: 165432 - DNA, 429 bp, Zea Mays
gtaaaatgtgggcagctgccttcacgaccttgttactgaaagaggatctgagcctgccaggggaatgcagttccgaagacatggaattaacaacatcacagacattgacattaccactggtaggggcagacttatcagccaatgaatcaagatcatgttgcagactctggtccctcctagaataaaccagaatgggcttgcagtatcgagggcaagagggtccaggaaagatatcaggccgaaccaatggcgcagcagaccccatgcgggagcaattcatcatggccgaacattccaaacgtgaataatccgcagaatccagaccaacatccgaccctgcccccgaggccacagggagtgttggcacaacagctgacaatccctcagcaggaaacgaggtagtcccagacgccaccagctctacaaccg

SEQ ID NO: 165433 - DNA, 397 bp, Zea Mays
tgtaattagtgtctattaaataaatttaatttatttaaaagtggattgaggctttgtatggcatattatagactattgcaacatcatcacatgaaaatataataaacctttatagcttttaatccatgcatcaaccatttatgtaagcaaccaaacatcatctcacatgggccaagctaagcttatacaggcaaccaaacgtatggatattgtatgctctcagctaggctaccaagagccaggtttcctagatacaagctaggtccacccaaccagacaaccaaacagggccattgttttcatcagtcgcactaccggcttgatattctctaccactgactgatgataaatggaagacgtagttaattcatgaaattcatattccgtatgtttggtt

SEQ ID NO: 165434 - DNA, 677 bp, Zea Mays
aaggggtaaatcaacgtgttcaagagaaggtgtaatattactcatttaaggtagaggcaaggagcctgatggagagagacctgagagaggtctgggactagagatgcaggtgattgtctctggttgcatgattttctcccctggtttttataccgcctccactaatactctatcacttatttctcattagtcttagtatcatctatcctcatagtttatcttgattctctattgtgtagtttcttggacacgggattgtcccaacaaccaccacttcattgtcatcatgaacatcattcctctcatgtcagcatcagtccttataacagcctcatctacaaaagatggaattcttccaacaattgtccctccttgtgtattactctcctcgtcttcggagccacttttgtctcctatacaattacattcattagctgaagagaactcttcaaaaaattgatcaagatcacactagtttgtgtagtaatgtcggtaccccgtaactggggtaccctctcctactgtgccaaggtagaaactcgtgtggttacctataaccacgtactaaggaactgagcaaccgagcccatggacctagacccatccttcgggaccaccagcctatggacttgcaccccacacggggacgggtccggtattgccacgtgtcccagggg

SEQ ID NO: 165435 - DNA, 549 bp, Zea Mays
cggtggtgaaaccgtctgtccagacgcatctcgtgctggaggctatggcgactgtggagcagaagggagaggagaagtgggaacagatgatgaagatgatggatcgagtggtgaagaagttggatacggtggaagctggacagcatcggctcgaaggacaagccgagctctcagctacagtggcaaggaaggcagaagaagagtgtactatattggcaaggcagatggaggagacgggcaaggtggtggcgcagttgtgtttggagatgatggcaaaggacttggagggcgatggtgttggatcatcaagggagggtgctaatcaaggtgatccaaaccaaagaagaagagaaccacaacaggagagagttagagaagaagaagatcgggtgatgggagggcaaggacatccatctctgcccaaatatttgtttcccagatttcaagggaaggaacctggaatatggttagccaagtgccaagactacttcaccatttatcaggttcttgaagctttgtgggcaatatcagcatccatgcacatggagg

SEQ ID NO: 165436 - DNA, 485 bp, Zea Mays
ggtgatattaggggcgctctatcagcaggggccttgattgattttctgcacctctaggaagctctaacagattcaccgttgcatcctgatattgaagacaggcacattttctccatagcgccagatggtaattactcggctaaaactgcttatgttggtctcttccagggttcgtgctcctttgatcaccacaaaaggatctggaaatcctggatgccactcaagtgccatttcttcctgtggctggtggcacacaacaaatgttggactgctgataggctggaaaaaagaggcatcaaccacacggttaggtgccctctatgtgatcaagaatctgaaagcattgatcacctgctagtttcctgtgtgttctcaagagtgttctggtacaaccttttgagaaagtttgggttgcacagcttatcccctcagcaagtggagacttccttctttggttggtgggagaaatccttggctcatgtcct

SEQ ID NO: 165437 - DNA, 699 bp, Zea Mays
ttctggtgaaccagtctctgtggtagtgtcatcttcctccaattctagcaggaacacgccgcgaccagaacacttgtggtcaggagaatacttctctttgcaatggtagcattcgccattggctcgcttggcagcgatcttctcaggagatagacgtcggaagcggggcctgctagaggcagatgatgtcgaccgtgctggtgcaggtgttgaggatttggatggtgctgctggtgcctgatatgaggtggtgctggggttggtagatagcagcagacgccgctcatacactcgggccagatgcattgcccgttgaagtgtctctggcatttccatctccacatcagtgcgtaggggctcccccaatcctgctgtgtacatgttggtctgctgccgatgagtcatgtcgtcacagcggcacaggattgtcaagaactgccgagtgtagtcttcgacgttgccggtgcactgcaatgctttcaagtcagccatgccgttgaaacggagtggtggcccaaaatgcatctggaggaattctataaaccttgaccaagtgagtacaccaccaatgtcacgctccagggcataaaaccactctgctgcgacgccttccaagtgcaaggatgcctgccaaacccgctcatcttgatgaacgcccatgccgcgaaaatatgtgtcgcatttgttgatccaaggcaa

SEQ ID NO: 165438 - DNA, 551 bp, Zea Mays
caaattttggtaaaaaccaaataacaaagttttaggacactaaataaccaacaaaatatagtaagaaagttttgccatttgaatttttcaaaatccctaaatcagcccctaaactaatgcacttgaaaaaaaatcagaaatttagaaatatgaatttcagcccctttccaaagatcgaccacgttctctgtatttcaaaacttaaatcaaacaagtccaaatagcaaagtggcgccaaatttcctggaacacaccatgacaaagtttggaaacctctctccaccattcgacacgatcttgacatggatttacctcgggactcgaccttgtgacactgccaccttagcgacgcgacaactctctgtacacagccccaaaccgctcgacttccacacataaatgacaaagctctgtcgggagagcaaatcttgtgcagtgatcatgcccaaatacgcgaagatctccaacctacgagcgtttaaacccgggcagaagcaaagagccacgtgctcgacgccgtgtcaggccgaccgagcgtggactggccgcgg

SEQ ID NO: 165439 - DNA, 387 bp, Zea Mays
cggaggcacaaagcttatcgagaagggcgtgcagcctgaatgatgacggtcgtgagccggttgatgagtctcgagatgatgtttgccatctcatccagggcttccgtcctctaggatctaggctctaggtcgtggtttcccggacggtgtgacgctaggcgggctcgacctgaacagaacacgtagcaagttttaacatgaacgcgaatgcaaaactcatttttacatcatttttcgttgcggctataccaactccagcctgaattttcaaatgtcattcgagcgctttaagattccacaatagacgcagcgcagcgcctccgcttgctattgagctggtggcaatacgacgacatgggcaaagaagttgtactccctcctattttt

SEQ ID NO: 165440 - DNA, 1117 bp, Zea Mays
tagtttctctctctttctcttttggttagggttagcttagttagtgagggattatttattttatttttgacaaaacagatgagtcatgaaatgttgcatcatgttgagtttcaaatattctttgaattgttgcacatgttgatttggtttgaatttgaaacttgatttgaatttgaattgaaaaccctagagaaaataaatagaaaagcaattagaaattccctggaaaatagaaaagccaatttatcccaagtcggcccattaagcccagtcctgtgcccgcgcgccctcggtgcctgacaggcgggccccgcctgtcggcgctaacccgcgtgccctctctccctctctctctctcgctgccccgtgggccaggtttgtcgcgcgtcgttcctctcgcacgcgcgccgctctctctctgtcccgccggccccacctatcagctcgtccccaacctcccgcccacgttcccccgtcgtggacgcgcccaccgcgcgatctctggccacctccgcacgtcctcgccccttttgagccccgcgcctcgctcgcccaacttcgctgacaccctcacaggatgcagttgtaacttgcgccctcagccgaaccctctcgccctctctctcgctctacgcgcgcgaccagagagctccgccaccgcccaccgtcgactatcgtctgttctgcgaccatcgtcgagcccgcgccccgtctgttgcctcggtgagttccaccttgccgtcagctactcgggacaccctctggtttgcctggtctgcactcaccggagcgtttgttgtgcagccggagacccgccgtcgtcgacccaaggctccatcgcaccccaccgttctccaagcgccccagagttcgcactcgaggtgagcacccttcccatgcctttatttcgccaagtatcgccccagagcccgcgcaattgctcaccggagttagttgcgccgccgcgggacttttcccaccacggtctgcgttctctgacgcccccgtgccagttctacgcccacggtcgtgttcgccgggttgacctgaacgtgcctgaccctttcccttagcccctagagcctcgccgtggccgcccctcgtctccggcgagccc

SEQ ID NO: 165441 - DNA, 660 bp, Zea Mays
ctgacatgacgcccggtccagtggttcaccggaccggtacgctgacccctcggtttggaaagcttcaatcaagatcccggactcggggctaagggacctggtccagtggcgcaccggaccggtctggtgcccctagtgcataccactttcctgatttgatttccaacgactacaaggggcttggggctatgtaaaggagtttcccacgacagtaaggagtacacctttacaagatattaagtgtagaacaagtgcatacacattctctatccctcgcttgtgtaattctccgtagatcaagtgtttggcgcatgtataagacaaaagagagagaggcaaagtgctgctgtgagatagagctagcaagcatgatcttgagcaaggagtttgcattgcgttcatctactgtcgagctatcgagttgtgatagtcacggttctgctgtactgcaatatcatcgagataagagaagtctcggtttatcacactgttgataagcctaaacaaccggaggaaggagttgaaataaactccaagatagattggctaactccaacgtggatgtaggaagcttttctagcttggacaaaccacgagaaaatcgtcatgtccctttatctctttgttctatttctatttgcacttctactcttatctttg

SEQ ID NO: 165442 - DNA, 272 bp, Zea Mays
ccgacggtggagttgatggctgacggagctcccaggaaccatggcgcagctctggaatgccccacggatgcctgagcgaccgtgattcacgtgcctgtcggcggcggatcctctcttttcctctctggtcgacgatggcggcttgagtctagggctatggcgctaatacgtcaacgaggcaatggctgtgggctatggggtagagccggtccgcccttgtagccaacgtggggcggaattgccgtgggcgagcaacaacagcctccgcgact

SEQ ID NO: 165443 - DNA, 476 bp, Zea Mays
tgagtggttcattgtggagaaccactgcaagtccctcccccctcagtcagggagacagccagatgtccgcacaccgagctggatagaatcttcgaccccttcggagataacagaggctaaagtactgcttgccgagatctgcttgctgaaggatagaggtctgactgccgaatctatagttgctaacttcgttttcaagaacattcaacccttaaaggacagggcctaccctgcttatttgtacagcggtgtcaatgattctacccgggtcatgaatagaaaaattcccactgaagatctgatgagtcgactggacatgatcctgagagacagagtttcaaatgttggtgctcctgtggcctattctgcatggaacctgccacacttaggccattctctgagtttgtgtccaaccctcctgctcgtgatggtagcctgggtcttagagtgtgaccctcttctgaggacattgaggc

SEQ ID NO: 165444 - DNA, 744 bp, Zea Mays
atcagtttctcgatcgcttcccctctcttcgtctcatcgtcgctcgcacccggaggttccccagacaacattccccctcgtctctacatcaatccaggaggagcccagggaggagctcgttgtccctgccaaaggatcgttcctcggcgtcgatgaagcttcaccggctctccctcctttcccctcagtgagaaacctccgcccccttctctgtttcgtaaccggtgttgtgatgccctctgctcagtgacaaactccccgcccgtccctcaccggatcataagaacgctctaatcaacttcactagggtcagatttcatcgtaccccaagcttttccataaatccccctttccttctccattttctctcttcccaggacctttcttcttcctcgcatgcgcacatggcgaccatggccggacctcctccctgtgctcactccacacagcgagcgcaccatagaccctctctctccctgcacagagtcagcaatgcccgacggcccctgtaaccagcgtgggcacgcacgagcccattcctcccttcaatgcacgtgtgttgccctatgcaatagcccgatgaacctccctatagagctgctgtgcgccccctgttgaacaccacatatctgccacttgggaaaggtcgaatggttcggatttgtcaccggacggtccgcaagttgattagatcaggaatgattaatgaaggagattaataaaggattatgggaggctacacta

SEQ ID NO: 165445 - DNA, 651 bp, Zea Mays
gttttattgggagcacaacatgatggcattcctttcatgctgttgggaagaaaaacgcttgttgacgattatgaatacatcatgcttggaaagcttttcaaggtctcaaaagacagtactaaagacggtaatggcaattcatctactaaagtgtatgcgttctcttgaacttgaggaatgttacttgtatatgatgctacactatttattgtgacactggttcgtttccctgtccttctcattttttctgtttcctagattatttatgtacggacatacaaaggcgaagggtaggcataatacagcggtgaaagttgtctcaccgagtcagaagcagcctctctgcatttgaagagaaaagtttatcacttttccagactttactcatggcctcacggggatcctccaacactaaatttgcttttttttatgaacatataaaggcaattgtgagctaccgcaggctgttttgtgtagacgaccttgcagttacttacagcctgtctaagtgtaataaccaagtaaaagttacagaaatgatccacaacataagttgggacaaaggatgattgatcccacatggtattctcttttagatttactgtctggtgtatgtaagtccaaggatacaaataatttattttatgtgaa

SEQ ID NO: 165446 - DNA, 434 bp, Zea Mays
tatggccaaacaaaatttttatggaggttgcgcataatgtgactttaggggcctgaacaacccaccacaatccacgcgagtgcaagctctagcgtttggtgtcaacgcgcgtgcggccatcagggctacgacaacacaacaagccttcgtaataagcgcaacagacacaattatgactctgtaattggggtacacgataagtccacacaacgtgcgcaacaggcgcaattgtggctcgatgatcacggcagacagacagtgcctacagggcatgcgaaaaatacgcgactcggcgatggcggtctgactcaacgggagcgatccgattaatggagagcgcgacatagcaatcacatgacgcagccaagttcatacgacacaaataacgtgtcgtgttgccagggcccaaccaatgctcgccaatgccataactc

SEQ ID NO: 165447 - DNA, 704 bp, Zea Mays
gtgcggttgacaccaaattgaaccattaataaccatttcctctcgatcaattgcacgatctgagctttaaatcaccctgtccacggaaacaacgcgaactaaggatgaacacgggtgttcccgacaatctagcgcggtttagcttaattgaatgggtcgaggagcatcaggagaatctaaggacactgaaacggaagagcagagagcatgaacggacctggaacgagctagccatggcgaggtcactatgggcggtgttttggaccgatttgggggaaatcccaaattggggctctctagtgagtaattggaggcacgagcaagtggattggatgcttgaatacctaacagagctgagggtgtgctcaatttatagggccctttagcggtggcccatgaatttgagctcgcgtggtggcggtcggagagaaagaggtgcactagcgcaagcgattggtggcatttaccgtggcaagctcaccggcgatcaccgaatgggctaaggtgactcactgcggcgtggttaaagcaccgaggaacgtggcgcaaggttgtggggtggctaactccggcgagcctatccaaagcggccgtgaatcaagcgggtactgcggccggagtagaatagtggccggagtccatccacggggtgatatttcttacccccttgccgttatccaactgcgccgagcacgaatcaccgc

SEQ ID NO: 165448 - DNA, 527 bp, Zea Mays
ttgccttgatgcttatcctaggtctgcattttagaaatctcctctctcctatctcaatttgagagcattgttttactaatctcacccttggctacatcttcttctttaccgcatgcaagccctgtcttaactccattcttcgtggtgcttgtacccttggttctcctatgccttatcttttctcttacacccttgaccttatcgcctctccttgtggtatttatgtctttacctagatgctccctttgaacttatcctttaaagccttctcttttccaacctagtttgagagtggtgtgttacctacctctcccttgattactttcccattttgtcaccttccaagttttgtcccaaccccatcccttgtcgtgcttctatctgttgttacctttaacccttgtcatgtctcgatattcaccatgatgcttatcttgtacttgcattttaaagccttctctctcccatttcagtttgagagtgtggttttacttatctcgtccttggttgtttcccctcccttgccg

SEQ ID NO: 165449 - DNA, 417 bp, Zea Mays
tcagtggggaccaagtcagtgtcatcaacagaagtcaaaactctgtcatcaggagcgctggcctctaaggcgacttcctgacccgaagcttgagctgctgccatgcaaccagaatgcagaggagaagaccctatgtgaacatccatggaagtgtgagagggagaaccaactcggacaccctcgggggctgggtcatagctcgcgctacccatccgagccggatcatccccggcaacacccttgggggctgggtaagcgctagcgccatccttgagggccgatctctctgtaacagccacctctaaggctgaaggaccttcacccacttccatgggagcagaacaatccagaccagcctcctgacccttaagaccgcgctctaaggtcgatgaggcacgggacgctgctcgagataac

SEQ ID NO: 165450 - DNA, 322 bp, Zea Mays
cttcaagctaaacttcaaaaaggaaattcagaaattcagaactgaattttcagccctttgtaaagttcagccgtgttctctattttccaaaactcaaatctaaaaaacccaaatatgaaagaggcgccaaattaccttgaacacaccctcgagaaatttgggagcaaaatttggccatttgacatgatcttggtagggatttgcctcgggactccaccctgtgacactgccacattgccgaggcgacaactctctgcccttgacccgaaatcgcttggctccacgcgcaaacgacagagtgtagtcaggagaacaaatctta

SEQ ID NO: 165451 - DNA, 684 bp, Zea Mays
ggacggcggagcagggactccagcgagcccatatcggccaaaaaacgcaacggctaagcttctccgttgcacaacacctaattctacccctaacgaccatttcccctcactcaattgcaaggttctggctcacaatcactctgtccacggtgatggcgcaaactgaggacaatccgagatgttcccggtgatctagtgtgatctagttcaattggctaggctgctacgcatctacagcacataggaatgttgaaatgagagcgaggaagatatgaatggacctgtagagagctagccacgatgagctcactcacggcggagttttgactgaattgggggaactttgaaattggagcgctctggtggacgatctgaggcacgggctggtgcgttgggtgcttgactacctagcggagctgatggcacgctcaatttatagggcccgagggcggtggctcatcaatttggaatggcgcgctggcggccggagagaggggagagcactggcgcggtgattcgtggcttctaccggggcaaggtcactggcgatgaacggacacgccaaggcaagttattgcgacgtggtagagcacctaggcacggggcaaccgatcgacaggcagccaactctgttgagcttatctgaaccggccgtgagtcaggcggacacggcggccggggcgg

SEQ ID NO: 165452 - DNA, 927 bp, Zea Mays
cccgcaatcccaaagcccgaactccgattaaacgaaagctacgcaaagtggagatgatgacggactcgaaggaaagctccataccagctattgggtcacaggaacgcctggccacagcgcagcacgagtttatggcgacggcgaggaattccggtgagctcggtggtctatttcgtccaaggatcccccacgcagaatcccgagaccgcgacgaaccaccctgtcagcactaagtctccacgtggtgccaaaaacagggggccgacggcggcggcacacaccttgtgcagtgcggtttctacgtcggtgtacggtcgtcgatagggacgattgagggagcacgagtccgcgaccatatatacacaggcggtggcggcatgcgcggatgtggtttatgcccgcagagtccgagctccagggtgtttgataggcgagatttccgggctgttacaacaacccgatgtttactccatgtgcgagattgagagaggaaaaattgtctagcgggtcccatcaagtggccaaccactcggcaccagagagcacacatggcgaggggagaggtggacgaagcagtgagaattattgagtggatctcgggtgagccactagcttgaagatgaccctgacaagctgagccacacgcaagacacccaggcgagaagaataaaataaaggaaaaaatggaggagggcgtgggacggtgggaagcattagctatggcatcacgtgccgaccaggtaagcttctactttttttattattttcttatttctattttcatttctaatttcagttttccagattttactccaaaattcaaatccctttttttaatctaagtttgtatttccacttcaatccaaacgcacaaccaaaaaaaattccagcataaaatttaaggtttcactttacttcattttattt

SEQ ID NO: 165453 - DNA, 512 bp, Zea Mays
ggcgaagggtggtgtcgaaacgcagtgtgggtgagatttcgcgaagtggtaggcgctgtcgtatggggatggagcgtggccgtcttcgagtagaccggattggtaaacgagaattgttgtcctcgccgattggggcgagcataggtgagggggatctgcgaaatctttttgagggtgaggaattaaagataatgttgttcaattatagggagatgggtatcatcccgaaggttgagccgatgtagtatatggtgccctcgctgtgtgtatgtaactgtaacttgtattgtaatgtggtttgttggccgttttggcatgcctgtgctgatccgactgcacccgtaggcgacttttgcgtggagtgtctttttcgataaaagacttcgattaacacacttgttgtgctgttctggctgcacccttgggcgacttgcacggattgtcttttcgataaaagacttcgattgacgcacttgttgtgatgctccggctgcacccttaggcgacttttg

SEQ ID NO: 165454 - DNA, 545 bp, Zea Mays
ctccatcctatgctctagtaaaatctcattggggggggtcccgtcggtccccggagcagagcagccgcacgagctgacgcgtcatgcctccagaaccggtctttgtcagctggataggtgcctcggtccgagcgctcgctggccgccggctgctccttccattgtgtgcagtgcaggacgttccgattccgacgtcagaggtcagatcaaacgtggagctttctgcgtcgtgacatcagctcctccttttcttttcttttctctctcccattcgtgctgaacgacgacggctgctgctggaagcaacacaagatagaatatggatagaaaaagcagtggacgaggacgaggccacccccggtcttgggaatgttgccatgccgccattactgaggctgtgtgcagcggcgtccgccagaccgctccctcctctcaatctggcggctgcagaagtcctctacgaccgcaacgacatcctctaaaaggttccccacgcagcagatgtaaacagcaacacgctgcagtgagcatgagttcgccgtccc

SEQ ID NO: 165455 - DNA, 364 bp, Zea Mays
gcaggggctcgatggtgggtgcacgtgagtagagctgcggcgtgagcgtggtcgtcagagtgctgcgcgggcgagctccggcgcggtggcgtcgactccagcgaggttccggcgagcgcgagcgaaggagagagtgtggggagtgcgagcgagcttcgggatgaagagaggaggaaggtgctcgacttttatagagggaggggagagataggggcgccgggaggaggaaatggtggccggtggccattaatggcgggcggtggccattaatggcgggcggcggccatgaagagagggaggtaatggaggagggagaaacagacggcattgaagctccattaacgacgaagacgaacggtcgtgg

SEQ ID NO: 165456 - DNA, 449 bp, Zea Mays
cactaatcacatgctactttctcttgttccaatctttggatcatgaaccccgccttccaaaatagatcacgacacaaccctttatcctaaccctaggttgagataccctgagagggaagaggcagatcagatcacctgtagctgtcgtcgttagacgcgaaccatcatcgctcccacttgtgctggcgatgattgtggtgggacctccggtcctcgcatgccttcagcgtacatgaggacacgcctccttgtggctgttgctccggtggcagaggtccttctcgacgacggccgcgtctctagccaccatggcatttagtgctgcgaactcatccaggttgaacatcttaggggcacacgtaggagggggcgacggctgcgcgagcggaaggacctcgacggtgagcgtagctacgacgatggaggacgaggccgagaaggcaccaaag

SEQ ID NO: 165457 - DNA, 590 bp, Zea Mays
ggaggatgtaagctcatttacagtggatgacatagttttgttttcttctttcatttcatcactagctttcataactatgtcatatttggcatttaaaaattcattttcatctttcaacttatcacatttagcttttgacttcctaatgatttgagtgtattccttgagcaagtcagctagttcatcataggaaggtgaagcaaattcttcatcactatcattatcactatcatcaataatatcattagcattttgtaccttccgttcacctctagccttgaggcataggtgagaagttgatgagggtgatggtggtggtgaagagaagtccccagcgatggcggcaactttttcatcattttcttcttcacttgaagaagacccacttgatcactcaatgtcagtgagccagtcaccaacaatgtatgcctttccatttttatttttgtggaacctctagtgcttcccatccttcctcttgaagaatctcttttcctttttctcgtcatcactgtcatcttctttcttgcccttgaacttgttcttcttgggcttgttgcattgatgagcaagatgaccaagctctccac

SEQ ID NO: 165458 - DNA, 364 bp, Zea Mays
cgattcgcgctcactagtgaccagatagcgcttcggggcaaaagatcttcgcctggggataactccggtagctggccgtcgtacccccatgccttgcggccagcgcagatcagttcaccggcgttggctgctagtcgatcgcctgccacgtgctacagcgttagaccacgtcgctgtgaattgcgtctcgcatgcacgctgatcgccggtgtactgccacggtgaaagccactaacccgagcaccagtaacctcctattcctccgaccgccgcgcgtcttcgtccaaatcctcggccaccgcttagcgatcctataaattgatggtccggtctgttgcgtcatgttatcatgaagccaacgcac

SEQ ID NO: 165459 - DNA, 536 bp, Zea Mays
ggacttctcacctccgccgcacgcactaaatcgcacgcgtcgggttctaatcggttgagcacgagtgacggctcggcgtggtatgcttttatcttcaagggccggcggaatcggaggcgtggggagctggcgcggagtataggggagaagagcccgcgcggtgcactcaggccgttggctccgcccagcgaatttctcgcgaggaagacgactgggtgaagggggcctgcgtggcattgtaactgcgagaggagcgcggccagaggttgagtgctgcggtgaggctgcgggtggggcccacgagtcagggcggctgcgcgcgcggttgaataggacgtgggccgtgcggtgtatttcctctggtgggccgaattcggatactgcagcccaggtaagtcttccccctttctttttattttattttctgcattatctccaaatttgaatttgaactcaaatttaaattccagcatctatggctcatcaccccaaattgtatttatgagattaaaaataccaatctttgagaatttaat

SEQ ID NO: 165460 - DNA, 630 bp, Zea Mays
ggtgctccaaataagagaccatatcatgtttatttatgttaaacttattagtgatcagatttctcataacttggatgtatatagaagacacaatagaatgattattagtgagtatcaaattcagatggttattttccacaatactatttgttctggtaagtttttattgcttctttatagaattggttgttcttttcacaagttttgtgttatatttgtgcacctaacaatgctcctttgtttcttcctaaattcttgcgctgttagtgcaagttccaaatccactgttttggcagccatttatatgtgacatcatatagatatatggatatggatggttgcactcccctttccctcttcccctatctcaatacattgatactattagtctgtatcaaacgtgcacaaggaacagcctttcaagtatgctaaattagttaaactgaattaggctcttagtttttgcattttctttttaagcttttaatttttctttgtctcaaggagtgaatatcctacaattgtttgcatatgacatatcgtgtacctttgaactgtcctccgccttattgtatgtttgtttctctgtctaaaatgttcaaattttgtatttagcttgcgagataaggc

SEQ ID NO: 165461 - DNA, 551 bp, Zea Mays
gtccgttcattacgatcacgcggtccagattcagtgaagacacgatttgatcgtagccgttcacagacaatcccacggccacctctaatcttcaagcttctgacgccgagtcctgctaaccaaacagagctccgcggcggcgccagggaccagccaacccccaccatgccaccccaatgtcccaaactcaacgccatcgggtgctaacttacacgaaacctatggtgatcaaccaatcttccacccagacgcgacccgagtggcgccagaagcgcatggcggcgcaaacctggcagcggacaacatggccggagtttgtcatctccgcgcacaagcacccaggcgtcgattccctagcgctacacgtaaagagaaataaggcgatctcgattgatggctcgttaccggatttcacagtgtggaggtccctggccacgacggtgtgcggcaacgcggtggagcgccagcgccggcgaccaattccaccgcaccgatcggtcgaccgcgcccgtgaacgccatatccgacatccacaagcccaggcggagtcc

SEQ ID NO: 165462 - DNA, 592 bp, Zea Mays
ctaggatccgagccacaggattagaaaccgagggctaggattagatcggccaaacactgaaccagttggttttctgggccaccggattgaggatcgacggtccagattttaaagtcacgcgatcgattttcatccgcccgatcgagatctaacagccgcgggtgaatcgttatcgcgcttctaatcttcaccgttcattagaaaatcaacgccacatgccatcacccccaacccagccacaagtagggcggcgctacacccaaccgcggcggagggttggccggagttcagccatccggcgcaccagtgccccaatttacaagcccatacgcgctacacagtaccgagatcaaggcgaattggtcaagggcacacttacccatagttcggacgccgaggtattccgaccacgggcggtgtgcatcttcggcgactctggcccgccggtgagaaattccgcccaacgcgcttcctcgccgaccgggattcttccgcgcatccatcccgtaggcaccggcgagcaccatgggccttatttcgtgccccgaactgtgactggatcgaggaatcgcgacggcaacgtgagttctct

SEQ ID NO: 165463 - DNA, 807 bp, Zea Mays
gtcgagttcgaaaataatcctttcaggctatatatgtacatgtatgctttcgtcgcttctttttcacaacagtatttgttaggtagttaattctcgatcgagagggaccttgcatcaatctcatcctgtaactacctgtgttgtgtgttgtgcatcgtgaggatgaagcgattgatttgtttggtatctttcctcccattccccattgccattattgaagggtcatggtaggctactagaggtctagggcctgatcatgataagctaatacaagtctagcacttaagagctagactgccacccacgatgcatacagaaactagaaatagtttctatgcgtatgattggttgtctgggtaaccgacgcatggctcgaccaagcctggcctgtcacaaacgcggctttcgtgcttctccatgtatgcaacaaaaaaggctcaatttggcctccgttgcatccacacatagaggcatgcacatgcaggcatccaatcagaagttaggggtcagtcaatgcacgggcaaaggccggttgtcgagaagcacacaaccaatcttgcagacctaggagtagcgatagaccgccgtcggcgaggcgaccccatgagcacaggcacgggagaggacacaggccacggcgctggcaagccagagatagagagtgcacgtggggtggctggaggaagaagaaatgagcatttgagtgactggcgtgcgggcctaggcgaagaaaagagttcaaaacagcggttatgggcacacaggacattgcacagtgcagtgtatagtgcactttggatagcctac

SEQ ID NO: 165464 - DNA, 439 bp, Zea Mays
ggacaaggtggaagtgtacgtcgatgacatcgtagtcaagactaagagagggtcgaccctagtggaagacttaaccctggtctttgacaagctgtgggcaacacgcacaaagctgaacccggacaagtgcgtctttggtgtctccgcaggaaagttgctggggtttctggtttcgcaccggggcattgaagcaaacccggagaagatcaaagcaattgaggcgatgaggcctccggcccgtatcaaggacgtccagaagcttacgaggtcattagccgcccttagccgcttcatttcaaggctggctgagagggcgctgcccttcttcaagctgttgcggaagtccggaccattctcttagaccgaagaggcggaacaagcctttcaagagttgaagcagcacctggtgtccctaccaatactggtagctctagaacct

SEQ ID NO: 165465 - DNA, 589 bp, Zea Mays
cctttttgttgcagttccgcaatctggagttttaattctgctaactctgtgggggccatgcggtatggtctttttgcgatgggcgcagtgccaggaatgaggtctatgtagaactccactcctctttcgggtggcattccaggcaactcttccggaaatacatcctcaaactcttcgattacggacatgttttctgctaccaggttaaacatcattggatcgttggcgggcggctgggcttgacaggaaactgcttttccttggtgatcggtgagaaggacggtcttacttgcgcagctgatgatacccttgtgcttagttagccaatccattcctaggatcacatcaatccctttggatggcaagacggttaagtccgccaggaacactaccccacttaagagaattctgacttgggagcacctgagttggcataggaggtctgatcccggggttcgagtgaccaaagggatggctaggggtgtagaggggatgccatgcttttccacaaacttagtggctataaaagaatgggatgctcctgaatcaaaaagcacagaagcgggagtaaattcaacaaggaactcac

SEQ ID NO: 165466 - DNA, 454 bp, Zea Mays
actacggatgcgctagcaagcttttccgcgcggcggattccggtgagggcacgggggtcgccgtttaaccggagttcgccacctcggtaaccttttgccccgacgcccaaggatatttaccacggccaccgacgaccagtcacgccgcggtggcgttcttatcgccggcggggggactgatcctgatccacggtgggatatttcagatgacagtgaacagtgtgccagcttcagtggacagcttaactgacagaccaagttggagcccagttttctcaaatttttatgtgaaacctaagccaactttctgtagtaaagttgtagaactataatccatctataactttgctacaatgtgctctcacaaaaagtcactggatcccattcaaaatcgagctcaaagttcatctcataacactgttactctgaatttcaaacctcaagcagtctgaca

SEQ ID NO: 165467 - DNA, 418 bp, Zea Mays
gttcaacaaagcagtcaaggagtaggatgatgaatttgcatttagtagtcaatagagggtgcatccaatgttgtctatcctagagtttggagaggcagcagacgtgttttaggattgcggcaaggcagctagcgacattagaaagggtagggtaggttcgccagttatggagaacggtggggagcaaggatgggatgtggagccatgaatttttgaagtggaaggtagttgtttttgggatgtttgtggagatagtgataaggaggggtttgtggtctgagtttggcctgggtagtgtagaaagatatgtggtggggaaggtgtcataaagacaagattgatgaaagcccaatccaaatgcgtgaagactagggttgcccaactgttggaccaagtgtaggagcaagcatggagtgtg

SEQ ID NO: 165468 - DNA, 397 bp, Zea Mays
ttaagtctcctaggaccttgtccaccggatgatctctttgaatgatggtttggactcttggttgtggcgcctgatcttgaagtggtggtactccatcttcatccttcttagtcttgtttctcctcaacccccttgatcattgccaccatcttgagcttctttctcaccttgcttgggggttgagcttgtatagagggtgaaggttaatcttgctcttgtggcagctcctgtagacgcacctctctaatggatatgttccttaacgctaagcttagagcctcctataccccggccttcgaccctgccccgaccaaagtcccttagatggccaatgcctcacttacatagcgcaacaaatcatgttacaaaacatgttggtgacaccatcctcaatggc

SEQ ID NO: 165469 - DNA, 759 bp, Zea Mays
ctgctcgatctgtgaagaaagacgaagaggctttgaagaagatgaaaacaacgttgaagccgaagggactagctcctaagaaatggaagcttgacaggattccttctgccgaaccgaaggtacatgatgcgctggagaaaactatgagccctccctcaccttctgatgccgaagtgtccgaaattttgaaggtaatgactgaatccccaccattcaagctgctaagtcctctaggattggaactgacaaaccttttacagaaaaaggaaatcccttcggctgacgatggaagagatgggggcaaaaaaagcgacgtatgatgaacatactgcaggcgattgagcaaaccccgcctctagcttcagcagacaagactgtcaaatctactgataccaaaactgtcgttgtaactgaaggcgaagatctcacagccaccatgtctgtaattgacaaaattatatcagatgtggctgtggagaaggaggtggccacagaagtttcaaacaaagggaaaaagttgaagaaatctcttcggaaaaagcagacttcgaccttcagcacctgggtggccaacaactttccgaagaggatatggcagagttgaaggaattttctatctcgtgtggctaccagcctggatcggtactctttggcggggttgacgaagaaatcatgggatgcatccgcgatcgtgctggtgcaaaaattataggcaccctgtcgaagagtgtcgaattcccgaagcttgagaaggatatc

SEQ ID NO: 165470 - DNA, 461 bp, Zea Mays
cgtacttctgccgcatcagctcctcaagttcccaagtagcctcgcgctcagactgattagtccacaagaccttaacatacttaattgatctccttctcatgacacgctccgaggactccaagatacgcaccgggcgacactccagagtcagatcctgctgcacagcaatcggttccaattcgatttgatggtccggatcctgcaaaaacttcctcaacatagagacatgaaataccgggtgtacccctgccatggaatccggcaattgcaagcgataagccaagctaccaacccgggccaagatagagaacataccaatgtatctcgggctaagcttcctggagacaccgaacctaacaactcctttagtaggtgataccctgagaaggacttgatcacccactgcaaattccaagtcccgcctcctcacatcagcataactcttctgacggctctgagcg

SEQ ID NO: 165471 - DNA, 511 bp, Zea Mays
cacaaaagtctccacggtcgctgagaatttcttcaaaggcttcgacctcttcgccgatccactggataaccccttcgggatcaccacggataaatttttgctctgatgaataagctcccacctttgcaaagctatctttcagcttcttcgcgcattccatggatacttcatagcattatttttagaatcccgaagttcgtcaatattcttctgcaccctggctctttccatttcacttatttcttgcttagctttcgcaacttcgaaattttcatttatttcagcaagttttttctgtaaatctccaatctcggctttgtgagcttcggcttgtgcgttaagcttcgcttcgctggtcttcagcctatccactaaggagagcaatattttatctttttcaagagcttcattccttagtttaataatttccgatcgaagattaccaagggctaattgacagctttcatcttctgcttttttctaggcctttaaagccttgctcagaattaac

SEQ ID NO: 165472 - DNA, 775 bp, Zea Mays
ctcgttccttcgccatcctagattcattccatgcttaaacactgaatgatgtgcggctaatacactaattcgtcgttcgtccgcatctgacgagatctcgtgtggacggcctcacgaaggtgatattattcaggatggagtttgcatgtaaaatctgagaaattgtccgatagcactcctgagtttcatttgaagatgtgtcctaaaattatgggcttttacatgtgtttgtgattcgtttcaaacggtgggcgaatcacgcgtgtttgattccggttgacttcgattgctaggctgcttgctttcgcctcactccttgcagcagtgggtgctacttgcatctttgtttctgtctccttcctcgccgcagagcaacaacaacagttgcaggggcacgggtagaaggttgggggacaggtggaagaggacaagcaggaaggtgaccgaaggtgggcactgaaggccgaagatggacatgaaattgcaacttgttgtcgcaaaggtattagaacccaatgcatttctttgtatcccgtatttagcttcctcttatctttgttcgaaattgcaacatggtgtttggtcattcgattttagggatgggctcatcgcccccttagaatctctctctagatagtgcggtgccgcatgaaaataataggttttgggttggattgtgtgtttctgtagtttatttgcgctgccctcatacttggaccttgagacctttaccttggtgtaaaaggatttatttttacagtgaattgaaagttgg

SEQ ID NO: 165473 - DNA, 391 bp, Zea Mays
ggtccgtaggtgcactttgttgtactgcatcaacatggcttcaccagcacgtctagtcaatggagttgtggcctctagagattttgacagtagacatgtcatagatgcgcagcggttcactcggtccagcacttcactacctcaagagaggctagggtcagatcaagcttacccacattaaatgttgcctagactatatctttggtgggtccagtccaacaacccttcaatgggaacaaatggcgctgctgccactggccccattcctgtgtgtgatccttcccatgtgcataacacatctagggagtctcacgagaaacacctccatgagcactaggacaccatcgtccttcagcgtgttccactcccacagcctcactctgaagttgat

SEQ ID NO: 165474 - DNA, 464 bp, Zea Mays
cgccagagatagccacttcaggccctacgccacgtgccttggcactttaacctcaccgccgtgactcacgttagcacgtccggtggtcgcaggggagcttgccacggtaattgccaccaatcgcgcgcgccagtaaccttcttcctctccggccgctagtgcatcttcgcgaaattggacgccaccgctgtgggagcctataaattgccgacctcgcctgctccgctaagtagttgtgcaaccagtgaagcaacccgtgcctcgaatcatccactaaagctcctcaatttgggaattcccccaaacctgctttgcgccactgtgaaagagacctcgccatggctagctcacctcaggtccgctcataccctctgctcttttgtttcaatgtccttgtgtgcccctgatgctccctgaccccgccaattaagctaggacccccttagatcgtcgagaacgcgttg

SEQ ID NO: 165475 - DNA, 414 bp, Zea Mays
cagtacgagtcacgacagcatggttaaagtgctgaggcacgtggcacaagaccgcgaggtgtctaactccggcgagggttgattcaaggcgatcggggtagagtggacacgacggccggacggaacagtgccttaagctcatccgtggggaagatctttttaccgcgagacgttatccgggcaccggtgagcacgaatcacctcaccgacatgaatccactcacggggtcgctggcggctggttcattgaaccaacagatttttctggtcactgtaccatcaggatcttcttcagtcagtctgacagatcatgtttggggcaaatttcctcccgattttgtagggtgactagatcaatgctctgcagcaaagttgtagcctaatagaccagctttaactttgttacagtgtgca

SEQ ID NO: 165476 - DNA, 377 bp, Zea Mays
cagaaccacgttcacacatgaaagtcttattcatatataccatgaatatttcctgttaattcagcatataacaaacacatgtaacacctgttaatattccctgtttttactcatgaatgaaatgttgcaatcaggttagacaatgtagtcagattacttccatttgttcacattgcaaatttgcaataatagaaataattcttacaaattcaacaatgaacaagcctctcaccttctggagaacatagtccatgatatctgtacatgttggcttcccgttcatctttattgttgccagggaaacagaggggagctctttacaaactgttgtacacttcctctcctcatgaagttcatcaacatatggcgactcctcc

SEQ ID NO: 165477 - DNA, 423 bp, Zea Mays
cgggggccattgcgaaggagtcgtggatggtcggtctgctctgtcacgttcgtgcatggatgggttgggtgcatggatgcgttctcttgttcaggaatttcctcagcagcccacagtcttttgaaggcgtgtcggaccggatagcaatggttcagacatgggacctcgagcatcttctcgaatggtcaatggcttcctcgatcgacggtttctttcctttctaacaggccatgactactagcattttgttgtgcctccacttgtccttcttcctcttatctagttgtcctctatagcctccgtcgggctctttattgctcttggccttctgcctacggtggtagaaaatcggcccactgcttcttctctcgatgcgtggtttgttgcgatgtcaagttctctcgtggtccatggggcttctgc

SEQ ID NO: 165478 - DNA, 273 bp, Zea Mays
cctcctctcgagccgacgtctttggttttggggatgcagcttttcttttcttcggagcagctaccttcggctcagggctcagtttttcagaaatttccttgtcctttttagccaatttggtgccttctttgtcaagggcgctcgcaatcctctttcttctctggccttcggcacctccgaccagttgctcatagtcagggtaatcaaaattcaaggcatctagcacacgattcaatcttcgtttcggacgtgtgccgaaggctgcagccatta

SEQ ID NO: 165479 - DNA, 530 bp, Zea Mays
acctattaagtgaagacttcagttctttgatcttttgttgtgtcatttcacctcttgagaagtcaaaaatttcttcacttagaagctgcatgttattaaattggatatgcataatgggtccaatatgtaaattaaagatgtcaacgaaaatgtcaaaactgaaaatacagacaaaataacttgccttcaatatagccatgcaattttcacatatagtttcactactctttgcagctgcaacaagatcaggtacgaaggatgaccatctggcaggccactcatgtttcaggacctatcacattgcaaggaagcaccatgagaaataaatgtatcaaaacacaaagcatcatatcaatgttgggaacaagaacattaaaattcagcgcatagtttagatgaccttgtaaagtagctgccaaggtgaagaaaaaagaaaagctaaatgtgcagcttacctgcaccaaaataatattgagtttattgacgtaaagcctctcctgccgaaaggtaacttcattgctagaaagctg

SEQ ID NO: 165480 - DNA, 431 bp, Zea Mays
acgataagtgcatcaatcgacactccgcgcaaaagtagcctaagggtgcagccggattagcacaagtacgcgaaaacggccaaaagtccacaatacaatacaagttgcagttacatacactcagcgagggcaccacatactacatcggctcaaccttcgggatgatgcccgcctccctataattgaacaacattattttcaattcctcaccctcaaaaagatttcgcagatccccctcatcaatgctcgtcccaatcggcaaagataatagctctcgtttaccaaaccggtctactcaaagatgttctcgctccatccccatccaacggtgcctaccactccgcgaaacctcgcccacgccatgcttcgacaccacccttcgtcgccggcacttggtcctcgcactaggaggatcagccacctcaccaacc

SEQ ID NO: 165481 - DNA, 344 bp, Zea Mays
gagcttcggcaaaactaaaaaattttcaacttcgtcaaaagacaagaaattcaatcatcagatggttagggtacgctcaacagctagagttactcgcgacggagaggaagccgaaggtgccgaaaccgctccaatttctgaagtgatgaaacggtcagggttggtagtatcggaggatgcacctgccgctgaagctgaacaggttgatgctgaggaaattgaatctgaagatgattacagcgccgtgccatctaaacccagccacctggagtttgggaaatctaccattaccaaagctgatatgtctaagctgatgaagttaggctatttcagtgaagcaaaaa

SEQ ID NO: 165482 - DNA, 398 bp, Zea Mays
ccctatatgtagaataacatacaaaacgatgcccaataaacagaagaagaagaaaatcagatgtaatgaattaaggactccaatactgcatgagcaaactaaagcaggtcgggtgtcacatcgcaaggtggccctgcttgttcccattaccatgagttcctgcagttgcagcaaggcagctctcacatctctctcatgcatcagactcgctgctagctcctcatcgatcaccaaagagacgaaaccttagcatcctcgagtacgctgctgggcctgggtggccagtgttgttgacgcagctggcacaggatttcacatgattgggtgggaacagtagtgagcatgcatgtattacccagcgggcaaaggaggggatgcggcaaggcagcatggagcac

SEQ ID NO: 165483 - DNA, 505 bp, Zea Mays
tgatgatgaagtccccaattacagagtacaatgttgcttcgagagtttttgaggccttgctaagggtaaaactttctaagatgctctatgttccatgagttccccacttccgtgccatccatttgagtaagccagtatgatccaggccgagtgacctctgatacaatgaatggcccttcccatagtggtgacaacttgtgtcgtcctttccccgttagaatttggcgaagaaccaagtctcccactgcaaaggatcggtgtcgtacggctttatcatgatagcacctcaaggtctgctagtatctagccgactgaattactgtgttcaatcgctcttcctccagcatgtcaatatcctctagcctggtagcttctgcttctgctatgttttcaaagaccaaccttggtgccccgaacatgaggtcggcgggtagcactgcttctgaaccatagaccatgaagaacggagtatttctatgtagagctcgactaggttgagttctca

SEQ ID NO: 165484 - DNA, 785 bp, Zea Mays
caggcgtttggtccagcacacacttctcgagagcttaagtcacccattgctgtgaagcctgatgaaaagcatgctggggttccttctgcttcttctacagatgatcggattgcctctctgtatgcatatcgcaaagctaaaggactttgttataaatgtgggcagcaatatacacgaggtcatcgctgttctgaaactgttcagttacatgtagtggaagaattgtggcagatgatccaatgctcagattctaaagaatgtcaagtggagtctggggaggaggaacctgaaatcaatgccctccatttgtctcaggcagctgtggatggtactgatgctcctcgtaccattaagtttgtgggtcatattgctggtgttgacattctagcattgctggattctgggagcacccattcatttcttagtgctacggtggcttcatctattcctgcagtaacttctatgtgtcaaccgttgcaagttcaagtagctaatggtacatatatgacttgtgctcatcagattgtcgatgcaacttgggctattggtggagtctcattttcttctacgctcaggatattaccactgaccacttatgacctcattattggcatggattggctagaacgtcatagtcctatgctgctccattggtcccagaagtggctcagccttccagtcaagggtacattcgttacgctacaaggagttaaatcttcagtcatgcagtcagcgatgatccaagtatgcagtctacaagagttgactgacaaagaacagtctgc

SEQ ID NO: 165485 - DNA, 586 bp, Zea Mays
agtttggcggggagacttcttcagttgctgaaccaaaagagcccattcttcctacacagaaggctaaagatccggctataatgccgaaggtacccttagccgagctagctgagtcaaagactaataaagataaagccaaagagccaaaaattgaaggaacaaaaatgttagaaattttaagcccttcggcagaagtaacagtgtcgaaggcacaaaaaagttttgcggcaactcccaaaagaagaaggatggcaaatgtactagatgtgttagagacaataaaggctttaagctccactccttcagggaaaatcgccgaggcttcaaaaatgcaaaccgaagctgaaacaaagccgaccgaaattgaagctgcagttatccaagctagtgccgaagctgggccttcagagctcgccgagaaaaaaccttcggaaattgaagaaagggcaacagaagaaaaggccacagagcaagtttcgcctgaaaaggttgctactcctgctcccgaaacattgaaagagagcattgattacatcatccgccatgcttcgggaaaggtactttctaaggaagaaaaacgagaagc

SEQ ID NO: 165486 - DNA, 455 bp, Zea Mays
ctgagggcagtatttctacagttacatgaaagaataagtgactgcaagtatccaccctttattctttgtgaaggtttgcaggtgctatcgtggataatattgtcactactagtattcagttttcagaaaacaaattctgcaaaacttccaatggtaattcggtcctggtggatatttaacttcctacaatcagctaccactgttgtaattgatctcaggtcaattttggcaacccatggcgatataggatttaaagaatggattgatatgttcatgcttgttgtttgcatttacctgtttgcgatttcagctggaggaaaaacaggaatcacattcacagacagcagtgtaacagagccactattgaatccatctgtgggacagcaggcagaagccaaacgaacatgtccatatggaaaagcaaatattcttgaacttgtcaccttctcttggat

SEQ ID NO: 165487 - DNA, 572 bp, Zea Mays
ctggagctgcaggcgagcttgggagtgttaggcgtggtacagaggaggcaacggggaagatggcagtgcactagggtcggctttatagccacgacgtgggtgtgggcatggggcggccgagggcacgcgggggttcgcgtgcgggcgtgctctgggcgcgcccccgagtgtcagcccacgttgaacacgtgggggtttacttctgtcagggttcaacggccgatttggtcgccatagcgtgcagatcttagcaaaacacccgtgtacggtctcgtctctgaaccaaatcctaccttttccatgttagttccaagcaaagatatggttggggtagagagatatgggggtgagaagttggctctgtccgagctgtccacaccgagacaaaagccatgtcaagtcgtgtcaaacgacttagggttgggttcaaacttttccagggtgtgctagaggtctttaggcgccattttgtcaaatgggccataaggttttgaggttgggaaaaagatgaacatgtgtgatctttgaaagagggttggttttgaacttaagaaaaacctgatttttctttt

SEQ ID NO: 165488 - DNA, 450 bp, Zea Mays
cctagtgccatctttcttctccacgaacaggacaggggcggcccaaggtgaggtgcttggccttatataatctttctctggcagctcatcgatctgcttcttaagttcaaccaactctggtccagataccctgtaggctcttttagagatgggagcagtgccaggaagaagctatatggaaaactcaacttttcgctcgggtggcatgcctagtaagtctttcgggaacacatttgggaattcggacacaaccttgataatctcgagtgaatctggctccttgctatcgatagccatctgatgacaacctcctttccttggctcaggtgagattaactcggctaccacttcttctcctagtggggacaccaacttaattatcctcctatcacaactgataattgcttggtatttatctagccaattcatccctaggatgacatctattcc

SEQ ID NO: 165489 - DNA, 870 bp, Zea Mays
ggggaaaacaggctcgtcgtgatccctccgcctcctaatccgcgtgctccgcgaagatataaacccgatttccccgtgacctgaagcccggccgctacaagtcctcgccctcctcgattcacctcatctattgaaaccgccgtgggcctcaccgttgtgttgtgtccgtgcgtgggcatgcgagccaccgcccatgctacacgaccattgctgcggtcggtctcttggccgggatgactcacggggtccccatggtacacgagtcattccaatttctcgctgtctttcctcaccaccgcggagccgtcgggtggcgtcgctggacctctacgttgttcaatcgtcggtaaggggttattacatatattcaccatcccctagggaacattgatcgcggataggattaatggatggggtgttgtggcacggaacggccgttgtcggccatggcctccactgtggggttgcccgccgccgctcggtcagctggtggatgaagatggtgtggagatcgttggatctagatgaacgatagagattagaaggttggggaggaaactgtataatcgttgatcgtggaacggacgccctggattagattcatgtatacctgtttggccagatctgacgtgggccgtttgatctagatctggcgctcgaaaatcgatttgggcgttataaaatttgatgcatcggtgatagatcttgcgactgtcattatatgtcggttcaatgatttaatcctggccgctagcgggtgatcgggtcgtccatattcgcacgtaccccttcggcgaggcttttttgcgtatgagccctcatgtttctttcaaacccgtcatcctaacgcagttgtagaaaatttaatat

SEQ ID NO: 165490 - DNA, 313 bp, Zea Mays
gctacctgtttacggataaaaatattgacacccatcatggccatgtggcatttgtggtactaggatggaactattggaagaacagtgacagattagcacttcatgtaggtgatcgcacaaattttcacaacaaggctctcaaggattgtgaggatcttttgaaagaaaatcagccaatcactgctgctatgaaaaagcaaagtcagcttgagaagaatgagaactctattcggttaaatgctgccattgatgtttgtagatttttgttacaccaggggcaagcttttcgaggccatgatgaatccaaggaatc

SEQ ID NO: 165491 - DNA, 279 bp, Zea Mays
gtttttgaagctttgcgtgctgctcgcttgtttggtaacatggacaaatgcaccttttgcacgcaacgtgtctcgtttcttggttatgtggttactccgcagggcattgaggtggatagcagtaaggttgaagcccttcagggctggcctacaccaacgacagtcacgcagattcgaagttttcttgtacttgcaggattttaccgccggttcgtgcgtgattttagctccattgctgcccctttgcatgaactcacaaagaaaggtgtgtcttttgat

SEQ ID NO: 165492 - DNA, 489 bp, Zea Mays
cgcgggaataaatccccgtcggataagaatttttccttattgacatcctgtggggaagaaacttctccatccccatcctctaattgaggaatttctaacgggaaattggagatcaggtctctattgtcatctctagttacggtggactagtgggaggggtagtagcagagtagtgctatgtagctttgctttgcttgcttcgaagggaagcaattactcaaacccttctgacttgtcaatctctcctggctggttttgcttgagaaaagttggaactgctcacgtattcagctctactagaagattagaaagtcccgcgccattcttttctcatctccgtatggtcaaagcgcattctcgttgttgtctttgactatagtaatacgtcttttttttctttcgggtgggttggggtacgataattcatctttgacaactgtcatgtgtgattgatgttcaagacttactaccacatagtatgcaatgttc

SEQ ID NO: 165493 - DNA, 392 bp, Zea Mays
gcttaggcacgacttaccgggccgtgcctcgggccggcccgcttgacccggcccatctggccatctataatgcgaccaggggctgagctatgtgccttgatatccggaccgtagatcgcctgatgagtggcccggatcgtataccgattcacgtgagatctaatctaatccaaaccgtcgtgttttgatccgacgattgagatgtaagcataccccttcaccgtgtgacaattgcaaaagagacctaagatttcgtagaaaataacccgccgttcaactatatgcaaagaacatagcaactgagtcctaaattttgcagagagaaccccgtagaactccaaaatcctgcgcgtagtccataaccgtgggaatttgataaataatataggaaa

SEQ ID NO: 165494 - DNA, 457 bp, Zea Mays
tcaaaagaaaagacctcgtaacctcttaaagaaccttctcttctttccccgatattaacaacccttcttctcttgctactagatggaaggctcctttgtcattaggacatcctactgctcgaaggtggaaggattccctcaccttcttcggagctgcacgcttcgtatggggattcgcaagaagctggagtatgtctggaaagaataccgcgagaacgggattgagaaatgctctatgccagtctacttgggagaaagctaaaattacccaaatcaccctccctttcagatcaccgctactggccaccgcttctcagatacctgccagaatgctgcccaaaaagccctctgccagctatgccacaactacagcagggaggtctttgatacaccccttcgctattttccacctaaaaacaaaaatactcttgcttggaggaaaagactccaggccttg

SEQ ID NO: 165495 - DNA, 927 bp, Zea Mays
gtcgttttagctttcctgttctgtgagtgcaattgtttttgagcttcggctttttgcagtgatcatcaccgaaatggccgaggataagaaaagtgtggatcccacactcgctggcttctacgaagccatggaaaggaccaacgtagaaaaaaatcaccaatgaaatgttagctaggctatccgatgattcaagtgacagcgagagcttggatgttcagagtgacaacgaagatgccaaagatcgaccgtggaggccaagccacgttgtttttgggaagtcaactatcagacaagggcaaattgaaaagcgatgaaaggcgaatattttcatgatttgtccatagtgagggctgggggagaagacactgtaacccttcctgaaggtgatgaagtggtagtctttaggagcttcatgaaagttgggcttccctttccgctctacaaaatgttggtcgaagttttgaagacattcgagatataccttcataagcttacccccgaagctctaatcagagtgggggtttttatatggcccatgaggagtcagtggttggagctggatgggagatgcttctgcaacattcatgagctatcttaccagatgaagacgatcagaaaagaacaatatcataacaacttcggctgctacggcttcgtgcctcgctctgaggcgaattaccctgtgcctacatttcggaagaagtggtcaggttcttggatgaaggaatggttttacgtgaagaatgacctgaatcaaagggaggatgtgagaggcgttatgcaacgttctatatggtcatgtttcggcattagaaggccatccatcgcacttgggaatgaagtgcaggcgtgccaaattgctttcaacaccaaatgcacctacattggcacaagagatttagttcaagagcacattgcttataaagt

SEQ ID NO: 165496 - DNA, 804 bp, Zea Mays
cccgcgcccgcgcccgctgtggagtttttgcagaagggccctcgggttatagactaactggatacacgttcgttcactgttcctctgtatcactgacagtttacacggggtcctccaagttctatttcttcgctgaccaaggtccacgacggcgttcacgcgcggccgaagtccggcgagctccaggaccggccgattggggctatgaccggtgcccaacttcggcttaaaccagattcaggacctagagaacgtttcccctaggttaatttcaggaacgacacacagagacgccctgaccatggtgaccgcgggtgaggcggatgatcataaacgttctcggcgatgggtggcggtctaattcaattgggcgggtctaagagctttaggagggcctagggacgctagaacaagcaacagagggacttggactgacctgagttgagctggccgcggcgaggtctttcctacggtgttcttgcgcagatttggggaaagttccaaattcgcacaccctggtgaacgatcgaggctaatttttggtggctggacgcttaactaccttacggagctcgcggcggggtcaatttatagacgtagcgagcggcggtgacgaattcggccgagcagtgtggcggccggaggagagacgagctctgtgcgtggaataagtggctttcaccgtggcagttactccggtgatcaccggacatgcacccagtgagtcaccacgataagggctagcgcttaagcacgtggcacgcaacgacgacagctcgacgacggcgaggttatccgaccgac

SEQ ID NO: 165497 - DNA, 421 bp, Zea Mays
cagcagcagcagcaggagcagcgatcgcctcgcttctagggtcactggaaagtccagggccccaagtaagtgtagtccctttttctttgagcctaatcatcatgccgacaagtcttaacccatcatctgtttgccagggcttcttccccctctgctcccaaggttacacctcctccgcaagataccaggcccaccgacgggtatggctctcagcaacaagaatatgctgagggtggtgccggcggtccgcccccagctgctgccaagacagccagcggcttcccatgccctagtcggggatccggtggcagcgacaccagcgtcgggtggcgtagcagcgacggaggaggtcccagctgggggatccgcgcccactcccgaccctgggggtgacgtaggaggtgcgtccagctccaacccc

SEQ ID NO: 165498 - DNA, 566 bp, Zea Mays
tggaaaatgccttattatcatgttagacttatttttcctacttataatgatgggctggggtgttcattatttttgcagtggggttctggtggttataattccactggatttttattataaattttgggtctagttttgtaattctaataaatgatttccatttggaataatgctaaataaaacattttattttaaaactaatctggactgaaggtctctttatttttcctaggttctctgttacttaagcaagctaggaaaaataatttcactcactgttcattaattggcccaagccatgattttaaatctttcttgttgcttaatgaatatacttcaatgtttataattggcccaagccatgattttaaatttttcatacccttttccccattttcttgaattttgctcatagggctcacttagggtttttattagggttgcaacattattacctttttgaaagacccatttgttttgatcatgatacttttaagtataggcttggtgggttcttcactcttaagtcaatttgatgctcatgctcaatttggttcacataaaat

SEQ ID NO: 165499 - DNA, 795 bp, Zea Mays
attggcacaagagacttaatccaagagcacatagcctatagagtgtggccacttgtagatagctgggagatgccgaaggatactgctgccgggtctgtcgaaggtggattagttcgattaaagtataccttcagattcagggaccggtttaacgagccaagtgacgattggctgaaaagtattgaggctattagcgatgagctacttgggacatataccagagccgaagatgatgctttatcctcggccttcgggggtcgaggcaagaaaagattgaacatggtgtttgatgcaattggcttcatataccctgattactgctaccctttgcgaagacaagtaaaaaagagaaaaactgccgcttcgaccaccactactgtgccaaagggcaagaaaatgaaggttctaacccaccggccacgatatattgagacggccgtagtgcctgaacttggtgaagggacttcctccgctgccgaagggaatcaagctgctcccgctgaggctgaagctgaaggatcgactgcagcgccaaaggtgcctatagtcgggtcagccgaaaccaaaaatgacgtggccaaagagccagagatggaaaaaacagtgatgatgccaaaaattctgagcccaccggtagaggcagaattgtcgaaggtgataaaggctcctgccacaactcccaagagaaggaggatggccagcgtgctagacactgtcatggagaccacaaaagccttgacccctgctccttctaagaaagttgtcgaagctatcacagtccaggccgaagccaaa

SEQ ID NO: 165500 - DNA, 658 bp, Zea Mays
ttcatgccctaatgtctgtttaagacatttcagttagcatgcccttgaccacccttgcttcttaatgatccatgagcggtcattttattttgcacatccttggtgatctcgttagttccttgtaacttccttcggtaatgaatttttacttcaacccttctattagaaccttatctatcttacccttgattgttttctccacttcgttacttcgcgagtcttgccttaactctatcctctgtcttgccttttgttattatcaccttcaccttagacacctctatatcttacttgatgtttatattatacctaccctttaaaatctcctcttttcatctcaatctgagtgttgtactttacctatttttcccatggtcgtatcctcttccttgtcgcttgcgagtttttaactccatcctttgttgggctccgattgggtactacctttacctttctcatctctcgatcttaccttggtaattacactgtgtctgttctctaaaatctcaaatatcctatcccagtttgagagcggtgttttacttatcttacccttggcaatattctcttctttaccacatgcaagccttgatgtaactccattctttattgtacttataccactggcccttctatgccttcatcttttctcttatac

SEQ ID NO: 165501 - DNA, 626 bp, Zea Mays
tttgggaaaccacactttcttctaaggtggggctctcacaccctctacaagcacaccatttcccacaactggggtgtcagatttggatggagtgattttgacaagatttgtggaggttggatgtttctatgatgaagtcaagccactgcactcagacaccttaccaaagcgagcatcactcccatccatagcagcaaagcctaaccctggtccaccagttcccctcttgaactgactaagcatcatgcccaactgggcctcactgctagacacctatctcaatactgatcaaaagtatgtgttttcctcctcgttcatagtcttgtcgtgtctacatgactcaagcatggattacaatccctcacatagtgcaaactaactaggtacaggtgcactcactgagctagccttctcaagcaaggctatcctagcattcttctctgctagcttagtctgcaagccaagacaagtctgacatgcacccaacaggctagacctagattgaagctcatcgcgctcatctagagcacattcatcacatttagtctcgtaagacaacaccataggatctctagtagactcaagctccctaagtgtgctctcatacttgcttttgtactatatcc

SEQ ID NO: 165502 - DNA, 489 bp, Zea Mays
tgattagtgcggtgccgagaattagatcaatgtagaaatctacttctctttctggcggcattcctggcaattcttctaggaatacatccatgaattcttctactacagatatgctttctgctgctagattaaacaccattggatcttgggcgggtggctgagcctgacatgaaactgactttccttggtggtcagtgagaagaactgtcttatttgcgcaacttatgacgccattatgcttggttaaccaatccattcctaagatcacatcaattccttgggatggcaagacagctaagtctgccaagaacactaccccacttaaaagaatcctgacttgggagcatttgagatggcatagaaggtctgaccctggggttcgggtgaccaagggaatttctaggtgtgtagtgggaatgccatgcttttccacaaaactagtggctatgaatgagtgagatgctctggaatcaaaaagtacagtagcgg

SEQ ID NO: 165503 - DNA, 282 bp, Zea Mays
atgcatgggagcagaaagagatgcagaaatacaagggctttagtagtatagcaatcagaatgtaaaaatgatctaagtggtgttgtgcgatgtgcacaacagtatatggatgtgttaggagatgctcgaactgatcacatgcacaagatgtataaattctatgcatttgaatcagttttaagcatgtaaagaatagaggttcaccactaaaacaacattgaacatatgcaagcaagaaaccatcaaagtgatagtcaaaggtatacaaggttaactacccca

SEQ ID NO: 165504 - DNA, 531 bp, Zea Mays
cgacactaacacaacttgaatgaatcaaatcagaattaagacgtaaaagttatgggttaaacaagtattaggttatttttaatatttattttgtacttaattaagactccaggggtattattgcaattcttagggacctatctgtaattgtttcaaactgtgtggggatggcaggttctataactgaaaatcctaggactcttttataagtttgcctcgaccgaacgggtacgttatattctgagccatccgatcaaaatccaacggattggattagactcaagtcttcccgaaccggtatgcgatcagggccgtatatcagccgatccacggttatcgtccatcggaacggaaagttatgaggttctaatcccatccatccatacacagatccatggccaccacgcgcctagctgaagcgatgcgcccaattttgatcaggatcgtgcatcaacacatcaatggtctcggtgtttcccccctcccgcgacggccgaccacggaggagcagaggcctgcggcggcgtgcca

SEQ ID NO: 165505 - DNA, 784 bp, Zea Mays
gccggcccatgcggcgatgcgctggaccctggcgtgatgctccgcctggagatcttcaagtgctttcttcgtcgcctccatcgcctgggggcccagtgccgtctgcgccgccaggaactgccggatccgcttttctagctttttctccttctcctccgcctcgagctcatgctcgaccagcaacttatcccgcctttcaaacatttcctccctgaaggcgagatccttctctcgccaggcgagatccgcctcccgcctatccagggacacatccttctccttgaggttctccttagccagggcaatgttgctggccttgtcctctagctcccgctcctatttttggatcctctccacagccgtggtctgctggatccgctgctcttccaggatttcgttcatggcattcagcttggcccggagctctgtgacgaccgcctccctctagctcaaggcctcctccctcttggccaacctcttctccttctggctcgcctccagctcctgagcgtacaccttctggaggtcctttttgtaaaccttgcggtcccgctcgagctcggaccgctcggaggcgaactggtgggacgctgccatggtgcgctcctccaattgggtgcgacagtcgttgaggcgctggtgctcggcctcaagtgcctcccactcccgcaggattgccgcctcagtctcatgaagagcctgatgggcacgagacaacacccgggggaggggaactggcgctgcttctggcttggcgccggaccggagccaccgcccaaaaacc

SEQ ID NO: 165506 - DNA, 745 bp, Zea Mays
attagcaaaaacctatatattattacacaatagctgctagctagagcagaaacgatgattaaacatgctgctttttgcatgtaccatacatacacaatatgacaatctcctaggcaacgccatacacaaatcttaatatataatgccactaaaatttaggagcaaaccataccttaatatagtcaattcttagcaatgtaataccatagtaagtagcgctactggagcactagtgcacaatataaaatagcaaaatagcaaatctgaagcctctcgtatttcaatagcattttcattatgaatataaaatagaaaatagcacttgaaatctctcatctctcatattttcagcctttgagataacaggaaaatagagagccgagaattacttggctcaatctggcctcataggaaaccaacgaggaggcgaggaggctcatgctgggcaaagtggagaactgaggagagcttctggccaatgaggaggtaggccgagcagcctgctacttatcctcaccctgggtcattgcggacgacatgaaatcaagatccaaacactctcgtcgtgaaatcaacaggcctctacttatcctctcggtctcaccctctcttccctctgtccctctcttttacgaccaggaggaagagaagcttaagaagctagccaagatctaagcggaggtgaggcggaactaggaagaaaggatgggagaaaggtaaacacacgatctagatgaattagaaa

SEQ ID NO: 165507 - DNA, 342 bp, Zea Mays
cgcgcagccgaacgggtatggagctctgctggccgctggattagacgccaagcgcgcagattaaatcacgctgaagtaacagaatccgacccttggatcgatttcctacggcatagatttaaaatacccagacgcgttggtaaccatcggatcacagatccatggtcgcagttctattgggcaaagggcacgtgacgccaaatctgagccatcgatcaacagatggacggctcgaaccctttcttcctcccgggattccaccaaagcgacagggcgtggcggcgccagttcttccccccgacaccaggtccggccgactgcgccatgtccatctcccaccat

SEQ ID NO: 165508 - DNA, 609 bp, Zea Mays
aagaaatatcctcaagttcagaaactattgtatgcagtacttctaactgcacgcaagctccgtcactacttcgacgaccacaaagtcatagtagtcaccggatttccaataggggatattctccacaataaagaagccatcggaagaatagccaagtgggcctgtgagctgggagctcatgacattgagtttcgacctcgtactgcaatcaagactcaagcactagttgacttcgtatcagaatggactcagcaacaagtgccagataacccggaaactgcagaagtatggcgaatgtatttcgatggctcgttgaagctacagggggcaggagcagggatcctcttcattgcacctggaggtgaacaactcaaatatgctcttcaattattattctcagcgtccaataatgcagcagaatacgaagctttgatttatggactgaacattaccatatcactaggcatcaagagactgatgatatatgaggattctctggtggtcataagtcagataaacaaagagtgggattgctcgaatgattccatcgggaaatactgcactgccgtctgaaagctagaagacaagtttgaaggtttggaatttcat

SEQ ID NO: 165509 - DNA, 712 bp, Zea Mays
cctccttccaaagcctttacttatttcgtgtcaagtcctccttctgctgatggcggtttgggtcttagagtgcgaccctctgccgaagaagttagtgctttggttgcttcgcttggagaaattcctgatgatgaacggcaggtccactttgaagtgcctttggatcctagcgatgcagagataggtgccatgctggatatgttggctggggattcttctgatgctgctcctactgaaacattggtggtggtgcccatccctgaagctgataaagccttggacgctcagaagcctatcaatgttcgtccaaaacgttctcgccgagttgaccaagcctcttttcctgctgagggggagaaaaagaagaagagacgccttcgtcaggtgtctagcttggatcaaggtgccggcccttctgctcctgttgctgaggaagtgccagtgcatgaattcactgaagctgatcccaatgggtgtagcccgttttgacgctgaacccaatgggtgtactgtccgtcttgctgatgataacggtgaagaagaagacgaaatccccatgattcggaaaaacagctgccgttacactgctagtggggaaagtagcggtgttccttctccagccttgtctgccctcattggactgcaagaattatctctggctaactttgatcagactcttgaggacatgattccagaagatctgctatcagaa

SEQ ID NO: 165510 - DNA, 294 bp, Zea Mays
tttctcacatatattgcagtggtctgggtggtcttcggaagaagcttgccggtcgtttcaaatcaaagcgccctcgtgccgatgatgcagactataatccaaccatagactcagaggcccaatcttcagctaggggtagcatttctatggacacagaagatgttccacacgctcatcctgactatccaattgacatcacaggatggacctgtccaaagaggagattctctatggcagaatattgctccaggaggacagtcaatcagtatgctctaccctcagacaccaatattc

SEQ ID NO: 165511 - DNA, 481 bp, Zea Mays
ggagagcataggtatccagctacttattaggtaggatataagagatggataggttaggacaagaatagcctggggaaagaaagtttacggtgagaaagaactccgtgctgggtggtaatgcatctgaaggttgagtttgagttctctccttccttgacgaggttggccttctttggccttcatccttggagttgctatccatatcaaggacatatggttaagatagttgtcggtgcttgggatgggtaggcccaacaaggtttactttgcttttggagtaggtgaatataggtaacatatcaggcatgttaagtaattgtgcatggccgagttgatctcaggcactagtttaggtttaggtgcactaggggaaaacaagggtcatatgagtaggatctagtttatttcactggtgttaatttggtaagtgcctcacattagattggataagatctagattaatttggcatgactagattag

SEQ ID NO: 165512 - DNA, 442 bp, Zea Mays
gacaccattcatgattgggccgacctcaagaaggactttgtgggtaattccaaggcacctacaaactccatgggagctattgggacctcaaacaatgcgcctaaaaaagtagggatagcctccaggactatatccagaggttattccaaaacagaaacgaactccatgatctcgtggttagtgccttcacctatggcaccatgaacgaagtgacggttcacaaacttggtagcaggcggacgagaacaaccgctggcctcctcgacatgacaaccaattttgctgacagagaagacgcattgggggcaatctttcgaaggggaagacccccacacgttaccgatgatacgagtggtgtaaaggagtgtcgagaacaccccgacaagcgctagagaagtaacaatgcctgttgtgaaggaaatgaagttgccaccatcgatca

SEQ ID NO: 165513 - DNA, 720 bp, Zea Mays
cttcatgctcctgctcattctaggaatatatgaggatatcatcaatgaacaccactatgaacttgtcgaggtagtccatgaacgcactattcatcaagtacatgaagaaagttggcgcattcgtcaatccaaatgacatgatggtgaactcatagagtccatacttggtgataaaagcggtcttcggtatgtccgaaggtcggattctgagctgatggtaacctgacctcagatctatctttgagaacacaccggctcctctcaactgatcgaacttgagttccaccaattcttgtctctacactcgataggctctcttagaaataggggcggtgccagggataagctctatggcaaattcaacttttcttttaggtgtcattcctggtaaatcctcgggaaacacatccgggaattctgatactactctgatggctcgatttcctcaatatgggcagtggtctggtgacagcttcctttccttggttcagacaagaccaactccactaacacttcctctcctgataaggacactaacttcacagttctcttgtcaaagctaagacttgcttgatatttggctagccaattcattcctaggatgacatctatggttacatcctgggtacccattattatcagatcagcggtgaactttatcccccttatttgaactcttgcaatggggcaaaatctatctatttgggttctctcaccaat

SEQ ID NO: 165514 - DNA, 394 bp, Zea Mays
tttcggttttgtggcagaaacaatatgataagtcatcgttccagttgcgctttgccaaattatcctttgtgagcaccaccccacgtcataggtaccaatggaaaatcttgattttcagggagcttttaatttccgcaggttcttatttagattcgtggtgtctctgaatattagagcagcatatagggattttactaaaaaaggcaatttgaggttaacttctagtagaaaccatcctgctcacgtgttaaaataatattgtctatgcgagagcacaattcggtccaagctactagctttgggccaactagacttcgccaacatgagagattaggtgacacattaagagcgtccacaattgttatatatttgtgcctagcgatgttatacaaac

SEQ ID NO: 165515 - DNA, 329 bp, Zea Mays
ggaggtttgtgctgatgtgctcgacgctaggttggggtcatcccgcgcctcatcgaccttagagcgcggtcttgagggtcaggagactgacttggatcgtcttgctcccatggaggtaattgagggaccctcagccttagaggcggctactgcagagaacttggtcctcaaggatggtgttgacgcttgcccacccccgaggatgttgccggggatgactcggctcgggtgggaaacgcaagccactgcccagcccccgagggtactgtcagagatgatccggctcaagtgggtagcgcaaactatagcccagcccccgagggtgtccg

SEQ ID NO: 165516 - DNA, 661 bp, Zea Mays
cttaggagttgtagcagaactcttttctgccttcagcgctgtcgcttctgttgaaggacttaaaatccctgccatctttgatacttcttcagtttttgatctttcagctttatctttgtcaaccttcgtttcaactaactcaaccgaaggtgccttcgacattatagccggttcttcagtcctctgcatgggaggaacaggttctcttaattcagcagctgaagtggcctccccgccaaactcgggcaccacagccggttcaatgtaacgcggccgatgggtaagtaccttcatctttttgcccatagccttcggcacagattcagctgggatggccgaggcagcagcttttctcttcttcccctgtccccacagcgggtagtggtagtcggggtagacaaagccaatggtgtcaaaaactctatttattctcttttttccccgacctccgaaggctgtagatagtgcattatcttctgccttggaataagctccaagcagctcatcacttgtaacttcgatgcatttcagccagtcattgtttggttcatcgaatttatccccatatctgaatgtatacttcattcggaccagttcaccttcgctagatttggtaatggtctccttcggcatttcccagctctctacaagcggccatact

SEQ ID NO: 165517 - DNA, 661 bp, Zea Mays
ccgatagattagcaaaagatgagatgactacctggaaagctcacacgagaggtgacgatccaggcaggacaggagacggcacacgggcaatcaaggtcactgaaatgacaaaagaggtgagcacgtattagtcacatagtcataagtatatgaaatgtaaataaatacacacacagagagatatggcacagaaaacacgagacgagacgatcgataggtcaaacggcgtgaaaaacgatgtttgaacgataaatagtgccataggaggtttggaattcgaattgaggcacgaaacgacatggaattgagccgatacttcatgaataggtttatataggtgaatatgagtgaagtgtgtgcttggtttgaatttaggcgaagaaaaagagatttgggcactcggctcggaaacgatcgctcgaaacggagaattgagtgaaattgaagcctggaaactcggattggcgtgaaatttgacaagtatattgctggaagtgttgtgaaggtgcctgaaaaatttgggttcaattgaagcatttttggctagtttgggcatttcaccgagcacttggagggcgaggaattagggtttcggagaaatggccatttaaggtgtgaaaaccctcccgaaggagctgagaacctgcaggagtactcaagg

SEQ ID NO: 165518 - DNA, 548 bp, Zea Mays
gcaaaaccatgtctgctaagcgcgccactaacctaacctgtgcagtacaccagagaccgaccaaagcacgtgtgttccaggaagcaaagaagaacgcacactaagcagaggactaagatgcggaagcaagcgtagttagccaaacaaacctacgaccacgaccgcctccacacgagctaggtcacgaacggtatcagtgcaacaggcaatcccagcggcgtcagcaagaaatcagatctggaagaccaaagaagacggaggaaggagatcctaaaaatgcgaggcagagacgggggagacgaggaaggaggtaagaataacaaaaacggatgctaggtaccaaccttatggccgtccggaggaggactgtgaggatgcccatgccgcagcactgctgcgacgtgccctcactgtggagcgttgcttcggcgggctcggcgaggagacgcatcggaagccgccgcgcgacggcccaaatcctctcccgaagccgctgcacgtgggtccgcgcgtgacctgggaccggcacaccagcgacagcagctccc

SEQ ID NO: 165519 - DNA, 342 bp, Zea Mays
atcccgacggccatgccactatagggcacgaacacaaggacgagagccatcccgccgaccatgccgctacagagctcggacacaaggacgagagccatcccgctggccatgccgctacaaagctcgaacacaaggacgagagccatcccgtcagccatgccgctacaagactcggacacatctcctctgaccacaacagcaatgcaacaacccatgtactcctaggcctccttgcgactataaaatgaggagctctgggccttctatgggggacttgacgacctaacgatttcacaacttcacggctcacgactcatcttagtcctgatattggcattcacc

SEQ ID NO: 165520 - DNA, 611 bp, Zea Mays
cgagacgggacgttcaagaggtcaaaagacgtaaaagcgacgtttgacggataaatagtgacataggaggtttggaattcgaaatgaggcacgaaatgacatggaattgagccgagacttcacgaataggtttatataggtgagtatgagtgaagtgtgtgcttggtttgaatttagtcgaagaaaaagatatttgggcactcggctcggaaacgatcgctcaaaacgggaattttggagaaatttaagcctgggatctcggattggcgtgaaatttggcaagtaggttactggaagtgtggtgaaggtgcctgaaaaatttgggttcaattggagcaagtttgggtggtttaggcatttcaccgaacatgtgaagggcggggatttagggtttcggtgaaaagtttatttggggtgggaaaaccctcccgaaggagctagaaacctgcaatggtgtttaaggcatacaaaggaacacattccacaacaggaaatctccagatttcacagggatttgaatttgcacaagggggtggtgaatagaatgtcacagagactttgaaaccgagagcagggagaaagagggaaggagagtagctgctcaccgaggg

SEQ ID NO: 165521 - DNA, 961 bp, Zea Mays
cggtcttggtgaggtaggcggcagcactcgagcggacgaagtggtcggcgaggtgtgcgataacatagccctcgagctaacgaggctgtggcgtagcctcccaaagtcgacaaagcagcgatgtggcgaggaggccgatgacctagcccccaagctggtgaagcagcgagtcgatgaggcagaagatggcacaacccccgagctagtgaagcagtaagtcggtggcgcaggcgacgactcagcccccgagctggtgaagtagtgagtcagcgaggcgagtgatgacccagccctagagctggtgacgtagcgagtcagcgaggcaggggatgacatagctcctgagctggtgaaccagcgagtcgacgaggtgggcgatggcccagctcccaggctagtgaagcagcgagtcggtgaggtgagcgttgacccagccactgagctggtgaagcagtgggtccgcgaggtgggtgatggccctgcccctcgggctggtgaagcagcgagtcggcgaggtgagcgatgacccagcccctgggtcttcaattcaaaattgtgtataaacatggtaagaaaaatgtggtggctaatgctttgtctcgagtgggctttgcaatgaatattacttgtgggtacaagaggtgcttaattcctatgtgacagattctcagtcctaagtgatgctccagaaattggttgttcatagtcgaggagggttatttcttgcacaagggtctgattagaaaaggccagcggatttggaatagggagaattcagctctgtgcacaaggttgatatctgcttttcatgagtcaacattggaaggtcactcaggtatgagtgctacttttcaatgcatcaagaagttcttttgttggaggggtatgaagacagaattggagttgtttgttaggcagtgtggaatatgccggaaagctaagattgagaggcattatcctg

SEQ ID NO: 165522 - DNA, 594 bp, Zea Mays
atatttctcgatttacagaatacatcgtcgttccaagagcttctgggatgtagctaggggtaaaacttcctgaggtgttctatgttccatgagttcccaatttctgtgccgtccatctgagtgagacgatatgatcccggccgagtgacttctgctactataaatggtccttctcatagaggtgacaatttatgttgtccctcccccgttagaattcggcggaggatgagatctcccactgcgaaggatcgatgccgtatggccttatcatgatagcgcctcagagtttgctgataccacgctgattgaatcaccgtattcagtcgctcttcttcgagtatatcaacatcctccagcctagtagcttcagcttctgctatgttttcaaagattaacctcggtgccccgaacttgagatcagcaggtagcactgcctccgaaccataaaccataaagaagagagtatttccatgtagagctcggctaggttgagttatcaggctccaaaccacatatggcatctctctgatccactttcctgtgaacttctcgtttttgtcgaagactttttttctgtgtgcttctaatatcatc

SEQ ID NO: 165523 - DNA, 368 bp, Zea Mays
ggacccgcatggctagcagacaggacaatacgccatatcgggagtacggctaggcacgaccctatagatgacgtcgggaattcaacctcaacccggggcagtagagcgaccccttacaaatagcaaacaagtccctgatgtaaagtctacccttgaactataaaagggtagtacctcatccttctcaggcacacacacaagttgtaaacactgttcccaggcaatactgcgatcaacactacactagactagggcgcaggcctaaacgagtataactcaccgtaaaaaaccccctccctttgaatcccgctcttcgattcaccatttagagtgagtttgggcactgagattatcacccctccttccac

SEQ ID NO: 165524 - DNA, 805 bp, Zea Mays
acgtgaatgaaaacatgtgttattctcttgtatttcaagattcctatcatacattatcttctcccattcattaactctccttaaagaagagatttaatcaacgggagaataaagggtcttcttacttgtgttgccttgtacttggtttccccttaggagccaacaacgagtgaccaacattggcgcccacccccggttcacccatggccacaaaaaggagcttcaacatggctccgaagaaagtcatagcggctggttctattctcacccccatctatctgaaccagtaatgctgcccttgttcatgagacacaaagccagaaatggaaggccatagatcctcccctagaaaataatcaacaagatctagatcaagaaattcgcaatctcgagtccatccaccaaaaggttgataagcaaagatagaaaattcttcgggcctttgaactctagaaaagaattgaaaaagcaacagagcagctcacaacctaacacaacaagttgaacgaccaggagagccatgctaaaggtacaatcttcgctttgaggaacaaggtttcatgactttctatatgatgatgcttctcccttaacacagagctacaagccatgccatggccaccattatatagactatcacaactacctatgtatgatagtctgtcagacccgaaccagtttttaatgagctatgaagctacgatatcttcctatggaggcaacacagtagtcatagtaaaatcatttgtcatggtagtcagaagtgtagctcagccttggtattcatcccttcggccaggaacca

SEQ ID NO: 165525 - DNA, 955 bp, Zea Mays
atttgatgtttgaaattcagactatcagtggtactgagtcatctttggacaggaaatcaagcatgatcgagtgggaatttggctatagttgttatggcaagattgtagctgaatcattggtctacaactttgctgcagagctttaggtgagttgctatagaaaatttagagaaaattgaccctaaaacctggctgtcaggcgcactgacgaagcattccatggtacaatgcaccccaaacagaaacagatcgcggttcacccccctcctcatcgccggtgatccgtcgctgggatggttgattgctcgtcgcgattcatgcaacgtggtcagtagataagcacgggcaggtaaaaatcttagcgcccggatggaattgggtgtcgtggcggctaagcttgtcgtacctcccatgctcatcggtcgatcggataaccttcgccgccgttgatctgtcaccggtgcgcgccacgtgcttaagcgctagcccgtatcttggtgaatcatggagtgcatgtccggtgatcgccggaggactgccacggtgaaagccacccgttcggagcaccagtgcccctttccccctccgggcgccagcacttctctgccaaattgagcgccaccgctgttgcgctctataaattgagtgcacccgcagctccgtagtgtaatcacgcatctattgcaccaaaccttgccccggattatccaccagggaccgagaattgctcgtttcccccaatcacggtttccgccaccgtaaaacacacctcgccgtggccagcgcgatacaggttagctcgtcccctctgctctctcatttgagtgttctcatgaacccgtgatgctcatagacccgcccaattggactagaagcccactgaccaccgggaacgcgttcatctgtccgcaatgtgtacggtcactgcggccagagcaaattaggtcacccttct

SEQ ID NO: 165526 - DNA, 484 bp, Zea Mays
tgcttcttcgttgctgtgggcagtgctatagtactaacacagtaggagggaggtagggagtagccatgcttttgccaccagccgctaccgccctgccattgttgggcttctcgcctcttccagcacgagaatggaagtggagtggggccaatggatgtgcggttgctagcctttcatttcctttctttgttcaaattcgtgagatttgaaaattgaatgcgaggtttgagggaaggaagttgcaatgatttgggtaaatgcagagaatttgccatatgctcatggacagaaaaaagcaactatcagaaggttttgacatctccactacaccttaagggtacaatgagggtgtccacagcatcaccgtgcccccgccgccccgcacgcgtcttcctccttgcatccgacatgccgcacacgcgccagccatcgcccctggtatcccgcgctcgccccatcctcggtgcttgttcccctctccccg

SEQ ID NO: 165527 - DNA, 345 bp, Zea Mays
aacatagggtctctttagtaaaacatacacaatcgaagagatatcggccgatctgagccgtaggatctaaatcatgtgcccacgaatagatccttatctttacactccttatctttacaaactgatatgaagtctcattcgttagatctcgaatcagtggcccaagagtcgtccacacaaacacctatccaaagtccttggatcgctgatcagcggcttggttttaatgcactggaacattatctgactttctaatctcctccgcccaaactagatcggacggccggacgatcttcttcctccttacggacaccagtcggcggtgcctgatctcttgtgtcggtg

SEQ ID NO: 165528 - DNA, 478 bp, Zea Mays
gtagaagatgattatcctcctcagtaagcagccactggtaaccttctgtgtctagggttcgtgggaggtcgtcggctatctgtgccagtactccaacttcactcggtgtgtttagtgctcgagcaaaatcgaggtacaggtttcgagcgaggagagggttctcttgccgaaggctagcatcttatctggctagctctcgctcccgatcttgagcctgtcggcgatcatggcgacgggagttatgcctttctcggtgcactcgttcgtcgggagtttctccaacctccgagtcttcgtctcaggacacgggctacgctggatctcgttccccggcttcatgatgtcactgcacgttccgacgtctatttcttcatcgccgagcatcacattggggggttcctccccttgcatggtaggctcatcgtcgtagatgggcgctgactccaatctcccctggatgaagaggatgtcagggtag

SEQ ID NO: 165529 - DNA, 691 bp, Zea Mays
gagggcttaggcgatggcgcgtaattcggctgagcagtgctgacgaccggcgatagagaagaaccttggctcagtggcttcgtgtctaccgtcgtggcgacctcaccggcgacgatttgacggctataagtcacggcgacgcgacatggatacccgagcacgtggcacacgaccagcagtcggccatcgccagtgaacctatctgtcgaagccacaaagtaaaaggggagatacgacggtgagtcaccggagtggcgtccagcgcacggggtgacgatctttctacctagaccgttatccccgagccctgtgcacgaatccaaacgccggtgacacgaattgcggcagaggtatcgtcggcggtgagaactccctgcgctggcggtctgatctgtttcggacactgtaccatggcactgcttcatcagagcgcctgacagagcaggtttagcgctgatttactcccgatttggtgtagtgatcgagcaagctctttgtaccaaagttacagcttaataaaccagctttaattttgttacatggtgcatcctcgaaagatcacaggatcatacccaaaatcgaactctaagttcatccagtctcactgccattgaaaattcagacttaaaatgacctgacagcctgactttgagggtgattatctccaaattgttcacaataacctacttac

SEQ ID NO: 165530 - DNA, 562 bp, Zea Mays
gataatgctgataggtattccaaacctaaacattatttcttgaatgtattccactgcctttgctgaggtcaaagaggctatgggtttgtattctatccacttcgtgaatttatcaatggcaaccagtatgtgagtatatcctccttgagccttcttgaaaggcccaatcatgtcccacctccagcatgtaaacgaccaagttataggaatagtttgcaactgttgtgtgagtagatgatgttgttttgataagaactggcatgcttcgcacttctgaactaactctgctacatcgttcttcgccgttggccagtagaacccggacctgaaggctttccctactaaggtctgtgacgctgcatgcacgccacattgcccagcatggatttcgtccaacagctgctttcctgtagccgagtgaatacacttcatgaggactcccctgcaccgcttctataaagtagaccccctgtgatggtatagtgggccgactgtctcacaatgccgcagttttatcatctggttcttcctcgtttcttatgtatctgatgattggctccct

SEQ ID NO: 165531 - DNA, 318 bp, Zea Mays
gaaagatgaagtagtgacatgtatcgtatgagacggtggtggctcctcacaaggcactgtccgtgccatatttttgtagaacacctattaggaaggagaaactggtacacaaagagccaaggatcacgtacaggcaccatctaaaacaagcgtacataggtcggacaccatgatctacaacaaagtatcggaccctcgattctatgaaagacaatgttcattttcacaatatgtgaattattcagttggtgaagtggcctgcatgcggtggatgtgctaatgagtgacctgcacgaggtggatgtgccaatgagagga

SEQ ID NO: 165532 - DNA, 911 bp, Zea Mays
caccagttcaacaaaatccatggggtgcgcttgtcgatgcggccctatcgccttctctgcgtcgtgcgccatctctggttgtggacccgcacgcacagagctgactcaccttcaactgtcgcgcgacgcgagctccgcaggaatcgggcgccatttgtttcccccatgtaatcgaccccaggtggatttaaggcggccgcgtgcctccttctcctaaaccttagaccatcgccgccacctttacctgttcctatgtgccgtgggaaattgtcgctggggatcgggggagaccgagggcgagaagccgtcgcggtgggccatcgaccgcattgcaaccaagctcaccaatccccatcccgatctcggtaagtgctctagcctttccgttacacccataggaacatatgtcaccgatagagagggcggatggattggcaggtagccgggaattcttcaccggagtatcacccggtcgcggaaccgcgccgtgccgtggtcggagctccccatggtccaaatagtcggtaagctagtcctatcatgcttgccttggcccctgctaagtgtagcgctcgtcggattaatgtttgcggtgctagcgcggggttgccggccatgggcgcgccgccgtgtactgcccagtcgccgctctgccggccgaggaagacgagtgggaagggaggagaattggtgtcgtagatctgcggatgtgtgggtgagcgtgagcgctagtgtcgatagatcccgacccttggatggtgatctgacggtccgtacctgataccggttcgatgaaatatggatctaatccaaggcgtccagtattgatcggatggctcaggtttaacgatactcgttcgccgcgtgcactttctaaaagagaccctaggttttcatatattcaacccgcc

SEQ ID NO: 165533 - DNA, 549 bp, Zea Mays
tagacgtagtggttaggatggttatcttgtttatgtatatgtggagcgttggctggaacacagagacagcaaggaacgtttgaataggccagtacgtattgttgtgaagccacgttttcttgtattggcgtgattgcgtaagtatgaaatagttacgtcatgtgaagtctaggttgggatgcaatttgtctgagttattcgatagatatatgtatagtataattaaaaaaaagagagttcctatatgggatgatataatgtatagaatgtgcttggatgaatatgtgggcatgcctaacatgcttaaacagattcctgtttgcatgatgtgagattaggcttaaatggtttaaaaagttatcatattgcttctatacttatatttgttctaagtatctcgtaatgaagaacctaaagttattagtatttcgatgaacgcttaatcttagaagagtaatgaacctgaataaaatctattgcttgttgttgggtctgcatgaccagttttagttatgcagctagttcaatgaagtaaaccatcttttctgt

SEQ ID NO: 165534 - DNA, 466 bp, Zea Mays
acatattccactggaagaaacatgggctgcaaatcaagttcatgaggaagctccccatgaccttgtcatggacaatgctgcatggtctactaccacggacaattgggctcaacaaatgtggcagaatagggcctcatataggggatagtggtcattatgtattgtgctaagttggctgagaacattgtctattagcaatgatgaactatctacaattttgaactcactttctttgtgctaagttggctgagaacattgtctattagcaatgatgaactatctacacttttgaactcactttctttgtgctaagttcctttatgtgatgtgctcagttgcaatgatgacattacttacatcctgataccattgtcgactagcaatgatgaactttcctatgtcattactttaccattgtctatgtcattactttactatgttaaaactgcaattttgttactcttct

SEQ ID NO: 165535 - DNA, 508 bp, Zea Mays
gactttcacccttagttgtaactggtagaagttaaatttattatctatccatagggtaatacatagacaaactcatgaaaagggtatgagaaaacatacatgttcaggaatatcaagcgcagaaatgattgaatctttctatcagcagtcatcatatgcaacacgtccaaagcgatgagagtgttcttccgacgtaactgttcgcgatgctcattttggttctcagtagatcccattttaacgtctaagtccataggctgtggcccatcgatggcattgacactctcttgcccctctaccatcgcagatggaaagccacaatcctcaaatatactatcaatcagtttactgacaacagccaacacaaacataatgacaacatgtccaaactctgttccagaaaatccataaacctttgatagttgcaaagcttcagcaatggacttccctatcctgggaagtacagtagtcacttatgaacaacttctaaagtgtactgcagtttacc

SEQ ID NO: 165536 - DNA, 362 bp, Zea Mays
ctaaatggccgaccggttggaaatctgaatggttttatgttaaaattgatgaggaaaaggagaagctagttcagagcccgttgaagctaatcttcgggctaactaggcctcagtgcaacatgacactgggggatccatgccaagatgacgtgtatgagtttagaattgtgtctgaacatattggaactagggatctagtccaggaatacttagccaacagagtattcccaacgctgaggaagtggggtatgtcgaagcttgaagaagagaagaaagagagtgaactcgttcggctgccttatcactttaagttcaaaaaacacttcaaggaaccctaccaagaatggttggacacgatcgaa

SEQ ID NO: 165537 - DNA, 686 bp, Zea Mays
ggagacgcaagggcagaacacatatggtcggctgatcaaagccgaccctacttttgatcagttgctctccaaggatactagcaagaagatcgttctacgtgatcggtcaacgaagaaaccctggtcacttgctaagacgaaacgagtaaacaaaacgacccgaaaggcgacacaacaagcatcgcctattcatcctataaggccggggtactttccacccgtttactcatcatcgttatattatcctgttcaaatatggaatggtataatgatgaatccatggtacatgtatagtccctttgtctatccagactggggggcatctccattctattccttttgatccattgaccaaatggtcatggccgagaaggatacaatctgaaacggcctttatacattggtgctttattgaatgatctccatgttgaaaagccgatgacttacatcaggtttagttcataaaaaaatccatggtacatgtatagtccctttgtctatccagactggggggcatctccattctattccttttgatccattgaccaaatggtcatggccgagaaggatacaatctgaacggcctttatacattggtgctttattgaatgatctccatgttgaaaagccgatgacttacatcaggtttagttcatatgcttttggttcatcaaccttcaccaaaa

SEQ ID NO: 165538 - DNA, 395 bp, Zea Mays
attataacatctaaatgccagcaaaaataagtcttagagaataacctactgttaaatggtagttgtagttcaaaacaccccttctgccctaacatttgataattttatctagaaagaactattcactttttaagccccatattttaggacaaagaattatacaccagtaagaagccactgtaattttacagaatttttagaaatttgttaagacaacttgtagttcaaacccactctaaaaacataaaagaaatagagggaaagaaaggaaagataaacctcgccccaataagttcaacttgaaatcttgacaattctcgctaaggatttaaaaagaattcagtggaacaccaaaatagacttaccacttagtttaaccgagtgtgatctaaatt

SEQ ID NO: 165539 - DNA, 842 bp, Zea Mays
gattaattccatcttatacaatgtacgttgttaagccttttaaaataaaggtgccttgatttgataccacttttcggacctagatggctaaggagggatgaatagcctataaaaattatcctacacacccacaaataacagtaaagcaatgttggatactataaaagatgtcataggaacgtatacttgctctagctaaagtttactccatgaaagctccctaaacaattctagtagcttggcctctagtatatataccatgtgtttggttgcccgcgtctgtcggtgcaaggcccatcgatgcaaaaataaaatgactccatgtgttcggttgactgagctcgtctctggctaggccacactcatgcaaatgatacagccaaaaggttcgttcctcgcgaaccaggatgcgctcggccttgactgcatcaattcgcgtagtcgcgctagggttcctctcatgtctcatctcgccctccatctctcatgtctcctctggctctctaggtgctctcctgtctcctctcgccctcaagctctccctcatttttctcctctcgtcctcgagctctcacaccctccactcccctcgctgttaaggatctagttccttccaggtttcgacaaaaggtatgaagtttgatattctctcttgcactcttcccctggccacaagatctttgtataatttggttgcctgtcttgtgaatgttttcttagatttgcgaatgttgagtaatattggtagttgtggttgtgtatatcatggtattgtgccacgtttctcgaatctggtgtagcttgaggttgatgttctcagatctagactgttggaactagat

SEQ ID NO: 165540 - DNA, 468 bp, Zea Mays
gcatgctacaagttaaaaatgtcgatcggagccatgtacacaggaataaatgtattgtttcaagtagtacccaaagaccatcgcaacacatgggatccaaactgaaacagagatgcagcgtgcaaagaccatcgcaacacatgggatccaaactaaaatatagttgcagcgtgcgagagaaacatagtccagggacatacctgaacaatggcaacaacaacaatggcagacccatttaaaagcacctacaggacctactatgatctgcggcaagaacaaaaaatagggaaggaatcaagcacaacacgcaggaacatgttcagtttctattgatgcatagttgctcttggattgcagaagtagtaattaaacaaagtgagactcagatctgccaccaatgcctgccatgcatatggtgtctgcagatttcgccatgcctctgtccctaatgtagccgtagcatcctag

SEQ ID NO: 165541 - DNA, 408 bp, Zea Mays
gcctaacaatagcgttgggagtcagctgatgaagatatatttcaaagttctttaaaactacccctatcatctcattcagggggaatcgcagccctgttctgaagaagctcttgaaaacaacaacttcatccttcttcggctctcggatagtctcttctccagcaaattgaataatcttactcttagcctctccaaaatagcccaatttcatcatcataggcatgtcatcttttgtcacagtagatttttcaaaatctagatgactaggcttcgttgggatcagaatgttgtagtcttcttcactctcaccaacattttcaccctcaaccacagtttgttcagcttcgacattagaagcaccttcgtcagccataatcagacctgattgcttcattacttctgaaatcg

SEQ ID NO: 165542 - DNA, 527 bp, Zea Mays
caaacaaaatatagaccgaaaacaaatttgtttacaaaggttgcacataatgtgacttcaggaccttgaacaacccaccacaatccacgcgagtacaagctctagcatatctagcgtcaacgcgtgtgcggccatcagggctacgacaatatagcaagccttcgtaataagcgcaacaggcacaattatggctcggtaattggggtacacaataaatccaagcaacgtgcgcaacaggcgcaattgtggctcgtggcagacagacagtgcctacaggacatgcaaaaaatacgtgactcagcgatggcggtctgactcaacgggagtgatccgattaatggagagcgcgacatagcaatcacatgacgcagccaagttcgaacggcacaaatattgcgtcgtgttgccagggcgcagtcaatattcagctaatgccataactcagctgattaccaacgcagcctgatcggcgtgtctgagtacccattatacaatttaatcgctcggcgtgagtccaaaagctcaac

SEQ ID NO: 165543 - DNA, 741 bp, Zea Mays
ggataagctctatggaaaattcaactttacgctcgggtggcaagccatgtaactcctcaaggaacacatcggggaactccgacacagttctaatatcctcaatcaggttggcctccttgccatctaccgacaaatagtgacatgctccttcttctagttcaagcaggtagaactcagttactacttcctttccggatggggacactaagttgactgtcctcttgtcataactgacagtggcttggtttctgtgtagccaattcatcccaaggatgacatctaacccttgagtacccattactactaggttagcgaggaagtctatccctcttttttcaatccttaggtccggacacatcttgtcgaactaaactttccccccaactgaattaactcttaaaggtggaagcattggttctacggggatgttatgtgcttctacccatgatgtagaaacaaaagaatgagtggcactagtatcaaacaatacttttgctggataggattcgactggaaacatacctactgccacgtcctgagcatcctggattgcttcggcctccaagtggttcacctttccatggttgtaggcccgaccacaacctcctagtgcttgatgtggcgctccttgtcttgctgaggtgttgaaagctagtgactactgagtggccttctttaggcagtgcttcgcccagtggtcttgttccccataatggaagcatgcacgacctcctccttgcg

SEQ ID NO: 165544 - DNA, 371 bp, Zea Mays
agcgattaaaactatggcccaagtggaggtgcgcgtagaccctacacggtacgtacggtacatatatatatagactctgtggttcgatgtcgtcacgtccatatggttcggtcgcttaagggttagggggtttgtgtgacgccaccctagaggcgtgtggataagagagaagaaatccttctgttctgtgttgagcacgagcttctccatccggaggctgcatgcatgggttttgaccacagatactactactctatgagaggacggagcgagcaacagactttggcacagaaagcgaattccaaacaaaccacagccacctcacttgtaaactcatccagcttacggcaggtccaaagacccaattttct

SEQ ID NO: 165545 - DNA, 845 bp, Zea Mays
ccactaacgagccatgtcgagcgagttatcgagcttcgagttttttgtctagccctacaccgccctaggcacattgaaacggccgaagtgccgaagctgattgaggggtcttcttgcgctctgagccccattgccccggtcctgtcgaagctagagcgaagccggctgaagagccagaatcaaagaaatcgacagagcaaccgaaggctctgagcccattacaaaggatggagctaccgaaggcgtcgaagattcctgcaacaactccgaaaaggaggaggatggccagcgtactagacgctgttatggaatcagtgaaggcgttaactcctgcctctgccgaagcacctagtgcgaaaagcgagattataaagaaatctaccgaagctggcacaacataggctgcggttgaggctgggccctcagtccccgccgaagcaagaccttcagaggatgttgaggagggtgatgaagcaagaccttcggaggttgtcgaaggaccattaatgttaggaaaagtgggtgctaccgaagaatctgagtcccctgctcctggagcacctaccgaggaattcgaattcatagtgtgtcatgcttcaaggaaaaaattataaaaggagcaaattgccgaagcgcaacattatgccagggatctgcagtaccctcgagggtccttggtatatggtggggatgatgaagatggcttcctttattgtctgcctgacaataaagagatccatgtctatcgggagatggcagaaaatgtaggatatccgaagcttgaactaggcttatctgcaatgacgaaggaccagctcgcagatagccttgcatataacagtctg

SEQ ID NO: 165546 - DNA, 538 bp, Zea Mays
caaggtagcacagtccatgctagatatggccggttggatttacatcctactggcatgccagaggtactggttaactgtttgagtgtaaaagcgcaagatggagcataagtataacttttgttgaagaaacgacatctaagaccaaagggaaaactgaccataaacccacacacatctagatgtcactcttctaaaggatgcaaacccaccgtaactgctctatacacacgtggcacccaagtatcgaaacaaagtaacaaactgtgtcaaccaaagatgcagtatgcatagcccgtccctcacaaatctaggtatctggaacccatcccaacacaaacacacgcaccaaagagtaagaatccaccaaccacacacggattgtgcaccggatgaccgacggtaacacagttcttgcaaagagcaaacaccctaatgcagcaagcaccaacggagccgaccctaatgcagatgcagacgatatgagggggtctagcagagcaaacgtggacttacggagtcacagacaatgtctacgggg

SEQ ID NO: 165547 - DNA, 494 bp, Zea Mays
tcaaaatctgcacactgcagctaagcctgggcatattacctgttaatcgaacctgaaaaatctggacttatccaaatctgcagtaccgaattctagtttgatagtaaatgctattacccgaatttagtttggataattcggatagcagcacaggtgctcgaaatagtgccagtgtgtgtcacctggcccctagcacgtgtggatgtttcagtccaacaggaaacacgcggacatgggccacgcggcccatcaacaaatcagtccggttcctccatggctctgtccataaggtgccctccctagtccctattctggcattcgacatctcgaccactccccaggccctagtagcttccaatccctccataacctagctgccacccgtcgctctccttgtgcccgcctgcccagaggttagatagccggaggccagagcgaccttcattgcctggaggccggagcgaccatgacggtgtcacgatgctcgccgtcgc

SEQ ID NO: 165548 - DNA, 615 bp, Zea Mays
cctcatcaagcagggctccgccacagaagaaggagcgggctcctgacctcatcgttgaatacatatttacgtgaggaaatattatcaaataatgacactagaaaaggcattactaacacatttaaacattaaaatggttcgtagaaacaaaaacaattcttccaagaataagccattaacaaagtatgtattcttattatagattgataatgacacatacaacaagtaatttataaaaacattacatgcatgtatagcattaacacgaaccaaccatttttattttacatatgttagttatcatacttgcaggatccaattgcatacccttccctatattttaactacttccacctcttgtattttcctccaaagaacccatgacggtgatgcttccaccctagaaggccatgttttcctcctaacccaatgtgtttcccaaattttccatgctttaacttgccatagtgtccattataatgatgtttaaacttgccaaaatgtcctaagtggtgattgtgagggtgatggccatgggttaagtgatgtacaccataggtagcggcggcggcggctgctgctccaccaatgagcgttgcccccatgttatatcca

SEQ ID NO: 165549 - DNA, 301 bp, Zea Mays
caggacaatacaatagatcccttggtattcttactgtcttataagcatggtctttgaggtgtcgcctaggtgtctaggtgtgcccccaacgccacagggcaccatggtaacactttgttgcctatatgtacaggcgtgcccccaatgcctcaaaggctaagcttataaaatacatagattatgctaatgttttggtggctaccccagtgtatgtcctgtgtgttatatgatgctatgtttcaggtttttgtatgtgtatatttttgtaattctgtgatttgggttttacatgtgtatgttg

SEQ ID NO: 165550 - DNA, 319 bp, Zea Mays
ccagacggtcgcgattagagttaggcgtatcccttcgccgcatgctattatgaccattggatcgtgtccgggtgctccagattagaagtttggagtggtgcgcctggcgccgtagattttggatctacggtggagattagacctaagccataccctttcggtagtggaccgtggaccgttggatatgatccgacggatccgattcgatctcgcttgcatagagatgccaccgttagatttagatccgaaggtctagattggataccggttcgtattaatagccttctaatcttggccgactacttacgatccaacggtc

SEQ ID NO: 165551 - DNA, 484 bp, Zea Mays
atcgcatagcatatgatatgaaaaagttctacagctattacaataatgagagctcgtctcatcacatcatcaagtgtttatggctttcaagccatgcatgcagcagatagttattacagaccaagtgttcattacaaaaataaagtactgaataataaacgttctccccctttttggcaccaagaaccaaaaagagagagagagaagcgtcaatccaaggatcaccagtggggaggaggttgatgaggagcaaagaggtgttacgccaggtcgtaggcaaagtgttcctctccagactgggccggaggaggagcactgccagacgggtcctggggcggaggataagaggacgattgacccggatccccacgatatgggggtgggtcaaactgctccggatcatcaaaataagtttcttcttcgacgtcatcggctgatgagaaaggtaccccatacgcctgctggtaccactcattgacatctg

SEQ ID NO: 165552 - DNA, 868 bp, Zea Mays
ggaactggctcgccttctccatctcattaaaagccacatgagggacaaagcggaccatcttgttgaagcccacttcatactatgtgacagacttcttctcttgcttgaaagactgcaaaccaatcttcattttctctaggaaggtgaccgggtagaacctcctttcaaactgcctgatgaagacatcccaagtcatgactcctgctgaggaggagtgcgctgcctgcacgcctctccaccaaatttgagcctctcccttcagcagctgtgtgccaaagcgaacacgatcaccatacacaatctcaaagacattcatcttatcctccatgtaagttagccaatctgccgccttgaccggagtaccactgccatcaaaagcatccagcttcatgcccatccactgcatcagagaaagaccactgactggaagaggcacctcagcttcgccacctggagcagcacccgcagggacagtgcccgcgggcactcctcctccaccagcaccctgagcagcacccgcaggggtaactggaatagcttgcctcagaatggccaactcctgctgcatggcctgcatcgcggctaacattgccgtcggactcatcgagtccccactaggaacttgcggactaccctgagccctacgaggcgacatagctgctgccacaggggtgagaataataaataaataagattggcatagcatcacttcagataatgtcaaactagcacagacaataacataacatatcaatagtaaagcagaaaacccatcctacatgtgtagtgtgtcaatttattgttattccacttgctaggacctacagcctattcctttcatacgaactgtaacacccccactgatccc

SEQ ID NO: 165553 - DNA, 393 bp, Zea Mays
gaagttggaaggctaagaaggagcttaactcttttgaagggaaagtgtcatgctcaaccttcttatgataactgtgataacatggtgaagaagcttgagaaggggacaaccgtagcatgcacaaacccgcttcaaaataatgttaagttccctaagaaagacatgagcaaacatcaagagaagaaagccaaagctcatgacaagtgcctcaatcaagtctccacatgctccacacaaggtaacaaacaagccactcttccaaataagagaagatgcactagaaagtgttatcaatgtcatgagaagggacatgagattaagtcatgtccttacataaaagatagtggtttatctttggaaagaaagaggctcactaaccatgtagcaaacaag

SEQ ID NO: 165554 - DNA, 372 bp, Zea Mays
agctgcgtagctggcgaggccgccgatcatggccgccgccgtcggcatgttgcggccgggggtcatcaggcccccgggcatagctgggagaagctaggtaaatctcgtcgtccttggaggacttgcgcaacccaaaattaagggtcgtccctagagcctaaccatgcacgctcctagctagcttcctctccgttccgtccccgagcgtagatctacgcgcggccgcccgggagctaccttcgatccgatctttgtatgcacgcgcgcgtacgtggaccggcagaacacagctccgcgtagagtgcagtgatcatgagacggtagatagaggatgcatgacggaggaggagtcctccgcttgtagctggctgc

SEQ ID NO: 165555 - DNA, 457 bp, Zea Mays
ctggcaaccaagagccaacgttgggaggagtgacctgctgccaccgcttggctgagccaccatcggggtccggcacaagcagagcagcaaaaaggggcggcgcatacgaaacacgcaccaattgtcggcgtgagcagagaagcactagcacgggcagagcgtcatcgttgattggaaccggtggaggagcagagggactatgaaaagaaagaacgaatcatttgggtggaggactcatttgtgaaaagaacttgacgtgcaggcggtggtatgcaaaataacaggactctctatttcatacgcgagatgtgttctagacggccaggatgatgagtttgcatggtttcacttgggtcttggtttgcaccagatacggagccatcaataaaatgatacaaacccgtagaccttttgttgcattctatttttgttgccacattaacaagttagattgcat

SEQ ID NO: 165556 - DNA, 577 bp, Zea Mays
atgttgcacttgagttttgtttttgcgggggcttttactggtatattacatggctccgcctcgttaaaaacctcaccccccaagaggaaaagagtgcgggccggaacaacattgtttgctgaattataagggcgcgtgggccctaagggttaaacaaaaaaaattcagagattgtcaatgtttcaggagtgctctaagtcttcgtcgaagggtgttaccagcctgtacgcgctgggggatgccttcgtcttgacaatgaatggaccttcccatttcggctccagcttgccccgtgactctgtccgggtggtccgggcgagtacgaggtctcctttgttgaattcctttgggacgactgtgttgtcgcgccaggccttggtttgggcctgatatctgtcaagagtctgcagggcgaggacgcggtctccgtcgatgagatctttggaagttggttcgtcgacatcggggactgctgatgtgtttgtcctgggcgatccatgcttgatctcctgcggcgtcatggcttcggatccatacaataggcgaaaaggtgtgaacccggttgcccgacattctg

SEQ ID NO: 165557 - DNA, 799 bp, Zea Mays
gcaagatagatctcgcagcgtgggccgactatacatgggcccctattataattggcggtagatcgcagcacatggtcttcgtgccaacggaattgtcgatggtcttcgctctggctcggactcttcgtgcacttcgaaacgcggtcgctcttcaggccttcgcgccctccatccttaacccttcgacattgtggtctctcgagcgagggggcgttgcgcctttgccccaacaataagttaaaaatatggttcaatcataaacaaatcaaaaccgctaccgaattgtattcctgatcgtctgtatatgagagatgaattaatcggcgatcgtggcgataggttttgtggtgacagtggcatgattatgctcatcgttgatgcacctaaccgactggacgtcctcgactccatgctgcttcatttggggtgcttcgatcggtgaccatgaggagcagcagcgctgtagcaatcgcctctgatacacagtgagatgacccacgaccctatggcttgtgcaataattagcatttttcatccgtagggcaggctgaaggcataggcaagtagtaacgtaataatcggaaggactctccctagtcgagctacatcgatgggtataaagagtaatagaccgtcagtgcaaggctctgggaaagcctttgttaattttaattatccaagacggccagttacagtgcccgcctaggtcaacatattataggaggcgggcatggttacgccctgttacatccagttttgagggcaaaaccaaatgtatagcatatttgtgtcaggatat

SEQ ID NO: 165558 - DNA, 1048 bp, Zea Mays
gaactatgttcagtttagcgaggcagtgattttgggttaactttggaataggatagctcttgatttgtgaactcttggcttggggttactgtgtcaaggttgaagaggtgagcaggtttggtgaattatggtcaacctgttagcattggaagttaggtgtttgagaggagtcattagggagggttcagtcgagttatttgtttcagggattgatcagactctgaaaaagatcttcacccatgccgtgctccacttgtgctgctctagctcgaattgaggataagaacgggggcacgaggggtactaggggtgaggagtttgacgtggctgacgcctgagtcgtgagcagcatgtgagttatccacgccggtgactcacctggttgtttatttctggtttgctcgtcactgatcctgcctacatggcttcggcctaatatcgagcgtgcgtggtacatatgcatggacgccatgtaaacatgtcctagcagctgctaacaacgtaccaccccaatcctcccagatctagcctcaccttgagctgtgtctggcactgtctttagctcagtgtcgctgctgccttcgggtttagcaaaattcaccgtgcccgcgagttcatcacccaaattgataacacactatgcttcgccaccctcttgcgcttgtgtaaccacaacccagccgcatgtcttcacccgagccccctgagaggcgtcttgccctactgttcatcgccgcgctatccaatttccgcctcatcgtggctaggtttgtttgacattgttcgatgcctctaatcccgtgttccagtctcccgtgggtgtaatgtagctcatgcatctgcctgtttaaactctactactctaggtcatccagaacgtggccacgacgtcgtcactcatcttcatgggtcgcctcatcgtcagccggtctatccccgctttctccagtctgatctgcgtaagcgtcatggtgtgggtgagttgctggtgcttatatgccttaaatttgagctctggtgtgccctcgcattagattcgagctcgccg

SEQ ID NO: 165559 - DNA, 536 bp, Zea Mays
ctaatcgtgaatgaatagcaaaacagtacagaatttgtcgagtccaaagtgtagattgcagtagtgcattgtaaattaatgatgcaatttcagattttcaaaaaaacatggttgcaaattgtgaaatcaaaaagcattcatggtcctgtttactactccctcggttccaaattggaagtcggttctggcctttctaggtacatatttttgctaaacatccagatatacactatgtctagatatacttcaactaatcattagcatctgctatcaaactagcttctaccaaaattaaaaattaagatctgctatctaattagcctctaccacagttagtttgagatgtaaacacagttagcctctaccacaagacctgaccaaattcattgcatacgcacaagttaacacataaacactcatatatcaatgcagtttacattgctattctcaaatacttagcattgtacacgaaatctagtttacacattgcacaagcatgtgaatttaccgaacaagaaataacaattggtatggtt

SEQ ID NO: 165560 - DNA, 766 bp, Zea Mays
ttggagtctctcacaaccttacaagatgatcacaatcaaaacttagtaccgacatttgtgtccttccccattgtcgtgaagcggccactgaactatcatagcatccagcttagtaccgacaaccttttcgcttcctttagacttcttggattgccgggagactggataaaaaatttcaccactaatggttttggaaggtccatttaagtctaagtcagccatcccaacctcatcctcaccctctgtaccacatgatcgttcataaatactatgtcctttagaggaatcataaaaggttgatgcttttggaaggtccatgtaagtccaagtcaaccataccagccatcccaacctcatcctcaccctctgcatcacatgaacgttcataaatactctgtcctttagaggaatcataaaggttgatgcattagattgtgaaattatcacacactccaagcagctggaccatccactgtccatgaggaatatttgtgctttcagttgatccttgttcattttgatcactgtcaccaaattcctttccacccccacttggacttgccttcccctagctgggaattgctcattttgatccttgccaacagattcctttccaccaccacttgggcatgcccctgttccatacttagaactagatgaatcatcggacattttggtcgcaatagattgttttgcgccaacatctagaaatttctctctgtcattcagaataagacaacaagtgttcaatgccagaggcaaggac

SEQ ID NO: 165561 - DNA, 531 bp, Zea Mays
gggagagtacagagagggcgaggacttgcagcggccgggccatatcgctggtcttgcgaaaatctcggcggagttggaggtcggggcgcgggctctgctggatacaacgaggcacaacgagatggcagctgggcagctaggagtctttgcgccaaaaggccgatttcctgatcggtcgtggaagaccggcggcggcctcccctggtgtgcggctgagacgagcgaggcagggacgcgccaggcatttgtaccccaaagtagtgcgggtcacagaagtcgttgcgcgagcgagggactcggtcgccgattcgggatttggttaggctcccgtccgagctttgcagcatgtgaagaagacgcacctgaccacggtaccccacctgtctgacaccccagtccgagagctcgtgccagccgtgaggccgaccagcggggcccacacggcggtgaagtaaggtgtgtagatgtgcggttgggcttagcgtgcgctaggtggtgggccgagagagcagcggtgtaagtgggccaaga

SEQ ID NO: 165562 - DNA, 371 bp, Zea Mays
ctcagtggtgccgtgacgccgacgaggggacgggacacatggaatcactcgacggcgagctgcttgttcttccgccacgacgataccgccgagcgacgaagcagaggagagcagatccagatctccgcctgcccgcaaacatggggacgcagacctcgatggtcgtcgacgatggctctcaggggcgggcgcgacagtgtgataggtggggagtggacgatggtgcatgggtttgggactggggtgtgacggcgaacgcggctgtcacatggggtggcgggcggcggcatggcggtggagctcgagcgcgacttctgagatgaggaatttgcagcgcggagaggggcgcaacagatggtcgcgcgggggcg

SEQ ID NO: 165563 - DNA, 665 bp, Zea Mays
tcgcgcccctcgtcttcgcgccaccgccggaggacgaggaggaggagcgcgagcagcagaagtcgacggccttggcggcgccaccggtgcggcggcccgcgcgccccggcaggcgcctcgtgcggttcgcgtcggacctcaccgcgatccccgagtgagtaggcgggtcgggctcagacggacgggaacggattcgctgccattgaattggctctggaactggaagcagaggacgaggacgcctggagtcgggacggacagaggaaattccaggcaggcaccgtcagattctcatcgaggggaggccctgatcactgcacgtgcaagtcatggacgaaacgtgaatacaaatgtaaaaaatgaatagcgatgattcatggtcttaccaagatcgctccacaactcacttgcgtagttgcatgtcgtatcgtccctcccctcccgtgtcgcagtcgcagctcgcaccccagccagaagctctgtgccgtttcgtggagcaacaaacagcaagtggcttccgttactggacggccaaacacggacggacgaaccctcttggcgatggcgaaaccggacaccctaggttttaggaggtcaaatgtcttgtctctctcggaccagcacacgatgctggtcacaacaacgtaaccatagttcatgtaatc

SEQ ID NO: 165564 - DNA, 473 bp, Zea Mays
taaaaagttgaagaggcaaacatcaaagtttataccttaaaattcaaatagaataagctcctggtaatgtgttgcctcctatagttgctgagatctcgttcgagcttcggaaatccatactccttgataaagtattgacactttttgctcccgcgcggtcagggatgcaccctagaatctcttcgtcgacgccgccaaagagcacggatccaaacttgtaaccgccagcaatggaaaattactttaactcagagatatcttcttcggagagttcttgaccacccaggtgtcataggtccaactccatgtcctccaaagaagtcccttccaactctttcatttttaagggcgaagccctaccagtggtcacttcagccatgcccttctcggaaccacatcagccataattttgtcaatctctgacattgtggttccaagagggcctccgctgttttcagcttccgaagcagcct

SEQ ID NO: 165565 - DNA, 578 bp, Zea Mays
ggcaaaggaacatcgtccgggacctctgaacagatgatggaactgtcaacctcaaggggctccgataaaaggttctcagggatgatctcttctaatggatggtcaaaatcagatatcgacaacccctggaggttgacaagtcctgataaggcctgcatccggatgtcactgctcctgctacgacgggtgttcttgcgaatcaagggaacttcttcttcttcctcctcttcatcatcatcaagcacacaaactgctaaccctagcatcgtcacaacctctaatatcgtccttgagggtggtgctcaccgggccatcaccgagtagtgatgttgaagggccagcatcttgttctaagcatgataaccgtcggagttgtttctttctctttttcttctcatcagacgtagctggagggttcgtccggcgtgatcgcttgcgacgaacaccttcaggtttctgaatttcttcgtcttcaccaaggttctgccaagtcgcaacagccatcgactcggtgtgggcagagtcagatgattccccagccagcatgttgagaacaacgttcatctgagcctcgtcag

SEQ ID NO: 165566 - DNA, 599 bp, Zea Mays
gttgagtttggttgctggattagatttgttttggttcagtttgattctgtccatccgcttccatcctataaaaccgaccctatctacaaaacagatcatatctctaaaaccgaccctatccacaaaacagatcatatctctaaaaccgaccatatccacaaaacagatcctatctctaaaaccgaccatatccacaaaacaaatcctatcactaaaaccgaccctatccacaaaatagatcatatctctacaaccgaccatatccacaaaatagatcatatctctaaaaccgaccctatccacaaaatagatcatatctctacaaccgaccatatccacaaaatgaactcccacccttccaacacctcgccagaaatcctgattcagagtccaacttaaaacagccataactttcgcctcgaaactcgaatcgggcccattttttcaaatcgcacagaattaaatttcgcatccaattctttccggctttgccggattcgctgtttctaaaattctcaaattcggctcagaaataggacttttcattttccaaacatttattccgattttagggcaaacttgcagaaattccagaggac

SEQ ID NO: 165567 - DNA, 431 bp, Zea Mays
atatagttaggagtcttgtttatcatggtgtcactcattctaatatttcttgttttgtgcatattcttagtcagattgtttcggtctctactcaactccactatagtcacatgcttcgtgagactacttgtgtcatctattctttccacgcacaagttctttataactgcagacctactatgatactctccgagctagtgagtcgactaagaagtagacaacagttctagtttgactgttcgagtgagttgcgtgctatggctcttgtgacaaggatgacttggttatagtggtggtttctgtttctatgtcgactcctcttttgacagtcagtacaagtgctattagtattatgattcgttcaagcatgagctattaagcatataggtgttgatgcctattacatgtgtgaacaatttcaagatgatatg

SEQ ID NO: 165568 - DNA, 389 bp, Zea Mays
tcacataaatggggatgcgctggtgatggttggatctcgatccaacagtcacggtccaggacaccagaggttgcgccacagccgcaggattacgatcccaggatccagaacgttcccaccgacatgagtacgcgcatcttaatccagaacgtccatttacagatcaacggtgtacaggctatcgtcttcctcaatataccagcggcgcaatacggaccgcggcggcgacgacgaccattgccggcccagccaaacctcgattacaagctcgaaacgccactcccaaaccagctacacgaggcggaggtaaatgcgaagtcgttggagggatactcacaaagaatttgcccgcgaaggtgccctgcctacggcgttaggtgatcccgcag

SEQ ID NO: 165569 - DNA, 303 bp, Zea Mays
ccttgaactgtttcttaaacttaaaacaataaggtaatcgaacaagttcatatttcttctttgttccctttagcttcggcatgccccaatcacttgacgtcagagatgtcctattggccaggtattcttgcattaggtctctggtgctgatttgttcagccaccaccctgaattctactgcggccagttggcatggtgaccctagctacatgttgcacaggggtcgggtcattccgaagtttagagatagcgggcacataaccatcgtcatcagtttcccccttttcttctcatcagccttga

SEQ ID NO: 165570 - DNA, 619 bp, Zea Mays
gaaggtgttggagcccttaatgacgatgcttgtggcgggtatgttgggtcagaaaaaggatgaagagcagcagatgaagtttgaggaggtgaagatggtttagcaataggatctgtaggtgatgactcttgtgttaggggttgggcatgagacaatgacggtggtggatcaaccaattagacatcccgtcaaggacaaaggatgaaattcttgatagcctattcaagtgtatcaatttctttgggccagggttgtctagcatgtcatcgttggatccttggacaaccgtcgtcacttctactctgcaataatcttctggaatgtcgtttccatggaacttgtgtcttgggatcgcaaggcctgtggctactttctttgtacgaagattgttaataccatatcatataactagggtgcacgccataggccctatgatgtcatcaactgaatagtggtccttattcaagtagaagcgatagagcttgggacggttgtacaatctgtggaagatggcgattgagttgccgaaattagttgcatttttggagcttgagtggtcatctgttgaatagatattgcactcaccaattgctgcatcaatgcagcaagattcaacgac

SEQ ID NO: 165571 - DNA, 692 bp, Zea Mays
aaaagaccctccagtttctaattcttcgcagaacgggatccccgacggtaaacagtgctcggtcgatctccgatgagcctgttccagccggatactgccatggcaggagctcccgagcgacagagatcgaattagactcctaccgaacacttcccctcaaccaatttcaccattgggactatgaatcaaccggtccacggtgacagggcggatggtcatacggatggaagcgttccgaccaaccgacggcgtgaacgaccaaattgaagcttgggaaagcttcacagacctaccagaggtgacgcacatactaaattttggactgggcacgaaaagaaacgtggggctacggagagggtgtcacggcggtgttctacagagcagaggggtgttccgatgatgagactcgggtaaactccaattggtcggctccgagagcaacagggggctacaaacaagcaagaactcgaatcaattgggtatgcactaacccgaggagtgctgatcacggtagagttcctcgcggcggagtaagaacagagagaaaggggatttgtggactgcgttagttctgcggcgtactcgattcgagtgcttagttgttgaggtgcgggatgtgatgaagaagcggagtccgggctcaatttataggctgtcgaccggagttggagaagaagtgcggatttcagatg

SEQ ID NO: 165572 - DNA, 607 bp, Zea Mays
taccctaagggcgccggtggctattgctggccaagtttcttgagacagttgaaaacttgagacttgaggccttgcatgatcatcccgttagcctcctcgacctgtcctttcacacgggggtgggccatagtggcccaatcgacatggatgtgttattcgacggaaaatttaggaatctgttctcggtgaaatgcataccattatctattttgatcgagtttgataccccaatgtagttgataatgttggtgatgaactttacgacttgctcggaggtgatcctcgacctcgtgctatggcacgccttaatccatttggtgaacttaccaaccgtggcctggacgtgcgtgtagcccttaggtgcctttctgagaggtccgaccagatcgagtccctagacggcaaatgtccaggtgatggcgatggttcggagagcctatgcgggtagatgggtatgtcccttagtattggcatcctttgcatgttctcgccacctggtgttcgttcaataccgcagtaggtcgtagaagccctaccggaaagcgttccccacaaggcttctcggggcagtgtggtgcccgcaggtcccattgtgaatgccttccag

SEQ ID NO: 165573 - DNA, 458 bp, Zea Mays
agcttttccaaaatctggaggtaaactgtgatcctctattagatacgatcttctttggtactctgtgtaaacacacaatccgagccatatataactctgccagctgagagcctttataagtagtcttgaccagaatgaaatgtgccactttggtcagtctatcaacaatcacccatatagaatgatatcctttcgaggtgcgaggcaaccctgtaatgaaatccatgccaatttcttcccacttccattcgggtatcttcaacggatgcagtagtccagctggtctttggtgttcggccttgactctttggcacacatcacacatagctacgtgtgcagccacatatctcttcagcccataccaccagtacttttgcttcaaatcctgatacatcttagtgctaccaggatgaatagagtaatcagaatcatgggcttccttcaatatagtctcacga

SEQ ID NO: 165574 - DNA, 979 bp, Zea Mays
aagaaaaggagaaagtctaaacagtgctgggctgaaatcaaaccaggcggcccaggcccacgcgaaatcgtgcgcgcgcccacgcccgcgagggagactttgcgcagaggtcctcggggttttcactaactgtgaacgggttccttcactgttactcagagtcactgacgcgttacagaaaagccctccggtttctgttcctttaccgcacgagatccacgacgacggcagcgcggaggatgaacttcggtgaggttgtgccggtggatttatgcaacggccggtgctcccgagtggcgtacattggattaaaccctccccgaatgattcccctaacttaatttcatgattggtaagctaccaagctctgtccacgtgaaaccgcgaacgatgaggacaaatggcacgcgttcccggtgatccctggcggtccggttcaattaaaggggtcgaggggtttgcgggatacctaaggatactagaacaagcagcagaggggcttgagctaacctgaatcgagctggccatggcgaggtgctttcacggcggcggagaacggttttgggggaaattcaaaattcgcgagctctggcgaacgattgctagcgattcgcggtggctgggtgggtgatgaccctgcggggctggtgggggcttcaatttatagggctcaacggtggtggccggtgaatttcaatggggacgcgcggcggtcggaggaggaaaaggttactggcgcagtggctgggtggctagcgccgtggcaattactccggcgagccacggagagtcgcaaaggttcacgatgacacggtagaaacactcgggtacgtggcacaagggcaagaggcggcggttcaccggcgagcgtatctgctctagccgccgagcagggggggtacgacgggagtcatcggagtggagtctagctcaccggctgcgaagatctttcacccgcgacgctatccatccaacctgg

SEQ ID NO: 165575 - DNA, 858 bp, Zea Mays
tggtggatcagattgactaacatgcaatacctaggaactcatattacaagacattggtacgtaattctgttttcagagtctgtagacactttcgaatcagcgtgcttgcagcttactcatcggttctattgccgctcttgctgccttctttctcgtagagacacaactgcattaccttccctttcatacgaccacggccctgttagttttgtatccatgtttttgtgtgcactgccaatgatggatgggggcacacgtgacagcatggcgtgctgccgtcaaagcccaagtgctcagcgttctgcgattttgtgaggtatgtactggtatagctaccttctttaggtttaatatggcccctggttagggcagtctagctctttccctttcgcctacacaaacatagaatcgtttcgtcttcgaacaactactatcgagcgcgttagctggcttcccgccgtttcgcgggacctcctcctcttcccgccaactgcctattttctcgcagagatatgcctgtggtatctgcccttccatacgaacctgttagtttggcattcctgttgttgtgtgtgctgctgctaatcgatgggggcacatgtgagaacatggtgtgttgccgtcgaaaccccattgcccaacgttctgcaatttctcaaattctgcactaatattaggcgctctttgagttgaatatagcctttgtttaaggcaatccatctctttccctttcgcatagataagcgaacgttcgttatgtctttgaacagctactatcgaacacatgaacacacttgagcagccatccgcttcggcgccggcacacgcgtcgcgttatgcgatttcgttgcgttctca

SEQ ID NO: 165576 - DNA, 1250 bp, Zea Mays
gaaaccttctattaggcatgccctaggagcctttccgttggtgaacttccgtactacagtggagaaggcactgggtgtggagatgcaacatcagtataccatggagccacagaagtcttcgggtgtggagaagccaggacgtgaggaggggcaacactggaggtccagcccacaagaggggcaagtctcagcattagcgccaccatccctaccgtggcaaatattctaactcgggtactccgggaggaagtactcagaggtttcgggctgttcctaagccgggctggggctggtgtgtttccgttgtggtgatgcgcatcgccgtgcagagtgccagtggaatggcagttgttcaatctgcagtcaagaccacgaggatgtggtgtgtaggaggaatcccaatgggaagctcagatgggagccagtgacttcctcctcttctcagggcactgtcaacatgatgtcaagcgctgaaaagcaatattcagttccacttcctccgcagcagttttatgtgcctaggacttctcatttcgtgccgatgcagggttttcctcagtatctggctgcgcatactcctgcaccgactactcctatgccatctcagtttggagctccgcgtctggctcacctgacggctcagtggggttcttctgttaatttcactccgggagcttcctcttctgcgggtattttcggagcttatgtgctacccgctgcggatggcagagagcaaggagacatggtgacaggtacgatttcagttgattcgtttgtggcccatgctctttttgactctggcgctagctattcgtttgttatgaagaagtttgtgtcgcgggctggtcattcggtgcagaggttgggtcacccaattttggttagttctgctaatggctccattagtagttgctcagtttgtcaggggtgttccgtcatccttgctgatgaggtctttttggccaatcttgttgtgatttccttgggggctttcaatgttatcttgggtatggattggttatcacagtattgcgctgttatatcatgtttttggaagacagtgttattgcaggcgccgtcgggtagggaggtgatattcttgggaagctccccaaagttcacgttatccttgttggcgcaatttcttctagatcgccggtcaaggaagtcgggaatctttttctccatggtggtggagggtgaggctgccttgcgggtgcaggacatctgggtggtgtgtgactttgccg

SEQ ID NO: 165577 - DNA, 345 bp, Zea Mays
aaaagacccctcggccgaagcaagcttagttggcggaaaattcattactgacatctgggaaaatggcggccgaggaatggcacacgagataataaaaaagagtgaaaaagatactcacgatgcaagagaaacaacgaaggcagctgaaaaagctgcggaactcaaaaggcggataggtatcgcttaatagcttttagtttgatttttaattttgtgacttcgaacttatttacgttttctatcgcagctgaactatctcctcccccagagcccttcgagtcattggacaacccagaagcaaagaaggaagatgaaattactagcatggccgaagctattatggac

SEQ ID NO: 165578 - DNA, 462 bp, Zea Mays
cacttgttgcctcattaaaaaccatctgtgagaaacttcaggaaaactcacaatgaggaaaagagtacaatgggtgtcttcaggacaactataaccttcatggtgtataatatacgatcttcaggtcgaattgtaagggctgaagttcagagatgatctccccctgaaccctgcaggtctgtcaaatggctcatccctataccccgtacacattttctgaatgtgactgtaggtaaggatttagtgaataaatcagctagattatcacaagacttgacttgtaggattctttcctcaccctcgttctggagttcatgaggataaaaatacttaggacaaatatgcttagtcatattgctcttaatatagcctgtttccatttgtgcaacacatgaagcattatcttcatagataatggtgggggtatttgcggtgttagaaccacatgacttctggatgtgg

SEQ ID NO: 165579 - DNA, 665 bp, Zea Mays
actctacacctcaccagccggcccaaaattgttatctcacgcgcggcccgcttgctgttggcgccgtctcactggcgggtggaccccactcaccagggtcgtctccctcctgcgtcggagcattcgctagcccttcgcgcggggtccgcgcgcaccagccttatccacctccgcttcctcaggattctgttgtcgttttccctggactcgatcctcgcagactctacctataaaacctggccgccgtccctgctcgtcaccagaaaaccatcatggcgcatcgagcacagggtgagagataagggagcgttgtgtgaagccgggagccgccaacggagtacctggagccgcaaacgccgtgcaccctcgtcaccaacctgggacgcttgtggagccttggggaaatcgttggggcagtgccaaccaaaaggggagccgggcgcgtcagtatttgtgcgccggtggtgctccgtcatttcaatgccgccccgccattctcggattgcgtggcgattcggcgccagggttggattgagatcttcacagtggggtcgtgttcgctgtggtgacatccagggagattgaaggccatcagagtacctgcaattcctcgccgtcgtttgccttggccgcaaaatccgagcagctcgtggacagctacaacc

SEQ ID NO: 165580 - DNA, 542 bp, Zea Mays
atttcactctccattttgctcctaacacttcctatttcattcttgtcactatcctttcactccaaataattctttcatgtcctccgcgacctctagcgttgagatagatgaagacgagatactctatatattgcatgaaactatgataaatacgtgatgtgaagcttgcctccgagtattcaattataggaaggtgaagagcagtggagctacatcgaccaggatcatgaagtcacccacaatcagctgatgcaagactacttcaatgactcgtggatctatcattcactctactttcatcgaaggcaccacatgcagactctttctacaaatctttgacagattgggtgaccattccccctaattcactcgtagagtcggtgaactcaaccacagtggtttcttccctcgccaaaatatacatcgcttccctctacatgctcgcctacaataatgttgctaactccatcaatgagtatattaaaataaggaaacatatgatcttagggagtctttagcatttctataatggtatcgtttca

SEQ ID NO: 165581 - DNA, 302 bp, Zea Mays
cggagtcaaaccctggcacaatgagcacgcacagtgcaagaagcaagggagacaacgtgaaatgtgccaatcgctccacccacacatgcatgtacacatgacatatgcatagctgcctctcgcttaattgatgaccaagtcacaccacaggaaactaaccaagctctgcatgcatgcatgctagtctacggccggccggcctgggcgccaccagtatcactatcaattaaccttcagtcgtcggttcgacgattggacaatatataatgtcagtacgttttgcgacggctcacaacaatata

SEQ ID NO: 165582 - DNA, 739 bp, Zea Mays
gtcacattcagtcttgttggacaccacgacggaagctctagtagacttaagctcctaaagtgtgctctcatacttgctcttgtattctttcctctcacgagcagaaaacctaagaaacttgtcctgactagccaaagtagttgtgagctcatctgcctctgcggcgagatcatcgacaaaaggtaatacctcagtgatggagtcatcgccgatgttgttgttgccgctgcccatcgcgtcctcactaagtgccatggtgcagaggcctcccctagtgttagcgagaagtagagtccgttcagcttgtcctcaaccaatctcccaatctccatgtcgctcgaggaagaagatgtgtaatcggagtcatggtcgaggttgctaagggaggcgaggaaggaacactctttgatctagtccttcttgaggcacttcttcttgagcgcctccttgtctaacctccccttagatctgtgcttgccggaggtgtactcgtgcttgcccttgcgccgactggagtggaggtcgcgctagccatccttcggcttgcccttcttggggaagtgggcgatgaagtggtcggggtcaccatagttgtagcatccatccttagatccgccatgccgccaattcagacaattgttgtgaaactgcttgaaccggttggcaataagcgccagctcctcatccccaaggatctccacctgctcctctgtgatggttgacaaataagataaagcaa

SEQ ID NO: 165583 - DNA, 729 bp, Zea Mays
gtcacggcttttcaatccaatatggtgatcattaaatcaatccccaatgcataaaggccgtttcaggttgcatctttctcggccatgaccatttgatcaatggatcaaaaggaatagaatggaggtgccccctagcctgaatagataaagggactatgcatataccatgggttcatcgtcgtaccatcccatatttgaataggacaatatatcaacgatgagtaggcgggtggaaagcatcctggcatcacaggatgaataggtgatgcttgttgtatcgcctttcgggctgttttgttcgaccgttttgttttatcgggtggacggggtttctttgttggatgatcacatagaacggccttcttgctagcatatttggagagcaactgatcaaaagtagggtcggctttgaccagttgaccatgtgtgctttgtccttgcatttctttccttgctttatgtggaggctgacgcctctggccatgggcggactgtccggctgagttagccagaccgtccgcatgagcaccggaccgtgcgcacctaggtgtcggacagtctgtgatgcttgagtcaaggagttttgctcggctgcttagttgagcctatcccccggtgcctctaaacttgttagtctttctatctagagctttccgagcaatcccttcttgcgatatatttgacgtgcaaggatcaccaatgatggtgtttttgtctttgcctttatca

SEQ ID NO: 165584 - DNA, 515 bp, Zea Mays
gtggcggcttcgaccgtggctgctgatgacgattcgtttggctctgtgtctaagtgttttgagtctgatgattctgggagttcgattgcgtggatggaggagtcttcagatgaggacttggattattttgcagcgttagacgtggctgcagcggagccttcgccgcgcatggagggttccgaggagctcccggacgcgagtactgggtataggcggcaaagggctgtggcgaaatggagagtgagtggattgtcgcgaatcggtaggtgtcattgtagtgagatggagagtggtcgtcttcgcgtggacgggacaagtaagcgagaattgttgtcctcgccgattgggggtgagtgtaggtgagagggagctgcgaaatctttttgagggtgaggaattgaggataatgttgttcaactacagggagatcggtatcatcccgaaggttgagccaatgtaatatatgatgccctcgctgtgtgtatctaaccgtaatttgtatgataaggctgtgc

SEQ ID NO: 165585 - DNA, 538 bp, Zea Mays
atttacaacaactgacattctacacctacattaaaacaggtagccctccactatcatgggagtactgacattctacacctctattaaaactggcatgccaagcgctagaaatatatgttcaaattattcaggaaagggctagaataagtgccccatgagataacaccatcttccaaagcaaaaagggcctcctataaatggatacactctctcctttgctctttaatattgtaacttatatgtttgcagttctaataagaagggaagaagggtcatatcactggagtagtgccacatgttattattagtggtttgtctaccctttaatatgatgcaattctttttttggatcatgatctggaaaaaggcacaaaaattggaactgatattgtgtacttttgagcaagtctcaagtctaaatagcaacttccataaaggtgatatattcatgtttggagatgcccaaaaagaaatctaacactgcacattagtacattactatttcactgcaagtttagtgcttccccgatgcattatc

SEQ ID NO: 165586 - DNA, 685 bp, Zea Mays
taccaagaatagtggcggcggaaaggctgtcggcggctcgatgcggaaccatggcggcgccctaactccgatgagcaatcacgaccactggagatccgtacccaacacgccgagagggtaaaaagctccgccaatccgagatggttatcccgcgccactaaattggttcccaacgacggtgaggaggcaacccgacgacggcggcggcggcaggatcttagtgttgcactacggccgagacggtggtggtgatggttttgtggaaatgagagattcgaggagaagtgcgcgaggtgacgcgcaacacccagtatttaactccacgatccatcacagggcgggcgcgtgatttgcaccggcggcgtgtccgcgatgcgcggtaatccgttgaggacggaggggattgcgctgacagttgtggcccaccacgcagtggcgtggaacggaagcacgaccctgggtccacacgccagcgatcgggtaaggaagcgaacgcgagggaaatcgacgagcgaggcccgcatggcagtcggtgcgtgcggtaagtgaagcctgggccacgtgggtggtattcggtttgggccgaaatgctgatctgcggccaaggtgaggtttttctcttttttatttcctatttccttctctaccatttcaaattcaatttaagtcaagatttaatttaaac

SEQ ID NO: 165587 - DNA, 466 bp, Zea Mays
tttctgcaacaattaaaacatatcgcttagcccacatcaccgcatgtgcctaatagtgatttctatcctactcgcgaaattttgcacccagagtcccaatcctactctagcatgacaatttttctatgaatgtaaatacatccaagtaattgagtaaatgtaaatgtataaataatgagagggatgggaacatgacaatgttttctcgaggtatcggagagcctacactccccactagtactcattggagcacctgtgcaagggtattgctccacatcgattcaagcaagaaccaagtgctcactatgtgagagggataggaacatgatgaatcgcccacaacaactcacaccataagtttggtcacccacaagttgtaccaagtgataaccaaactgctaaaacaccaccaagccatctaggttatgtcgatcaccatgactaacaagcataaattctcacttga

SEQ ID NO: 165588 - DNA, 409 bp, Zea Mays
ggaaacacgaaattgggagactctggtggatgatccgaggcaagggctggtgtgttggatgcgtaaatacctagcggaactcactatggctgcaatttatagagtcctacggtggtggcgtctaatttcgagaaggcatgctggcggccggagagaggggaagtcactggcgcaagcgctaccgtggcttttaccggggtagtgtctcatgtgatgaacaagctacctaaggaggtctactacgatgtggtaaggctttgaggcacgtagcctagccagataacagtgaactccggtgatgccagcgcgattgactgcggtgggacacgacggccggtccggtcagctaccagattcaccccacacttgatattttcaccccaccccgacgttatctactctccccgcg

SEQ ID NO: 165589 - DNA, 904 bp, Zea Mays
gttcaaagcatttgtggcttcattcatgagtttgacgttgtgtgttgcttgaagtagcggacagtcagtgcattcaaatgttcgtagtgctgatcctcaagaatagacaagaagagaaagaagtcgatcccctgatcaacaatgccgccaagaagaagacgatcaatgagcagtaatatcgacgctctacaaaacctagttgcctacacacccgatcatgtttctatgtttcacatatacaaaaaggtggttccaaagatatgttctcctaacactcagtgctcgcaaagaatcaggacaggaaggctcagttgcagcttgatggagaagagaggtgattcgtgtgtttgcctattaggctcctatgaaggaacatgaaagtggagagaggcgtcacgtggcggcgagcggggttgagcgaagtttcttcagttttgttgagtcaagctagctccaggaggcgaaaaaattttattcagcgactaagggtctgcaatggatgggccttctctcatgaagacaagacccaagagatccaaaacttcttccagaatgagatgaaacaaccaccacctaggaatgttgaccttaactgggagattatctctaataggcgacatgacctctccagcttagacacgcctttttagaggatgaaattgaagcaagcattgatcttctgcctagcgataaggcaccgggacccgacggcttcaccggttctttcctcaaatcttgttgggccactataaaatatgatttcatggcagcggtgaatgctttctacaaccttcgttgttgcaaccttcatctaataaattcggccagcatcatcctaattcctaaaaaagatggggcggaaacagtcgtggacttcaggccgataagcctaattcattccttt

SEQ ID NO: 165590 - DNA, 320 bp, Zea Mays
cccggattatggtgcagaacctacgcaccacctaacttagttgtgatttgatgcttgagcattattattatgtaggacagtgggagtatgcgccagtgacttaggtagttgagtgccagtcaggtcgatctgtatctctttaaaagcgtttcctggaaatagtttgtgcgcctgcgcactacactgcatcatcctcgatattttcccagaattttgagatgagtttcagcaaatgccagcattgttatttcaaagcatcataggaactttccaggagatctttgtactggtgtgtttagacttatatgtgaagatccctg

SEQ ID NO: 165591 - DNA, 410 bp, Zea Mays
ctaggctactttcacttgcttgcagcataattttacaggtacttccttagataaaatgtttgctggtgtgacttggccatccaccctgtcgccgagctggacggtcgagtaggatgttgcgtctgcagaagaataccaggagaagtagtggccaggcttcgccatactcccaattaccttcgttagtttatttctgctacatcaaaaactatgatctgctgcttttgactctgatgctgtaataactcttaagtactccttcaatttgtggaccttcacgtgtactagccattggagctagccgttggtgcactagaacatccacgaggcacaccagacgtccgcatagaggtgctaaaaacaacatatctgcatactcagtctagttggcccccggtgcacaactagac

SEQ ID NO: 165592 - DNA, 721 bp, Zea Mays
gaggaatatcaagatactccactttccttccccggtgaagctccaaacttgtgtcaccaacaagttgatgttgtcccccagccatcccaggtcgacagtgataaagatacttcgaaagtccaaagtgggggagaatccaaagaaaagcctcgcacagatgtacgaaaatggcaacttgcagaattgaattagggttcaaatgtgtcagattcaactcatagaaatcaaggaggccacggaaaaagggggagataggaagagcaagcccacgaatgagaaatagaacgtaaacgacagattcatgcgtgtcctctgtcggaacagtgacaccacgacagatccaccaagagcagagctcctttggaagcaaaatcccaatctcgacgagatgaagaagatcggattcagaaattacggacatgttgttaccagcgaatggaagctgtctgttggggtccatgggcgggatgattgcaatagcggtgctttgcctcttccgcttgggtgccatcgcggtctttgcggcggaacgagtgggctcggaaactcagaggaagcagaggagcggatgaagagaaaaagtgaatctagggctcagaaatcaaaaaggcacattggcgcgagtataaatgggggttttcttgggtcagacactatctctaaagtgccaggtcactactcggaaaagcaaagccccaagtaccactcggcagttacctct

SEQ ID NO: 165593 - DNA, 528 bp, Zea Mays
gatagtgatgcggtggagccccacaacccgattccagggttttgccagtgataagagcgtgaggcgacggtgatggtctttgggagctggtggtgctagatttatgtgcttgatgattggcgtctaaagggggtgagatggaagaagaggcgtctgtatcgcagccttatagtcccagtaataagttggtgggttgtttcacttgaattttcaaattatgtgatggtggctacgggttctgttgcccattgcccattttcgatgtggcatgggagaaacgcctgacagagctggcccactgacagtgagcacgtgatagaggtgttgatgagtggggctggactatcagcggaaacccaggatcacgagcgcgcggccgagggacgaggcggctagcaacgtagggcctgacattagcacaggctgcccaactgagttcgacgaggtgggaagcaaagatgggtcatcgtgggcgccaagtgggccgaggagcgtgcagaactaggctagcgggcaacgtggggattg

SEQ ID NO: 165594 - DNA, 434 bp, Zea Mays
aattatggtgtgataggatttcctccatccaaactaaaacctacgacccgaatatttaatcatcgcaggggtacgccacttctaatcaaagccaccacatccaccatacaacggcccatagctcttctcccaacctagcatccgagcacgacaggcagcgaagggagcatgggtgcggctgtcacaaagggcccacttggcggcacctgaccgagagtgcaaatgggttacgtggccttgattatgggccacgtgggagaggagatgagtgggccgaggggagaggaaagcgtcccaatatgaggaaagcttctttttcttttgttcattcctatttctctttcttttctattttgaagtccctttttaaagtttcaaatttagttaggttttgatatttaaattcaaccaaatagacatattaaagaccaggc

SEQ ID NO: 165595 - DNA, 1420 bp, Zea Mays
aaagtgctggttgtttgctcttatgaagtttctgaataactttttgaacgtaggggaaattatcatgaattgatcgtttctgaatgaacgcgttttgggctgtggagatgatctcgttcattcttggcgcaggtctatttcctaaaatcttggttaaaattttcataaaactgttgatgagactgatcggtctaaacatgtcaatcctgtcagccccctccctcttttgcaaaagagtgatatttgcctcattaacaagatgcaggcttttgcatctatgattatagaaatcatgaatagcattggatagatcatccttaatcagctcaaagaaacacttataaaataaccctatgaacccatctggacccggcaccttttcagagtgtatctccataaccacatttttaatctcatcatcgttgatcgtagagtccagatcagataactcaaaagggctatagcctaagttgtcccaacgaacagcacattttctagcacccgtcttgccaataacttgagtgaaatgattatgggcctcgagcaatttatcttcctaactagtgagcagtctgccgtctcgaaccagcgatctaataaagttttttcttcttctgttatttgccatcaagtgaaaaaaatttgtgtttgcatcacccaggcgcatccagacgagtcttgaatgttgcttagctcttgccttttaaactgacactattccgaggattttcaattttagacttctcctgaattctagctcatccccagagagctgtctggattcctgctctttctcaaggaaggtaaggacggtctgaataattgctagttacactttaaaattgcctacagtctttcgactccagatctttagagctttagccgttcgggccattttcacatgcagccgaaggatggcatctgaggaactaacactagacgtccacgcttgctgaaccacctcattgaacccatcaatttttgtccaaaaagcctcaaatcgaaacccctatagaaaccaaaatccgagcaaccttgcataactagagggcaatgatccgaggtcatggtcccaatggcttgcagatcggcctgaggaaacgtatcatgccactccgtagtcgccaaaaatctgtcaattctagtcatcgtagggtcgtcttgttcatttgaccaagtgaataatttaccattgagatcaatctctaaaagctgaaggtagtcaattgtgtgattgaattgtcttatcactcttctatttattgaacctttgtttttctcccttgctctccttatcatgttaaaatcacctaggatcaaccattccggcttcatcatatttcgaatattgcgcagctctgttaagaaagtcattttctcattctcaggttgagggccataaactcctgtaaggtcccac

SEQ ID NO: 165596 - DNA, 342 bp, Zea Mays
gccggtcttggtgccaactgtgggcgagaggcttcttctcatcgccggtgaggaatccttcaagttgagcagcgggaatcgcaggcataatctgagcatgccatagcacataatttgtgtgggtaagcttctcggtaatgggaatcgaggaggaaggaatgatgaaggagacttcttgcgccattattctcgatgtgctcgagggtagtatgtgaatgtaattggattgaagcgttcggcccctgacgcctctctcgcctcccattttgagggaggataacattgtctcaatccttaatcttaaaccaaacatcttatttgagagatcgttccgtcctgtca

SEQ ID NO: 165597 - DNA, 522 bp, Zea Mays
tgtgcaaccagtgaagcaacccgtgcctcgaatcatccactagaactccccaatttgggatttcccccaaatcaacccagaacaccgagcggtataacctcgtcgtggccaactcgattcaggtccgatcttgccctctgctttcttatttcagcacccttacttgctcctgatactcctcgaccaactcaattgagctaagctaccttagatcgccgggaacgcattagaatgtccgttgatcatacggtcaccgtggatagagcaggttagagcgcagttagtgaaattagttgaggggaaactcttgttagggttcgaatttggtctcagccatagtagagcaccggtcgttgcgtgaatcgaccggcacaagcttgctggagctcggccctgcgctgttcgccatcatggacttcgggctgtgaagaaatagaacatgggggatgtttttgtaaactgtcagtgactcgaggaatagtactgcgaccccgcttcaggttattcaaaacgacaggggcc

SEQ ID NO: 165598 - DNA, 542 bp, Zea Mays
ctgacatcaacttcaagctcaattctgtgcatgatccagtggaaatctacctagggttgccatagcaaagttgtagctggtttatagcactacactattgctgcagagatttggacctgttgccatagaaatctgagagaaaatcgaccctaaactttggctgtcaggtgctctgatgggagctcgccatggtacagtggctaaactggatcagaccgccagcgcggctgtcctcaccgccgacggatccctccgccgcgattcgtgtcgccggcgtttggattcgtgcacagggctcggggataacgctctgggtagaaagatcttcaccgccgtgcgctggacgtcactccggtgactcaccgtggctgccccttctgctttgcggctggagcagattagctcgccggtgaaccaccgcctcctggccttgcgccgcatggcttttctttccaccgcgacgccgtgactcgctacggctgtccaatcgtcgccggtgagctcgccacgacggtggacacgaattcaccgcacccgcgttc

SEQ ID NO: 165599 - DNA, 429 bp, Zea Mays
ggccggcagattcggaccaaatagtcatcgcctccgtctcattgccatcgtgtctcctcctcagcttcgacgtggaacaccatcaccatggtcccttctctgcttcactactgtatagtaccagtacagcagtccctgtccaaggtgtcccttccagcgtccaggctagcacattcactgctccttcatcgctgtggcctgtggccctcgcttcctcagacctggtctctccgccacctccacacgtgctcgtcgcagcatcgctccttctcagcgtacacctccgtttagcgctaggaatatgagtctgacctcttttgcatgacactatagcatggtctaaaaacagaagtgcaaagcataacaaagtgatatgggctagtctagcacaatctaaaggaaagtctatatcaggcctcaaattgtggc

SEQ ID NO: 165600 - DNA, 2003 bp, Zea Mays
cttgaccccaagcggctgcacgtggaaaacgtcggcgaatgtcgaactcatcttcccaagtgtcaagagcagcatcacatccagaccatcgaaccagcacttgaggtacttgagtccctccacgagtaatgacacggtgttggataatctgcactggaacacgcagtgtgtccggaataactggaagagacttactcaccaaacagctgggatgtagagatggctttaactgggatacgtgaaatacaggatgaactgaagctgattcaggaagctttagcttgtaggcaaccttcccaactcgctgcaggatttcaaatggcccaaagtatttataagcaagcttatggttagcacgaacagccactgacgactggacataaggttgcagcctcagatagaccatgtctccaacttgatattcacaatctgatcgacgcttgtcagcctgattcttcattctctgttgtgctcgaaggagatgatgccggacagaccttatcatgagttcacgttgagaaagccagagattaaggtaggcatgattcactgagtcatcaacagacaaaccaaaatggcgaggagagtgaccatacaacacctcaaaaggagaccgacccaaagaagtgtggaaacaacaattataccaatactcaaccgttggaagccaagaagaccacttggatgggcacgactgtacaaaacagcgcaagtacgtctccacacattggtttacacgttccgtttgtccattggtttgtgggtggtaggaggagctcatatgaagttgagtccctgacaacctgaacaactccttccataatgaacttgtgaagatgcggtctcggtcagatacaatagaatcaggcatgccatggagacgataaactgctgtcatgaaaaccttagcaactgtcagtgctgtaaagggatgacgcatggccacaaaatgagcatatttggacagcctgtccacaatcaccaagatggtattatagttccctgaccttggcaatccctcaataaagtctaaggaaattgcctgccaagcttgttgtggcacaggaaggggctgcagaagtccaggataccgagaacggtcgggcttagcctgatgacaaacaatacatgcagctacaaaatccttaatggttttcttcatacgaggccaactgaaaagttgcttgatgcgtcgatatgtcacaggaaactcggaatgaccacccaaggcacttgaatgtaaagcactgatcaccttggtctgcaactgagaattgttccctagccagacacgattcttgaaccgaataactccattatgcagactgtaaggaggctgagatcctgctgacaacgcagccagcaattttagagcttcagagtctgttgcataaccggccaccacatcctgtaaccaggctggtgaaaccatagtaagagcaagacaagcggaatccgtgtggtgggggcgacgagacaatgcatctgcagcagcgttatccactcccttcttatagacaatgcgatattgcagccccagtaacttggtaaacactttctgttgccagggtgtgtgaagacgctgctcgttcaaatgagacaaactgcgatgatcagtgagaataaggaactcggcatgttgcaaataagatccccactggtctacagcaagaagaacggccaagtattctttttcatatgctgacagacccaaatgtgccggccccaaggctttactgacaaatgctaagggatggccatcctgttgaagcactgcaccaataccacttcccgacgcatcagtctcaatggcaaatggtctatgaaagttgggcaaagccaaaaatggtgccgaggatagagcctgtttgatagcttgaaaggcagaatcttgcacattggtccacacaaacaccacatgtttcttaagcaaattggtcagtggcttagccaagatgccaaaattcttaacaaatttcctatagtagccggcaagacccaag

SEQ ID NO: 165601 - DNA, 433 bp, Zea Mays
tggtttggtccttcgtcaacatcagagtcacccacataaaccggcttagagtcacccacagatccctgactcagccacggtattattcactaatgcagaaatgtaaacaaactagctacgacgctgcaacgtgatgatctcttgtcaatgttagttgctggtcatgaaacaacaggctctgtactaacgtggacaatctatcttctcagtaaggtactcctgtagtgctatattgcttgcagtaaccatgtatcaaccgaagtgacaaataatgtgttacgtaaattgtcactttaatatgttgactgctcagtgttacactactgaaggatccgactgcactgaggagagctcaagatgaagtagatcgtgttctacaaggtagactacccaaatatgaggatgtaaaggagctgaagtacttgatgcgctg

SEQ ID NO: 165602 - DNA, 694 bp, Zea Mays
ctcaaactgatggaaacttgtatcctctgcctgaatgtctgtcactggatcaggtactggtactggatcctcaggggctggatggtaggagccaaataggaggcgtgaggcctcaagggtgccctggaactatggtggtcggatcagctgtgcgaagatgtggcagagataatgagcatttggcagctgtcgccgagcacgaagaccatccaataccgtgtcctcgatctcacaaataaggaagtcaacaacatcaaactctgaatgaaagatcagggcaccgaggagccaaagctgaatatgagtggtagcctctctataacccatccacgacagaagcgtccgtctcatgagctgatataagtacttggctactgtagtgaaatctgccggagaacgtcgcgacccatctgagaagggcggtcggaacaaagccgcgatgtgagctgtagctggagcaactccgtcgtgagggcgacgaggaggatcagaggtaccatagcacaagctatgaagacaagtcgatgactcattgaatccaaacagctggcgaatctagctagcatgaagtgtaacatcctctcgctcaaagcggaacctcatccactggtgatcggggtcgatccatactgacgcattgaacacacggacccactcctcaacatatctgccgctggtagtcagaagagtgaga

SEQ ID NO: 165603 - DNA, 651 bp, Zea Mays
agcggctaggttactttagaagcggtgttgggcgggctccaggggctgaagatgtccctgagccggagggggagttggtcgtgtttgaagctttctttgttgctcttcttcgcctgccagcgcatcggttcgtagatgaggttctgcggaggtttgaagtacaaattcattagttgacaccgaatgccatggcggcgctagcgaagtatgtgtgggctatttcctcatacgatggggagccatctgttgaggtcttcgcaaaaaattactgtctgcattggcagaaaaggaagataggtgataagattgctcagtttggatcttgcacctttacgccgaggattgggaagacctcgacccgaagtcatcgagattgtcccgtgcgccaaaaataagtggggggcaactagtgggaattttggttttatgtgcgctcggtgatgttgaagggttgcccagtttgcccccctgcccatcttgtgctcgcactactatatggcgtttccacattttgaggtggcagaagaggatcaagacgaggggggcctttgctacgtagcccgcctgagtagtgggcgtgatttggtggaaagtttattgcttgtggggtatggcccttggcgcatggctgggctttgtgcgagattgccc

SEQ ID NO: 165604 - DNA, 305 bp, Zea Mays
ccatttggtaatttagggactaaatagaactaaaatagatgtactaatctttagtctctcagatcaaatggggcgtacttgaagaactcttgtcttccttgtgtacaattcaggtccttgcatcgcgcacccatccacacatgcaaatggatgcgtttggcggttatatcttgagcggcataaggatacaaaatacaaattatatgatgtaaccgccatcaacaaggatacacaagtgagtcatcaatatggttcagtcttccgatcaaaggaggatagcacgccattgtactttaaaaggcggg

SEQ ID NO: 165605 - DNA, 543 bp, Zea Mays
catctcaatgtgttaggagttccacctatgtttttggagaaatttcatggtaactgtaacacagctcatagcagactgttaaggctatatatagggaacgtaggggaaaaaaaactgtctccaaacattgtgtctgaactctgcagttgtccatgaagaaacggagagagcaacaaacagatccgccgacgactctttcgctggtcgtactagctccaggttccggtagggtatgacaggccatggaaagggactagtccatgccagatagagataagcaggaggtggttgcctaccattagcatgcattaaacagctttgctggccatcctacacaagtgtacccgcatccgcacatccagcgcgccgtccacaccacgccacactagttttacgctgcgtgacaggatagaaccacagtccacagcgaagagccaaggcatgtcccatggctacgacgaccccatgccccttcaacgctggctgcaactgtgtaaccgcgtgcagaggacatcagccacactgccacagcaaagcgtacta

SEQ ID NO: 165606 - DNA, 407 bp, Zea Mays
gcctctgagtctctgttcgatacaaagatccatctaggggacatgttctatctttatatttttactctcccccacaagtcctgttcgcggggaagaggagaggtgagtcataccacacttttctcaatgggctagcaatggtgctcggtgagatgtggtgagatgcaatcaggtaatctgagtgaagccctagatccttttgtaggacccaagcacgaggtaagttggtgactgtcctcacacttccagacactaactcatatagttactggctccattcgacctaacccaatggctcgctgcctctccctacaataaaccatgagtcaaacattcctgaggctcgaacacaagctggtgatgcccttggcgcttgtgctctagagtcctagccactagtgtgccta

SEQ ID NO: 165607 - DNA, 1092 bp, Zea Mays
cgcgcttctatcctttctccgttcgaagtccacggcggcgaaccgcgcagggacgtactccggcgagcacctggaccggccggagggagccaagactggcggccccgagtggcgaacaccgaattggatctcccccgaacaattcccctaacttaatttcatggttggtaaactatcaagctctgtccacgcggaccgcggacgatgaggacaattgcacgcgttcccggtgactagtgggctcctagttcaattcggtggttcggcaagcatcacggggttatgagaatactcaaacgagggagcagaaggtgtgggctgacctgaatcgcgctagccgcggcgagctgttcttcgcggtgtattcgaaccggtttggggaaaatgcaaaattcgagctcgctggtgatcggctgggggcaatactgggtgtcggggtacttgaataccttatggagcttgcagtggcttcaatttatagagttagtgggcggtggccgcgaatttgaagaaggacgcgcggcggtcggaggaaggagagttcactgtcgcagtggattcgtgtcccacgccgtggcaattactccggtgatcaacggagagtgagagtaggctacggcgatgaggtggaaaggtagagacaagcggcagacgacggtaatggcttaacggaggtgaggatcttatccgaggcgtggtgagcaagaggggaggcacggcggctagccggagtgacgtccagctcaacggcggcgaagatttttctaccccgaagcgttatccggttaccagtgagcgcaaatcttaacgacggcgacgatcccggcgcggagtcattggcgacgaggggagcggtcgatctgatcttcatcagatactgtaccatgggacttcctcattcagttggactgacagtcaatctttgagctcgattttctctcaaactcatatggcaactgatccgaggctctgcagcaaaattgtagaataatgtaccatctccatctttgttatagcagccatgggcaaattctttgaagatcatgatcagtagagctccacagatggctcaaggccactggtaatacaact

SEQ ID NO: 165608 - DNA, 762 bp, Zea Mays
gattagattcagaactttaagcgaaccattaagcgttggtggccgcccgatccgagatctacggatcggatttaaaatacccaaggtggcttcgaatgcgcccgatccccaaccaacggtccggatcgacctcacgcagaacgtttactcagatccaatctaagcctttgatctaccgattggtggtcacgatttaacgcagcaggaggtatacacgactccaaatctggtgcgcccgttgagcatccaacggccgaggtcgaaccaacctcccatcgtcctgagtccggtgccgccgacgaccagcgcggtggcgccatcgccggtgaaggtcaggacacgattctagcgcgtaaactctcagagtatcggtgttacatgcgaaggagacgatggcgaactcaagagaggggcacttaccgactgtggtgatagagacgaggtcagccacgacgattggcggcacccgagctacggcgagcaattcaccgagacttggctacgccccaagttccgatgcccactgtaaagtctccacgaagctcgagggatgttcttaaacccgaaagcgagaacgcgacgaccgtgtaagcttgattaccctacggcggatctatggtggcggcggcgctctcgagggttgatggaggatggctcaggggagatgccagggcttatatacaaggggtgatcccgcagcccgcccttcaacaacccgagcattgcgcgagagatacggaaaatccgttgggattgggggcg

SEQ ID NO: 165609 - DNA, 321 bp, Zea Mays
caccattcaaattggtatacggacgtgagcctccggcactggtaccataccaacagggcacgacgcaatcccaaaccgtggaagacctgctacaagaccgagacaatttcctggcagaggtgcgggaccgtcttcttcaagcacagcagcatgccaagcgttggtatgacaaccatcaccgagaagtgacttttgaggtaggagactgggtctggcttcgactcctacataggccaatgcgctccctggttgacaaagcacacagcaagctggcaccaaagtatgcaggtcctttccaagttctggaacgagtcgggttag

SEQ ID NO: 165610 - DNA, 871 bp, Zea Mays
ctcagttttcatcatcctttactccttcagcatttgtagtttttatgatctgtttggtatgatgggatcgctgggtataaaatgacatgtattaattgatttgaattatcacataatgtttggaagtctacctgagattctcttacacttgatcggctagcaatgggcataattttcaatttttcattagtggtataaagttttctaaaaccaaggttggctgaacagaatggaagaaaatatccatgattagaaaaaaaaaagacaacaaataaccggccatgctcacttgttttctattgaacttttacaattagtagagtacgcataacataattcaaattggtgtaatactcatcatatccatacagatatgagatgcccatatgacaaacataatgaaatggaattgattcaaacattttggtagacacaaaacttagctgcatcggaagctctgcattagaagctctgattagacacaaaacttagctgcatcggcagcaaaatcattgctatttaataggtgcatcagaagctatttaatacctatcttcttcacctaacctctcttcctcaccctccctcatagcagttggctgtcgtgatccggtgacctccccacgaaattccgaaggtaattttgtttagttgctcctctctgtttgtcacttcgtgaagcagtgggatctaggttagggaagctttttctccttcatgtccatggcggctcacgagctctgtccccaaccttcccgccacccatgcctccaccatctgtcgcctcctcttctttgtcgtctgactcgtcctcaacatcgcagcgccacctcctttgcattcactgtctccactagcagcttccaccatc

SEQ ID NO: 165611 - DNA, 568 bp, Zea Mays
ggcacgaccggtccctgctccataattagcaatctactacaactcgttcacgcaacccgatgaatccgtggccgcccaaattccataatttcatttactaacatgttttgtccagcaaccgaccccttggcggcgatgcgcttcttgtggcttcagacaatgaaccggatgtcgtagtttccatcggcgataacactgtcgtctccccactacacgctgacttccatcggcgataacactgtcgtctccccactacacgctgacggagaaggacgcgacctcacataccggcagcgaccgacacgagcaagcatgcgagagagagcacgagtagcggcgaagaaggcgatggttgcaatcgaaaggcaataaagcgtaagaaaaacgaagtggtggcctggccctttttatattcatagctcatttcaaaatcccaaaaagcgcacagtgaaccgtcacatcaatcacgtcattacggtacaaaattttgattgtgccccttgacgaagcctaagctgcgatcaagggcagagagactctgggatcagctcaccaagttgagccaaac

SEQ ID NO: 165612 - DNA, 506 bp, Zea Mays
ctgatgccattgataagggtttggttaatgctggaagctggatgatcgttcctttgtcgtttactggtggtagaaggtatcatgtgatgaactaccaagatgctatggcaatatgtagagtctttgcgctccttacttgtttgtgaccttcacgtgcaacactaagtggaaagaaatagcagatgccatttgttttgaaattggacaacaaccatgcgaccgctccaacgtaattgttcgtgtcttccacatgaaagtcgctgagttcataactgatatcagggagggaaagacgtttggccctgtacttgtaggtatgctgacgtttgtggccctttaggtgttcttccctcaacctatcactttccatctgaaaacctcgtgtttaccaaacatttctgcagcgctatatactgtggagttccagaaacgtggcctaccccacatccattgccttgtttggctggcaaaccgctccttcgacttagatgcctccactattgatg

SEQ ID NO: 165613 - DNA, 995 bp, Zea Mays
aaaccttaataaatgtctagagacagaaaaaaattggccaaaccataaatcctgaaccctaaacactcaaagccaaacccttaactcgaaactctaagccccaaaccccaaaccctaaaccctttgtatcgaaggataactcataaggctttttgacaattatggtctccactaaagaaccaagattgtgatttgtgtccaaacactaaacacttaatcataaccctcaaccctaaacactaaacaccagacccaaaacacttaaccctaaaccctaacgccaaccctaaacattataaccttgaccctatgtatcgaatgcttacacctatgcattttttaacattaaatggtttccacaaaaaacccaagaatgcgaattgtgtccaaccaatattaaaatgtaatccaagtaatagtaaaatacaaagatcataaaaaattaagtgcaaaccattgtaaaattttagagatagtacaatgtatccaaaccttaataaatgtctagagacaaaaaaaatttgcccatacactaaacactaaacactaaaacacaaacccttaactcgaaactctaaaccccaaaccctaaaccctgtgtatcgaaggataactcgtatggctttttgaccattatggtttccactaaagaaccaagattgtgatttgtgtccaacctatagtaaaatttaaccaaaagagtagcaaaatctagaaatcgaaaaattttaggccgaaccatagtaagattgaagagatagtacaattttatctaggccataataaatgtctagagatagataaaattttcccaaaccctaaacacttaaccataaccctcaaccctaaacactaaacactggaccccgaaccattataggattgaagagatagtacaatttatctaggccatattaaatggctcgagttagataaaatttgcccaaaccctaaatacttaaccataaccctcaaccctaaacactaaacaccag

SEQ ID NO: 165614 - DNA, 483 bp, Zea Mays
ggcgcgaggccaatatggggattgagggaggccaatatggtgattgcgggtgcgctttccatcggcgtgtgcaggcagagcgggggcacgtcacgcctagtgtggacgcccacactgttgttttacagagtagtagtagattaatggagataaaatgacgttgaatgatgaatagttgtaaaaaataatattttatggttgagatgaggtaaaggaggagaatttagggagaaacaaatgtgaagatgagaaaagtagagggtagagcctatgtgacgtggctgcatagtgtggtatatggaaaaaaaattaggaggaactgttgtgaatagtctaatctactacccctagcaagcatcaatcaagtatgtgtgtgttattaagtgctggggttacacctactctacgcctaatcttgcactgccgccgcaatacgcaacacaaatgctgtggaccgtgtgggtctcatcgcttctactagtg

SEQ ID NO: 165615 - DNA, 745 bp, Zea Mays
gtggagcttttgagatgtccggggtggggaaatggcgcctttgtgaagtaggagtagaagggtttcaatcaaatagtatttggtcttggacgtgctgatcaaattggattatgcttcggtatttggggatgattgggattagttggagtggctgatttaaggctaacggagatttggtggtttagttcaggtagtattgttgatttttggttatagaataattagtatttggactatatagcagaccttccccgatgatttggttactagcatgggcaattagttgctctgcaattgcaaaataaggccttgatcgttttagtagtacatacttacggctgcattatcatctcctctccatactggcggtgatatgtttccggtggccttcaagtgaagctgtgggtagttccagaatactggttccctgtcattctgtgtaggtgagtagataaccttctatcattgttaaaaacatcttgattgtagctggattatgacatatatactatcttatcagctgatccagtacacgggctgttatactgtaaggtatgcccatagttagatttctgatagtttggatcggcaaagaagcttatagcttctcataaaaggagctgaaactgaaactggaagtcatatcgttgctaaacattactacttaagttccttgaaatgaagtcagactaaacatttgtctcttatgtttgcgcatcggatattctcacaacattagagctgt

SEQ ID NO: 165616 - DNA, 708 bp, Zea Mays
caatttcaaaaccagccctctttcaaagatcaaacatgttcacatttttccaaacctcaaaaccatagggcccaattaacaaaatggcgcctaaagacccctagaacaccctggaaaaatttgaacccaaccctaagtcgtttggcatgacttgacatggtttttgtctcgggctggacaatacagacagagccaacttcacaccacaatatctctcaaccccgaccatatattcgcttggaactcacatggaaaagataggatatggtgcagagaagataccttacacggggtttttgctgagatctacacgctaaggcgaccaaacaggcctttgaacaccggcagaaccaaaccaccacgtgttcgacgtgggtaggcactcgggaacgcgcccagtgcacgcccgcacgcgcgcccccgcgcgccctcgggcgcccccgtgcccacacccgtgtcgtgcccgcgagtggctataaagcccgccctcatgcacggccaccttccctgtcaccccctccgcaccgcgcctagctttccctagccagcccgcagctccagcgacctccccgcgatccgtcagagccgcccgagggcgctcaccatggccaaaccactcccgcccacctccgctcgatctaagccatcggatagcttcctcgagaggccgtgaagctttcccaagcttgagccgaggaccagccccac

SEQ ID NO: 165617 - DNA, 721 bp, Zea Mays
ctaagttatcaatctttaacacacctttagagttgtttggggcctacatgttggttccatatgacccctagagggcctcagcgtttgtatgaccctccatggtcccaaggtgattttgctaaatccatgcttactaggtgcgtggggcccctaggtgctttattctgttaggtgccttgggcacgtggggccttagggggcttatctgaccaggtgccctagagtggggggacaatggcttatcatgttacgtgctccagggcatgtgggggaggggtcaatgggaggtttgtcctattgtgtgctctagggcatgagggggccctaggggcttattctattaggtgatgcatgatacaagtggccccaatatcatatcatgttaggtgccctagggcacaaggggccctggggccttattttgttagtgcttgaacgtatatgaagccttggaggctaaatcagtaattgtcgtaggcgtgtggggccctagggcttgactccacttgttatgccatatggtttagtgagctaggttgagcacatgcatgtatgacctatggctagtgtcgtattcatatgccttataaggtttagtcacaatgactctcattccatagggcctagggtcagtaagtatccttgagcatgtcttggtagtagcaggttgtatgcacttccttgagtgctggtagagtccctcgtgtccgctttaggaatg

SEQ ID NO: 165618 - DNA, 580 bp, Zea Mays
aataaatccttggatgtcttacaacggttaaactatatcatcaaatataattagtgtacagttcatcctataacacactttatatatatatatatactttcaactttgagcgcatctcaatgttcgagcgtaaaaactttcagttttgagcataaacacatgcaattatgcataaatactgatccaacatgtatgttgttggaaccgattaacacgtggtcaagtgggcccaagcactaggatgtgggagtgttcaggtgctgaacaaaacagtagccaaggaactgtagcgtcttgttaagcatgtcccatcaacgtaaagtgtgagggtatttataggtaaacaggtgggtggcgtgcccttatgaggacaattatgtcctcggttacctgctacagtcccggaataccccccacgaggtcattacaggccactacggtgatgttaaatacaacttgatcagatacacagtaaacgctactccatagagggcttacaagtgggcccgaatgagtagcagcacgcaacgtggcccagccatcgaacgacgcggtcctcgcctgcgcgacactctttgct

SEQ ID NO: 165619 - DNA, 782 bp, Zea Mays
cctcaatcaattttaccaatggggctttgaatcaaccagttcacggcgacagtgcggatggtcaaatggatcaatgcgttccggataaccgaaggcatggctgaccaaattgaagcttgggtaagcttcacgggttcactagggtttacgtacatgatagaatttgggctaggcaagagtagaaaagcgggtcggcagagagggcgtcacggcgacgttctacggagcagaggggtgttccggtgacgagactcaggtaaactccaattggccggctccgagagcaacagggggctaaaaacaagcaagaacacgaatcaattgggtatgcactaacccgaggagtgttggccacggaagagttcttcacggccgcgaagagctgggcagaatggttttgcgggcggtgggagttcttctggtgcaattgagtcaattgctcaggagcttgtgtgcgtgatgcagtgaagaagtaggatccgggctcaatttataggttgctggccggagatggatgagattcactgagctgtgaccgtgctggcgagctcacccgcgcggcagagccatggtgaaagtacggtggccgccgattaaccgggtaacgccacctccccgctttaacgccacgtcgcggaagtccttcaccgtggccaccgacccatccccggccgcggtggcgttcttatcgccggcgagatcttttctgatgaacagtgcccagattcagttaaaatttgcctgacagcccatcttcagatcaaaatttatccaaatttcac

SEQ ID NO: 165620 - DNA, 1761 bp, Zea Mays
tttgaatttgaaaaatataaataagaaatgaaaacatagaaaaggaacaaaagagataagaaacttaactatcacgaaggctcaagctcggcctaggcaatagtgtgtcacactatcaccacacccccacattgtcgtccggctagtgtacatgtgagccctgctggtcagctacacatgtcacatgcgcacataggaaccagccactgccatgtgggcccatccatcagaagcttctcctccctcgcatcgtaacaaactcgttcgtagtgtcacgccaagactcgaccaatgacctatcgccctaggctccgtacttggtgtatatatgcatacatcgtgacattctgtggccatagattgagagagcaagaaccttgggtcgccgagccgtgcacctggatagagggtgaggtagccgctgagaaagagaacattagtcgtcatcatcattgtacgtctataccgccgaccgagccctgatcgatagctccaagcattcaccaaagaggggtcacaagaatgccaatgctaatgcctcaccctaaatcctaatccacagaaggatccatctcctaggtgtcggagtgaccggaagagtgacatcctaatggtggtactggatctgcccccttttctacaggacagcggtgggaggcgacgtcagtaaggaccagatccatctccactactgcagggagaaggtatgaactcctattcccctctgcggtcgtgttttatgtgcactgatccaagatggattagttccctgttatcttctaaagtaatctcggagttctaagtatacacagttagatccctaatttctatcagatatatgttgctctgtttatctttatacactttcctccttgatagcctcttttcgggcaaaccatgtgaagcaacttggcttttattcagtcttgtagcatcaacttttgatgttcacactttttggtcatgcagtttctctttctacctggttgattacccgcaccattccatcctgaatcatcgcgtgcgttgacttttctgtacacgaggaacgattactgcatgagtggatgcaaaataagtcgttttgaggccatccacctgcatctgtatatacgccagatatggtcgtacctggccggccaggctcgcgtgggactggctgtgcgggcgcagtaaaccaatcaggcactttgtgttcggggtcacttggctaatgtagctaaaaactgcagattttacggcaaacttcatgaggtgtcagtgcttaactgcttaagttagagtgctacctttagagtgcaatggagtgtcatctgcacaaatgatctatagtgtggttataacaatgtaaactgcagagtttcatgattagaaataaataaaggaaccacaaaatcaagggatcatacactttgccgaggtcatgtgcacaagggattttttttttttgatacgagggcatcaccatttatattactttcataacagaaatgcatcacagttcaccaaagagtacctgaccgacagacggacaacctccgacaaaagacggcaaccagaaacctgaagtttcgccaagagttgtctagacagcctctgattcagggagccagcacgcaggacaaaatgggccatcaagttcaacgggcattaacccaccaacatatatagtagagtaatacagctactgctcaaggactcatgcaggagccaaaagcataaaaaactacgatcgaatccaagcaggcagcaacattttgt

SEQ ID NO: 165621 - DNA, 567 bp, Zea Mays
aagatgtttgtatgcggtctcggcgtccatttttgtgagaaccaccgtatgtggtctagaacatgccaatttgtagcactatcaggttaggggagccgatgtggtgcatgttgtatcctgccagtcgtatgtcccccaaggaccaaccctaggttgtcacatgtttcaaaaatcattctccagcgggaacactagcaagaagggaaaaaagacctcttccacaaaagatagaggctcctagaagttgaagtcaatgtactccatgtgaaagttattagcaatgccgaaggtgatgggtggcaacacctgtcccaacaagtagacacaacctggggagatagttgagaaggaacccccaagggttagcctatcatagaggatttgtagctcatcaaaggcatatgtggtgaggatgttgaggctggccccaccatcaatgtggaccctatgtaacttgactttggcaacgattggggagacaacaactgggaggactctaggcctagccatattgtcaggacaatcagaagttgaaggtgatgggggtggagacccacttgagtgggc

SEQ ID NO: 165622 - DNA, 335 bp, Zea Mays
tggtgctcaccacgtgagtcgtgcaagagatgtataatagcaaatcttcagccggttgagtcggcgtggctcggcgcggcggttttagcactggtggtgttgtcaagaatttttttcagcgcatctagagcttcttgtgcttatgaagtccactggaatttgtctaccttcttgagcaacttatagaatggtaagcctttctcccccagccttgatatgaatctgctcagagctgccatacatccggtaagtctttgtactttcttctgtgatcgtggtgcttccatcctcatgatagctttgatcttttctggattggcttcaattccccggtg

SEQ ID NO: 165623 - DNA, 622 bp, Zea Mays
tcatgaggcgggccttatttcgaagactgagccgatgtagcatgtttgctgccctcgctctcatgttgtggtagtgagtgaaaatgcttccctcccccggctcgcaatagagagtgagggcaacaaaatgtgatttgtattatttgtgcaatgtggccggcgggccttcgctgtgtgtatgtaaactataatgacattgcttgttgtgaaatgagatggggacttcgcttgccatggcgatgtgtggatgcttatgacgcgtacctggttgcgtccttaagtgctttttgttcgaccgtgtcagataatagagacttttcacctttaaggtgatcgtaatagactttgcaccattagggtgatgtcgcgtatttatgcatgtccggctgcacccttaggcggcttttgctcggatgtcttatagtaaagacttcgtatgacacacttgtgcatatccggttgcaccctttaggtggctttttgcccggatttgtcttttagtaaagacttcgtatcgtgcacttgttgtgcttatccggctgcacccttaggcgacttttgctcggatttgtcttatagtaaagactttgtatcgtgcacttgttgtgcgtatccagctgca

SEQ ID NO: 165624 - DNA, 727 bp, Zea Mays
cagcagtaaaagaatcacgaaagactgcagcctagtgcgccctcaactcatataggttgcttaaccacgagttgtccttcaacccatatgtttccaacaaatcagtccacatcttatcaaaggatgccacagaactctcttcataaacacatttcttaaaatcagcaagaaacttaggatggtccttcattacttgactgagatgttttgcagcattttgataaatgtgccacaaacaaaggtgatgccttgtatttggtaaaacaattctaattgctgctgacatggccgcacattgatcagtgaagattgtgctaggatgcttgcctgacatagctgctagaaatgtattaaatagctagataaatgattcaattgtttcattatataagagtgcagccccaaaaataattgtccgcttatggtggttagtcccaaggagcggagcaaagggcatttcaaacttatttgtttgaaatgtggtgtcaaatgacacggcgtcaccaaagcatgcgtaatccatgatagcttgaccatctgcccagaagaaattagctatccgaccatcttcttcatctaattgtatggcgtaaaaaaaagctggatcctctaattgtttattcttcaagtattctaatagtatctgtgaatcattggctggcaaatacttcttgcgctcacgtccaattagattattgcaatccattcgtgagaagggtacattttc

SEQ ID NO: 165625 - DNA, 907 bp, Zea Mays
cctacgcagagcctcgccatggacctcagcggatctgccgcgagtccgccatgcccttgagaaattccgggcgattctgaccccaagacgccaaatccaaccccaataatcacagaggagatgcacgcagtcaagatgaaagagatcataccaggaataaagacgcaggggtacccagccacgacgtacggcggatttgagggtgaggatttgcgccggtgagaaattccggcccacagcggtgacggatgaaataggggcgggtgcggaaccgttcttatgcaccgaggtcaggaagtccgcgcgagccggcgaggtacgcggcgtctgttgcggcggcaaagagtccgagcgcggctgttccgaggtggacggccgagctgaccaatgggccccaccagtcagcgccgtgagcatcaccggagagtgaggctgaccggtggccccggtgtgtcggcgccagtaatagcaactgggctggcggcgaagagaaaagtaggagcgggccgcggaggataaaggtggaggtgggccgagcagaggaaaaacggcccatgtaggtaagtcagtccttttcttttctttttatttcatttaaacctctaatttcaaatggtcttcaaataaagtttaaattctaaacttaattataatgaacaatcaaaaggataccagtatgagatgcaaatttatttatattatttattttattcaattattagggcaaatgattcaagtgtgaaatgctccattacacaatacatgtaatagaatctttattactcttgtaggttaatttaaaattatgttcctatttatttaagagataggactttctagtgtgtaatgtttattaaattattttttaacttagttcttttggaggacatttctaatcatattattt

SEQ ID NO: 165626 - DNA, 537 bp, Zea Mays
cgtgtgaggagttagtggagattcacaatattctctcttgagacattatgtaagattctaaatctgttcatcacatattcacatatactatttcctaagcataggggttcatgcttaataggatacttatcacataactttatttgaatctgaactttatttggatgtgcgttatttgtgcccatttctccacacgtttgtatctttggaaacaaattactgcagcatggtttgaacagtaatcgtttcaactgaaattttagtcaaaacaaggtacctcatttgagtagtttgttccgggaatttgtcatgccagttagcggtcaaattggctacttgatccatagtggaacgtagtcttgtgggacacctgccttcaaatgatgatctatgctattgtgtgtttctttcctctgaaaagaatacagtattcattaatttacatgtagctaggatcgtgagttcgtgacagatgtagttgccttcaaatacacaaataattgttagcacaattacacggtgacatgtcacttttgc

SEQ ID NO: 165627 - DNA, 1178 bp, Zea Mays
ttagtgcaaatcctccagggaattacaagtgtggtgcaaattttctcctgtcgagaactaccggagaaatcacgcttgatgattcctttggctcctgccgtgcatggcaccctaatgtgcccgtgccaccaacgacgcatgcccctttgagggggtggtacgggtcattggggtctgccctcgctgctcattggagatccagggtccgagcagagggtgtcaaagataaggtcgatgccgctggagccatgatggaaggcgggccttccttcaccacactgttcggagaggctcacgcaggacgagaagaaggcttacaaacatcatatgatgggttgggtcccatatggatcacaatttgtcacattattcgtcacccttggaggatgaggtcggtccttgccccctcgtcttgcttctgtggggtgaggcagaggctagcgagggctccatgacagtgtcgagatcgttgggcggaaggggtctggcttccggggccctaaccacctctccttcatcgttgatgatgaagtcgaggctcccgaaatggatggtcgtcctgggggccagacggcatcgtggtcggccatccggagcttgaagaagaaagcatcgagaacatgcaaggccctacctggcacgctaagtgttggtgtttcgaactagctctgttttgaactagctccgacaagtgaatttgtatgtgctcattctagggtctggatgatgtgctcagtgggcgtgagatttattttggttcaggcaaaacgtccctacatccagtctttggcggctcattcaaccgacaccttgttgctcaatgtttgtagtaggggttagaaaccgacgagagaaggaggaagctcccaagtatcttacacgaggaatgacataaggacaacgaacctggtgctctcaaccaaggtaagcctttggcgtcatggcgacatgatgcttagatctagtcttcgtagtcctccatgcgctctagtttggtctcgtcctaggtccatgtgtctatgcctatctcttgtcttctggccgacctctccctttttataggccaaggtaggggtcagttaccagtagcttcttaaggaaggagctaccacaccgtggtaaaatgaggtgttctacctcggtaaagtcgggcttgtctgtatgtgccttggtcatct

SEQ ID NO: 165628 - DNA, 402 bp, Zea Mays
gacctatggctgtcaaattttaacaccagcaagataataaagttatctaccacttttctatagcacatatttacagaaaacacaatttagtttatcaaacatacagcacacagaaaacagtacgtgcagtccaaacaacaatcaataaatttcagcttctatataattcaagaattgtcttgctctagagacttgaagtattctaacactttgctatttgttggagttgaaacaatcaaattaggacctacaagtaaacttactaactttttatccaagttatttcgtgcgctagaattaccacataattaacaaacacattcaccaaataaagcatttcggcacacatgtccgacatcacacaaaactacgatgaagcactactaatatttagctttagac

SEQ ID NO: 165629 - DNA, 921 bp, Zea Mays
gtcaaacagggggacgacgaggtcgagtctgtgggtgagcacatcagcctaatggcgtggaggttgggcgccgacgatggaggctaagacgagcagggcgtagggaagaggacatccaagcgtgaaagcaacggctagacctgggtgagcaagaatgggaggagtagagggaggcaggtctggcgtgcgtggctaggcgcgagcgctagtgaggaagatgaagaccggtggccctagacctagtgagcacccgacatggaaaggtgaagatgagggggcaaccccttagactagaggaagagcacaatagagaggagcagcaggggcgacgagcgcttgatagcgatggacgaccggtgcgtcgagctcgacagtgaggaagttgtcggagctaagtgcctagaaagaagaaaccatggaggagaaaagagaggagtgtgttgtgcagatgcttgggggagaggagtggcagctaggggtaggagtagaaaaatgtcccaagtgcaagaaagaggtcccatatttatagaagaaaaaattcagggtacgatttgagatattgcttaggggagaagcaaagatgtttacttagaagagatgcaaagaaattgcttagaagagaagcaaaatatggtttcttcaaggttaaggattcacttatttatagaaaaaaattctaccacgggattatccggtgcggagaatgaagataactggcgttcggacgaatggaagatcgaggaaatagttggactcaggatttgtttttggtgtcgcttagaaataaattctcacatactataagaaaataaattgacttgagttttgaccagctttcagttttgcgatcgagataatgcgagttggtctgaatttggatcagatgcagtgatatcaagtcggatagaataaaagttaaat

SEQ ID NO: 165630 - DNA, 717 bp, Zea Mays
tgtccattgttttgtcaagctctagtataaccgtaacagccattgtttcagcaggggctgagtcagaagattctccagccaacatattgagtacaacatctattcctgcatcatctagactcgctggcatctcaaaatgaacttgcctctcatcattgggaagatcacaaagagaagtaaccagggcctcaatatcttcaagagagggtcgcactctaagacctagaccactatcaccagcaggaggattggacacgaaattgaaaaaggacttaggaggtggcagattccaagcagagtaggcaacaggagcaccaacatttgatactttgcctctcaagatcatgtctagtcggatcactagatcctcagcaggaattctcctattagtaacccgagtcgagtcagtaacaccactatacaagtaagctgggtatgctctgtccttcaagggttgaatattcttaaaaacaaagtcagcaaccacagcctcggcggtcagacctctctccttcagcagacagatttcagcaagcagaaccatagcttctattatttccaaggcagtaggagactcattccaactcggagtgcgcacatctggctgtctcctcgatcgaggggggagggacttgccgtggttttccacaataaaccactcaaggcgccaccctttaatgctgtccttgagagcaatgtcaaggtattctgttttcc

SEQ ID NO: 165631 - DNA, 389 bp, Zea Mays
ctagaaaattgcgaaacaacagggtggctgagaaaaaaagatgaaggagtaagaaggggctggcccagctcgtcagccagcccacgttaccctcccctagtgtcgtgacctacatctacatggatacatcagatggagtcatggagacccccgattcccagagctgctgctcgccatctgcctagtgtgagtgctccccatccctcctcatagattgcttctctctctcaatctccagatgtgccaccacccaaaacttctccctcctgctttttcctcactgctctacaccctcagatcaaccattgctgcagtccccttccatttgactgtgatgcagcaccggagacagcagggatcgcaacaattgccctctaccctctcgttct

SEQ ID NO: 165632 - DNA, 643 bp, Zea Mays
gccaaactagactgttaactccttttaccaatcagaataaatggtgacgtgtacagctacagtagtagggagaatattccgtacatgttttggaccagagtacaggaacacatgaagaaatgatttctgaaaagtcgccagcgcaagtgaacgactcctcaaaataaccaacgtacccacaatataatgagcactacgaattgaagcagggctccaattgtctagacgcagtcacgcagatgcgctgctattttgcgacagaaaacggtgagtgcagaaaggtaagcaggttcataaattctcaaaatcgccaatacagagaagtgaaaacaagcaatacagacaaatgcactaaacctctatgaacatcaagagcataatgcaatgcggcacaaataaataagatcaaacccaagtcgacctggaaacgatgccctctgtatgtcagggaagataagggtctcctccatccttgcgtgctccagcatcacctccattgcgtccccgtaccacttgccgagactcctgacctcagcaccctctacaacgctcctccccttcccggacttcttccccttcttgaccatctccaccaccttcgccgccacgccctcgaggtgcctctccgcgctgcggtgctgca

SEQ ID NO: 165633 - DNA, 701 bp, Zea Mays
ccaaaatttagatgtgttccctgttttccaaaactcgaatccacaaagtccaaatatcaaagtggcgcctaaataccctaggaacactctgaagaagtttgagatcaaacccaaattgtttgacacgacttgacacaggttttgtctcggtttggacagtgctgacagagctatcttcaggccatcatatcttctcacccaggccatatcttcactcggggctcacacacgacataaacaccttggcacggtgaagagacgctacacaagatccttggcaagatatgcacgtttaggtcggccaacaggcgtttgaactcaggtagaatcacacttccacgtgttcgatcgcgtgctcaagcactcggccgcgcactggctgccctctgcgcgcgccacgcacggtcggcttctgtccccgcgcctgcgcccagccatgcccgagggtgcctataagtaccccgggtgcgcaactgtctgtccttcactccgcctcacgccccgagcaagaactccaactccggcgagctctcccctgcccgccatcaccgcccgagcctcggctaccgtggccagctccctccagccacttccaagccgcgccagtcactcagttagcttcgctagtggcccgtgaagctttccaagtcctcagacccggtagagcctcaccggaaacctaggatcgccctcaccggact

SEQ ID NO: 165634 - DNA, 389 bp, Zea Mays
gtagatcttcagccggttgactcggcgtggcttgacgcgatggttttagcactggtggtgttgtcaggaatttcttcagtgcatctagagcttcctgagcctctaaagtccactggaacttatctaccttcttgagcaacttgtagaatgttaggactttttctcccagccttgatatgaatctgcttagggctgccatgcatccggtaaatctttgtactttcttctatgatcgtggtgcttccattctcatgatagcctcgattttttctggattggcctcaattccccggtggctgacaataaacccgagcaattttcctgctggtactccaaagacgcatttttcaggattaagtttccatcgatatcgccgtagactattgaag

SEQ ID NO: 165635 - DNA, 605 bp, Zea Mays
cggcggcagcgcacggaggagctccggcgagccactgcaccggccgattgaagcgatgaccggcgcacccgagcggcggacaccaaatccaagctaccccgagtaattcccccaagttaattgcacaattggtgagttattctagtctgcccacgagaaccgcgaagaccatgatcgtttgatcgcgttcccgacgagtggtggtctcttagttcaaattggaggctcggtaagcatcacaggctgacaagagtgctcaaacaaaggagagtgagggatgaacggacctagaaagggctggccgtggtgagcagtttcttgcggtggcggaaacctgatttggggagaattccaaattcgcggattccagtgaacgaccgtggctgattcgtggtggctggacagcttactaccctacggagttcggggaggggtcaaattatagtgccaacgggcggtggccgcgaattcagagcgagacgcgcggcggccggaggtggaagaaagaactggcacatgtaaatccgtggctaacggcgtggcaatctccccggcgacgatgggacagccttaaggtgtcacggcggtgcagtggaaaggctaag

SEQ ID NO: 165636 - DNA, 742 bp, Zea Mays
atggacggcgggttaatttataacaagcccggggtttattttgtaattttggacggccgaaggggtatcgtgcactgtgggccacacgatcaggattcactggcctggattgaatctagtctttactgaaccggtacgcgccgaggatccttgatcacgaaatcgacggtcacgatctaatgcgcgaaggaggtatactaccgtttgatctgagccgcacaacaactatcccacgatccaaaccctatctaaccctaggtcgttcatcctgagatcaacggttctggtgctttctcctttcttccgctctctcccggtgagccgagcaccctctggcagggaatgcccacggccgcgccatatggccgacgaggtccgcggccccaaacccaaatcaaactagtctagccataaacggaactcaaggaaaacacaggggaatgatttcgccgaccgccacgcagccgaacacccccgaccatgatacgggcggcgcccgaacgacattccccgcacaaaggccaaatttgtgcccaattcgcccacgattaactacggcgagacattagctaggtaagggaatacggcgagggtaaagaattgagagctcaccgaacgcggaggtcgaattggcgctagacttcccacggtggatcaatgggtgcgatgacgaattccggccgccactggattgatttcccaccaatccatcaacgggtgatccaccggcaagcacccgaag

SEQ ID NO: 165637 - DNA, 680 bp, Zea Mays
tcggaagccggaagaagaaaaggctaaatagagtttttgatgctattgggttcatgtaccctgattaccgttacccgccacgggggcagaagagaaagagtgcaatttcgggaaggatgttgcttcagctgctccaagcgagcccgcgccgaagaggaaaaaggtgaaggttcttactcaccggtcgcgatatattgaaccggccgtagtgcccgaatttggcggtgagacctcttcggctactgaagccaaggatcctacgcctacgcagaagattgaagagccggctgcaatgccgaagacatcctcagccaaattagctgagccgaaggccgataatataggggtcaaaggaacaaagatatcagaaattacaagcccttcgacagaagtgacagtgccgaaggcacaaaaaggtcttacagcgacccctaagagcaaaagaatggtcaatgtactagatgcgctggagacaataaagacaagctctactccaaggaaaactgccgaagctccaaagacgcagtctgagacaagagtaaacgaagtcgaagttgcaaagagccaggccgagaccaaagctgggccttcagagcccgccaaggagaaatccttggaaatcggagaaaaagaaacggaaaaagaagctacagaacaaattttgcctgaaaaaactgcca

SEQ ID NO: 165638 - DNA, 496 bp, Zea Mays
gaggggtttggggctgtaaataccccactaacaggaaaattacaagaaacaagagttgtgcaaacattctcatacactagtgcaacacctccgcttcatcccaagagatcaaagtgcctcaattgagtataaatattcttactagtgaaagagaaggctagtgtgcttgtgtgatctgagtcttggtgttgtgttgtgctctggtgctattgtgttttgtattatcttgtaaaggctagcaagagtctccgagtttgtggagtgccttgcagagacaaagttttcacatctcaagatctagagggctcaatcttgatcattgtgatcgcttgagagggttgaaagagaccctattctttaggacacctcaatggagacatagattcttcgaaatcgaactccggtaaaaaagaaaaaaaaggaaaaagagcttttgtaggccgaaacctgctaggcccgctcgcctccgcccaccgctggcccaatagcgtccagt

SEQ ID NO: 165639 - DNA, 535 bp, Zea Mays
tgaggcggcagattggctaacttacgtggaggataagatgaatgtctttgagattgtgtatggtgatcgtgttcgctttggcacacagctgctgaagggagaggctcaaatttggtggagaggcgtgcaggcagtgcactcctcacccggagtcgtgacttgggatgtcttcatcaggcagtttgaaaggaggttctccccggtcactttcctggagaaaatgaagtttgatttgcagtctttcaagcaagagaagaagtctgtcacagagtatgaagtgggcttcaacaagatggtccgctttgtccctcatgtggcttttaatgagatggagaaggcgagccagttccgtcagggcctgaaaccttctatcaggcatgccttgggtgcctttccgttggtggacttccgtactatagtggagcagtcactgggtgtggagatgcagcatcagtataccatggagtcgcagaagtcttcgggtgttgatgagccacgtggccaggacgcgaggaggggcaacactggaggtcca

SEQ ID NO: 165640 - DNA, 493 bp, Zea Mays
ggccgtcatgacgtcctccatcgccctagtagcttggacagtcgtggagtaaacaaccagctagtcgcctgggctttggttggcctcgtacttgtctacgttggagaccttgaagtttggcggccactggaccgcatgcagcccagggggggtaaaggcaaagaccatgaacatgccccgggctcccgagtccatgccacgagcatggccgtgacgttttgaaagtgaacaaggtgtcaaccgggcgcactctgtgggttttaaaagtggtggggcccttggctcctttcttcctccgactgatctgaatccagacttgagtcggggaggtgtataatggagttcgccgcgttggagctaccatatcgtttggtcgaggtgggggtgccagtgtaaccctacatccgcccgatgcaacagcaacccaaggtggcctgcggatgtaatggggctcctaagtctaggcgcaagacgacaccgttctcgttgcaac

SEQ ID NO: 165641 - DNA, 592 bp, Zea Mays
agctcgcctccgctctactcttgtacgccgcagaatcccacagcgcagtcagcgcagatttaatgcaggataaggccaaagatgaaaaaatacagcagcagtctgtatatttcgtctcagaggtcctaagcagctccaaatgcaacatgacagaaatggagaaaatgtcatatgttgtgctcatggcatcacgaaagttgtgtcattactttgaagcacacaagataagagtggcaacagaccgaagccttaacgatctgttcagcaacccagaagctatagccaggataggcaagtggcagcagagctctcagggtaccacatagtcttctagtcgagaaattcaatcaagtcacaagtcatcgctgactttatagtggactgaacagcgccttcaccatctagactcaaaaacacactagacaatccactatgacggcacctggtgtcatgtgggggtcggtgcagcaacagtaatcatagccccattaggcaccaagtatagatatgccacccgactaagttttgctcttgagatagacaaatctaccaacaacatagcagagaatgaagcagtcatcctcgaactccg

SEQ ID NO: 165642 - DNA, 544 bp, Zea Mays
tgtcggtttcggcgagggcgaagaggcacactaccgcaggcggtggcgcgctcttcacgcgtcggttcgccttctccgcacatagaaaccggcgcgccaggtgcatgacatgtgggcctgggcccccatgccagaggttggaccactagttgcggcgaagatgagggggcgcactaccgcgagcggtagcacgctccttgtgcggcggttcgccttcttcgcactcgaagaccagcgcgccagctgtatgacttgtggaaccggccccccgtgtcataggatggataccccgagtgtgcatcgggggagacttctcgcgacatttcgaggcgggagcaggggagtctacctttaaagaggggttcatccctcgagtagcagccatgccttgcttctctcccactcgtggcgtcctctcgcctccgagctctctgcgcccctttgccttcaaggtctctgttttgcgttgccgtagtttgccatggccttgtaagttcatcccgagcgtgcccagactgagtgagtgctctacatggtataccgc

SEQ ID NO: 165643 - DNA, 413 bp, Zea Mays
cacaggcgggtacggcgaccgaaggggtacgagcgcccgtggaagttgaagaaggaggggccctaataggcaaagggtggtccatgacccgtcagctaaaaactatgctcgaaatatggcattaggaagagcttaagcttacttggggccatgaacttaccagtggccttggaagcggggcactcgttgtcgttgctgccgctgcccctgcggtgatgacgattggtccgtcatgggcggcggtggtggtggagtcaaatccgaaggaggtagcgttggagggctcacgcccctctgcccgtcctgggcctgaggttcggcctccttagccccaccaaccgttttctggcgcttctgggaggagcccgaatcaaggggtgggtccgagacaaaagacccatcggcgcgatgca

SEQ ID NO: 165644 - DNA, 694 bp, Zea Mays
tacatccaatagggttgttcaatggacctcgggttgctaggatgccttgcttcgtgggccatgagccgaggtaagtttcctcctctgagttcccacaacccccttcttaggctttgatattttactcccttcccttttcgttgcagggtggtcgccactaattaggcggtcgcactaccacccatcaggctgccatagccaggctcctcgtctcgtcactctttcccttaggcatctttagggagtcacgatgtttcccgtgaggcccaagaggccaccgaggtcgagctaatttgcatgcagctttttcgatgccattggtcgtgtcgttggtaaggcagttgccctcagatttctccctagaatccttgcctcttttcttttcttgtctgtatcttctggtagccttgggggctgagctagataaactgtgccatcgccttggccagcttctggactacatcgtggtccacgacactcccctggtcgagcatttagacaacgccccgtgtcacatccgggatatcatcgactttagtgttcaccggagagccatggcagcgctgttgatggcggaaatttgctctggccaccgtcttcaatacatcatcggtcttccttcgtccctttccgatgaggtggccagtcatgttttcttcgggttttggctcatgacattgcgtgtgacacgtgc

SEQ ID NO: 165645 - DNA, 654 bp, Zea Mays
taataatagtcataatgaaagtgtggatgatgctttgtctgatcttgatgatgttatggttctcagaaaaggccgcaaaattcgtcacagggaaaaaactgtgagaaagaaaaaaaaaggttagtaaatctcccaacaataggaacatccctattaagtggagaggtcagactgaagggcatacccagaattgttcagaatgattggtgtgatttggaattgtcagggtctgggtaaagaagtgaaaagtgagttcctttgggatattatcaggaaagagaaaattgattttattggtctacaagaaaccaacaagaaaaactttgatgactcttggttggacttcattagtggtaacaggaattttgtttgggtctggtctccccctaatggtaggtcgggaggtttgctggtagggtttgattctgatatgtttgatgttagagagaaagaatagggtgaatttatgattcggactctcgtgattcagaaagaatcaggatttaattggaattttatcaatgtttatggggctgctcaaaatgatcaaaaacagaaattcctgagtgaattgtcctccttctgttccaattgctctcatctaatgttgattggaggcgactttaacattcttagaaaagattcagaaaagaa

SEQ ID NO: 165646 - DNA, 615 bp, Zea Mays
atgggctcgtgcccggatcgcccgtggattatgcacaatctcaagggaaccgttcgtttttcccgcgcccgtcgccctcaaacgccggggatagatcgggatgatgtcggcaggttttccttaagataagctaaattggttcactatttgctaggagataagccggaaggctatgatcatcgtgtcgtagggagtgtcccacagtcgtgtatataaggcataggggggacatcatcattttcatctcattagcacttctccattcgggaaacaccacttgtaaacacgccacgcatataaagccaccccacaaagtagggaattacgcctctcaaagcggcctggacctgtagaaaatcgcttctctctctgtctctctctcgtgctctcggcatgaaccatcgagctacgatcaacaacaccgtcttacccaaaagcaccacaagggtatcctcgagtgtgcggtcagacactagacaccgacacacattgcgtggtatccgaagcgttagtgagcgtaacgtcccgaaggagggtacttaggatttcaagctcagacttagcctgatctgagagacgggagacggaggccataggtagagggtgggagaggac

SEQ ID NO: 165647 - DNA, 694 bp, Zea Mays
taccgcaggcagtggcgcgctcttcacacgtcggttcgccttctccgcacacagaaaccggtgcgccaggtgcatgacatgtgggcctgggcccccatgccaggggttggaccgctagttgcggcgaagacgagggggcgcactaccgcggggtggtagcacgctccttgtgcagcggttcgccttcttgaccgttggtcgtggcgaagatgaagggggcgcactaccgcggggcggtagcacgctctttgtgtggcggttcgccttcttgaccgttggtcgtggcgaagacgaagggtcgcactaccacggggcggtggcatgctccttgtgcggcggttcgccttcttcacactcaaagaccagcgccagctgtatgactcatgggactgggcccccatgtcataggatggataccccagtgtgcatcaagggagacttctcgcgacgtttcgaggcgggagcgggggagtctgcctttaaagaggggttcatccctcgagtagcagccatgccttgctactctcccactcgcggcgtcctctcacctctgagctctctgcacccctttgccttcaaggtttctgctttgtgtcatcatagtttaccatggcattgtaagttcatctcgagcttgcccagactgagtgggtgcttgacatggtataccgcttgcttggatgggatgcgccag

SEQ ID NO: 165648 - DNA, 660 bp, Zea Mays
gaaatcggacgacggcccagctagcttaacctccgcgcccgacccaaccgtggactccgcgcgcctgccgccactgtaccactggccccacacgccagctgctatggtctcgcgccgtttcactgtcgccttccgccgcaaccaccggaccgccacgaacgccgccattgtcgcgtgtcccgccagctcgggtgaccgtttctgtggataaaaaggcaatgtggccgtggactcgttcgccccatacccttccactatttccacttttcccttgccgcatagcaacagttgcgccgcctgggttactgccgtgccgtgccgccggtgaaaaccctccacgtcgttgttccaatccctgcgcgcggttgtgggtgtgtgccagcgtccgggaaatctatccgtgccctcgggacgagctgggcgaccctgaatcggggtgaatttcacgccggtgtgcgcggcagggcgggattgccacctttccgtggtcggctcactagtgtggacaatccccggtaaaaacacctcgtcccgacccgccttaatacctgttgcatgtgtaccattttaattggggtgtattgcgcacaatttggaggattgctccgccgacggaagaccccatcgcggcggcgtccgcgccgtggtctgggtcaccca

SEQ ID NO: 165649 - DNA, 832 bp, Zea Mays
aaagcaaagtttttctaagactcagtgaacatgactctggaccgcgggttgaatccgaggaaacccagggtttcttttataagacatacccgcgaaggggtattacgatgttctaatcgcagccgttcctggtgcatccgatggccaggaccaactaccgcccgacatcctattcaggcggcggtgcaagctgcatctacggtggcgcaacgccgacacgacccacgacaacgcctagagggtctgaaactctcgtcgagacacgccacacaacccaggggctaatgcgaacatgatagaagcgaatttatcgtggattatgtatcgacgatcacgggtcacgagcaatggcgggggtgaagtacggtgaacaatccgaagctgctccggtggtcgaacccgctcggcgttctcacgtgtgaaccccaagtactatggcggagctccccaccacgacttctaggctccaacggcgatgagattgaggatgggctgtagcggtgctctacccagatttgcgttcactggtggcgaggaaagagtatgtggtgataggggcacacgagcacttcggcggccacgggagaagacaccccgaggggagggcgcgaggtctaaatagtgcggccaacgcggtctaaagaatcggagccggcaaccgaattccccacaggcgcggagagaagctgttggtgccgcgcgcggagttcggtttcaggggagaagaaccagctgacaaaacgggcccaccagtcggtgtccactgccgtgacgcgcgcgcgaggaggctaggtaaatggccagtgggacccacacgccagtgtgacagcgc

SEQ ID NO: 165650 - DNA, 716 bp, Zea Mays
atgatgaaattccaacccttcaaatttgtcttccagctttcggacggctgtgcagtacttgcccatagagtcgttcaagcaatcccattctttatttatctgacttatgaccaccagtgaatctccatataccatcaatctcttaatgcccagtgatatggcgatgttcagtccgtggatcaaagcttcatattctgctgcagtattggatgctgagaataacaactgaagagcatatttaagttgttcacctccaggtgcaatgaagaggactgcgcctgccccctacagcttcagcgagccatcgaaatacatccgccatacttctgcagtctccgggttatctggtacttgttgctcggtccactctgatacgaagtcaactagtgcttgagtctttattgcagtgcgaggcctaaactcgatgtcgtgagctcccagctcgtaggcccacttggctatcctcccgatggcttctttgttgtggagaatatcccctattggaaatccagtgactactatgactttgtggtcgtcaaagtagtgacggagcttgcgtgcagttagaagtactgcatacaatagtttttgaacttgaggatatttcttctttaagggtcccaaaacttcactgatgaaatagacgggatgttgtactggatatgcatgtccttcctctgctcactcgactaccaacgcggtgctcaccacgtgag

SEQ ID NO: 165651 - DNA, 510 bp, Zea Mays
ggacagatgagtgtgttcccggtgatctaaggctacccagtgcaattgagtgggtcgatgggcatcacgggtatatgagagcactcaaacgagggagaaggcggcatgaactgacctgaacggtgctggccacgacgagctcggttcttgcggtgcggcggaccgatttgggggcaaacaacggttctccggctggggtggctaatcggggacgggagtggttgctatggcttcgcaatgacctagcgcagcaggttcggccatcaatttatagagggcttaggcggtggcgcgtgatttgatcgggcagtgcgggcggccggagacagagaagaacacggtggttgtaaccgtggcagtcgccagtgtaacggcgcaaggagaatactcctaaaggtgccgcgcttgctaacccgcagtaacaagcttcggtcgtggcacaaccgaggtcaccggcgcttccacggcgactccggtagtccggccacgtcgcagcggctataatcacgg

SEQ ID NO: 165652 - DNA, 674 bp, Zea Mays
cgggctgccgggcaacagaggacgtcatgacggcgtacttgcccattgtcctagggcaagacgcgctgcagtggctccgacacctacatcgacactacatcgacgattgggtgactttagtcatcggtttatcgcaaacttccagtctctctccgataagccggtgcagccatgggacctcaaatccattaggtgctagaatgatgagaccctccaatcgttcctcaaaagatttcaaacaatgaggaactgtatccccgaagtcgcagaggcggctgtaattgaagacttctatcgggggtctaatgactcggtcttcgtccgagccatactccaaaaggcgctagccacctctgaacaattgttccaagaggaagacatctacatcaccgcagatgaacgggcctaggacctcatcggaggcacaaaatccgcgccacccgcaccacagccggatatgaactagcagccaaataagcgctgggaaaaaaggcctcgcgcggaggtgcacaccgccaggccgcctgccgctcgagcccgaggcgcacctcgcggaggagtgcggacactggacgaaatcctcgactcctagtgtctgtaccacaaggacatgcgccacaccctgtggaactatagagacttcaaacatttcgtcgggcatggccgaccgttcc

SEQ ID NO: 165653 - DNA, 352 bp, Zea Mays
cccatttgtcctcatcgtccgcggttcacgtggacagagcttgatagcttaccgattgtgaaattaatttaggggaatcattcggggagggttcaatccggtgtatgtcgctcgggagcaccggtcgtagcgtaaatccgccagtacaacttcgccggagttcatcctccgcactgccgccgtcgtggacttcaccctgcgaagaattagaaaccggagggtctttctgtaatgtgtcagcgactcactgaaacagtggaagaacctgtctctagttagcctgaaacccgagggcccctgtgcaaagccgccagagcgcgcgggtgcgggcgcgcttctgcttagatctggg

SEQ ID NO: 165654 - DNA, 879 bp, Zea Mays
ctcttcacaagtgtgcagaagttgctaggaagatagattttgcatgaaacatatttacaaatgatcgtcacagtaactcaatttgctgagcatatattgcacatagcaactaccagtcagaggccgtcaaattgggaacaaaaaaaatgcagaaaatagctggtcggcctataaccttgttaattaaaattgactaggcaaaatcagcttcagctcgtgactgtagctttgtagtttaatttaactgggtaatcccagggcacaacacagactgatgtagttacatgcggagatgcaagtctgtcccaattctctctttgttcagttgccctcttgtacttcctcagagacagagagcaatgcttattcggtacatagggcttccaagaattttatcaaatatgtataagcatttttgtacccgtatataaagtgggcaaggccaactgctgggagcattggcactacacgacagtgaaggaactacttcagatgaagtgctgaaactaataaagctaagcatacgaacaattgtttcattagatgaaaatggtagttcacaaatcaggatggtgccattgtatagtgcagataactttcatacaggaactacagcaaacacaaaggactagggcaattaacctttataaggtcgacatgcagagagggagaggagcaagagggcaacctcattattttcatcgtctgatcactgtgtaaaaattctgaatctgtggactaaacttgaattctagtttagaattcaaagttcccaatctgttacataactatggtagtatgactgtacaaacagtatgagagggaaactacaggctcctgagcaggtaggtgggaaaacaggtgaatctgaagccaatg

SEQ ID NO: 165655 - DNA, 528 bp, Zea Mays
tctggtccttggaggtacacgcacgcaagtaaaccattccaaatgttgctacgatggccttataggagtgttttagggcctcatgtgtagtagactcgttgatttggatgtactcatacatgacatcctcagggacaccatacgcaagaatgagaatagaggccaccaccttctagagtgcatcgagaccaagttgactagtgcagttaggtctctgcacgaagttggggtccacatgtcggatgacaacaacaatgcgaaggaacacatgtcgttgcattctaaacctacaagagtcatgcagacaataagtaatggtgtacacaatataaacttgttggttggtgatttgcacgtgtaataagccaccttctctgaaatcgagcttctatgtacaccggcatatcggagtagtccggttgaatcctcgtgtatctacttaaatgatcatgctctgcactcatgaaacctagaatgaaaccgtggcaacgacgtgacaagcatatgccatctgcttgaatgaaggcc

SEQ ID NO: 165656 - DNA, 656 bp, Zea Mays
agggagaacccactcggacacccttgggggctgggtcacagcttgcgctacccatccgagccagatcatctccggcaacaccctcgagggctgggtaagcgccagcaccatccttgagggccaagttctctgcaacagccatctctaaggctgaaggaccctcagtcacttccgtgggagcagtgcaatccagcccagcctcctgaccctcaagaccgcgctctaaggtcgatgaggcacgggacgctgcccgggatgaccccaacccggcatcgggcacatcagcacaaacatccatcgcgataccatctgccggctctgacaacagatcttctggaaccatgtcttcaagagtctgatcgaagttcgtcagagataattcttgcagaccaatgagggtagacaaagaaggagaaggaacaccactactttccccactagctatgtaacgccggctgttcttccgaattagagggatttcatcctcttcttcatcatcttcatcaacaacacggacagtacacccattggggtcatcttcagcaggatcacacccattggggtcagcagcggtcagatcacgaccatcggtttcagctttagtaaagacaggcactggcacttcctcagcagcaggaacagaaggaccggatcca

SEQ ID NO: 165657 - DNA, 1076 bp, Zea Mays
tgctcacccctaattgattggatggtgttaggatcaggatgagcaggggtacgataatctatggactatgcctggctgtatgtggaattctatagtagaaagagattatatagctagggtttcatttattttgggcaaggccaagtactcaagtttatgcattttggctaaatttgtactggatattttatacccaccgggttaacgagtatgggtgatgtcgggggcggtaattagggacaccctgattatccccctaacgaacgcactcagagaaataagaaccaaactcctgaagggtgacagccgagccacctacaaaaaaaccaagacatcccttgaggatctcccacctcgagcagggctccacctcacccgaggtcgacaccactcgctcagcctcgcccgaagccgcctcagcccagtccgtctcgcctgagctggcctcaagcgaataggacaaggcactcgaaaacaggtaggggacatgcgcatttaatgcgtgtgccaacccgcgctgtggcagcagagcacagtggcggacaatatagcaatcacgcccggtgtagtgttatgattacgcctacatcacagtgcacgcacgccacctgacgccctccgatgggacgtctaacacgacaagccaagcggacatgccttcgggcataaccgctccgcctcgcccgaccctgggctcaaccctcgggcaagttctccgcctcgcccgagctcagtctcggccaccgactgcaccacgaatcctgtagacagccactacgcccaactgtagcgcacgttgagagacggctcggctagcgcctcgagaagacttctgcatcaaccaagcagggactctgatctcgatgagtgctgtagggaatctcgacgtcatcatgcactaggacgatgatgcgccctgtaagcagcctttagcccataccccaacgctgtttacaaccactacggcatgggcgacctctccctcgggggctcaggcgtatggacaaccgctcggcctcggctctctacgggaagtcagcaggcatgaatctactgcatggttcgccatcacatca

SEQ ID NO: 165658 - DNA, 417 bp, Zea Mays
atataacacaacaaaagattaacatcgaactttacacagatctatataaaaatattagatttgttctataatagctagggtatcctctcctatctaaagtgtttgtatccagcatataacgtgctttcgttccttgccttcgtgcttgccttctttgtcatattgattcttgtttttttgggagatactttttattctctttcctgtctggccacagtatcgctgcatgcggtaggctacgcctgaaccggcgcatcgtccaaggccttggcaggctagctggcaggcagcaacgtgtacgtggcttcctcctgtgtggtatggcgtgcccacattgccagcctttgtccggccgactgcacgaagccacagagaaagcgatgcatctagcgtcatcctcgtgcaccgttagatttt

SEQ ID NO: 165659 - DNA, 975 bp, Zea Mays
gagttttagagccgatttgagcttgatcgagtgagcggatgaccaaggtccctatggtcgaattggagcctgtatataggttaataactttgttgtaattcggtcggtaacttgtcaagtaaaaattgaagaaaaacacctctgaagatgctctgtcagaacaactgaagaagatcctgatggtacagtagcgaaaagatcttcagattcagtgtatctcgccgctggtgaccttacgcagcgattgacgccggtcgtcgcgattcgtgcgccctggtttgcagataacggctggcggtgaaggatctcaacgcagggaagggtttgtgatgtttcaccatgccacttgccacttgccacacgcagggattcgtgccccctgattattcaccatgccacttgccacgcaattaactgaggtgtccttgccggagttcgccgcccttcatagccgcaccacaaacttagaagagttactacgtcgcagtagatagccgtaggtagtctgtccatcgcttgagacattgccccggtgaacgccacggtagttcgcgccggtgactcaccccctctttcggccgctggtctcccccttcaaaatttggagccactactctcggacgctataaattgagtgcgctgctagctccgctaggttgttacgaagctagagcacccaccctgccctcgattagccaccataaccggagaatttcgttcttcccccaaatctgttgtccgcaccaccgtgagacgtcgcgccgtggccagccatctctaggtccgccctcgctctccttgtccgtgttttagcacccacacatgctcgtgatacttatcggctcaacccattgagctaaaccacactcaatcgaccggaacaccttgatttgtatgcggtgttcgccgtcaccgttggtgggagaatccagggcaggattggttcaattgaggcatgttttatgttcgcctcgg

SEQ ID NO: 165660 - DNA, 486 bp, Zea Mays
ggaaagggctaatggaatgatattggaagcactcaggaagaaagtcttcgacaagaatgaaaagtttgcagggaagtggatcagagagttaccttatgtggtttggagcctaagaacttaacccagtcgagctctgcatggaaacacccccttcttcatggtctatggttcgtaggcagtgctacctgccgacctcaggtttggggcaccaaggctggtcttcgaaagcatagctgaagcagaagctaccatgctagaagatattgacgtgctggaggaagaacggttgaatacagtaattcagtcagctagataccagcagaccctgaggcgctatcatgataaggctatacaacatcgatcttttgtagtgggagacttggtccttcgccgaattctaacgagagaaggacggcacaaattgtcaccgctatgggaagggccattcgtggtatcggaggtcactcggccaggatcatatcggct

SEQ ID NO: 165661 - DNA, 513 bp, Zea Mays
tttggatcctagagcttgactcgccgccaggtgggaccaccacgacagaaccttcttcacctgcgcggactccgcaacgaacgccgtcgaagccgcgcgccatccgcaagcttcggtaccgtttaaccgctcagtaccccacctcgcctataagcattgatcccacgaactcgtccgctcgagcccctcttgctttcctgccatcgccactccgcgccagctcttgcaccgccgcgacccacacgaacaactcttcgttgccgtcgacccaggttatcagcaccggcgaggtctcggatttgggcctgggcacttcgggtggtcgcacgggtggtgtgcgtgctcttcccgtgggtgattgcgggccagcgacaccgcgatttctcgtcgtagttggaagaccgccgtggatccacgccacctcgtggacagagggtttctcaccgcgaatcgaggtaagattcagtgtcattccgttcgttttcccctcggtgtggtatcgcacgattcaaa

SEQ ID NO: 165662 - DNA, 429 bp, Zea Mays
tgacaggaggattcgacacaaaaagggtgaaggctttgggaggaggcaggttccaggccgagtatgccactagggcaccaacatttgacaccttgcctctaaggatcatctcaagtcggttcaccaagtctgcagagggaattcttttgttggtaacccgagttgagtcggctaggcctcgatacagataagccgggtgcgccctgtctttcaacggctgaatattcttgaagacaaaatcagcaacgacagcttcagcagttagacccctctccttcaacaatccaacttcagccagcaaagcacctgcctcagctacctcctgatctgtggggggctcggtccagctaggggtgcgaacatccggctgtcttcccgaccgaggggggagagagtttccataattctcaactatgaaccactccaagc

SEQ ID NO: 165663 - DNA, 271 bp, Zea Mays
tgcagatgcattctgacctgctgaagaacctcttgttgactgttgagcagattcctgagatctgggattgtgcactggttaggggaatcaagtccaaagtgtgtaggtaagtgaccatacaagacctcgaacggtgactttccaagagcggaatggtagcaggtattataccaatacttagctagagacaaccatgatgaccactgtttgggacgtgtgtggacaaaacatctcaggtaagcctccaaacactggttgacccgttcggttt

SEQ ID NO: 165664 - DNA, 632 bp, Zea Mays
gaaaagcctcaccatcgcgcctggaccaatatcacctatagcccactcagcctgcaaacctgcatgaccctgcaccgacaggtgtgtcccacttgtctgtctcccatccccgcattccagccttggtccagtattcgcatgggtaagaagcaatcacttccagtgggccatccccgtcagtttcttcctccctcgctcgatgttgccaaactaacgaatgtcgcggacttccctcggttagcacaacaaacccccatggacttcgggatttcctccaccaacgtcgcgcttccctgactccctcgcccggaaccataaatagccggccctggcgcctcctattgaatctagccattagcagccccaagttagccacgcaagaagaaagagagagggggaaagaagcccatcgctggttttgcccaggtcgcgtggtgctctgcggtgcgatctgaatggtcggccaagcgctgtgaacaaatcgaacgaagggctggggtgttggctgggcgcggccaccttcggtgctcgtgccgccatgggcagcattgtgagcgcggggaaaagagctcatggggatctcatctgtaagctacttgcctcgtcggggtcctgctgtcgggttgaggagc

SEQ ID NO: 165665 - DNA, 823 bp, Zea Mays
tgtatagtttataatactctctctatatcaaaataaaatttgttttgcttctttagtggatttatcatcgctgtcacaacccaaccaagttatcgggcccacgtacaccaatccttgccctcaaggcctcggctagatatgtaagtggatcgaataacttactcgaggtgccgagtttcgatgaactcgttcatttccaaggaccattcacgcaaagttgcaaatattacaataaccaatccagaacataaactttaaaaaacaggagttgagcggaagtgactgggccgaaaccgacccgctcggcccacgaacacatgagaaaactggccccgcgccatccgcccacgccagcgctgtgcaattttgcgcaattacccccgttgcatcagctaaccgaataaaggtcctatgtcatatttgattgtttcactgacattagcactaagatctctgtctttttgcttattaacaaactcaagtccacgatagtgactccggcgaccctaagccgggcacgaggttgcgcgctcacgacaagcccacgcaggttatctccggcaaggatttgcattcttaaacgtcacccgagcccggcccgacctaacccgtaagcgaatcagattcaaatagtctagactgcccagatcacggcgacgacggacattgggatcctggtagggtaaccagaagagtttgaatacggtagcatgcaattcagaaatacagaaagcctcaccggtgtacaaaaaagtcatggtgctcacctaaacttgtctggagaaactgtgagcagctcggtcgacgatggggtggtccacaa

SEQ ID NO: 165666 - DNA, 729 bp, Zea Mays
aaatgttccaaagaatgaacttgaatcacatttatacccctgagataccaaaaacccccattggaaccctggaaaaccctaaatgtaaaccctaggggcctttgtgcaaaaactgtgcacatttggaccaaagtgtcaaaagtactatgcttaagcttataaagtcacatggttcacatttgggaagatttacaagccaaaccctaagttttggacaaatttgcaaaaaagaccccaattgtgattccactctaagtctgaaaaacagtgttatgggctcaacttttgagctttgtaactttcaaactctagggttttgccccaggccaccacatccaaattgtagacctattaaaagggaacaactttgctgaagaggttaagcattgttgttatgaaaaattgggagataattaagcccaaagttggactgtcaggctaactgatgactgaaacttggtctgacagtaggattacctgaacttggggctcaatttcaaacaagatcgagccagaatttgcttgaggttactataacaacattatagccagatcttagggctataactttgctaaagagtggcaatcaagttactacacaaaactggaagttattggttctgcaaatctctctgtcaggctgtctgacgaacactcgccatggtacagtgtcccgagatgatcaaaccgccagcactaaaaagatctcaccgtcggtgactcgccgcc

SEQ ID NO: 165667 - DNA, 350 bp, Zea Mays
tgagccgtaagggtcaagtgaacaacatcactactcatttgatgtcacaagaattgtgctgggaaatggaacgactcaaccttggatttctcaataatgtagaagcaatggtgatggaagttgaatctaccttggaagaagagattcgtaaaggacaagaatctgatgagaaaattaaggaaattaaagctttgattggtttgggtaaagccccagatttcacggaagatgaacaaggcacaatatggtttaagaagagaatctgtgtacccgaaattgaacacatgcgccaacttattttgagagaagctcatgattcagcttactctattcaccctggaagtacaaag

SEQ ID NO: 165668 - DNA, 612 bp, Zea Mays
gcgacatcttcgtctcgttctggatgctcttaggaagaatcaattctatggcaagttgaagaagtgtgccttttggctttctgaagatgcttttctatgtcatgtgattaatcagcatggcattgcagttgaccccaagaatgtcattgttgtggtggagtggaagagaccttctagcgtctcagaaattcgaagtttcttggggcttgctggttattatcggcgttttgtgccaaacgtttccatctttacaaagccattaactaaactattggagaaaggtgttccttttgcctagaccaatgattgcgaagtcagttatcaggcattgaaggatgagttggtgaatgctcgtatcttagccttgcttgagagtggtaagcatttcacagtttatgtagatgattctcgtattggccttggttgtgtgttgacgtaggaaggcagggtgattggttatggctctagacagttgaagaaacatgagaggaattaccctacccatgacctcgtgttggccactgttgtgtttgccctgaaatcgtggaggcattatctttatggtgagtcttgtgacatttacaccgatcataagagtatcaagtacatttt

SEQ ID NO: 165669 - DNA, 446 bp, Zea Mays
cgagtgcgcatgcgctggtccacggcgggcgcaaggaaggcggatctgacagggttggcccatggcgcagagggagaaaagagggacgctcggggcaacgactcgacgactggcaatccgggcccacgagacagagagagagagggagagcgagcgggtgaagtaactgacaccgataggctgggtccactgggcagcgagagagcgagggagagtgggcgctcggggttgcgccgataggtggggctcgcctgttaggcagagagggcgcgcgggcgcggacacacgcgggccggccttaatgggctgccttgggccgaattagctttttctatttccctgtaatttctaatgccttttctatttattttctctagggttttcaaatccaaattcaaactaggtttcaaattcaaatcaattcaaacttgtgcaacacttcaaag

SEQ ID NO: 165670 - DNA, 521 bp, Zea Mays
tggggattgaggctacttggccgtaagaagctgtgctttcaccgtgcgcaatcgatttgggagaaggtggaggggacagtgcaaatttaacttcgactgagcttcactggtggagatgaaagcacctcgccgtggctccttgctcaatttataggcacggcggtccggtgattgttttgcggccacgaggtgggctgttagcgcatgtcgaccatgtaagaacgaagcacagtaagagagatcgacgtatggcgacagcgcggtggacaacgctgagtcacggcgaccgccggtgagtaactccggccgcatgcggctgggttcgcggagtcgtgccacgtacgagttacccaactccggcgttatccgttccctactgcccacgaacccggacggcggcggcacgagttttggcgcagagaggtcgccggcggtgagtcggtctgatccactttggttactgtaccatggcgcaccttcatcagtcacctgaaccgaccacctccctcccacattatctc

SEQ ID NO: 165671 - DNA, 562 bp, Zea Mays
tgaacacgcaggccaaaagcaacaacgcaccagtccaacccaatggttgtttcaagtgcggtgagcttggccattatgctaacaactgcccaaggcgcaaccaacagacacctcagaagagcaacaaccagaggaatgaccagaacaaccctgctcgtggatctgcacagaacaagactccacagaaccagagtagaggaagggtcaatcacgtcatagctgaatcaatgcataaggatgccgacgtggtgtatggtatgtttcttatcaactccatacctgcttcagttttatttgactctggagcatcacattcatttataactgagtcattcgtggaaaaacataacataccaaagcaccctcttaagaagatgttacatattagttcaccaggaggtgacatgaaggccacacattcatgcctccatgtcaatcttaagattcaaggaatagattttctagtcaacctagtggtcttaggatccaacggtattgatgtgattcttggatgcgactggttgaaaagttgtgatggagtgatacaatgtgccaacggaac

SEQ ID NO: 165672 - DNA, 589 bp, Zea Mays
ggattacacccattgggttcagcatcagtcgggtcacacccattgggatcagcatcagcaaaaaccggcactagcacttcctcagcagcaggagcagaagggccaacatcctgattcaagcatgacactcgacgaagacgtctctttttctttttcttcccctcagcaggagaagttggatgattggttcggcgaggacgcttcgggcgaacactatcagacctctgaatatccaaagctttgccatactcgaggatgggtgctacaaccagtattttagcagggctgcatcagaggaatcttcagccaacatgtctagcatggcacttatttctgcgtcactcggattcaaaggcacctcgaaatgaacctgcctctcgtcgtcggggatttcgccaagtgaagcaaccaaagcctcaacctcttcgggagaaggtcgcactctaaggcccaaaccgctatcacctgtaggaggatttgacacaaaactgatgaaggccttggaaggatgcagattccaggctgagtatgcaacaggagcaccaatattagacaccttgcctctgagtatcatctcaagccggctcac

SEQ ID NO: 165673 - DNA, 344 bp, Zea Mays
ggattgtggcgttcggagccctgcccacggtgtggcgcggaatcacggcggcgcagcggctccggttagcattcaccgttgccctgatggtcgaaccctgccgccgagtccacgaacgacctcaccaaccactcgtgatgcaccctgacccaagaggagattcccaggcacaaggtcaccggtgtcggatacgagtttctctacctatggcggtgcacagtggtcacgaggcatggcccttcctttatacgcatcggggagggcgatttccagccgaggagtccgtggcgggcggcgcgcgtcgtcgcaacagatttcccaaagaagcggaggtggatttggtg

SEQ ID NO: 165674 - DNA, 916 bp, Zea Mays
atctgcccaaggaagaatgaaatgctgtattataccaatattcagtcaatgacaaccactgaatccattttgacgggcaagcatggacaaaactccgaaggaaggtctccaaacattgattaacgcgttcagtctgcccatccgtttgagggtggtaagatgaactcatccgtagagtagtaccagccaaccgaaacagctcttgccaaagtttacttgtaaaaatctgatccctgtccgaaacaatagaatgtggcagtccatggagccgataaactgaatccacaaataattgagccaccttaagagcagtgaatgggtgcgacaagggaataaaatgagcatatttgaagaacaaatcaaccaccaccagcacagtattagcaccaccagatcgaggaagaccctctataaaatccatactgacaatctgccaggcatgttcaggtaccggcaaaggctgcaaaagccctgggtagcgattcctgtctggcttagcttgttggcagactgcacaattcatgacataagacttgatttgagttttcattctagcccaagcaaacaactgtttgatacgacgatatgtcactggaaaacccgaatgtgcacccattggactgtcatgtaaggctctaatcacctggagttgcaaggtctcattagcccccagccagactcgacccctgtacctcaaaatgccttgagacaaagtaaaattaccctgagaatgcccagttactgacagttcagacaacaattgttgcgcatgggcatcactggaatatccttccaccacttgagtcaaccactgtggtgtacctgatgaaatactgaacagcgaggattcactttcagacactggtcggcatgacaaagcatcagcagccccattgtcaacccctttttatataca

SEQ ID NO: 165675 - DNA, 596 bp, Zea Mays
ggccgtatcatatatctggtgccgaaaaacgcccttggaacggagaaaagcaaggtcgcggtgaagtgtgagcagcctctcctctagtggttctgctgggacgacaccaccagcactgcagtaccactactagttagtaagtacgctgctgcacacaacaatattcttttttctctccataatactacaaatactgcagtatcaatgtggctgtccctcctcttttccgctgatggagttgagatgttctgcactacttttccaccccgaatccggatggcacccgtaccgtagtgcttgtatgccttctttccctttcttctacttgtacctacatgctactacaggtgtactacgtattttgctccccccacttggttttgcaagcaagaccagcgtaaaagcagaggagactgtcagattcctctttcgctttattctcccgcccagcctcacacacacgtagttagtgttgggctactcacacatgacacaacttcgcctccctccaaatacccagagttttgaagcagggaggaaggaagacagagcagaagcagagcgctctccgtctccggtccagtatctccgctcgc

SEQ ID NO: 165676 - DNA, 395 bp, Zea Mays
cccgtttttatccctaagtactatcacgacacacaccaatactacaagcactaggactaaccttttttccaatattactggagcaaaggtatgcccaagcttcccactattgatgactgccctgagtgtgtagagccttcctatcatgaacattgaacctttgtcttccaatgtctcgggcatgcacatgcttactcgcaagatccagactgagaaacactacgacatcaacaatcaatcaaggaggaggaagaccacgagaagtgtagcaaccatagcggtgcctagacgatctcccacgatcgtagaagccctaagtgcaacacatgagaagcttggaacaagcgaaggatgcctatctccatcttctcaagaaggttagcacatgcctcgcc

SEQ ID NO: 165677 - DNA, 783 bp, Zea Mays
cctttagagagagagtagccatgttcatccgggctgtggacacacaaccgagccagaagtgattgtgcagccgagtcagtcacataggaattcgtaacttcctggacccagagaggttgaacttcactgactgctgtcaatgccatcacacaacccacacgctacagagcatcagctactttgttctctttaccctgctagtagatgactttgaactacagccccataagctttgccatggctttacgttgcaactccgagtgaagctcctgactacccaagaagctgagagccttatgatcagtctgtatttcaaactcgctccattgcagataatgacgccaatgatccacagccataatcagggcaatgaactccttctcatagatcgacatcttctgattggtaactcccaacgccttactcaagaaagctataggccgcccctgctgcatcaacaccgctcctaccccatcatcacaggcgtcagtttcaacagcaaatggtatgttaaaatcaggtaatgccaatactggagtggaaaccatggcctgcttcagacgctgaaaagccagttcagcttctggtgtccacttgaaagcccctttctgcagtaacttcgttagtggccgagcaattatcccgtacccttgcacaaagcgcctatagtaccctgtcaacccagaaagcctctcaaatccgtgacattcagtggttgcggccacttgagcatagcttcggttttctgagggtcagtagccacaccctcaccaaatataatat

SEQ ID NO: 165678 - DNA, 692 bp, Zea Mays
gtggttcccattcaccccctttggtcgtgtcaccggtccttcaatcggtatccatgctggttaaggacctttccaccttaatcagttttagatccatgaaggagacatggaatgtggtgttgacaaacctccattctttgatgggacaaactacccatactagaagattcacatgtatgtgcttcttctaagtattgggtatcgagtttgggagatttgtctcaatgttgtgttcgatgccagagtgctggatcactctaattcagttggagttccattattcaaccaacaaggctcaaaacgctttgttcttgtgtctctctcttgttgagtttgtgcgagttggacatttggctatggctcatgagatccgatccacccttgagagatttcatgagagcaatgatcatgtaaagacaacactctttgagatgtaccgacaagagtatgaaaactttgtgtagttggcaggagagaccatagacactatgtttctcagttccagtcgattatcaaaaagatgtgtgccaacaaggcacaacttccctatgatgatcatgagagagcgctaaagttgctacatgctctagatcgatgggtttgggaggtgaaagtctcgacgatcatcgagtcacccaactatgagactctcaccttcaacaagctattcaacaagctcaagtccactgaga

SEQ ID NO: 165679 - DNA, 452 bp, Zea Mays
gttcgccagttcgctcccccctccctcacaaagtctcaagacgtctgatggcccctgagtagtgtaaatgtccaagaaacaaacattctctttcgagtcatattctttccgcggaaagcaaaggggtgacagtgaggggatggcgaggcgcaaggatggctggggcgacggcgacaagatcaagattggtgtctgcgtcatggaaaaaaaggtgagcggttggacgttggagaaactaatgattcgatgcttgtgtttcttcttgctaatttgattggttttccctgtggaaacttcgtaggtgtcgtgttctcccatggaacagattcttgagaggctgcgtgcgttcggcgagttcgaggtatggctcagaaatgtgttttcccggcggattatcctttgcgtccgttgcttttcttgctgattacttgtttgtgttttttaaataaaca

SEQ ID NO: 165680 - DNA, 334 bp, Zea Mays
ttgtcatgtacttacgctgcttagtgggtgatcggccaaaaacttggttacaatggcttccatgggctgaattttgttacaatacttcataccagtctacagtcaagtgcaccccattccagattgtctatggccgggaccctccaacaatgctttcctatgcacctgggacgaccagagtcactgcagtcgaccagtaactcgaggaccgagatgttttcttggaagacatcaaacaaaggttaattcaagctcaagtgacaatgaagcatactcaggatagtggccgctgaaatgtgcaatatgctgttggcgattgggtttggctttgtct

SEQ ID NO: 165681 - DNA, 714 bp, Zea Mays
aggggatcaactttttagaagactggaagaaggaatcagctcggctgaatgcatgtctgggaaacaacgacagcctagaagtcaaaccaatgttagaagacctcatatgcaaagctcaacgtctagacgcagaaacaacaagacttatggcaaaatctcgcaaagaacaacttccggacctcaagacagatgaacaaggagtcctttggttcaagaaccgtctatgtgtaccaaaaggagaggcacgagaagtcctgctcgatgaagctcacaactcagcctattccatccacccaagaaccaccaagatgtacctagacctcaaaaccagatattggtggagagggatgaagaaagagataacacagtatgtggcccggtgtgacacttgccaacaaacaaaagccgagcaccagaaacctgcaagcctgttgcaacccctcttagtgcccgaatggaagtgggaggaaataggcatggattttgtaaccggactaccccggacgcaaaaagggaacgactctatctgggtaataatagaccgcctcaccaaggtagcccacttcatcccagtgaaaactacctttggaggagccacccttgcccggatttatctcaaagagatagtcagactccatggcattccaaggaagatagtgtcagacaggggaacccagttcacctccaaattttggatgagccttcagcaagcta

SEQ ID NO: 165682 - DNA, 473 bp, Zea Mays
cgaggctgatcaacacccgaagacttctgcgactccatggtatactggtgttgcatctccacacccagtgcctgctccatcgtggtacggaagtccaccaacggaaaggcccccagagcatgcctgatagaaggcttcagaccctgacggaactggctcaccttctccatctcattataagccacatgagggacaaagcggaccatcttgttgaagcccacctcatactctgtgacagacttcttctcctgcttgtaggactgcaagtcaatcttcattttctccagaaaggtgaccgggtagaatctcctttcaaactgcctgatgaaaacatcccaagacaggactcctggtgaggagtgcgctgcctgcacgcctctccaccaaatttgagcctctcccttcagcagctgagtgccaaagcgaacccgatctccatatgcaatctcgaagacattcatcttatcctccac

SEQ ID NO: 165683 - DNA, 820 bp, Zea Mays
gaggggcgccgggctctaccgggctggccatatgggagcaggtcgtgccgtgccagaccacgtgcctggcttgcggcccaggcacgacctgctccactgggccgtgccagcctgggctcatccctcacgtgccgggctgggtgtgaaccgggccaaaaaagggcctcgggccgagttaacgggcccgtgcttcatgtactactatacgagcagaccacaggggaaaggaggttgacctagtaccaccgagcaacgtcagcactataaaacaaaccatcactaaactacatccgttctaggggaacagtgccggagggcctctttcaaacacgaccccaacacgatctcagatgtgcccctgctaatcggttggacccgtctaaaaccggtagtagggacctcagcatcggagcctctacagtgaccggaatacctgaaagaatgagacagtacgccatactgggtgtatgccaacgtgtaccgaaaggtgacgcaagggtcatgacgaaagatgaagttgtactgaatacaaccctgaggccactctttgggtctcgctgggtaccgccacgttggcatcagacaagctacagggacacaaacgcggggtagacaagacgagataccatattaagaatacagcagtgcacgcccctacggacgatgcaaggagggctaaggcaacctaggacagcagaccgaactcctccatagatagatgctagttctcactgtaaagtatacccttgagctataaaagggcaagccaacccccatcttcgacacactagcactcaattgcaatactctccaagcaata

SEQ ID NO: 165684 - DNA, 1451 bp, Zea Mays
aattctggccgctagatcgaaaatctctggtcaggattttaaaacctcgctatcggactccatccgccgacccgacgatcaacagcccagatgagctggggtcgaaccggtatggagccccaaatcttggccgttgatggacagatcaatggtcatcctagccttccctaaatcgggcggccagacagcggcgcaccggcagcgtcgtgactccccacgacgacgccccgccgaagaggccataatcgtgtcccgagggtgcaaaattatatcgcgcacggtgctagacgaggtggaggccatgagatacaacatggtgagcatcataccgcgattcgtgtagctgtttcaccacggccacagtcgatggcggatctgcggcggtggtgagctccgatgagaaattcccctgggttcggtccatcagcccgctccgccggatagaggaacaatcatgggcgagtctcaggggcggtggcccgcaacgacgttgcatcgaacggcgacggctgcaccccgccaaaacaccgtcagccgccccagcgacttgcttcttctccctgcgcgaacacggcacggtgggacgagcggcgagccccagcgtcaacagccagcgccggatcctggagcgccatccaccccgcatattcccagatggcggccatgccagagctttcccccatggccggcatgctgttgacgacgaacgaaggagttgcttttatctggtgaccctagctccaaattttctcgtacgacgctggctactgtctcattgacttcaatagcgcaggtgatggttcggctgctcatatatatacttgtggacgggaccgattccgggcgctctacgggcaggacgtccgacggttacgcggtgggtctgttacgatctgctatagcgccggtttgttacgagtctacgagatgtctcgatgtggaagaaaatatctggagtgtgggcccctggattagagatgtacaacctcccggcttggacgcacatgcgagaggttgaaacggacgaccacaaacttcagcccaattggaaatgaaaataaaaaaagaatagatgagaaggtgtggagaaaaagaagtgtgggccggtttgagattatcttttcctattccatttaatcctttcttttctattttcctttgtgtttccatttctaatcttaaaattcaaatgaaattcggatttcaaatttgcacctccatgcaacaaccaaatatccagcatgagttgtttgtcaaatatatttgtgtatatatattaattattttgtttattttgacaaatgcctcaaatatgtagtgcacacacataattattttaaagtaaattctaatgtgtagtgtttattaaggtatactttaacttaaatactcataggatattcctaaatgagaaacgttaacatggaataaattatcatataaatacctct

SEQ ID NO: 165685 - DNA, 602 bp, Zea Mays
caccaacttgctcttcaatgactgataactgacctcacaatcgccggaccagacgaagggaacacccttctccaagagcctagtcaaaggcttagcaatgctggaaaaatttggtacgaagcgccgataatacccagcaagccccaagaaacttcggattttagagacactagaaggtctcttccactccaccacagctgcaacgttcttgggatcaaccgcaataccctgctgattaatcatgtgccccaggaaagccacttcggatagccaaaaggcacacttctttaacttgccatagaattgattcttccttagggcacccagaacgagacggagatgctgttcatgctcggcctcggtctttgaataaatcaaaatatcatccaggaacacgaccacaaaatcatccaggaattcatgcaacatcctactcattgcttccataaaggtagcaggggcattagttaagccaaaagacatgactatgaactcataatgcccatacctggtgcaaaaggcggtcttctcaatatcctcctcacaaatcctcaattgatgataaccggagttcaaatcaattttggagaacacctgggcac

SEQ ID NO: 165686 - DNA, 565 bp, Zea Mays
gcgccaggtaggggtcgaacctacggccttctgcttaggaaacagacgctctatccactgagctacaagcgccttaatgactctaaatgatcatcagattataagactgcgcttatttttgtcatgctggcagaggagacagtgtggatgtcctgaaaacgacgaaacggtgttcatcggcacgtctgctagattcaccgggaacgagcatcctgtgacactgacacgcggggcatgtttgattacgtggcctgggctagacaggtttaggttaatctgatagccagggtagctgaaatctagctgtaacaacgcaatccagtctcgttttatatatgtgacatttactggattttgttcgttacagtagtacatgccgttttacgcgttgtgcaggcgggcaccatgcgtgcttgtaatcgctttaatgatttgtttctttttgtttgttgctattgaatagaaaaaatagctcgatggcctttttctagtatatatacattttttgaggagttgagaacagctggtagtagatggcttgatgattacgacagcgtaccgaata

SEQ ID NO: 165687 - DNA, 460 bp, Zea Mays
ggggaactggcggaccggggttaggctttgctactaaggatgggagtgtcgctcgctttgggaaggttggtgagtgtagtggtttgacaccttcagagaaaccttcatccactcccaagcttatcaaaaccacctttgctaagcctgtcacccctatgagagatggtgtgattgatgaacctatgagagatcctcctcagaaacaagtgtggcttccaaaacctaaccatcttaggaacacacttgacacctttcccgacatctctagcaatccccttcctagagcccctcagccatctgaaaagaaaatcctcttccacaaacaaaatccacccaagagaggggtgaggtaccattgtgaatattgtgagagggatgggcatctagcttctttttgctttaggaggaagagagatgagcgacgggtttctgagtcgagcaggaaggacatgaaccgccc

SEQ ID NO: 165688 - DNA, 1256 bp, Zea Mays
caaattcagggtgctacaggcccctggccatataaataacacgtaaagaatctctaagcactattcacatgtctctctgaccaatgcacttaagcccctggatttttatttcttcaccaaacaagtccctggcgacggcgcgctcgtccgccggccaccccctcgcggggattcaattcaaatggcgacgaccaacgaaaccgagtatcagatcatcatctccgatcccaggcgagcctagttcatgccctaattgaactaatctaacccggaattcccctgcccaggacgacggtgaaaaccgaggacaggccgagttgttctcgacgactaagcgtggtagcattcaattgctcgagtctacgagcaacaggagaccctaaggatgctagaacatgaaccagagaagcaagaaccgacctgtggatggctggccacagcgaggtgtcttacggcggcgcggctgaccgaattggggaaaactggaattctcgggttacggtggctaatcggggtgaggactggtgcactagatttgtaacaagttagcggagctggccaaacactcaatttatagagggtgaccaggagtacaacaaatttggacggagaagagcttgcgatgataagagaatgagtcaccggaattcatatgtcgtggtgcccgctgatacaacggctcaaggacggtaattctaggcttgccacagttataggtacgtggtgaaagggtcacggcgtggcgcaatcgcgaggaatggtgaccaccatggcgatgatcgtgcgaccacgtcgctacgcaagtgggtacgacgaactgagcagtaacagtgcccaagctcatccccacgccgagatattttaccgcaagctgttatccgcgtgccattgggcatgaatcgcagtgccggtgtggatagcggcgcgggttcaccgacggcgagattcactgaatctatgatcttcaggtcactgtaccatggaaacctccttcaatgcgcctgacaaagcgagttagagggcttcgttctccatttttcatgtggaaagctaccaatccatcagtagcaaagttgttgctctacataccaactttgtttttcttataaagatcttgatcaaatactcactggatcatgcgaaattcgacccccaaagttcatcagagcacactgacagtcgagtttcagtctgtgatttgactaactgtccaacttcaggtctattttctccaatttttaggtagctctagggtt

SEQ ID NO: 165689 - DNA, 551 bp, Zea Mays
gaattttatatgaattaaacaaattctatcatttattttcacattaaaatcattttctaatcccttttctgaattttataaatctctggactgggcatcaaattctttaaaatacaggggctgtggggtaagaatatcaagacacagtgtatagctgtaatggacggcgggttgttattctaaaacttcaggggctcttgtgcaattttgttccgcgaaggggtacgggtgtcgtttgaccgttggatccacagccgagggcacggattagatctagagtgcgccgaaatggtacgctcggtggaacgtcggatctacgatcgagggttagactttaatgaagcgcgatcactttcagcaccgtcccttgaccgatcaacggccaagatttcaggcgcaacagggaaaatgttaacctctaatcgcagccgcacatcacaggatgagcggcggaaacctcatccccaacccgacagcaccccagcggtggagctcagctccccgcggcggctggttcaccggcgagcacgaaatccggtacctaaccgccc

SEQ ID NO: 165690 - DNA, 745 bp, Zea Mays
caaaaattaggaacaaaggtttaattaagtctttttcatcttaagaactatggcttaaaccatgtcatgcacctcagggtgagaagaattcacaaaccctaaataaccctaaataggccattttagtgcaagagggaaaaacttgtaaaaagactttgaaaaacacagaatcatgatgagaaccaaataacaaagttaaaatgcactaaatgaactacaaaacatagtaagaaagtttgatcagcaaagctttgcaaaaatctcaaaaaggcccttcaagctaaacttcaaaaaggaaatttagaaaattcataactgaattttcagccctttgtaaagttcagccgtgttctctgttttccaaaactcaaatctacaaaacccaaatatgaaagtggcgccaaaataccttgaacacaccctggagaaatttggaagcaaaattcggccgtttgacatgatcttggcagggatttgcctcgggactccaccctgtgacactgccacattgccgaggcgacaactctctgcccttgacccgaaatcgctcggctccacgcgcaaacgacagagtgtagtcaggagaacaaatcctacacatcgatcttgcccaaattcacaaagatatacaccctatcgacgttagaactcgggcagaaacaatggagccacgtgttcgatcgcggctgacacgcccggttcacgccagttcgcgcacccgccaccagccatgcacgaccgcggg

SEQ ID NO: 165691 - DNA, 660 bp, Zea Mays
ggtgcttctgaagatatattattcaagaaaaaacatgcatcttttaaaggagatagacaatcgcatcgagtcaggccacaaaagaagctaaaatgtgagtatttcctacattcagtacaagagtaaaatgctactattcatttcttttgagtattatgaggagtttttccacatgaattgcagccatgaaccatgaagttggcagcttaaccagatctaataatgaagaggggagggagaactctgaaggtgcttttgaagaagaaaacacaagagaaaatatagtattcaagaaaaagcatgcatcatttaaaggagatagacagtcgcatcgagtcaggccacgaaagaagctgaaatgtgagtatttcctaccttcagtacaacactaaaattctaatagttatttcttttgagtattatgcattattccacatgtcttgcagccatgaaccatgaagttggtaacttaaccggagctgataatgaagaggggagggacacttgcatggcacatattcagaacaataatatggatacctacacgagagctgataatgaagaggggagggactcttgcagggcacatattcagaacaataatatggatgctgcaaaaaatggtatggtacaaatataatttgacatgttctgcatttt

SEQ ID NO: 165692 - DNA, 1366 bp, Zea Mays
aagataataattactagaagttagagttaaccctaaattgaaattatggttggaaataagaaaaagataaaggctatgaaaatataaacaatatatatatatatataaaaatatatatccagaattaatacccctaatttcacaaatataagttgcagtgatgagccatagaagtttgaatttaagtttgaattcaaatctaaatgtggaaatagagaaaaaaaagaaatagagaagtgaactgtgcgcggttgggcccagaccaacaattcggcccactgaaggaaatctaactcgcgccagcccaagtcccaccgcgggcgctcacttacgcgtgggccctactcgtcggtctccaccgcactcgctcctccctcccttcctctggtccgcggggcccgcaagtcagcccgttcccaccttcctcaacggattcctccgagctcggcgatgaccgcgcactgtcgcgtggggcccagttgtctgtccctctggcgtgtgcggttgcgatgtgttgctgacaaatcggccccgttgtcagttgcttcaaccgctccgcggattcgcctcaacggagtccgaccatggcggagtgcgccgcgaaccccggagcacgttgcgtggacccctccctcttccccggtcgttataaggtagccctggtcgcgatcctccccttcttttcgccttgcacgcaccagtagccacgccgccgccgagctataagaaggacgccgccgccgcgccataccctgatttgggggtgttccggtacctgggagagtgtctggagcttccccgtgtgggcgcaaacgtggtagcgtcaacctaggagatcgaaagccaccgtcgcgcccgtaatcgctcgccgtcgcacttctagacggcggatctgcgctgtgcgagggcagctgtctccgtcgtctggtttctggtgagtcacctcatatccattttttcttagctcagtgatcatgtagcatcaatcggggcatgtgcgggtgcggggtgacgccggggcgggttgccggagtttggccgccatgggcaggggcgctccccagctcggctctgttggggggggagacgatcgctcagccattggatggccacggtacgggtgagattaggatgtgttgacccatttagatcccaaccctcggatcttaatcggtcggatcagacgaatctccacgattttaaatctgggccgcttgttccggatcatgcgattggaaatcgggcaggctaggttctaatctgagacgcgcatcgttgatctaacggtcagggtttctggatacccctacggctggtggttttataaaagagaccccatgtaatatagtaatcaacccgcggtccc

SEQ ID NO: 165693 - DNA, 331 bp, Zea Mays
ggggcccaccgggcagtccctcaactcccacgtatctccgtcttcctcgcgcactacccacctctgtgcatgccgcagtgaaccggaagctccgggcttccgttgtagccgccccgttcttcccctcgcctagaaataccggaccccacgacctcgcccctcgttctccccttttttacgctgtctccgctccacaccattaactgcgtcgtcgcgtcccgcgtagagaagtggaaacccgccgctggagaactcgtctgtgtcgtgcataccagcctctatgcgcagtcgagggtgtgcgccgggagccagggtagccgaccgtgccccc

SEQ ID NO: 165694 - DNA, 1000 bp, Zea Mays
ttttgggaaatgcatcgataggtgtttatgtgaaaagtgtatttgttttatgcaatgtgatgggattcataattatatcggggtatatttattaatgtgacgagtagttttgaaaatgctagttgcgtggaggatgtattgttaagacattagtgtcagagttcatatattagtggtcgcgccacattgattgaagtgtctcgagtgcacgccacaatatggttgtatgcgagacggggttatgtgcatgatgagtttagtaaaaatccattggtgtcactggtgttaagttgaggtttatttgcgcgtggaaagtaataatgtgtttaatacttagaactcttagtcgatagtagaaattgttttggcttatatagagaggtggtgacatgccaaagtagtcatcgctttctctatatttataagtcgagccatgacgatgcgtattatgcgttcgttaaattatgcttcgcatatagtgtataattgtgctcatgatttcgagtagatacttcaagtaagtcaagtagacttgtgatacaagtgtgtaatggagttagttgttttaggataattattgaaatactcggctcgtatgataaacatgtatgtgttcatgattgggaagtaaatgcatggtgattgcgagttggagattagtggtttacgatccgtatgagttggtcggtgtgcgaaaatacttgtgaatatgtgtgtttataaaaatgttgtagggtatgttgtgtctcggattgcgataataataggcaagccggcgtgtatgttatttagtggtctacgtcgttgctctagttggccgaattgctagatggtttggttaagctcgtaatcacgatgaattgcttgttgtgacctaaatgcgtatggttatggtcgcgggtaaaaattagtagtgctcatgtgatgtccaaattaaaatgccaattactacatgaagagcgcatcgatatatacatgtataccggatttgagtatcgtg

SEQ ID NO: 165695 - DNA, 409 bp, Zea Mays
caactctgctttcatcaccctattgcctaaaaaggatgatgctttggaggtcaaggactacaggccgattagtcttatccatagttttgctaaactggttgccaagctcctagctaacatattatctcctcatctgcctagactggtctccattaaccaaagtgcttttatcaaagggtggagtattctggacaattttctgatggtatagcaacttgctagagtgttgcataagaaggaacctcatgtgctcttaaagcttgatatctcaaaggctttcgattcggtgtcctggtcatttctgttagagttgctgcagcatcttggttttggtcgcaagtggtgtaatatggttggtctgctgttgtccatatccactactagaattctggtcaatggtgaactgggc

SEQ ID NO: 165696 - DNA, 571 bp, Zea Mays
gactagtgattgattggcagaacaataacataaacaaatagatatagagagacaacattctattgttgtttggttgctaaatgtgtacatttagctacatccgatgttgtttaagactttagatcacttgtcatttgaaaagagtcggtggttacaatggccaattgtgctataatttgtcacctaaatacacgaggatttaatttatatactaatgcatattaggctcgtcccatatttgtcaaatacggaataaatacgggttcaatccggaaaaaacgggatcccgcaaaaacggacggaataagccctctcccgtttccgtcccgtttccatatttttccgtaaatacggaaatggtcgggtcaaatgtagaaaacggtacgggtcgggacgggattttttccgtctgttttcaaccctaccgaggtctaggatatccaatcctctcaaggcttttggtgtgcacaccattgactaatttaccaagcagtggccaccattaaccttttctggttcttcgccttttcataggaaacctctcctacatcagtcaattttttcgattagc

SEQ ID NO: 165697 - DNA, 827 bp, Zea Mays
ggaagtcactggctcccatctgagcttcccactgggattcctcctacacaccacatccttgtggtcctgactgtagatagagcacctgtcactccactaacactcagcacggcgatgcacatccccacaacgaaaacacagccccagcccgggcttaggaacagcccgatacctctgagtacttcctcctaaagtacctgattcagaggatttgccacggtaggggtggtgacgctggtgctgagacttgcccctcttgtgggctggacccccagtgttgcccctcctcgcgtcctgaccacgaggctgatcaacacccgaagacttctgtgactccatgatgtactggtgttgcatctccacacccaatgcctgctccactatggtacggaaatccaccaatggaaaggtgcccaaagcatgcctgatagaaggtttcaggccctgacggaactggctcgctttctccatctcattgtaagccacatgagggacaaagcggaccatcttaatgaagcccacttcatactcggtgatggacttcttctcttgcttgtaggactacaaatcgatcttcattttctccatgaaggtgaccgggtggaacctcctctcaaactgcctgatgaaaacatgccaggacaggactcccggtgaagaggagtgagctgcatgcacgcctctccaccaaatttgagcctctcccttcagcatctgtgtgccaaagcgaacacgatcaccatacacaatctcaaagacgtccatattatcctccacataagtcagccaatccgctgcctcgactggagtaccactgccatcaaagg

SEQ ID NO: 165698 - DNA, 577 bp, Zea Mays
tcgtcgccgggaattcgcgctccgtgtgtgctgcgctcggagctgatcaatcacttgtaagacctccctcgtttctccgcatgtccttccttgtttcaatttgagcagaattgagttagattggaaagcgggttctggtcgattgctcgtcggtgtggcgcctggccgccattgccgctgaccctgcgtctcagcattaccgcgcgattaccgctgttgagccatccattcggtccggtgcgtttcggatcaactcagtgtaggtaaccctaggctcgtggggcggaatcgacaacagggatcccacaaatttgtcgccgtcgaggaaggtccgcgctggtccgttgcggaccgtggtcagctcccctaacctcacctctgtctccgataagccctgggatagcttcgctttgccgtgcacaccattttgcaccggttgtagggttgggggaaacacggggtagccatcgcgattgtacgccggcgactcgccgccgtgaccagggcgcggcgccgccgtgcgtcgctcgggttagggagtggatccggggaccgttggatggcgcacggacggtcc

SEQ ID NO: 165699 - DNA, 467 bp, Zea Mays
ttgctctttaatgtctaataactgacctcgcaatcgctggactagatgaagagaacacccttctccaagagtctagtcaagggcttagcaatgctagaaaaatttggtatgaaacaccgataatatccagcgagccccaagaaacttcgaatttcaaagacactagagggtctcttccactccaccacagccgcaacattcttgggatcaaccgcaatgccctgctgattaatcacatgccccaggaaagccacttcgaacagccaaaatggacacttcttcaacttgccatagaactgattctcccttagggcacccagaacgagacagagatgttgcccatgctcagcctcggtcttagaataaatcagaatgtcatccaggaacacgaccacaaagtcgtccaagaactcatgcaacatcctattcattgcttccataaaagcagcaggggcattagttaagcc

SEQ ID NO: 165700 - DNA, 966 bp, Zea Mays
atgccggctcgccttgcaagcccgatctcactcccgacggatgatgttgcccgaccccactcccttcatggtgccccgtcctccttgtcatcgccgtgatgccggcttgccttgcaagcccgatctcactcccaacggatgatgctgcccgaccccactcccttcatggtgccccatcctccttgtcatcgccgtgatgccggctcgccttgcaagcccgatcttactcccgacggatgatgctgcccgaccccactcccttcatggtgccccgtcctccttgtcatcgccgtgatgctggctcgccttgcaagcccgatctcactcccgacggatgatgctgtccgaccccactcccttcctggtgccccgtcttccttgtcgtcgtcgtgatgccggctcgccttgcaagaccgatctcactcccgacggatgatgctgcccaaccccactcccttcctggtgcccccgtcctcattgtcgtcgccgtgatgccggctcgccttgcaagcccgatctcactaccgacggatgatgccgcccgaccccactcccttcatgatgccccgtcctccttgtcgtcgccgtgatgccggctcgccttgcaagcccgatctcactcttcgtgacaatgcgactcatccctgacgattggtgagcttgacgaaccagtgagccttagctcttagccggagttaccgcctaacccctcccctttcctggcgcatctgcccaaaatcgacattctataaggtatactcacatttttgtttcgatcaacaagaacttagcgctatttttgtttattttgtttatatagtttcttctttgaaccttaaattctatgcaacaccagttttttaaaccttattagattttatcacgcggttttccggcccctatagattatggtccctacatcaacaatttaacatgtgaccatcatcatcgccgttgctgcgccct

SEQ ID NO: 165701 - DNA, 342 bp, Zea Mays
gagcgatcaaaaagatcttgtatatatttggactgagacagataaaagcctttttgagtctgctgaacttcaatgcccaagaaatagctaagcggtcccaaatcagacatttgaaatttcttactaagatgctgcttgacatgagaaatatgttctgagttgtcactgtaatcagcatatcatccacatataatagaagtaaagtgcggccttttggagagacatgggcaaacaatgcaggatcatgttcaccagaagaaaaaccagcagctgtgatgacagagatgaatcactcaaaccaagcacgaggagcttgtttcagcccatacaatgcgcgacgga

SEQ ID NO: 165702 - DNA, 645 bp, Zea Mays
gggacgtttctggctgcctaggctcacgcgagccacacgccgcaggtgctagcaaccaatcatgtagagtatgtctgtgtacgtacgtgtgctgcaggatctagttgatcgtgcttctacacatatgccgtcatataaggtatactatgtggtttgtgtatggtctatgtgaacaagaatatgcaagtatgtttgggtggaagctaggaggtttatcttttagctatctgaaagtagtctgggtggatagacgaaacctaaaaattataaactttgaacacgaactttactagacgttagcgttaaagcgaataatgaaattggagtgtagaagaaaggtcttcttgcaaagagttgctcaatctaatacaaattactttaggagcaagctcgaaacaatcacaagcaagagaactagagaggggagagggaagaagcaaattgcaaagattgtgatcaacgcaaagacacggcgatttgtttcctgaggttccaccccgaaggatttacgtcctcgttgacgaggccacgaagatcgggtctttttcaaccatttccctctatcaaacggccacggagaccggttgagtatgcttcactatcacacggacactaagtcccgcaaggacctccacacaaagaatt

SEQ ID NO: 165703 - DNA, 468 bp, Zea Mays
acggcctcgaatcatgcagcgcttcgccccaccatcaccatcggtgagccatcctttcctctgtgtaccctcttcaccgcttgttgatgcttccggggctaggctgggcaacctgtgatttcgtggggaagaagcctggcgcagagaagaatggcgggccgctacggtcagtccctgtcctggctgccggttcgccgttggggcctccaaactccctggggatgttcgccggtgccctttgagactttgtgtggcatcggtgagccggttgcgtccggagcactgctccaaactactcatcggagcatggcggcatggtggaatcacccctcaacgtggtcaggactcccctcgctgccatacgcggtaagaagaccttcgtcgagttcgctgatatctctactacgcgtagcgctagggaatcgagagctgaacatatgtgcgtgtggttggggagctccggtgatg

SEQ ID NO: 165704 - DNA, 868 bp, Zea Mays
cccatgtcagatcctctttactataccatgcgattcctagatggtcttcgtcatgatgtcaaatctatggttatgattcaacacccaaaagatttggatgctgcgtttgttcttgctcaaatgcaggaggagattgtggaggcttcaagaacttgggagtacaaaaatatgattcaagtacatccaacaagactccatctcgcggcccttttccactgcctccaccgcccaagaatgttcctaacaagccagtggactcaaaagcaacagaacatctaacagaccgcctctcatccgtttatgcatttcgaaaagctcagggcctctgctacaaatgtggactctcctatttcaggggtcatcaatgtccggatacaattcagcttcacttggtagaagaactttggaatcagtttcaacctccgtttgaagatactcattcactatcggaagtcgaggccgagctcagtgtacttcatctttgtcagtcggccgaggctactggagcacatctgaagaccatgcagattgtcggtgagctggcgggattttcagagctcattttattggattcaggcaattcagtttcatttgtcagttccaccatagccaagcactgtccacgtattgttcccctatcaactcctttatgggtccaagtagcaaatggtactcaggtggcatgcgtttcataagtgcttgcagctgattggtctatctagggttaccatttcacctctaacctcaagatattggatattccaacttatgatatgattgtggggatggattggctttccactcatagtcctatggtagtgcattgggcagataagtggctatccatgtcaacaaatggcaattctaa

SEQ ID NO: 165705 - DNA, 550 bp, Zea Mays
ttgcccgagggccacgacaattttagaaaaagctaggtgtgaacatgttaaggtcgtagcacaggcagaatctattctcttagttgacgacactagggacccttcggctgaggcctctacattgggcgataaattctactccgatgtgtggatgaagggtggtcgtgagatggctgatgaagccattaaaaagaatgagaaagaatctcacaacgcccaagaggaggctaagcgagctgaagaagctgctgaacgcgccatgattataggtatttttatttaaaaccttttgcttcgttgttcgtttctagcttcgaaatttaccatcatacactttattacagtcgacctttctccaccaccggagccatacaaccccgaggctaacctagtcatgaaagaagctttcgacgtgataaagatcgctaacaaagtcgtcgacgaagttgttgatataatattatatgaagtcgctgagaaaattctaaaagaagattaaattcttgtatgctagaaactataaatacttgtgtgtggttgctgccatgtg

SEQ ID NO: 165706 - DNA, 540 bp, Zea Mays
tccacgcccacgaggtggaaacctaagctcaatggtataggcccacatccaccgcgataagacgtgtcatcgtcacgccagaacatgtgcacactacacaagacaagcctcacgggagacctcagcataggagtgccaacagtagcacgcaagtcggaaaggacgggagaacacaccggaccaaatgtgagtaccgtgaaggatgggaggagacacaagcaaggcgtgcggtggacgaggccacacaatgcacaaaccatgtatgagtacaaaatcgtgggaaccaccacacgttgccatcagacgtcagcagcggactcgctacaggagccagcgcaaagaacggataaggctcgccctctctatctccactctctcagcctctctttctcttcagcaaggaagggcccccattgtaaggcttctctcttaagatataaagggaagaggtacacccttcaagacacacaagcacaccgttgtaacatgctcctgagcaatactatgatcaacactacactagaatatggtgtgtcggcg

SEQ ID NO: 165707 - DNA, 580 bp, Zea Mays
tcagatctctttccctgtttgggtaccatctgattcctgtggacgccaagatacttgaacaatggccggcttttgggctttcaaaagtgctgtgcgaggggtagggtcggggggtggcctatcctttcggctacaccgttgccgttccttttgtttcgattcctcttctcccgtaatctgaaccgacactgcgttcagctctgcgacctttgcgattaaatagcttttttttcttcttctgaaacgcttttgaacggaatatatctcggcatatcttgatcgtaattagttttgtgtccaggttgttgaagtgctttgcttgccgcttgcagatagaggccacccatctgactcttgctgggtttcgacgtgggcactcaaggtctgatcccaacaccacctccaaagttgttcgaatgattccttggcacattagtatatttgctcctcgttcgtcttttaccaaaaactagttctgacggatatacagtggttggtccgagctctggaaaacatcggggaaatagaaagaaggattttggattatttccatcttttgaactaaagctcaaccttaaag

SEQ ID NO: 165708 - DNA, 393 bp, Zea Mays
aagaagaacaagtacgattgatacgtgagaacttgagaactgtgcaatcaagacagaaaagctatgccgatacccggagaagtcagttagaattcaaggagggtgatcacgtgtatttgaaggtgtcaccaatccggggtatgaggaggtttaaagtaaaagggaagttgtcccctcactttattggaccctttatgctcctaaagcgagtgggggaagttgcctatcaactggaattaaccgaccatcttgcggatgtacatgatgtcttccatgtatcccagttgaagaagtgtctcagagtaccagaagagcaactgcctatggagcatctcagtgttcaagacgatctgacttatactgagtatcctatcaagatccttgatactttga

SEQ ID NO: 165709 - DNA, 664 bp, Zea Mays
gggtctcgtagcaatgacttaaggaatgtttagtgagcagttttgttataggttgattccaatgttttatttaggaatttgaagatttcatgggagtaagtcgtgctcccatttgaaaggttaagggctctagaaactagaggtgggttcctccgttgggtgcagtttaggaacgttgatgtgctgagcagaaaaaagaaatcgacggtgggcatcttacgtggtgattcagacttgcagttggccagcacttgcatcgatgtgtggtggagctccatggtatgggcacgcagctgcctgtatcagcagccggtcgtggcgtggacgtgtcaagtagctaggataaagaagttgatagggtcgggaccagggaccagcgcagcaccgtgaaacttctcgtgtgtccatcaaccggtactgcatgtgcccagtaaaaaggatcgctctcctagcttttgctgtcaatgtaaaatgggccggtcacacctcacatcttctatccatgccaaaaaaaacctgtgtctgaccacctaagactgtcgtggccgagtatgagattttgttgctcccatctccggtgagcacaccatcaacgttgcacatcaccgtggctagcccattcagcggtatgtcaggctcagtttgcccgtgttttgtggtcttc

SEQ ID NO: 165710 - DNA, 395 bp, Zea Mays
cgacacctacgatgaggagagagctgttgagaagctcttccgttgcatctccgagaagtacaagtagattgctcgctcgatcgagtctctgctagacctctccacgatgacaatcgaagaggcgataggtcgtctcaaggtggtcgacggcgacgaaccacaggctccctctgggcctatcactatcggcgggaagctacatctcactcgggagtagtgggaggcctgccggagtgacaaaaagaagggggagtcctcgacacgaggccgcaaacgtggcaagccgcgcaaggcgcgtggaggcgcacaggccggggcgcgagaacatgctgagggtggtgcccgtggaggtgcccaaggcggcgccgtcggcaacaagaagctggcacgagacg

SEQ ID NO: 165711 - DNA, 531 bp, Zea Mays
cgacgatgctgggcgccgccgcagctctacggcggagtgcagtagtggcgctggagtgggagcctcgtcgtcatgcctggcgccaccggtgctcgtcgacccgccagtagtggtggtgtcgagaaggttgagcctcagggagggctggaggaggaagaaggtcctgcacgatgagtccttggaggataccgccacgtctcctatcagtagccctaaggttagagctagctagctagcccaatcatcgtcacaggctaattgttaattacctaccctaaagatttttctttttttgtgtgtgagtgtgctgcatgcttattttacaaattaaaacttggctagtgtttatttggttcgggagatctgattcgatttgatttgatttgctggcgtggaagcagaagtgaattttattgcatgctggtttcagttgattgagttgagggatcccgacgacgcgacccaccaccagacgaaaacgagttgctgtgctgagatttcgcgttctaaggtgaccccaaccgaaattct

SEQ ID NO: 165712 - DNA, 516 bp, Zea Mays
atcatatacaggtagaacggaatggaaagaaacaagcagaggaaacaaaccattagtttcatttctaacttggcataaactaacgtacataggtctactaaacagatatgataagatgtaccttgagaaagaatggtcgacgatggctgtgaggacggtgtagttggaagtatgttgccaccatccatttctgcgtttatagcattcacttggaaggaaacattgccataaataattgtgctttcggtgaagctaacattccactcgaaagacttttccagtagatttgtaatctcttttggaatgaaatcgggtggattagtcgagatgagggtgtccacattttttttaatgaggcgctgcgccattcgtccaaagaagataaattcggcggtgtcagtgtcgtcttcagcggtgagggatatcttgtacctgcacagagtggttcgattgctaaacatcacaaaccatgaaatctgtcctagacactaaatgtctcctttagttgccatagtt

SEQ ID NO: 165713 - DNA, 407 bp, Zea Mays
cgggaaaatcagaaaagtcaacaacgaaaaatttcaagaaagacatagttaaatggccagagttcgctccattgctagggttgattgcgagggagatgagaccgaagctgttgagaccgtttcgatttccgaagctatgaagcggtctgggctggtaacatcggaggacgtccctgccaccgggcagagcaagttgatgttgaggagaccgattctgaggatgattatagcagcgctgtgccgagcaaacccagccaccttgattttggaaaatccacagtctccgaaggtgacctacctaaaatgttgaaattggggtatttcaatgaagagaagaaagagctgattcgctttggtggagaggaaactactccgaagccaggaaaagatgaaatagtagtttttaa

SEQ ID NO: 165714 - DNA, 824 bp, Zea Mays
cttgcatttttctgcaattttctagaaattttctaagtctagcagaaaaagaaaaagagaaagtatgaatagtaacgggctcaatctaagcccgagtcgtcccaagactggcgaaacgcgcccgcgcgcgcccgcgttgaccattttccatagaggcgtggataacggcgaactccggtgatgccagcgtgattaaccacggtgggacatggcgaccggtctggccagcgaccggattcaccccgcgctggatattcttaccacgttcgtcgttatccactcttcccgtggcacaaatctcctaggcaagcgcgaattgcgacggtggatcaccagcggcgaagggtgatgaatcttgggatctttttcagctactgtacaatggaatccctattcagagcgcatgacagatcaattcgcagggcctagatctcaaatctttacatgacaacttgttaatctgcctataacaaagttgttgctcgatgatccagctacaatcttgctatagcaaccatagtcaaacactcactagatcatggtcgaatcccagtccaaagattgcccaatctcactgttagtctgaattcagacttagggcagtttgatagcccgactttgggctcattttactccaaattttgcatgtgaccaaggcttaatccctatagcaaagttgttctcctatagtaactctataagtttgatatattgaccctaggcaaattctttgtatttctggatttacaaagttccaaagttagccttgctcaactgtttttgagacttaaccaatgatcattagagtggcccttttgcaattt

SEQ ID NO: 165715 - DNA, 636 bp, Zea Mays
cggggtcgggcatggcaaaacctgacaggggagatcggacgtgtcaaaagggaaccactcgagtggatcacgcactcagccctagactgactcgccataaatagtcgaccacatttaaccatgtctgacacctagccatagcgcggcgccagtccgcttccactcatgacctacgagcacctcgggccgcatagcactcatgacctacgagcccctcggaccgtgacgcattcatggctcacgcaccccttgcgcacttatggtctatcacactaggcatgagtgcgccgacctcccgcagggcactacatgtcgggccgcgccgagccctaggctacgggggccaggggtcggcgtagccaaaatgatgacgccagggaccatcgtcaccccacgtcgtccgccacgataaatacgagacaaccatgtagccctggccccacgagtacgtgtggatccacccatgtaaaacgttgtttttacccttgacttacaactcattcccaaggaagccatcgctggacaacccctctcccggcctataaaagggagaggctggcctcaaggcaaggggatcgaaaggagagagctcttggggcaaccagacgccttcagatggacacgagcccacaagga

SEQ ID NO: 165716 - DNA, 319 bp, Zea Mays
ggaaggaataccgcaaaaatggagtagagaagtgctctatggcggtctacctgggagaaagccgaagttacccaaaccaccctcccttccaagtcaccttcatcgggcaccgcttcccagacacttgccaaagtgttgcccgaaaagcccttaaacagctatgccaaaactacagcagagagatctttgaaacccccccttcgttacttcccacctagcaacaaaagtacccccacctggaggaaaagacttcaggccctgtcagggagagaccctaccgaggatgaccccaccattgtctacatggccggatacctcc

SEQ ID NO: 165717 - DNA, 1012 bp, Zea Mays
ccacgattaagctctaattccggggaggaaatggaagtgccccgaccattaatcaagtacgacgagggcacaaacaattggtgacagatcactatccttcatctgcaagcgcccactgcagtttgaccagcagatgcccacgatggatctcgagcttcactgattcccccacaaatcctggagctcggtcgctacaccatgcttaatcgacatggttggccgcctccctggaaacactagccgcgcccaacactaaccctagcacgaaatcaaccctggcggggctatactctctcttctgctcttggcctcactctgctatccatctctcattttgctcgcgcattgtgacgattggattagcggctcccggttttatagaggtaagggcggagtccgccatggagttcggtcgaggggccccgcacttcgcgcggccgagaaacatggcgacaccggtggagaggttgtctgctggccagggtctgcgcggagtccgttccttcaaccaccagcgcacaaagcggagaggaaatagggagggggatagagctagcacagggtctgtcgtcacccatgagcgcgcccgatgtgggatccgtgattcccggcgaggagaagggctctgacaagccgggcccaccgggcggtgagacaagtcgtgacaacaggaagcgcaggcgcgggcgtcaaattcctaggaatcgcgcggcgcggggagcggctggaggttgctgttgaccaaacgggcccgccgtgcagggatgcaagcgcatgtgagccatgcggcaaggcgctggccagtggggccatgcgtcattgacccaggtgcctgcgagcgtagttaggtgggctgcaggggcgctggcgcgaatttggaactgggctgaaaaggatctgttcggcccaacggtattctgtcccttttccttttctttctttttctctatttctattcctttttatttttttgaaattttcaaagtcaaatttgactccgatttaatattca

SEQ ID NO: 165718 - DNA, 532 bp, Zea Mays
gggaagagggcggacgcgcggtcctcgccacattgaatacgcgcggtcgtcgccccatcgtaggcgggccttgcgacggcgcgccattacaggagagggagaagcgagatctacaaaatccgggtctgggaatgcgagcggtgcgcagacgcgagaatggcgaggggttggagggcgagggcggagcattagggccgcggacgaccggaatggtggatggaggagcgagggaagaaggcggctgggaggaaatgataggcgcaggagggcaagtgcgtcgggcaccaccccttccttcccatcttccggatccggtcatcgcgcgtgatggggaggagggagatgtgggatgggagcacggtcatcacgcgtgatgggggcggctgccagatccggtggggacgccatgccgcggtggggaagggcgtgatctctggtgggagggaatggcacggctgccggatccggtgggaacgtcatgccgtggttggggaatgaatgcagagtagggaggaaaaggcgacgggggaag

SEQ ID NO: 165719 - DNA, 1255 bp, Zea Mays
gcgggcactattcttgagaagctcagggtctgttttgttaattccagggcctgacagtgatgatctttctatagctcaggactgcgggttgataaaccaaacatacagagtctcttttgcaaatatctatggccgaaggggtatggaggattctgagccgcatgatctaacatcggtggcctagattagacttaaccctatatgacccggtatgcaatctctcccacacgacttggaagagacgaccctgattctatttggttggattcgatctcacccgtgcacccatgatccaacgatcccggtttactaacctaaatcgttatactctcctgttaatccactcccttcatcggtcgatcgacagccccagtttttcttcttcctcaacgcctagtcacattggtggcctccacaccgcgaccgccattaccggtgtgcagcttccgccacctaagtgccccgctaacagttcgactagatgctacttaagatagagggcaagacgaacaacatggagacactcaccggtgaccgaaaccgcggcgacattgaccccgacccaaagcggcttgccaacgaattctagactccagtacacttcggcgagcactgatgcacccatccgagcataggcaagatccgccaagatccttcgtgagccggtggacgtctcgagtctccacataggcaccgaacgatggaggaagtaggggcgacggcggcggcaatccctcaccaatggaggtggcgctccggttgtctttcttggcactagagtcgagcgcatgaaaggtgggaggtgaaggatatgtgcggcaggtagatatacccgcagccgaggtccacggctggcgaatggatccccttggattcctggccatgcgaaaaacgcgccgcgagcagacctcaggagttcgttgcagaggaaggggagagtcctgacaggttgaccccacatgccagcgtgagcaaggaggctaggcgcccggcgtgcgatgacgcgactggtcgccccgggcccacgtggtagtgagatgatgcgtgcatgcgtgtcatgagtcagccagccgtggcccgcatgtcagcaccgggtcacgacctcggtaacacgactgcggtttagtgggatgtgcgcgggaggaattggtgggccgagcgcagggtttcagcccaaaagtcgttttttccttttcttttatgttttgcatttctttctccatttcaaaatttactatttgaatttgaatttgtt

SEQ ID NO: 165720 - DNA, 1243 bp, Zea Mays
ctcagttttaatgtgttccgactggagaaggatggtgggttcatttttctatttcatcaaggactcttttgcaaactaaccacagcgaaagggtatggatgcgtcttgttcgtcgtattggcccatgacggtcgtagatcgggtctgaattggtacgcagccctggacaccggattaccgttcaacggcccggattttaaatcgctcggccgatccaagacctcccaatcctagatcaacgcaccggattgatctcactgaatctgtacgaagactctaatcctagccgcagatcacaagatggagtatggacacctcacatccgtcttcaacctctggccgagctaggcggtggtcctcccgccacgacccggcagtcccgcggccaatccatgccccgacgcgctacacaccaatcgatatactattcgtgatgcaaggaacaacacgatcatggtggtggccaaagtacccctgggggtggcacaaccagcacatccctcggcaaaacatagagctgcggcgacattcaacaacgacgagaaattctcgaccctatatgacctaatccttcctacccgtcgattcaatacttagcttgcatgaaaacgaggtactagaagggctctcaccggtggagggggatgcaaggatctggttggcgtaaggggcagcttggcgctgagacaactccgtcgaggaattccacccgacccggtcccgctttccaccacaatcggtgacgtccacgctcagggcactccggggattacccaatgcacacaccgcgcagagagggtggtccttctcacttgtagacgacagtgtctcgctgttcctctcgcggcgctcgtcgtatggccctctgcggtcgcccggtatctcggtggttgcagcgaggcggtggcacgaggtatggcgaagatagtggtgcgtggagactcatataggcctgctgggcaacaacttgcccgagatcccgtcgtattgagctggcagcgatcaggtcccgcccgagcgctcgaattggaaggggacggacccgacacggcggtcccacacgacagcgaacacgacaaggcgatgcgtgggtcccagtgtctagccgcacagagtgatagttgcgtcgggcgcgcgcgagatgcagagcacggctagctgactgatgagatggtcccacctggcggcgcctgacttcggttaactgggccgcgcggtagagaggtcaaatgggccgtttgcg

SEQ ID NO: 165721 - DNA, 353 bp, Zea Mays
tccgggcacaacagcaggaccggcaccagaagactcgatcatttgggtttccacccaaggggcccaacttcagtagaccagctggacccactctgtcacgattcagccagcagagtcagagctctttccattctccctcagtggcaagcaaccaacctccggcaaatgcatgttggcactgcggtgatccaagtcacttcaagaacaactgtccgcagctgaagccacagggacccgcctactccaactcggtgaatggccccaagaatacctcggcaaccgccccaaggcgccctccgccgtcagccagcagaacaagactccgtaccaagggagggcacgtgtaaatcacg

SEQ ID NO: 165722 - DNA, 632 bp, Zea Mays
ggaaaatctgttatgagctaatggttaagctaaaaattaaaatagtttggttaaaataactgtcaactatgaatttcataaaagcataacgacgtggcaattggtataaggggcattgcctatcctcataatccatcgtcggcaaggggatgatatgcctgtgccatgatggtcctctacctgtcaactatgaatttcataaaagcataacgacgtggcaattggtataaggggcattgcctagcctcatagtccatcgtcggcaaggggatgatatgcctgtgcagtgctagccctaaatattgtggttgtagtcactctcactccagcacatgagtggcatcctacaagagtaggacgcatgacgacaacaacaacttagacgataggtgttgcatcattgttttcatggaaacgaagcctcaccatcaccgaacattgaagtaggggtgggagatgctaaaggagaaaacatcatatcgagatgaaaggtatggatgttaggtgatgagcagtgttgaagggtcaacggaaaagagacatgacaatttagggacggatgagttgtgtcaccgaccaccacaaccagacgcacggaggtggtggcaacctagcacccgcgagagatgtta

SEQ ID NO: 165723 - DNA, 397 bp, Zea Mays
caactttctcacaattttcgtcttaacaatgtccttgtttcaccgtctctcattaaagatttaatttctgttcgccaattcaccactgacaataattgttctgtggaatttgaccctcttggctgctctgtgaaggatcttcccactcggcgcatgatccttcggtgtgatagctccagcccactctacccactcaggagcacaacatcttctctccatgctaccacctcttcattgtggcatcaacgacttggacatccaggatctgcagtcctcactcagctagctcagtcttctgtcattccttgtaccccgaataaaaacacccccatatgccatgcctaccagctaggacgtcacgttcgtctaccttttcattcttcatcacatgccactc

SEQ ID NO: 165724 - DNA, 481 bp, Zea Mays
gtcgagcgagtagaagaaggacatgcatacccagtatagcatcctgtttatttcatcagtgaagttctgggtccctcgaagaagaaataccctcaagttcagaagctattatacgcagtacttctaactgcacgcaagctccgtcactacttcgacgaccacaaagtcatagtagtcaccggatttccaataggagatattcttcacaacaaagaagccatcgggagaatagccaagtgggcctacgagctgggatctcatgacattgaattccgacctcgcactgccatcaaaactcaagcactggttgatttcgtatcagagtggaccgagcaacaagtatcggataacccagaaaccacagaagtatggcgaatgtatttcgatggctcgttaaagctgcagggagcaggctcagggatcctctttactgcactggaggcgaacacctcagatatgcccttcagttgttatttccagc

SEQ ID NO: 165725 - DNA, 1025 bp, Zea Mays
gcttatttgcaaaaatcacctcttaagttctatatagcctaagtctgaatttcagagtttttgctcaacttttgagccttgtaactttcaaactctagggtctttgccctatgtcaccacatcaaacttatagatcaaacaaaggagaacagttttgcttaagagtgtgagctcagttgttgtgaagaatttggagataatcaccctcaaagtcaggctgtcaggacatcttaagtctgaatttccagtaacagtgaaattggacagactttgaacctgattttgagttggattcggtaactattttatggtaagctccatggcaaagttgaagattaactataggactataattttggtacagagagctagtcgggtcaccacacaaaatcaggagtaaatcgagctccaagatgctctgtcaggtcgactgactgaagaaacaccatggtacagtgcttggatgtggatcagactgccagcaccggatgttcaccgtcggcgacctcttcgccgagattcgtgctacgggcgtatgggttttgttcattaggtaaagatctccttgcggatatgtatgagctaccgtaaactcgtcactccctgtcctttttcaccggcgacgtggcctcctggccgtcaccggagttgccatgtgttactgcggctgcgccacgctccaagctttccaccacgtcgtctctagccgcaccagctcaccggtaaccgccgtagcttcttaaccggtgatcaccggaggaagcgccacggtgaaagccacctgtttcacacaccgagcgctttgtttcctctggccgccagcgctactcgaccggattgatcaccaccgctcaactatcctataaattgaagcctcagcttgttccgctaggtaatcgtgcgtctagtgaaaccactcgtagcttcgatcgttccccaccgctccccaatttgggatttctcccaaatcggttgaagaacaccgaagaatcaagctcaccgtggccagtccaaatcaggtccat

SEQ ID NO: 165726 - DNA, 683 bp, Zea Mays
agcaatggcgccaccgcgagcagcactgctccgtgcccgtagttggtctcaacaccatctcgggtaagaaactagcctccaacatctccgagctttgttgagactatatcgtggatgattgagctcgagacgtggccggttcacggtgaattcctcgccgtagctgggggccaccattcaccgtggctgaccctctctccatctccgccaccggtatggaccctctattaagttctccatcatctcctccactcgtagcaccttatggttaggagaatagtgcaacaatgagtgaatcacacaactccggcgagcttcaccgtcaaggagccgggcggcgctgccacgcgccaatcgtttgaggaggaaggtgtgcgaggcattaattctttggtgaacgactcagattagatcgttgcgtacccctttgctagtttgatttggacgattggatctgatcggacgaccgagctttgaggtatggcgtgggggtcgatcggctgttgatccatgatcctaagacccatatcgcaggctgttgatccatgatcctaagacccatatcgcataccgattcaatagaaatagcctaatctgcgcggttggtcattgatcggacaactcagtccgtctgacaccctttaggcctcgtaaacactacaaaagagcccctgctctttttc

SEQ ID NO: 165727 - DNA, 776 bp, Zea Mays
gagaattatacacatacacaagcgtcttgttgagagtgcattcatctgtgaagttttgtgcacttcttcagggggagttcaggaggagatgtttttgttaggaggagatggatgcttttgctattcatgttgagcctttgcctcgttctagagggactgtttttgcttttagagtttttggtgcttttcatcttttgctcttatcattgtatagtggtgttgagcctttttctacctcttcttgagggctagccatttttgtttggttgcgttgagtcgttgctaatgtcttaaggaaacaagctttgctcattttcaatgtctttggtttggcttttgtccggcctttggtcatttgagtgagctcttccttcttccttttttgttgatctttgtgtttgtgcagtggtgttgacaatgcacacattaagtgatagattgcaaccacaaggttgagatgcttgagtttgtgatgagtgattgtcaacagagtaacttcttggttgagtcgtgtggactaactaggacatgagtgtgtgtgcaacatgtctcttagcttctgatgcataggtgtggagcccagagctagtgtcaatggtgaaggtgaaaggtcatatgggtttgtgtttatggatcaagatcggtgaaagatgagcactaggtctttactgagaggctgaagaagttgggtgactggtagcaatggataacacctaggtacatcagcatgtgcgaggacatgtcgtgcgaatcatgtttccaatgtgtctgaggac

SEQ ID NO: 165728 - DNA, 675 bp, Zea Mays
acgctttctagtggcccaaacctgtataaaccctcgtgtgatatggcacccgcacgtaccatcgagtcgtagtcaacaacgttgtcctgctcaaaatcatcacgtggggaaccctgtggtgcacagtcgggtcataaacaacgacagctggcacgccatgtagggggtgcgccgttgatccacgatgactccatggctatcatcttcaacaccctgatcaccttcaatgccagggaggtgttccgctttggatccatccgaaagaagatcttctccgatagcaccaattgcgagggcgggctcgtcccacctgactccagcaagaactacgttgacgaactccaaagcgcgaaaacctcaactaacttccaccttgcgcaggtttgtgcccttgtcgggcgggctcaggggcataacaacacttgtggcttgaccaactaaggctgcacccctgtcgcgatggacccctttgtccacgtcaccctcctgggtgtggacccgaatcactcggcgaaaaaggagtggatagcgtcggcaccgcgtggccacaggagcaagaccgacgactgtcccagccgcttcgctcacatgggagactgccggagtgcgagacacaaccccaagctctttcttcccggatgtcctttttatccagggatgagtagaggatgtccc

SEQ ID NO: 165729 - DNA, 919 bp, Zea Mays
aatccattgggattttgccctaagtcaatatagcaaacttgtaaagctaagataggagtacaactttgcttaagtgattaagccttggtgttgtacaaaaataggagataaataggattgaagtctggctgtcccaccactctaaaactgaatcgggactgacagtgagatttgctcaactttggattcaattcaagctcaaaggattgagtaaatgagttaggtctctatagtaaaattgtagctggactataggactacaactttgttaaaggtggattagcaagttattacatggaattttgagaattgggcgctgcaatttgctctgtcagaacgactgaagcagttcttgacggtacagtagcaaaagatccgctggttcagtgaacctcgccgccggcgaccatacgctagaattcgcgctaggcgctgtgattcatgcccaacgtagtactgatagttgctcggggtagtaaatatcgccttgaggatgaacttaggccactgttcaacctcggtcgccgtgttcgcctgactcatggccggttcagataagatcaccggagttggccgcctatcgaccgcacgccacgtgccttggtaccttaccacgtcgcagtaactcgtattacgcatgtccgttgatcatcggtgagctcaccacagtgaaatccaccaatttcttgcgacagtgctccccctctctccggccgccatcgcgccatctcaaattcatgggccaccacccttgggccctataaattgagcgtgccattggctccgctaggtagtcacacacccaatacaacaactcgtgcctcgaatcatccaccagagctcaccaatttgggatttcccccaaatcggtcaagaacaccatgtgtgtgagctcgtcgcgatcagcgctccacaggtc

SEQ ID NO: 165730 - DNA, 456 bp, Zea Mays
cggtgtagaaggactcaccgaggaaggttgaaggtattcaccacgcgaggcaccagacgggtcggcatggacgaatggcgacaacgagaaatcaccagctcgctgatggtgatccttgccaaacaaaggttcctacgcgtgtggcagggttgtctggagcaacggatctactcgtcgcggtcagtagtccagccgaggacctaatcgacggtggcggcaggaggtcactcttctctctgtcctttctctttaccagcgcaatggggaaaaggggttaggaggagcgagggccgactatttatcagcgaccggttcccacagccgagaggatctcgcccgggttgttgcatggcccacgtcgcggcgaattcggcacggcacgctatcggcggcatgaggacgacgactcggactcgcagagtacaacgcgtggggtcaggctaacagagacagcgg

SEQ ID NO: 165731 - DNA, 429 bp, Zea Mays
tcaggcttcgaatccgtcatcaaagttgatgctgctctgggttagcataaaacagggaggacacattttgaatcacatacatagatcagaagctggtctttccgatagaattctttaaggctgtctccggatcatatatatggtcgtacaaaatattgttttgcactatagactgcatggttcacatagtggggtttgaaattgaggatgggataagagataagatggataagctgatggagacaacctaaggtgcatagacactttaatcaggatttgtgcagtttttgctttgagaagaactactcttgaaaatttaaggcccatctttgaagttgttgcatatgtacttttaaaaaaatgttccttgctgaatttataatgagatctgtatgtttcttgcatgtttgtcatgtattcttccacgca

SEQ ID NO: 165732 - DNA, 349 bp, Zea Mays
ttggactttggcagcttcagcaattttcttagtaggaacgcggctcaaggcctttgtggtctccaacacagcatccaacacgctggccatcctcctccacttgggagttgcggcaggacccttttgcaccttcggcagttttgcctctgctggagggctcagaatttctagcactttcattgtttcttccacctctggctcttcggccttatcatccttagcttcgactggcccgactgtaggcatcttcaccactacaatcagctcttcagcgctgtgcacgatggaagcagtttgttttgccttggtggttgaagaggtcccctcgctgaattcaggcactatggcc

SEQ ID NO: 165733 - DNA, 559 bp, Zea Mays
ggcccaccgcacaatgatggaggagctaacaagatgttttggcggtggctcggtgacgagatgtcgacgtaaaaagtgaaagcgttgttagatagcattaagattgttgggtacgagcacctgggtcgacgacaagcactagaaggccggcccactgtttttgcagcagtaatgggaagagtgaaagcaagtgtggctaggggggggtccaaggtaatggtgttagttgtaatgaggtgtcagtggcagtaggttgctaggacacgataccgagagcaagtcgggggtccatgtgtcaatgttagacagacggcggggttagttgaagagtgaaaaggctagcccattaaggatagttcgaatagacctggtgaagccccaaagcaataacagttcaattatatgtccttcctctaatgaactacatttctcatgtcaggttgctgtagaggtggccaaccctgattgccaacaattcccaagctcactggtggagggtgaggggattcactatgattccaagctaggtataacgagccctccaagcattcatgcctga

SEQ ID NO: 165734 - DNA, 318 bp, Zea Mays
acctgtaaccgtcaaggaacacaaggctccaagagtaacaaatccgcacaaggttaagtttgcaatgagatcaaaaacaaagggaatgggagaatcaagatgaaattgacagcgtgttagatcgacttcacctcacaccaaggatccttcaagcaattgaaggagatgcgatttcgggtgtgagatgtgaattgaatgcccttgtttggagtttggtcagctgagaaatcgtggagagagcagaagtaatgaagagagagagtgtggggggtatttaaaggatcccccaaaagctggcagccgttgggagaaaagagc

SEQ ID NO: 165735 - DNA, 300 bp, Zea Mays
aaaacaatgaaaagttaagaattttaccttaaagttagcataaaataggctaccggcgatatgttgccgccggtacctgctgaggtctgcttcaaccttcgggaggccaacactctttgataaagtgccaacaatcttcgccccagtgtgatcccgatggcatcctaagctttcttcgttaactcccccgaagagtagcgcacctggtctatatccgcaagatatagcgtactctttcagttcttctttttcagccttcgacaattcttgcccaaatatatctcggaagttgaagtcctc

SEQ ID NO: 165736 - DNA, 595 bp, Zea Mays
cgatctgctagctgaggattcgtctgatactgctcctgatggtacattggcggtggtgccgcttccagaggttgatgcgaccttggatgtctcgaaacctgtcaatactcgcccgaggcgtcccagccgaaccagtcagcccgagccttctgctgatgagcagaagaagaaaagaagacgcctccggcgagtgtctagctttgatgaggatgccagcaccttagctcctgctgccgaagaaatgactgcaactggccttgttgacattgaacccaatgggtgtgccccgcctgctgctgaccccaatgaggatgttgtttgtgctgttgctgtggaagatgaggaggaagagaatgaaactccattaactcggaaaaacagtcggcagttcgctgctagtggtggtagtagtggggttcattctcctgccttgtctgctcttattggtctgcaagaactgtccatggccaattttgatcaagctctagaggatatggtccctgagaacttgctgttggaacctgcagacgttgatgcaacagaaacttgtgcggccgtgccagatgctgggttgaggtcgtcccgtgcctcgtcg

SEQ ID NO: 165737 - DNA, 447 bp, Zea Mays
gatagtcccgagcgcagccgtaacaaccatagcgccatggccggagtgcgggtacgcgatctcgcttcttctttccccctctttgcactacataattgttcagctaccgtaccctatgtcctttgtcggtttctccatctgcatctacccaaaagcgccgtcgtggtgagaaagagagaccgcgggggagtgagttggacggcggtggcaggtccccgtcctcggggtgtgtcctaggagagttcgccagcgcctgggggagttgtccgaggccgagcctggcaaagaaacaaccggtggacccagaatttttcaccggagttgaagcttcacggtggtgccgctcgtcaccgtagataagaccgcccctgcatcaatcaccggtaatcgccacagtacctaactcgtaatcctctgtacttcatcagtagccttggtcgggctggg

SEQ ID NO: 165738 - DNA, 974 bp, Zea Mays
ccattctctctttgttattattcatacaacaaacataagaaaagccaacgcacaaacaatgccatcttgaaaagaaaaaaaatatatactgatcgagttggactccacaaactaataataataaacttgtgggaaaaaaaaagagaagcactgaaggatgttccgccattggcttgaacagagagagtatcatacagcagctgagggtgcagagcccagattgcccgtattgctattcagaaggcctgcatgactaagcagagcccagatgtgcgtgaggaactccccgccgttttcaaggtgctgcatgtgttgctccgtggtgtagtgcgacttagcggcatggatggttgccttggcccagaattcttgcagcaactcccagcgatccccatcgggcttcctctccagcttcttaccgaacttgatgcctttctggaagatcttccgagggtcgtcgtcctccccggtcccttctaaatccttcatcttggcgtaaatcttggaatccatgtaggaggatccgagaagctctatgcgttctcccatcaccgtctgtgccaactctgctatttcggcttcatggtagggcagcagttctgggacagatccaatcaagtacgcacagtatctggacaagtgaactgcgacgcctcggtcgttatctcgacgagcaagagcgatcccatcatctactctgttgtttggaagcagtgaccctagcacattcccaaacaagtatccagacagattagctgcaaaaaagccttggtgcttgctgcatcggcatcgagtcgtcgtgcgtttactgggagcaggacctgaaatgtcacagtactcagttgcgatgtgatgaattaacatgtcttggagcgatgtttcttcgacgacgttggtagttaggttgccgccatacgttgatatgagagatctagcaacagctctcttcaccgcatcagagacctccactggac

SEQ ID NO: 165739 - DNA, 1059 bp, Zea Mays
attttctatgaattaaaccaattctaggaattaaaacttcattttctaattcaatttatctgtttttctgattcactggactgtgccccaaaatctgagaagcgcatgggtctctgcgtaaaacgcccgaagacacaagatgccagactctggatcgcgggttatttttagtaattcccaggggcccatacgcaattgagccacggcgaagaggtatgtaagaatcccatccatcggatcacagttgaacggcccagatcataacccctacatccgaacaggtacacgttgacgccccttggatcaagatcccacgacccacgtgaatcccggctgaaacgttgcgcgcgatctaaccacatccgcacgatccggatcggacggtgcccgatcagaacccagctcattctctctcctatccttatcactgtctaccccggcggccgcactttatccccacgacggcgccatagcctggaccgtcccacccctagtcccggcgaccaagcttcgatctatatggttcaacaggccgcagaaacaacatagcattgcatgggggccataccggtgcttgaggtagagcagcatcaagcgacgttgtgcggcaacacagcgatgaatccttggaaggtgacggcgcgccaggtagaagctcgatggccagcggctgggcgaggtggacagaacggccatgcactggagggattcgctagctaatcatggttgggtcagagcgcagcccggatcacggccgcggcgagactgccattgcagcaggtacggagggagccagggaggcaatttgcaatcgcggttgtggacttggggtttaaggaggagggcctcggatgcctatatatatactggagtcattagcaagaaaaccggacctaggtggttggctggagggctgcttcttatccgttgcgccagactcggctggaggttgcagacgaccagagggcccacaaaccagcgaccgatccaacactgcacacgagctagggagactagggaaccgggaatcacgaccgagcagttacgacgcacgaatat

SEQ ID NO: 165740 - DNA, 381 bp, Zea Mays
tcgggtaaaaagttgttgggagaggaaattgccgaagctaagcactataccagagaattaaagtacccaaaaggatctttggtatacaatggcactgatgaagatgactttctgtactgccttccgaataacaaggagatatctgtttgccgggagatggcaagaaatatagggtttccgaagctcgaggttggcctctctgcaatgtcgaaggatgaccttgcagacaacctcactgataacagtctgaaggtaaagatgttttgacataatcagattattttttgtatcttttaccgttgtgccgatccccctttttgtagggcttaatcctgagcaatgccttaagggcacaaaagaacgctaaggacgaaagatgcc

SEQ ID NO: 165741 - DNA, 506 bp, Zea Mays
atagaatctatgtgcctgaggatgaccaccttcagtagttggtcttaaaggaagcacatgactcaacttatactatacacctcggtactaccaagatgtaccaggacttaaaggagaagtactggtggtatggcttgtaaagaggtgtagccactcatgtagctctttgtgacgtaggctagagagtaaaagtagagcatcataggccagtaggtttacttcaacctctaaaggtgtccgaatggaaatgggaggaaatcggtatggacttcgtagttggattatcccataccatagatggctatgactctatttgggttattgtggatagactgacaaaagttgcacaatttataccagttaagaccacctattctggagccaagttggaagaactgtatatggccaggattgcgtgtttacatggagtccctaagaagattgtgtcaaaccgaggaactcattttacctcacgtttttgggaaaagttacacgagtcaatggat

SEQ ID NO: 165742 - DNA, 1379 bp, Zea Mays
gtcgcggttgtcttggcgcaggcgcgcagccactgactccgatcgctgccggaagtacagtgagatgcacaatcgccccgcagccccggggcgccgagcaggtgagttgtttggtagattgccgatcagtgattttgtagccttgcttttccgcatccactctcagcatagcgacttcctggcagatcagaaagtttctgcaacttgttaagtatctcgttaattttcgctgcatttccttgcgtgtttggctcgcgtgttctatcatcggagtagactgctcccaattccatcacagaaaagcgggggaattcctcccgcgggtttgcactcagcgagtgcgaaactgccaataagtgatggcgggaagtacgctaggcatgcgcatagcttcggtcacctgctcgatgaaatgccggtgtcagttcataaatagcagttgttgcagctggcctgccccctccccctcccctgaagatttgctcgcacaaggctgtcagatggtccattgtgcctttgtcgggctgttcctctatgcgttgggcataagcatggtggtgtggccgtgtgggccaagctgccgtgggcaaatcgggatttgggggcagagtttggtgcatgagtagggttggttggtacatgcaggtgatcggtcgctgtgagcgtaggtggtacaggtcgttggttgtttggatcgtactttgtgagcagttagtgctgttgatcggatcacgacctcgtacctggtagaaggcacagatcaggcgtgcaaactgtacgaggcctcgtgcgtggtagtcgtctgtagctgaaggcaggtatgatttttttttttactgaacttacaattcagtgtttgtcattgcataagcggtagctggtagcgaaaggttgctagttagctagtctcctggtgttagtttcattagagaggcaacgcaaatcacctttgccaatggtcgattggttactccaaagtgcaaacacatcttatatcacttgttagttaaggcgcatcgtaaatctgacaaaatggcacccagttctgccacctgctgatgatgagcatgtgtggagcgcgaaacagatagtgctgtttgttccactctgagcttttatgaactgcttgctcttttgctaacagcattggaagccgatgagcagtagtgatgttcatttagctagctagctgttagctattttagttccttcaacaaacctttcctgcgcccctgtctgttctgtcgacagcacattaacataagaaacccagctgagcacgcccaatggcaggaaacaagaagaagctaatggctcgatcaggcctttttcatacccccacaattttagaactcgggttcacagtattctgaagtacg

SEQ ID NO: 165743 - DNA, 540 bp, Zea Mays
ctagcctaaagggcttactggagcacaaaaccaagggtagggtacttttggatctcagctagccttagctcgttagggatacttagtgactaaaatattaaaggtcacttagcctaaaaaccaaccttctaaggttaactcacttttactaaaaaagtatttgctcttgctggagaaccaaataagttcactctcaacggcaagactctagcagcagtaaaagtactgcaatttcccgtgatcccacttttaaccactccaataactagctaataaaacatgcaattaaaataattaaataaagagataaagcaccgcacgtccgcaccatagctacatgaggataatttgaccagttgagctatattttatcggctccttaaagaactgatcatacctgaggtctataaatgtcagaagaaagagatcactactgtctaacttttaaatcatcagtagccatggagaacagaataccagaactattgatttatcaataaatatgcaaccaccggttttaaattctactgttaagggtac

SEQ ID NO: 165744 - DNA, 277 bp, Zea Mays
ctcattacatggcctccggcccattaattaatccagtcgcggcccacaaccctgggattcggcctgcgtgcacggcggcccctttcttctcctccggcttcagacttggtgctctgttcctctgaatgtgccttggcagctatgctgacattcccctctccaagagatggcggttgtccccaagccgccgcagtgggaaaacgttgacgcaaggccacctcgtcctcccatgtgtcaagggcttcatcacagttggaccagcgcaccttgacttgag

SEQ ID NO: 165745 - DNA, 1426 bp, Zea Mays
cgagtagcagaacatagcgcatccctcgaaaacctacaagcatactgcaacaccttccatgaagaggtgcacgtattgtatgatcggctgcacccaaaagtgcctctagaagtggcagcaatgggagctggaccatctggaacagcaaatggagggtctgatgggggaattgacctttttggggcccctccatctatgaatcttgctgatgaacggtctcctgaagcaggcagcggaacaactaaggatgaagaggattagagtagtatagtttaagcaatgtactcatgtaaaataaataagaaggttgagttgtaatactgagtatgtgtaattattactgttccgcaatgtaataaagatggtgtgttggcatgtaataattccagatgttttcttcctcagatgccatcgcgaacccatgctcatgatggggcaggtacatcccgcagcggggaggacactcccaatccgccacctgtacctcctaccctggccgaggctatcgctgccttggtcaacgccaccaccgacaacacgggctttctgcgtgaaatggcgggaaaccaatttcaacgactaggaggaagaggtcaaccacaaggaccacgcgacaccacctatctagagttctccgagacccgcccaccgctctttgtcaaggcggaggaacccctggaagctgacgagtgggtgcgggtgatggaacaaaaattcaggctaatccgatgcaccgagatacagaagcccctatttgccgctcagcagttaagaggccctgccagcacttggtgggcaatcttttccgccgtccagcctgcgggacatcaagtcacttgggaagaattcaaactggcatttagggaacattatgttccggaaggagtgatgcaaatgaaactggaagagttcatccgactaaagcaaggggtggattctgtgatgcagtatctcaataaattcaatcacctctcccagtacaccattgatcaattggatacagacttgaaaaagaagaattgctttatgaggggactaaatgacagactccagcgtaatatggcaatgtgtctggacctcacatatagcagggctgtcagtacaacactgtcagttgaagccaaaaatgcgggacaagaaaagtcaaaaggatatgcaggtgaaagatcaactcagggacctaaaaaggacaaggttggtaatccgacctttcaatccaaaccgttcttctcctcgcccacctacatatccattcagacaacccgtatttattcatcccactcctgcccccactctgaccaatcagccgagtgcccatggtgctcgtttcccttcccttcccagttcctccagtggttgcttcaattgtggaaagtccggacatttcatcaaggactgcccatatccgaagcaaaacaaatccaac

SEQ ID NO: 165746 - DNA, 1010 bp, Zea Mays
cgacgggaaaccatggcatgtttaagtttgagcttggttggctaattagagacggtttccatgatatggttacctctatctcggagcatgaaacaaggggcaacaattccatggaaaagtggcagaagaaaattcgggctgtacgccagcaccttagaggatgggcaaaaaatacggctggaacaatgaagaaagaaaaagtccaacttactaaattaatcgatgacctagataaaaaggcggaggttactcgtctctcgcctaatgaactagctatgaaggcatttattaatgaacggttggctggaattctaagagaggaggaaattcgactcttccaaagagccaaagttaaacatctgctggaaggtgacgataatacaaaatatttccagttagtggctaatggtaaacaccgtaaacagagaatctatagcctagaagatgataatgggtcaagtatagtggacgaggaggaacttaaaaaacacattactagctactataagggcctatttggtaaaccaaaccaaacttctgttgaattggaggaatcgtttactcacgacatcccccaagtttcagatgtggagaatgaaattttaactgcgtcgtttgttatggaagaagtccaaaaggcggtcttccaaatggagcataataaagccccgggaccggatggatttcctgttgaattctatcaagtattctgggaagtaattaaaaatgatttaatggctctgtttgccgacttccataataactcccttccggtgtatagccttaacttcggagtcattacgttaattcctaagaaagagatcgctatgaaaatccaggattatagacctatttgtttgcttaatgttagttttaagattcttactaaagtgctcacaaacagaataggtgtggttgtcggtcgaattattaaaccctctcagactgcgtttatgcctggtcgtaatattcttgaaggggtaattgtattacatgagtctttgcatgag

SEQ ID NO: 165747 - DNA, 925 bp, Zea Mays
gatgaatgcgatgagttgacatctaggtataacttgttgggtggatgcgctgcttgtcttggcttgcagattgagctagcatagaagaacgccaggatagcctcacttaagaaggctagctcagttagcgcatctgcacttatgcagtgtgctctttgtgagggtttgtaatctactcttgagtcctgcagacacgacaagacttgggtcgaggaagaaaacacatactttcgattagtcttgagctaggtgtcgtacagtgagtcctagttgggcatgatggtcagtcagttcaagagggaactggcggaccaggtttatgctttgcttctaaggatgtgattgccacttgatttggtaaggttggtgagtgcagtggcctgaaaccctcaaaaaaccttcaaccaccccaaacttgtcaagctcattccacctaaaactgccacccatgctgtgaaaaatggagtgattgaggagcctgtgagagcctctcctcagaaacaagggtggtgtccaaaacctaaccaccttcataagacacttgacacccttctcgacatctctattgtcccccctccaagagctcctcatccacccaaaaagaccacttccacaaacaaattctacccaagagagaggtgaggtttcattgtgaatattgtgagagggatgtgcatttggttgcattttgctttaggaggaagagagatgagtgatggagttccgagtcgagcaggaggaacatgaaccagccttctcatggtgttcatgagcttcctattcagagacatcctgttaggcctagaggtactttgcctcaagctgctaggccttaagaagtgagaccatagggtggtcatgcccagcgaggtactagtcaagagccatatggccaaggaccccatgccagtggctttggttctct

SEQ ID NO: 165748 - DNA, 632 bp, Zea Mays
tggggatccgcaagaagccggagtatgtctgaaaagaataccacgagaatggaactgagaagtgctccatggtagtctacctaggagaaagacgaaactacccgaaccaccctcccttccaagtcaccttcactagacatcgcttcccagacacttgccaaaatgttgcccgaaaagccctccgacagctatgccaaaactacagcagggaggtctttgagaccctcattcgatactttccacctagcaacaaaaatacccctacctggaggaaaagacttcagaccctgtcaggaagagatcctactgaggatgaccccaccatcgtatacatggccggatatctccacaccctcgataaccactatgacaacctttcctcccactgcacccacctaaactcctgggtggaaagcttagagcaacaggtcaaggaacttaagaaggagaaggtgtctctccaagaaagtctcaaaatagcagaaggtgaagaggccaacactcgtgaagcctaccgaaccctgaagatggattacgacaagaagttaaagaagctcgcccccactaagaagatccgaaagaggaccaagagccaaggatgccagactgagcagaaaaaggaagccccacca

SEQ ID NO: 165749 - DNA, 425 bp, Zea Mays
ggatgactccccagccagcaggctaagcacggcatcaatctcggcatcatcagtgctggctggcatctcaaagtgggttagcctctcagcctcgggaagactccaaagtggagcaatcaatgcctcaatgtcctcaggagagggccacactctatgacccaggctaccggcacgagcaggagggttggagataaactcagagaatggcctatttggcggcaggttccatgcagaataggccacaggagcaccagcatttgagactctgcccgtcaagatcatgtccagtctgctcagcagatcttcattgggaatcctcctattcgtgacccgagtggaatcaatgatgccactatataagtaagcaggataaatcatgtccttcaagggttggatatttttgaaaacgaagtcagcaactaaag

SEQ ID NO: 165750 - DNA, 1722 bp, Zea Mays
cggcccaggtggaggctgcggctgtccgtcgagtgggccagccctggcggccggttgggcagcctgctggagcggtccaggtggtatggcgctggtgcgctgcccagcagtggacgagggcaatgcgccaatgggtggaaccgggacctgttcagaaaagaaatccaaaaaatcaaggttagtgggaagagccgagctgggaggggtctcggcgaacggaaaggaggattcgtcgaacacaacatggcgggagatgatgatacgattggtggagatatcaagacaacggtagcctttgtgttcagacgagtaaccaagaaagacacacatggtggagcgtggagcgagtttatgggtggcagtggcagagatgttgggatagcacttacagccaaagacacggagatggtcgtaagatgggggcgaccaaagagggcaagatggggagtggaggaattgagggtgctggtggggtggagattgagaagatatgtggtggtgtgaagagcctcaacccaataaggagcaggaaggtgagcttgaaagagtaaggaacggacgatgttgttaacagcgcggaggacatgttctgctctaccattctgctgggaggtatagggacacaacatacgaaggtggacaccgtgggagaggaagaaagctcgtgcgtgggagttgtcaaactcacgaccattatcgcattgcaagctttttatggtggtgccaaattgagtggcaacaaaagagaaaaaattagcaatagtgggaaatgtgtcggatttgaggcggagagggaatgtccacaggaagtgggagcagtcgtcaaggatggtgagatagtacttgtaaccagaaatactgggtattggagaagtccatagatcacagtgaacgagatcaaagtgacgtggagcacgagactgggaaatggaaaaaggaaggcgaacatgatgaccaagttgacatgcgtgacagacatcgggggcagtagagcctttattacatgaaatagaggatgaactagttaaatgacgaagggcgtcgtggctgatgtgaccaagacgacgatgccaaagctatgaagaggcactggtgaggaggacttggggggtagtggtggaggacaacgggatggagagtggatagaggtcgcctgagctattgcacctggcgatcacgctccgtgtcctgagatccttcacagaaaaaccagcggggtcaaattcaacagagcaattattatcaattgtgaattgacgaacagagacaaggtttttgataatagatggtgagacaagcacattattaaggtggatcagacccatatgtgtggatcccgtggagacaacgggcaaggaggtcccatcgccgacaataattgaagaaggagtggaagaggaagggggatggcaataagttaggataccggaggtggaagccatatgagcggtggcgccggagtccatgtaccattcaccggctggcggggtgagtgtcatggtgttgaaagcacctgctaaagcatgttggtcccatgggccaaaaggaccaggagccgcctgctgctgggtcggcgaggcccgctggacggcccagggtgcagccggaacgggagcaggccaggtggacgcgtttgccgtgggccaggtgaatggggcccagccggtgggagtgggcgggggaggcccaagtgcgctcggcggcccacccacgagcgcctgg

SEQ ID NO: 165751 - DNA, 818 bp, Zea Mays
cgctcgatgtcgtcgttggccgccagcaaagtccggtgatggttatcaccgtgaccgtcgcgatggctcactgggcctataaattcacatgctctcactcccttcgtcccaaatcaaccgagcacagctcttcgtccctcagttgttaatccaaaaaatcactagcctccctgttctgtccgccatcctctgtgatcaacggaattcccttgaaccggtttcttccgccgctgtgaagaaccccttcgtggccagcacttctcaggtctgtacatgccaaattacttcctgttctagcgtgactctggccttctattgctctcggagtcaaccaattaaactttactaaagcccacactccgaaacaccccatcatcccatagaacgccgccgcaaccccctctccgtcgacccatgctcctattcttgtttagtccaaattcaagtgcgtgcatcacctctggtgaacctatgaagctaacccatgcttcaatttcagcagccatgccgttagtcgttcggaacgcgatcaccagggtcgtctcgccgccatgaccatgagcaagctccaatatgggttgaatccctcaaattgagcgagggtttttgaccaaataggttgacacatcacatttatgtgcttattacctcaggttcgggccaccttcaccgtagaatcgcagctccggtctgtgctcgccgcagctcagtcatgggactagagtggagaaggaatagaacttgagggacctttttgcacgatgtcagtgactcatcaaaaacctgacgaggactccttcttagatcttcgaaccgat

SEQ ID NO: 165752 - DNA, 714 bp, Zea Mays
gagcgtgtcctctgtaacgctgtgtgccttcccttttatagtttaagggaggcacatacaaggatgctgagccccgacatgcgggcccaggagcataatggaagaaatacattatgtgaataactaatgttaacagagtaacacatgagtaatcagcgggagtcatgatggctgcagtccatgcagcattgataggtagtaacccttttcctggtaacgcgtgagtaatggtgaatcgttgccctcgctatggtaacgtgtgagtaactgcacggcccacacaacgtggactgggcacgcctcctgtcactggaatggacagacgcacgtcttatccgcaataaatgccgagacatgcgtagcccagaggctttatgtcaggctccgcccgttggcttacgccacgcatagtaggccacatggcagcatcgggtcttcgcctgggtgggagctagagtgtatgcgataagatccggatcccaccagatcaggtctggacacctggcggctacggacccccgcctcggtctcgactaaggcccgggtatgctctgtcttggaaccctgggaccccactttgggcggcccagaccccatacggggttctggatcccattttaggggtccggttctcacacgtggaggtcctaggccagacctggagggctagaccgtatatacaggggtctggtactctcccatgggggtccgaac

SEQ ID NO: 165753 - DNA, 698 bp, Zea Mays
ggcaacagattctggaaggaatgtccgtcgacgaacagaagaggaggatgaagaaggtggcatcggcagttctgatgtatgtcttcttctaggactaataatttgttgtatattaaagtatggaattatggtttgtcaactactttactactatctccactctaaataggtacttctaggtttgttttgggtaaaaaaccccgatatgttaacttttaaccaagtttgtacaaaaataattaacatatatgacaccaaattgaaggacagacctggtagagtggcgagaagcctttccactgagccgtcctgggttcgacgcaccctctctacaaaatacagggggtaaggcttgtctcggttatttttgccctggaccccactcatgtgggagccaccataactgggtctgtcctttttatatatgacaccaaatcagtacattccgaacatatatttcataattgatcaaataataccagtttagtgcttaaatgttgctattttgttctaaaaatttggtcaaatctaacatagttcgaattaggacaaacctcgaagtatctatatggagggagtattatttattgttgaatctggtttatttgatgccttgtaggaagagaaagaaatgattagagatcagcaggaaaaggctcagctagaaagaaacatgagagaaagagatgcagctaaca

SEQ ID NO: 165754 - DNA, 988 bp, Zea Mays
gcgacgtttgaggaggacggggacgaggtggacagcatggaggatgaagggcggcgtgctcgagcccaccatggacatgggcacccttgacgatgcgctccctgtcaagtatgcacgtgttgcttcctcttcgacccacaacacatgtgcaccgatccaacatcatccctccatgggtttcgatacggttttggatcgattcgctccgatgatgacacacacggatgcatgtgcgggagggggtctatccaacttcttctctaagggctagtttggcaacttgtttctccgtggggttctcagcctttaacctgtggtggatgcccacgtgaaatctttccacgggcaaattactcaatctgtttagaagcgtcgatcgtaggggtctgagccacatgggagcctaacttccacgcagattcttcctcgacctcaggagaccacctcaggagaccgggcgacattccctgtctctggcctttgcctctcatgagcgagacgacaaatgctattgtgcatccctacaccatctactccgtggcccctcgcttcgctgcccccgtcatcgttgtcccatcttcccccatagcaccgcctcaggcattgctgcctttgcatccaacatcccctcggcatcttgttcgtcatgtgagcgagctgctccatcgatagttgttgcctccaccttggccacatcgacgagcaaaggttcatttgtatgcatccttctcaccatggcaaagatatgtttttccctcgactgaggcagacacctccttctctcagtgactccccctcgtctcggcattgctttagcttccttgggatgtactttcatattgcaaatcggatttcatcagtgtgtggaaatctcccctgggtggaggttgggctgtgcacaggatcctcgaggggagggttctgctcctagggatatttgtcagttgttggttgttgggaaggtttggcatgaccctcttttctcaat

SEQ ID NO: 165755 - DNA, 635 bp, Zea Mays
gctgctcgcgctcgctgatctagcatgtgacgtgcttctgacacgatatgggtacgagcaggaggaggttcttattgcgatggtgaaaatgcgccggatcgttctgggcgccttttgaagcatccaatccaaagaggtggattttgcatttgcgttgcacctagcagttgtccaggctagcagcagcaaaggatcccgctccttgagctgagatgcccgggcccgggccacccgcctgctgccggcgccccctcccccgctgatggctcggctctgttcctctgggcggtgttcgggccgcggcggttgggcgtccgccgcgaccacacgagcgctcgcgccgcacatgggctgccccagcgtccccccttggcgccatgccatgttctctggcctggccagaattcaattcacctcctgcagctccagcctgctgcaggcaggtcctccagttcgacgtcgcggggagcctcggccgggacgtatgtgctgtgcgcggcgcgacatgcggatcggagccagccaacggcaacgcccgtgacctgtgtcgcgtagtgcagccggatcggacgacacatgtaggcctgtttgcactttcttttccagcgttccggagttgattaatgatttttttc

SEQ ID NO: 165756 - DNA, 491 bp, Zea Mays
aatccatctgattcggaagaacagccgacattacatagctagtggggaaagtagtggtgttccttcttctgccttgtctgccctcattggtctgcaagaattatctctggcgaactttgatcaaactcttgaagacatggttccagaagatctgttgtcagagctggcagatggtggcgcgatggatgtttgtgctgatgtgcccgatgctgggttggggtcatcccgggcagcgtcccgtgcctcatcgaccttagagcgcggtcttcagggtcaggaggctgttctggattgcactgctcccacggaagtgactgagggtccttcagccttagaggtggctgttgcagagaactcggccctcaaggatggcgctggtgcttacccagcccacgagggtgttgccggagatgatccggctcggatgggtagcgcgagctgtgacccaacccccgagggtgtccgagtgggttctccctcccacacttcca

SEQ ID NO: 165757 - DNA, 503 bp, Zea Mays
atttggttcttaatagagtagtatagatactaagtatactcgtatgtgctagctacgttttctaggaggggaggagggaccagcggcgtatgtgctagctacgttttctaggaggggaggaggaggggccagcgacgacgtgagtgagggaaaggggagagcagtgaggttactgtgaggggtgagggagtaaaaataatctaaataacattgatcattgaattagagtaagagagaagagttatccagcaatctgaatcgttgtttttgagagtgtgttatgtccaagcacaaatcatttgttggatttagggaagactatgggtgtggggtaatttagttgggtgtgttttgcaaagttaaaattggtgaatttatatagggttaagatgtagaatctgacaaaatccgcttagggcttgtctgatagaaggggaatagaggggattggaggggataaaatctccatactatgcaaaattgaatagcaagggacattagcc

SEQ ID NO: 165758 - DNA, 591 bp, Zea Mays
taaaaactacgactttgtcgtttcttggtcatcacttcttccccagcaaaccgaactagtttgtcatcatgctttccaaaatatcctagtttcttcattaaaactagatcttccactttaaacgtggattttccaaactcaatatggctcgtttgctcggacttaaaattccatcatcatcttcgttatcactgccagcttcagcagtagttggttcagcttcggcaccagcaacatcttctgttggaactgactctttttcttcttgaacaactaacatagaacatttcatcatttataaaatggggatcatctatgaagctccagcctcacgtgctactctggcagtagacctcactctagccatttcagtttttatgagacgaagctacactcaactaattggacgtttgttcgaagcttatacagcaagttcaggaaagtaggaagcttctgctttagtaaaaaatttcaacagcacaatggcacagtagcaaatgaatgttgtggtaacttctcaccagctcatctgtttatatagccccgaaggtgaagaaggcgaaccgccaagacgcccgtactggctgatcg

SEQ ID NO: 165759 - DNA, 434 bp, Zea Mays
cacgcgacggccttgtagctcctcactcctgaggaagcacttgtcctagccgctagcaatgacttgtgacgcttcgtctctcttctccgccacggcactcgtgacgatgacgctcatcatgctcatcggtgacggcagcactacgtgccacaccgtgcgacatctttctcactccctgcccccatcgctcctatcaccgtcctgggcatttctgtcgtgccgaagccgtcgatcgtgcccgtgtccacccttccactaatgcttgccataccgacggtgggtgtcggtgccatatatgccatagatccatattgtgccaaacagcgccgcgctgccccctatgccgactgttgtacccgccatcatgccaaaagtgatgttgccaccaatgtccgtcgtcgtgccgaaggttggtgccttgccgctaatgcttg

SEQ ID NO: 165760 - DNA, 402 bp, Zea Mays
atcgcctgtcagcaaggtggacaggcgacgcgtcctctctgcaataaatgcagagaccacgcggcctagagtccttacgtcaggctccgcccgttggcttatgtcatgggcaacgagctacgtgacagcatcgggcctccgcctgagcggggagcgcaagcgcacaggataaggcctggacacgtgtcagtaccggacccttgcttatgccagggtctcccctgtcccgggacctcgttgtggcctggaccttactcggagggatctggaccccatccaaggggctcgacatgcttacttgggagtcccaggccgtaatcggggggtccgggttatgcgtacaggggtccggtgctccctcatgggggtccggtccaactgatacatcctcggatgtatcat

SEQ ID NO: 165761 - DNA, 915 bp, Zea Mays
ttgggagctcgtggccggaaatcgcgcgctggctaggtttaaaggcatgcgaccgaggcattggggacttcggtccgccacagttgagccacaccggcgacgccagggcccctctctcctccctacgtccactgcattctctttcccctcggcgaccgcgatggggcgctgggagaacggcaccggaatccaaagcagcaagaagagatggccgtgtggggaagctagtgaaggtgcacggtgtgaccctctggagtcttcgacgatgatccgctcctgcaacctcgaaactaggcgcttgcggtgggatatccggtcgtagttggccgggtcggcgctggccttggtgagccttttcttttctctctctatgtctctgcggtattacagaagctatcaaggattccattgccggacagcaggggcagggttgggcgtgcgctttggatctagacagcgttggcagattcttgcggggtccgatcgccggtaaaacttacctgctcaagttcatcgttgtagtagttttgtgtagcactttttagtttgggtaaatgattatcgaatcgccgggatggatgtctctggcgaggccctcgccgtggtgtgtgaacggcatcgccggggctcctggctgtgaaaggagatgaaaggggaatcacgcctcaccattggatatggagcaagtggtgagattagaggaagagtaccgcttcggccagattcgttatgggccgttgatggcgtgataatgcaatcgcagattagatcaaggcgtggggcggtgctgaccgttgatcttttctcggacgactacaattatgttagggcaatacctattcgtggatgcgtctgttccgtccgatttgggcgtggcgtgtgttgggccgtcgatcgtcgagtgggctgtcaaga

SEQ ID NO: 165762 - DNA, 565 bp, Zea Mays
agaagatggcttctgcctgggctgcagccttaacatgttcacagccagttttctccaacactgctgcaacccctcgggcaccggtgaaggcacaaaaatctccacggtcactgagtatttcttcaaaagcttcgacctcgtcgtcgatccattgaataaccccttcaggatcgcctcggataaaatctttgctctgatgactatgcacccacctttgcaaagctatctttaagtttcttcgcacaattcatggatacttcgtagcatttttctttggaatcccgaagttctttaatattttctgcacccttgctgtttccatttcacttatttcttgttttgctttcacaactttgaaattttcattcatttcagtgagcttcttctttaaatcttcaacctcggctttatgagcttcggtttgtgcgttaagctggcttcgctggtttttagtctatccaccaaggagagtagtattttgtctttttttaagagcttcattccttagtgtaataacttcttatcgaagatttccaagcgctagttggcagctttcatcttcggc

SEQ ID NO: 165763 - DNA, 773 bp, Zea Mays
cccatgcctataagagcagcacgacctcggccgtactccctcgcacgcccacactcccgcccgcgccggagttcaccggagtttgccacaaagagcaagccctaccgcccgccaccaccaccgtggctagttcgtcgtagtctcccccacacccagctaaactctccagtggctccccaacaccttcccacagctcgctgaccggtttaattgagcactaccgcgccggtgaggtctgctcccgtccgccattcgacgcgcgcacatcggtgaacgtggaccggccaacccaagccgccatgaccaagtcgaagctcacggacgacttcaccaaagtctggtgaagctcctagagcctctccttggatgcctaccccaccagaggtgaagatcaccgtcgacgaagcttccttgcccgcctgtacgcgaggaccgaacgccaccgacctcctccgaccaatcaccgccgtcaccaagctcgccggacccccacgagaatccccgacctcttccccgactcgctaccgccactgataaggtataatcgttcaccggagtttcgcgtttactgttccggcgagggtggagcgcgggttaaggatgggaaaaacctagggggtttttcgcactgccagtgacacgaatgattgtgttctggggacctagatgtaatacaaacaatagaagagcccagggaccccagcacaagttgtttttctttcttttccttccttttatttcagcaaagaacttcaaaaatttgtaacttgagt

SEQ ID NO: 165764 - DNA, 489 bp, Zea Mays
tgccggtacaccatgatctcgggcgtattcctctcggcgccttatctcattctcgtgccgacgattgcgtgaagcgctgatgttgctctgtgcgcctcgtcggctattcatggcatgacacaggtcgtttggtgggtgggcgagaggtacaagatgattggccgcctgagtaagcacccgctgatagccctccacgtcgggggtccgcgggaggccatcgactatctgcgccagtactcctccaacttcgctcggtgtgttcaatgcttgggcgaagtcggggtacaactttcgggcgaggagcggattctcccgttggagcctagcatcttgttcagctagttcccgctctcgttcctgagcatgacggcgatcacggcgatgggagttgcttcattctcgatgtgttctttcgtcgggggtttcccccatctctaaggattcgtcccgagagacgggttgtgttgggtcctgttctctggcttcgtg

SEQ ID NO: 165765 - DNA, 455 bp, Zea Mays
ggttcagttactatttttctatgtcactgacagtttgtgcaaaaacccttcatgttctatttcttcgcagggggaggtccccgacaacggcgcgcgctgtgaaactccggcgagcaccagtaccagccggagagagccaagactggcggccccgagcggcggacacgaacttggacctaccccgaccatttcccccaacacaatttcatctatggccaaatggtttgccctggccacggtgaccgagagtgttgcggacagatgaaggtgttcccagtgatctatggcgatttagttcaatctaaagggtcaatgagtttgagggaagcttagggatgctagaacaagactaaaggcaatatgatcagacctgatttgcgttgaccacagcgaagtgtctttgcggcttgtttgaaccaatttggggagaactcaaaattcgtgggcgctagtga

SEQ ID NO: 165766 - DNA, 707 bp, Zea Mays
gcgggaggcgtcacagtcattgttgcaacagatgaagcttagggggaaggctatggagcttctggggaagactggagtggcatgtgctccgtggattcattcatttttagggtaaatagtcattccagaaaataggactaaaatcagtcattttaggggggtcgatcattccacaaaaaaacatgcatcacaggaaaacatggagttaacaaagtcaccgattttattttttcaggcctcatttattcaactttttcaggagaatcaccgagtaataaggcactttaggggggccagtcattccattaacaaactcaatcattctatgagtattcagtcattccattttttcaggcctcagttattcaatttttttcaggagaatcacttagttagaaggcactttaggtggtcagtcattccgttttttgagtcctcaattattctaggtggggggtaggcatgatggttgatcatcggggacttataggtgtcatcgcttttgcaggggtggtggtcgcactggtggaggaatcaccaggaaagaggggtgttgggaggtcatcgcccggtggaggagaaatccccgagaggatgacggtcggaggtggtcgcctcacccggtggatattaatggtgaaatcgattttcgattttaacactcaatttagtagatattaatttttaaaatgaattttactttaggc

SEQ ID NO: 165767 - DNA, 292 bp, Zea Mays
gggagtgccaaagtgaggaggacattatggacgggtctgaatgtctcattgtagtcaacaccaggacgatgagtgaaccctcggagaacccaacaggtcttgtaccggtccagagaaccatccaccttccgcttatgtgtccagacccacttatcgtcaccacattgttgcctggaggacgatcatcagatcccaggtgtgattggcaaggagggcctagtactcttcctccatagcccatatcacatcaccaatgagaatcgccaagtgcgctatgcacgaaagacaacat

SEQ ID NO: 165768 - DNA, 309 bp, Zea Mays
gtgcaatagggggaaaaaggggcaccttgtgaccctgagtgtgtggcggagcttcgagcactggttaattggactgatgatcactaggaagggggaaaggggctcaccggagcgatgggggaagcacggcggcgctagcttgattcgctcgggggaaggcagaggagttggccggagctggtgtggtgaggacggggctcgggcggttccttttataggcgcccgagagagggagagggatggaggggacggcgagcgccgacgagctcgccatgatggcgggaatggagctaacgacgattgggatgg

SEQ ID NO: 165769 - DNA, 337 bp, Zea Mays
tggtgcctctttttttattacatccaatctgaatgaggttctgagcaaaccaggtgttctcctcttttgatcggcaagcactgtactagctgagatctacatcaaaatgctatgttgtactttattttatgtcaatcatatgtttcttttggcatccacttggtcccttgttcccaaccatacaagatttcagattttattatttaagtgccagttttatgcaatccctttcccaaccatacattgattgctctcccagtggtgaggattgtatctaagttcggtggacttattttccttacttttacatccaaaattgaatgacttctcaacaaag

SEQ ID NO: 165770 - DNA, 505 bp, Zea Mays
gccaaattgcatctcaacctagacttcacatgacttaactatttcatacttacgcaatcacgccaatacaagaaaacttggcttcacaacaatacgtactggcctattcaaacgttcctcgctatctctgtgtttcagcccacactcaacatatacataaacaagataaccatccctactactatgtctattccctcccaccacacaacttaattaacatggattgcgaaagagctcaccacaactaaaccgaactcccatgaaaaaaatccctaaatagaaaattgacaatcaatagcgcaaatgttcattttgtttccacctctcactataaaagcaatgataacaatgaaatattgtaaaatcatctaaacttcatgatctacaactttcgtattcaaaggataaacaatttttttcatctaccatttttaatttgacttgtaaggcgacatacatgatctgccaccagaacctaacaaaacatcacacataaattcaaaat

SEQ ID NO: 165771 - DNA, 1019 bp, Zea Mays
ctaggataggacgacgggttatttacgtgtaagacgaggggttctttagtaaaacggtcgccgcgaaggggtatctacctactagagccgtcagatcacatctgaacgaccaggattacatcttgctacattagaatcggcgtggatcccgaaccgtccattcccgatcccccgcctcggatttaatgaggccacgacccgactctgatcatcgatttataaacggacggccacgatctacttaaccgaaaaggtatctacgtttttaatcccagccgtccgcacagatctaacggtcagaggctttcccccgtattccctaacgcggagcacggcggcgcccggagccgtaacggcggcggcatcgccggactcggccacgcgtgattccggccacaagggcttaatccaaacgtatctacacgttgcgggggcaaaactgaagtcgattagggtgttcatactcactatagtcgtgtcggtgttgctgcccacgacgcccggcggccccgccgtagatccgcgattctggtgagcaatcgccggccacgagagctttcttttcccccgagaaagtggctgacggctccccgtagacacgacgaagcgattcaggggtcgtaccggcgtttggggagatagcagaggtcaacgacggcgcacgcaggggcgggcatagcggtgacccattgctccaccggccagatgactccgcggcaaaacgacgacgctgatgattttgtggtatggtggctctctctctggtcggcaatggcggtgctcgtacctgttggtcatccttgttttgatgggagagaagtagtgtatgtgcctcgtataaatactcaagggtggagcctgagtcaaggaacgacagccgtatcctaacaaccccgccctagatcgtaacaaaccaatgctaatttcacggcggccacaataaagaagataaacaacgtcaaggggccccactagccatcgactatttctgacaatgctcggtaactagtctagtgagg

SEQ ID NO: 165772 - DNA, 518 bp, Zea Mays
atatgaggaggtccggaaccagctaagggggtcccaaaaggcatacacgggggtctgggtcccacttgcggggtccggactcacagtagccgcccctgagcattttcaccactgggacaggtggtggcactggatctgttccaaagcggggagctggttccgaggccaatcggtcctgtcagctcatttcctaggacgcgactacatgtaaccacacgagtatctagtcttgacacaataggatagggtacctagttacgggttatcaacgggtatcaacaaattgaatcacaagaaaacacttaatcgcagacagtggccacgaaaataagtacgaaccaatcatgggtgtaggttgttgcggtgggttgggggggggggttcgtgaagtttggttggaggacaagaacgggcagggggcgcacgacatacgaagttgtgcatgcacaaaagtgttgcattatattagtagagatttggttgagtgtgtaactcatttagaccgtgttcaacagcta

SEQ ID NO: 165773 - DNA, 588 bp, Zea Mays
ggcagcaagccatcaactggcttagtgaccatactttggaactccttcaaaggtgaggaaatttcacaagatacatccagagctagctacactaggatgtcatcatgatcaggcatagtcagagaccttcttctggaatagactttgaaacatggtggcttcgctctccaactggctgacccaaacaatacaccagtcgtcgaactcttcaccctggaagattccttaacaacatcttgctagacgaccccaatcaacagacaagaagaatctttgtcattgcaactcacagcagcaatctgttcagacataatcgaagtatccaagccaacctcctgaccttccaccggtacaacgaccatttcagcaggggcaccagaatccatatgtgatcccaccggtttagatactaaaggtcagcctccccaacagcaataccagattcgaagcgagactgatacactataaaatgagcatttggtcccactagagcaggggccataacaacatgtagcaccttgacgcccagggtagacaccttcggacaagaattcaaaaagtcaggaacaccaggcgccgccaactcct

SEQ ID NO: 165774 - DNA, 562 bp, Zea Mays
ggtctacgtgcggcggcgggcgaccgaagtccgacgacgatattcttgcttttccggtgaggcaggtcttcgattctcgcatggggaagcttcatggctccacggggaagctatccaaaggctcaattgaggttgaaggtctctggaaatggctggccacggtggccggcactcgggtggctcgggcgggcggccagtgaaggtgtgtgcggagtgaggtgaggcgcgtctgggggtggtcttaaaggcgcgggcgagcacggccgaggggtggctctgacacacgctcagggtgtgcgcgggcgagcgccagtgtgcgctctggcgtctgggcacggcgtcgagcacgtggcagcgcagggagaggtcaagttcaagcgcggattggctccaaatcttcgcgattatggccatgatcccgttgagagatctcttctctgacatttctttgtcatttgtgtgtggaggcttatgggttttgttgactggatcaaaagatatggagggatgaagttgggtttgtctcactgctgaactccgagaggaaatcccgggtttgatg

SEQ ID NO: 165775 - DNA, 658 bp, Zea Mays
gcagaggaatataaaacatcacccaccaaaaacatatgaacaatgtagtgtttgtgtggtgggttacaaacaaagcaactccccgatgaaggcgcaaaaggacactatgtgcaggatgggaggaagaagagaagatgacgattttctctatgccactttgcaacgtgggcatgagatgagtgatgagttggagggtgatgaaaagtattggtagatctacaacaagcatcaagtgctcaaactggacagcaaggagtggaagatgacttcattggctctgaggagccatggttcttagggatggctggggttggagttggttcactggcaagctgcttgatgtatccaatgagcatgatgtatcagaatgctggggtgagtcttgagtccagcaatggccaaactgagcacagcaagcaagcatcagatgaagaggacaaggattattggaatgtggtccttgacaggataaacttagagctgtcacccgagtcgcctcccttgcctaatatacagttcaagttacctagctactttgctcaacaaaaggaaatgacaagtaatcaagagatgatatcctagaaaaaaataaagcaatgacacttgttggaggactctatataatagttataaaatacagtcaagtaggaaaccagag

SEQ ID NO: 165776 - DNA, 723 bp, Zea Mays
gaggaatttgggtccacgagagcgctttgcgggtgatctccaagtggcaaggaacgaggctgtcgaggcccgcactcgtgccgaatcgatcaagaaggcttatgatgacctagcaaaagtgacaaaaaagatgaggagacgggttaccttactcgccacgagtgtatgcgggtgacttcctggctttacatcttggagcgagggaaggagactgtcaagtcttaggtcacagccttgaagaaagaagtggcttactgggtcaaggaggaagagaggctccaggcctgcctgagaggtaggatctttgtacccttactcctcggtatggtactcatcctgaccccttctgctctttccatcgctcatgtcctctttggccaaatttgcacggggaagtttgatgctgccaaggggaatttcatcgaagtgcaacatcgcctaaaaaggacgaagagggagaatggtcgtctatcaaaggcggtagacgtcgcgcgcacacgatttagggtgccctttccttctaggcatgagcccctgatatctcactttgagcttttcacgggctaagttaacgagctcagggtggaggccttctgcatggggtcaaccaaaccttcatcatcgccatgtcccactatgtgggggaattgacttggaagccttgagcatatgctattgcgacgcctggagtgttgtggagctcgcggagatggttagaacttc

SEQ ID NO: 165777 - DNA, 322 bp, Zea Mays
gcaagagcagatggacaacataagaacttcgggtgttacaattttgcgtaacgaaaggatactaaggcccatgtgattggatattgcacaaagtggccgactggctggacaagtgaatggttttatgtgaaaactgatgaaaagagaagggagaagcttatgactatggtgatgagtcccctgaaattgaacttcggcatgacaaggccattatgcaacatgcaactcggctccccctgccagttagccaaagtagagttcagggttttggctgaacatattagtacctaggacctggttcaagaatacttggcatataaaa

SEQ ID NO: 165778 - DNA, 457 bp, Zea Mays
gggagatgttcctgtaggggaggctgaggtaggtctccacgccatcgaggtccatgcccggcgccgcttccatggtgcacatgtggaacgagaagtcagactcgcggcttgcgttgttgctgccctacgtcgtcagcacattgtgcttgcctttcggtgggtggcgcaccagcagcgggcagctctggaacatggcctgggcattgccaaacacaaattaagtccacggtgccccagattaaggtctgcatgtagaactggatcccgttctcctcgtacaaggtgtcctcatgaccttccatgctgcaccggtagacgaccgacttgttcgaatttgaccttagcgccatgtcctacctcctttccggccctgtcatgtttctgattgtcaggttctgtggtatgaagccgtgacccaaggcatctgcagcagcaacaacaaattaatagttctgat

SEQ ID NO: 165779 - DNA, 562 bp, Zea Mays
acaccctgtttaacctctttttgccatcagcgccgaaggcagttgtcatagctttgtcttctgccttcaaatacgctccaagtatctcatcacttgttgcttctatggcatccaacaaatcatcatttggctcatcaaactagttcctgaaccgaaaagtgtacttcagataaactagaccactctggctagagccggcggcggccttcttcgacatttcccactcgctcgcaagaggccatattttgtaagcaatatgctcttgaactaagtctcttgtgccaatataagtgcacactgtgttgaaagcagcttggcacgcttgcacatcattcccaagtgcagtgggtggccttctaacgccgaagcgagaccatatagggcgttgaataatccctctcacatcttccctctgactcaggtcactctttacataaaaccattcctgcatccaagagcctggccacctcttctgaaatgtgggcacagggtaactcgcctcagatcgaggcacgaagctgtaacaaccaaaattgttgtgatagtgttcctttccggtcgc

SEQ ID NO: 165780 - DNA, 740 bp, Zea Mays
caactttgctaagaagaatttgactgtatggatgaagaatggccaccaccagctcagtcctattgttatctattttggctatcctctgggtttttgttggtataaaattggtctgctcaaccacgtatatggttcagttttgcagtaatatcatgattcattgtcaagatttatcatggttacctaatagttcgttgccaatcaatcatcatggtcactaatgtagcaattagggcatgtcaattacctgaacttgtgctgaagaagaatatgccaatttgaataagtctaattttcatctgagaccaattaaactcggttcaatgtagctttgtcattccacaattatcataaccaacaaagcccacctccatttctgtagagtttggggcagcaaaccccagtccgaatgcatcaccataaacatcatcagatgtagttcatatattccggtctcggcagagcaagcagtgctcccaacaggttttggcacgtaggccccaagttaacaaaggatttaggcacaaatacggcagacccccaattatggccatatcagaaagctacaccatcttatactaaaaaaaggaaaccaatataaagcacctctaagaactgtattaggagtttcttataaatgcagtaggtcttaatgttgtcctatgtccactaaaatacaaggtgtataaagcaaggacaaacaaacatgataaacccatacatattttcaaaaaaaatat

SEQ ID NO: 165781 - DNA, 383 bp, Zea Mays
cagattttggcgactccgctagggaatgatttgcaatagtttcatagtgacaaactgctggcgattggcgtccttatcgccaatcatagtcagggctatggaggaaaagacagcgaagaagacggcgccggacaaatctgaagttcatcccttgaacgtaatcaaggtcacgatagaggaccttatagaggcggaccggaaggagattgaagaagaaatcgcacgagagatggaggagaaatagaacgagagattggcttgctttcataaggccatgcaggtatgcgaagtgggtttccaatatagtgccagttgagaagaagaacacagggaagatcaggatctgtgtggattttagatatttgaacagagccaccccgaaa

SEQ ID NO: 165782 - DNA, 445 bp, Zea Mays
gtatttgctgaagcggtcgacgacggagaggatgaccgtttttccgtgcacccggggtagcgcttctacgaagtccatcgcaatgtccgcctagaccgccgagggcaccggtagcggctgcagcaagccagctggatgtagatgttccgacttgaaccgctggcacgtcgtacacgcccgtacgaagtcctgcaccaggcgtctcatgttggggaagtggaagtcccggcgcaggcggtgaagggtgcggtggacgccctcatgcccatcgtcatgcacggcggccacgatctcctgcagcaagggccacgccggtggaatgtacaggcgcccctcgtaggtgaccatgccgtcagccaccgcccacggtgcatcgcgggtgccgacgccgactccttcatggatggccgctagagccgggtccatggcctgggcctgacgaagg

SEQ ID NO: 165783 - DNA, 627 bp, Zea Mays
cacgggatgggcagataagggcgcacggtaaaagatcttcgccgacggtgagctggcgatcactccagtgacctccgtggccctctctccccctttgcggctgaacagattaactcgccggtgaccgccgcttcctggctgtgtgccgcgtgtccaagcctatccaccgcgtcgccatgactccctgtacccgtcccatcgtcgacggggaggttgccacggcggtggacacgaattcaccgcgcaagcttcttccccatccccggccgccgcgcgtcctcctcaaaattcacggccaccgttttactctccctataaattgagtccatgactagctccgtaaggtcctaagcttaccagccaccgttaatcagccacaatcatccactcgtgtgctcgaattcggagtttcccccaaatccgatttccgccaccgtgaaaccaagctcaccgtcgccagccatactctggtcagtttccgtcttctgctcccttgtttaagcattcacatacatcggtgatacttgccaacccatcgaattgaactaagagccctctggtcgccgggaacacgaccgtatagtcgccatactcacggccatcgtggccagagctccatagttgacc

SEQ ID NO: 165784 - DNA, 622 bp, Zea Mays
aaaatttttcactacagcctaaggtgtttgcactcttgtcatctattgaccgtgcttcggcataagtggtaaaaaaactcttagtttagcttcgtcttgacaattcaatggccagaattagatctactgctaggctgacgaatgaatgcggggaggccgaagcaatcgagacatctcggatctcagaaattttatctaaagaaggagtagagagcccacgttcctaggtcttggaggagttgcctttggagattcattatcttccgaagaagatgacaaaaaagtccgtcgaaggtggtcgatcttcagggcatgataaggcagaaggagagccgaaagaaccaaaccttacacacagaaccaaaagaaccaaaccttacactcagaacagatgcaactgatcccactcaaactacatgtgaagatatagatgagctcagtttctttgtgagacatcttggcgagggtgagctgagtgagaaggaagctttggagctggatcacaagggcgagtccatggtgtacggacctggagctatgctcttcggcggtggagataaaatgcttatgtgcgtgcctaatcctgatgagtcaagaattgtaaggaatatcacccgaagca

SEQ ID NO: 165785 - DNA, 472 bp, Zea Mays
gctaccctcaagttcttcgtgattatacatgcttgttcttctgcctcttgaataagttcaggtccaaaaaactgactttctccagtctggtcccaatgtaggggggtcctgcacttcctgccatatagagccttgaacggtgacatattcggactggcctcgtaactattattatatgagaactcagcataaggtagactcttgtcccaactactaccgtgctgaagggcacaagttctcaacatgccctccaattcttgattagtccgtctgagggtgataagtcgtactgaagttcaactttgtgttcatattctcatgaaaacttttccaaaatctaggggtaaattgtgatcctctatccgagacgatcctcttcggtacaccgtgtagagacacaatccgagccatatatactctgccaattgagatcccttataagtagtcttgactggaatgaaatgagccactt

SEQ ID NO: 165786 - DNA, 489 bp, Zea Mays
cagcgatgtgtggtaggatggggatgggctcctaagggtacgcagctcgacgtgaagatacaattgagggatgaggctccttgtgctggtggcgtgctgtgtaaatcgcagaacggaggaggatcaaaggaggtgttgtggagaaggacggttacctgttggaagcgcgcaacaaaaaaagcttgcgcagacggacgatatctagcttctagcatcgctgccatcacggaggacgtggctagccatgggcggaggcatggtgcccatcagcgaacggaggaagatggcggcggcgcggtgccgtggaggaaaatgggagacgaagaaacggggcggtgtttagggtaaagaaacacgttggtggtttgtgctgaaataatgggcctccaaataaaaatctggttcgatcagtaatgattgtggcatgaatggaccagaatatattatcagactagggcttcctctagttactagaagcccagggcttct

SEQ ID NO: 165787 - DNA, 431 bp, Zea Mays
cggtggtgaagtaattgctccagcgagcaattcgatggtggtgaggcctccaccgcgcggacactccacctggaatgatccctggccccagacacttcaggcgagatactcatcagggcccaagtccaagcaattttgtggagcgctggcggcaacctaacctgattatgctcggcgcagatggtgagttcggaggttggcttcgcgagaggaacagacgacactatttaatgaagagcagggtgtgtggcgctgggtcaaacgtcgcacggttcgaagagtccggttgccccatagcaccaaggaatcacggtatttcattgtgcgtgcgtgatttccgcaggaagaaagtcctgatcggccgggcccatgcgtcattgccacaacgctattgtcggcgtttcgaccccgggggggtccctggaccgacg

SEQ ID NO: 165788 - DNA, 877 bp, Zea Mays
tgccttcgtttacaggtgattcgggttcggatccacagatatcgaagtagaaactattcccggcctgggaaatccataaccaacatttttaaccactttaaataccctaaaatttcttacatccactaaaaatcacaaaactatttttactaaattctagggaaaataagaagcctaggaaaattagtttcacaattttagcatttttctacatttttctacatatttctaaagttttcttgaaaaagaaaaagaaaatgattaaacagaactgggccggttctggcccagacggcccaggtccagggcaaaacgcgaggtcgagctgtgcggtgttcctgagcgttttgggggaaatcccgaattgaggctttctggtggaggattggaggtgcagaagggtgcgctagatgcttgagtacataacgaagctgacggtgcactggatttatagactccgggggcggtggctctcaatttgaccgcgatgtgttggcggccggagacggggaagaagcttggcgcgcggttacgtgtcctatggcatggcaaggccttaggtaaaagaaggacggcgtatagtaatcgactgcgacgtggtaagatgaccgacggcgtggcataacagcaaagaacggcggcacgccggtgatggccgtgcggccacgtcgccggtaaggggagaagtgaccgagtggccacagtgctccaagtttatccacggtgagatcttttcaaggtgagcaacatccacacggccgcggcaccaatcccggcaaagaggtcgccggcggtgagatcttttctacggcggtcgatctgatccggttagggcactgtaccatcaggagtttcagtcagacgaacctgacagcgc

SEQ ID NO: 165789 - DNA, 665 bp, Zea Mays
cgaattgaggcacgaaacgacatggaattgagccgatacttcacgaataggtttgtataggtgtatatgagtgaagtgtgtgcatggtttgaatttaggcgaagaaaaagagatttgggcactcggctcggaaacgatcgctcgaaacggggaatgtggtgaaatttaagcctggaatctcggattggcatgaaatttggcaagtatgttactggaagtgttgtgaaggtgcttgaaaatttgggttcaattggagcatttttggctggtttgggcatttcaccgaacacttggcgtgcggtgaattaggttttgggagatttaggcaaattaggttgtgaaaccctcccaaagggagcaagaaacctgcagggatactcaatggggacaattgaacacattccaccttttggatttactgaatttgataggaattcacaagatttgaatttgatacaaaagggggtggcactgcctagagaaacagagagagaggaaggcagaggaggggaggaggctgctcaccgagaggagaggagcactggcgaggtcgccggaggatcgccgccggtgaagggagatcgccggtgagaggagaaatcgccagggacagagagagagcgcttgcaggggagaagaaatgagcctctggctcggtctcgggc

SEQ ID NO: 165790 - DNA, 679 bp, Zea Mays
gtcagatgcttgtcattcatgtgagttctaatattctatctctcagtccccttgttccttggtggaattaatttcggatacaatacaatagattgaacattaaaacatgtgattcctattctttgataatggtctatacagtagaatgagtaatactcactaatcactcactactcatcccagtccaagtatgtcaataatgaacatttagatttttcaaagttgtagacagctatcaagtaccctcttagtccagataatgtttgttaattcagtatcatatttgctttggtagattattgcttgctctgactaacataacccgatattttcttgcaccaggataataattgtttgtaatcatgagggaccaatacaagcatttgtagtctaaaagccttaacagaatcacaagcatcatagtctattctaggcacaacaaaaacactaggaactgcgaaccctaaaaacagatgacaggcaacctagcatgcctctcagtcacacaacagcaagcaggtcactacgtggaagcaatacaaacatgaataaatctcggctgaactcaatcttgaacgacaattttttgacttggtccattcctcctaccaaccaggagaagcgcccgcggatctgcttcagcgtcatcacaggctactctctcaccatcctttgcaag

SEQ ID NO: 165791 - DNA, 376 bp, Zea Mays
ttgatgaatgtattggtcgggaaagtcaatatgcattgtataatgtaaaatcaggtctgaggactcaggtctggcggctgaaggtgtcttttctattctatgcttcacataaggttcagcttgttctcatattgctgagtaatatagagaaaatacaaatgaatatattaattgaactcttcttggacttctgtttgtgttccttgtaaaatataggttataatatgtgagatatctaaccaagtacatttcactatttcagtttagtttatttctcctgcttggtcaatttgaagtagccagttctttttttctttgcctttgacaccagctttctttgagtgcagttttatgacttttatgaactaatttcccc

SEQ ID NO: 165792 - DNA, 329 bp, Zea Mays
cttgcgcccgcgcctataaaggccagtagcccttggacatccttgcctcagccacgcacactcgccgcgctgaatcaccggaacattggccgtgaacagagagctccaccgcccgccaagccgcctgagcttcggtcaccgtggccagctcaccccaaccatccctcgcccacgccagtagttcggttagcttcaccggagacccgtcaagcttcccaaacccttagactgagcgctacctcaccgaaaacaccggatcatcctcgccagacttctttcgttcaccggagagcatggaccgggtaagccactacaccccgacgccgacc

SEQ ID NO: 165793 - DNA, 336 bp, Zea Mays
caagaaaagagcaacatcatctgcatacaacgaaatcctctgcggtaaggatctagtagaaagaggttgcaaaggcccttctccttcagctttagataccatatcaccgagtatatccatcaccaaaataaagagcattggagacaagggatctccctgccttaaacccctttttaagtaaatgttctttcccgagattccatttaaaatcacttgcatggaagaggcagccaataacccgctaataatatctctccaaacgtgaccaaaacccaaattttgaagaacctccagtaaaaaaggctaggagactgaatcaaacacatttgtaatatc

SEQ ID NO: 165794 - DNA, 502 bp, Zea Mays
ccgtaattactttatactaggataggacggtgggttatttacgtgtaagacgaggggttctttagtaaaacggtcgccgcgaaggggtgtctacctactagagccgtcagatcacatctcaacgaccaggattacatcttgctacattagaatcggcgtggatcccgaaccgtccattcccgatcccccgcctcggatttaatgaggccacgacccgactccgatcatcgatttataaacggacggccacgatctacttaaccgaaaaggtatctgcgtttttaatcccagccgtccgcacagatctaacggtcagaggctttcccccgtattccctaacgcagagcacggcggcgcccgaagccgtaccggcggcggcatcgtcggagcagcgtcccaatggtcatcccgacgcccaggacccaacccgaaccgtgctagacgaagtgcgggatactatgaacagcagggaagggctattaccggctcatatcgcgagttg

SEQ ID NO: 165795 - DNA, 823 bp, Zea Mays
ggtgaacaactttgcttaagtgggcaagccatgttctagtgagaaatttagagataatcatgctcaaactttggctgtcaggctgattaagttctgaacttcagacaagcaatgcaactgcaagcactttgggcatgaattaatgcatgatcgagcaagtatttgcctaggattgctataacaatattgtagctggatcttagtactataactttgttaaagggtgtcgatcatgttactacacaaaattggaagttattggctctgtaaattcccctgtcagaaccactgatggagcattccatggtacagtaacccgagtggatcagaacgccagcgtagcttgctcgccgccggtgacccccccccctgcgcaaagattcgtgccgccgccgttaggatttacgctcgctggtaaccggataacgcttcggtagaaagatcttcgccgccgtcaagctggaagccaccccggtcagccacgatactcctcccctggctcaccgcccgcgggtaaagtgctcaccgtcgtcgtgccatcactgttggccactgcgtgtcctaaccgcgccatcgcatcgccatgactccctctaaactccccgtcgaccaccagagttactgccacggcggtgaacacgtgttcactgcactagcattcttcctcaccgccgaccgccgtgtgtctcgtccaaaattcacggccaccgctcgctccgcctataaattgagccctcccctagatgcgtaacatcatcacccacccagccaccaacaaccgttagcaaccgtgcctccgagagcttgaattttggtttctccc

SEQ ID NO: 165796 - DNA, 730 bp, Zea Mays
gatggcacggaaataggaaattcatggaatatagaacatctcaggaagttttacccctggctagatttcaaaagctatcgaggcagcattgtatcctgtaatcggaaaatacatcatcaataaaaaagatttcattctcaaggacactcgaactatttattatcgatctacatgcttactcaacttagggtgaccactataccctactaacggagcaatcggcttaagtcagcagtgacttaagacagtgcaacatgctcacgcttactcgacttagggtgaccactataccctactaacggagcaatcggcttaagtcggcagtgacttaagacggtgcaacatgctcacgcctactcgacttgggtgaccactataccctactaacggagcaatcggcttaagtcggcagtgacttaagacggtgcaacatgctcacgcttactcgacttagggtgaccactataccctagtaccctactaacggagcaattggcttaagtcggcagtgacttaagatgatgcaacatgctcacgcttactcgacttagagtgaccactataccctactaacggagcaatcgacttaagttggcaatgacttaaggcggtgcaacatgctcacgcctactcgacctagtataaacatgcttacgatcactcaacttagggcgatctctatgcctcattagctaatcaattagatagaatagggaaaagtttcaaaacc

SEQ ID NO: 165797 - DNA, 455 bp, Zea Mays
catcataggaaggtgaagcaaattcatcatcactatcactatcatcaataatatcattatcattttgtaccttccgttcacctctagccatgaagcataggtgagaagtcgatgagggtgatggtggtggtgaagagaagtccccagcgatggcggcaactttttcatcattttctttttcacttgaagaagacccacttgatgacccaatgtctgtgagccagtcaccaacaatgtatgccttcccatttttctttttgtggaacctcttgtgcttcccatccttcctcttaaagaatctcttttcctttttctcgtcatcactgtcatcttctttcttgcccttgaacttgttcttcttaggcttgttacattgatgagcaagatgaccaagctctccacagttgtaccaatccatttcagaaatgggctttcttttactagaaaagaatttc

SEQ ID NO: 165798 - DNA, 833 bp, Zea Mays
caaagacacaagaagttaaaagatgttgtgttgtctccagttcatgatcgcagagaaggttgctccatccctctctcctcccatctagcaattgtccaacatttgttcttcattgctaaccaaagaaaaaacttgcatttcggagggacccaagaataccacaatcttttccacagctcaaaggtggttgatcccatgaacaagacattgttgtgagacttcgaaaagaacaaacctaaggcttcatgcctccacacatgcatatcttcttcctggttgagctcaaccttccccaaggtatcccaaaggagaaggtaatattgtatgcccacaagggaaagagtagaattaatatcccttattcatgatctattgtgcatgccttgggccactgttttggaagcaatagccatatggaagcaaagacattgggcacaagtttatcaatagaacacccatccaaccatttgtccatccaaaacaatgtgttgcacccattgcccacattggaaactacagacatggcaaacaacttcttggcgtgctgctacatagggaaatctatcccattccatggcctattagcatccgaagccatttcatttggagcgcccatcccataaactgtaggttgggtaaactgagacctccaaggttcaatggtctagtgactttatcctaggacataagaaagctgcccccattcacctctttcatgtccttccaaagaaatcatcgacgaatcttttcaatagccttaatcacccactatgtaacattcacgacgattaacaaatacatagggatagctaagagaacaaatcttactggga

SEQ ID NO: 165799 - DNA, 954 bp, Zea Mays
gcataagtcaggtcatcttgcacactaaggtcctccattggtagctgctcctcaggtatcctgaggcacttctttagttgggatacatggaatacatcatgtacatctgctagatgatcgggtaattctagttgatatgcaacttctcccactcgcattaagatcaagaaaggttcaatgaagcgaggggacaactttcctttgacttcaaatcttctcataccctagattggtgacactttcagatacacgtgatcaccctccttaaactccagtagtcttctccgggtatcagcatagctcttctgccttgattgtgcaattctcaaattctcccatatcattcgaacttgttcttctgcctcttgtataagttcaggcccaaagaactgtctttctccagtctgatcccaatatagaggagtcctgcacttcctgccatataaagcctcaaacactgacatcttcagactggcctggtaagtattattataagagaactccacatatggtaagctcttatcccaacttccaccatgtttaagagcacaagctcttaacatatagtccagcacttggttagtcctctctatctgcccatcagtttggggatggtaggctgaactgaaattcaactgtgtatccaagctctcatgcaacatcttccaaaaccgagaagtaaactgcgatcctcggtcagacacgatcttcttatgcaccccatgtagataaactatccgagtcatatgcaattctgctagcttggctcctgtgtaattagtcctcaccggtatgaaatgagccacttttgtcaatctgtccacaatcacccaaatagagtcatacccagcaggggtgcggggtagtctaacaatgaaatccataccaagttcttcccatttctacttaggtatcttaagcaggtgcaatagtctagctagtctttgatgttcg

SEQ ID NO: 165800 - DNA, 388 bp, Zea Mays
ggccatcgctgccttggtcaatgctactgcagataatacccgcttcttacgtgagatggcgagtaatcaattccagcaacatggcgggagagttcctccacaaggaccgcgtgaaacctcgtatctggaattctctgagatgcgtcctccactctttattaaagcagaagaccctcttgaagttgttgagtggataagggtaatggagcaaaagtttggattagtctgttgcacagaaatacaaaagacgttatttgctgcccaacaactaagaggccctacgagtacctggttggcgaattttgtagcagttcaacctgccggacatcaggtcacttgggatgaattcaagctagcattccgtgaacactatgttccaaagggagtg

SEQ ID NO: 165801 - DNA, 477 bp, Zea Mays
gtacagtacatcacagcacagtacaatgcaatgacgcgaactgttgaaggaaactcgagcgctggagtcgcagcgcatcagcatcggcagcaggtgccgggcggtacgctgtcctcgtcaaggcgaaactaaaagaggtcagctgcccaggcctccatgaagctttgcctccggtagtggaacataacgaaaggctccgtcttggtgctcagctgctatcaacagtttttcctcctgcgcacgttacgtacctcgggcggccttttaccactcaccagagagtgagagacaacgctgcggccttaaccacacgcggggctaccaccgcgcgatcgatccttgcattgtcaccgaagaccgaactcgccgcagcccatacagcggtcggtgtcggtcaccggctcaccgccaacctcgcttgccctattcatcagctgcatcgttttcctgctgccgagctgcgcagcacccgcaccg

SEQ ID NO: 165802 - DNA, 490 bp, Zea Mays
caaagaaatcagccgcggtgaggtgattagactcgtgattagtcggtcgagtggcttcgtggtgttgcgctggtgctctggggaaactctggcgagcttcgcggcggaggaattgcgccggtgccgcgcgtccgccgttgaagcaggcctctccgtggtgcgggcgattgatcacaccgtcaaaggtaataaatctatcattcagttcatcgcgcagtaccggtcgatttgcatatctcgggcagagcaatgttagactaggaagcgggatggcttgccgccggcgggtgcgtcatcgggcaaacggaaggagcagggctggttctatcccgaggttgaggacggctccccttgcgttggatcggaaacgggtggccaagatccgttcacggttgagcgcatggaagaaatccaatcgtgaccggttagtggtgatcggagggctgggaattttgcgcatgcgtggttagatctcgggcatcaaactcgg

SEQ ID NO: 165803 - DNA, 559 bp, Zea Mays
ggtttcattcgcccaagttcatccccttggggagccccagttctatttgtgagcaagaaagatggttcgagaagaatgtgtgttgattatagaagtttgaatgaagtaacaattaagaataaatacccattacctcggatgaagatttatttgatcagatgaagggagctaatatattctcgaagatagatctaaggtcgggatatcatcagctaaagattcgagcagaagatgtacccaagacaaccttcaccacgagatatggattatatgagtttttggtcatgtcgtttggactgactaatgcaccagcatactttatgaacctgatgaataaagtattcatggaatatctagatcagtttgtggtcgtattcattgacgacatactggtatactcttcgaatgaagaaacatatgaatatcatctaagatgagtcctacaaaagcttcgtgacaaccaattatatgcaaagttctcgaagtgtgatttttggctaaaggaagttgctttcctaggacatattgttactgacggcgaaattaaagtagatccagg

SEQ ID NO: 165804 - DNA, 653 bp, Zea Mays
tgaggatggtatgctgagcttcgtattacatgggtcccaagtgattcctacaattgctcccaaaatcgtgccacgaagagtgctcctctgtctgatactatagtccttggtattccatgcaaacgaactatctggtcaatgtagatttctgcatacttctccgtcctgtgggtggtgtgcactggcaagaagtgagctgacttggtcaatctatccacaatgacccaaatggaatcatggtgccgggaggtattgggcaatcccacgataaagtccatgcaaatgtcctcccatttctaggatggtatggtgaggggttgcaaagggcctgctaccttcaaatgactggccttgactctctggcaggtgtcacattcggatatatacttggcaatttctctcttcattctggtccaccagtacaaggatctgagatcatgatacatcttgttactgccggggtgcatggagaattttgagaggtgagcctcatccaatatcttctttctgaggtcagggttcttgggaacaaccagtcgatctccaaaccatagaattcctttgctatcctgacggaagcatttgtatttttctgctttctgcttgatcatttccttgataacctgaacacccttgtcttcaatttgtgccct

SEQ ID NO: 165805 - DNA, 284 bp, Zea Mays
tgggcgggttaaatagggaaattcaggacatccttgcttataaagattatgctaacgtaacccgattgtttcatcttgcttgcaaagctgaaagggaagtgcagggacgacgtgctagtgcaaggtctaatgtttctgcaggaaaatctacaccatggcagcagcgcacgactacgtccatgaccggtcgtacaccagcaccaactccctcgccgagtcgaccagcaccaccaccttcctccggcgacaaaccacgtacatcttccacaaattcagcaaccaaa

SEQ ID NO: 165806 - DNA, 1043 bp, Zea Mays
tctcatctgctagaggcttcatcttgataagttatgttaccttttttgtttgttgccagggtgatcctcatgttcactatccttaccctagactaagacacttaggtcttctggagctcaaaccacacctcttgggagtctcgtaggttgaaacttgactcatgacttctagagtcatggaggtcatgaagaaactgagaacttgtttttaaacactgtccatcgggtgtactctgaattgagttttcttgacgaatcatctcctatcttggtgttgagcttctcttctagtgcaacattccaacaaatgtattatagtttgtgtttatctaacgaatcgtcgtctttcttggtgttgatcttctcttctggtgcaatagcagagccatcaaggtagccctgtagctgcgcacccctgaggataggtagagattgtgtcttctagagcgcggagttattttttaaaagctttaccatcatgaatagtcctaggaggggtgttggcataatagagtttgaggtagacaccatagagacttgttaccgtgagctatgattctagaagtgggtggaggagttggctctgattaccatgtaaggaaacatggcaccaggtttaagttgttcatcctgacctattaagccaagggaggctgagcagattacaatatgacttgaagtccaactcgagtacaactaccttaaccaactctaatgctaactctgctatctctgggatagatcaaacttgattctatttttaatccgagtttaaggtctttctctattatatcacaaccgtgtagacccctgatctgatatgaccataaccttacaagcacattatattctaacacttaatgcaagccagaaagagaagtaccttgtgagcaggaagatcaagatccttgttctctcggataactttccaaatctgttgtgaactaaacagaaaacctgaagcaggaactactcctcttctatcacctgcaagacctcctggtgcaattgaatttgaaaatctctgcctaagttgttgaacc

SEQ ID NO: 165807 - DNA, 488 bp, Zea Mays
aagagtcaccaccctgtgtgatgagttgtgcaagctgaaactagaagttgtttcttcaggtgtcttaaattatatctcgatggagcccacattgcaagagcaaatagtcagggcacagattgaagacaagggtgttcaggtcattaaggaaatgatcaagcagaaagcagaaaaatacaaatgcttccggcaggacagcaaaggaatcatatggtttggagatcgattggttgttcccaaggactctgagctcagaaagaagatattggatgaagcccacctttcaaaattctccatgcacccgggcagcaataagatgtatcatgatctcagatccttatactggtgaaccagaatgaagagggaaattgctaagtatatatctgaatgcgacacctgccagagaatcaaggccagccatctgaaggtagcaggcactttgcaaccccttcccataccatcttggaagtgggaggatatttgcatgg

SEQ ID NO: 165808 - DNA, 697 bp, Zea Mays
gaagcgagacagacgaccaagtcctcgctaaatagacccatgaagtacgagttcccaccaagtggacccacgaaggagccccatcccaacactactggcccacgtggctacgacgggatgcgatgtccttaggccacactcgggtaaacgtgcggcaccgaaggaatgtcgagtggtcaccattagagcacaaaccttacgcccacgtgtacaaacctaggcacaccaccactgtgttgtggggccagtctgtgggggatggatatcccccgggccaacacccgcatggaaacgcgcctggcttccccctatgatgtcctatggtgggccagccgaaagtaactaggcaaagcaagtccattctgaaccagcaaaggccaacgcccgagttaggtgccacaagagcacgagtatatcgtgcggtaactcgggcggatgagtgaagaggattccgagatgtaggaagacagttcactacaaactgggagataggcgaatggattatgtttatcacctgtgcgggatagctatccttggtcgtgtatataaggctaagaggcaccactaccattttcatctcaccttagcccaacctactcataattcacggtttgtaatctcataccagtaccaagatcatcacatgacgtagggtgttacgcctttcgcgcggtctgaacctgtataagcttctgtg

SEQ ID NO: 165809 - DNA, 488 bp, Zea Mays
gggagatggtggctaggccaaaagatcagggtggtcttggtaataatggatactatgatgatgaatgagttatgagtgcttgttggtcaaatggatttggaaaattgctcaaggttctgaggggttgtggtacaagaccattaaggccaaatatatgcatggagatagtttttggagatcgaagtgcaaaggggtttcgcaattttggagaggccttcacaaatggagagcgataaataaagtaacaatggggaaggatcctttttttggacggatgtttggaaggggaggtgccgttaagcatcaagtaccattgcatctttgatttatgcaggaataaagacgccttggtagttgaatgcttcaaggagggagagtggattgctcggcccctcttctagcgtgggagaggtctcggatattggtgtgatctgaagcctatgaagctggatgcgtggggcttccatggtggggcgttttgttctctc

SEQ ID NO: 165810 - DNA, 1107 bp, Zea Mays
atctccgcgcggctgcgcccttgccgctgattgatggggcctcactgcgggaccgcgttcccctgcgctgtgactgttgcgtggggccgcactgtcaggtgttcgtcttcttcaccggatcctccgcattcgccacggtcaaccaagggctctgcgtgattctcggccgtggggtccccgaatctggtggccttgactggagtataaaacactggtattccgcaaaccacgttccttactcgaccgccttgaccgcctgggtgaagccgccatcgggagaagaatggcctgttgggaagctcgctctgcacagccaggtgcagtgggaaggccatctctgccgctccgatagtcgtaagtcttctcttaggcatgcacctacaccttctcctccgtttgcgctcggttttgtttagggggaagcgtcatactgctggtagttgctcgtcggagcagtgcctccgccgtggacccgcctttggccatgaacgtgtagtctgcaagcagtaatccatcgataggtggtctctatcaaattctgggtggttcacccattatttccctctggaatccggtcaacgtcggactccaggcgccggattgttgtgcgctggtggggtgcgccgccgcaggcctctgtgccgtggaacctgagcagcggattaggggtggcgcgctgatgtcgttggatctacgtaggatggacaggattagatcatggggtgatggcatattgggcgtatatcctagtgtatatggttgtgattagatctcaagtcaccccttcgtcattttaaatcggaaccattgatcggtaattgtacggtttgggatgggtagtggcctggtgtgatcctcggccgtccgatgtgattgtgcgcgttggattgggcctcggtatttaaaatctctaccgcagatctcacaatcaatggctgataatgcataccgactcactcggaataatggtctaatctatgccggtgatttagatctgagcggcccacattagatcataccccttcgccgagccagacatacaaaaaaaccctggaaaatcaaataataaacccgccatccagtgcgaatgtagcctgagtcatccag

SEQ ID NO: 165811 - DNA, 514 bp, Zea Mays
gtttgattctgtgaagttcagggacttatttgaaaccttgctcggtcgaagggttacaggatcatctgagccgtcggttcaagctccaaccgcccagattagatctacgtgcaatgaaccagtgcgccatcaggatcgttgatccggagagcaacgccccatatatacgtgatcgaggccatgagatcctaatctaagggcgctggttgaaatcatcccaaagggaaggctcgatcaatcttgaccgtcccattcctgatccacagtcgcgagtccttctacccaacctcacatccacggcggcacacacggcggcaccatcgccggcgccctcggtctacgttcctagctcttagttcttgcacgaaacgctactttacgaagaggacacagttgcggatgacttggcagggttcttaccagaatccgagtggagttccgccctatccgcggcacacggtggaggtgcttcgacggcgaggaattccggccacaccccggatcctcgcgctcg

SEQ ID NO: 165812 - DNA, 776 bp, Zea Mays
ctaatccaattcgtctatccactcccgtcctcagcgaatccgcaccccgcacggtacgcgagcgcctcagtcacccacacaatgacacaaacccacgtacaccatgtcttctgttcatagcaacggctggcatggcaagtggccacgcgccaaatgcattgcaacaggagaccaacaatccatgcacgtcgctccgtagggaacggggaaagcagtttcaatagactcacacacgttgtgtcttccatgcatagaaacgcggggaaagcggtttcagcagctgcgaggtggagccattttactcatcctaatccaccaccaacctagctacaaaaagtcatactgaggcccctcaagcgatagtggtaatggatctgctcgccgctggtggcctgatgctttccaactactccgactcgcctacgtcctccaaggtacgcacatacgtacatctgtttttctggcattcgtgggacctaattagtgtcgcattcgtgggaccgaggccccgcaagcatcttcacatgcctgtccaccgagttagtgtcgcattcgtgggacctaatggagaccaacgctgggatggagggcatcgactgttactcagttaggcatgggccacagagggcatcggtggcaagtcaccaaccttaggcacgacgacgggcattgacgacaaggcggcaaccttcggcacaacggggcattggcggcatgtgttgagcacaaccttcggcacaacgggcatgtattgagcacctaatttaatagccatc

SEQ ID NO: 165813 - DNA, 745 bp, Zea Mays
ttagccttcgtcatggcgtagaggccagctacgagcttcgaaaaacccatacttctagccatctcccggcagacggataactctttgttgtccgggaggcagtacaggaaatcatcttcatccgtaccgttaaacactaaggcccacttcgggtacttcagttcctgggcatagtgtttggcttcaaaaacttcttcggataatctttttcccctagcatgtcgaataatataatcaagattttcggactgtgcttcgggagcaggggatttggcttcttcggccacatttttctccagagctacgctaatatctggagattcttcttcgaccgtatactcagttgcagcaagcttcgtctcagaaggcactaagggcccagcttcggtttctgtatgagctataacagcttcgacaactttcttcacaggagcaggagtcagtgctcttgttgtctccacgacagcgtctagcacgctggccattctcctcctctagggagttgtggcgggagcctttgtcaccttcggcaattctgcctctgccggaggacttagaatttttggcagcatcactgttttttccaactttggctctctggccgcatcatctttggcttcggctgaccctactataggcaccttcggcactacaatagatccttcagcgctccgagtggcgggagcagcttgtttcactttggcagcggaggaggtcccttcaccaaattcaggcactacggccg

SEQ ID NO: 165814 - DNA, 2352 bp, Zea Mays
caaaaaggctctaaagaagactttcaagaaactagaccacgatgtaaatattcaagactttctaggctcgcggtaattctgtcattttaaaaaaatagaatgctcgtagcaacatatagatgactagttcgaaagaaatcgctaacatattgtttctaaatccactgcagggttcagacagtcgaggtagaatatgatgagtcgacaactgaaagcgagttatgtgatttcatttttccccccccttcatgtttctaatgctatttggatttcaataatttgacaggagctatcagcagagcttgtctcgttgcagggtcaggtggcggagcttcaaaagcgtgtcaggtgaataacatcagctcataacatattcagcataaggaactatattgataaatgctgtaggaatgcatatctcttttgaaatctttccacttagtgtcgctgtgattttcctttcatgacacatgatcctgttaaatgttctccacgttgtgaatctatggcattgattagcctgtcacagaaataatgggcaaaccaaaaaaaatttgagagaagtgtaacggcaaggcgatttgttttgttcttcagtgattggagcgatcctgagaaagttgacaatatcgacaatataagagcaatggagcaatctctcaaagaaactattaatcatatccaaatccataaggtacacatctgtaaccttatggttaactactttataatctcaatatctagttaacattattatctgaattttcaatatcaaatcagattagttctgacctttgcatctgtttgggtctctgcctctccaggggaacttcggaaagcaacatctaatcgggctacagtatgctgctacccaggtaactaactaactaacctaccacagcttcaggtgcatgtgacatgagacgttaattttgttcagattaagatgttgctttcctgtcatgccatgtttcagttccagaccgacatgcagttgcctctaggactgcccggcgagtcaggcccttcgtcgtggttccaaaacggcggcgctgatgggcaacaagccatgatgctaacggacgagtccggcctgctccatcagaggtgaattcaagctccgagttgtgcattgctctgacgaacaaactgcccttcgtcgttaactgacgacgagcaaactgatcttggcgcagagacattgcgcagggctatccaagctacttcagcacggtcaagcaggatcccgacaccggtggtagcagcagtgatcacgggcaggtggtgcttcaccatccgcagccgcccgacttcagccagaccgagtgcctgacgtcgctgcacctgccgtcgcagcagttcccgtacccacccttcgaccaccacggcctttacagcgaccgaattttcaggccagacgcagttgagctgcacgccggcggcgtcgccagtatggactttctcagcggtcagtacgacttgccgaggcctggcgatgatgccagcttccataactgggcgtcagctgcagcatgtagtgcaaccatgttcgaccagcaacagcaacagcagcatcagcatcaccagcaaccacaatcttcacctgcacaagtgagtgcataattacaaaaccaatctttcgactgttcgttctgccgcatgtgaacttgcttatctatctatttgctgtcacaagtttatagctccgctgaaacattttccgatacatatttttttttctcatctcacattagttgacccatttttatccatgtttattaagacttaattcaatccacagtccatatcaaactgatttaagttctgagcaattctatgggcgatgagagctttccaatcattgtttaaattcatttattaaaatttaaaatcatgcagaaagaatgtgcagttatgatttttttttttttttttgcctttggcattatatgttttactgatttcggtatctcttgtggaccatgactgaatctctaaccatcagcttcctgcagcaacaactctagcaactgcctcgttcgatcacgccgtttatcacagttcatctcagcaccaacaagtcatgatcggttgatcctatatatggtaaaaaaatcggagataatattgccctccaaaaggtgctaccctaaactaatcatcaatgcaaaatgtgtataggcaacactgtcgatgtaaaatatatatttattgtagctaattctttcttgtaagtatctatctgtctcctgtatactactggtatagctttcataaaaggattgggcacttaactattagttcataggcattcatctttgcatgaatgaatatatttgaaattttggccac

SEQ ID NO: 165815 - DNA, 558 bp, Zea Mays
tggtgtcggcaccgttgagcaaccgagtccgagtccgttgtgagatccgcgctgaggtgggggcattgggagtcagtgcgacaatggcggagcgcgcgcgggagcatcgccgaggtcttcgcgggttcgttgtaacggcgacgaagctactgacagcccggccccacgcaacagagaccgatttgcgaaggtggaaaaccagagtggctggtggccgggacccacacgccagtggaaggaagaagaaaatgagtgcggcgtgtggctgacgggcatggcccacatgtcggcgcgcgtcagcgtaaggaaggcgggagttgggccgcgtggatgggaaacgagagagtgggccgaaatggatttctgcggcccatgtaaggttttatccttttcctttttattttctttcctattttccattccaaatattcagctcaattcaaaattttgttttgcactccagattttaaatatcgagcaaaagtctacatgaattatacttttactgtctgaattaatattatttattattgttatcttataatgtgtattcttttt

SEQ ID NO: 165816 - DNA, 574 bp, Zea Mays
tcgcgctcgcgcaagacttcagagttttggcatggcacaacagggctacgtggtgtggtcacaaacttcattattgctgatcttcatgaattgcccacgactcgtatatagtcggtgagtgaggagtacttcacgtaagcaggttacttgctgttatgcgttgggggggcgcatctagattgattctagttcgttccctcgtctcgtgttcagacagcaaaagaaaaggtttcagaaccaaacacagctagcctcgctcgtcgctcgtcagtgcctgccgcccaaacgccctttacacaacgtgctgtgctgggcttgcactgccctccggttcatgtcatttagcgcaataattctcgaaccctcactatagttctgaccaaactcgatcgatgtgacatgggtggataagccaggttacagtagaggcagaggcagaggcagagcacatcccacgccgcctttttgactccatttgtccttcgtctccaatccatgccatcccacatgcccgtaacaggagggaagccattccatatctattgaccccacatgccatcccacatgccatccc

SEQ ID NO: 165817 - DNA, 522 bp, Zea Mays
caaacaccacctccatctcctccggagcaggcagggggttggagctggacgcgcctcctgtgtcatccccagtgttgggagtgggcgcagatcccccagctgggacctcctccaccgccactgcgacgccgcctgacactggcgccgctgccgccggatccccggctggggcatgggaagccgctggcactgtcctggcagtagctggcagcggaccgtcggcaccaccctcagcggattcctactgctgagagccagaaccgtcggtgggcctgatgtctggcggaggaggcgtgaccttgggtgcaacggaggaagaagccctagcaaacagatgatgggttaagacttgtcggcatgatgattagactcgtggaaaaagggactacacttacttggggccctggactttccagtgaccctggaagcgaggcaatcgccgctcctgctgctgctgctgttgctattgctggtgctcccgggactgatcacccccagatggtggtggtggcggcagaatcg

SEQ ID NO: 165818 - DNA, 909 bp, Zea Mays
atcagcgcggagttcggaacccacacggacgccgcgctataaaatccaggtcgcagtccttcaaccctcaccgttgtagcaaccagagagaggcgagagatgaggatgccgctattgctgggctctggggtggggcatcgagggagatcgtcggacttcgtggagttggcgcgcgtcgttgcgggggatttggagcaacaggagagaacccgccagcgctcctccaccgcggtgccgcatcgcaccgtcgacacacgcgtagaccagcgtcggggcccccatgtcggttcctggagcttcatcgggcctcgtggtggatgtgtgcgtgcttgatttgggcggggtggaccgtgactatggcaatttgtcgccggaattggcactccgccgtgttgccgcacgtcgtcgtggctggttgtccctgcttcgccgtcgtcagtaagtttctcctctgtgtgatcaccatcatcccctccctgcgttgcaccggttgggtaggcaaactacgctctggtgcgcatttgggtgcggctccagcgaacccgccaccactgtcgctcgggcgccgccgccctgggcgctcggtgtagaagacagggcttcggccgttgatcccctggtggatggctctggtaggctctaggttacccctttgaccgagttgaattcgcgccgtgggatcttgatcgtgcgggtcagagcagatgaagcctcataaaatctggaccgttcatttataatccaaggatcccgagccgtaccggtttgcggtgatgtgagatctaatctgggcccttgatcagtgatcgggcggccagatttcactcagacctcttcgtgtggcatattatctaatgagccctcggaattctgtgaaataaacccgcagtccccactatggaaatcctg

SEQ ID NO: 165819 - DNA, 638 bp, Zea Mays
gtgggcttcgctagttttcagtttatccaccaaggagagtagtattttgtatttttcaagagcttcattccttagtgtaataacttctgatcgaagatttccacgcgctagctggcagctttcatcttcggctttcttttgggcctttaaagccttgctcagaattaagccctacaaaaataaacgatgagcacatactgaaaaggaaataaactacaaaaataatttgctttttaacaagttaaaagtgttcccaccttcagactgttataggcaaggctatctgcgagttggtccttcgtcattgcgtacaaacctaactcaagcttcagatatcctatattgtctgccatctctcgacagacatcaatttctttattgtcatgcagacaataaaggaagtcatcctcatcatccccaccatacaccaatgaccctcgagggtactgcagatccctggcgtaatgttgcgcttcggcaatttgttctttcaataatttcttccctgaagcatgacgcactataaattctaactcctcagtagatgctccaggggcagggaactcatattcttcggtagcaccctcttttcttaacaatgatggtccctcagcagcctccaaaggccttgcttcagc

SEQ ID NO: 165820 - DNA, 440 bp, Zea Mays
ggtgttgctggtacatatggttttgctggtaggggtggtattgttcattgtggaattgtcgctggtgatattgttgggggtggtaggtgtgggcgatgactcgttggttttcagccggttgatttttggcaatcctatctttggtggccttggtttcagggcaatccctggtggggtgtggagtctttgccatgaaaaagacagtaaaaccttcgctgttgcgggactcggcctttgcctctgcctctggggttgctgccgcggccctgttacgtggggtactcgtggcgacgagcggtgttccagtctgctgttgattggcgatagtgttcacttgggactgttacggtttggtcggccggagtcggactgcgcaggtatgacccatgtcctgttggaccgcggagtgtccttgggtttcctctgtgactcgacttttc

SEQ ID NO: 165821 - DNA, 641 bp, Zea Mays
gtttgggttactcatctccctcatgacccttgttttaatatcttccttataaaatgtgcttcaacacctgttagcatctcacccgggttgccttaaggccctttgatatgccttaggagtgttcagtggcatggttgcaagaaagaatgtcacacaccccctcatcattctaggtgtgctgcaatttggtttatcattcattttcctctactcgtccctagaggttgccatgaaagcgttttcccgcccgctaccagttctagcccttggagaaatagtaaatgacaattcaaccacctaaataacttctatgcatggggccatggtaacatgtatgtcctgaggactaggaccaaactaggcagccttgctcaaaaaattgtagtaagcttcagagtcactatacttgaatagccttaaccttgccacttgttctacctgcatgctctttgctatggctccaatgataggtcttatgtccaacagtccaatgcacatggtaggtgtggggagcatttatgcttgtcaactcccgagaccatgctcttacctccatgtagttttctcaccgaccaagcctccgctccgtcaaaaaaccaaccagcttctgccacccaacacaaaaccaagtctgcttttgc

SEQ ID NO: 165822 - DNA, 725 bp, Zea Mays
atggatgatgtcgttcatattgctaacctctttttcaaagagattgtgcgcttgcatggtatgccttctactattgtttcagatcgggatgcaaagtttttgagtcacttttggcgcacactatggaacaaattggggacaaagttgctattttctactacttgccacccccaaacggatggacaaacagaggttgtgaatcgcacattgtctgcaatgttgcgagcgatattgaagcacaatttgaagatgtgggaagagtgtttcccacatgtggagttctcgtataatagggcggaacactccaccaccaaggtaagtccttttcaggtagtgtatggcttcaaccctcgtgcgcctattgatcttttgcctctacctaatatggagcatgtacatagtgatgctaaggagcatgctgatttttatttgaaattgcatgcttcaactaaagagaacatagaaaagatgaccgagaaatataaacttgctggtagtcaaggtagaaaggcaataaaacttgaaccgggtgatttagtatggttacatttacggaaggatagatttccagctttgagaaagtctaaattgatgccccgtgctgctggaccatataaaattttggagaagattaatgacaatgcatataaacttgagttgccccccgagtttgggattagtcccacctttaatatttcagatttaaagccatatttgggagaaga

SEQ ID NO: 165823 - DNA, 588 bp, Zea Mays
gggaaaagaccctagaaggacctgccttcatcaaggaggcagaagagaaagtttccctgatccacaggagattactcgaagcacagagtcagcaaaagagttacgcagacaatagaaggagagaactcagtttcgaggaaggagattttgtctacctcaaggtctccccaatgcgtggagtcaaaagattccaagcaaaagggaagctagctccgtgattcgtcggcccctatcctatcattggtagaataggaccagcagcttaccgccttcagttaccagagtccatgtcagatatccataatgtatttcatgtatcttagctccaaaaatgcataaaagtaccagagagtcacatcgcagaggagtcagttcagattcagaaagatctgtagtatcgagaaaagccagtgaagattctcgattcagccattcgaaagactcgaaactcagaagtaaggctctgtaaagtccagtggagcagagaaggagaagaggaggctacctgggagagtgaggactcattgaggaagaaatacccttacctttttctcaaacctagcctgaatctcgagggcgagattcttt

SEQ ID NO: 165824 - DNA, 836 bp, Zea Mays
agatagggtaaaataaataaataaataaataaataaataaaattatggatttgcatttatgctgagttcttttgtttgtgcattgaagcttgactgcaagttcaaaaccaaattttaattgaatttgaaattagaaattagaaaagaaataataaacagaaaataaaaagaaaaaagaaaaggccttttacctgctcttgggctagaacttacacgccggcccaaatcccttttagctctcaccccgcatcggcccaggtggcctttccctttctcattattctagccgagccaaggactggtggggtcatctcgtcagcctccgtgcgctcacgttctcagtcatccaaccgccaggtgaggcccacgcctcagcctccatcatccatgcatgactatctacgagcgctgaaatgtggggtccgggctgtcagcgtttacatatcgactggcgcgtgggatcacctctacagggtctccttccctaatcgaacgaacccgagcaggtggcgtgacgacctgattccctttgtaacaaactccttcgtgaaggaatcaaggagaattgttaagatctggagccatgtgtataagtacgggctccgcgacctcgtccaccaatttcatggcttaacccgtagcttgcgccgtgcaccgcatcaatgaaaccgagcaaagtcaccaccgagagagaaaaagagaagggggtcgccgcatgggaatcttatcggagtcatcggtcgggactagacgtgcagccggggagacttgtcgtggtatgttgaatgtgtcagtggcctcctcggacgacaatagcgatcagagaggcgttgatt

SEQ ID NO: 165825 - DNA, 727 bp, Zea Mays
aacaacgcaaggcacaacttatttcaaatacaaagtgcacaataagcacaaaacgaccattcaaatacaaaagttcccatagccatcctttggcaaaggggggcgagggcagcgtttacgcttgaattcaccaaagaacggccatgtcaacacacattttacataggctccgcctttgggataaggccagcctcccgaaaattgaacaacatcagtttcagctcctcaccatcaaaaagagcccatagatctccctcttcaaaacactgcctagccctcggagcaaggatgatccgacgagtcccctcctccaaatgtattccctcccatggacgagacctctccattcccatatggcgacacctccgggggaccccgcgccttgcgaagactcacccaacatccccacacttcatttcgacactctgatccttctcttgccttgcaactcagccaatgcaacactagacgaagactccaccgcagtggaggcaaccctaggcgaagactccgcaacatccaaatctagcgccataaaataatctaggtcatcctccaaagacttgtcacccaccctagcaaacgggctcatcaacccttcacctttcgaagaccttgacccaacatcagattcatcactactaagcactatcaaactttgacacattaacaattcatcatttccattatcaccaaaatttgcctacgcaggcccagacgctggaac

SEQ ID NO: 165826 - DNA, 307 bp, Zea Mays
gtctggccggaccggacgtagaggttggagttggtggcaaggaagaagtcgccgaatgaaatttcctatagagagcgaataatatggggccgcaactttctaggtcccaaatatagtactcttcaagttgtttagatgaatttcattaaaatgaggcacctgcctgttggatctgtcttttattgtttagaccctatatttcaatttgtttatgtgtttagggttcttattgtagttgctcttaatagttgtaccgaatcgtatccctttgatgctcaagtgtaacatacccacccttgattcgagc

SEQ ID NO: 165827 - DNA, 791 bp, Zea Mays
aacaactttctgggctgaattaccctggtcggcccacttgcgctccctgtccactcctgcgcggcccaacccagtgcacccacgcgccgacatgctggtcccacgggaaagcctcatgccagcacgcctgtggctttgctgtcttcgccaggtagggcaattatgtcgggcttatcttcttcccccatcttcacgcaactgagtctgccgtcctcgcgggattgttgcgtgctgcgtgtcgtgatcctctcgtggctggcaataaaacccaattgcgtcgtcctgtaacccatcggtgctggcgggcggaaccacgaccactatcggggctacggccgcacagatttctcctcgtgctgtctgcccatctcacaaccagccatcttctcctccacggtactccctccgcccatcccctacctacaactcacatggcgctctcctcactccacgaacggctcctccacccagtaccctagctcggcctccatggcatgcgacatctcaagcgctggctctctctctccattcaacactctagtgccccgagctccctgcaccgaccacttttccccatggccgccagctcctgcgcctccctctgctccacacggccagcatggcagccgtatgctgaagatccatggcgagctccctcatgccctcgacttcctccacatcggcaatgaacgcgctagaaaatagtgtgcttcttccctgttgccggtatgcagcaacgacatcgtgtgcagcaagctccacctcctacaccaagcccctttctccaagaa

SEQ ID NO: 165828 - DNA, 565 bp, Zea Mays
ctccgccgcatgttcgtcgactccgacgacgacgactccgacgtccacaaccaccaccaccagcagcagcagcagcagcgcggcgaggacgacctcgacctcgacctcgccaatgccgtcccgggccacgtcgtcgcgtacgaggacatggaggacgacctcctcctcgccggcgatctcaagtggaagtgagagagaatttaattattaactactgatgtgaccacaaacttaaaactggttttccgtcgtttcaaacacacagctcgatttactctctcgatggtgtgcatgattgcatcgcagcgattttgttcgcgtcgccaaaaggatccggatcatccctgccaagaagacgacgtcgtcgtcaagccgcgccaagaaatgcggaggaggagatgtcaaccacagcaactagtcgccggcgtccggccgggccgggctagcttttgttagactctcgcatgcaattattactgctagccgctagctgcagctgtcgtctactccatcgttgtgttcttcaattcattcactcagctctctccattatattatacccggc

SEQ ID NO: 165829 - DNA, 642 bp, Zea Mays
attcactttaggcttttgttttccatgttcgcttatttgtcttgtaaaaatagacaagctaccagcatcaggtttatacaactcatacccccgtgcgcgtgcgtcttcattctcctgaacctttttgttacttttatcttcaacggggatgtgccttaaaacctttttgagaactggatgtccatgttgttaaatttactctctccaatcatatttaagaggagtacttgacagcactgatttcaaagcatttctcacatctgatggtggcaagcggcgtatcctatgaatttcagaatataatccagctctagccaatgaggacctcagcgccaagatactcaatacacaatcacagaatccataaagtcgacgtcggtagcccttaagttgttgtgggctacacacaaaaggtctgcagggagattctgacaacttattggtcaagtaggtaaaaaatgacggcagaccaaccccttttattctatatagctcaataatattgtgaatgtaactgaagtagttattgaatttcgccttttcagagaacttgtcacaatagagtgcgcggatttcagcacggaccccatcaatgacaactattgtactaacgtcaaactgtccattccaacttaatcccac

SEQ ID NO: 165830 - DNA, 816 bp, Zea Mays
tgcagttacaaaatgacagtgtgccttggcatctcactaataattactgtccaaattagacagtggttcaaattcccagccagttattgtttttatcctaatccaacctacaagtgcaaatcctattacagctgtgggcacatggtcgttcctccggtaaattcagcacaccgaatgcgacggcgagctttcagctctgcccacatagtgcctcgtcatgcactgcatcatcggcacccatcagagcatactttttcttaggatcatggccttcttgccgcatccttctggcaacatcatccagaaactctgcaatcctattctagtctgggtgattctggttatctacaataaagacatgaagcctaatgtttgagtaagatccaaaaaactacacacacttcatgatgtatattctgggtgccttactacttcatgtggtaaaacaaaaaagcttaaatctccttaacaatcaatccatatctcaactaattttagctatctagctttagaaagcgcatgttaatgaccaaaaacaatcttatctccaatgaaaacagatacacatggacaggtgaatgaacgtgatagtgaaagtcgacgaaaagtctctcctagtgaagaatagaaagaaaccaaaataaataggaaaaaaacaaacggaaggcaagctcagaaatcagcagcaggaatgaccataattcatgatgaagtagcaaaaaaagaatgagatgagctaaggaatggaggttcaccatccctcaatgactctgacctccagcctccaacgtccccataatggtataaacagaggag

SEQ ID NO: 165831 - DNA, 389 bp, Zea Mays
gggcactctagtgatgaccgaggtgccttcggttgcgcgatatcaaagtaggggaggcacggatttgcgagagagcgctccaggaatcacatgattgacctcgatggcgacagaggagctccggaacgctctggtaacggtgatgatagtcgacgatagacagtgcttgcggggagggtagtggagggctcgagagtagccaaagaggtgtgggggagagagcaggagctcatgtgcttcttatagggactgagggagtgcgatggggcttcagtggaggataaattcctcataggaattacggcgggaaaggaggatgggcagcttggtggaggggcagttacgaccatggtaatggagaaaaagttgtgacactttggcttggaagc

SEQ ID NO: 165832 - DNA, 669 bp, Zea Mays
catgaagatggtacacctgagacaggaataactgtgcgacagaagcagcggtgtagggatgggataatggcaggaaatgggcaaacttagtaaacttgtcgaccaccaccaggatgcaatcagcagtgccggagcgagggaggccttcaacgaagtccaatgaaactgtgtgccaagctgtgtgtgggaccggcaagggttggagcttgcccggataagcagacctgtccggtttcgcttgcaaacaaatctggcactgttgcacaaattcatggactgattgtcgcagtttggcccaagcaaacatactcttaactcgacgatatgtaacaggtgccccagagtgaccaccaacaggagagcaatgaagggctgtcaggatccgagttttaagttggtcatcagcgcccacccaaatgcgtcctttgtatttcaggagtccatcgaccagagtaaaatgaggcacaacactaggagctattgccaacttggacagcaatgactgagccgcagtgtcttgactataactgctctggacatccaacaaccattggggaaccaccactaaaacagcgtgacattcaggatctatacggcgagatagagcatcaacaacacgatttttagtacctgggcggtattggatccggtattgtaatcccagcagct

SEQ ID NO: 165833 - DNA, 375 bp, Zea Mays
cccttaacatatcttccagaacctgatttaccctctctgtctggccatctgtttggggatggtatgctgagcttcgtatgacatgggtcccaagtgattcctgcaattgttcccaaaatcgtgccacaaatggtgctcctctgtctgacactatagtcctaggtatcccatgcaaacgtactatctggtcaatgtagatttccgcatacttctccgtcctatgggtggtatgtactgacaagaaatgagcggtcttagtcaatctgtccacaataacccaaattgaatcatggtgcctggaggtagtaggcaatcctacgataaagtccatgcaaatgtcctcccatttccaggatggtataggaaggggttgca

SEQ ID NO: 165834 - DNA, 595 bp, Zea Mays
ctgatttatcctacgataagaaccccttatacagtttcacggtattctctacttcacatagcacctatcgtccttggaagcggagccctagggcgttaggagtgtcacgcaccggtgatgcatagccgtggaggccggcggtgtcacccgtctgtgcgctaggttcagcagggtaaggtgagcatcatagatctgaaaaagagcggaccagattagaagatcccatacccctccgcttccaattagatatgaccatagatcttcgattgcgtggatccgaggagatctcaattatttgatgtctgggccgtggatccgggatcagatggttgggattggataccatttcataaccaagccaatctaatctaggccgccagatcgcaatcgtgcggctgatgtaatgtgatacccctttggccttggaataatgcagaagagcccctgaccttgtttctatttcacctgcaattcactactatacaaagaccattacacataagtccgcatctttgcaaatgtggaccctagcctttttggaacctcaacccaccgtcctggggtaacaactttacacctgatccctcccatttac

SEQ ID NO: 165835 - DNA, 472 bp, Zea Mays
ctcgctcaaataatatttgatacattgcacctagcaccacctaaagccgcctcattttagttcatcccaggctgccccacaactgatggtattctcaagaagacaagtacagaaggcaaggttggtggaagacaaggaaagagaggaggaatcgacccatcaggttattgagacattagtggaagaggtaggggatacagtggagaggactgtaatgagcgcaagacaaatcctggttaaactggcaaactgcgttgatgttggaagaccagctccgctgtctgctggaattgccctgtcacctgaacagcagcagttcctcaaccagcttaccaagcagatttattgcatcctcccagccccggttgatctgatcctgaagaataatagcaccaaaacacttgctgccactccccggtgcagccgtcatattgcagggatgggggctgaatttgatatccacgacttgcgc

SEQ ID NO: 165836 - DNA, 1201 bp, Zea Mays
ttccatcatccttactggcgtagctcccgaaggtccggcttcagcatgagcagaagtaacgcttgcactaaccactttccttgtatatccaattttcttgccagaaacttcgacagtggcaggagttggcattttcatcgattccaaaacgacatccaaaacactagccatcctcctcttcctcggggtcgttgtcgcggtagttgatagcttcggtaattctgccactactgaagggctcaacaactttggctattcttctgctgttttctctgtttccagctcttttaccgcatcagcactagcttcggctagcatggcagggacaactttggcactctcaataaacttcacttcctctgtcgtgggcaccacagctgtatgttctgaagatcgtagcttcgtctacgggtcaggatttggctctcttcggcttcggcgcaccagaagaggtcgaagtggctatttttctttttcctccttgctttcgagcaagaaaacaataatcaggataaacaaacccaattacatcaaagactctatttagtcttctttttcctcgagcgccaaaggccacggtcatggcttcatcctctacctttgtgtaggctcccagcatctcatcgtttgttgcctcaatagcatctagccaatcgtcatttggctcgtcaaactggcttctataccagaaggtgtatctaaggtaaaccaaaccacattggctggagccagcaacagtttcctttggcatctcccactcattcacaagaggccataccttgaaagccatgtgttcttgtaccaaatctcttgtactgatgtaagtacaaatggtgttaaaagccattaggcacacttgcacctcattcccaattgcaattgacaaccttctaatgccatttgggacactgaacaattcctctcacatcctccctctcgctcaggtcattcttcacataaaaccattgcttcatccaagaacccagccatttcttctgaaatgttggcacgggataacttgccttagagcggggcccgaagctgtagcacccgaaattgttatggtattgctccttcccagttgcctttgtctggtaagataattcatgtatattacagaagcacctagcatctggctctagcccttggctcctcatagcccaaatgaaaacccccattctaacaaaagctttgggagtaa

SEQ ID NO: 165837 - DNA, 558 bp, Zea Mays
cagcggccgacgcagggtcttcgcgagccatagcaggcacgggcacggccgagggaccttcaccggcatccgagggcagcaccggattgccctccgcagcctcggtcgacgcaccgaccagacctccaaggtccttgacgtcctcggcacgctccatctgcagcaaaagcacattcactcaacaaaaactacacatatccacacacaaccaaccacacaaaaataataaccttcacctgctctctcgcccggtcggatcgctccctgacagcctcccgaccatgcgcccccacatcctatcaaaaagtgcccccgctgactgcttcacaacagggtcttcggccttgaagatctcgcgttcaaagctctcgtctgattggtcgaagaccttgtagtgtctacagccctcgcgggacaacgcattcatggccccctcgcaggtgacgagggaggcaaaggacatgaaaccctcgacaatggtcgggagtaccagcaactcctcctataaccactcgaggaagcgaaggcccgcttcccggtcgggcacctcgaagtcag

SEQ ID NO: 165838 - DNA, 373 bp, Zea Mays
ccaaattgggcatcatttactgaatttcagttttagttaactgaaccaatttcagtcaccagtaacccaacagtccattttcagtttactttttctccactttttgtgtaggatcatagccatcacccttaaatacatttgtacaccaacttatggtcttcaattcctctatagaaaccatagctcaaaaccttatggattattcacaaggaagctccaaagtatgtcacaatcactgaaattcaattttcaataactgaatataattaagtttcagccacaacacagtcccactttaagcagttgttactccaattcttgtatgggatcatgtccatcaccctttaaggaagttgttcaccaatatatggtc

SEQ ID NO: 165839 - DNA, 538 bp, Zea Mays
tatgaatcccaccaagcagcagcaggatctatcagacggccagaagcatataataccttctcctggtcagtacactgagcaatgttcaacatcttctctatgggcttcagccaatcatctgcgtacaatggatcaggagaactagaaaatgtcgatggcttatggctcatgaactccctgtgcttatctcggggtagaactggtggtggtggtagaggcagtggtgcttgctgatgttgctgttgttgttgttgttgctgttgtgccctcctttcctggcgtatctcttctcattcttggcgcagctctcgacgtatctcctcccgctcttggcgcatctcctggtgttcctgctgcatctgagcatgcatatctaccatagtgtcagccatttgttgcatcatcctcatctgagctgcaaccagtgggtcaactcctgctcgtggaggcggtggtggaggatccatctctgctggttgtggctggggttgtctaaatatcctctgagtgtgtcgattggtaggtaaatcaattccac

SEQ ID NO: 165840 - DNA, 476 bp, Zea Mays
acccgagacactaactctcagctccgattagccaccatagccgtagaatttgggttttcccccaaattgatcatctgcgccgccatgaatcaccccgtcggggctagccgctctcaggtccgcactcaccctccttattcgtgttttatcaccctcgcatgcttgtgatgcttgttggctcaactaaatgagctagacggcgcttactcgtcgggaacgtcttggtttgacctcggtgatcgtcgtcatcgtgggtaggtgaatccagggccgaattaactcaattaaggcttgttctaggttcgcctcaggtcagtaatgcttgccaattagttaatttgggcagccaacgccggtcatggccagtccaagcaacaaggtggtcgatggcgagcgcgccgtggccatgggtcaggttggagaaggaacagaagtcggaggacctctgtgcatttgtcagagagacaacgaatagt

SEQ ID NO: 165841 - DNA, 4015 bp, Zea Mays
gtgggacttctctcgctcggttccacggtggtcgtcatgaagaggttcgacgcaggcgaagccgttaagaccattcgcagattcaaagtcacgcacttcccggtcgttccgcccatcatggcggcgctggtgcacaccaccaagccagcggcaatgccgttggaatgcttggtgcaagtgtcaaccggtgcagcgccgtccagccgcaggctcatcgacgacttcgtcaaggctttccctcacgtcgatctcattcaggttcctgcctaccccacttacagtcacttcattcgttcttccctaccttgcccaagttagttatgcttatgcttgatgtggacgactctgctatgccactacagtacggaacaaaaccgcgcacaaatctggaaatcagtttgaatcagtttcatttaggagaaaaaaatccattctacactgctctgaagtctggatagtcttttaataggaacaaaagcgttgagttttacctagttacatatcaggtaaccatgcaatattttaatagtgtcagataggtgaagacaagtgtcaactagctgaagacaagtgtgtgtattccacattggtattacatgctcgtgggtgcaggtgtcggaatcagtggtacaacgtacacgtgtctgaggtgcccgtatggggtgtttgaggctatgttttgctctcccctgttaaaaatagaacaccaacctagcaggtagaatcagaaattgttttttttccaaaaatagctgcttcctagtacaattttcgtagcatctggcgatcttggaccctacttttgactttcagctttctacttttccaaatggctggaaatagatagacattttacaaatatttcgagggagatagaagagaagggtaggtttcatagttgttttaactagatagcacatatctcacaacagcttttacacatctaaactaaaaatagaccctggcttagcaagttccttgtggacaatgtcaaatgtcactaggaatctgatgtgagtataggttgtttggtttggcaaaagaaaaaaaatggatacgaatgtctacgtaacaataaggccttgtttggttcttttcaaaactgtgacaattaaaatgagatgcaaacaagtggattttttttaggggggagggatccttataatccaattatccatctccaccctattacttaatctctctttagaattcagggattcaaacatatctcactttttaaatctagattctaccatcactgtttgcataatcttatgagatccaaacacacactcaaaatgatcatgtgcctttttcagaattataaggttaaccttcctagaaaccgacgtgtgtcagcaggtgcggtgtttgactcacaggttttttatgcctaatgccaaccaccacttggaatctgacccatgtgtatgttctctgattttactaaacaaggacactagtatatgggtaacactaataaactcaaagtatgattccatgtcttgtttagaattttttttgaagctcaatggggaaatgctccccacctgacattctatttcattgtcgtttgctcgcagtgacatacaaacagcttacatttacaacccggcatgaaccgagcttgttcttttttgtttggaggaggagggggtgggggttgctgtttacatcttattgcctcgcactggaaaacaccatctgccaggcagcacgcacacccagttctctgcttcggtggctgtagcaccagatttcagcttcgttgccgcatcgttgcaggagacattttagtgatgctgcctcctgacgaaagaccagagcgttcctacgcttccatagttgccagcaacagagatgaatgaatgatgagaactcagcttttgggatattcgtaggtctttcaacgcgatgaagttgagacacttcaaggtccgctagaatttggatgccgattgcttgccagaacattttggcataactgcaacctagcataatgtgtcgtgccgtttcacctgcccacactcttcacagccatcttcctcaagtatcctcttcttcctaagatttgttttgcattgtatcttttcttgggcaagtaaccatgcaaaaaactgagcatgcttgattcctaattgagttgaccttcctaattgagcatgcctgattcctagatcacctgtcaattcactaagacaatggggggacatggcaaatattaagctagacacgggcgtatatggtgtttgaatttacatgtttttttggcacaatgccaaatgccattagcactagtgtaggttctctaatttagcaagccaaaaagaaaagaaactaggacacaagtatccgggtaacactaatacactatacacatacaaatgagaatgggcaaggttgatccaacctacaagagcaaggtcaatggtcccaggggccaacctcagagtctgaaattggtcaatagagtaagatgggtcgatccaatcatcacatacaatccattttttcaaatttgttgatcctcttcgtttttccaaacaagcatgatttgtcataacttttaagcaagtctatacttggaagtagatcaaggaatatcctgaaaatagataaaattgaaatctcattcactttcaaacttatttttttaatgtgttgctaatatccttaatgtgttatcatgatactatttaatcttttatctcatcttacctagaggcgttgataatttttatagctcatgatagcagaaaaatatttgagccgactcgtgctacccaatggactagcaaggctacaactttttaggtaaaatgtgctgactcatgatccctaaaagtttgccttgaggccacagggtgggtcagcccattcccatccatgaatacacacaaaatatgggtaacttgagtacttgaccttcccggttgaccatgcctgaccatctctcagtctgccaccgtcatgtggtgatgtgtaccgttgagtctagcaatgggctttacaaagattttactctttctactagcaaacggaaaatattgtacttttcccttgaagaaaaaccccaagaaaacaaagatttacagcaaattcaagcatgtagtgatgcctactgcttggctgtcattttagcagggaagtatggttctcaaccttacagccactaggcctgcatgcagtgatgccagactccaatagcaaacttgctacttggtggtttcagagtagggaacagattgataagtcagggtgcaatggttttgattgccttatgctcttagtgattttgttactttggaaggaaaggaaccatcaagtctttgaggggttcagtcttcaactatcagtctatcacttcggtactgaagatcaaggatgagtccagattgtggattcaagtaggataccatagggtgaggttgcttgttgctctagcttcagtgtgtaatctagatactagccgtagcctgtagctttttttttggttttctcaagtaaataaacctcaccgtacctcatgccactgagctgtgcgtgtggttgcattcctttctttttagtgaaatatgtgttcatgttcatttgttaaaaaaagaaatagcttaatttatgatattttacacaatgctagtagttattgaaatatgctttactgatgtaaaagcttcaagtcactaactgcatcttaacatgtctccgtttttcaatggtgcttatgtttgaagaagtgaaatgacaggctggaatctgtatcttattttctgtacatacaaaactgttggagtaatggttcttttacatttttgttgctgtcctaggagattctcttggctgtacagcttgtgatcctgagtcacagaagaaattgtgctctttctgcagaactttattaaatgctttataaagactgcttgttttattagaaaatagagaaacctcatactgaaagaaatactcactgtcatgcgatgtaatgtgttcacagggttatggcatgactgagtct

SEQ ID NO: 165842 - DNA, 721 bp, Zea Mays
tgaaaactagcaaagccaaacttagtgcacaagccaaagctcacaaggccgaagttgaagatttaaagaagaaacttgcagaaacgagcgaaaaaattgaagttgcaatggcgaagcacgagataagcgaaattgaaaggttaagggtccaaaaaatgtcgaagagctccacgactccaaagagagatgctacaaaatatccttggaatgcgccaaaactctaagggatagttttgcaaaggtgggagcatattcttccgagcagaaattcattcgtggtgaccccgatggtgtcgtctagtggatcagcggagaagtcgaggcctttgacgaaatcttaagtgatcgaggagacttctgcgcattcgctggcgcacgaggggttgcggcgaccttagagaaagccggttgtgaacatgttaaggctgtagctgagccagatttgttttctcggtggatgacaccaaagacccttcggctgaagcttctacgctgggcgggagattttactccgatgtgtggatgaagggcggtcgtgagatggctgatgaagtgattagaaaaaatgagaaagaatctcacgacgctcaagaagaagctaagcgagctgaggaagctgttgagcgcgcaaggtttatgggtacttttactgaggtttagcttcgaagttcgttttcagcttcggaattaaccgacatttttttattgtagctgaactttc

SEQ ID NO: 165843 - DNA, 504 bp, Zea Mays
tctcgtcttcagcattcttttgcgctcttagggtgttgctaagtatcaagccctgcaagaaagaataaaaggattaacatcagggtaaaagacttcattctagagttcataagcttcaaaattcataatttctgaaccttcagactgttgtatgcaagactatctgcgagatcaacattcgtcatggcacaaagtccagctttgagcttcgggaagcccatacttttggccatctcccgacacacagataattctttattgtctggaagacagtacaaaagatcatcttcgtttgtaccattaaacactaaggcccccttcgggtactttagttcccgggcatagtgtttggcttcacaaatttcctcttcggacaatttttcccgcagcatgccgaataatgtagtcaacatcttcgatcggagcttcgggagcaggaatttcggttttttctggtacattctgccctgctgttattgttctgaggcgcggtaggctctgtct

SEQ ID NO: 165844 - DNA, 603 bp, Zea Mays
gaatggccaagagagctctcacacgcgagcagcacttatatttataagatccaaacatttctagtcgttatgtgcaagtagcacatcttttgcgcacacacgaacgatctgtgccctctagccagacggtctgttgtaccagtaatgactatatatgtcgtttgaatcatgtcagagctgtcagaaaatgcaggcctaaacagtccaccgaccccggccggacggtctgatagatggcaacttaacgcacacgagcactaaccaagtgacttaacacggacatattgtccgccctccaaagccagatggtatgccactttgagtcagtactgtctgagccaaacactctaacaatctgtagtacaaatgccaaaaaccacagggtccctgcccaattccattttggcacctatgaacggtccacgccctctggccggatagtccgcacaagcaaacagggacttgtaaatcgaaagcatccttggtcttgactatgtgacaccaaggcccagacggtccgcagtacaatcacttcggaccacaccgaagacaccacatccggacctctctgagtaggtcgcggatggttcagccacctacccg

SEQ ID NO: 165845 - DNA, 591 bp, Zea Mays
catagaacaacggttgtcagtggtgaagcgaccgaccgagagaaggttatggatgatgttgggggcaacaaggatgttgaggtacaaaggaccaggaagaaccatgtcacctaatgtggtgacaggcagagtcaacccattaccgacagttatggaggaagggaaggtggggctaagaggatgaggtatagagacaactctggggtcgggagtggtgtggaacgaggcgctggagtcgacaattcagtggtgggaggagggggcgacgatgatatgggaaaggatgagagagccatcgggggcacccccacagagccacctagggaatgctggggccgaaagtagtgagcatgctgacggtaatcatgggtgggagagaagacaaggccccgatcgtcatgcagacaaccgtggcgctggggaacacaaacggtccgatagcgtggcggtcctcttgagggtagatcttgacacagtcacgaaggacagggttcgagacctaatcaaagcccacaaatgtgccctggagaagctgaccgtcgtgaagggagacgcacatacggtaggaaggcaccacactcgtggcggagg

SEQ ID NO: 165846 - DNA, 513 bp, Zea Mays
aaaccgtaacgcccaaaccctaaacatcaaaccctaaaccctatataccgaatgcttatacctatggattttttaccattaaatggtctccactaaaaacccaagaatgtgatttgtgtccaacccatattaaaatgtaaaccaagtaatactaaaatccaaagatcataaagatttaagggcaaacaatagtaaaattgtagagatagtactatttatccaaacattaataaatgtataaagacagaaaaatttgcccaaagccttaatctttaaccctatgcactaaacgctgaaccccaaaccttgaactcgaaaccctaaacgccaaaccctaaaccctatgtatcgaaggataactcatatggctttttgaccattatggtctccactaaagaaccaagattgtgatttgtgtccaacgtaaacatcaaaccctaaaccctatgtatcgaatgcttacacctatggattttttaccattaaatggtttccaccaaaaacccaagaatg

SEQ ID NO: 165847 - DNA, 490 bp, Zea Mays
aggatgcaagggaatgggaggcggctagagccgagaaacagatgttggataatcttgctgatcgtctcaagggaagtgagtgagaaaaatgatactataattttgtttgtacaatttatttatcctaactttgcaaacttatttttctcattatatttgcagagattggatgtggcgtaaactatatcgtagatgaggcacatgcaagatacgttcaggaaaaaatggcgacgatggagctgacggaggaggacgacgatgacacatctaggttgagtgagcttatcgctctcgcagaggcaggattacatggggaagaggaggacgacacatcaaggttgagtgagctcatcacactagctgaggcaggattacatgctcaagaggaggaggacgagtttatgtctcaggccgccgaagaggtagaggcggcttattacaagcaaaagttcgatgaggctgaggctgaggattagctattttcctaagc

SEQ ID NO: 165848 - DNA, 324 bp, Zea Mays
gccgtgccaagccgccccaagcgccgtctcagggtaagtgaccctccctcatccctattttgcgcaaatttcgcttcactgtgatgaatttcgtctcgccagagcccccttcatcggaccatcgcttcctcgcagcgtccggccactgcaaccctccccgagcccaaattcaggcctcgagcatccctaccttctccccgaaacctatgccggacgtagagcgtcggattaacccttaccttggcgggtattgctcgctggagcagcccggggttcacccgagggtccccctccgccgtctgcccgccttagccccgttcacgc

SEQ ID NO: 165849 - DNA, 910 bp, Zea Mays
gggagagtcgtataggacgtagagagagagatggagagtcgtatagaacgtatagagagggagagagggagagtcatatagaacatagagagatggagagtcgtatagaacgtatagagagggagagtcatatagaacgtagagagagatggagagtcgtatagaacgtatagagatgaagagaggaggattcatataggacgtagagagggagagatggagagtcgtatagaacgtataggaggagtcgtataggacgtagagagagagagatggagagtcgtaggcagtcgcttgatgtgcggcccacatgctgtgtgaagggaaggggtgccaagtaggctcgcccgctactctccgtgtgtccttctcacccgtctgcatctctttacttagtcttttttccgcgtctcactaaaaaaccatatcagagatcatgtgctaattctaatcacaattcaagaaataaatgctaaacgtacaccgtgaaggcgattatgaccacggtaacacggtaactatggcagaggaaatggcgttgtatgcatgcttctcatttgtgcgagtggcaactaagtaaacaaattgaggaaatgtcgttcggtgtacagtaatactttctatacactccctctccctcctctctcttctctctctccctccctccactctctttcctctctcttccctttcctctctcctctcctctctcttccatctccctcctctctcttccctctccctctctcctctctctctccctccctccactctctttcctctctcttccctttccctctctcctctcctctctcttccctctccctcctcgctcttccctctccctcctctctcttccctctccctctctcctctcctctccctctctctcactctctgcagagacgcg

SEQ ID NO: 165850 - DNA, 348 bp, Zea Mays
ctgtgattgagcgtgtcaattgagtctgtgattgagcgtgtcaattgagtctgtcccttgtaacgttgtgtgccttcccttttatagtttaagggaggcacatacaaggatgctgagccccgacatgcaggcccaggagcataatggaacaaatacattatgtggataactaatgctgacagagtaacgcatgagtaatcagcgggagtcatgatgtccgtagtccatgctgcattgatgggcagttaccgtacgagtaatggtgagtcattgccctcgatatggtaacgtgtgagtaactgcacggcccacgtatcgtggactgagcacgccgcctgtcagtggaat

SEQ ID NO: 165851 - DNA, 682 bp, Zea Mays
ccggcgagaggctcgacactgaagttgatggtgctgggtgggtggtaccttgagacgtgctcgagcgtcgtgagcgaggcgggggtgcttgcggttgctgtggagcgcgacagccggtgcggagcacagtttcatggagggcagcttcgggtgtcgtgagcaaggcaaggcagacgggggtcaggggtgaggttgcggatgtcttgcggcgggagggagaaggacgacagatggatggggggatgggaggatgcagtcgcggttggttccacagatgagagtggaggatgcgacgagcggttgctacgaaaattcgagcgggcgcacgctgggcgagcgcgggtgggatttttttccgaacgagacaaagactcacgtcgcacgatgaaactcgggtgaaatgatgagtagcgttaaggatgatctattaaagaattgatctaggatgttgttttttgaccgtatgatttttctagagataaaacactgggtgcatttagcaagagtatgagtgcgtggatgaatcatgttgtgtacttagcgtagtttaaactggtggggttaagggtataaagaacatggagagacgaattggcgtgtgcccgtgaaaaatatatgcatgcatcatgcatgggtcacaagttgcatatataattgcataaacagatcaggtatgcctcat

SEQ ID NO: 165852 - DNA, 551 bp, Zea Mays
agagcttgtgctcttaagcatggtggaagttgggataagagcttgccatatgcggagttctcttataataatagctaccaggccagtttgaagatgtcatcgttcgagactctgtatggcaggaaatgcaggactcctctatattgggatcagactggagaaagacagttctttggacctgaacttatacaagaggcagaagaacaagtgcgaatcataagagagaatttgagaattgcgcaatcaaggcagaagagctatgctgatacccggagaagactactacagtttaaggagggtgatcacgtgtatctgaaggtgtcaccgatccggggtatgaggaggtttaaagttaaaggaaaattgtcccctcgcttcattggacctttcttgatcttaaagcgattgggagaagttgcatatcaactgaagttacctgatcatctatcagatgtacatgatgtatttcatgtgtctcagctaaagaagtgcctcagggtacctgaggagcagctaccaatagaggaccttagtgttcaagatgatctgac

SEQ ID NO: 165853 - DNA, 279 bp, Zea Mays
gccccggagcacataacggaccttgtaccgctccagggacccgtcggcgtgcaacttcagtttgaagatccatttcccagtgaccacgttggcgccatggggacgaggcaccaggtcccaggtgtggttcgcctgtagagcctcgcactcctcttccatggcacgccaccactgtgggtcgacaagcgcaccacagacagtcgtgggcaccggcggtagggtcggagaagaggtcgcggagaggatcaggcgatcaggggcccgaaggacacccgccat

SEQ ID NO: 165854 - DNA, 476 bp, Zea Mays
aagaaggctaaggcgtttggaaggccgagatcctgtttgctacgaggcagtcagagtaaggttgacgggaggtactcccttcttaagccggcctctagctcagggaacttgtgcaatacgcgatctccttcgtatgcagagatggccgctagaccaccacctcctattaatcgggcaggggactctgaccaccggcctatgccttcgggtaacagaaatccgactatggcggcacccatgcaaggaggtggatggcgggggcaggcacccccgcggcacgggcatggagatggcgcattttttgcatcgtcgaggcgctgggcgtggtgcttgtcatggccggggcaatcaagggatgcctggtcgtggcctagttggacagggaggacgcttccctccacagcctcgataccagaggagggtggaaggttttacggctagccatgtaatggcgcctggggatgagcttcctgttg

SEQ ID NO: 165855 - DNA, 628 bp, Zea Mays
caattttttaggaaattcaagacgtatctaatatacttgaagggggtgtggacaatgttcaaatacctatactgatacgttcatttgaagaggtaataactttaacaactatattgatttgcggttgtacatacaaatgatttattggtttgtgttattggcttatgattgtgcttaaaaatgtgttggcaggtacaggtaaatttgcaggatcacgcgaatatgaatgagagtggtgacgatgaacaaaatgatcatgccagaaaggtaataatggtattatactgaatgtgggactgcataatattatgtgctgaaaaatatatacttttgaattgcagaaactggattttgcagtcgatgggataagcttggcaagaccaaataactcaaaacccaaaggaagaacaataaaggggagtgaacaaaaggttatcaaattgggagcaaaaggtacaaagaaaatgaacaggaaatgccagaagtgtgaaattgctgatggtcacaacagtaggacatgtttgtcattggaggagaataaattacggttggctagccttgctggacgtaagagaggacgacctccgggatctaggaacaagggtggaagtaacgctcctcattggaa

SEQ ID NO: 165856 - DNA, 730 bp, Zea Mays
gcgaatgttatcgatggggcgaaaatcgttatcgatccggtctaatcgacaacggcggtcggtagctgatgtggcaaactttgactggtctgccaatttcattcgtttgaatttgaaatatttcttaaagaagaacaaaaatccaaaaacctgaattatcctatagacagaggggtgtttggattcattcatacgctttcatctccagtttctcaagccccttcgtcattcacacactttcgtctccattttgattcagttactttcaaacatgtattccgatatggatcaaaggcggaatctcaactatgaaacgttcacagatttggtcaatgattgatctccattacgttctgagacccatactcttgtggggcaagtcttccttgacggtcattcttccgtccaccatcggcaagaggaagttccttctcgttcccatggcctaactcctcacccactcttttcttattcatatgctactcctccatatccataccggccaagtgtcaacactcctcctcctattgagcctccaacaaccgacacccctcctcctaacatagatgaagcccattccaccgatatttgtcctccacaacctttcacttatttgtatcctccttcatatccatatcgatatccatatgctcattcatatggctcgtatggtgctcttcctccatatgctcctcctgtgttccctcccaactatggcgctcttcctcca

SEQ ID NO: 165857 - DNA, 512 bp, Zea Mays
aaaagtttcaagaaattctacccacttagcatgtctacggttcagatttgtttgactatgaagatgcttaagtgactcatgatcagaatgaataacaaattccttagaccacaaataatgtttccatgtttgcaaagatcgtatgagagcatataattctttatcataagtggcataattaagaacatgaccattcaatttctcactaaaatatgcaacgggtttacctccttgcatcaaaacagcaccaatgccaacttcacttgcatcacattcgagttcaaaagtcttaccaaagttaggaagttggagtagtggcgcatgagtaagcttctctattaaaagagcaaaagaatcctcttgtgactgtccccaattaaatgaaacacccttcttggtcaactcatgtaatggggcagcgatggtgctgaaatccttcacgaaacgatgataaaatcctgcaagtccaagaaaactccgcacttgtgtcaccgtcgatggcattggccaac

SEQ ID NO: 165858 - DNA, 771 bp, Zea Mays
catatttctaaagctggacagaaaaagaaaaatgaaaatgtggaacagtattgggctgattctggcccgaaccggcccaaccacacaggaaaccagggcacgcccacgcccgcgctgacggctttgcggaaaagccctcggggttttcattaactgggaatgggttctttcactgtttttcgcagtcgctgacagtttgcgaaaatgtcctcggtcttctattccttcacatcacacggtccacgacgacggtgaacgcagccgcgctccagtgagccactgttccggccgaacggggccatgaccggcgctcccgagcagtgggcatggaattgaaccaccccagctcatttcccctaacctaatttcaccaatgactaactaataagctctggccacggcggccgtgaacatcacggcaagacagtcgcgttcccggcgaccaaagggctcctagctcgattatttgggtcggcaagcatcatagacttaagggaaagcttaaacgagggagagaaggagatgaactgaccggaataaggctggccacggtgaggttgggtttcgggtggcggataattgatttggggcgaattcaaaattccgagctcgggcgaacaattgctagcaatacatggtggctgggtgggtgatgatgttgtgaagctctctgcggggtcaatttatagggagcggtgacgagcaatttgagaagattgcgctggcggccggagatgaagaagaaggcactggcgtgcgtgagtgcgtgtc

SEQ ID NO: 165859 - DNA, 578 bp, Zea Mays
tctgtcttatgggtagtatgcactggtaggaaatgagcggtcttggttaatctatccacaatgacccaaatggaatcatggtgccgagaggtattgggcaatcccatgataaagtccatggaaatgtcctcccatttccaagatggtatgggaaggggttgcaaagggcctgctgtcttcaaatgattagccttgatcctttggcaagtgtcacacttggatatgtacttggcaatttccctcttcattctggtccaccaatataaggatctgagatcatgatacatctttgtactgcccgggtgcatggagaattttgaaaggtgagcttcatccaatatcttctttctaagctcagggtccttgggaacaaccaatcgatctccaaaccataggattcctttgctgtcctgccggaagcatttgtacttttctgctttttgcttgatcatttccttgataacctgatacccttgtcttcaattttgtgccctcactatttgctcttgtaatgtgggctccaccgagatataagttaaggcacctgaagaaacaacttctaggttcagcttgcacaa

SEQ ID NO: 165860 - DNA, 703 bp, Zea Mays
gatgccgaagggccttcggcacggtttgcgctttcatcgggacaagggatctaatccaggagcatatagccttcagagtatggccgcttgtagaggagtgggaaatgccaaaggagactgtcaccaagtctggcgaaggtgagctggttcggttgagatacaccttcagatatgaaggtaagtttgatgagccgaatgatgactggttgaaatgtatcgaagctacaagtgatgaacttcttgggccgtattccaaagcagaagataacgcattatctgtagccttcgggagccgaaagaagaaaaggctaaatagagtttttgatgctattggatttatgtaccctaactaccgctacccaccacgggggcagaagagaaaaaatgcaccttccgggaaggatgttgcctcagccgccttaagcgagcccgcgccgaagaggaaaatgatgaaggtccttactcaccgaccgcgctacattgaaccggccacagtgcctgaatttggcggtgaaacctcttcggctattaaagccaaagagcctgccctaacgcagagtattgaagaaccagctgcaatgccgaaggttgacaaaattgaagaaccgaaaaccgaagaaacaaaaatatcagaagttcgagagcacactagagccatcaaaattttctctaagtcccaaatcaaccctagcctaaagattag

SEQ ID NO: 165861 - DNA, 424 bp, Zea Mays
tttctttatttgtaatataaacggaatatgtgatatgaaatgggtaacttgatcatgaaatgggaacttgatctaggtgaatctagttagatatggcgatgcacatttgtaaaatatagtgcgtcgaaccttacctttgccacgattctcgtgcctccctaccgtgtgcgctttcccttcacaccgaccatcttctctgagacacctttgtggctcttgatcatgtcatgaacccggacagtttgtgttttccagcaccgtaattgtctccatgaagatcgaggccttgtctccctccccatccaggatctctgtcagcatgctcaccactatcgaccccagcacctctgcgggtgccatcgctggctctctcatcctttcacatatcaccgccaccggcccccttctactgactaggttgccg

SEQ ID NO: 165862 - DNA, 1313 bp, Zea Mays
acacagcccggtaagcaaacctctgcttgcatctgcctcaacctgtgtctgagctcgacgcttcgaccaatcctcccccgcactcactgctagggttagggaaccagccgtgtcattgccacgacgccttcgcgagcagcacaacctccaccacggccacctccggcacactgcgcaaacaacttagaggtgcagcagtctcttttggtggcatctaaggtgaccccgaccatgtctctccaatgtgatggcggcaacgccacgctccatcgtccagcgacagtgtagagcgacgacaacccatatacaacaccattatccaacgacacctgacgagatgcgtaagtggtcccaggcggcgctgccatcctcgatccgagcagccttccacggggcatctactccaacccttcggccagcatgacctcaccaatccggactccctgatggccagatttgcatcccctgaagttagccatctactaccaatcaattggtccccatccgcagagcactcgcccaggtacattcccaactcatttgatgtcccagatgctactgtgtgtttgtataattttcttcccttacccggtacaatcgttcttatgttgtacctcggccttagcttgaggattttttaacttcatcattagcctcatatcttagcacgccccctgccatacactagggtagtatttcttcagatatttaccattgaggccttgggtaatctccttccttgcaagtcctcaacgaaatatgcattcccatgcacaatacctacaaccttgaatggtccttcccaattcggcgaccatttgtcgaatttattatttttgactcccacgggtaaaatcgttttccataccaactctccaatctgaaatgatttctccttcacctttttattataagctctcgccactctcagcttttctttctctatttcacttaaggctgttaatcgactttcattattcccatcaattctgtctagcattagctcaccatataccttagccgataacggattttgacaagctactctacaagcctgtaaattcacctcaataggaagcaccgcctcttgtcaataaaccaattcaaatggtgtcactttagttgctccatgccgagatactcgatgagcccataacgcctctgacaacacttcatgccacctcttcggctgttctacaatcttcttctttatcaacctgatcaacaccttgttgctagattcaacctgcccattagctgctctcgctgtccagcagacgacgacttaaataggccaccacactctctttccc

SEQ ID NO: 165863 - DNA, 433 bp, Zea Mays
ctagtgctctaaacagggcaccgatcactgaaattcagttatctgttaactgaacaaaagtccagtcagtgcaaactgacagtccatttttgggtagctttaactccacttttgtgtgtgattaagcccaactcacttaaaggaatttgttcactataacatggtcttgaattcctctacataaaccatggtccaaaactgcatagaacaggcagcacacagccccaaaacttcactaaaaacattgatttcagattcagatactattcccaatctgaaaaattcagaagtctgacagcccctctttggtcacctttttcttctagttccaaatacttctaaggccaagtggcttaatcaaattggtgctccacatgttgctctacaagtttggtacaatgatctttagctagaaccccatggattccaagcc

SEQ ID NO: 165864 - DNA, 570 bp, Zea Mays
gagttccaccacatagaaagagattgcaatgcagcagcagatactctaccaaagctaggatcgagccgtgcacaagctccaccaggcatctttgtctaggagatacaatagtcgagtatcacatcatgaccaatggaggaatgcaaggtagtggagtagacagaaccagacccaaatgactggaggatgccatttatcagatatatcaagaacgaggaggaaccgaatgataaggccgctgccgagcgcactgtgagatagtcggcccactatatagtcataggagaagtcttgtacaagagaggggttgttggagtcttcatgaaatgcatcgattcaagcgtcaggaggcgtttgcaggaagaaattcatgcagggcaatgtggagtacatgcaacatctatgactcttgtgggaaggccttcaggtcaggtttctattggccaacaacaaagaaagatgcactccacctagtccaaagatgtgatgcatgccaatttttggccaaacagcaacacttgccagcacaacagctacaaactattccggtcacctggcccttcgcatgct

SEQ ID NO: 165865 - DNA, 1021 bp, Zea Mays
ttctttgacatttggatcatcaaaagatgcaccagactcagtttgcctgggttttctagcacagatccaatttgccgtcctttcaccaagttgctcggaaagcatcggcaaccctgcggccttcttctcagtgtcttcttgtctccatttagaaacttgacgcttgtaaccacctgtgcctaagtggtggtggtacttgttcttcttagatagttctgaatttgcctcgcttagagatatgaatttaggattgctcctctgctctagaaatactgtccactgaccttctgagattttatattttttttgtcgggtctaggcccttctttgcaaattttgtattcatctcagacctccagtttcagaaattgattgcaagttgcttcatcgtgtattccttcatgagttcttctgaaccccgaggtagaacaaacctcgttaatagcttattccatatttgattcttgacatcatctgacacatctttccaatgtcggattgtgatgtcaagattatccctaactaagaacccaactgcattccgaaacttagggagtgcctcttctggagctaggggctgacctttcgggctcacatctgagattttatatgttttgtcagtaaacttgttcagtcctctatcacctcttttccagtcgctctgtgtccttttccttgacctctcggtggttgtatcggtcggtaccggtgcgtctttgtcttgattcagccccggtgcgtcttggtaatgtgccacgacttcatcaagtatcgcacgatattgagacaatacctcctattcatgtgtaatagacattatgaaatcaactaattaggtatacacatatgaaactaaagatgtgtactttacctcacactcttgtggatgataatccgggtcacgatgcaattgacgccgagcggcccgatctatgctaggacaggggtcggtaggtgtttcatatctttcatcacttaaatgttcttgagaaacacccttgttcatgtggtcgggcattaa

SEQ ID NO: 165866 - DNA, 368 bp, Zea Mays
cttccccttgtagttacttatctattttgggtaaaataatcgcttggtacctattctcacgagagtgtaaccttgctacagatggcccgcacgtggttgactgcccgcaagtccactgggggaaaagtctcttgccaccagttagcccctcgggaggctcgttgccacaacaagttcctgttggagtttgggatgcccacgttgttgtagcggatactttactctctaggatatccggaggggaaggagcctcgctactattgggataaggagccactctgtgatgggatgctagtctacgtgacagctgtggtccgtgctaagggtgatgaccctaattggggcggctggcacttcgagagtaaggg

SEQ ID NO: 165867 - DNA, 689 bp, Zea Mays
cggggacagggcatcagagagccaaggcgggctgaccagccgggcccaggggcaggggcacgggtgagggggagaggggagagtggtcgaatccagattggagggctatgatcagatccgcactaatgaaacctaaaccgcccgatctcggacggacgctcgagatctaactgttgggggccggacctaaacgtggtggcaccgctcggtcctacggcgaaggctcgctggagatgaggggactggccacgacagggctctagaggcttgggaaatagctcgggtgcgttcagggcggtctggtggactcggtcatgggcatcacgctggcgcaggggcactagagggcgcagaccacagcgaggcgggctaacagcggcgcgaatcaactccagcgagcaattgcgcgatgaccagggcaataaatagggaactaggggcacagggagattgatcaccttgagaggaaacactggagtaatggagcaacggcagaggcgtagggacgcctcggggccacggtggcggagctccggctgcacaggaagaactccggtgagcgcggaccgggtagactagagggattagggacgaatcgaggggtgttccaggtggcgggtgataaggtggagcttaccggggcaacagacgcggcggggagttccacgacgaccgtagaacgggcggcg

SEQ ID NO: 165868 - DNA, 778 bp, Zea Mays
gggcaagaaaagattgaacagggtgtttgatgcgattggcttcgtataccctgactaccattacccactacaagggcaagggaaaaacagaaagactgccgcttcggccaccgtagctatgccgaaaagcaaaaaggtgaaggttctgacccaccggccgcgctatgttgaaccggtcatagtgcctgaacttggcgagggtaattcttcagctgccaaagcaaagcaagttgcttcgattacgcagagcattgaagagccgactgtggtgctgaaggtacccacagtcggagcagccgaagctaagactgctaaggccgaagagccacacacggaaaaatatagaaaatgcctgaaattctaagcccaccagctgaggcaagtttgtcgaaggtgcaaaaggctcctaccgcaactcccaagaggaggagaatggctaacgtgctggacgctgtcttggagactacgaaggccttgagccctggagctactaagaaagatgcttaagctaccaaagtccaagatgtgaccgaagttgggcctttagcgcctattgagatgaaggccattgcgcccgaagataaaactgatccacaggcttcagacgctggcatggcagaagggccagacgcgggagaaagggcaaaatctcctgcccccaaagccgctgtcgaggacgctgattatatttaccatcatgcttcggggaaaaagttgtccaaagaagaagttctggaagccagacactatgcgcaaaaattgaaatatccgaagggag

SEQ ID NO: 165869 - DNA, 562 bp, Zea Mays
atagtggcgcagcttcctggacgcaacaagcacagcatagagcagtttatgcgtttcaaggtacctggcctttgcttcatggaggacctcactgacgtagtagaccggcctctgaacggtctggacccctgtagctggtctcgagccctctggctcttggccatcttgtgtcgtcctttcgacgaccagcaccatgctcacctgttctgcagccgccgcgatgtataaatacaacggctccccaggttctggagctaccagtattggtagggacaccaggtgctgcttcaactcttgaaaggtttgttccgcctctttggtccaagagaatgggccggtcttccgcaatagcttaagaagggtagagctctctcagccagccttgaaatgaagcggctaagggcggctaatgaccccgtaagcttctggacgtccttgatacgggtcggaggcctcatcgcctcaatcgctttgatcttctccgggtttgcttcaatgccccggtgtgaaaccaggaaccccagcaactttcctgcggagacaccaaagacgcacttgtccg

SEQ ID NO: 165870 - DNA, 691 bp, Zea Mays
acatgtgataacaagacatgggtgcaagtagggagtcagggccttggtaacacctggggtgttacaggtgggctcaggatttctggcatttctatcactctttccacctgggactcttcggccttatcatcttcagcttcggctggcccaactgtaggcacctttggcactacagtcggctcttcagcgctctgcacaatcggaacagtttcttttgtttcggcagctaaagaggtccctttgccaaattcagatatcacaaccagttcaatataacacggccggtgagtcaaaacatttatcttcttgcccttcagctcagctgtaatgaacaagcagcaatctttctctttttcccttgccctcgcagcgggtagcgataatcagggtatacgaagccaatagcatcaaataccctattcaatcttttcttgttctgacccccgaaaactatggacaaagcattatcctcggccttggagtatgccccaagtagctcatcgctagtagcttcaatacacttcagccagtcatcatttggctcatcaaagttctccccaaatctgaaggtatacttcaatcgaactagaccacccttactagaatcagcggtggtttccttcggcatatccttgctctccacaagaggccataccctgaaggctatgtgcttttgaattaaatctcttgt

SEQ ID NO: 165871 - DNA, 865 bp, Zea Mays
gcttagcggggcgcggcggcgcgccatcggtgaagcaccgccaggcgtacatgagtgccaaaccaaaaaccaccatgtgcaacgcaacactgggaacacgtgtgactacatggagagcatcttaccgccattgaattggtgaagcatcccagccacgacatgaggcggccgacagcgaagggtttgctccgttgaggaatttcggggtcattagccattcatccaccctgtcacggccacgagcaccacccccgagatccccagtcgtcaccaggctagaccatgtgccccgaacggcaacgcaggcaagatcccacggcggcagcttcctttctctcactggtcctctctctctccgcctccgacgaggtgcacacgatatgggattagctcttgtgcttgagcgaggtgcggtgatatttataccctgaagtcctagtacgaaccacccgcgagattcccggcactggcagccatggttagctccgaccgacaagcgttctgttaccggagaaatcggggaaggttcgatgcaacccattcagtcacgataagacgtttccaagtaaaggggggaaatatatcaggcgcctggactcttgcggtaaggaaaccacccgaggctgagaagcagtccaaggctagcggcttcaggtgtgcgcttcgctgcgctgtgaggaaagggacgaacccgacaagcggagcccacctagcggcgtttgaaggtggaggcgagactggtacgtgggtcctattgccaaagacagccgagggcgagtacgtgggtgtggcttcggatggccgcgtggcctgtaggggcgctggcgtgaatatggaactgggccgcggggcagatgaatcggcc

SEQ ID NO: 165872 - DNA, 601 bp, Zea Mays
gttcggtcgagaccgcatccggaggcagacaaacgacaaaaagaaatatatagtaatgactagttaggtgagttgatcaatgcatatgaaacagcgacacaggtcaaagtgtcaaacgagacatgcaaatgcctggacaatttctatggacaaacttctttacccggtcagtacatgttacttgttttcagcgtagtatgcagggcgtcagcctctgctgatcaactgaaccaccattcaccaggaagttatgtcctcggtccgtaatgcaatctccaacagctctaccatctcatctcatatcacgactcctaaacttcactcttcgtctgattggttgggtggacgcacgtgaccaagcccgtgcgagctagacgcgctggaaacaggatgtcatctacgtatctgcgcatgcagtgagggaagtcgattctagcttgcgcatgcagctaccggtacagctttgtctctatgaacacaggtaaccatacagaggccgccgcttgatcaatgcatccggagagtccagcttagggtacacagaaaaccaatcaggcgttctgtgaacaatgcattatacagtgcaaaacaatattttgta

SEQ ID NO: 165873 - DNA, 962 bp, Zea Mays
gagaaattcattttattcaggtaggtgaggaaaggtggcgtcaggttgaccctgttcatagaaagcaaagcaaggtctcacccgagtgacagattttttttggtttgcatgggggtgtggtcttgttctccagggagaatgggagatccatagatcttgatagtctttctcgcaaggtaacgcaacacgattcacataaaatatagaaaatatgagaataaaaatagaaaataacttttacccaaataactctccaaataaaaatttaaagcaaagtttaaaaaaactattgaaggtcctcttaaccacattccaatcgcacacaactattacctttcctccattttaacctcaattttttaaattagatcactcgctcttcccattatacatttcttggaaatattgatcattgttcatgtcttgtcacagaggaacaggatacagttcaagagtagtttatatagcagaatattttatcctgctgttacgatttgaacagcaacagaagatatagaactatctgtacaacaattccgaagaccaaaaagtaagatgaaattcacggaaccaattattgtcccgcgcgaagactgaaactgcagaaatctcagctgtaggtaaatacattctgaaataggttcgaaactgggatttggtcattttcatgccagattccgttcaaataagattttgaggtgcacgaattaagttataaaataaggtttactggtaccaaacgcattgataaattgtaaccaggaagacaatgttgaacttgtaaagcaaacaacacaatagtaacgagcagcaaaatgtgccaaagcaatcaaaatgcgtaccaaattacaagaggttctaggtgaaataacacctaacacgtttgtttaaaaaggcaacattaaaacatacccagcctcagaaggttacatgaattatttgctttactccacggtatattc

SEQ ID NO: 165874 - DNA, 510 bp, Zea Mays
gcggggtcgatgagcatcacaagaatgctatagtgctgaaacatggacaaagagggcgagagcggacctggagatggctgaccacggcggggtgactcacagcggcgcagagagtggatttgggggaaattccaaattaagacgctacggtggacgatcgaaggcgagggttggtgctctggcttcgtaagaacctagcggagctaacgatgcactcaatttatagcctccgagagcggtggctccgaatttggggaaggaagctggcgaccgaagagaggggtgagtcatcggcgagcgctatcgtggcattcacagggcaaggacttacggctgtcactagctatccctcacggcttgcgacgatgtggtgaaacgactaagagtgtggcgtaaccgagaaaaacggcagcatgatggcgatggttcccattcagtgcgcctaatagagcaatttaaaaggcttggttctcaaatttttatgtagcaactcattaatccatctgtggc

SEQ ID NO: 165875 - DNA, 569 bp, Zea Mays
gttggggccttggcgagctggtttgccgttcaccggcgggagcgccgccacgggatggccagctccaccatctggagtctcgggtagggaagatggtgctgccaccgtcgatttggtaatgggtgggtgagattagaggagcgtaccgcttcggcaggactcattctgggccgtccatagcgtgatatgtggtcgcagattggatcatggcgccgggcgctactgaccgttgatattggatctgtcggccatgattaggtaccggtttgattaaaaatgcgatctaatctgaaccgtccggatcagatcatgcggttgtgtgatgtccatacctcttcatcgtgtaattattgcaaaagagaccttggggttctacctattcaacccgccgtccacccttatgctgttaatattacggattggtcctgaactttatgagttagaccctaggcttctgcaaaattgtgtccgcagtccataaagtgaataaatggaataaaataattcagaaaatattttctaatatagaaataaaccaagaatcttagttaattcatattcaattcatc

SEQ ID NO: 165876 - DNA, 582 bp, Zea Mays
cataatcatgataaattataagtggaattatttgactaatttgtggtcgttacactagtagacacatgcacatgtttataataactgaataataataataacacaattagttaataataataacacaattagttctggcagattaagattgtagcagggtattatataaactacttacaaatcatatatatgcacacacaaattaaactactgtaaaccacttgtacacgactacaagcacatataaaatgtacacaattaagcctgctctattaataaggagaggagaaagttaggaagtttctgctcttggaactgtgtgaggttgccttccgccacagttcgaaggctactatttggagattgagcagctagcagaacctgagtggtatccatggttgtatcgtacatagaatatataggttttgtcagtcagaaaggaatcaaagaaaatcaacaagcaacataataatcaacaatgcagattactaaaagtcagtcagacactgagacaattgaagatatattaaagtttttgcattcaaaacaacttgttcacaacacagatattagccaaacaac

SEQ ID NO: 165877 - DNA, 571 bp, Zea Mays
tggaaggcctggagtctccagaatcgcgtcccgtttctatccaattgttcagtgaagttgcttctgataaacgtgaacaacaaaaaaaacaaacttttgatgacattatcacgcgtccaagtgtcggtgggtgttacagtgtcatgtacagaagcgtgtcctagtggcataagaaaagtgtgccaaacactcatcagttcagaattttggcggcaatcatcgatgcaaacatacactaccgcgctaatgatgatagaaggtaaggttgttgtagcagtagtagtaggccgcggctaggctgggctctcacttggacagttcaactgtgctatgtgaagcttggcctttcattgggtaaatccaagccttcaattctgtcggccttgcaaacaaaggcgggtatcgtccacggacgacaaagttaagcctgtccagcgaagcgacccggctgttcctcagttgcttgcgtgcatccaaccacgcacatccaccgtggacccgaagacataaactagaattccaccccttcccggccccgtcacctctgtgcggcttggaatttaattctggc

SEQ ID NO: 165878 - DNA, 564 bp, Zea Mays
ttactgctaaagcaaatctcacgacgcctccgtaatcatcgtgcagcttccatcttcaactagataacctcacccgggctcctctcctcttcatcttcctcacccgggctcatcttcgcttcatcttccatcgccgcgcttgggccatcgtcggccccccgccccgcgctcgtacagccgtccatctgatatatcgtcaatgtatgaaacacctcacataccgctctcaagcactataaaacatggttgttattacattagaatccaactactagagacctccaaactattctgttgacatgaagcaaatggtgttcatgtcatataatgttttttcttctctcaaaagagataaaatttgcaagactcataaagcaatgaagggataacaacaagaaaaactaatgtacttcttgacacagactcatgcaaaagcttcttaaatattactttcaacactaaaataataacacgatactatgcttaacatgagtaattggacttcaataagacaatccacataaccaaactaccttgattaacctcacatacaacaaaacctcc

SEQ ID NO: 165879 - DNA, 369 bp, Zea Mays
gtgagaagaggtttaagtgctcgaatttagaattcaatgaaaatctctaaaccaggcctgagaacttgtggttcttggtagaagacagcgactgcagtggaaggaagcatgccagtgaggaatcgcagaggtaaactttacctgccgtggcacttggtggtgaggactagcctgccaaaagtcccaaagtgattcgcttagttaggacaggaaaaacgggtggttagtgtgtggatagctgacgtactatgttagcaacttggcttttgttggatggcgaaaggtcaccatcacaaatccgtaaggtagtggcgcacaggagaagcgaaaccgttcgtgtacaaagagcctgcaaaaggaggcgctcaa

SEQ ID NO: 165880 - DNA, 544 bp, Zea Mays
gagtcggtcttaagtttgtaatgatctcccccctatgaatgaagacttggtttcctgttgatctgttgttgcatgctctgttcttgcatttgatggctcattagcattttagaggtaatgcacgagtgatgcttgcttttctgcgatcccaacttttcacgagtcatcggtctgccgctttgcgcccgacttaacatgccaacccatacttctgctgacgtccccccttgagttctgaaccctagttcttgctttttcctctgccgctttccaacttcctgagctcctaaatccgctcgcatcgttcgagagatcacgatggtgcccaagaggagaaagcagagtgctgctattccaatcatccctccaatcgatcccaacagccaactccccttcgccggtaaccacatgtctattattttcgaagctgaccttctgcacctcgttgaaattagttttcttctaccgaaagaattttgctccaggcaaatctagcgcggagttactgtcccgactgaggatattcatgaggctgttatcttta

SEQ ID NO: 165881 - DNA, 677 bp, Zea Mays
ccagagtcagatcctgctgcacagcaattagttccatcttgatctgatggtccggatcccccaagaacttcctcaacatagaaacatggaataccgggtgtacccctgccatggaattcgacagttgcaagcgataagccaggctgcccactcgggccaagatagtgaacgatccaatgtatctcgggctaagctttccggagacaccgaaccaaacaactcctttagtaggtgataccctgagaaggacatggtcacccactgcaaactccaaatctctcctcctcacatcagcataactcttctgacggctctgagcggccaaaatattatgacggatttctcgaaccttcttagaagtctgctgaatccaatcaggaccaaccagggatctctctccgaaagtctcccagcaaagaggggagatacaccgcctgccatataaagcctcgaatggtgccatcttgatgcttgcctggtagctgttgttataagcaaactctgccaaagcaagatgatcctcccagctacccttccatgacagcacacaagcacacaacatatctcccaaggtttggatcattcgctccgactgaccatcagtctgagggtgaaaagcgacactaagtgaaagcttggtgcccaatgcactgtgaagactctcccagaatttggat

SEQ ID NO: 165882 - DNA, 821 bp, Zea Mays
atctcatgttgttgttgttgccatgagggggaccatgctgccatgcgggtggcagtcccatggcattgacttcttcccttagcctcttgtcccatcgtcggtcttgccgcagggcatcttatttattcatggacatgtctttttcgctagtcgatgaggtcgtgggctcgtttgttggcggtgatgtatctgtcagcgtcatggaagtgttgctcggatgttgccaaagccctttggaggatggcctgtacgaaagcctcatcacgagactccggtagaagtcctcactcactgcctcggtgatgttggggatgcggtacctcatcgactgaaaacacttcaggaatgagcagaaagaattttcctccttgcgcttgatggatttgaggtcccatgggtgtatcagcttgtcggagagtgactaaaagttggcaatgaacctgtcacaaaagtcagcttgtcgttgatgcagtgatgatgaaggtgaggaagccactagggcacatcttgccctagcatgattgggcagtaggctgtcatcacatccttcattgcctcagcagctcgggcagccgtgaaataaatggccaaccagtccctcgggccctgttttgcatcatacatattgatattggagatcttgaagtttggtagccagtgcactgcatgtagtcggctggtgaagccttcatgcccacgtctttgagttccaaatcatcctctagtcggagctggctgattagtccacgaagcccatttgtccgagccattgaggtcctttaatcggcccatagtctaaatttgtgtcaaggggacctagc

SEQ ID NO: 165883 - DNA, 479 bp, Zea Mays
tctggtagatggctcttggctggtcttcacctcgctctgtgcttcaatgcttctgctgactagacttgcagttcagtagctatatttggatttcctttgatccctatcgatctcttccttctgtctcaatacattcattgcgtatacaatatggatatgacttgttcagaaaatctattgaaatttcctagccgtccccccaatgggtgtggccaagggacgtcttggtacacagagcgtttagcacattgtcctagagtagtaacttgatgtgaccacggggtgtaatcatatcgcccgagcagttgaccttagtccaaatggcgtcatgttacgcgaagcggcatctgttgcctgactcattttaggtggcttgaattgcttattgaatacttgcgactgtttggtgagcgtggtaggaaatgaacaatcgcttccgacctctataaatagcctgcttgcaccgttgttctcttcac

SEQ ID NO: 165884 - DNA, 596 bp, Zea Mays
agccgccgggcgtaataccctacgactagaaggtatgggtccgacctaatcgcccgggcgacgtcgagcgtcatactcctcggttaagtagtggcatgtgctacctttgtgagggtcgaggacagagcttggtcggtggctgacatcgagtaccgtgcaggtattgacgccgcccttgaaagcccaccgatgcgtgtggtaggcccccatggccccccacagccagcaagccacctttagggtggtcaggttgacgagggtgtagccctcattggcctccttcatgaaattcataagaaggtagaggaaaccataatgttgactttcccctacctagcgcgccaaatatcggagagtaaactccagctgtgtggtagaatacacccgcctaatcctaggaacacaagactgccttgggtttgcctgatgagatggatgaacacaaaaaacacaaagatttagagtggtttggaacactagagcgtaataccctactccattatgagttgtattgatgagagcttgagaaagcctagatctggatggagatgcctccgagggagttcgagtgagtatgtccttagggattctagtcc

SEQ ID NO: 165885 - DNA, 384 bp, Zea Mays
ctgagatgtcaacaaactttctggcctgcggttgtatgggaagatccagacccctccatgacctgctagcatcagtcttctgcaaccatagccacctagcttgcagagcccatccctgtaatttaaggttaggtattccaagccctctgaggtttagaggccttgttaccacctcctagggcaccaaacaactgtcacccttcacatccttccttcccttccaaaggaaaccccttctaaccttgtcaattgctttgatcacccatctcgggacactcatggcaataaggagataaaccagaatggcaaagagcacaaaacgaaccaccgcagttctacctgccaagttaaggagggaggccttccaaaaagggaaacgatccg

SEQ ID NO: 165886 - DNA, 413 bp, Zea Mays
acacggcgggggcccgatggtggccgtggaacaagcccgagaacacgacggacggcggtggagttccctgggtgcgcgcgatgcgaggtgagtgctggggtgttgtgagtgcgtcagtgagggaggaggagagcgagtggggtacaaggcagttagaaaaggtcggggtggggatgggcgtggccttggcatgcgtcgtgggcgcagagtccacgacgacgcgcgggtcgtgcgcaggcggttcaggaaggacggatccgacaggtgggacccacggatcagtgagagtgggcgagcaaacgggtagctagcgctgtcgcacggggcccgcggggcagagagagagcagggtgcgtgcgtgaaggaaaccggcgccgacaggtctgccccactgggcagcgggagggatagag

SEQ ID NO: 165887 - DNA, 609 bp, Zea Mays
taactttttttctttttgcaaatgtgaaagaaggtacgtacaggactgcaagctgagaggcgcaggtagcgcagaggaaggatctcactggccgcggcatttccgcaaacaccttgggctcgctgcccagtacacgccagttacacggcacaccggcacctgctacgtggctctgacaggcacggccaaagcaccctaggaaaatcacggcgtctccgtgaccactgttcgcgctctccccttccagcgatgtgttatgtaccttgcaggctcgcagtcgtggggtcgtctgttccgcctctcgagagagcgtagataggtgtagcgcgcgtgagttgtggacatggcgcgtgctgcaggagccagccagagaggaaacccagagaaacgagccgggcaacgggctggcggcggagcggaggtcccgagagctctctcctgcgatgcaacgatctgggccgcacgcgctagatcggacgtcaggtaggcacgcacagagggggctcaacggtgtttgagagaaaccaggcgtccacccctcggggtcgcaactctcgccgcggatgatggatggccgatttatggaaggggtacctaggtagacttttt

SEQ ID NO: 165888 - DNA, 750 bp, Zea Mays
ctgcttccatgcaatcagaatgcggaggagaagatcctacgtgaacatccatggaagtatgagagggagaaccaactcggacaccctcgggggctgggtcatagctcgcgctacccatccgagccggatcatctccggcaacaccctcgggggctgggtaagcgctagcgccatccttgagggccgagccctctgtaacagccacctctaaggctgaaggaccttcaaccacttccatgggtgcagagcaatccagaccagcctccagacccttaagaccgcgctctaaggttgatgaggcacgagacgccgctcgggacaactccaacccggcatcaggcacatcagcacaaatatccatcatcccaccatctgccagctccaacaacagatcctccgggaccatatcttcaagagtctgatcaaaatttgccagagacaattcttgcagaccaacgagggcagacaaagctggagaaggaacaccactactctccccgctggctatgtagcgccggctgttcttccgaattagagggatttcatcctcctcttcctcatcttcatcaataatgtggacggtacacccattggtatctgctttggccggattacacccattgggatcagcatcatcgaggtcacacccattggggtcagcatcagtcgggtcacacccattgggatcagcttcagcaaaatccggcactggcacttcctcagcagcaggagcagaaggaccggcatcct

SEQ ID NO: 165889 - DNA, 523 bp, Zea Mays
ctttaaagaaaaaggaagaaaagcattagaatctttcacgctgaatttagaagaagctctatcatcaaacaattttttattgagaaatatttttccaaactttttcgagcagttctctaaaataaaccatggagctgagagttaaaaaagcagcttcttctcatttagttgatgcatggaatcctatatgtgtcactgagtttactttaaagagttacagagaatcaatctcttatgatcaatgaatcaccatacacaaagaacacaagcaggaagagctcaaccaatctgtctcttgctagctgctagggctattgtttccattttgcagactttgtgattcgtaaaattctttggttggtgcaaaatagaatttttctaaataattaaatatttatattgtcaaataaaagcaccagcaatggtacctccatgttcatgtttataattatctgtgattcttacatatttcaattactatgcttatttgttaaggttaagaagtattatcatgtgacctgcc

SEQ ID NO: 165890 - DNA, 967 bp, Zea Mays
gaggtgctcctatcatttcaagtgtatgcacatgatgagatgatctaagggtggagtttagggagaaaataaaataagaggggggttaggaggttagggttccaaaccttgggttgggatttttgggatgttacaaacctaccccacttaaaggaatctcgccctcgagatttagactggatttgggaaaagataagggtattccctcctcaaggagtcctcactctcccaggtagcttcgtcttctccttctctgctctactgaactttacagagcttcacttctgaggtgcgggtcttttggacagccaaatcaagaatcttaactggcttctctcggtactaaagatctttctgaatctgcactgcctcttcttcgatgtgactttttggtgcttgcaggcatttgcggagttgggatacgtgaaacacattgtggatgtcagacatggactctggtagttcaagacggtatgctgcgggtcccactctgccaatgatgggatagggaccgacgaatcgcggtgctagttttcctttcacttggaacctcctgacaccatgcatcggggagaccttgaggtagacgaagtctccttcttcaaatctgagctctctccgcctattgtctgcataactcttctgccgactctgagcttcaagtaatctcctgcggatcagagcaactttctcttctgcctctttgacaaaggcaggtccttctagtgctttttcccctacgttggaccacatgagaggtgtctggcattttcgtccatacaactcttcgaatggtgacatcttgatgctggcctgatagctgttgttgtatgagaactctgcgtagggtagactggattcccaacttctatcgaatgctagcacacatgctcttaatagatcttcgaggactttgttaactctttctgtctgcccgtctgtctgagggtgataagcggtgctgaaa

SEQ ID NO: 165891 - DNA, 492 bp, Zea Mays
ggcgactgaagcagatgctccatggtacagtagaccattaaggatcagaccgccagcgcggctgtcctcaccgccgacggcttcctccgccgtgattcgtgctgccgccgtccggattcgcgctcataactaatggataacttcgcggggtaaaagatcttcaccgcccgtgcgctggcgatcactccggtgacccccgtggccctctctccctctttacggctgaagcagattagctcgccggagaaccgccgcttcccggcattacgccgcgtggcctagctttctaccgtgtcgccgtgactcccttaggccgtcccatcatcgccggggaggttgccacgccattggccacgaattcacgcggccagtgctttcttcttcacctccgaccgccgcgtggctcagccaaattgagcaccaccgcccgcgggcgctataaattgaccgtacccccagctccgccatgcatccaagcagctattgcacccg

SEQ ID NO: 165892 - DNA, 1099 bp, Zea Mays
aattagaaaaagaaaaagaaaaagaaagccacatgggctgactacctcctttccagcccaattcacgttttcacccgcgcggcccaactcctaatcctccacgcgcgcgcgctggacacccactgacatccggaccccgcgcccagcctcacatggtatagtcattcagcgctagtgttgagtcactagcaggtgggacccacttgtcgggttcatccccttcgcgtaacagaacccgcgcgggagcttcggctgccgttgcggacctcgctgaccgagctcgaccgaggtataaaacccaatcacgtctctcctcctcctcaacccaccgcgccgcactcctctgccctttcgcattacctagaccatcctgggcgacacgagaagggcgccgccatcgacgtctgggatgaccactgccgcaaccgtgctctcccctatgatccttgacggtaactccctcctctcgcttgcggaatcttctctggatgataggagtttataccgtgccatgttcgaaccataggaccatagtaattgctcgccgtcgcgtgtgtccccgccgtggattggactgcaccatgggtcgggggtctacgctgttttgcggctgaaattgatgggcaacataggttcgggccgtcgtaaatctcacgagggctgagcgaattagagtttggggctcggggatttggatggacggtggagattagtttggggtgtaccgctttaggcgattggatccgtgctgtcggatcgttatcctgcggattagaacagatcatgtttcattaagttgtagccgtcgatctctgatctagcggccaccagcgataccggttcatgtataggaatggtctaatccgcgccactgattctaatcatgcggcccatatataaccataccccttcgctgaagccattttacaaaagagaccccatgaatagacataataaaccctccgtccagtggaactattctctgtgtctaggttatcttgcgcagagacccttgagcttaccagaaattgaggcccagtccagagtagattaaaaacagtgaaataattatggaaatttgtttttaatacaaaaacaa

SEQ ID NO: 165893 - DNA, 1338 bp, Zea Mays
tgattgtgggtggaaggctgagctcatctgtaacttaaccccggccatgtgaaacagttcagtccaaaactggctagtgaaaaccgtgtcccgatcacttacaatggaacatggtagaccatggagtttgacaatatcatcgaagaaagccttcgccactgagactgccgtgtaggggtggcccagggcaatgaaatggccatacttcgagaatcggtctacaactgtaagcactactgacttgccaccaacctttggaaagccctcaatgaagtccattgatatgtcagcccaaaccatagaaggaatgggcaagggttgcagcaaaccagctggatgaaggtgccgagtcttgttgcgttggcaaactgcacaactgcgcacgaactcacgtacccggtggagtgcttttggactgtaaaaagatgtcctccacctgtgaactgtcttttgcacgccttcatgaccagattcatgagcttgggcaagaagtacagaccataatgacgacgcctctggaatgaatactttgcccttgaaccgtagcagaccatccgttgtagtccaacccggactagcagtgccgtcagccaactgcttgcagattgcagccacctgtgaatcagattcagcttctgcctttaaagtagcaaataaatcaaaggaaggcgaggagatggtgtacatagttcccatatcctcatcccgacgggatagcgcatccgctgcgccattgagtttgcctggccggtattccaccgtgatgtcatatccaaaaagcttgctgacccacgtgtgttgaggaatcgttgacaatcgttgatcgagcaagaacttcaagctataatggtcagtctggactgtgaatggtcgaccccatacatatggtctccaatgccgaactgctttgaccaacccaatcaattccctctcataggctggcagtttctgatgatggcgagacacaggcctgctgaaaaatgctatggctccatccccttggtgtagaactgccccaaatcttgagcccgacgcatcacagtcaatgaagaatcttttggtgaaatcgggtaactgaagaagtggtgctattaatagtgattgtttcagctggcaaaaatcctcagctgcctcatctgtccattggaaggcatccctttttagaagagcagtgagagggcttgcaacagacccataaccagctatgaacttgtgataatatcctgtaagaccaagaaaaccgcggagagctctgagtgtacgcggtattggccatgactccactgcatccactttagatggatccatggcgaccccctgtgctgatacaatatgtcc

SEQ ID NO: 165894 - DNA, 630 bp, Zea Mays
taggaactgaaatgggtcgatttggacaagatatgaattaaatatgatttatacaagttttacatttttttatactcaaaatcaatttctaactctatttttcctgttttatttaatttctggactgcgcgcaccaataccaggaagcacaggggctaatccataagaatccctagacacagagcgctatatgcaggatagtgggttgatttccctatactagggggtctattttgcaaagtggtcacagcgaaagggtatcatttgtttctggccttcggattagttttggacggcccagattaaatctttccaactccgaaccggtacgcaatcgcacccgttagatcaaagatcgacgctcacaatttaatgaaggcgcgatctaatcttcaccatgcatacaccgatcgacggtcccgatcacctagtcgaaccggtactagtagactaatcctagccgttccccagggatcctgtggccacgacattgccttccacctcccgacggacacccacggcggcgcacccatccatgcgacagcgccatggctgtcgaacacccgaactctccccacacctccatactctacacgcttgggcgaaaaaccacgagaagtctactatgat

SEQ ID NO: 165895 - DNA, 883 bp, Zea Mays
taaatagttaacaacttaactgaatgattcagttttggacagcagccaactcaatttgaaattccatagctcccagacgacgcgtccaaattcagagtataagcatcctatggaaagctcatataatatactaaacaacattccatagtggtttgtgcagattaggtactcaaggtagataaaaatgggttacaaattaataactcattgctgtaatcattaactgaataattctattttggacagcaacacatctgacttagaaattccatagctcccaaacgacttatccaaactggatgagtaaacaatctatagaaagatcaactaacctaccacaaaacactccatataattcagagtccattttggctctaattatttataaaacggcacccaaacctaaacattgtaacatgtactgaaacataacagaacgcatcgcgtaacttcagaagctgataacttcgtcaatacccaaccaaaaaaagtaaataaatacttgttggaaaggttagaagatcctctacaatttcttccattatgacttaaccagatttggactctaaaggcctccaaaacgccctgaactactacaggcgcatggtgttaacctgacagcaacagcagacgactttcatacctcataacacctttaatccacaacagaaaaatgtcggtaagtacccatatggaatgtactgataagcactataagttttgtttaaaaaagtatttccagattcaagctctaaaaccatcaaaacgtcaacactttgttgtaaccttaatctgaaaatgaaactgaaatcgggatttcgcgagtagggttccttggctgaccaagaattgaattaaaacgacaaaggaaaaagtgattaca

SEQ ID NO: 165896 - DNA, 746 bp, Zea Mays
cacgtagtggccatgggtgatctacgaagctcgtggagcgtatctgttgccgtttcgggcggaatcgtgggcggggcgaagctgaatttctcgccagagatcacacggcgccgccgaaccgcactctgtcgtggctagcgccgctcgggcatcgatgtctggtgaggactccctccctgtgttcgccaggtcctttattacgtatcgcgcactgtggattaggacctagggcttgtctgtgtagtttcgccatgctccggcgagctctgcggtgggggaagcagggtgccgccgggtgccgtgactggagaatgggggcagaccgttcggccgtctgatcttaacggacggtagagattagtttgagcgtaccctttcgatctattgatcatgcgccatcggatcacgatcgtgtggttataattacataccggttcataacccagcgcgatctaatctcatccgctgcacacagatcggacggcacatattggcctgtaccccttcggccaactcttttgcatatgagcccctgaagaatcaagtattaacccgccgtccgtggtagctgtgcactgagtctgggcaaatttgtgagtgagcccctgatcattttagtaattgacgcgcaaaccaggaaaataaagaaaacagggaaatcaatttagaaaatgaattttaataccaaattaagtgcaataacttgtttaatgcttagaaaattcatattaaatccttttcagttc

SEQ ID NO: 165897 - DNA, 513 bp, Zea Mays
gtttttatggtgctctaattgttctccttaaggattgatctataaatgtcaacctagaacatacattacaactgggaatgctattatggatctagattagttaagtatgaagactttttctagcttgttagtggtttccgaaaggtgccaataggatttgatgagctgagtataggataacctctagcatgtgtgtataacattgatggtattgtaactatgggggttcctatattctcttgccattgaaacctggtagccactaacttgtgcgggaaacttttgaaagatttcatagtgaaattttgtcatgcaccttagaagtatagtttggggctagctactcctagcaaatgggaaccacaactcatagataaagatgtacaacatgtgtagagtatgtctaaactattatatcagtcgtgctcatggttatcaacatgctgaactactttttgaacaaacctttgaaagaatctattttattactttaaattatgttatgcattacta

SEQ ID NO: 165898 - DNA, 931 bp, Zea Mays
ctaagatgagtaattgtgagcatgcttgtgctgggttgagtggacgtgagcatgtcgcaccgttttaagtcgttgccgacttaaaccgattgctccattggtagggtatagtggtcaccctgagttaagcaagagtgagcatgtcacaccgccttaagtcattgccgacttaaactgattgctctgttagtagggtatagtggtcaccctgagttaagtaagcgtgagcatgtcacaccgccttaagtcgttgccgacttaaaccgattgctccattagtagggtatagtggtcaccctgagttaagtaagcgtgagcatgtcacaccgccttaagtcgttgccgacttaaaccgattgctccgttagtagggtatagtggtcaccctgagttaagtaagcatgagcatgtcacacagccttaagtcgttgccgacttaaaccgattgctctattggtagggtatagtggtcaccctgagttaagtaagcatgcagattgacaataattcgagtgcctttgaaaatgaagtctttttattgatgatgtactttccaactacagaatacaatgccaccctgatagcttctgaaatctagctagggataaaacttcctgaggtgttctatgttccatgagttccctatttctgtgccatccatttgagtaagtcgatatgatccaggccgagtgacttctgctactacgaacggtccttcccatagtggtgacaatttgtgccgtccttcccttgttagaattcggcaaaggaccaagtctcccgctacgaaagatcgatgtcgtatggctttatcatgataacgcctcagagtttgctggtacctagccgactaaattactgtattcaatcgctcttcttctaatacatcaatatcttctagtcgagtggcttccgcttcggctatgttttc

SEQ ID NO: 165899 - DNA, 578 bp, Zea Mays
cgaaggggacctcgtactcgtccgaacagcccggacagagtcacggggcaagctagagccaaaatgggagggtccattcatcgtcaagacgaaggcatcccccagcgtgtacaggctaacaactccatctggcgaggacctagagcattcctggaatatcgataatctccgcaaattttttgtttgaatcctcagggccaacacgcccttgtaattcaccaaacaatatcgttccagcccgcactcttttcctcctagggggtgaggtttttaatgaggcggagccatgtaatatacctgcaaaaatcccccgcaaaaaccaagacacaatatgtcgaaaaagactgcatcgacggtcttcggcattcgaccacaccgaagtcaccgcgaggggcagcgctgactaccctcgcgtgcgacactccgcgcaaaagtcacctaagggtgcagccagaacagcacaacaagtgcaccaaatcgaagtctttccaaaagatctccgtgcaaaagtcgcctaagggtgcagccggactagcacaataagtgcgcaaaatcaaagtcttttccaaaagactctc

SEQ ID NO: 165900 - DNA, 649 bp, Zea Mays
acagaggacacttgccttcaccaaactgctgatcagggacttcctcttcaacttcctcgagaaacacagactgcccgttgtctacgtaaagtaatcattcacactatgcacttgggaaataacaaacaaaagcaatataccaaatatatgcagcagagggatcacaagttcataatagaaaaggattggcactctagtgttccctaggtctagggtagaggactacacaaagtgattcactatccactaatcaggtctaagttagtggtggggttaaatcattacatgattttaagtccctaaacttaggtgtttaagttcataaacttaggtgctccaacttttattaaagcctactattttctatttatctcaaatagggttccaataaccttaatcttatcctaatgatcaactattaattgggacataaaaacagcagggaaacattggttaaataggtagacaaaaatactatgagcattttgcaatttgaagcacctaatttggagttcatatgacaaagttatgaattttacaagtttagggattaaaaaatatgccctaaatacctattttgaattaaataaaaggtccgaggacctaactgcgagaatccagggacggcgggttaaatagcggaaaggcg

SEQ ID NO: 165901 - DNA, 482 bp, Zea Mays
cgcggaggaggatatgaataaatgaaaggttgtgtaggacaagcatccgtggaagggtcttcatcggtgttaggaggagcgtaagtggttggaggctaactactaggaggaggagcattgacatttggtcagtacgaatacgaaggaggatacaagtgttgagcaccaaaataaccaccagacggtccggcactataggctagacagtccgcagtacaaacggtccgcgcgtgtgtaaaatcagttagggttccaaatttctagcgggatttgttagcaaaacctgtgggattaactcaagaatcaacttgtaacaagcctagacctccccctatatatatgaaggggtatggccaattgaaaacccccataattcctagccctagtttagatctagtttagttttccacaaccatccctcttcgactctacgctgattagggacaccccgggtggcctgccaacccctggaactcttctcc

SEQ ID NO: 165902 - DNA, 1584 bp, Zea Mays
gtcacccctatatgagtaatcgtaagcatgtgaaatcgccttaagtcgttgccgacttaaaccgattgctccgttagaagggcatagtggtcaccccgagttaagtaagcgcgagcatgttgcaccgtcttaagtcgttgcggacataagtcgattgctccgttagcagggcatactggccaccccgagttaagcaagcgcgagcatgttgcaccgtcttaagtcgctgccgacttaagccgattgctctgttagcagggcatagtggtcaccccgagttaagtaagcgcgagcatgttgcaccgtcttaagtcgctgccgacttaagccgattgctccgttagcagggcatagtggtcacctcgagttaagtaagcgcgagcatgttgcaccgtcttaagtcgttgccgacttaagccgattgctccattagcagggcatagtggtcaccccgagttaagtaagcgcgagcatgttgcaccgtcttaagtcgttgccgacttaagccgattgctccgttagcagggcatagtggtcaccccgagttaagtaagcgcgagcatgttgcaccgtcttaagtcgttgccgacttaagccgattgctccgctagtagggcatagtggtcaccccgagttaaataagaatgtaggtcgattatgaacaaactgagtattcttgaagccttttttattgatgacatatttcccattttacagagtaaattatcatcccgatagcttttggaatatagctagggataaaacttcctgaggtgttctatattccaggagttcccaatttctgtgccgtccatttgagtgagacgatatgatcccggccgagtgacttctgctactatgaatggtccttcccataagggtgacaacttgtgccgtccctcccccgttagaattcggcgaaggacgagatctcccactcaaaaggatcgtcgtcgtacggccttgtcgtgatagcgtctcagagtctgctggtatcatgctgattgaattactgcgttcagccgttcttcttcgagtacatcaatgtcctccagcctagtagcttcggcttctgctatgctttcgaagaccaaccttggcgccccaaacttgagatcagcaggtaatactgcctctgacccatagaccatgaagaaaggagtgtttccatgcagagctcggctaggttgggttcttaggctccaaacgacgtagggcaattcccttatccattttcctgcgaacttttcatttttattgaagacatttttcctgagtgcctccaatatcatcccgttagctcgttcaacctgcccgttggctcttgggtgtgctaccgaagcatacttgatctgaatgcttttttgctcgcagaaatcaaagaactctgaacttgtgaagttggatcctggtcagttatgatactgttcggtattccgaatctgaatattatgtcttgtatgaattccacggccttggctgaggttaaagaagcaatgggtttgaattctatccatttagtgaatttgtcgatcgctaccagtacatgagtgtatcctccctaagctttcttgaaaggaccaa

SEQ ID NO: 165903 - DNA, 750 bp, Zea Mays
tcgccgtcgccactaccagatcttcgtcaccggcgacatcggcgggtctcctactctccatccgtgcggcttcccctctctggctctcccttggtcattccccaatctagaaatccctaaccataatcacgtcatcgtcggttgttggctcatcgcgcgtcgtcgtgcacttgaccctcgtctccggctccaggctccggcttggcaggtacgtccctcttcggctctccctccccagtcgaaaatccctaaccctaaccgtaatctccttttcactgcttgcttgtgggctttggtaggtcgccggccgactacattgtggtcatgctagtgccgccagggccattgaggcacgatgccgagaagggggacatggatgacaacgacgacaacgactggtaccctagaaccatcaatgacgagctcattgagttagggcagcttcccgatgacgtcgacgacatgggagatgctactgctgccttgttcggtgtcggcagcagtcatactgccattgaccctgagggggcacctgccgggccggttagtgatgctgctggctctaatgaacttgattcattgatttcttcaagcattggtaagcgttgatttgctgttttggatgacttcactgaagtcacaaaaaatcgtaatggtaagaaggtgcacattacaggtatttgcaaattttgcaaggcttggttgagtgctaattctaatgctggcactggacacttggttaggcaccag

SEQ ID NO: 165904 - DNA, 808 bp, Zea Mays
ttatctgggccgggggcatggattttggcccaccccgggcgcgagcgcgcgctgaggcgctttcggcccagcggcggcccacgagtggggagaacggcgcggccgtgggggggggggggtgacggcgtcgcatagggcccactggccagcgagggggggagaaggaacggcgttacggttgacggggggggtgaaccggccgtccgcggggaggactcggccgccggtgggctcgacggcggttcgccgtcggtggcccggttcttgggcaatgtgtaggtgccttagcatggggaggggatggcggacctagaggtgggctcaatttggtcagaggaggtcgggagggggctgcccgcggggaggtggcggagcttcgcggcggggttgccgtcggtgagctctgggcgagcaatcggggtgggggagtggtgtattgcgtttgcggtaaggtgaggaagctgctaggctaactcaatcgcttgctgggctaacagagagggagagagaagagggggagggactccccggagagggggaagacggcggcgcttcacgaattgggctcgggcgaggggaggagggtagtggtcgaggctggtgcgaggaagaaggggctcggagcgagctttttataggcgcgcgggggcgaggggagcggtggagctccctgactccggcgagcttcccggtgccgccattaatggcgcacagcgccgccgaggggacgctacggcggggcggtactggcgaggacgctggtcaaggggaggaggacggagcggtgccaacctttcctgtgcggcga

SEQ ID NO: 165905 - DNA, 573 bp, Zea Mays
ttccacgaagtggtgacctttgaggtacacatgatcaccttcctcaaactccagtggtcttcttctattatcagcatagctcttatgtctagtctgagctaccctcaagttctctcggattatacggacttgttcttcgcctcttgaataagttcaggcccaaagaactgtctttctccagtctgatcccaatatagaggactcctgcatttcctgccatatagagcttcaaatggtgacatcttcagactagcctgataactattatcatatgagaactcagcataaggtagactcttgtcccagctgcctccgtgctgaagggcacaagctctcaacatatcccccaatacttgattagtcctttcagtctggtcatcagtcttaggatggtaggccgaactgaaattctacttcgtatccaaattctcatgaaaacttttccaaaatttggaggtaaactgtgaacctcgatcagacatgatcttctttggtactccgtgtaaacacacatccgagccatatataactctgccagctgagagcctttataagtagtcttgaccgggatga

SEQ ID NO: 165906 - DNA, 487 bp, Zea Mays
acgaggaagggaagacactacgaattttggcttctactgatcacaccggaagatagtgaagacctcactgtggttgatggcacaatttaaagggatggcgacctagctagctacccgcggtcacaaggcacgacgttagtgcatggcgaccacgtaacaaagaagtacagtgtggtagaacttaggcacgagtgacaccgcgacggaagtgcccgagcccgttctgatcttctgtcccggatccgctcgcctcggtgaataaataaagtcgtcaccgcgacacccccaaacccaaagctaatcagacagtgaaccaccattgccgcagttcccgccgccgctgaagcacgcgaccgccgacgtcgggctaccccaagccattcagggagcttcgcctcaacaccctgtcgatgtccgtggtctcaccacacaagtttcgtggccgggttggtgtgaatttgtcgttggaggaagagctccgctgtcc

SEQ ID NO: 165907 - DNA, 458 bp, Zea Mays
tccaggcacgctatatatagacaatggagaacaacctatttagatgaagaggagtctcatgatgtttgcatctctggtttgggggctttagggcttggcgcatcatggcgcaccacaaacatcataacatgtagtactggtctagaccactacttactattgtaaaaattgatttaagaaccaagtagtagtgatagctaccactattgcagccaggtcgagcacacgtatcaatatcatcgcctagcaatgcgtgcatgagggttagtgccaacacaaggttgatatgtgcatttgtgtttggattgtgatgagtgattgccaacaagtagcgtcttgggttgagtcatgtagactaacaggggctgggccacaaaatctggcgacactgtttcagaaggaatcaaaggagacacgtggcatcattatgaaggatctatcaaggcgaagcaacttcg

SEQ ID NO: 165908 - DNA, 434 bp, Zea Mays
aaaaaaataatgttgcggtcagttctggctttgagattcggagtaccacgtggcgtaaaggcaggccgtgtcttacagatgaataaaggacctgggtctcacgtgattggtttccagtttcgtgcatcaagatgtggaattttcaaactgccgtcgtgtttgtttcgtcacataaaagctttttggaaggctaaggagaggaagccggcgagaaggagggggcgttttacgtgtcactgtcctgtcgtgttggctgttgacacgaatcatttcttccgcgcgtgggaagaagaagatgcacattagcggcctgaagtagagatgtcaatggggaattccccagcggggattaactccccagacccgtacccatgaacatagaccggcccccatccccgaacccgaacccgacctcgggtacgaaaatcctccca

SEQ ID NO: 165909 - DNA, 1101 bp, Zea Mays
catggaaacaaaagttatgcaaaagagagtactttttattgatcacccatcttaaagtacaggcggtggtctctcattttgaggtcatgacaccactaaggatagaacttgcgtagctgctcgatgttccatgaattgccgactagagttctatcggtttgagatagccgataagatcctggacgagtaacctctgtgatgatgtacgatccatcatagtagggggataacttgtgtcgtccatctccatatattaccttccgaagcactaggtccttgactgaaaatgctcgaaaccgaatcgctctgtcatggtagtgtcgcagggtctgttggtatcgtgccaactaaatcatcgtattcagtcgttcctcttcgatcatatcaatttcctcaagccaagtagcttttatctcagccacgtccttgaaagccaatcttggtgctccaaatgctaagtcagtgagtaacaccgccttcgatccatacatcatgaagaatgtggtattatcctgtagagcccggttggattgggttctaaggcaccagacgacgtaaggtagctctctaatccacttcccagcaagcttctcattcttgtcgaaaaccttaagtggggttgtttgccttgcttcacttatccacattgcttgtaatgacctaagggtctgatttgagggttgctcttcttacacccattgccttaagcttcctgaagcctagcaacagagcttcgtactcaactatgttgttcgtacactagaattgcagcttagtatcatttgatgcttttactttggatggtgagatgataatagctgtagcactagccccaaaggatccccatgaaccatcacagaagattatacagacagcttcatctgatgcactggcttcatcttgtggaccaggtgatgaggacatcctacccgttggcgaagacacaattggcccagttagcccaactgtagtcgcacgacgaccgtgtgagcctcagaattatcccacctcgcttaacttgggaggaggaagccaccttaaaagggagagccaccctttccccattggactagtcttttggggcgattgagcctttcccta

SEQ ID NO: 165910 - DNA, 541 bp, Zea Mays
attaaatagagtttttgatgctattggatttgtgtaccctgactatcgctacccgccacgggggcagaaaagaaagggtgcaacctctggaaaggttgctgcttcggctgctccaagcgagcctgcgccgaagagtaaaaaattgaaagtcctcacccaccgccccgttatattgagccagccgtggtgcccgagtttggtgggaagacttcttcagctgttgatccaaaggagccaattcctcctacgcagaaagctgaagaaacggctaccatgccgaaggcaccctcagccgagcaagctaaggcaaagactggtaaagataaggtcgaagagccaaagactgaaggaacaaaaatgttagaagttttaagcccttcggcggaagtaacagtgccgaagatacaaaaaggtcttgcggccactcccaaaagaagaaggatggcaagtgtactagatgtgctagaaacagtaaaggcttcaagccctactctagggaaaattgccaaggcttcgaaaatgaaaatcgaagctaaaacaa

SEQ ID NO: 165911 - DNA, 545 bp, Zea Mays
gtcatcaataggatgtggtgagtctacacttttatgtgacactaggctatgatcaccgtccattttgagacaagatcttttccttagattacttgtcatcgctatcgtgcttcacacatcacttaagctgatagcgaagagcgcgtcacatgtgctcgagcttgaactcagatttttaggcttgttgaagaaactatatttggccgctttaagtagcatagcatcatctgctccactcgaccaggtcatgtacaagtggttgtagatgcagttaaggaggatgatctttcggttgctcgtcgaccaccattttttcaattgcttggggtacgatggtgagaagcttctgtgaaggagttgtatctattgactatttgcccctggaatgatgatccctccttatcattgccatcaatgggatccaccaattatagtagccacacatgcatctaaaaaatatgaacctaaaaactattatggacctaaaacatatgtggactttcaaaaatatgtgtacttaccagcctttcattcttcactctttg

SEQ ID NO: 165912 - DNA, 375 bp, Zea Mays
agtggaatgatgatcttgataatactaattattagatttgagtaagtaaaagagatgaggattatcaagctatctaaactgttggttttaatgatgtgttatgtgtgagcgtagtttgattggcggatttagggtgtgtttggttgtaataacgggacagaacgggatgtgatgataccttagagaatgttgtttggttcatgatcaagggttagaacaagagcatcctaataccgtcatagctatttgtcgaaatcggacggacgagagtggacctcggaggacgtggctatcgtcggctcttccacaaccaaacatacttttggacaaagctattgatgtgtgggtgatttggttgggtgaattttgtaaaat

SEQ ID NO: 165913 - DNA, 615 bp, Zea Mays
gcaggggtctcggtgcagttcttcctaagactcagatctcagccgccaggacggcgggttggtttctaatagtttcagggactcatgtgaaaatgtgacaaccgaagggggtatcgagttactgcaaccgtccgattgaaaacggaccgcccagattagatacaattttaaacgaatcggtatgaagtcgtggccaacagatcgccaatctacggcccggattagactcatctaaaaccgaaacggtacgcagctaccgaacgtcggatcaagatctcacggtacggattttaaatccccgagatccattttataccgttgatgcatgatccaatggcaaccgcgcccctagcaaaccggtatggctcaggttaatctgaatcgtccattcccatatcgatcgtctggccttatcttcctttcgctcacccgagaacggcggcgcacaacgcctaggcggcggtggccatggccggccactggattcgatggcaaactccctagaactcgaccttaacggttgctacgcacacacagaacgggggtaaaggctgtccacggcttactcaccggagttaggcgactggtggagcgaattgcggcgtctagcgggtc

SEQ ID NO: 165914 - DNA, 826 bp, Zea Mays
atttttgcttgatagtttatatttcacaaagtctagcaaaattggtttgactaaatttggatgattattcttcaagttatgcatttattaagttctctgcaatatttaaaggaaaagtaaattcgaaatggaaaagaaattcagatttgcgctgaagtccctgggttttctccccccttttctctcacaaaacagccctcggtctactatttgcatgagtcactgaccttgcacaaaaccccctggacttaacctaaatctaacccgtgatccctggctggctggaacagtaaccgggacaaagattacggcggtgaggcttaccggcggcagtagggatcctgtggggtggtcaatgacgtttgggaggtcacgacggtcacgtcggtgtgcgggtcggcgtcggaggtggccggggctactctggccacgagcgcaggcggcagaggtcatgtgcgcaaggaattgagaaatggccaaaccacggtggtagggttcaatcaaggtgcacgaggagctccactaggtgatgtagaggccatgtgcgcaaggaattgagaaatggtgcagagggttacccggtccacgcgcttcggtggggttatgaactccggcgagcgtgagcgcactgttccggtggggctggtcctcggctcaagcttgggaaagcttcacggcctctcgaggaagctatctgagggcttagatcgagcggaggtgggcggaaaagggtttggccatggcgggcgccctcgggtggctctagcgggtcggggggaggtcgccggagctacgggcgagctcgggagagttaggcggggtgcgg

SEQ ID NO: 165915 - DNA, 650 bp, Zea Mays
cgcgtccaactccttctcgtcggcctcggcggggtcgtcgtctcccgagagcaactgcagcggtgggcctccgccgccggtggcgccgcatgcgcttccttcttttcacatgagccccttctgcatgtaggcagctagctgcacggctgcaccactgatcgacaggagcaaggggcatagttgtcattagtgctagcttaagtacccaataatttctgcggcgatgtcttgtaaagactttgcacccttgcttggagcctttggacgcttgggggcccgtatgtaaattgttttggtacgccatgcagcatgctgatcgatgcggcccagcaagtcgagagtgcgtcggtgattagtactacgtcatcagtgctgcgctggctttatttgtctgactaaaataagtgggcaaataaagactattgggggcatgcatgcatatatgcgtactacactggagtctggacaggcacatgcatgcatgccactgatcagaacttagtagtatatcgtcatcggtgcagcagctagctaacttgtggtcagatctttgtttcatgtactataatttaagaacattttcgtcctgattaattagttccatcgtgtgcaaatagccgtattggattttctctccgttcaaccctccg

SEQ ID NO: 165916 - DNA, 526 bp, Zea Mays
attgaaaatgatgttgaagcatgccaaaaggctttcagcaatgtttgtgctttcattggcacaagagacataatccaagagcacataggctatagagtgtggccacttgtagatagctaggagctgctgaaggatactgctgccgggtccaccgaaggtggattagttcgattgaaatatacctttagatttagggactggtttgacaagccaaatgacgattggctgaaaagtattgaggctattagcaacgagttacttggggcatacaccagagccgaagatgatgctttatcctcggccttcgggggtcggggcaagaaaagattgaacagtgtttttgatgcaattggcttcatataccctgattactgctacccattgcgaaggcaaggaaaaaagagaaaaactgccgcttcagccaccactgatgtgtcgaagggcaagaaaatgaaggttttgacccaccagccatgatatattgaaacggccatagtgcctgaatttggtgaagggacctcctccg

SEQ ID NO: 165917 - DNA, 532 bp, Zea Mays
cgccagaccatagtgccggaccattctaagagaggtgtcatactatgccctagaagctaacccttatcggtcgaagaatatggcgagagagggaggagaagctcccaagtctcttgtgcggaggaggaggtggatctaagggctatagagcgagccttaactaagtcttggcttggcggtggggcttcggtctttgggtcttcgtcgatgcatctgtccctgctttcgtcggtcggtctgtccggtgctctctccgtccatccgtttggtgctctcttcacccgtctggtgcccgaccgcctccttttatcggccaaggaggggatcgaccatcagtggctttcttgagaaggatcactgggtgattgtaaaaccaagcgttttacccggtgaagtcgtgttcgtccatgagcgcccgggtcgcctggtcatctcgtgttctttatggcggatggtgcggacagtgtggggcctgggcgtcattgttcgagctatgccgatccctggcctctgtagcctaggtctcggcgcg

SEQ ID NO: 165918 - DNA, 401 bp, Zea Mays
tgatgagttgatagtgcctgggtctgctgtaccagtggatgctctcccaagtgtttcggttgatgagttggcagtgccggggtctgttgtaccagtggatgctgtttttctcccaagtgcttcggttgatgagttgacagcgcctgggtctgctgaaccagttgatgctgcaactctcccaaatgtcttggatgcttcggtggtagagttgctggcgcctgggtctgctgtaccagttgatgtcgtaactctcccgagtgccccggctgctgctgttgattccaatttttgccctacagtcttggggggtgctgttgtcaacattgcggatccctatggtccttccctaaatctgcatgggagggctgggcctttgctgaattgctggttgagtgccaagc

SEQ ID NO: 165919 - DNA, 486 bp, Zea Mays
gccatctgtagccgtcagatcacaaatcaaggatgcagattagaagtcctagctccgaaccagtatccaacatcagtggtcggatcccgatccaacggtcttcccttaaagcaccagtgcgagagccacagccgatggatccaagatcaacggatccggaccattccattgaaggggtatcccagcgatttaatcttagccacccaactggatccaacggcgtccgcaccgtcttccacccctgcgatccccaacgcacaggaacggcgccgtcaaccccgcggtggcaaggagcccaccggtggtcaccgacctccacaccccaagccccaaccactgactcgatcactgatacacgcggaggaggacaatgcgaacacctgaggggggtacctttctggaagaaacggcggaacacagtcggtcacggctggaatagggagcggacgacggtgagggaaatcctgagcctcgggcgccggttcc

SEQ ID NO: 165920 - DNA, 580 bp, Zea Mays
cggcactgttacttctgccgaagggcttaaaacttctaacatttttgttccttcgatttttggctcttcagccttatcagtcttcgactcagctagcttggctgagggtaccttcggcattacagccggatcttcaaccttctacgcaggagaaatgggctcctttggtttagcagctgaagaagtctccccgccaaactcaggcaccacggccggttcaatatagcgtggccggtggataaggactttcagctttttgctcttcggtgcaggctcatcgggggcggccgaagcagcagccttcctcttctttccccgtcctcgcagcgggtagcagtagtcggggtaaacaaaaccaatggcatcaaaaactctatttaatctcttttttccccggcccccgaaggatgtggataaggcattatcttccgctttggaatacggcccaagcagttcatcacttgtagctttgatacattttagccagtcatcattcggttcatcaaatttatctccgtatctgaaggtgtatttcagtcgaaccagctcaccttcaccagacttggtgacagtctccttc

SEQ ID NO: 165921 - DNA, 424 bp, Zea Mays
tagaggtgacaatttatgtcgtccctcccccgttagaattcggcggaggacgagatctcccactgcgaaggatcgatgtcgtatggccttatcatgatagcgcctcagagtttgttggtatcgcgctgattgaatcaccgtattcagtcgctcttcttcgagtacgtcaatgtcttccagcctagtagcttcagcttctgctatgttatcaaagattaaccttggtgccccgaacttgagatcggcaggtagcactgcctccgaaccataacccataaagaagggggtatttccatgcagagctcggctgggttgagttctcaggctccaaactacatatggcaactctctgatccattttcctgcgaacttttcattcttatcgaagactttctttctgagtgcttctaatatcatcccgttg

SEQ ID NO: 165922 - DNA, 744 bp, Zea Mays
aatacgattaaggggtccgacgggtttaagacaacgctaacaatcaaccacataaccctaatcgactttccacaagtccccatcacttaggcgttcagagtgattggaagaactacgatctatggcatcagtttccatgatctctccaacggaaacgggatctgactccccatgctggtgccactcgggtagacgatccagcgccgatcagtgacgggaactagactcctcaccctcatcccgcgccgatcgatgacgggaaccagactcctcacaggaacacacatggaggaggcgggtctacgatacaagtcgcctcactaaacaacaatgaaggtgtgtaaccctacacctcttagtagattagacgtagtcttcatcaagactttacagttaccaattgatattatagagacttatgaatttaccctagtcaccacaggagagggttgcggtcaaaaaaaaaagtaggctaatatggttgagccgcgaccgccccttccaaatcaaaacccaaccaaccgcgatgatcgaaactgcgaggccccctcccggcctccccccacgcccccattgattccacggatgcagaagcaatcacagcatgcacgcagctgctctcagcggcgcaccatcaacgacgggacggacagctctgctcgatccatatcacccataatagtcatcagaaagcacaaagtacgagtacaggccacttaggcagtggttgttgtacactcgtac

SEQ ID NO: 165923 - DNA, 1070 bp, Zea Mays
tggttttccagacttctagtgaggacttcgatgagtcgggtctgattggctagaacttgggccaagtctaggggtagttccggaggtgcggggaggtgggtctcactcccttctccgccagcttctcctttagctcttaggggaaaacctgctccaatcccggaggcggtaggcgtggttttatccgaagccatctgccaggggagaagagttactactatgtacatgccaatttttttaatcagatactttattcattacatcagttcattacagcatacaactaccaaaagctcattacacgcgagtgctatcgagggtactcccgaactccttctctaaagtgtccccaaattccttgagaaggtcatcaaggctggctaaggacatttcctcggtgtcggacgagtttcttatcctggtaggaggtagggctggaggggcttcttccttctgctcagtctgacatccttgccttttggtcttcttgcagatttttcttgcgggggcgagcttcttcagtttcttgtcgtaatccatcttcagagtgcggtaggcctcacgggtattggtttcctcgacttctgctatctcgaggctttcttgaagggacgccttttcccttgtaagttccctgactttttgctccaggctttcaacccgggagtttaggtgagtgcagtgggaggcaaggtcatcatattggttatcaagggtgtgaaggtatccagccatgtagacgatggtggggtcatcctcaatagggtctcctcctgacagggcctgaagtcttttcctccaggtaggtgtatttttgttgctgggtgggaagtagcgaagggggtttcaaagatcaccttgttgtagctctggcatagttgttggagggctttctgggcaacattttggcaagtatctgggaagcattcctcaatagtgacttggaaagaaggatggttcggatagtttcggctttctcccaggtagactgccatagagcatttttccatgccgttctccagatactccttccagacatattctggcttcttgcggattcccatgcgaag

SEQ ID NO: 165924 - DNA, 496 bp, Zea Mays
gtgacggatccgggctccccatagcgaagcctcttgcggggaggagacaacgccatggcggggacctgggcttcaggcggatcccgtccttgaagttgggcttccagggctgcaatcatggcatgggcatcctccagctccaaatgcaccctagagagatccagggtggcactgtccaggtcggtgttgaggtcggccaccacaccagctagggtgttgaggcgatcctcactagcttcacctagaacgatgctggtctgactccctccactcagacgcagaggaagatgcctaaaattcgtgtcgtgcagctgctgccggtaggtgtggctgtgagaccacagagtccgtctggcagcatcggtgaccgaagcagcgtaggtggatagcggtgtcagggactcatgagcagacagagtcttgaatcccctatcccctgcatccatcactctgacgtggatgtgagtgttgtagtagcaagcccggggaggctcac

SEQ ID NO: 165925 - DNA, 802 bp, Zea Mays
cctctgttgatacttcttcgcaaacaggagcagaaggtccagcatcctgatccaagcatgacagttgtcgaagccgtttctttttcttcttcttctcctcagcaggcgcagtcgggcggctgacctggcgaagacgctttgggcgagtacccttaggctttcgagtgtccattgttttgtcagtatctggtataaccgcaacaaccattgtttcagcaggggccgagtcagaagattctccagccaacatatcgagtacaacatttatttctgtatcatctggactcgctggcatctcaaaatgaacttgcctctcatcattgggaagatcacaaagagaagcaactaagacctcaatatcttcaggagagggtcgcactctaagacccagaccactatcaccagcaggaggattggacatgaaattgaaaaaggacttaggaggtggcagattccaagcagagtagacaacagaagcaccaacatttgatactttgcctctcaagatcatgtctaatcggctcaccagatcctcagcaggaattctcttattggtaacccgagtcgagtcggtaacaccactgtacaagtaagctgggtacgctctatccttcaggggctgaatattcttaaaaataaagtcagcaaccacagcctcggcggtcagacctctctccttcagcagacagatttcagcaagcagaaccctagcttctgctacttccaaggcagtaggagactcaatccaactcggagtgtgcacatctagccgtctccccgaccgaggggggagggacttgcc

SEQ ID NO: 165926 - DNA, 560 bp, Zea Mays
atcgaagcgcttttcacccaatagtttggattttaacttagacatcacatgagcactactatttttcatccgcgaccataaacatacacatttagactacaacaagcaaatcaccgtgactacgagcttacccaaacccatctattaattcggctaactagcgcaacaacataggctgctatacatcctacacgtcggcttgcctgttattatcgcaatccgagacaacacatatataacaaacacttaacgaaatcgactcctatttaacatgagttggctaatcacagtagaagacttagcgaaccattttagacatcgtaactcaaaaacatgggttggagccgattaatcagtgtttcttaaccatttctcaacttaagctggacaacacacaagtcacttaaaacaccatgttttaggaggcctaacatagaggtattaacacatggcgtaaaactccataagacttacatttgctactcaaggacctaaagcacttatgtgcatatgttatcggattgttcttcaattttaaccaggaccgacttatgaatgct

SEQ ID NO: 165927 - DNA, 602 bp, Zea Mays
gccagaggctcatcttttcactgcccagctctctgtctctggcgtctccctctctccgccggcgaccttccccccaccggtgactctccggcgacctggtgccctcgtgcccctctccttccctctctggtgagcagcccttcccccctctcgttccctctatcattttctcccctgctctcggtttgagaggcagtgaggcactcaagtctccacccattgtccatctttcaaattcttgtcaaatccaatgaatccaaaaggtggaatgtgttcaattgtccccattgtgcatccctgcaggttcttagctccttcgggagggttttcccacctcaaatagccgtttcaccgtaaacctaatttcccgcacgccacgtgctcggtgaaatacccaaaccagccaaaaatgctccaattgaacccaaatttttcaggaactttcacaacacttccagcaacatccttgccaaatttcacgccaatccgagtttccaggcttcaatttcactcaattccccgtttcgagcgatcgtttccgagctgagtgccctaatccctttttctttacctaaattcaaaccaagcacacacttcactca

SEQ ID NO: 165928 - DNA, 724 bp, Zea Mays
gccaattctcccaagtgtgctatgaattggcttatatgttcgtgtgtgcttttcccaccttcaccagaaaaacttagagaagtctggtattctagttccctgtggatatgtcacagtgtcgaatcggtggctataaggcttccgatacgattgccctgtacctgacacactaacaccgagtttgtccctgaacaccccagctacttcgtctccgatcctctccgccatgtctggcgaccatccattgagtttgtgggtggaaatctcaggttgcctgacatcactctatcggctttcctcccagggatgtttgaggtgtgtgttaggtgtcctattaatgtcaccagctcctgccctatacctctcaggctctcttgtggtcgaacagtattcagccctatgtccatgaggtggtatggtatgattataatgtgttgctggtggggcaccataatgttgctgcgatgaatgtggaaactgtgcatattgcgcagttctcggctctgcgtacgcatatccggatggtccggcgtaagaggccggatggtctgcgacctggccaaacggtccgaaggtatatccggaatgcccagccgtataaggtgttacgtgggtagtctcgtacccagaccatctgtcgtaatgaactggacggtccgcgatcggtccgaatggtccagggttgtacccggacggatctgtcatatatggcgcgacttgggca

SEQ ID NO: 165929 - DNA, 638 bp, Zea Mays
ttcccgagtccagccggagacctcaccagcggccaccgtgacccagtgactttgccgcggtgtcacccatgccgcgatctccctcactgtgtcttctaccgacgtggtaaacatgcgctagcaaagctatccggggccggagatcgtctgccgggtcgccgtggctataaatagcacggtggtccacggcggggtatgaacttcgcacacacagtgagtttattgatgcctaaattcgcactgcctctgccccctcctcccaaattggttgagcacggtaaaactagagtcccttgccgccgtatagccccaagctccgccctcaatttcaaccaagcacgccgtgacgccattttcccccaaattagtccgccgcgccaccgtgaacagctctgtcgtggctagcccactcgggtaagactctgtccaattcatgtgttgtttttattgctctatgtgctagggaagcttaccgtggcacccgttagctcaatttggccatggttaagcaggaacgcgtgcccatggtcacggttttcgccgtgcatgtggacaggccattctcagtacgttcgggtcaaattaatgcgtgttccgaggccatcttaggtcagtgaagcctccccgatagttagccc

SEQ ID NO: 165930 - DNA, 734 bp, Zea Mays
gctctaggcttcacacctatgcatcagaagctaagagacatgttgcacacacactcatgtcctagttagttcacacgactcaaccaagaagttactctgttgacaatcactcatcacaaactcaagcatctcaaccttggggttgcaatctatcacttaatgtgtgcattgtcaacaccactgcacaaacacaaagatcaacaaaaaaggaagaaggaagagctcactcaaatgaccaaaggccggacaaaagaaccaaagacattaaaaatgagcaaagcttgtttccttaagacattagcaacgactcaacacaaccaaacaaaaatggctagccctcaagaagaggtagaaaaaggcttaacaccactatacaatgataagagcaaaagatgaaaagcaccaaaaactctaaaagcaaaaacaatccctctagaacgaggcaaaggctcaacatgaatagcaaaagcatccatctcctcctaacaaaaacatctcctcctgaactccccctgaagaagtgcacaaaacttcacagatgaatgcactctcaacaagacgcttgtgtatgtgtataattctcccccttgttgataaatgcactcaacaagcaccacccatatgcacaaaagctacaacttcccctcaaaaggagtcccccttgtgatatgcatgagagtagaaaagaatatataaaattcaagagcttcagaagtatagtagtcaaaatgtaa

SEQ ID NO: 165931 - DNA, 445 bp, Zea Mays
agtcgttgcctctttccttgtgaagaagatctcgattttcttctttccacagtctgtttccttctatggctgagccgaccgttgaagccttcgacagcctagcacactagacaatgactcgcccgaggccacgactcacccgaggcagtcacgtcgcgaccgaggcagtcatgactcgctcgaggtaaaccgctgtgaaagacgtagtcactgttcatggtgggagatgcagttccagttcgcccgaggccaacctcgatgggagacgtagttccaattctcctgaggccaacctcggtgggagacatagtcctagctcacccgaggccatgctcgaatgagagacgtagtcccctctcgcacgagcgcaatcctcgcctgagcgcagacatgattcgcatgagcgcatctctgactcgccagagccacacacgattcacacaag

SEQ ID NO: 165932 - DNA, 292 bp, Zea Mays
ggttagtattattgtaaattattcgagtatgtttggacaactatccctttcaactagtttacctatgtgatatatagaatttgtagcagcgcacgagctgttcgaaggctaaataattgtgtcactgcaccaggaatgactgactttgcagagtcactgtgttctttggctctctccttggcaagatgtgttactgccattcacatatatgttgttcatagtaccttagcatttggcaatgccaggaggctaagggctgcttgccaaacttgtgccccgaatgaaccaagac

SEQ ID NO: 165933 - DNA, 1059 bp, Zea Mays
aaacaacaatcaataaatttcagctcatatataattcaagaatcgccgcgttcgagagacttgaattactctaacgctttactatttgttcgagttaagacaatcaatttagaaccaacaattcgacttgcaaattttattcaagtcattagtgcactaaaattactacaaccaattaacaacgcattctccacgataatcacccaacaatttgccttttaaattagacatcacatgagcactactactttttcatccgcgaccataaccatgcgcaatttggttacaacatcccaaacgggtgcaagaacactagtttctagttttaaccccatgattgttccattaatcattttaactgcttaatcggcatcgaccgacttaaccttcatctcgacggtccgagcaccacaattcacgaacgtctacctagacatctagaattacatagagagcctactacttcacattgcaattcatacagaaccacaaggttacaataataacacacatgtaatcgacccttctctacgaccttcagttaggtcaccaacagacgacatgatgactacgaaggcatgtcaccatttcatcacactcattcctcgcctatatgcgcactaattcgtttcttgcgaccatgcactgaaaatcgatccacactacacgaaatacacttatctcttatttatgtgcagacttaacacctttcgggataaagcgtcactataaacaccttacacataattgccttaggaacctattagttccctcgaagacatctattcaagtcataaacacaatcatacacttatttgtgaagcacaatttaaggaacgcctaacgcgtatagactcgacttataattatagaggaagtgatgactacttacagcatgtcatcacctctctacttaagccaaaacaatttctactatcgactaagagttctaagcattaaacacactgttactttccacgcgcaaataaacctcaacttaacactagggacaccgatggattattactaaactcatcatgcgcataacctcgtctcgca

SEQ ID NO: 165934 - DNA, 299 bp, Zea Mays
aatatttatgcttgtatataaccatggttcattaatattatggcatataactggaaaaggtagtttaagatacgtaactccatttcgtattatgtagtatgcattgtagacagttatatacaatagtcgaattgtttttggcatatatttatgcataaatcattttacttaaatccaatcatttttgtcaacagttatattgcttgctgaatcatgaggtccgttgatcgcccaccatctaatgcaaaaagattaacgattgagtcaagtcaggagatgttttctattgacatttcaag

SEQ ID NO: 165935 - DNA, 720 bp, Zea Mays
ccactgaaacaaattccttagcccgtgcctctagcacatctgtcgaaggtgtcagcgacatctttgcagcactctaagggaagagcaagtaatatctaaactggccaaggctggttcaaaaacatgcaaagatgttcgaaactaacttcgaaggtggagcaggcactaacaacagcgaatacaaatagcaagagtcgtgccctataacactgggtaccaccccttttatacgcgcaaaccatttgactttaaccgtcgcactcaatgaccactgggtccaactatgcagtgttgtcgttttcataacgagctttgggaaggtgttttttggaccttcggcacaaggcctcccaattataatttttgcgctctaagcttgttatgaagcaacaaactcatccctcaaggggctactgttgcggacctacattgccgaaggtcctctgattaattgtattgcatgactgccttaaggatacaacaaaagccatgccgaagatcacttgctgatgaagagacagtcagctgactaacacatggcttcaccataagtaaatgtgttttaggaacgtttcttcttacaaaagaagctaaccttcggctgaagcattaaataaagccacttcatctatgagtaagcagcacagacggcggccgaaggcaatggcttcgagcatgagtcaagaaggaattcactgaataacgaaggttgagacccgc

SEQ ID NO: 165936 - DNA, 698 bp, Zea Mays
cttgtcgccgactagcgtcccccatcctgtcaagtttgcccctattgaatttgttggggccgtgcgcaaatcccgggcggaatcggtcctcgccggcgacgcaattttggcggagacttcggtcgctggctacaaatacggatgtccaaattccctctgttatgagccacaccttggatttagctcaagtacacggatttcccggtgccaggagttctgcgaggaaggaggacggggagaaactaatcgccgacgctgatcgtcgtggtcaccacaacctgggactccatgctgggatccgggtgctcgcgagtgtcctccacatgcgaccatggcctcatatggccgaatcttcgggcagtgaggaaggaatttctcatcggcacagcatcgatcaccatagagccgttgtgcgccatgggcagagttctaagctgcgtgattcacagtgagtctaccccatttcgattcgccttattcccagcatcgcattgaaccgcttgggtttgcgtttggggtgctgatgcaccgggtcgcgtgactccggtaatggccccgccgcggttcagggacgcgctgccgcgggtttggtcttgggaggaagacagagtctagcctttggtttcgagatgagcggccaggattaacctacgcataccgtttcggatggtgcagtctgattcgtccgatctggatcg

SEQ ID NO: 165937 - DNA, 385 bp, Zea Mays
gtgaggctgtgagtgcctcgccgtggtccatgctgctattcaaagccacgacggtccggctaatgatcagcggccacggatagcattgttagcgcatgtttaccacgtagaggagaggtacagtgagggaagagcaaggtatggatgacaccgcggcggaagtgaccgagccacggtgaccgccggtgagataactccggccacatatggctgggttcgcggaattgtgccacgtccaaagttatccttctccccgattgattcccccgctgattcatcgaacccatctgattcaatagtgcctagatttttgtttcagatatttcagtgtattggatcttcagtgtttatttgaaccggctctcttcaacccacttattctctt

SEQ ID NO: 165938 - DNA, 389 bp, Zea Mays
aatttccctcttgtagatcaatgtcatgaccacacgatggggttctcataaaatctctgctgtcatcaagatctccgccactgcgatccaactggatttcttcactatcacctcctccagattggtcttccggtgcatttgaagtagttcctgatcctgcatacaaatttaaaaaagtgattgaaagcacagagtgatgtgtatgggcaaaattgcaacttgtatggtggatggttgcaacaataatattatgttgtatgcaacaaaaaatacctgctcctgctctagtgtcaattgcaacggggctccgtataatttcttcactatcacctcctccagattggtcctccggtgcaattgaagtagttcctgatcctgcatacaaattt

SEQ ID NO: 165939 - DNA, 593 bp, Zea Mays
acttgaaaaagaagtacaagggtgttgaggcgatcttctccagcctctcctagaaccacgctcgtctggatctcaccacaaggacatagaggaaggtgcctatacgccgtgtcatgtagttgtagacgataagtatggctaagtgaccatagagctctccgagcagcattgttgaccgaagtagcataggtggacaacagcgtcaacgactcatgtgctgagagagtcctgaacccactatctccttcatccatcacactgatatgcagacgagtgatataatagcaagcccgagggggctcagaaacccgtcgtgtgtcacaaagaggacggacgtagattcccaactcatgtagcacattctgcaataaatttgggaagtagcccgtctcaaacatcaaagtgtagtgctcagcgataggccacatcccaacaaaacaatcctcctagataggtacattattgttgttgttgtcctggttaacctcttcttcttcatcatcattgcctccatcatctccagaatcatcaggatcatcacctctaggtagggatggatccggatacttattcagatgtcaaatttttggtct

SEQ ID NO: 165940 - DNA, 289 bp, Zea Mays
tgatcatcaatgtccacagtcggtgcagttgcatgtgcttcaggaagtgttggatctttatgtggatgatgcagagggttcatctgtcagtactgttgctgatcaggtggcgggtgaccaggtgttcatgatgttatctgcagctgcagtgtctggcgaggaggcttttcttactgtgaaatttcaaggagtgattcaggggtttgaagttttggtgttagttgattcgggcagttcgcactcattcttgtcttccgcactggcaacaaagctgtctggtatttccttg

SEQ ID NO: 165941 - DNA, 441 bp, Zea Mays
ccgcaacggccgctggagctcgggccgagttcctcgcgttgggcgcgcctctatgcggcataaaaccccatcggattgcggtagcttctccctattttctccatcgcctcgacctcgcgcaggccctgacgtagtcctgagactctacctcgacgccaaatcgagctagccaaccgtactcgtgtgagcggagcgggagaggaaggtccgccgtcgacgcctagcgccttcggcgtcactcgtgttccgggaaggagtaaaaggggcatcgccagacactatagaagctcgccatgtaccaaatttggagggaaatcgatctgtccgacgataattcgtcgccggagctctcttcaccgcgcggagtcgcctggtgtcatgaacagcgccactaccacctcaatcgctggtgagacgcccttctttgagctcgcaatcgcc

SEQ ID NO: 165942 - DNA, 781 bp, Zea Mays
gcggcttcgaccgcgattgcggaaaatgattcggatgattctgtgtctaagttttttgagtctgatggttctgggagttcgctggtgtggacggaggagtcttcggatgaggatttggattatttcgtggcattggatgtggctgcggcggagacttctccgcgtgtgatggatgttgttcccggtccgagtgctgggcgtctgtggcgaagggcgatggtgaagcgtagggtgagtgaggttgagggtggtcgtcttcgtgtggacagggctggcaaatgagaattgttggcctcgccggctggggtaagcgtaggtgagggggagttgcgaaatttgtttgagggtgaagagctgaggataatgttgtttaactatagggagatgggtatcatcccgaatgttgaaccaatgtaatgtgtggtgccctcgctgcacgtatgtaactgtaatttgtatgatgagtctgtgtgccttcgctgatccagacgtgcccgtgggggacttgtgcatttgatctagcgcgtttattatgccggtccggctgcgcctgtattcggtctttgcgcgaatagtttttcgacgaagattttcgcacggatgtgcctgcgattttgtgcgcttgttgtgctagtccggctgcacccttgggcgacttttgcacggatagtcttttgaggaagacttcgattttaagcacttgtcgtgctagtccggctgcacccttaggcgacttttgcacggatagtcttttgaggaagacttcgattttgcgcacttg

SEQ ID NO: 165943 - DNA, 618 bp, Zea Mays
gtgagcgccatgtgggcaagtcgacgatgagggttggtgcttgcttcggccatcgagaaggatgacatgctcgtggaggccgaacagagctcgcacgtagccgctgttaccataccgctggagctcaacgtacgccacggccagctcgatgtgcgcgagcagcaacaactcatcaaaggttttggcctgcgtgtggagttgcagtggctgcgtgggaatagggttgacgtcgtcggcgcgcagtgaagcttggagagaggaggtgcaggcgtaggcgcgagcgagcgaggctcgtccggctatggtccgctggctggccggtgcttgcaactagactattggcaaggcagggagcaccatagccatggaggagctcagagagggcgccatgggagtcgatctctactgctgaaggtggaagaaaaaggggggcgtcgtagggaaaggtctctgcctgctgccgagcgccggaaggagcagtggaggtgaggggatgcttttaaaggcggtgctcgctgcaggcattggcggacacgggcggcatgctgcagagctcagtttcctcagagacacaaaaaataacacacattggatggcagtttttgtcgttttctgttt

SEQ ID NO: 165944 - DNA, 1159 bp, Zea Mays
gcaaggaagaagcatgtgcacgttgaagctcgtgcctcactgcctgatgatggtgaaacgccctcatggcgcatgggaggggggcccctgtagtgctgtctgcccaagtgccgagcacgaccagagcaggtgcggacagcagcacgcatggtgttttgatcacacacgacacacggcctcggcgtcccgtcccgcctgcctgcacctaatccatattctatccgctgtcgtattcgcgtggcatgcaggctagccggccggtcggccggtgagcaactgtaaaacccgcgacgcgccaacactcggttcctggagctgatggccgttctcgtcttcctggcgatcgccctggttaggttaggcgcacatctcttgtcgcggggaatgtgtcgagaggtttgataacccgaccgagctctgtttgaccgatcttgctatgtgtttgtgtgtgtctgtgcgcgcagagaaagctgtgcgggatcgatggaccgttgaacggaggcgcgtctgctctgccgcatgtattatattgattcaggtggacggtcgggtttcagagagactgctgctcaagtctttttacgtgggactgtgggagtgcagctgctgcatccatcgatcgcagcgctaggttctccaggtacctcaacttcactcttcactcgcactaactcatatccgtgcatatttaaacttcacttaacgaaccaacggtgcaaaacagtgttttaaataattatatacgtgaactgctggatatggatatgatctaagagcctaaactgcagaacagtaaaatgcacgagcacatgcacatacgttctggcgttctgccaactgtaactaataatcctgcacccgtactttgttagccctttctggggtgttgctttcagcagagacagggcaaaaaacacacactacggttttacagcacactcatggcattaggatacgtatttgctgcgacttgagcatcagcgtttgcgcgcccaccaagcaaatgggatggcaaattattgcacgggtggcgacggatccgtcggttggccagaaccgcgactccaagtgtgtattgtatgtacgcacggtcctacacaccggtacgcagacctctcctcgaccggccccccctgctggcgtgcatagtcaaacgtga

SEQ ID NO: 165945 - DNA, 647 bp, Zea Mays
gggatgggtgcattgcgttcgtgagggagtggcgaagctcaagaaccatatgaattggactgggacttagcagagggaggaggtcagagctcaccggagaggggagagacgacggcgccgagtccgaatgagctcgagggagggaggtggagtggctgaggcctggtgtggtggaaggcggtgctcggtcggtcccttttataggcgcccgggaggggggagggaggagggacggcaacgccgacgagctagccatgctggcggtgatggcgcaaacggcgacgggatggctcgggtaggcgaggggtgaggggacggctcgggtacagtggcggggaggtagctgaggccggtgcgcgcgttaatggcgaggagacggggcgggcggtggtcggcggcgaacgcgccggtgaaggcatgggcgggacgagggagctgacgagcgggcccgggctgtcagcggaagagcggcgcgagagggagagggagggtgcagctgacgggtggggtcgggccgtcaagcgcggcgcgggcgcgcgcagctgggccgcttgggccacgagaggagaggggggaagcgggcgcgggcgcgacttgggctggaaacggcccagccgagggggggagagaaaatgtttttctttttc

SEQ ID NO: 165946 - DNA, 339 bp, Zea Mays
cgaggagcatcaggggcatgtaagggtactaaaacaagagagcagaggacaggatcggaccagaaatgagctagccacggcgaggacctttttacggtggcggaaacccgatttgggggaagtgagcaattcgggggctcaggtgaacaattggaggcacgagtgggtgtgttgggtgcttgaatacctagcggagccgagggtgtgctcaatttatagggcccttgagcggtggccagtgaatttgagctcgcgcggtggcggtcggagagaaggaggtgcactggcgcaagcgattggtggcaattaccgtggcaagctcaccagcgatcaccggat

SEQ ID NO: 165947 - DNA, 1516 bp, Zea Mays
ctgcttggttgccagagcacgactgcccgtgttgcggtagaggtgttcgatccattgcctggcaggtttcgactggggtttggttcgcggtttagccggagctctgggctccgatggtgtgtgtttcagtcgccgcatgttaattagtggctccatctgatcacatgttagcagtggtgtggtagagcacggattgtgccttgagaaggaagaagaagataggaagtaggaggaaggcgacgcgtgttcactattgcagtattctgttttttcttaaacgtttacaaagacctgtgcctccttatattggagcactcacaagactcacgctacaacctagttcgggtcactcacacgagtgttgggctggcgcacacgcaagccacgtcgcggcccagtagtcacagattcaggtgtgtcgcgtgcagccatctcctgaacaccatcctctgtagcctgatcaccatcctcagcgctgacatcccccctgggagaaaacctgcttgtccccaagcaggggcaccgggaaacgattgctgtagagccacaaaatcttcccaagttaccaaggaggacgacatactggaccacttgatcagcacctgcaagcggccatcaactcccagacgacgctgaagaatagcttctggaatctgtatgccagttaaggaattgggtagctgtgctagcgtgacatctgaaggaacaatgcgcttcaactgggacacgtgaaacaccggatggatggttgaagtagaaggcagctccaatttgtaagcaacactacccacatgagccaggatcttatagggaccgaagaatcgaaatgccaatttttgatttgcctgaggagccaacgaagcctgcacatatggttgtaatttgagataaatccaatctcccacaacaaaggatctctcggagcgacgcttgttggcttgcgtttgcatgcgatgtcttgctcgggcaagatgctgctgaaccaagtcaatcatgacagttttctcctgtactcactcatgcaaggatggaacatggaaaagtgaagttagatcgatccaaagtactttggagagtacccatacaatacctcaaatggtgaatagcccagagcggagtgccaactagagttgtaccaaaactcaaccagatatgtccagtccacccatttattaggacatgcatgaacaaaacatctaaaaaatgtttccatacattgattcacacgctccgtctgaccatcggattgggggtgataagcggtactcatactgagagaaactccagccatagagaataatgccttccaaaagtgactggtaaaaatgcggtcccgatcagatatgatggttgtgggcatgccatgcaatctgtaaatctgctgcagaaatactttggccactgaaacagctgtgaaggggtgtttgaggggcacaaaatgactgaatttggagaatttgtcaactaccactaagacatagttcattcctctagaaacaggaagtccctccacaaa

SEQ ID NO: 165948 - DNA, 996 bp, Zea Mays
gttggtggccgggggtaggaccgaactttggaccacttaccccagggcaggcctataaatacccccgtcctgtacaaggatggtacacacataatgagaagctacagttcccaccagtcgtcttgtcgctctctcgagctctgtctttgtctctgagtgtttgggtccacctgaccacgtgtcagtacccaacatttggtgcccatcgtttgtgcgacgaaaaccattcccacgatgcctcccaagaagaacactcgtcctagctctctatcgagtgacgacgacgccagggcagccctcgtagccaagaagggcaagcttgtcctcgttgctgatcactcctcaacactcaacccaaaggccacaaccgatccataaggcgagagttgcgtcgcaaaataaaaacagctagccatctccaccgaacaagcgagcgaggtccacaccaccagctcagaaaacacaggggaccccctcccaaacccaaaatatcaaccctgccaagctaaagtttgactagacctaacaaagaacctgcctccgccccaaggcttcgttgttgcggcaggctaccagcatcccccatttggaatgcctcctacagatgacgatgaagacctccaggatggcttggacctgagtatcaacgtcgaggaacatctcttactcaagagcctctacatgagcaactccaatctccagaagtagagagacagtcgcgtagtgaggcacaggctagggtaagcctcctcatccaataagaaaaagagcacctccaagccctcgagaaagaaatttcatagctttaggcccagcaagacccgacacacccttcccatgaccatgtaagaaagagcagttttgacgaagtcagacagtctccccagattgacactttccaggccttcaacttcactaatagcagatgcccactctctgccagagtgcaagcaatgccaaaaccaagcaactacatggtcaggaattggccaaagt

SEQ ID NO: 165949 - DNA, 795 bp, Zea Mays
tggaaatgtaacttttatcgagaagcaaaatcttaatcgaatggtttaataaactcaaagtcatggctcaaggtagttcagctcaagtcattgaaggtattgaaagtccccaattgatcaaaatcgatgaagtgatattggccatgtttgttttggcttctaggcggattctggccatcagaatcgacttctagtagctaaacatttcgcttctcagactttttctatgagaatcacttctgtgaaaatcgctcaaatcaatgtgaatgcaaatcatcgagtcgttgcgaaggggggaattcggtgcttcctaaaccctaaacagtgcataccccttcatcttccttcgcatgcaagccccacaatatccatattctcgggacagctagattatcgaggaatccagattcacataaaagctcttcagaaaagtcatcccaaacaagcccattattcgaataatggcaagctcaagtggtattaattttgcactaccttcagggcactccaaatttggttcttcgtcttcactgctcgtccacctccgagctcatcatttacatgaatgtcaactgggctagttgttaggattcacacaagtccaccttaggccctgatctatttctcgatgatagcttgatcttctggtcatcaaagcgtcagaatgtcgtctcacaatcgagtgttgaggctggatatcgagatgttgcaaatggcgtcgtgaaagctagctagttgcaccatgtgctataggaggttcgcttcctctctgacaaagtacacttgtccactgca

SEQ ID NO: 165950 - DNA, 311 bp, Zea Mays
caaagttttagtacactaaataaccaacaaaatatagtaagaaagttttgccatttgaatatttcaaaatccctaaatcagcccctaaactaatgcacttgggaaaaattcagaaattcagaaatctgaatttcagcccctttccaaagatcaaccgcgttctctgtttttcaaaacttaaatcaaacaagtccaaatagcaaagtcgcgccaaacttcctggaacacaccatgacaaagtttggagacctctctccaccgtttgacacgatcttgacatggatttacctcgagactcgacctagtgacac

SEQ ID NO: 165951 - DNA, 300 bp, Zea Mays
gagaatttttacacatacatagacatcttgttgaggatgcattcttttataaggccttgagaatttcttcagggtgagttgtttttgacaggagggttttgggagatgttttgctaatcgtgttgagcctttgcctctcttggagggactagctttgcttcaactttattgttgtcttttgctctggtttggctctaatgtttagctagtggtgtcgaacccgttttctaccgcttcttgagggctagccaaattttgcttggttgtgatcagtcgttttccatatctttggggatcaag

SEQ ID NO: 165952 - DNA, 575 bp, Zea Mays
gtgcgtcgccattatcgcccaagcacggtcaccatggctagacagccctagtcccattccacccaattaaaccacactggtaactcccctagagccccataaagcctcattgagccagaggccgagctaaacatcgccgaaaaagcaaaattggcttcaccggagacaagagctccgccggtgaacatgggccgacttccccagcccacctcagtccaattcctctaaaacccagcaccaccacaacttcataaagctttcccgccgaccagattaagctctaccgccactgttggctggaatttggagccgtcgtcgagcaccgtggcctacgaacttggactgggcagctccaaccatctccgatgatgccccgaccactaacgtgatctctagagcacccctgacctcaccgactacaccgtcggagtgttactgccgctattaagtcgatgtaccactttcttcatcgcggttattgttccaatcagctagggaccacaggctgggatgtttagaaagctagggggttttgtgttaaccccatgactcatgtgaatagtataccaaggact

SEQ ID NO: 165953 - DNA, 396 bp, Zea Mays
tgctcagacgaaacttcagttttggttctgcttcgtcacaagaggaagagcttcgggaaaatcagaaaagtcaacaacaaaaatttcaagaaaatcataatcaaatggctagagttcgctccactgctagggttgatcgcgagggagatgaggccgaagctgctgagactgttccgatttccgaagccatgaggcggtctgggctggtagcaccggaggacgtccctgccgctgaagcagagcaagctgatgttggagtgacggattctgaagatgattacagcagcgcggtgccaagcaaacccagccacctagattttggaaaatccacgatctccgaaggcgacctagctaagatgttaaaattgggctattttaatgaagagaagaaagagc

SEQ ID NO: 165954 - DNA, 928 bp, Zea Mays
cttgctgttgatgaaccggtgtctgttgaaagtgctttagtagatccgaattggagagtagctatgaactcagaattacaagcaatagaagctaacaatacatggagttggtcaaaactgccaaatggacagaaagtcataggactgaagtgggtttttaagctcaagaataatgcagcaggagaagttgtaaaacataaggctagacttgttgcaaagggatattcctagatagaagggatagactttgatgaagtgtttgctctagttgccagattggaaacagtaagagtcctacttgctctggcagcacatggtaactggcagattcatcacatggatgtaaaaacagctttcttgaatggtgatttgagagaggaagtatatgtgtcctagccaccaggcttccaagatccagggaaggttaagaaggtcctgaaattacacaaggccctatatggtttgaaacaggcacccagggcttggaatataaaattggacagtgaactgatctctttgggttttgaaaaatgcagtgtggaacatgttgtttacagaaagggagctggtgactcctttttggtggtgggagtatatgttgaggatctcataatctgtggaccgtcagtagtaaaaatagaagaattcaagaggcagatgatgcacactttcaacatgagtgaccttggtttgctgagttactacttgggcatggaagttacacagaaggagggtgagatattaatctgtcaaagttcatatgcagcaaagattcttgagctgtgtcacatgactggttgcaaccccactgatactcctatggaacaaagaataaaactcattgctgctaagaaagggactgaaaaggatgttactagatacaagagtgtgattggtagtctgagatacctagtgaacaccagacctg

SEQ ID NO: 165955 - DNA, 581 bp, Zea Mays
ttattgctcctttccggaatcttcccgaggctgagaaataggcccactttgagatgctgagtagtactgatgatgctgagatgaatgttgttcttaacatgctggctagggaatcatctcactctactcgcaccgagccgatggcgtttgcgattaggcaggaccttggtgaagacgaggaaattcggaaactagaaggtgctcatcgcaagcgatcacaccgagtgaaccatctagctattcctgacgaggagaagaagaagaaaagacgactccggcggttatcatgcttggagcaagatgttggcccctccacactattcctcggcgatggcccggtgagcaccatcctcgaggacaatgtcagaggttgtgacaatgctcgggttgacggcagtgtggtcgatgaggatgaggaggaggaagaagaagaggttccgttaatccacaagaatagtcatcacaacaggggcagcgacattccgatgcaggccttatctgcactagtcagccttcaggggttatcgatatctgattttgatcaggcattggaagagatcatccccgagaaccttctatca

SEQ ID NO: 165956 - DNA, 621 bp, Zea Mays
acagagagaaggcaagggtcccgctgggaagcggcttgtaatattttttgtaaggtacttttgggaagtattaacctaacagtgacagaacttatctacatgctatttgcctttgctgtgtgtgtttgttaccaacttatccttggtacctggcccccctggtatgtaggctcgacatgtcgaggctggatgccagtatacttaagaaaaattcgtgacctggcccccaggaggtagtctcgactgggacccggacctgcacacagccttggctaggaagctttagtagtgcgcccataggacccccactaactggtatcttttatcctttgattcgcgcaataggacctgcgggatttagaccgggaagccaatccatgtgtccggaccccctggatcacagctccaaatactaggacatgcgccgcagagtggtggagcgcgtaggcttagggtatgggaccaggctaagcgaccagacagctctggaccatcccaggggacgggtgtccgttctctagaaccggacccccggttgacggacccacaggactatagttccgaatactagggtacccgtcacagaatggtggagtgtgcaggcttagggtatgtaaccaa

SEQ ID NO: 165957 - DNA, 796 bp, Zea Mays
gactcacggccatttcagataagctcaccggagatggctgcctgccaatcggatgccacgtgccttgaagcttcacacatcgcagtaaaccactccatattgctggctcgtcgccggtaggcctgccacggtgaaagacacgcagctcttgtgcaagtgacctctttcttctccggccgccaccgcgccatcccaaattcaccggccaccacccccggagcctataaattgagtgtgccgttgggtccgtaaggtagtcaagcacccaatccaccaaactgtgccttcaattgctcaccagcgagccccaatttcggatttcccccaattccgtccaaaaccccacgccttgtgacctcgccgtggtcagcgtgctccatgtccgctcatgccccctgctctttcgttttagtatccttgtgtgtccctgatgctctcggacccagccgactaggctaggaccccttagatcgacggaaacacttcatgctgtccattgtgcccgctattaccgtgaacagggtgatgtagagctcaaatccagcaattaagcgggggaaaatgtttgttaagggtccatttggtgtctgccgcacgggagcatcagtagttgggtaatccggccggtgtaggctcaccggagctcggttctccgccgtgcgacgtcgtggaccttgggtcgtaaagaattagaacttggagggctttggtgtaaatgtcagtgactaaatcaacagtgtcgcgggctctttcggattgttgtcaaagccagggtcctcagtacaaaaccgtcgcg

SEQ ID NO: 165958 - DNA, 362 bp, Zea Mays
ggtgaacctggattcatgttcaggttactgtaccatggcgcagtctacttagttgacctgacagaccaacattgagctcgatttactctcaaatttcgtatgacaacataatcacttacctgtatcaaagttgtggagctataccccaactgcaattcgactataggaactaaactcaatcgagcactagatcctttataatcttgatcccaaagtttggtcaataacactggcgaccacttctgctttttagtttcaaattcagttcttcaatacaagtctgacagagcaactttgggcagcaatttctttaatttttgcataacaactcaagagactgtctgcatcaaagttattcctat

SEQ ID NO: 165959 - DNA, 505 bp, Zea Mays
caattgttatcaggcagcgatgtctgattatagatctcaaaacaagaccgtcatttccccttagttcagttagtatagttgcttaaattcagtaagtctgaatacttcaacaaggcacaataagggaggttcagcacgtaagttagtatacgaccatgtgtaatctatttaacagagaaaataggcataaaaacgactagcctgcagacgtgcggatatttgaatataagtgttctgatgggcgagcgcccttgtgctttctctattggctaaaattcttgaaaagcatgtaagcttttcgcaaggttcgttagcagtgactatctgtttgtagtacatgaacattagtattttactttccttagttcacctttcttgtgcttgcaatacaatacattattttttacggtgaatttataaaccatatttggtaagttatgtttatactagcctaatgcactcgactcttatatttagattaagtttggtgaataatttatatgtt

SEQ ID NO: 165960 - DNA, 607 bp, Zea Mays
gtcaagaaccagcacctcatcggcgtgggcgccctcggtaccgaatctgttcccgccgcgcgcgtcaactctggacagtcgctcgagtgctggcacgacctccgcgacagcgagcacgcccatgagacgctccgtgcttcatgtcggatcaggggttgaggggctcaccttgacctgggctggatctgttaccgtcgtgtgcgtcgcctactcgcctccagacaaccgctcgagtgctggctcaacctccacgacagcaagcacgctatgagacgatcggtgctttcggctctcggttccactgcgagggagaagggaggagtgaaaacatcgagtgtccgacgcctcatggcgtgctcgcgggagcgcgtggagtggcggcgtgatggagtagatcgcgaagctttcttttgcagagcgcggcgacgtgatggagcagagcgtgaggcgcacggatgggaggttgttcgcggcttcaagatgaggatttcgggcgccatgggcatgcgcggctagcggcggatggggtcggtttgttcatggacggatgaggctgctggcggcggatggggtgggggtttgttcacggatcccggatgagtctgct

SEQ ID NO: 165961 - DNA, 504 bp, Zea Mays
ctgttcactccggccgccgtgtccgcctagctcacggccgattcggatgaactcaccggagttagctgctcaacgatcgtgcgccatgtgccttggtgtctttccacgtcgcagtagctcatattacacatatccggtgatcgccgatgagcccgtcacggtgaaagccaccaatctcttgcgacagtgctcttttctttctccgaccgccaccgcgccatctcaaattcatgggccaccacttggggatcctataaattgaacatgccgtcagttccgcaaggtagtcaagcacccaatccatcaactcgtgccttcaattgttcaccagaggccctgaattgctcacatcccccaaatcggttttccgccaccgtgaaaaggctctcaccatggccattgcgcttcaggtccgatcatgtcctctactctcttgtttcaacacccttatgtgccactgatgcttctcgacctgaccaattaggctagaaccccttagatcgc

SEQ ID NO: 165962 - DNA, 768 bp, Zea Mays
aggtattctaaaatgaatgtcaaactccaaaatacgccagatggcctcacatatggataggtatcttgcatcgatatactcttgaatttcattgcaaggagctacctaaggttcaggtgacacattggctgtctttgccgtcacctcaaaatatatcttcgctcgatcacttctttagtaacgtacttaaacaagtatttaatcatgtttgatttgttacaccactcaacgttgatatgtgcacaatattttttgagcaacaccatgttattaggaacaatgctcctgttatctagcttaactccattcttaacaatgtatctatcatcatcgcgtctcttatagatcatgaatccaaaatcgtcaacgatagtctcagcctagaaggacttagggtagtttttttagcatttgtcattcttcatacaagggcatcttttgttgtgttcaccgcatgggccgtgcatcatgaattcgtcaaccaatgcatatcccaatgggtcagtcatgaaatcaggtacctcagcacagataaatccatcaatagtggaggcatctaagtcggaggagcggtttgccagccaaacaaggcaatggatgtggggtaggccacgtttctggaactccacattatatagcgctgcagaaatgtttggtaaacacgaggttttcagatggaaagtgataggttgagggaagaacacctaaagggccacaaacgtcagcatacctacaagtacagggccaaacgtctttccctccctgata

SEQ ID NO: 165963 - DNA, 637 bp, Zea Mays
cgagcccccaactgcaacgcattaatgactcacacgctccttggcatgcacgttcacttatggcctatcggactaggcctcaatgcgcagacctcttgcgaggcactacacgatgggctacgccgagccctaggcaacggaggccaggggtcggcgaagccaaaatgatgacgcctgggaccatcgccgccctcacagtaaatacgagacaaccaggcagcaccgggccccacgagtacacatgactccacccgtggtaaaactttggctttacccttaccttacgactcatctcaagggaagccaccgcttgccgacccctctcctagcctataaaagggaaaggctgacctccaggcaaggggatcaaaaggagagagctcttggggcaaccggacgcctttagacggacatgaaccgacaaggacgaacagtaggagaaggagcaccgatgaggaccaggaggttggagcccgccgaaccaagacttagctaggactccaccctacatcttctaagctccacttccaccccccgataaagagacttaggagcatcacatccctctctcgaccgctggtaacccctactacgagtttgatcatcaatgatgccggtagcgcaagccaccgatgac

SEQ ID NO: 165964 - DNA, 804 bp, Zea Mays
cccgcccgacgcgagtgtaatcctacgtgaggtggaagttggttgaggtttttgtgccttggagttcatcagcgcagttcttgttggagtcaggtgggacgagcctgcctccgcaattggtgccatcggagaagatctcctctcggatggatccgtgatgcgatgcaagacgccttcttgacctgcgatgtaagagagggatccaaagcggaacacctccccgacgttgaaggtgatcggggtgttgaagatgatagccatggagtggtcatggatcaacgtcgcacctcctacctagcgcgccagatgtcgatgtttatgacccgactacgcaccacggggttccccacatgatgcttttgagcagaacgcgcgttgttgactgcgactcgatggtacgtgcgggagcacgtcagaccacacgagtgtttatacaggttcagaccgctagaatgcgtaacaccctacttctatcgaggatgtgtattagagtttcaccggagtatatggattacaggtgaactacggcggtggaggatgagttctcctgccgatctggtggtgcgtggttgctatgagatggctaatcagctataaggtggtgctgggatgtgacgagatgagatgcgtttgcaggggtacctcctcgcccttatatagatgaccagaggcttatccctttacaagtcttgatcactatctaactctacatgaatcctcttttaacacgacatgcattattgcttaatcggagttcggtcgccgagtttctagcccttcaggtgtgcacaacctctccacgcg

SEQ ID NO: 165965 - DNA, 355 bp, Zea Mays
aaagagacgacaaccccaaggatgaggaagaagaggatgatatctccagtgatcaacaaagaataatgggtggcataataaagttactcgaacacgtaggaacatgcagcatgagcaaagacactttcataatagacttcatcgagagacactcaaccaacgcctatctgaagaatagtgccacaaagaggctaggcgacaaatcaacaaccgcctatgttgccctacaacatgcaaccttgatactgacttccaagaagtaagacgacaaagaatctacaacaccccaaggctaacatcatattcatggcaaatgcgctatgttgggaacccaatctgcctcagtatgagtgac

SEQ ID NO: 165966 - DNA, 474 bp, Zea Mays
caacaccttcccataactttttgagatcatcgatcaagggttgcatcatcacattcagccctttcccaggatggtctggtctaggaataattagggaaagaaacatgtaatcatatttcatgcacagatgaggtggaaggttgtatggaataacaaatacaggccaacaagaatatgatgtcgcatttgtattgaaaggtgtaaacccatctgtcgccaacccaattcgaatatttctcgcttcactagcaaattctggatcaaagtcatctagagccttccacgcatcactgtcagatgggtgtgtcatcacatgagtgtcctctcattcatgttctttgtgccatctcatgtgcctagctatgtttctcgaaagaaacaaacgcttaagacgaggcgcaagagacatgtaacaaagttgcttttgagctatcgttgatgtgaccatttcaccatcatcgtttttacctctgc

SEQ ID NO: 165967 - DNA, 482 bp, Zea Mays
gcgagtacgagaaattagagaggtgtccacactgtagcgctagtcgatggaagacgaatgctggctgtcgcgtggatgatgatccctctagtatgatgaagaagaagaccaagaagaccaagcagaatgacctgcctcatcaggatgaggaggaagagggttacacatcgaggaggagtcctgcattgtcgatgtggtacctgcccgtaatcgaccgcctttgtgctctatttgggaaccccgaggatgccaagctgatgtcatggcatgcctcagatgaccgtacaaaggacgatggcaagctgtgacacccttccgatgctcgccagtggaaacgtttcgacaccatgttcccgaagttcagcgaagaggccgggaacgtctggttcgcgcttagtaccgacggaatgaatccgtttggtgacctcagcagctcccacaacacttggccagtgatcctcaccatctacaacctgcctccg

SEQ ID NO: 165968 - DNA, 1059 bp, Zea Mays
gtccttctcgccgaccggtgggcccaaaccgcgcaggatcgccaacaacctcccggttggagcgcgggcgcggcataggcggacctgctcgagctccgcaaaaccgccgctgactagaccaaccggagtataaaatcgcgtcagacctcgcctccttctcaaccctcctgcgccgccataagtagtacctcgacgtggcgagaaaaacatcgtcggagtgcagtgcggtgaggaagcgccgcgacttggacatcctcggcggaccgtcgatctgactcgtgtgcggaaccgggtgaagacgcgggtatccgggacggtgtgggcgtgaagccgggcggaatccccgactgtggcgccgggaattcgacgccgccattgcaaatccgtggagcgtcgtgggcagacctggagacgaccagaatcgtggtgagaacacatgtcccaagttcgctaccttcccaatttcgttttgcatccgggatacgaggggatcgagtactagggaacactgttggcattccggccatggccgccgccgcgctggccttgcgcgccgttgcgctgggtggtcaggcggggacgacgcccctccaccgtcggatcgcgcacgggcgatcgggattagacctgggaataccgattcgaacgcgttcgatctgagccgtagattcagaatcgtggggatcgggttagatttaggttgctgttgatcgcggccgtcgatctgtagatatgtggtcgtgatcacgtaccgtttcgcgatgtcaccgatttaatctgcacgcccatcctagatcggacggcctagattcaccaataccccttcgcgggtgcactttgctaaagaacccctgaactatgtagaaaacaacccgcagtccacagcagtgtcagtctgagtcttagaaacattttcaccgtagcccctgctgttttctgttattgaggaccagtccagtggggttattaaattagaaaaataagtttttaaaataaaaacaatacctagaatttgtataattcatagaaactccatatgaactccaaattggtccattc

SEQ ID NO: 165969 - DNA, 839 bp, Zea Mays
cgtacccatcctgaccgctggatcccaaaccgatgccctagattcttcactcgaagcggtactcacaagatctaatctgtgccgttgacggagggatcaacggtcttgaacaatatgccatactacaatgcccacattcgatctccgccttccgatctagatcctcggtccgaggatcctccttcccccaacacagaggaggtgtctcaccgaaaatgatcacgacgaggaagccggttgcagtgcagtctgcccccacgacagagcttggacaacgatgaggaatttatcaccagtgcgaacaaatatccatcggatgatggggcttgcgacttccctggttgacggcgacttcacacgacctacccgcggtcaccgcaggcgtgggtcaacgcggtgcactctgccctcctttttctccccaattttgctctctcagttcgctctcaatttggccacgattgcacggtgagggtcgcagatatggaggaggggtcgctcgagaaccctagtgcttcatataggggtaatgtgccccgggatggagcaacgacacatcacgctcatgccatgatcccgcctttgatggcgaggtgattggggcggccactaacggcacgggccgacccgacagcgtcatcacgtatccgcggtgtccttggatgagccgttccccccatttcagcccacaagatagggagcagcgcacgcagcatgacggggctagtgaaacgagtgatgccaagtgggtccggggtgtcgacgccaggcggaggcactgggttgcgcgcgcgtgaggttggtgggccggctagcattttggcccaacacgtgatttt

SEQ ID NO: 165970 - DNA, 758 bp, Zea Mays
ggatatcacaccaatacaacgccataatggggagaggatccatcaacaaacttggagcgacaattcacgttctttctctgtgcatgaaaatcctaggtcctctcggtgcaataacaatttatggggaccaacagactactcgcaacatcgaaagggattttgtcctaggacaatacaatgtccactgcctcatctttgaggactaatgccaagttgtcccgtgccccgagaaagtagcaccaaccaaagcctagattcaaagcatcggctaggccaaaaaagttcctctggacgcctcagtaccaaatcagacaatgttaatcagtgaagacctcacccaagatagagaggctaagctattatcctgcctatatcgcaacaaggacgtcttcacttggtcggcctaaacctcgtcggcatcagccgctcaatcatcgagcatggtctaagcatagacccttcggtccggcccaaaaaacagaaactccgtaaaatgttagacgagaagaccgaagcagccaaggccaaagtacacagactgctcgaagctaagtttatcgaaccagtcgagtacccccctataatatcccaaaaaaatgttgaccaaaagttggttttcggtgcgtggatgagggaaagggttgtgggctgttggatgcaaagtcagaagtcatctaaggcgtcgtttctttctcccacaaaaccctaggtggccacccctttttcccttttccgcttcttggccgccacaccccccc

SEQ ID NO: 165971 - DNA, 549 bp, Zea Mays
gctagattaacagagctattgccatctcgagcaaaaaccctgtttacactgcttcactcccctattggatcaacttgccctagagagcaagttccaacaactacaactttgctgcagagcattggtcatgttgtcatatgaatttgggagaaaatcgagctcaaagatggtctgtcaggtcaactgaatacactccacgatggtacagtgtctggattaggccgccagcttagaatctcgctgccggcggtccgcgcgaccggatttgtgctggtcgccgggattcgtgctgcgggcgtgtggatttcgctcaccatgaaaagatctcgtcgcggatgtgtatgagctactgtggtcttgctgtaccctaccttttgcaacggcgacgtggccttatggccgtcactgaagttgtcgtgcttcacagtgactgtgccacactccgagcctttcaccatgtcgtcactagccgcaccagctcaccgataaccgccatagctcctcaaccggtgagtgccacggtaaatcgcgccggtgactcaacccttc

SEQ ID NO: 165972 - DNA, 585 bp, Zea Mays
aacgccatggcagggatttgaacttcagggggattccttccttctagttgagcttctagggctgcaatccttccgtgtgcatcctccagctccaagtgtaccctagagaggtccagggtagcactatccaggtcggtgttaagacctaccaccacaccagctagggtgttgaggcgatcttcttcagctccacctggaacaatgctggtatggctttctccacgaatacacagaggaagatgcctatacttcgtgttgtgcagctgctgccggtaagtgtggctgagggaccacagtgttcgcctagcagcatcgctgactgaaagcagcgtaggtggatagcgacgttagagactcatgagctgacagagtcctgaaccctctatcacctgcatccatcaccctgacatgaatgcgagtgatgtagtagcaagcccgaggaggctcgtacactcgccttgtctcatataggggtcgaaaataggttcccaatgcatgcagaacatcctgcagcaggttaggaaagtgccctgtctcgaacattgatgtataatgttcagtgataggccataaccccacgtagtg

SEQ ID NO: 165973 - DNA, 726 bp, Zea Mays
taacgaacacaaattgcgcatcgactcgactcgacttataaacatagaggaattgaggactaccttggcatgtcaccacccctccatttaagccgagataaattctattatcgactaagagttctaagtattaaacacattattactttcacgcacaaataagcctcaacttaacaccatttttgggtaacttgatcgacacactacgcatgttctttgcccatcaaaatttatcgcaccacaggaatcatcccacttgctaatgacatcaacaagacccacttatctattattaaaaacacgaacacagttacacgccacattctagtttctaacataatccatacgtaactcgtaatcccactactcactaacaataaatcacgcatgacaactaccacatcaaccggttaatttatttggacaccgtctgcctagcgtgccactagtatataccccacattttgactcatgctcaaaaatacatcctttaatcgattatacaacagcgacctaagcgtcatgttacccagtgcatacatctttcttcgtcgcgagtataaccatattacggcatacacccgcacacctcaatcaaataccttacgccaccaccactataatatacaccacgacacacacgcacatacgtgtccctatattacgcacaagacatcaatcgcactagtgactccaacaggattaatcatacacctcatttgcctc

SEQ ID NO: 165974 - DNA, 428 bp, Zea Mays
ggtgcacaatcacgatccttggtgtcaactttaggaagggcctccgccggtgtctcatctggaaccggagcaaaaggacccacaccctggtccaagctcgacagtcgccgaagctgccttttcttccttttttcttcaacgggtgcaatcgatcggctcactcggcgcgaacgttttggtcgggcaccttcgggtttctgggctttcaccacttcaccaagttcttgcccatctgtgatagccattggctcgacgagggcggagtcagacgactccccagccagcaagctaagtacagtgtccatctctgcgtcgtcagtgctggttgacatttcaaaatgaatctgcatctcattctttaggagactccagagtggggcaattagagcttcaatgtccttagaagagggtcgcactctaagacccag

SEQ ID NO: 165975 - DNA, 1020 bp, Zea Mays
aaaagaaaaaaaacaataaaagccttatgggcctcagcattcctgttcagcccactggagggaaaccaaccgcgcgcagcccattctacctctgcaccgcgccgacatgtggggacacctggtcagccgggttgctcgcgtcgcgtgggactcggtctcgctgcgctcgggggcccaccggtcactctccctttttagtcgcgcacccggagcaatgacgctcgtgtgatccgcggcgggcaccccgccatgccctcgtcaacgccgtcacaggcggaaccacctccacgaaatccccgcgtccgcgggcgccgtggcttcggcccttataggtcggcaccataacagctccgccttcgtggccaactcgggagagctaggaaagcgcctgcgcgagagccgtgtaagggtgaggaagccgccgccaagattcgccaccgataggggaagtagggcgccatttgtgccagcgggagggtggtcgtgatccagcggtgctgtgtgagggtttaatcggtgggcgaactgctagtgctccgggaatttctcaccagcgcgctcttcaccgcgcaacagccgtcgcccgtggacagccatcgattcgtcatccctgccggtgagagctctccccttgcattcgccgtgcctggaattgcgtgaatcgcgttgtaaattagatattagggccctcctggatgggatggtcgaactccggccatctctctgtcgtcagggctggcggcgccgccggtcatgtgtgctggtgcgacgaggaaggaagacctgatgcgcgccgttggatgtgtgtcggacggctaggattagattacatcataccccttcgctcggttgaatcgtagccgtcgatccgtgatcgggtgacctagagcggatttagtcgcttaaaatctactccgttgatgggggatccagcggttgggatcgcgcaccggttcacttgtgtcacggtttaatccggtccgtttaaatctaatcaagcggccacgatcctcccgtacc

SEQ ID NO: 165976 - DNA, 479 bp, Zea Mays
aagttgaagggaaatgcttattacatgcattcgtcatcattatgtgtttcttgccgcattgtatagttaaacatattcatacacacctaactaaacatattcatatagttaaacatagaatagtttcttagcatttttcatacacctaacagccatactatcctcattcacaacaatagtcagcatgcacctgatttatgtagagaaagatattgctgaaaataaggcatggtgacaatgtctattgataaatgagctctgtcaatatctaatattaaaaaaaggcaaccttacaattcacatgcaaccataaataagctatgtaaaatcacttgagctatgcaaccataaatgagctatgtaatctttaataaccatttagtttgaagtatagaactcactacgttgaagcgattgaagagaacggcgatcgtcacgagcagcgaacacgatgatgattgtggatggggtgtcggcct

SEQ ID NO: 165977 - DNA, 417 bp, Zea Mays
gctagacaagtttgtggtggtcctcattgatgatattctggtctattcaaagaatgaagacgagcatactaagcatttgcacatcgtacttcaacgactgcgcgatcatcgcttatatgctaagttgtccaaatgtgatttctggctaagggaaattaaatttttgggtcacaccatttctcaggatggggtatcagttgatcttgagaaagtgcaagaagtgatggattggaagccccctaccactgtacggcagattcggagttttctgggattggcaggatattatcgacgattcattccagatttttctaggattgccaagccaatgactgaattgttgaagaaagaagcaaagtatgaatggagtcagaaatgtgaatatgcctttcatacattgaggaagcatctgtcaac

SEQ ID NO: 165978 - DNA, 976 bp, Zea Mays
cgcagcccaactcctcacctgacttaggccaactccacctcggtcgcgtggcccatttacctattgcgccgacccgcccctttcctttccgcgttcgtcgctgacagccaaggccttcttttcagcgcctcaccacgccgcaccctttgcttcccactcggtcacttacacctgggccctccctgcagccaccctcagtcctcgtgcgtggatcagacactgtcggtgggccatccctatcagcttcatcacccaaaccaaatcccaacagagaccgctgtatttcccccacctgccatcagcgatctccgtggcttggcgccatgagcgcgctagctgggcagggttggtagcttgcctcgccacggactccgcgcacctataaagccgagtcgtgctcgccatcgttgcctcaagccttgctatgaaataaactgagagggaggagagaagtaggggccgcgtcggtgacttctgtccgcgttgactcgctgcccttggtgtttgggctcggagcttcaccttccggtgtggagtgcgtgcatgttgttattgggctttgggggccagccaattgcaagcaattgctcgtctgcgtttcccttccgccgcggtaccacccctctccttggatagcactgcctcgaccaccatcttcggtgagattcgctccaatggtctgctttaccctcctgcttagcaaagcgccattagggttgaagctgggggcgcagtggggcgggagtaccgaactctggcgtgctctcggccaagggcacgggcggcgccaccatctctagtggacgggatggagaatatgttccctaggccatccgctaccggatggacaatcgagattaggcggggggaaacgattcgacaagttaattctggggcgttgtctgcttgatcaacgtttgagattaaatggaaggtaccctttcacttatacggatctgggccatatatctcaaat

SEQ ID NO: 165979 - DNA, 631 bp, Zea Mays
gtgacccgatttgagggaaatccgttgactgtgggctatggtgcagggcagaggctaattgtgggtggtatgtgcgtgtaatagagaggcggagcgagggtagtgctcaatttaaaggaaccgtcaacgtgctttgccaatttgggccgaagacgataatggcagcgatgggatattccacaggacgagctcgtcgtgtcgtccgctggtacaacgactcaaggactgtaattccaggcttaccacgattatagctacgtggtgaaagggtcacgatgtggcacaatagcggagaacggcggcccctatggcaatgatcgtccggccacgtcgctgtgcaagtgggtacggcgaattgagctgtaacagtgcccaagctcatcccgacgccgagattttttactgcaagccgttatccgcgcgccacagagaatgaatcccaacgccggcgttgattgtggcgtggattcaccggcggagagattcactgcacctgatcttcttcaggttactgtaccatggaaacatcattcagtacgcctgacagagcaagttaaggagcttctttctcaaattttcatgtgggaagctaccaatccgtctgtatcgaagttgttgctctacataccag

SEQ ID NO: 165980 - DNA, 1335 bp, Zea Mays
ggggatcagcatatgctatagtaaccactttaatgtgtgaaagtttatgctccggttgtaatttttagagatcgtccatttgtgcttgcgaaatccaccaagctggaaagaactaaaatatctacctctcgtatgtaagaggggaagggcaatgtggagggggactattggccatttggtcaattgcttactccctcacttttctcccttctatctcttattcggtgtaaaaccaatattaccaaataaatagagatgtgcatatagagagatgtgcaaaaagttattccctaatgcactaatctctagtacttgtgaattaaaagattttatcgattggttctttgtaattctcgttttccaaactaaaaaatataactgaccgacatcatcagttatatatatgtttacatggctgagctaataatgtctacattgacacagaaattccaatatagttattctgttcattctccatcaattaatagctctacaaatttactaagctacgtccaaatccatatcaatttgaatatcatcatcgttagggattgaagtaaaaaaaatatttctatgcgctattcctcatatagctggtgaccaaactcggacgaggcatatataggtgtttcgggagaaattatgtaatttttatttgatattagatcgatttatcccacaagagatttcatttccttatatatatattaaaattacagaaaaaatagtatctaaggggaaatattatttgaatagtagttacgattttttgagcagtagtatgttcttgtaagttcatttcggacttacaaaaacacgttattgtgttaataatttgttgcttgttcccacaaaatattacataattacatattgaaccatgtaacatgaaatgacaatttttttttcatatataaggtatgtcgtaccaaatattgaaccatttttaacctaataataaaaactgtggaatattttgttggctatacaagtactcggtcgttgttgcgatataaaattcttagtgctatatatgtttgcatggtaatgggtgactaggccagggagatcatatttgacttttttgattaggtaacaatgagaggttatcttctaatagagttattgctatttgttataaaactatcatgtgatttcatctcactctctctataccctaaaccccacacatgtgtatgagagatatgtatgttttccttatcgacacacaatacatgtatattttccttatccacacataacatagaaggcaggtcataattttgagttatatgtaaatgtttctcacataggtcgccctacaagttacatgca

SEQ ID NO: 165981 - DNA, 742 bp, Zea Mays
caccattgggatcaacctcaggaaggacctctgctggcacttcatcacaaactggagcagaaggaccggtaacctggtccaagcatgacagtcgccgaagccgcctcttcttcttcttcttttcctcaacaggcgcagtcgggcggctaacttggcgaggacgttttgggcgagcacccttaggttttcgggtctccaatgctttgccaagctcttgtccagtcatgatagccatcggttcagcatgggtcgagttagaagattctccagctaacatgttaagtacaacatctatctctgcatcatctggactagccggcatctcaaagtgaatttgtttctcatcattgggaagataacgaaggggggcaaccagagccttaatgtcctcgggagagggtcgcactctaagacccaaatcaccatcactagtaggagggttggacacgaatcggaaaacctatgaggtggaagattctaagcagaataggcaacaggagcaccaacatttgatactctgcccctcagaatcatgtctagtcagctcgctagatcctcagtaggaattcttttgttgaggacccgagtagagtcattaataccactgtacaagtaagctggatacgtcctgtctttcaaagactgaatattcttgaagacgaagtcagcaaccacagcttcgacagtcagacctctctccttcaacaaatagatctcagcaagcagaacgctagcctccgtt

SEQ ID NO: 165982 - DNA, 1021 bp, Zea Mays
agaaaaactatcttcacatatccttgctgtggaaatcgactgcttgaagaagaattatcatacaactttgatgaactatcacatctatcccatgttctatattccagactcaacaaaaatcagctccatgcttttaacactattatagacactgtcattgccaataaacctggattcttctttgtgtctggatacggaggcaccggaaaaactttcttatggaatgctatcatcacacatctacgagccaataaaaaatagtactggcagttgcttcctcaggtgtagcatccttgcttcttccaggtggccgcataacacattcacgattcaagataccatgcgatctagatgaatctactacttgcaacataaaaaggggaacaatgctagctgaattaattgaatcaacttctctaataatatgggatgaagctttcatgacacacagatgtgcatttgaagctttagatcgctccctccgagatttgctctacttaaatgcatctgcttctaccaatgctccttttggaggtaaagtaattgtcttaggaggtgatccaagacaaatattgcctgttatagaaggcggagatcgtgcacaaattgttaatgctgcaataacaaactcaccactttggtcatcaattattgttcttcacctcacagaaaatatgaggctagcttcagcagaattaacaaatgaggaaagaactcatattgctgaattcagcaaatggatactagacattggtgatggcaacataccagctacagtgaaaccgggggaatatgaacctacttggataaaaataccatcagaattcttattaataccagaacacaacaacatatcagcaatcattggaagcatttatacaaatattacagagaattttaatgatcctatctacttagagcaacgcgccatcttaacacctacaaatgaaattgctgatttaattaatgaaaaggttgtgcagttaattcctggccattctaaagaatatacaagcagcga

SEQ ID NO: 165983 - DNA, 1421 bp, Zea Mays
cgtctcttgctgtggatgtttgtttgattgtttcggtaggccttgcagtatataggattttggtgatttcattagcatagccaatcagctgttgatttggtttcccactgaacaaagattcaaggtgcgtgtgttgcaatcggttgtacatatttcacctttgctggctgtttatttagggaaacgacggcaaccattgaagatttgtggtttcctgtttttttttgggagtagatctcactcagctgaagtcgtctctatcaatactggtgaagcctcctagatccaaatgtagcccattgggtttgggagattccaagacatgttgggcactcgagtgcagtagaccatgcagaacttttgagaagatcatacataactttttcgtatgttttagctgaagcatgtgccagctgtgtcgatccatcagcgattacttcaaatatcacaactatcctcctcgactagaaaggcctgctatgtgcagaaggtgccaaaggcttagacctatcttctcatttaatgatgggatgttctccttttatttgttgtttgagcaagtgttagttctggctgtgttagcgtgttctgctgtaccgaggatcttcctcttgttttgctcttcttaatatagtgatgtgcagttccctgcgtattcgagaaaaaaagggagttgctaaaacactataaggagtatacaaaaatgtttgtgctccaacagttctctatttattggtgattaatctttaaagttgtccacgccaacaaaaaataaatgagcctattttctatttttaattgagctggcgatagaaatttgtatcaacaacctttcctagcctcttgggaggtcgaagctgtcgatggaagaccagacggtcacggcgacaggcacacgccatccacataggtccttgtggcgacggcgtgaaggcagcacaggaggtgctcttgcagcaccttggcacaagaggttgtctggcagtagcggcgtcaatgcgtctgaggcggtggagatggatttggggtcacggggtggtgggacggcgcgaagcggtggctggagtatgctttttcgcgtatgacttagcaccaacgttgatttcgggagtcccaacgaggttggtaaatgtagggatgaaactgagttttgtagggagtttgtaaattcagggacctgctttacataactattggaggagagtttttcttgaaaacttcttaaattcatatttagggagttttttacataactattggagatgctcttttgagatattattctccatttttatgttttctgctagaagctttgagactttttgagcaaatgtggtttcctgagatcaacttttctatataacttaatatattatgcatattagattatttgccaaccatggcttcccatgttatgccct

SEQ ID NO: 165984 - DNA, 890 bp, Zea Mays
gcccggaccgtcgtcagagccaggcagccagcggaatggtgatcttgagaacttgcgccagaccacgcgaaacgcgaatgcaaggcaaacctgctgcgaaagggcgcctcatgccaagttcttcgcttggctactgtcataggaacggatataatgctgaaggcgaacctgctgcgaaagagcgcctcatgctaagttcttcgcttggctacagtcacagcctcacaggaacagatacaatgctgaaggcgaacctgctgcgaaagagcgccttttcgatcatagcaaacacagtgtaaaccatatagctatcggtgaactgtctgtatattcaaacaatcctagaacataaggcgccctttcggacgccctgcgccatgaattaaagaccataagctattgactatatatatttgacaaacgtggctttgtaaagatgataacactaaggcctgagcacatatactgagcgtaatgatatagaggcttctacacaagcttcaggttagtgggtgtcatcatttgtatacttccttgaactcaggcttgagctcatgcctcatgtcatgcatgcgtccgtcccctgattgatttgtcgtccctcgctagctagttgcatacatacaggagatcgtttatatcatctcaatagtataagtttcttgctgctgagtacaaaccagcgagcacgctgactacgatatgcggatagaagaagaagaagaggaagaagaggggcacatgaatgaacaggatgggcatgcgttaatctaatagtaggaggaaggatccgatcctagtgtgttcattgcgttcccctgctgaacgaaagtagtagcagtctggtactcctacattgcagcggaataatatagaagacacaggtgaac

SEQ ID NO: 165985 - DNA, 368 bp, Zea Mays
agattgctctgcaagtgcaccggcttttggatcttccagcttttctgcttgccgccggtgctgactctgaggtgcacctcacatatctgcctggccttctgactctgttgactaccagcggcaggtatgttgaggagtgggtccgagttttctacgctactgtatggatagacccagatcatcactggatgaggttttgttttgagcgagaggatgtcactattactgccagtcagattcaccagctctttggatttaccgagtcatcgactcgacttcacagtttatgctacgacacctctgaccctcctcgtcgccctcacggcggtgtggcttcgggtacagctcacgtcgcggctctgttccgc

SEQ ID NO: 165986 - DNA, 554 bp, Zea Mays
atatggatgcaaggatcaccaccctatgtgatgagttgtgcaagctgaacatagaagtcgtttcctccggtgctttaagttatatttcagaggagcccaccttacacgagcaaatagtcatggcacaaattggtgacaagggtgttcaagttatcaaggaaatgatcgaacagaaggcggaaaaatacaaatgcttccgtcaggacagcaaagggattctatggtttggagaccgattggttgttcccaagaaccccgaactcagaaagaaaatattggatgaagctcacctttcaaaattctccatgcaccccgatagtaacaagatgtatcatgaccttagacctttgtactggtggaccagaatgaagagggaaattgctaagtatatatctgaatgcgacacttgccagagagtcaaggccagtcatttaaaggtagcaggcaccttacagccccttcccataccatcctggaaatgggaggatatttgcatggatttcattatgggattgcccaatacctcccggcaccacgattctatttgggtcatt

SEQ ID NO: 165987 - DNA, 321 bp, Zea Mays
gtatcctgacataaaaccagtgcttattttctattcgtgcatgtgcaggtgttgtactgtttcttagaattatccagcaacttcgatgggaggaattttgtttgagcttgtgggcccaatttgagaagttttacatatagagtaaaaaaaggtcctgctctcgtgttttcgtgtaaaactggattttgttcagttcttactgtggagctatgcttcctagataaaacttctcgatttgtataacttctcgatttgtataaaaacttctccatttacatattgggaagtctatatgtaaaacttctcgatttatatatcaac

SEQ ID NO: 165988 - DNA, 663 bp, Zea Mays
gcatgtccaacactttgcctttgatttctaaaatcctcacaatgtttcctagctttattatgcaagctatccaccttcccaacatgctcaacaaaagattttgttgcattcttccaattacaaaaacccttgcttgtgaatgcatcaataccaaaattttcatgtctttgttgtttgaatagataacagtaaaaacagaaggcagcatctttggtaacactatactctaaccaattatggttcttgaaccatgaatcatgaaaacttctttgtcagtctcccatcttttttaggatatatatggccaattggttgacatggaccctgtaacaaatactctcttctaacagcatccctaatgttaacatcgtattcatcaattggttttctaagcccaggatcaacaactatatcgaatacctgctcagaaggtggaatttcttgctcttgttcatgtgaagttggatttagtactgcctcaatagtagcctcctcggttgaaatttcttgggcttgattgttactggttccggttcccactgttggttgagaattgaggtttgatcttggctgcacattacacacgacgggtgtcagagctggagagaaaaatgattgtaatgttctaggcctcttcttcattggtgactcgcaggacagagc

SEQ ID NO: 165989 - DNA, 773 bp, Zea Mays
tgggcacatatttgacaatttttgacgaaattttgaacgaatgacttcatgtgtttccaagcaaagatggatttaagtctactatatgtggctgtagcaccagagtgaccacctagaggagagttgtgcaaggctgtaataatacgatgttgcaaatctggattctgtccaacccatatgcggttcttatatttgagtattccattttggagggtgaaatgaggtacagctgagtcgatggccaacttggacaagagagactaggagtctgaatcttttatgtagctctgttgaacgtcggacagccattggggtaccaccatggacatagcactaagctctgtgggcatgcatctagatagtgcatccgcaacacggtttgcagcaccgtgccggtatacgatcttataatgaagactaaaagttttgtgaatactttgtgctgccacgatgtatgcaaacgttgctcgttgagttgcgagaggctttggtgatcagtaagtatgatgaactctccagattgcaggtaaggacgccactgttgtactgctaccagcacagccatgtattccttttcataggctgagaggcccctagattttggtcccaaggctttgctaaggaaggccaatggatgacccttctgcataagcactgctccaacggccaaggaactggcatccgtttcaattgtaaactgggaagaaaaatccggcatagacagaacaggagccgttatcaaagcttgtttcaaagcttggaaggaagtagaa

SEQ ID NO: 165990 - DNA, 315 bp, Zea Mays
gctccactccaaatttttttagccaaacactcccaactccaaaaactccggatccaaaaaaacttgaatctagctcccaactccaccaaatccatggagtccctcaggggtactccgcaaacacagtttttgaaaggactcgtgaagttgtgtggaaattacccaccattgccatcgtttacacaggataccgcttcgttttcttttttctctcccgatcgcatctcctgcccgtcgctcaaacgcaaaccgatcgcctgccctagtgcgtacctgatcgcgcagccgccgccggagaaggacaggatgtcccgg

SEQ ID NO: 165991 - DNA, 817 bp, Zea Mays
taagttctccggtagtacctgatgtctccaaggctgtcgatttgcttcatcaagcttttgcagcggcaaatggtagcgggagtgcagctaatcatgtcccggacagtacgtgtgatcaatttgtatcgctactacaactccctgataggagcagtaatgcctctgccagtaccagatgggatgcagtgggctcgaatctagggccccaccgtagttcacgacttgagacgatcaatgagatttctaagccatcccatttagatgaccaggtgggatcctcagcacttcaagtggtcaaagaaaaggtgccgttttatttcaagtgtaaaacaaaaggtcaccagctgagtgaatgcattattgagctgttttgtgaagtgtgtgatgtcaagacccacttatcttcgaaatgtccggtggttcgtacttgcaatacttttgcagttcctagtgggtatgcggtagatggtttggggttttactatatacctcagcctactcctgtcaaatcaaagcaaggtagctatgttggtacagtgactgttgtggagggctcaatgacagaggagcagatcactagtgagctgagaaggttggttgctacggagtgggattggagtgtgaagggctttggaaataatgtgttctcgacgggttttccttcaatgagtgaactgcaacgaatgattgaatgggggacaattcacactaaatttggtgctaaaatgcaagtcaaggaagagggatctggagaagaaataaaatatgtgatgccaaaggtatgggtgcagttcacaggattacctaaggaattgag

SEQ ID NO: 165992 - DNA, 456 bp, Zea Mays
gccaagattgctaatcagcttctctagaactcacatgaccatgcatagaaaccatacattaacatagatgtcaaaggaaggggagagacgagtcatccgaagtagtgagctgttagtatagaaacaaagcaagcaagagcaatcttggatccaaaaaagaaaacgtgaccacgatataaaaacctatatccgagagaatagtaacgtctatggttctttttttccaaggaatctacaacgtcaaaattgaaccaaacaggtctgtctgttctagttccgtcgagttatcaacatataagatgtatgggtcaagtataaaaacaaccaaacatgctaacgtataaaaacccaatggcatgatcttatctcaaatgagctttccaccttttttgaattatggtactatcaaatcatcaccagcttaaagcatatgggcataaacaacattgagggcaa

SEQ ID NO: 165993 - DNA, 622 bp, Zea Mays
atgcttgcgtattttgtcgttattggctgcgtaaattggcatagttggacgtgattgggaggtggttagatttttatgcttgtttaaattactaataacaaataaataatcatctgacgcgacgtgtgtggtcagatcgggtagtgggggtgacacgcgcatgatccgggaacgtggggcggtcgcacgttggggtgagccatgtttatggaattgtaacacaataggcaggtattcataacgtgtcgttcacgtaaatctcgcgacatgcagactgcgcagaaaatcgcggaggatattagatcatgccatgaatataggtcagagcggtttaggcgagtataggagattagctggaaaaaacgggctacacacagctgcagacgtttttgttcagagctctgggagagttagggcatacacaatggagacggccaggggatcggagaagtgtggagaagctacggcgacgacgacaccctgtacaatcgatggccgacatactgtaactcccccggctgcgttaccagcgccaggaattcttgaagacaccaacacagttcaaccaagttgggtgggaacaactcagcggataccgatgaggacaattggcgaacatgag

SEQ ID NO: 165994 - DNA, 961 bp, Zea Mays
ggtatgtagagcccccatttaatatagggtctcttgagaagtctttagaggactaaataaaaaggtacaagagacattctcttcacatgccgctaagttcatctctacacgattttctatagtggcggacgcaggatgagaattcatgggggccaagaaaatcacgtgacaaaatcaagcacgaccgaaaaactaatgttgcatagaatccaagttttatatcaatacacgatataggttaaaagaataaaactatataaacaaaagaagtaaacatgtcactaagttcttgctggccgaaatgatgccgtacgtatctgtcaaatgtcaatccttgaaagactggggcaccgagaagagggtagtgtcaggcgtcgtgatgatgagaagtagggtgagggtgtcgcgagggtttggggtctcgctaagttcttgctggccgaaatgatgccgtacgtatctgtcgaatgtctatccttgaacgactggggcaccgagaagagggcagtgtcgggcgtcatgatgatgagaagtagggtgagggtgtcgcgagggtttggggtctcgctaagttcttgctggccgaaatgatgccgtacgtatctgtcgaatgtctatccttgaatgactggggcaccgagaagagggcagtgtcgggcgtcatgatgatgagaagtagggtgagggtgtcgcgagggtttggggtcccgctaagttcttgctggtcgaaatgatgtcgtacgtatctgtcgaatgtctatccttgaacgactggggcacggagaagagggccgtgtcaggcgtcgtgatgatgagaagtagggtgagggtgtcgcgagggtttggggtcggacgacgtcgcgtgtcggaaaggaggtagtggtgggcgatatcaggacggactggctcgaatgtcgtcaaataaaatggggccaaatagatagatacggagactaaacaa

SEQ ID NO: 165995 - DNA, 444 bp, Zea Mays
ttgcgaccttatttggttggcatcttccgaccgatgattcttggatggctgaggatggaggagtgatggcccattaaatctggtcatctactcttgccgtctagagtcattgttattgttttacaatggatcctattaaaaattctagtgtggaatgtcagatggctcaattcctctgctaggtaggatgttgttcgtaacttggtcgattctatacaggtgggtgtggtctgccttcaagaaactaagatggtgactatctcgaggcgggtgatccttaccatgcctggtgccaattttgatgattttgtggagttaccggctgttggtgccagtggctgtatctttgttgcttggaggagaagtgtggaagccacgtgccagcttagaattgatgccaatagtgtttccgttcagttttcctcccattcgggtgcatcttgg

SEQ ID NO: 165996 - DNA, 497 bp, Zea Mays
cgagaaaacaagaacggtaaataaatatttatcgatgaagcaaaaataacacaccggtctgcttgtagttacatgtgtaggcgcctagataacaccatagaatggcacatcatgttgtcctagtggatacatatttaacaaatttgaatatggcagtggaggtggaacttgtccatacccatacatcatcgatggtagtacttcaactggtggtccctgacctgattgccattgcatgcataagggttgaagattgggtcgtgtcgaagcagatagttagaactggagctacttgagctatgggttccatcttggataggaaataagatcgaacgacgttgaccgcttattgtctcctgttgtgaatgaggtacatcatcgtaagaatcttgtatgccatgggtgaattgacttcctctagtggacctccaatcccccatcccactccctcctgcaccactccctcctgctccatatgatccagcatcacctcctcc

SEQ ID NO: 165997 - DNA, 1482 bp, Zea Mays
gaccttgaagatggtataatttggtctttgttggattatgaaagttttagtaatttcatgatctttccaaagagtattggtttgtaattttcattgtatataattggagttaggctgctctgaagttgttgcaccgttgtgtctgaactttaggtatcgttataaccaccaataaatcgactgtgttttgatagtttcatagcccaaatttgggaattctctttaagcaaaactttagttcttctcagtaccttttaaatgggtatttacttgtaattgtctgttaaatagattgggagaggtggttgtccggttataagtcgaatctccaatgtgcagtatctcgggctgagtttagctgtaggtcatgcagagttgagggctataaagataaatttgggtgcaactttattgcaaaagtcgtggacaattttcaaacttttccaacgcgtgttcgttgtagttttaagttgagtataggaggagttatatgtttttgaattttagttgtccattgtttccatcctttcagttttgcaacaaaagagttgcattattttatcagtttgaaaacgaatttcgagacactcattataataaaagttttacagaatgttataatcttttcaatgggtttatatttgcaaaattctgttaagctgcagggagttatgatattttgaatttatgtgtcatgtttcgtcagtttctggtggcagatcatgtatgtcgccttacaagtcaaattaaaaatggtagatgaaaaaaaatttgtttatcctttgaatacgaaagttgtagatcatgaagtttagatgattttacaatatttcattgttaccattgcttttatagtgagaggtaggaaaaaatgaacatttgtgctattgattgtcaattttctacttagtgattttttcatgggagtttggtttagttgtggtgagctctttcgcaatccatgttaattaagttgtatggtgggagggaatagacgtagtgattgggatggttatcttgtttatgtatatgtggagcgtgggctgaaacacggagataacaaggaacgtttgaataggccaatatgtattgttgtgaagccacgttttcttgtattggcgtgattgcgtaagtatgaaatagatacgtcatgtgaagtctaggttgagatgcaatttgtctaagttattcgatagatatatatgtatagtataattaaaaaaaagagagttcctatatgggatgatataatgtatagaatgtgcttggatgaatatgtgggcaggcctaacatgcttaaacagattcctgtttgtatgatgtgagattaggcttaaatggtttaaaaagttatcatattgcctctatacttatatttgttctaagtatctcgtaatgaggaacctaaagttattagtctttcgatgaacgcttaatcttagaagagtaatgaacctgaataaaatctattgcttgttgttg

SEQ ID NO: 165998 - DNA, 711 bp, Zea Mays
atcgattggcggtggccactgtttcatagtgctccggtccaagctttagtttagctagcaagcaagtggcgcggcgtcgcccaagcccaacgcaaaaatctcggcgctagctccctggccacttgagcttggggtcactcactctaggtctctagctagcagcgagcaggcagcacacgcacgccgccatcgatccttggctgccaacgcaagtgatgaaacgcgcacatatggatggtctggggtcgtgttgctgtcgatcgccgtcgccgggccggaggaggggcgggaccggacggcgacgcgtacggccgtctgaatattcgccggcgatgggaattgttgggacggagtgagtggttagatgcccggcggccccgggccacactgcgagaggtcagaggagagagggtcccggcatggcatgcatgccggcctcgcgctcgctcgcatctggctggacgaacaacgccacatcatgcactccaacaagctggcaacaacagtaggtagctagctgccatccgtcgccaatgcataatcttccatggtccgacccgagatccatgtgcagcgagcgagactgaagagatgacatgcacgcagcggtgcagcagcagacatagagatgcgattcaagtattcaactggggttcacgatgtaatgtgtgttcatcatagttgtacatgaaacctgagcccgtagacccg

SEQ ID NO: 165999 - DNA, 385 bp, Zea Mays
gggccgcggcaatggaactcgtggtcggggccgaggacgggcgcagcagccgcgcagattttactgcttgttccacggcgaagactgcacgcacccaacaagggactgcctggaaacgaaggccaccagagacaggatgtctcgggcgcaaccagccgacaacccaagagttgtcgcgcacacatatcaacaacccccacaaccatacaaccatggccccgttccgcatccacctaaccacgcataccaacaccaccaggaggtacaaaatcgtacctcccccactcccaccaccacacccgcaacagccaaacatccaccaccccaaccaccccaagcaccaaaacaagaagacttcgctgatcagccgtatcgcgaagtcatt

SEQ ID NO: 166000 - DNA, 844 bp, Zea Mays
gtctgatcttcccagtgcgaggaccaagtgccggcgacgaagggtggtgtcgaagcatagcgttggcgaggttttgcgaagtggtaggcgccgtcggatggggatggaacgggaccatcttcgagtagatcggtttggtaaacgagagctactgtcttcgtcgattgggatgagcattggtgagggggatctgcggaatctttttgagggtgaggaattgaaaataatgttgttcaattatagggaggcgggcatcatcccgaaggttgagccgatgtagtatgtggtgccctcgcgttgtctggcggtaatggagggcgtagttgtgtttatttgtgcggtgggtctagtgacccttcgctgagtgtatgtaactacaacttgtattgtaatgtggcctgttggccttctttgagtgagagactgtgtcgcacacttgttgtgctaatccggctgcacccttaggcgacttttgcatggagtgtccttttggtaaaagacttcggttgatgcacttgtcgtgcttatccggctgcacccttgggtgacttttgcacggagtgtctttttagtaaaagacttcgattgacgcacttgttgtgcttatccggctgcacccttggacgtcttttgcacggagtgtctttttagtaaaagacttcgattgacgcacttgttgtgcttatccggctgcacccttgggcaacttttgcacggagtgtctttttagtaaaagacttcgattgacgcacttgttgtgcttatccggctgtacccttgggcgacttttgcacggagtgtctcttaataagacttcgtatcccgcatttgttgtgctagtccg

SEQ ID NO: 166001 - DNA, 701 bp, Zea Mays
ctgagcggcagtgcacacaccgggttgacgacagcgccatcgccggtgatctccggtcccgcatcccgcgcgccaaactccgattcctacgatactacgcgtggcagatagcgaagcaaggcagatggggatagttctacctcgaatcgaggcggcgacagctctgtccacgtggcactgcagctccgcggcggcgatcgaacgtcgtcgagaaatccggagtgctccgttggataatcccactcgaatgcgccacgaacagctttgggcgttgcccacgaaccccccggacgccttgccacggccggacacccccgcagtactaatctagccggcggcggatctcccttcccttggtttgagcttgtcgcggtgctgcgcttgctgtggtgtacgcgtagaggaaagtagaggagaggaggaggtcgtgggcgcgcccggattttatcccccgagtcctcggagtcagggacgtggtccacccgtgcgacgcaaggatgagatccgcgcatggcgcacgagctattgacgcggagcgaaacagaaatagcgaagaagggggagagataggaatgacagagggatcccaccgatcaatgacttagcgccaagcacggggagaacactcggccattgacgaccggaccccgcaacatagaaccagctcgcgcgtgcagcgtctgttgacccgggcccgcctg

SEQ ID NO: 166002 - DNA, 638 bp, Zea Mays
gccgataggtaggccccacccgtctgcctctctgcgcattgtatcctcggtgccgacatgtgggcccatcgtggcagcatcacaaccgcgtgcgctcaccctcacgacctctgcctgcgggacccgcgccccagccgctcgctctcgcttgtccctttgccgcatgggtcccactggtcagtgccagccccgctccactgcgtacctcgtccacccgcgcgcctggtcaacagccctccgcaacagacgcgagctcgacgtgcgcgcgattcgcgccagaggactctgattccgtggaaccacctcgcgggcgccctttaaacatcgaagccaaacccctccgctctcctctcaaccaccagcgacccgagccatccattactagctccattgacgccgtgttaacgaaacgcggtccacgccatagcggactagcgctctggccgtcgctccggcctcggctaggcttctggggccttcgttgaggctcgctggtgcacgtgatttgctcggctggcgtgatttggggctggggtgcacgcgatttctcgccggtgttcctacgtcgctgcaactccgccccgcgccgtggactgggtaccgtcgcggccaaatccctggtgagccatcccctatcg

SEQ ID NO: 166003 - DNA, 1189 bp, Zea Mays
ggagaatggtaggattttttttctgatgaggagggtggttttgccaccaaatccgtatagggtgttgttggctttttgtagcagattgtggttgatgcccattctattgaaggcatgcaggaaatgatatcttcatggctatcatcatcgacaagagctttgttcagttcctagctagttatgttgcaaattatgaccatggtgtctgtgtgaggggcacttcgtagttctacatccttcgcatcgaacattagatggacgtgggtccattttgtttggacgactagcccaatcagtgcgacgtggtttaccattcaatagtagtccttcttctgccatttgtttgcgaagtccacgctggagcctcctatgatcatgttgatgatttcgtggacaagtggttgggggaagacgtattcatcttttggtggaggtggtggtagttggtgggttaggggtattatttgtggtggtggatgtggggtaatctttcttggtgaatggccttcgctgtttgttctggggttgttctatccattatttctttggtctcttttgtgatagcgcaatctttggtagagtgctcaatgtcttcgccgtgaaaaacacactaaggcttgtgattttgcgtggggcccctaccgtgtccatgaaccctattagttcttcctcctcatcctgactgttgaggaagattgtgggcatgatagggttcttcggcttgctgtcattattgactggtgatgttatggagttctgatggttgtgaatttggtgatgctattggctcccaagctaggttttgttgtttgtggcatttgaagtctccttgggctttcgttgtgtttcaagcttgtggtaatgcaactcctctaatctctcatactttttgaagagcttacataactattgtagtgtgtttgggcgtgtctggtgtgatgactgtaaaggtcgcctatgcgatggccgctaattgcgtagtggattgcaatgcggtcttcaactaacgagagctgagacttcataagtagaaacctattgtagtagtcccaaaggctttctttctcttgcttcctacagagggataactaagtgaggctatcagtatttagtctatacccttagaaattaagtaggaatttgtcatgcaatgccatccttgattctttggttaggggtggcaaccttg

SEQ ID NO: 166004 - DNA, 1007 bp, Zea Mays
ctgggcatggccggatggtccgcccctaggcgcggacggtacgcgattagatcagaacatgtgtgattaaccacttttcctcgcgtgtttatccctctaatctcatgacatatgttggggaacgcctagaaacgtgtccagacctcccccttatatatatatgaaggggtacgaccgattgtgtggatcaacaatcgaatcaaatcaatatatcttttgtttcctttacttgtttccctaggagtagaaagtaacatagccttcttcacctctcttctactctacgtcatctggaggcatcttagatggcctgccgatcctaagacagaccctaggatctctcctccctgatggggtcccttccggggggcgatatacaggtgccattgtgaacgttgccacactacgcacacgcagactgtccagccaccaagcgtgaaccgtcctgatcagcataggaaaccccactcctacttctaggttacggaccgtccgaccctaggaccaacacactttttggcgacttcgcttgggataaggcagttagatccattgaatcgacccctaatgaccagtcgtatggaccactccaatatttcccctagtaatatcatagagccaactatggaggcactttcagctaatgaacaacaggaattcgaggagcacatggagcaactgatcaaggcggccacgacgaattacttggccaatttcaaggtgggcaggaaccagaaagtcgttcgtatatgggagactaacttggcgtcaatccgacctgctgcgacaacccccattgtaagtaacataggcaacacccaagcactttgatcttacatagatgaacaacggggtcgaatggaacatatactgggggtgtgcaagaagattataggatattagcatgtgcattcgataaatctagcattgctagtttttggtcacacaatgtccaaactatagataaccaatatgatccatcgtctgcaaatgagcatgccccatcc

SEQ ID NO: 166005 - DNA, 443 bp, Zea Mays
tgattgtagtttggttgatgttgggggtagtatgggtgttcgttttgatagttagggtggaggtatggtgtggttggtaagtgtgagtaatggctctctggttgcttatcgtagcggttctggccatccagtctttgatttcttttgtttctgggcaatctttggttgggtgcccggagtatttgccatggaagatgcagtaaaactttcttggcagatgggggcctctacccccgcctctgcctcttgttgcgttgctattgggccttgttgcgaagggtagttttgcagctagggatggtcttcgcgttggctgttgttggtttgtgatattgtggacctagagttgttggccgcactcttggcagcagggggggtcttgctgtggaactctggtccatgtcgtgctggactgtggagtctctttcgactttcgctgcgac

SEQ ID NO: 166006 - DNA, 444 bp, Zea Mays
tgctctattttattttatatgatacacttgtactcttatcctattgaaaccgacctagggctttattaaatcctggatccgccactatgttaggtattttgatacacttgtgctctacccttggtgtggagcgtggtttcccctatttggctatgagccacagttgatttcgttagtcatgcatgcgaggtgcgatattgcactctcgattctccctggctggtgtgctagatgtaatgtctcgtaatatatttaaggaatagttcgttccttggcgatgatggacatggatgctactgtacactcgaaattcttaggtgcaacatgtacttagcacagggagagacgtggttgatagtttatgataacaaaagaggcagcaggtggtaaacacattttgctttgatgccttgacgtggatgtagttctgaatatgcgggagcc

SEQ ID NO: 166007 - DNA, 868 bp, Zea Mays
gtaatgtccacaattacatctgcatatacatataggcataaatacaaataaataaaattcataagataaaaaaatctagattatcctccattaaagtgtatctactttaaatagatccctcttaacttaaaagattctctcttatcttgatagatccatcttatcttaaaagattatcttttattttaatagattcatcttatcttggaaagattgtatcctattccaatctgatctagatcccatctaatctaacatgatctaatccaaattgagttacttaaataagttagataatgttggcgacataaactatgccctaattctataaacatatcttaccctaaattaataccttggactaactcgtccgtaaacaacaacctaacctacatcataggctgcctaatctagatatcccaaaagcaaagtaaaactctgtttaaactgaactacctcatgtaccccggctatcctaaccatatatccttagccatatgtccttaactcggatgacaactccaagaataaaggccaaagaagaccaaccaagtcaaaggaggataagcatcaactcaattattcaaagatcaagttggatcgccagaagaatcaaggtccagagtttaggatgaagtctttccttactatacccttgccacaacccctacttgccataatcgtacctcatctgacctaatagatggctagacatacaatatccatatgttccaaatcgtctactaattgttatgtaaaaacttgaacaaaactttgatttccaaaatccaatgagaaactaaaattctaaaccaaacctattatatcccttttcttacaaatctcggggacgagatttctgttaagg

SEQ ID NO: 166008 - DNA, 1778 bp, Zea Mays
tataaaatctcagaaggtgttttttcctcaaaatgtttcttaatgcgatttaagtttttttcctgacatatattcctttcattccatgtaggatcagcttcaacaaaaggccaagcaagagtctgaaaaatttatgtcttggaaggctgcccctgaaaaggaagtaatacaggtacttgttcttaacatgttgatcatgtttatgaacttctttctcaaagatctcgttgtgatagtgctgtatatccattaattagctcaagaaggaagggagacgaaatgaatatgacatgcacaagctcttggctttaaatcagaggcaaaaaatggtaaattcttcatttttcctctttcagctttaagatagcatgattgtcgcctacaccattctgcttgaaattgtaggtcttacagaggaaaactgaagaagcagcagctgctacaaaaagattcatggagttgctggaagcaaagaactcatcacttgagacatatggtaggaagtgatgtccaatggcttcatatttttaccattaggtttcatgtgtgctcattattcctagctggttatacttttactagttttggtttcttgtttttacaggcagtggaaatgcttcggggatgcaggtatccttcgagaaatctttgttagggaatgaataaactatttcccatctgtgttctgtaacgtgtctgaaacattatttttatgtcactaggccttaatgcgagctgttgatgatgaactggaagtcactataagagcacatgaattacgctcgtattaccagcgacaaatgcaagagtaagtctttgttttgcattgataatttgtagatcctgaccttctagagttttcgttattttgtggtgcgctatatgcatgtatgagcattatttttgggcaatttttttatgatgagatagatagatttgtagttattcaattaaatatgaactcaagataatttgctattgtgctcccttgttgttagaccacttgagaattagatttgggccaatccatagggcagtgactataaatattgaataggtttgcttccttctgccatgctgtttgatttcccaacacataattctgtgaagagaaataatgggctagtagtaagattttgcactaaccataatataaattcaaattcctggcgaaaccgtggcatcattaactgtctccaaaaatactgacttgatatacctatatcaatcattcaccccttttctttctaaccttagcgacataatatgtgaactgtagttgaaatatgattaacctgagcagcataatatttatatattaatatatgtactgtaatttaaatatggtggattctttatacattttgtacaacattagctttggacaactgcccctgtttgaaatttcttttttcctccttaaaacaggagagcagcaatatccaaggaaatagcaaagctggaggaggaaccaaagcacaagatgaggtttggtgatttacatctcttttgcttttaggggttaagtgatctgtttcagtgtctctgaattgtcgcttattagctgttatttctgtagtgattgtcctcaagctatgtctcctagtgctagaagttttaggatatcagcattagagaacatgtcctcatcatcaagcgctatggtgtctatggcttctcaactatcagaagcagaggagcgggagcgggtattcaatggtaaaggtagatggtatcatgtcaggtccctcccagaggcagagaacataatgaaccac

SEQ ID NO: 166009 - DNA, 507 bp, Zea Mays
cccgttcgttttttttaaatggtatgttccggttgtatgtactgctctccatttggcaatactgaactgatcttctctccacagaccactgatacgcacatacatattttattttgtttctcgattcacgtatagaaaattctagcgtcgcctgagaacgcaaagggcagcgatttgctactaccggccggtgctgtcagtgcctcgcgctggtcaaagatccacgccatgtgaaggtggaacgggaattacatacaccagttgaccgagcatcgccggagcggaacaagaatccttcgccggatacggtcgtccatggagagttggcaagttggctcggtccgtagcgtgatccaaattatgtatatgaggctgcgttagcgagcggagcagagtggagaaccgtcgcggaaaggcttggaccggagcgtaacgacatcaactgatccatcggcctacagccctgcacgccggtatatatattagtaaccctaattagggtttatg

SEQ ID NO: 166010 - DNA, 730 bp, Zea Mays
aaccaccaaccaaggatgccaaacatagaagaagtagaagaagaccactccagccccacctccccctagaatcgatgattggtccgacgccgaggatatatccctagcaagccttgatgatcttctcaaggaatttggggataccttagagaaagagttcggtagtacctcagggaacgctctcgtgtagttcaacctgtagtagtcttatgcttgtaatgtattggtgtaatgaataaaataacttggttgaaaacaatttgcatgtgcataatagtgactctcttccctggcagatggcttcggataaaaccacgcctaccgcctccaggattggagcagggtttcccctgagagctgaaggggaagccgttagagaggaaagtgaacccacctccccgcacctccaccactacccttagacctagcccaagttctagccaatcaaacccgactcatcaaggtcctcactcgaagtctggaaaatcaacggccaaatggtggaagaccgcaagacataatgggggatttcctaagactcaaacctcccacgttcgccggatcaagcaaccccctcgatgcagacgattggatgcgcacgatcaagagaaagctggaagccattggttgcccagaaaaccagcatgttcaactggctgcccaccaactttccgagatggccttagcctggtgggacaccttcaacgtcaccatcagagatgctacctgg

SEQ ID NO: 166011 - DNA, 880 bp, Zea Mays
taggtttctgatgaccctggcagataaggagggagggccctcaaacttatgctgacacatcaaacagttctttttctgacaggagccctgcctgaacccagccctagcttcacgcagcctcttacttctcctcaggtcagactccacaatggtaggcttggagggggaggacaccgaatatgtcggatcagagactttaccagttgattcttctgagaggacagactcaaggaacttgccatcaggacatttcttagggatggcaaaagagtgaatctcagactcagggtccagcaaagcagaaggaatgtctaaagaccagaatgatttcgaccagctgaaggaatcttcatgtagcaggtttgacaggaaaaaaggagaccacttcttagggacctgcacagagaagtctggattaccagcaggagcaaaatagttagcctagatcctgtagaattgggcactccttttcctttccatgaggctcaggaaaacaaggtctggctgccagtcctgggagagcatataattcatcaccacattgttgggaccattgttgatttgttcctcaggttgggcatcagggataagaatatcccccggcacatggaggtctccctggttgggtgggccgtcaacctcctggagcccattcataggaacatcacccaaagcaggaaggtcaggagcattaaagtgcagcaccggcccaaccacatcttggccctcaagaatctgcccattctgcaccggaacacccaggatgggaccagaagaactatccgaggacaggcctaaatgctgattgctgacttgttgctcgtcaggttgcaggtcttgctggggctgctgcgcaggtgggtcattaacaatccactgg

SEQ ID NO: 166012 - DNA, 1069 bp, Zea Mays
gctcaaacaattgctacacacgctggtaagtggtcggctggatggattgaatgaaaggcgttactgtgtgtactattttctaattattgtgcgtctctgttcctcttgcagtctcgctctgactttgactctgcgcgcggcgcgtccttgtgaagagttgaagacaaaagcttggcacatgcactgcacgtataaaacaaaaagatacaggatgggggttgagtgaaagacgtaacttttttcctccttcgaaggccacacagggtatacactagagattttcagtaagtttaagattcatttttgtaggcatcgatttatcacatggcgaaaatcttgtatgatctgagttgttttttttctttttgaactactgatggtcacaagtgcggtggctgcttaatcttaaatcaagatagatacctgtttaatgaacagcacatgagactaactaaatcgatttcaaaagaatgaacccaattcagttccaactatccaagtaacctgcttcttcgggaaaaaaaagaagaagatctggagctatgccaatttattgtcttctgctagtgcaaggaattgggatcggtgatgttggtttatagcagtaattaagatagctaaattcagcagcttgtgttcatagctccgtcgtctctgcttgccacaaaaaaaaagatcatagtaaacttaaattcaattaccacaacatcatctactggccgattcgaagtgacttgctatcccaaatcttagttcagtctagcttcatgattgtctttgtgatctgatacctttttgcaagctttttccccctttgtgattgtctttgtgattctgattctgacgtagtttctttctttctacagaagtgtccgtgagaccgtgacgtgctctcttgtagagagtgtactgccacagtggacgaggtgacatgaggcgatgtactgcacagtggacgaggtgacatgaggcgctgttgttgtactatatagctagccgcgcaatcccaattccaattccatagctgcgctccgcgtctggctcagatgcacggaccctcgaccaaaac

SEQ ID NO: 166013 - DNA, 1297 bp, Zea Mays
atataactctgagccacatttcagtgacataatatcagtgtctgaacaaatttggagacttgacctcggaattgccatttagttttctttagaaatagaaacaataatttattagattgcttactgtgatgaactttgagaaaataaaaccaattgcttttgatgacatcaagttaattgtgattttcatgtgagatgaaaatttcaatcaacaaaatcagtataatgtacatctttgctcaaatagcaagataattttgatcatacctgtatgttttcaattgacaattatacttcacatgttatgtttatatatgtgttctgaacctgccatgctaagagtaccttgaaagcaatgctttatgattttttttttggaatactaagttttccttgagagttgagttggagcatgctctttatcttttgacactagatctttagaagagaaccagtagagaagatctggttattcatggtttaccttgaactgtacttccatttatccttttagtccattgttggttccatttgtactctatttctgacctaggctgcttatatacaaaaaaaagcacttgtctgtacacaaatgctcatgtggagagacatatgtagatagaacagaatattgcatttgtattgtaaggtcatcatgaactgtctgtcaccttattctccacgatcatgaacaaattagaaaatgaacatcctggtgcctgtcatcttatttgcaaaacatctcttgcgcagtacatcgattggtaatatctcttgcatgggcagagactgtggaaggcaatggttatttttcaaatctgatgagcgagtcattcagcccactgcttgaccttgaactgaataccaattctcaagatcaactgtcacagaatatggtagcagcaccaaccgagagaccaaatcagagaagatcaaagaatttcagcgagcaggaagatgcactatcggtgtcatcttgactcaatgttagcatggatttagttaaagaagcaaccgaactaggagcacctattggaattgaacctatgatcacacttccattccaacgaggatttcccctcaacgagcaaccaaaatcctctgatgcatcgttggggcacaatgtaagagaatgccaactagttagttggatgcagacacaaattaactgtaggggccaaagtggtatgacgactacacaagaaaggtatggattacatgtgttctctaattccactgtgcatatctatgcatgcaatttcatgctgtactgacttcaatctgggtgtcgatgtcg

SEQ ID NO: 166014 - DNA, 487 bp, Zea Mays
tctgtgctttcattggcacaagggatataattcaagagcacataacctaccgagtgtggccacttgtggatagctgggagatgccgaaggagactactgctgaatccagcgaaggtggattagttcgattaaaatacaccttcagataccgagagaagttcaacgaaccaaatgatgactggttgaaatgcattgaggctactagcgacgagttgcttgggacatataccagggccgaagatgatgccttgtcctcagccttcgagggtcggggcaagaaaagattgaacagggtttttgatgcaattggcttcatatatcctgattactgctaccccttgagaaggcaaggaaaaaagaggaaaacaaccacttcggccaccactaccgtgccaaagggcaagaaaataaaggttttaacccaccgacctcgatatattgaaatggtcgtagtgcctgaatttggtgaagggacctcttccactac

SEQ ID NO: 166015 - DNA, 720 bp, Zea Mays
ttccgaggccctcgtcatctatccttctttgtagacgatgaaagctagactcccagagcgaatgactgtcctaggagtccaggccgcaccgctattgttgctagccatccggagcttggatgttcttgacgcataacgtgtaaggcccctacctagcatgccaactatcggtttgtcgtatatcgctccaacaagtaaacttattgtgagcattctagcctctagagggtgtgcgcagagggtgaaagatttatactagtttggaaaaaacgttcctacatccaagcatcgatggcttgcgctactagcaccattgatgatcaaactcatagtaggggttacaagtagtcaagagagggaggagaggctcctagatctcttatcagggtggaaatggagcttagaagctgagaggtggagtcctagctaagtcttggcttggcgaggctctagcctcctagtcctcgtcgatgctcctcttcctgtttgtccttatgggctcgtctccgtctgtcgaaccttctcgccttgaggccagcttctcccttttataggctaggactggggtcgatcagtagtggcttccctaggaaggagttgtagttttacctcgtgtgagtccacacgtactcgtgaggcctagggctgcttggctgccgcgaatttatcgcgagggcagcgatggtcccaggcgccatcatactagctatgccgacccct

SEQ ID NO: 166016 - DNA, 643 bp, Zea Mays
gcactattgagatgagtcacttacggtttacaaaaagaacctccacgttctattctttcgcagaccaaagtccacgacgaggaacagccctcgccgcactccggcgagcttattccggtcggatgacgccaaggctggagctcccgggcgacagggacacaattgaacccctactgaacacttcccctcacttaatttcgcaaatgggtgcctggttggctctggccacggtgatcgtgggcgttgcggacagacaatcgtgttcccgacgaccagtgggtttctagttcaattgggcgggtcggtgagtatcaaggacaagcatgggtgctgaaactagaacacaattggcaaaatcggacctgatttgagcggaccacggcgaggttagaacacgcggtgttcttgagcagattgggggaaatgcaaaattgaagctctctggtggagtatttgaggtacgggtgagtgcgctagatgtgtgattacataacgaagttgatggtgcactcaatttatagaccccgaggtcggtagctctcaatttgaccgcgatgtgttggcggtcggagatagggaagaacacggtggttgtaaccgtggcagtcaccggtgtaacggcgcaaggagaatactcctaagg

SEQ ID NO: 166017 - DNA, 377 bp, Zea Mays
tggcaccatgagattgagcagttttgacgaagtcaaggagacgatgcaaagcaacaccttctaggctttcaatttcactgataatagatgcccactctttgccagactacaggcaacaacatggccaaccaactacagggctagaaattggctgaagtacaacgggaaggctaacccatcgctttttattatgagttatcaggtcaaagtggcctcatccgaatgagatgacaatgcaatggcgaagtctctcatcatcaccctggagggccccgccttaacatggtgcatcaggcttcctccgttgtcgattgattcatgggcggcccttcggcacaaattcctcctcaacttccaagggtacagacagcaaacag

SEQ ID NO: 166018 - DNA, 463 bp, Zea Mays
ggcggacctggtaaagggcatgggtgtacacatatacattcaataatgtttgcaagagagactgtaggttagtaggaataatacatgtatacacttgtaattataaatcagatacgaatacagccaaatagtgtaggttagggttagcgaactcaattccgcgcagcaggaatgggagagcatgtggtgtgcatgcctggcggtgctcgtcgccggcgaagggcccgactaaggcctggaggcgaagacctggcgaagagaccgatcaagaccagggcacttggcaattggcatcggcgtcggtcgcccagttgtcgccacgagcccacgagtgagcgagatcacgccgagaggacaggtgtcgagagatttgagtggggcggtactgcggaagcttccagtcccagagttccagtgcaggcaccaccgcaccaggcagtgatgtggttgggctgttttgatc

SEQ ID NO: 166019 - DNA, 646 bp, Zea Mays
gaggggctcttcagcaaaataccacggtcgaaggggtatcgtggttccaaggccgatggattcgatgtgaacggaacagaataaatctagcgcccgccaaccctgctagtaaccccggccacccgatctaatttctgcggcatggattcaatacgacgaagaggtatccggcatctaatcccagccgtccctttggatctaacatccacacaacttctcccctattcccgctttctcccaccggtgccagctcgacggcgcaagacagaggcacggcggcgccattgatggggacagacccatccccacacggactcaagaactcccatcccgattatgctacgcattgcggaggccaaagcgaacaccatgtgaccaaacacttaccggagacgaagtccgagcggcccagccacggtggagcgtcgaccatggcacaatatccgcgacgacgaggagattagctcgcccaagccgccgattctgccaggtgagcgggcgcgcaacatccgtacgacactgcgaagccaatcggcccaatccctgactctgaatggcaaccaccatggatttcgcccacggcggaactccctggcagcggccattctctctctcctctcggtttactctctctccacaatgagat

SEQ ID NO: 166020 - DNA, 639 bp, Zea Mays
acatttagctacatccgatgttgtttaagactttagatcacttgtcatttgaaaagagccggtggttacaatggccaattgtgctataatttgtcacctaaatacacgaggatttagtttatatactaatgcatattaggctcgtcccatatttgtcaaatatggaataaatacgggttcaatccgaaaaaaacgggatcccgcaaaaacggatggaataagctctctcccgtttccgtcctgtttccatatttttccgtaaatacagaaacagtcgggtcaaatgtagaaaacggtacgggtcgggacaggattttttccatccgttttcaaccctaagattgagttcctttatgctccttgagtactcctgtaggttcctagctccttagggagggtttcaccaccaaaatggccatatctccaaaaccctaaaacaccgcacgccacgtgctctgtgaaatgcccaaaccagctaaaattgctctgattgaacccaaacttttcaggcaccttcacaatacctccagtaacatattcgccaaatttcacgccaatccgatataccaggcttcaatttcaaacaattcctcgtttctagcaatcgattccgagccgagtgctcaaattccattttct

SEQ ID NO: 166021 - DNA, 505 bp, Zea Mays
ccccgatgcgatgctctacctggagatcttcaagtgtcttcctcattgcctccacagcctgggagcctagggccacttgcgccgcctaggctgcctgcgctgcctgtgccgcctctaactggcggacccactcccctagcgtccgctccttctcctccagcgcttgctccttctcctctgcctcgagctcataatcggccagcagcttatcccgcctctcaagcatttcctccctaaaggtgaggtccttctcccgccaggcgagatccgccgcccgcttatccagggaggcatccttctccttgaggttctcttcggccagggcaaggctgctagccctgttatcaagcccctgctacacctttcataggttctccacagccgcggcctgctggtcccgctgctcctccagcatcttgttgtaggcattcagcttctcctggagctctgagatgacctcctctctctggcccaagtgcacctccttcttggccagcctcttctc

SEQ ID NO: 166022 - DNA, 674 bp, Zea Mays
agattacgtccttaaaatgcacttaagaactctacctaggtacatcccccaagaacaaagaaccagggctccgccttgcccgaggtccacatcaagggccttccccaaaactctgccccaaccgagcccccccatgagggtgttccaaaatctccggcttacccaagatcgatctcgagtagaccacatgctcgggcagatctccacctcgctcgagcctctcgcgccctagggcctcatctccgcctcgcccgaggctacctcgccctaggactgccatgtctgccttgcctgaaccagtctcaggcgacgaggacaaagcatgcccgagggccaatgggggacaactatctttaatgcgcatacctaccctgcccagcactacaggtgcacagtggcaacaagactacggtcttgtcaaatattaacatcatgattacgcatgcaccactgtgcatgcacgccacctgccagcccctcacgggacatgtaatacgacaggagggcagatcggccctcgggcacaaattccgcctcacctgatgccaagctcaccctcggatccaaagccccctcgcccgagctcggctatctgttccaccacgaatcctgcaggaggccactccgtcgactgtgtcgcacgtcagaaagggttcgtctatcacctcgggaag

SEQ ID NO: 166023 - DNA, 657 bp, Zea Mays
ttcgtcggcgaggagtatcacaaggtacgccaatcgcttggtcttatcttcctgctctacgaaaacaagcacacaaacccaatttactatgttacacccttggcttccgacgaggtggacgaggcgtgaggctgacggtggcgctggtagtccgcaaggaaccggatttggacgcgctctccctcgtcgctaggtaagagacccaggtaaggaacatataagtggttgttctgattttggatattagccaatttccccctccaatctgttactgatttatatgcccttctagggatcagcagatcccacacctattacatgatttgtccttctagaatagaatccgctttctatcttctgaaccggcactgccttcttcaatatcggccaccggtcggtccacctcttcaataatcgtccttcacttcagttgtgagttgtgacatactatttatattcggatctgatctattacaagtatacatgcatattatagggtgtgcgtctgtatacccatgttctttacaaggttcgtccctaggtgatatgagtagtaagtctaaacttgcttcttaccaagagttaggttgtatgtgtgtatgtattttttagtacaatagtattcaagctgatatccaagtagggatgtttcatcac

SEQ ID NO: 166024 - DNA, 1031 bp, Zea Mays
cccagtatagcgaagttcatatgtagaagtacctttcaagtacctcattacaaattctagtgtgcactagtgatcgcttcccagattagaagtgcatatgctcaattttcttacaacaaccgagatatcagatctagtcgcaccagcaagatacatgagagaaccaaaaatttgggagtatctcagctgattaattatttgtcctttgttcttgtgaagttttagactaggatcaaatggtattggggaagctttagagttagaaaaacccaaagcgattcagaatgttctctacataatgagattgttttagtgtaatctcattctcacccttaattagttttatatttagtataacatctgcctctcccaaatcctagtcctaaaattactcaatgcttgtcccaaaatccagtgtgtcatccatatacaagcacaatattactcccttaccaccaacgaaccgatagtacacacaagtgtcaggtttgtttaccacaaagcatgctaacatcaaagttctatcgaacttttcatgtcattgctttggcatctacttgaagccatacaagggttatcttaatctacataacatgttctcttgtccaggtatcacaaatccatatggcttcttcatatagatctcttcatcaagctctcaattaaggaaagttgtcttcacattcatttgatggatgagtagatcatgacacgcagcaagtgcaactagcacacaaaatatgatcaacctcacaactggtgaataggtatcaaaataatccttgccatctttttgggcaaatcccttcgccacaagtctagccttgtttttatcgatagcaccatctagttttagtttttcttgaatatccacttatatcccacaagtttacacccaataggcaagtcacatatgttccaagtgccattttttaaaatgaactccatttcattacgaacttcctccttccagcgctctgcatctggtgatgcatatgactctgcaagggtttttggtgtatcatccacaa

SEQ ID NO: 166025 - DNA, 486 bp, Zea Mays
ggcgactggtcgacagagagggagatcttcggtagatcggggcactctgacgaacaatcgcgggcgagaaagcacatggcaggggaaaataagggcagaggtaggaaggttacctcaagtggagactcaggggctcacgaacgaaggctggggcgtggagaggacgcgggtcgacggtggcggttctccgactgcgcaagaaattctacggtcagcgtggaccggatgaaccagagggggagaaggcgaactaaggggtgttccaagtggtgggtgatagggcagagcttaccgaggcaacggacacgacggaggttccgcgacgaccgtataacgggcggcgaacatcgttgagcggcgacggagctgcctaggtgcacgcgcagggcgagagagagggcgagggtgctcggttgagggtgcaaatgagcagggggaagtgggcgagcggggtgcgggctctaaagggggccagggcgtgaggag

SEQ ID NO: 166026 - DNA, 663 bp, Zea Mays
cgctcgcgggactaacggagaggaagagagaagaggggggaactcaccggagagggagaagacggtggcgctctgcgaattgcgctcggacgagggaggagagggatggttgtggctggtgcggggaaggaggagctcggggcggcccttttataggcgcgcgagggaagggggggcggtggagcttcgcggctccggtgagctacacagtgccggccataaatgccgcacagcgccgccgaggggacaccacggcggggcggtaccggcgaggacgctggtcaaggggggaggacggagcggtgccaaacttccctgtgcggcgagaagacggaggaggggacggaggcgatggccggaggtgaccgcgatgaagggactgtgggaggacgacgaagcagctgacaagcggggccacgctgccagtgggagtgagcgcgcgagagagagagcagctgacgggtggggacgtttcgccagtgagagggagggagagcgctgggcgggctagcgcgcgcgggagcacgcggggacgagggaagaaggagcgcgggcacgcggggaggtgcggccgcgggtttgggctgggaaaacggcccagcgggggggaggagggtttttctctttatctttttattttctaaatcctatttccctttttgc

SEQ ID NO: 166027 - DNA, 592 bp, Zea Mays
cctagctacttaataatctaatatgtagtgttgacattagggtggtgaagcggttcatccaagtcaaatcagcaagaacacaagtataatatctttggatggtgagagtggagaagttttacagagttacagtacatgtatcacgtcgatcagacaatggtgtcgtgataacgggatggtttatgatacctcagagttgtttggacaatatataccatatgtgtttacgacaccacccaacgacacgtattacccggtgattcagtaccacaaagagtcaattaagttggtgatatatggccgagatctgtacatggttggatggagaggccctcacggaaactacgagataaaatctgactaccagagtgcaaactacatgataggtgatgtcacttgtaggggcaaagaggtgctatggtagcatatctcctggacgtgatgttgggaacacaagactaggcctatatgaactaaagagggcattctgagaattattcagatttaaaggagggagtgccggaaaaagtggaagacgcgatttgccggattgtcgtcttaatcagtgaggcaactcggctgcaaggtgctt

SEQ ID NO: 166028 - DNA, 627 bp, Zea Mays
ttgagatgattctttcaaaggggtacgagcacgcctaatcacagccctccgaaacgaatcggacggtgccggagtcgtctccccccagttggtcgagatggtggcgccgcctcacacgtacggtgggggttcgccggagcggacggattccctgcccaaaggcccccaattcgatgaccgatccaagctatcgcgagagagcatgaaggcgaacaaaatggtgggttttcttaccgaaatcagagattgttgacccccaatcgcgatgcggcgcggatccaagattggtgacgatgaccggcgaggaattgcctcggaccccggagtccccacgcccgcaggttttcagcacaagtactacgatcctcggcggcttcccggactacacacaaagggggctacaacggtggcggtgaatctcccacggcggctgccctctcttcaatctgtggcctccgctggaactagcagcgcacgcgggatttcaggtcagctaaatcgggaacaacaagggggagttcgtgatggcacgacctttatggtcacggattagcgccgtgatttgagccacgaagcccgagtccgcggagcgattccgccattgtcgggcgaatcggttgagcgcct

SEQ ID NO: 166029 - DNA, 942 bp, Zea Mays
tcacatcaaagttaaagacctaacataggagaacaactttgcttaagaaggaaagcatagttgttaagcaaaagtcagagataattaagccccaagtttggctgtcaggctggtccattctgaaattcagattctcagtggaacagagccaacttggtgtgtgaattcaaacttgaattgttgagaaattgatcaaggttgctgtgacaaagctgtagctggcttgtcaggctataattttggtacagggagttagcttggtcaccacacaagattgggagaaaattgagctcaaaaacggtctgtcaggatgactgaacaccattcgccatggtacagtaagctccaacctgaagaagatcctatccctctgctcgtcgccggtggcccgtcgccgttgatcaccgcttgccgtgattcgtgcgccgtcgccatggataagcacaacccagtaaagatctcggcgtctgatccactcaagcttggctacggctaagaccgccgcacttcaccgccccagctcaccgtcggttggatgacctcgtcaccgataagccaccaccgtcgcgcaccacgtgtctcagcgcggaacttcctcgcggtgactcaccggttgcatgcccggcgatcaccggagggagcgccacggtgaaagccacccactccttgctcatgtgtccatgttccttccggctgccagtatgaccttgcgaaattggacacccaccgtcgatggggtctataaattgagtgcgccacaatctccgtagggcagtaaactatccagccaccacgaatcagccgcaaccattcgctagaattcacgaattttgaattcgccccaaatctgtttccgccgccgtgaagaacagctcgctgcggccagctcgattccggttagctcgcgcccctctgtttcttgttctagcgtccccatgtgcc

SEQ ID NO: 166030 - DNA, 387 bp, Zea Mays
cagcaagcggtcttgacaacaatcagcgagcgaggcgcgagcagggcgagtgggtaggggcaaggagagatgaggcttggagcttgccggaatcgcgctccggggaccgcaacatggggccacaaggctgtcacacggacagagagcaagaggcacgcgaggagaaagtggaggctatgaacgacatgatggagctcgggttcgtgatttatagcgacgagggagagcaaacggtggccggccattgatggcattcatcaacggaggaaggtaatggggaagaaacggtggcattgaagtttcttagggaagaaacgttcgcgactgggcacggcgcgtcgcgggctgcgttgggtgtcgcgctgtgctcgacgcggtcggcggctg

SEQ ID NO: 166031 - DNA, 587 bp, Zea Mays
agcgtaacctcccaagcacaaaaattgaccaccaaaccaagtacgcccagcaggctgtaaactgcttgtattttggtacacaccttcacttgttatatatagccagtggaacagtcctggaatgcagccacgccaaaccagtttggccgcttaggaatatgtttgattagctaatctgttcgtaggcactttggtctatagaactaaaagggcagccaatgagtactagattaggaaagtaagggagaaacatacatatataatccacttaatgacgttcagagtcgcaggttctgtcaaacataccaatatgtcagatctgattaattgtgaactgagttcgatctctgttgcacttgcttacttggtggtaaaaaaaggaacaagtggcgtgtggaggagcatgttggttgtagtttcagcctcaactgaataatcccagttgccccatatgtcacatcaacagaggagaggcatggtttgagatctcggccagaaacagcttctcgctagctttgcgctggattgcctactacctgccggcagctgtttgatcgttccctggtttaagcaaagatatacagctg

SEQ ID NO: 166032 - DNA, 1307 bp, Zea Mays
gcggtcgaacggaccggaatccctccggtcggtctcgacccgcggccaatccacaggcatgggagccaactagcgatgatgacggaggcaaggatgatgaagttgatctcccctctgccaacacacccattttccaggggttggttcttcacagggcggaggctcgtagatctgcaaatgagcctgtcacagatttcactgccagcggagggtctgcccttctccaggacattcgattccaaaaccctacattacgtattcatgatgctaggatcgatggtaatcggttctggaccctccaacatgtcgatgtttacaattctgtgattcttcccaagaagcatcagcctattctgcatcagagatatattaactgggaaggatgtgaagcaattggtgatccagagatgacacaggctttgagggcctgtgagaggaagaggatgaagaacgttatgacattccaatatgattggagtgatgaagttattgctcagttctattctaccctttggatcaagctggctgatgaggaaagtccttataactttccttatctcaatttctatatcgaaggcagctggtataaggtgagctaccggaggtttgctcatatccttggattttctgatggcgatatttctggtgacaagattaagattcatgactatcgtcctcccaccaaggatgaagccagggatcttcatatctctgagactgataaatactgggagtcaaccaatctgcataagttctacagatacattaactctctctgcagaatgactctcattccaaaagaaggtaaccaaatgaatgtcctgggagagagcaaggtcttgctctcatttatgaagccaaatagttcagaaagtatcaatgtatttgacatgatttggcaagaaatcattcatgctgcctgcttccctctcaagggatgtcttcacgcccccttcattatgaagatgattgaagtggtgactcagtttcgctttgacaaaggaacaagacatctctcatacacccccttctggattgatccaaacaatccagcagggcgtctgaggaaagctccctctagctctcgtggacctgctactgccggcccctcgcgtccatctcctggtcgcggatctcccacaccacgtggtcgtggtcgaggtcgtggtcgcgggatgggtgcacgtctgacccatggtattgtagcattcttttccatgtgcaggaacatatcttccgatgtgcatgagctggctaggcgtcagcgggagactgacgacaacctccgtcgtcaagcttcttccatg

SEQ ID NO: 166033 - DNA, 621 bp, Zea Mays
tcttgcggtgtattcgaaccgatttgggggaagttagaaattggagttcctcagtgaacgattgagggtgataatgggtggctgggtgtgtgatgaccttgcggagctcacggcgagctcaatttatactaagcgagagaggtggccgggaattggaacgatgacgtgcggcggtcggaggagggggagtttcactggcgcaatgaattcatggcatctactgtggcagtcattccggcgatcaacggagagtcacaatggttcacggcgatgcggtggaggtactcaggcacgtggcacaaggccagaaggcggtggtcaccggtgaggtcatccgattctaccgtggcgtgtgctgtacggtggccggatttgtttactggccggagttatccacggcgaggacccttactcaaccccaagcgctatccacatgttccaagcacgaatcgctgcgacgacggcacgaatcgcgtgcagcccatcggcggcgagggttgagctgttgatctgatcttattcagatcactgtaccatgggaacccggacagagcacctgacagacgaagtttagagcatattttctcctaattctttgtgacaacatacccaaggctttgt

SEQ ID NO: 166034 - DNA, 774 bp, Zea Mays
cgaaaactagggacgacgggttgattctaaacaaaccgagggtctctttaataaaattgccgcgcgaaggggtaccgggtgattctaaccgttagatcagagaccgacgaccgagattagatctgcggccgagggcgcgcgtgcgcgggcgggcgagcgctgaaaggcgggctaggggcgtcagtgaccgaaggggagagcgcactgaccgagcgggcctagcgccagggaacacgggcgctgacaggcgggccaggggcacagggcgcgtgtgcgcgaagcggtatccgcgatctgggccatgcgatcaagatcagacggaggggatcagaccagggaggacggacggctgcgggcggcgctgctcatctccgcgacggtgaggtcgccagatttggggcaggcgcgagctagggtggctccggggtcgccgggattgggcagagagggagagaatgccacggcaaactcagtggcggggaaaaggccatgaatccgcggacagagggggaagaacggcggggagaaagcctcaggcggaccggaggaactctgctgagggattccggccacggggagggggcttgaggcgcgctaaagcatgggaaggcttcaacagaggaaggggtgacacagggacctgcaccggggcactggaccgggctaaattggccggccactgcgcgggcgcggcggaccactacgaccgagcaccggcgatgccaaaattggtcgagcacagagcgaaatcggggaaattaggcacgggcaaag

SEQ ID NO: 166035 - DNA, 548 bp, Zea Mays
ttacagcaagtcattagaggcacatatggatcacttacgtgttgtttttggcgccttgcgagctgcgcgtttatttgctaaccttgtgaagtgcaccttttgcaccgaacgagtttcgtttcttggctatgttgtgagtccacagggcattgaggtggatgaggccaaggtgtatgccattcagagttggccaacgccttcgacggtgacacaagtgcagacttttcttggacttgcaggcttttatcgccgttttgtgaaggattttagcaccattgctgcccctttacatgagatgaccaagaagggcattttgttccattgggggcagccacaagaggattcctttgcacttttgaaagagaagcttactcacacaccgctactccaactttctgattttggtaagacttttgagcttgaatgtgatgcaagtggagttgttattggtgctgttttgttgcaaggaggtaaacccgttgcttactttagtgagaaactgcatggacttgttcttaattattctacatatgacaaagaattgtatg

SEQ ID NO: 166036 - DNA, 808 bp, Zea Mays
cagtaacaaccatgatctagcctaaaataaatagatcttatctagttataccggtgatctagatcccaccaaatctaacatgatctatccaaattgagatacttaaataagttagataatgttggcgatataaattaggccctaattctataaacatatcttaccctaaattaataccttggactaactcgaccgtaaacaacaacctaacctacatcataggttgcctaatccagatatcccaaaagcaaagtaaactctcttcaaacctacctacctcgtgtaccctggttatcctaactaagtatccttagccatatgtccttaactcggatgacaactccaagaaataaaggccaaagaagatcaaccatgtcaaagaaggataagcaccaattcaactcttcaaagaccaagcgggatcaccagatgaatcaagatccacagttctagataaagtcttaccttattatactcttccttgctacaacctatacttgccataaccgtacctcatcttacatgaaaaaatggctagacatatgtatattcatattttccaaatcatctactaacgtgtataaaaaaacttcaaacaaaacttttgaatcctaaactaaatgagaaactaaaattcaaaccaaactcgttgcatccctttttcttacaaatctcgaggacgagatttcttttaaggggggtaggatttgtaaagcccaaaatttgtcaaagaaaaaaatgatgataaaataaatgaataaatatatttgaggattttgaaatcatgagagatttatttggaccctcc

SEQ ID NO: 166037 - DNA, 577 bp, Zea Mays
gcttagtaaggcattaggcaatttgccgaagatgcacgttccatcgtttgatggtgaaaaccccaagttatggcagtctcgctgtgaggcgtattttcgtatgtatgaagtcgactatactgtttgggtccaggtagctaccatgcagtttttgggtccagcagcaaggtggttgcaatcagtgcaacaccagatccaccacatgtcgtgggaggggttctgtgctttgatccaggagatatttgcaaaaaaccaacaccagtcgttgcttcgacagttgtttcacatcaggcagactagttcagtggcggtgtatattgaggagttttaccaattagtggatcatcttaatgactatcagtacatgtctgaccccttatattacacgatgaaatttgttgacggacttagagatgacattaaggcggtagtcatgcttcagcgccccaaagatttcgatactgccgctgttttggctcaattgcaggaagaggcaggagagctaatgcgaaagcgcgaccaccgcagaggacctacaagcttcacaccttcttcatttggttcgacagttcagtct

SEQ ID NO: 166038 - DNA, 492 bp, Zea Mays
ccgggtccgacctcagggccggaccgtccaccgtctcaaaacggtgctcaacggggtgactgggtgatgaggtgtcctcgttcttcaacacgaacacacagaacgaaattgggcccgcccagaggctagatctggtgatgatgtgactgtgatgatcgatttaactagactgacgcgcgcgcaagcaagcgaggtgagcaaggaggcaccttgagcttgcagatcggcatcttcgcctcgctccagttctggacgcgcatctcctgccgctccctcttcttgttccctggcaacggcaccgcctgatgcgcccatgcccctcgactgccgctccaagtcgccgtagcccgtagcgtcccctctcctctgcctgaaagtctccacatgctcaaatctgttctaacaaagggcacaatgtacattgatactacgaggtcgttgccgccacacgctcaaatctgttctaacaaaggggcacaatggctttccgtt

SEQ ID NO: 166039 - DNA, 1039 bp, Zea Mays
ttgttcagccactaccctgaattctacctcgaccagctggcatgctgaccctagatgcatgttgcagagaggcctggtcattccgaagtttaaggacagcagacacatgaccatcgtcatcagtttccccctcatcttctcatcagccttgatgtaaaaccattcacctttccaacaagttggccatttggtgcgataactgagaactggagccttcgtatccttgcgatacgcaaaattgtagcaaccaaaattttcatgaagaccgtctgccctggccttcgtctgatagtgcaagtcgtgcactcggcagaatgcttcggcatctgggctcatcccttggcttcggagggcccagatgaagactaagcctaacaatggcgttaggggtcagctgaggaagatatatttcgaaatttttcaatacttcccctaccatctcattcagaggaagtcgcaatcctgctctgaaaaagctcttgaaaacaactacttcatcattctttggtgctggggtggtctcttctccggcaaatcggacaagtttcctttcagcttctccaaagtagcccagcttcatcatcatgggcatgttagcttcagacacagtagatttctaaaaatctagatggatgggttttgatgggatcaaaatactataatcttcttcatcctctccagtatcttcttcttcttcagcaacagtctgttcagcttcggtaacaggggtaccttcgtcagtcacaacttgacctgattctctgatgacttcggaaattggtgctgtctcggtgacctcggtctcttctccttcacgagtcacccttgcagtcgaacgcactctggccatctgatggattttttgcggtttttacgaagttgatgtttcttttttgcagttttgacgaagctcactcttttgacgaagttaactctaaatgatgaagtgttcacttgagagcgtagtgaaaaatcttcggctatggttaaaatttttaacagcacaacaatgcaacgacaatgaatgttgtggtaactc

SEQ ID NO: 166040 - DNA, 1064 bp, Zea Mays
cactagtgcatcaaaatagcagtacacttgagagcgttctttatgagtcttaaaatatttggtagggattgttggatttagtgggcttagcctgaattaatttattaaaccatctaaatattaaagattcatataatggtatggaatgaaaggtggttaatcccaccttggaagtgaagaggggtcataaccaacttataaagtggactttataaacatcatctgtgaaattgaaaaagaggacatactcacatacatgaaactagaaaagaggacatgcatgccacatgcacgcacgctcactttcctcgtcgggttgagtgtgtagcgtgtcatgacgatatatacatacaaacatacgggacggtgcgacagaagtgatgttctaggattatcctcctcagtctttcctcacctatataaggagacccacctctaggggaccaaatggattacaatccacatgtttatttgatccttaaattttatcgtataaaatttagagccaattgtcacccctgctcacccctcatgtgaacactctctcacaactcgcgtacttctgcttagaagatatctctcttctctcaaactttctggtatagctaagaacaagatcttcattaccacgtttaatttctgcgctcatggacgtgacaagggcaagccttcggaatccctatccactgaagatctcgcttgggataactgccgctaagttcttctgggagggactgcataacgtcaatcctccactacatcgatctatacgtctacatcaactgaggccaatcaatcagtatgactactctaattaataaccgtgctactgcttcagtgtacatcctcaaacttcctacttttatatagctcatgattattagaataataagcatgaacacatgcacctactacaattacactgcttcactaacgatattcatcttcatgatttatctaaataattttagaattaaaatatattgtagaattctctaacagttttgcgagccagcaaatcctcgttcggtgggcttcatttattagccacccgtgaacttcat

SEQ ID NO: 166041 - DNA, 753 bp, Zea Mays
ccatcaggattttgtcgtcttctgtgatgcctcgaggcaaggcttagggtgtgtgctgatgcaaaacgagaaagtcattgcttatgcatcacgcctactcaagccgcacgaacagaattaccccacccatgatttggaattggcagccatagtgcatgctttgaagatatggaggcattacctaatcaggaacaaatgtcacattttcaccgatcacaagagtctgaggtatatcttcactcaaccagatctcaatctccgtcaacaaagatggttggagctaataaaggattatgacctggagattcattatcaccccgagaaggccaacgtggtagcggacgccctcagtcaaaaaccattcggaataaaggggaccaactttttagaagattggaagaaagaatcagctcaactgaatacatgtctgggaaacagcgacagtctcgaagtcaaaccaatactggaagaccttatatgcaaagctcaacgcctagacccagaaacaacaaatcttgtggagaaagcccgcaaggaacaactcccggacctcaggacaaacgaccaaggagtcctttggttcaaaaatcatctgtgtgtaccaaaaggggaggcccgagaagtcctgctcaaagaagctcacaactcagcctactccatccacccagggactaccaagatgtacctagacctcaaaaccagatactggtggagagggatgaagaaagaaatagctcagtatgtggcccggtg

SEQ ID NO: 166042 - DNA, 535 bp, Zea Mays
gggcagcgtaccgaagggccccttcgtcctcatcatcctccgccacctcgaacggtgggaatgccacatagcagtgagagcacataatggctacagggagcccagggagatcttcgacttccccaccagagacataaaaccaaaagtcccaccaattgccccacttgttccgagcacaagggactatttccacaacttccgccgaagtctttccagtcctcggcgtgaaggtgcacgatccaaattgtgcaatattatttcctatttccttcttttgccagtgcagcaatagttcttggtgaagacttccatagatggctgaccgccatatgaagcaaccgcccaaacgtacttcgctacgacaaccacgacgttaggtgtcaactggtggacctgcacgtcgaacctccgcaaaacctccaccatgaaatgatgcgccgggagacgaaggccggcaatgaaaaatgcctcaaacacaaccaattcgcccttaggctcaaggatctcctcggcacccgaaacccggccgacaccg

SEQ ID NO: 166043 - DNA, 606 bp, Zea Mays
tgtgtatccctgcaggttcttggctccttcgggagggttttcactcctcatatggccatttctccgaaaccctaatatcacgcccatcacgtgttcggtaaaatggccaaaccagccaaaaatgctccaattgaacccaaatttttcaggcacctttacaacacttccagtaacctacttgccaaaattcacgccaatccgagattccaggcttaaatttcaccaaattcccgtttagagcgatcgtttccgagccgagtgcccaaattcctttttcttcgcctaaattcaaaccaagcacacacttcactcatattcacctatataaacccattcgtgaagtatcggctcaatcccatatcgtttcgtgcctcaattcgaattccaaacctcctatggcaccaattatccttcaaacgtcgttttcacgtcgtttgacttctcgatcgtctcgtgttttctgtgccatatctctctgtgtatgtatttattcacatttcatatgcttatgactatgtgactaatacgtgctcacctcttctgtcatttcagtgaccttgattgaccgtgtgctgtctcccgtcctgcctggatcgtcacctctcg

SEQ ID NO: 166044 - DNA, 820 bp, Zea Mays
gcgacgctcgatgtggtgcaccacctgcttggatggagtgcgtcgacgctcgccgagaggatccgcgctggcgccgtccccctcggtgacctcgccgcaggggagttcattttgttcacctcctacatctcctacgggttgggcgctgccgatctcgcctttcttcttactgctgttggatgagctcggcctctagcttcagcacctcaccctgcactccatcctccaggtggccattttcgctcacctatgcgagatgttcgtgggggtggcgccctgcacctccctcttccgccatttctttgtgctggtgaagtctgggaaggctaaggaccacctcggtgcctactatttctagacgaggtcggttccaaccatggcctacatcccctcccttggtggcgcaaggtgggagaactggcgcggcgactgggtgattgctagcacgaaggccaacgaccgcctcgccctgccgagcgacgggccaagactcgaccagaagcagtggagggccaagccgtccctggcaccggagttccagcttgtactggacaggatcaagagcttggcggtgggcggcctaacgtcgatgcacgtggtcggggacttcctgaagcgccggatctcaccgctgcagcagagggcgcgcctgtgctgctggttcaccggctgaaatgacatcggccaggtgcagcgcgggccagggaccgacctgtcctgggaggagttggaggttctggtgaaggggataaccggtgagtccttcgtccctgagtcccttatccttgccgagggcatccttgcactctgcgacgacaca

SEQ ID NO: 166045 - DNA, 305 bp, Zea Mays
agaagatgcattaggaagtgagggagatgacacgggttcaaccgctaagtaggcgatcgtagcacgtgggaagacaagcggtccaggcacgtgacggcccgcctgagggtggagctcgacgcagtcctggagaatagggttccaggcgggatcgaaggacacgaacatgccctggatgagctggccgtcgtggaggagtgcacgcacactcacgagagcagcgggtgaggtaaagctcatgtatagcgggggtgacatcatgaaatcggtgagggtagagacaccactggtgggaagaacgcaac

SEQ ID NO: 166046 - DNA, 717 bp, Zea Mays
ttggtgctcctgttgcctattctacttggaatctgtcacctcataggtcattttccaatttcgtgtccaaccctcctactaatgatggtggtctgggtcttagagtgcgaccctctcccaaggacattgaggctctggttgctccccttcgaaatcttcccaatgataagaaacaaattcactttgaggtgccagcaagtccagatgatgcagagatagatgttgtactcagtatgttagctggagaatcttccgactcgacccatgctgaaccgatggatatcacggttggacaagagcttaacaaagcaatggagacccgaaagcctgagggtacccgcccaaagcatcctcgccaagttagccgcctgactgcgccttttgaggaaaagaagaagaagaagaggcggcttcggcgactgtcatgtttggaataggatgtcggtccttctgctccggtttgtgatgaagtaacagcagcggtccttcctgaggttgatcccaatggtggcgtccatgttgaagttgatcccaatgggtgtgaccgtgctgaagttgatcccaatgggtgtaaccgtgctgaagttgatcccaatgggtgtaaccgtactgaagttgaacccaatgggtgtaaccgtgcaccggctgttgtccgtatttttgatgaggacaaagaagagaaagaagaagttacgctgattcataagaatagccggc

SEQ ID NO: 166047 - DNA, 384 bp, Zea Mays
gaaaaaatggaagaaccgagggctaaagagacaaagacatcggaaactttaagtccttcagcaagagttgaggtgccaatgccaatgccgagggcacaaaaagaccttacaacaactcccaagagaaaaagtatggttaacgtgctagatgtgctggaaacaataaaatcttcaagctctacttcgaagatagctaccgaagttccaaagacacaaattgaggccgaagctgccaaaagtcaagcggaaactaaatctaggctttcagagcctaccaagagggaattcttggaaattgaaaaagaaacggaaaaagaatctgcagaagaaattttatctgagaaaaccgccacacccattcccgaagcatcttccgaagctcct

SEQ ID NO: 166048 - DNA, 534 bp, Zea Mays
cgtggtaaagcgatggtgattgacagtgacagcatggccaaggacgaagagggacctcgatgaggagacaactcggactggttgactgtggcccaagatgacgccattgctggagcaatgtcctggcactggagcgagtgatgttggcgaggatggtgcctctggtgtttgttgcggccatggagggtgacggtggtgaggtgctggagtaaaggagcggctttgcatcggtgcttgaggccatcgacggccatggagaggacgacgtgctgggggaggcgagcggtcgtgcttcaccggcgaggtcaggtgcgacgcatcaacggtggagtgaaggaacggcggtgcgacaccagttccactcaaggaggagcgacgactgtgtggggagccgagcgaagacggaggagaagggcgtgagagaagaaggggcgtgcatgcgtgcagcggcctaggggcgaagggaacgaggaggggttgtggacgtggggaggaagccgccaatctcgtcacggtgacggctgtctcgtggca

SEQ ID NO: 166049 - DNA, 859 bp, Zea Mays
gccgaactcgatgggtcggatgacttgaagcaggcctcctcagaggaggtggaggactcctctgactccgaggagtggagcgactgcttgggcgatgacggcgagggcaacggtagcagcgatgacaacgacggccagggtagcgacgacgacggtggcgagggcaatggtgacgatgacggcaaggacgaggacaagggtggtggtgaaggcgacaatgacgacggcaagggtgaaggcgacgacaagggcgacggtaaggctggcgacataatgctactggcataaatattagtatagtgtagcagcagcagtagtagttagtagtagaataatgtagtttagttagtagtgtagtgtagtataagtagtaatgtaatgtaatggttgaggggtgggaggccgactcatgatgagtcggatgagtcgatcttaagtttgtaatgatctccccctgtgaatgaagacacggtttcctgctaatctattgttgtgtgccctgtttttgcatctgatggttcacttagcattttagaggtaatgcccgagtgatgcttgcttttctgcgattcaaacttatcccgagctatcggcctaccactttgcgcctgacttaacatgccaacccctacttctgttgatgtcctcttgagttctgaaccctagttctttcttttttttctccaccgctctctacctttctgagttcccgaatacgtttgcatcgtttgagagatcacgatggcgcccaagaagagaaaacagagtgctactattctggccatcccgccaatcgatcccaacagtcaactccccttcgctggtaaccatgtgtcttttgtttctgaacctgaccttc

SEQ ID NO: 166050 - DNA, 571 bp, Zea Mays
cgggcgacggtggctcttataggctccgaaacacctcggtaaaccaaaggccccatagtaaaacgtcccacctcccaatggtcatatctcggtgcagtcatcttacaaaaactccctcggaccacctcaacctgtgatctagggcagcgttcttacacaggagcattagacgaagggtactacggtttcgacacacagcattctccagacgacttctcacaagggagtcaagcggagggccctagtcaccccccgaaaggcatttcaccgacggcggtgcctagaccacgtgaaggtaaggacatgaattcactaaaccgtcgaaggctctgtctgcctccgacactgacttcgcagaacctagggtgcaacacgcgggtggagactttgttagactacgaagaagcccaggactccgccccactgtcatctggaacctcttgtaagcccattgcggagtagattttatagtatgtctagattactgtactcctcccactgtaatggctccgttgaggggaatattctaggaatgtagtagataactaggggcataatagtatttagggac

SEQ ID NO: 166051 - DNA, 514 bp, Zea Mays
aggacatgtgccacaccctacggaactgcagggacttcaagcactccgtcggacatggccgaccgttccagcctctaccacctcccccaccatgaggagggcccgacgagcccaggcagcctcagcagctagaagggggaggggatggagcattcccacgcgttgatagggaggtcaacatcatctttggaggacatgagttgcaggagaacagaatacaatagaagctcaatgatcgacaggtcctggcggcaaccactagtgccccagctccttatcggtggtcggagcatgcaataaccttcagccgagcggatcagtggctcaacttcgaccaccccggcaagtacccactcctcgttgatctggtgatccgagaaagcagggtaaagaaagtactagtggacgggggaagtagcattaatgttacctttccctgaatgcttctagccttgggggtcgcactcaaagacctcaccgagtcagatactcatttcttcggcatcgtgccgac

SEQ ID NO: 166052 - DNA, 541 bp, Zea Mays
gaagcgcgcatcgcctggatccgccccgcgccgtcgtcgtggatctctgcgccctaattcctggtgaatagctgcgtgttcgcgcgatagtcgtaatcgttttgcgctagtagattcagggtttagtgccttggatcgccaggcagagagttcgtcggcgtgacgagcgtgctggttctggagttcgctccgccgtgggatagccggaggttgaagacgcgagatcaccgtttgatctcctttgggccactgagattagaactgggataacccttcgtgtgattaatcgggtgctgctagatcgagatcgggcggcattggttagatcggaaattataaaatctgggtcgtcgtttctccatcctacagccatcgcagcatacccattcacaatctaatttgcaccatgcattatagatccggcgtccgagaacctaggatactggttcgctctggcaaagttgcttatgagtccctgaattccttgagaatgaacccgcggtccacatcgactatgtagctcagtcttaggaatttttct

SEQ ID NO: 166053 - DNA, 608 bp, Zea Mays
tgcttctcctagaattatatttttcctgtacttcgtgtagcatcgttcgaagtgggaaaactgatctatggagctcgtttgggcgctgcgacgatgaaatcctcgccatgggcgggcgccgccaccgtccctggctagaggtgggaggaggcacgacaactgctggtcttaaaacgggtggataggattaggtggcttcgggtaattaaatcgtgtgcgctgatcgatgatccaagggctcagatgtgatcagcgtgcagtcgtactatgggtcgtggatcccgaatcttgtggcccttgttgaataccggttcagatttataaccctctaatctaggccgtgaggtttagatctaacggccacaattcaacgataccccttcgtcgtggcattcttccttaggagcccctgctctttcccttatttaaccagccatccataactatacaagaaccatgctattaggtcctaaaattttcagccaagtccctgtgcttgtagatattgatggtcgtagtttaggggtcatggggaaataggaaattagtatttaaacatgttttctagtatagaaataaagctagaatcctatttaattcatatttgc

SEQ ID NO: 166054 - DNA, 333 bp, Zea Mays
ctgcgctaaatgtgataaaacggcgtgaccgggatgtccaagtcgttggtgccatagggtagatgcaagaagagcagaggccgggaaccgcagggggtatagtggaccagagctgttacatctgaagatctcgcgccgagtgggtagatccttcacagagcagccaaaaggatcaaattcaacagagcaattattatcagtggtaaattgacggacagaaatcagatccttaatgagggagggggaaactaaaacattgtgaagagaaagattatagggaagacgggtggtgccagtggaggtaacagggattagatgaccgttgccaacgac

SEQ ID NO: 166055 - DNA, 406 bp, Zea Mays
ggggaacccctctgcgtcaagattgggtgtacttctccgcatccaaaattttcgatcaaaaaaggctttttgcgttctcccggctatgtcagaagcagggtcccgaggagcgaatgtgggtacatgtaagtggcgaggccgactgagccgaggaactcctatgcctctgggttagggacacctcactcatcacctgccatgaaaaatgacccaactcgggaagccaccctattattgacaagccaagccggacacgcaaattgaaagaaaggagagtgcgacttcatgcaagaaaaacaaagtgttcaggccttagcggccgcggtaagacacacgcacatccaacagaaactgttccaacaagagttaggcgccgccttgggaaggagtcgcgccttcagttccg

SEQ ID NO: 166056 - DNA, 463 bp, Zea Mays
ttgtaatcacacgagagggtattcgagtacaactagttgatgaagacgttattgggctagctaatgaccttttgtgatatcaggtttcctataatccctttattcaaggcatacctagatggtgtttatgtccactcaagtaaaacatcacacatcattatgccacatcatttctcaaaataaaataaagaccatgggaaatttagccaaattgcacgagagaactttccaaacataggttaaggttgtaaggcacctttttccaccaaaaagatgctaataagtaggaatataaagaattcaaaccaatagatcaccttttaaactaaaaaggacgtttccctgatgtcaagggcattgtattcgcatgagagggtattagagtacaactagtggatgaagacattattgggctagctaatgaccttttgtaataccaggtttcctataatcccctctattc

SEQ ID NO: 166057 - DNA, 611 bp, Zea Mays
cgccagcgaccctccctcaccggcggccaacgtcctccggtgacctagtgccagtctccttccctctctggtgagcatcctctgctctctttccccctttttctctttgtgtttctgccaccagagaagttcccctctttccacctcttgtgccaaattcaaatccttaagaattcctatgaatcctactggttggaagtgttcctatgtgcctcttgagtatccctgcaggttactagctccttagggagggtttcacagcctcaaatgtccttttcaccgaaaacctaaaccttcgcccaccacatgctcggtgaaatgtccaaaccagccaaaaatgctccgattgaacccaattttttcgggcaccatcacaacacctccagtaacatattcgccaaatttcacgctaatccgatattccaagctttaatttcaccaaattccccgtttcgagcgatcatttccgagtcgagtgcccaaattccattttctttgcctaaattcaaaccaagcacacacttcactcatatttacccatataaacctattcatgaagtatcggctcaattccaaatcatttcatgcctcattttcaatttcaaacctcc

SEQ ID NO: 166058 - DNA, 976 bp, Zea Mays
attaactcaggcgggagttcttatcccgcacgtacttatctagctaatcacataggaatttgttgggatgcgtataagaaggggtccaaacctcccctataaatataaaaaagatacgaccgattaaggcgccatccaatcgatcaaatcaatctattatcattacctttacattcttgtcctatgagtagcagtaacttagcctaacgtagtcttcttcatcttcaatcgtcacctctattcgactcaacgtcgtctataggcatattgggtggtgtgtcaaccccaagacaaccctaaaatctttcatccctaacggggtctctcccggtggcaaaatctaggttctgtaggagttcatcgcaacctctacgcacgcacggaccatccgccaccctgcaggagctcaagttgcagacggtccgttgacctactacggacgatccacgctcacgcagagagcaccctaggtactcgctccccacgagcggggtctaaggtgcgttaggcgattggcccaaaagagccaatcaactcgtttatcaattcctttactttcttgccctacgagtagccagtaacgtaaccttcttcgtctcaatctccacctctcttcaactctacgttgcctagaggcatcttgggtggcctatcgatcccaaggcaaaccctaggatatctcctccctgacggggtccctccgtgggacgacatctaggtgctgtttggcgaacaactctgcactgcgctcacgtggaacgtctggccatcaggcgtggactgtctagcttggggcagagaaccccgctcctgcttccaggtcgcggatcgtctggccctaggccacggaccatccacaccgctacagagagcccgccaagcaaaacaacacctagtgtttggtgcctagatccgcgccaacacagtttttagcgactctgctggggagtctgagatttgatttaccagatcgacc

SEQ ID NO: 166059 - DNA, 384 bp, Zea Mays
ggggccggtgctatcacatctgaggagggtgcgccgagttgtcgagtccttcacagtaagaccagaagagtcaaactcgacagaacaagaattatcagcagtaaaacggcgaatggaaagaagattgtggaccaaagaaggagcgacaagaacatcgggaatgcgaaaagagccaggagggtcggcggcacccacagatttgataggaagacacgagccatttgccaccatgatgaatgaagggagagaggaagaaggagggcgaactgaggtgagtataccaggggcgagagtggtgtggtaggtagcatcggtgtccgcaatccactcgggacccatcggcagagtcagagtgggagtctggaaggcagccagggcggctgc

SEQ ID NO: 166060 - DNA, 1058 bp, Zea Mays
gaagtattagactcaccctaggaaaggggacaaggacactcggacaaaaagacttacctcggctcctgaccaacgcgacgtggcatcccatcgaaccgcaattcgttgaccgacctagctgcaagatccgttcgaggaaggaatcgaagagaaaagggctcgagagtgaccaatgagcggacgtccgcccaaacttataaagtggcaaaggcacccgactccgcctcaagagatattgagctacgtcgaaagtagtccgagtcccaagggcaaaagctccacaatcgctcataaggcggaaggacaaacatcacccaacctttcatcagtcccgaaggggagatactcttcctcgggggctaccatcgaagaaaagatccccaggtctctggcccgccagtcatagagagcgcacaaaatagaagctactggaccacaggggcccacccgtcagagggggataaggggaaccatcttgttagggaaaagatccccggtccctagagcccaccggtcaacgagggcgttgggaagaggcctctggaaactagggcccatcagttagcaggaggaggaaggaaatgtttgccctggaagcacccaccccccggacgaaccatgaggcaccgagcccagggtcgggcgtggcagagctagaaaaagggattgggcatactaaagggaaaccactcggtggatcctcatctggcccgagactgacccgccgtagtgaccgtccgcattaactacgcatggcgccgagtcgtgacagaggagccggtccgcgtcccactcatgacatacgagcccctcgggctacagcgtacttatgacctacaaacccttcggactgcagcgcatttatcaaccccgcgtcctcggcttgcggcacactcatgacttattaggactaggcctaagtgtgcaggccgcctacagggcacatcgatatgagtcatgctgagatctaggctacgaagatcaggggtcggcgtagcttgaggcgataataatgacacctgagccccacgctgccaacaccgttcgccataaagtac

SEQ ID NO: 166061 - DNA, 516 bp, Zea Mays
ggggtatgcctttatacccccgtgttggtgaggcggctgagccattggggtggttacgccagctggggatttctacggagatcttgcgctcattcggttaagatgacagttactgggcacctaatttgttgccgagaaagcagggggagaaggagggtaagggggcctggcgatgggcggttgtcctgccctgtgggcccaagcggtggtggacaggagtgcgcgcgtgcctgctgcgccctgagaggccctacctgaaacgctccagctgctggcttcacggtctggagaaggtgaatctgacgaatgagccccacctgccagcgtgagagcgaggaggagtggacgtgggggggtaaacgggctggcgcggggtgaaagcatccgggccggccagcgcggggagcgagtgggccgcgcggtagaaggaggcgaagtgggccgaaagcggaaatgggtccacgcgcgagttttctttctttttttttctttttccttttctatttccatttctat

SEQ ID NO: 166062 - DNA, 532 bp, Zea Mays
cgccaccgcccgccatctctgcccgagcacgaccgttgtggccagccccttctgttgacccccagcctcgccccagcccctggaccgcttccccgtgaagccgtgaagcttctccaagcttgagccgaagcattgcctcaccggagaggcggattcacccacaccggactttggtcacccgccgccgcgcgtgggcagagcaatccggtgagccattctctaattccttgcaccactgtccttcttgacctctagcgaagctctctgaccagttcacttggacaatcgcgccatgagcaggacggattcctcgccgtcgtcgagcatttctgcctgcgcacgtggaccggccgactccgaccattcccgacggcgacctgcacatcgccgtgaccctcaggacctcccctacatcctcgaccacctcactggagcagtctcgccgccgataagcccctccgcccctttcttcctctgcggccactgttccattagggaaggaccgcaggttcgattttgcaaaaccctaggg

SEQ ID NO: 166063 - DNA, 323 bp, Zea Mays
cccccacccaatgggtgttttccaatgggtgtgaccaagggacgtcttggtacgcaaagcgtttagcacattgtcctagagtagtaacttgacgtgaccgctgggcgtaatcatattgcccaagcagttgaccttagtccaaatggtgtcgtgttacgcaaagcggcgtctgctgcctgactcacctttaggcgatttgaattgcttattgaatacttgcgactgtttggtgggcgtggtaggagatgaacagttgctaccggcctctataaatagcctgtttgcttcgttgttgttttcacacatcctctgatcacccgttg

SEQ ID NO: 166064 - DNA, 368 bp, Zea Mays
ggagaaaataggtggactgactgaggacgaggcactagggcggagcagccgcatcggcgcgtcgttctagcgagtcatcgaatttgtcgtgagatggcgttggtgagacgacgacaagtaggaggagcgagtgcaggaggcgaggtagcgatagatgatggtgacgacaagcgacacccattgtcgtgttgcaatggcgcggtgggactctaatgagttagcgagggacaggtgatgccacggttccaccaacagcttgcccatgtgctggtgcagactaggaggcaaaatatcaatgttgtgtgtaggatcccgacgagtcgacgagctgatgagtgatgagaaggcaaagtgcgcagcagcgggcg

SEQ ID NO: 166065 - DNA, 532 bp, Zea Mays
gactccccatctcaccatacgatacaccagcaccataatataatctaccaaaaccgtgagagtgagtactttccggcccccagaaggccagaaaggaatggccagtcctatgagcctcatagggcatgtattaacgcgtcgcaaaacccaaaccaatggggaagaaaacaacataccaacatccaaacaaactcacccatattggaccaacgagtcggtgatctcccaccggctgccatcgatatagtaagagaggaaatagctggggcgttccgagataagctcggagttagtatagtccccggagggcagtcatatcggagaccttatgatagccagtttgaccgtctcccatacccacaggggaccagaatacccgaattcgcaaagttttcgggtgaccaaggaaaaacacgcgcgaacacataggacagttcttagcacaattaggagaattggccgacacggaagcatttcacgtgcgtttattttcactatctttaacaggaaccgcgttcgcatggtacgctac

SEQ ID NO: 166066 - DNA, 583 bp, Zea Mays
gctagaccaaaggagtgtagctgggtcctgattgaatggctagcacaactgcagcctgaagagcaggagatggagcagactatacttgaggaataggaacaccagtgtgttgaaggatatgagtcatgaacgcccggtgctctgccctgactgtcaagggctactgctggagggtgtcctagcggttctaaatagtctagaacatagacaacatccgctcggacatctgttgctggatggctgcctgacgagcctgctctactgccagatgagcgtgctgctgagcgagagactgaagtatggcggccaaagtagggtcaatcgctggaggagcagcactggagccaccagcctcatgatcatgggaacgaggtggcacaggaggtggtggcagaatccccagatcctcatcatctgaagaggtgtcagtagtggcaccctgatcctcaaactgacggatggcctcatcgtcatctctgaagtctggtgccaatggatctactaaagccggaactgtgtcctcaggggctgggtggtagaatctgaactgaagtctggaggcatcaagggtgacctagaacta

SEQ ID NO: 166067 - DNA, 643 bp, Zea Mays
agacagtctctttagttgttatacaaaaattaaagaaaatgctgcccaaaattgctttgtcagactggtattgaacaactgaatctgaatctgatagcagaagtggtcgtcggtgttgtgggccgaacttggggctcgaatttaagcatgatccagtgagaattcgactaggactgctataacaaagatgaagatgatctagaggtctacaactttggtgcaaaaggatgatgatgttgccatggaaaatttggagaaaacctgccctaaaccttggctgtcaagcgcactgaagatgaattccatggtatagtgcctggatcagactgccagctcggtcagctcaccgttgacgagccgcgcgtagattcgtgccctcgccgccgtgattcgcgatcggaccgactggataacgctcgggattgagtaaatatcgtcgccgtggatatattccgaccaatagtttactccggccaccgtaccgaattgccacggtcgtttcggatgagctcgccggtgacagccgattcacggccttgcgccacgtacctaggcacattcaccgcatcgccgtgactcactttgtctgtctgatcatcaccggtgagggttgccacagtagatgccacgaatcccttgcgcc

SEQ ID NO: 166068 - DNA, 1248 bp, Zea Mays
ggaggagcagactgcactggtgggagctgaacaccggtgtgctaaaggataagcgtcatgaacgcacggtgctctaccctgtctgccaagagctactgctgaagggtgtcctgacggtcctagatagtctaaaacatggagagcatctgttcgaacatctgctggtggatagctgcctatcgagcctgctctgctgctagatgggcctactgctgcataagagactgaagtatagcggccagagcagggtcaatagctggtggggcagcaggagcagcactagaactacccacctcgtgatcttgtgagcgaggaggaacagaagggggtggcgggatccccaagccctcatcatcaacggaagaagaatcaacaacggcgccctgagtctcgaactatctgaaaacctcatcctcagccctaaaatctgaaactggatctggcactggaactaggtcctcaggggctagacgatagaagccgaactgcaggcgagaggcctcaagggtgccttggaactgaggaggcctgatgagctacacaaagatgtagcagaggtaatgggcatatggcagctgacggtgagcacagagaccatccaacactgtgtcctcgatctcatgaataagaaagtcaaccacgtcaaactctgaatgtgagatcaaagcaccaagtagccatagctaaatgtgagtggtggcctccctgtagcccatcctaggtagcaaggtacgtctcatcatctcatgtagaaactttgctataggagtgaagtcggaaggagagcatcacgacccatctgtgaaaggcggtctgaacagggcagcgacatgagctatagcgggtgcaactccgccgtgaggtcgacggggaggatctgaagtgccatagcataggctgtggagcctagtcgtcgactctggaaatccaaagagctgtcggatctgactggtatgcagagtgacatcctctcgctcaaaacggaacctcatccactgatggtcagggttaatccaaacagtggcatagaacactctgacccactcctcaatatatctgccacatgcggttagaagagaaagcagacctggcagataagtaaggtgaccctctgagtcggcacaggcggctaactggaaagcaggtagatccaaaagtcggtgcactctcaaagcaatatgagctgacagctgcgccctaaagaaggactcctgagtcctggtgctaaagagtggcgtagctgctggg

SEQ ID NO: 166069 - DNA, 669 bp, Zea Mays
ggtagacctataccagggcttggtggacagcatgttagatggagatattagagcagaaaagattgggaagcaaactatgtagtcgacgtcgtttattggtggtcctcgtgacatgagacgtcagtatatggatgctatggctctagtgcaaaagtttggtaaaccagacatatttcctaccatgacatgtaaccccaactgggatgagataaggatggaacttctccatgggcaaacaccgcaagatcgtccggatcttgtagtgcgtgtctttcacgcgaagctacaagagttaaagtataggctgactaaacaagatattctcggtaaggtctgggcctacgtattcgtcatggagtttcaaaagtggggtttgccacattccttgagcaatatgaccttttgatctcagtcgagatcccagacaaaaagtaccctgaactacgaaaaatggttatcaagcatatgatgcatagcctgtgtgggtcgctaaaccctaactgcccatgcactaagggtcgtgcatcgtgcaagaatcattacccccggcctttcagtgacataaccttacaagggaaggactcataccctgtttacagacgttgtgacgatgggcataaggaaaaggttcgaggatgcgaattggacaataaatgggttgtcccttac

SEQ ID NO: 166070 - DNA, 434 bp, Zea Mays
taaaacatgctctcatgcaaggcccgccagagcgagttggagctgggtgaagctactattttcaactctatctcccctccatcgctcatgagagcatgttttaagagaatctatgagtggagctgttttattttacccagcacaaaacggatctaaacagctccaggaataggtggtggagctgtgccaaacaggatccagcataaactggtttcatcataaactcttgctcgcaaagtaacatttatatctaattagcatcaaagctctaactgaacccattttgagaacaccaccaaacaatgtgatttcaacgatgtcatccaactacaagtgaaacatcacaaatagggtgtatgccgtatttacataccagaaatacaaggcataggtgcaaaaacacaacatatgtaatgcgtatcaatctgcacaga

SEQ ID NO: 166071 - DNA, 529 bp, Zea Mays
taagaagacattccgcacaaaagtcgcccaggggtgcagccggatcagcacaagcatatgaatacgaccaacaggccacatcatacaaattacagttacatacactcggcgagggcatcatatattacattggctcaaccttcaggatgatacccatctccctgtaattgaacaacattatcctcaattcctcaccctcaaaaagatttcgcaaatccccttcacctatgctcgccccaatcggcgaggatagcaattctcgtttaccaatccggtctactcgaagacggccacgctccatccccatacgacggcgcctaccacttcgcgaaaattcacccacactatgtttcgacaccaccctttgctgcctatacccagcactcgcactagggaaatccccggcaccctccacacatggcgaagactccgctgtagccacatctaacgctacaaaataatccaagccttcattcgaggactcctccgtccaggaaaacaaactcccagattcaccatcagactcaaa

SEQ ID NO: 166072 - DNA, 1008 bp, Zea Mays
ctctgggatggcctcaggcaagtcgtgactgcgtctccatcccgaggttggcctcgtgtgagtcgtgactgcatctctcgaccaaggttggcgtcgggcaagttgtgactgcctctctagctagaggttggcctcgggtgagtcatgactgtgtctcttgcccgggactggcttcgggagagttatgactgcctctccctccgaggttggccttgggcgagtggtgactatgtctctcgctggggtatggccttgggagagtcgtgaatgcgtctcccgcccagagatggtctcgagtaagtcgtgactgcctctcctacctgggtttggcctcgggcgagtcgtgactacgtctcccacgtagggttggcatcgggcaagtcatgactgtgtctcccgccggtggttgccctcgggcgagttgtgactacgtctcccgctaggggatggcctcgggcgagtcatgactacctctctcacacatggatgacctcgaggtgagtcgtgactgcctctccctcgcgaggttggccttgggcaatgcgtgactacccctccgacccgaagatgatctagggcgagtcgtgaccgcgtctttcactcaaggtttccctcggcgagtcacgactgcgtctaccgcctgaggttggcctcgggcgagtcgtgactgtctcccgcccggggttggcctcaggcaagtcgtgactgcctctccatcccgaagttggcctcgggcgagtcgtgaccgcgtctcctgcttggggctgtccttgagagaatcgtgactacatctcctacccgaggctagcctcgggagagtcatgaccgcatctcctacccggtcatgactgcgtctccagcccagagatggccatgggcgagtcgttactgcctctctcgcccggggatgacctcaagcaagtcgtgactgtttctcccaccggaggttggcctcgcgcgagtcgtgactgcccctcccgcttgaggatgacctcgggccaatcatga

SEQ ID NO: 166073 - DNA, 527 bp, Zea Mays
atgatggtttgcctagcgaggcatgccctcgacccagggagacgaagactagatgatcgagttatgcgtagatggagcgcagataccttgggcatggaggttgatcatactcaaagggctagatactcggagataactcgaatgaagggcaactgaactttgaatacgtaggagtgcttgtcgtgttaaaagatagattcatatagagttagatagtcattacgacttgtaaagagataaccctctggtgatctatataaggccgaaggggtacccctatgaacggatctgatctcgacacgtcccatcaccacctaatagctcattagtcctctcatagcaactacgccactactagatcaacaagagaactcaccctccactgcccacagctcatctgtaactcctgtagactagtgatactaaaatactcagcctcgataggacgtagggtgttacgcattctagcagcccaaacctgtataaatccttgtgtgatccgatgtgcatccgcacataccatcgag

SEQ ID NO: 166074 - DNA, 659 bp, Zea Mays
tcatgccctccccatcctcagcgctgatgagctcggggaggagaacgacggcaagacgaagcccactcgagcgagaggacaacaaatctagagaaggtaggactggatccacacttggaggcccggatctacacagccactcaccggatgcgtgtggacggttgaacagatggggaaggaaaagagcgagagagacaaggagggagcagtggagcgcgacgacgcacagatggagatggggcgggacatttccgggcgacgagaggagtgcgactcattagggcatagcgggcgacgagaaaatgaaggaggtggtgtgcagggtgcgcgttagacagtagcgccaaggacgggggcgaggtggcggcgctgaggaaggaggcagggtcacaacctcttcgaagacgggggcaagggcgagtgggtgcgctgaggcggggcgggggagacggtgtccctggttgcaatcagtacacaacgtaccttcttgagcgaattggcgtccccgaagaagccgttacagacggcggccgagactgagatccagaacatggcaacagtcagcacgatgcgcagatcgcatggggaacaaagaggatgagatagaaacacgtaaggtgacttacaagtgcatgcaaccgatcttgcggatgtgctcg

SEQ ID NO: 166075 - DNA, 678 bp, Zea Mays
tacaaagggagagggactcccttttatagttcaatggacagtctttacatgagagagttcttcagctaatgtcttgtgatgtagtacgtggtgggccccttgggtcactctcagcctctcagggcatgcctccgtgcggcatggtttcttctgatggtcatgtgatgtctgtctcgtccatccgacgtgcgagtctctatagcttactctacgcctacggtgcccgtacctgatgggtcctgcagaacgtgctcttggtaaggttgaggttcgtgttcagaacagatttatcttccatcattgccattgtgtcactgtccagcatgcgcgagtatgcactagacatgttgtcctgtccgtattgtacgtgagtcgttaccgtggagactatgttgtcgtggcccccttggtactgtacgcgtggcacaaacatggtttggtgatgatgtgtcctgctacggccgtcgtggaccaataacgtcggcttgggttccttccttgcgagttcgtttggcgtgatcttggttgtatgccacgcctcgcagtcttgctcagcggagacttggtcgttcaccccacatcacagacttgctcggtggagactttatcgttcgccccgcctcgcagtcttgctcagcggagacttggtcgttcaccccgcatcacagacttgcttgg

SEQ ID NO: 166076 - DNA, 976 bp, Zea Mays
gcatgagatagtcaggatctgaatccaaaaaacctttgtacactactttgcgatgatggcaatgacggtggcaattcaaggacgaaagcaagcgactgcaggttgccgttgtccgcgatgtgggaagcaaaccggtgactgatttggctcgctgcagtccagagtccagactccagagctcctgatctgaaatctcaaccaccagcgaccaagcacatctcggccggcacagtaacatgaagggttgagcagactgaagtccatttttccatcataaagttccttttcttgaacctgaagcgtcaagaatgaggactatagctataggtcgactgggactctgggagaataacaaaagacagagagtacaacaattaagagagaaataaaagaagaacaaacaaaaacatacaacagttttcagagccataaatcaaaggtgaggcacactctagccttcgccctttaagatagaagactcaactcttttgggaagactttttttgtgtgttgttgtgaaacttccagagcctccaatgcatctcgcgacagtttctttgttgatggaatgccaaactcaacatatcattaccatcttggattggcagcccatcttgtgaaaactatggacgggagcacctagctccatcagcggcgagctttgtacgatcccttggttatcaagccaagcgctcttctttttctacgaggacaacgcattgatcgatcgatgctgacaaataaaagtatgcgggtgaagcttccctgctgtctatgaacgggaaacagagcaattaccgacctgtaccctgggctcacctacgctgcagtccaatccaaaggacctgacctgcaaatctcaagcgccatagcacatcaatggcggagtcgcaaaaaaaaggaacggatcatcacattgcatcggcacatctttaggctccttttcttgagcctgaagcatcgcttacgattcgct

SEQ ID NO: 166077 - DNA, 727 bp, Zea Mays
aacaaaaaacatgacatgtcaatgcacatgatgttatgctgctgttttagtgccagtaacaccaggggtgttacatccttccccccataaaaatatctcgtcccgagatttaaggtcctagggtaagtaatggaaaaggaaacacgtcatatctttatttccttacttgtcttacaaagcagggggtggtatggggtttatttcacctttacgatcaaatgtacatatcttacaggttacatgaagctaaaaacctaggaaaattctttcccaagaagtcttgagtctcccaggtagcttcatcttcagtatgctggttccattgtaccctatagaatttaagagtccttttttgggtgaccctgtccttctgatccaaaactcgaatgggatcttctgaataagttaagtctagtaccaagacaacatctaccacatcgatggttcgatcaggaactcgaaggcacttcttcaattgagatacatggaacacattatgtactgcagacaatgtttcgggtagttgaagtcggtatgccactggtccgtatcgttcaagaataagaaacgggccaacatactggggtgccagtttcccttttacccccgaaacggttcacacctttcattagtgatactttcaagtatacatgatcattgacttgaaagaccaaaggttgacgtcgcttaaccgcataattcttttgccgagcttgtgcccctttca

SEQ ID NO: 166078 - DNA, 749 bp, Zea Mays
gtggcaaacacatgacgagaattcatgggggtcaagaaaacaacatgacaaaatcaagttagactgtaaaaactagtgttgcatagagttcaagttcaatatcaatacatgatataaatttaaagaagaaaaccagatgaacaaaagaagcaaacatacttcttttttcttgctgaccgaatcgaagccatgcgtaccttgtcgaatgttcatcttctcaaagggtaggggcgccaagaaaggggcatggtcaggaaatgtctctagctaagagccagggttcactgtccgctggggacaagtcacatcatcgcaacgggcaagattgggcctgtcgagcgggccagcatcgcgacaacgatgagtgggtgagtgcactaggaaggggcaggggtggtggcattgcacattggtgagggagaggcagcaggtggtggtgggcgacatcaggaacgaggcatcaaggcaaactggcttaagcggcgtcgggaagaatggtgccaaactgatagttgagaggactagaccgaggagtacgatagttaggaggacatgtcgatccgatgaggaggctcagaacagggttattttcgccacccaaaacttcacttttttcattacataagaataaatacacattaggtataactggttataaaaatttgaggggtgacattgctcattttgcgcccccatgggtgcgcccctaggtccacctaaaactccaggagccatccacactaaaataa

SEQ ID NO: 166079 - DNA, 913 bp, Zea Mays
ttcgaaggttcggcttcggtaagagcagtagctgtgcttgcagtaatcctttctcttgcatcttcagatttctcaccagatgcttcagtagaaatagaaattggcgctttcacggattccaatactgcatctaaaacgctagccattcttcttctccttagagtcactgttgtagtactcgatggcttcggtagccatgttacagatgctggactcgacacctttggctgttctgctgccttctctgctctcggctctttggcccggcctgcactagcttcgatcggcatcgcatgagctgtttttgtggctaaggggacagcctctgcacattcaatgagcttcggcacatcggccgtcccaataggcttcgacctacatgtcaagaccttcaccctcttcgccttcagcgcactagaagaggtcgaagcagcaactttcttttttccccttgccttcgaataggaaaacagtaatcagggtaacaaacccaataacatcgaaaaccatgttcaacctccttttccctagagcgtcgaaggcaagtgtcatagcttcatcttctgtcctcgagtaggctccaagtagctcgtcactcgttgcctctatagcgtctagccaatcatcatttggctcgtcaaattgacttctgtaccggaagatgtacttgagataaaccaagtcaccctgactggagccagcggcagcttccttcagcatttcccattcatttgcaagaggccatacattgaaagcgatgtgctcttgaactaaatctctggtaccaatgtaggtacatatagtgttgaaggccattagacacgcttgcacttcattcccaatcgtgattgatggcctcctaatgccgaaacgtcaccatatgggacattgaatgatgtccctcacatcctcc

SEQ ID NO: 166080 - DNA, 456 bp, Zea Mays
atcggcgttagcgccattcccgacatcatggcgagctcgccggtgctcgccgtctcctccatccccctccctttcccgagcgcctataaaagcacccgcccggaccccgtcctcaccacaccagctccggccatctccactgctttcccccgagccattcgagctagcgccgccgtgctcccttcgtcgctccggtgagctcccttccccctctctagcgatcctctgtccaattaaactatgctcgaagctccgccacactctcacggtcacagggagccactttcccccctctattgtggccggcaaccgcaccggcggcatcaccgccgcgggcacccgccaccgtgccacagaccggccgccatagggccccacaggccaaattaaccccactcccgtgatcccctgcacccacccgtgcctcgccaccacctccccgccgtagaaccggac

SEQ ID NO: 166081 - DNA, 672 bp, Zea Mays
cttgtacattggaagccaaagtcttgccttgaaaaagctcatgtatacaacaactttgtcttttcctcgcatcgggtcgcctcattcccaaggaggcgcacattgactttactgctaaaataaccaagtttcttcatagattgtcggtctttctccctcaaagtgaaacgaccaatttcaatatagcttggcttcgaaggtctatccttggacagctctggagcaggctttgacgatgacaaagccctcataactttggagatgggcaaggtatcttgtcgtgcctccgaagaggtaggtgtgattagttttgcggtggtccaaatcctagccatttgagtggactggaaattgtctaagatgatttcgtggaagccggcttctgaagcagcgatggatgggaagctttggaggcacagaaaatttaggcagcatgtagctgagggcagtaaatatgatctgcacccacctgctcgactgtttttatactgagaaatgggcgtgaagcggtgcaagtcgctaaaaaggttcccacgcatcaccctcaacttcccctcgtctgtttaacttccagatcaattgttttttattgaatcgttctatcttctccctaacgagcttcgataaggtgtttttcgaaccttcggcacaaggtctcccattctatttttt

SEQ ID NO: 166082 - DNA, 305 bp, Zea Mays
ctaacatgatcatgtcttttttctaaaagttgtaattgcttgatcctatggagacttcgagtgtggtgtggttggatgagagcacgagaggacatgacgcacgccacatgctttcctaattcgcctttggagtttattagtagctactagctgggttaattagccgtacgttagcccatggcgcctcctcccttgctctcttgtagccaagctagctgtgggaacaagtgccactgccttccaatggcacttgggattgggagtcggaaccagtgatggacgatggtgtgatgtgctacaacgac

SEQ ID NO: 166083 - DNA, 430 bp, Zea Mays
cgtaagtagtgtgttagggatattagttttacatgtacatcgctataatatcgggacggtttcggaaataatggaaataccctggaaacgtggatgcggttacttgtatagtatccgtgatttccttacatccaaaaaacaccacaaagcctgcataactatttggaggtggagatggctggctctggagaatcgccggcgatggtaggagatggcgttcgtcttgatccagagacagagggagtagttgatggtaactcactggtcacaccacctcctactctactgggtcctgtaatcgacgagatgagcatatgggaagaaggagaacaaagggttcgacctccgatgtccaatattagctccagggagatggatacgcctcaaatactgcattcacatgtaagtccaattgttgtatttgattctt

SEQ ID NO: 166084 - DNA, 472 bp, Zea Mays
tttcttcgggttttgtgatttcaaagttatcagatgacgaggatgatgaaaaattgggtgatgttgcccctcactgaaaactgtggccaagatttcccgattgttcaatatgctgatgacacactattgataatggaagcttgccccaggcaattatttttcctcaaagtagttcttaactcatacgcaacctcgacggggctcagggtgaaatataataaatcaagtatgtacccgatcaatgtctgcccagaaaagatggaggttctctctagaacattcaactgtgagacaggattaatgcctttcacctaccttggtgtccctctgggcttgtcaaaacccagaatccgtcattttttaccacttatccaaaggattgaaaggagactgtcttgctcatctgctctcctctctcaagctggaagattggagttggttaactcagttctctcagctctcccgacttttc

SEQ ID NO: 166085 - DNA, 612 bp, Zea Mays
gccaattagcgtttgaaaacgaccagaccgagtgatgacacgcattcgatggcttgcctgaccggccgagcgcggactggccgcggcagcgtgcgccccatgcgtggtcaccctaccccgcgcgcctgcgtctcacccctacctataagtaccccaagggcctcagccgtgttcacttgtgcacccaaagccctgcccaagccagtgatcataggagttcgccgtgaaaggcaagcgccaccgctcgccaccactgcccaagcacggccgccgtggccagcttttcccgtcgaccccgagcctcgcccaacctcttagatgacttccctgtgaagctgtgaagctttttcaagcgagagccgagaccctgcctcaccggagcagcgagatcgccctctccagactttgaccgctcgccactgcacgtagaccaggatactaggtaaagcattttccaattacttgcgcctacaacccccctgacctcccgtgaagctccccaactcaatggattgagctatcccgccgtggttaggtcaaatcactcgccgctgaagagctcccccgcctgcgcccgaagaccgaccaactccggccatctcctacaccgac

SEQ ID NO: 166086 - DNA, 647 bp, Zea Mays
gcgatatccgtcgtccccggcgaggcggcgacactgctgctgtaggtgcgagccgtagctactggcctgccgtagctactgtaggcggcaacactgctgtaggtgcgcccgccacaattgcattcttacaattgcctctgattattgacaacgctctgcagatcagtttcctcttgcaatataacaaagttcaatcctggtagatgcacgaaaagacactccgcagaggaaatttaccatgaaactcaaacccgaacagcctcatatcattctgttcatattcgcacagccgaaagagcagagagagagagatgaatctatcttagattttgtttggatcttgtgcatccatccgtccactcgtgagaagggacaatgaaaagcacagggtttctgcacgcaggggcgcaggctcggtgccactgccactgccacccatgcgagcacgcactactgctactgtgatattatagaacagaaccatgcatgcagcctattgctagatcagagctcatctcagaaggcagaaggcagaaggcagaagccgaccgaccccgtatataccctcctgtctcactggttttagatgttttcaggggccttgaactatcgagacccatgcattcttagaccacactatgcttttt

SEQ ID NO: 166087 - DNA, 1102 bp, Zea Mays
cacaaaaatgaatgtccaaaggtgctaacagagctttttcttcatataaattcagcaggtgattatccagatcggcaatagatcaaatatggatccaggaaaatcaatagatgataaattcagcaagttgcatccaagttttccagtagacaccagaattggcatagttggagcagggccaagcggcttatcagcagcatatgcactagctaagctagggtatcacaatgtaaccgtgtttgagagatgtcataatgtttcagggatgtgcgagtccattgatatcgagggtgaggaacttgactaatgcactcttgttcaattgttttgacatctgtgtatttattatcattgacattgttattcaggaaggacatatgatctgggaggacaagttatagcagcaaacagtgcccctgttataactcatctggcaaaggaactaggttctgaatttgaagacatggatacacacaagcttgctcttattgacagccaaacaggaaacattcgagatcttgaagttgctgaggactatgtatccatggtttctctaacgctaaaattacaggcaagttttttctagaataatttggactacttataaagtgatcaaaaggaatacgattttcagtaataataactaatggtttggtctacttcgcacttctttctgttgcttacatgtatgttctttggtacttcttataggatgaggcaaataggtctggaggagtgggaattcatgcagtcagtggattggcctcagatccaactcttgactttttgatgcaacatggaataagttcaatgccaaaatctgtagtatatggttacactgcttctggctatggttttgttcaagacatgccctatgctttcatacatgagtttactagaacctctatggctggcaagatccgacgtttcaagcatggttacatgagtctgtgggataaacttagtcagtcattaccatttgaagttctttgtggcacggaggttctcagagtcaagcgtaacaactgtgtcgcaagtgtaattatcaagaacaacaatgatgatgtagaagttagggagtttgacaaaattatattgtcag

SEQ ID NO: 166088 - DNA, 663 bp, Zea Mays
tttcaaaaaggaaaaagaatatgtgagaacatggaccaaatctggaaatccatctaccatttatgtgagcctcactgcctcagccattgtatttttccttctgctgtgcgcaaacagggacaggaagagtgctgacagtgtgtctcctcgaacccaactcgatgtccagagacaagctgtggtctatgaggccactgttcagttgggtaaccatagctgcattgaagagaacaatattagtaaagctctacaggcaggggcatgccaatacaagggcactctagtgcaacccattcaaaccacagccaccataagcgttgagctcaagcatagcattcaaggtccagaatgccaaggccacccatttctaatagctgacacattggtgtccatgccaccttgcatttacccacagagagttcctgatccagtgatcccccatctccgtagcttattccattcttgggaagtcattttagctggttgaggacagtgagcagataggttggttgggatcttaaaattgatctgggctaggacagtttgggcaggcctgaacccaaacccctcttttctttgtttgggctctgattcttgttgcgccaaatattttcctcatcatcttgacattaggaacttagtagtgaagtccaataatcttgt

SEQ ID NO: 166089 - DNA, 343 bp, Zea Mays
gggctgcccaaggcgaggtacttggtctgatgtagcctttctctaacaactcatcaatctgcttcctgagttccaccaattctggtccggacactcgataggctctcttggaaataggggcagtgcctggtataagctctatatcaaattcaactttcctttcaggtggcatgcctggtaactcctcgggaaacacatataggaattctgatactacgttgatagcttctgatggttcaatctcctcaatacaggtggtgacttggtgacagcttcctttccttggtccagacaagaccaactccactaacacttcctctcctgataaggacactaacttcac

SEQ ID NO: 166090 - DNA, 597 bp, Zea Mays
cttctaactgctcgtaagctctgtcactactttgacgaccacaaagtcatagtagtcaccgagtttccaataggggatattcttcacaaccaaaacaagccattggaagaatagccaagtgggcctgcgagctgggagttcacgacattgagtttcggcctcgcacaacaataaagactcaagcactagttgacttcgtatcagaatggaccgagcaacaagtaccagacaacccggaggctagagaagtatggcgaatgtatttcgatggctcactgaagctgcagggagcaggcgcaggaatcctcttcattgcccctggaggtgaacaacttaaatatgctcttcagttatcattcccagcatcaaataatgcagcagaatatgaggctctgatccatggattgaacattgtcgtatcactgggcattaagaggttgatggtatacggagattcactggtggtcataagtcagataaataaagactaggattgctcgactgatttatgggcaagtactgtacggccgtccgaaaagtagaagacaaatttgaagggctggaattccatcacgtggaaagagatcgcaacgcagc

SEQ ID NO: 166091 - DNA, 924 bp, Zea Mays
cagatcctgaaccggctcccaaccgtgcccctccgatcaacatcaacggtctggattttatttgaccgagatcaacacggacccgtccgatctcgcgtcaacggctgggattcaaaatgtgaaggggtatccgcatcttctaatcttagccgtccatcccaatccaacgggccacagcgttctccttcccttcgaccaccagagcggcggcggcgcactcccttacggcggtgccattgccgcccaaggccatccttcggaccggcgcccaaacaccaccgtcgactagtcctactcgaagctgaggtcatcgcgaatatacaggaggggttcttaccgacagggacgatagatacggggcttcccacgacgttgggcggatccgcggttgtgcccgaccaccagcgagaaattccggccacccagaccaacggtgagctaagcgagagtaccgtgagtactggtgcgatccaacgaagcatcagggctaagattctagggagcgctagtaatgtggagagaccctaaggtgcgatggctctcgttcccctccttatcttctctgcttgccgccatggctcatgtcgcaggttttcctctcgtgatgaaccgtggtggagttggccaagggtggtcttggatttatagcgcgacggtagagtccgaggtggggagaacggccagcggtggaagcggagaagaaatcgcggtttgttggaggtaggagaacgagctgtccgagcgggcccacctgacagagtcaccagcacacattgccggttcgtgaggctgaacagcagccccccggtagtagttagcgcgcgcgggccacttgggccgaggaagaccgcagctgggccgagccagggaagaaatcagcccatgcgcgttttccatttttcttttataatttctgttttattt

SEQ ID NO: 166092 - DNA, 595 bp, Zea Mays
cacgtcttggtcaccctggaatagggatgatgcagaaaatcacaggtaattgcatcggtcatgatttaaagtctgctaaattttctaaaccatctgattttatatgtacatcatgtgcaacgggaaagctaatcttaagaccatctcctcttaagattcatgctgaaccactcaagttccttgaatgaattcaaggtgacatttgtggacccatacaaccattatctggaccgttcagatacttcatggtattaaatgacgcatctacacgatggtcacacgtgtgccttctgtctacacgtaaccatgcctttgctaaaatcatgacgcaagtcattcgattgaaagcacattatcctgaacatcaaatccagttaatccgcggctgaattctcttctagagcattcaatgattattgtatggcccaaggaatacacattgaacattctgtgccttatgtacatactcaaaatggtttagctgaatctcttattaagaggatcaaacttatcgcaagacctttacttcatgaatgcaatttacctacatcctgttggggtcatgcagttttacacgctgctgatcttattcaac

SEQ ID NO: 166093 - DNA, 700 bp, Zea Mays
ggattttgttttcgattgccttgattggggacattgaacacaaactctttcctgaatttcccgatgaactgaagaaaattgagctgtgcgtttgtatatgtgtctctagtataagttgattcactggattggatgcggcgagtccattctaggctcaatcttttagtattgatgcggcgaacaaccatagtataggttgaaccttttgtgggatgccgatttggacagtacggtctcccctgtttgtcagttcagaaattggcagctgatacttttaggtccagacagcataagcacattactccaggttgctacttgctaatcatgggaaccgttaaatttatttcaagagatttgtcactatgtcctgtattttatacctgcgctcatagtgtgaaaaggtagggatcattaacattgtgctacaaaaaaatgttgttgctaatgcttggtgtgatcttactagtaatgaaaaggtgtaagttgttttcaagacaccagatgataaataataatttggacatgcatgtagtgaagctataaaaaggtttcacagtgtgacgagagttgagtcaccctagtgcttccttgattgccaaggatcattctatgtacggaaagcatgttgcggcatgacactaaccaaatatttgcaggtgcatctggaatgtttgtttcttttgttctatatacatttatg

SEQ ID NO: 166094 - DNA, 814 bp, Zea Mays
caggagtagacctgggatcggctggccacggagcgcggaggattatgctcaccggcgtctgagaagggggaaatttggtgtcgcgacgggctctagtgaaattaggaggtgagattggggctacacggtcgcaaagtgctactgattcactgggtacacttaatttggggagaggaggaggaggcagtgcgaattttggcttcaatcatgctcactgatgaagttgtgagtgcctcgccgtggttcatggtgctatttataggcacggtcatccggctaacgatccacggccgcggattgcattgttcatgcatggttaccacgtaaagaagaggcacagtaagggggaagcgaggcatgagcgacacggcggcggaagtgatcgagccacggcgaccgccagtggaatatctccggccacgcacggctaggtttgtgggatggtgccacgtctgaagttatctccccgcgatcgattcccttcaccagatcactcaaacatatcaagttctacagtgcctcagatctttatcagcgttctttagatatttacattgttttgatcttcagtgttttactgaaccgaccacctttcaccctcccatactcttgattcttgttaagaacagggtaatctccattaataaagtttgttcactaaacaacagtcttcaaacctagtatagggtccttgggtcaaaactgaatgaattcaaagatatggcgcatccaattaggccccattccactgtgaccattcctgttctagaatttagttttagtttctcaacacagttctgacagagcaactttg

SEQ ID NO: 166095 - DNA, 372 bp, Zea Mays
gtgactgtaacctccttgagctttcttgaatggtccaatcatgtccagtccccagcacgcaaatggccatgttacgggtatggtctacagttcctgtgctggtaactgctgctgctttgataagtattggcaagcttcacacctctagactagctcagttgtatcattctttgctgttggccagtagaaaccagatctgaagaccttcccaactagagtcctggatgccgcgtgtattccgcattgcccggcgtggatctcttctagtagttgcttcccggtagccgagagaatgcacttcatgaggactcctgtcgtgccccttttgtacagtgtttccccaatgagagtgtagtgggctgactgccttgc

SEQ ID NO: 166096 - DNA, 1144 bp, Zea Mays
tataaatgtgtcttcaaaattagtactttaactatgcaatataatccaaggacaaatttgctacaggatttgagtgtaaatttaaaataagttttgaatttggaaatgaaggaaaaaggaaaaaaagagtaaagcaaattagaaatcatccacgcttgggccacacactagtcacagcccaaggcagcctttccctccttcgcgcctgtgtgggccgcgaccggcccaaaaccccctcctatccgccagccgtgggtgcgacttgtgccactgacacttggtggcccgcgcttcagctttgctactgccgctgcatgtgggcccatctagccgtccggtcttcttcccctcgagaatagcgcgggatgaacatatctcaccgtttcctgcggatcgttcctccaattgcgcgttgcggagtccttggcaccaaggtataaaccggtcgccgcctttcctcgttctatacccggaggatttacaccgtgctaggaatggccaccattaaaactgccggcaggagagagaaaagagataagggtgtggctagaggttggatagatcgagggcggagttaggtgggtgaagcgctccgcaaagtttcccgtgcgatggtggttggctaggcatcgccgtgttggggtgccaacgcatcgaccttgccgaccctaggagcaccgtcgcattaatcgtctgtggacggctctgcgcacgcgtctaacaccagtatggttgcaagcttgtaattagccatcgttcctgtaccgtgctggattagtgcatactccttaccgtggtcggggaccgcctactcgccgctcaccggatttgcactacgaccgtagcttggaacttagggcggaagacgaccctgtgtcattgatcactggataagccgccaggatcagagagagttttgaagtgttttgaaccatgggattgatgttgggcaggcgagatcatcggtagcataccccttcgatctgagaaatgtgtgccctagatctcagatcctacggttctgagcgcatacccattcgattaagatttagatctaatctgatccgaccgctcctaattggatggtcctaatccgacgataccctttcatggttgtcattttgcataagaacccccgcaaaag

SEQ ID NO: 166097 - DNA, 359 bp, Zea Mays
cacaacatcgccaaccagcaccccgctggcgaggcccctcgccgccaggagtatccccctagggccgcggaaacggaactcgcagtcggggctgaggacgtgcgcagcagccgcgcagattttactgcttgttccacggtgaagactgcgtgcaccctacaagagtttgcccagagacgaaggccaccagagacaggatggcacgggcgcagccagccaacaaccctagagttgtcgcacacacatatcagcaaccccccaaccatacaaccacggccacgctccgcatccaccgcaccacgcataccaacaccaccaggaggtacaaatcgtacctcccccacacccacctccacact

SEQ ID NO: 166098 - DNA, 571 bp, Zea Mays
gtttttttgaagttgtcgtctcattccaatgaggagcgttagttccaaccttgttcctagatccaggcggtcgtcctctcttacgtccagcaaggctagccaatcaaaccctattctcctccaatgacaaacatgtttgactattgtgaccatcagcaattccacacttctagcatttcctgttcttcttctttgtaccttttgcactcaatttaatacccttttgttcactccccttgattgttcttccctttggttttgcgttatttgtttttgccaagcttatcccatcgatagcaaaatccagtttctacattcaaaattacagatggttttcagcagataataatatgtagtcccacatgcactttaataccattattacctttctagcatctacattttgtgcatggccatcactctcatgcatatctgcgttcacctgcaaattatcatgtagcgcccacacatttttatgtacaaacgtgaaccaataacacatttttatgtagaaccacaaaccaataacacatttttgtaaatattgttaatacattcgaactgtacaaca

SEQ ID NO: 166099 - DNA, 682 bp, Zea Mays
cagataaatttgcgcaggaagagaagaggagaaaagaacgacggctgctaggagagaggtaacggatgtagacgacgtgagtgtccatgattttaatcaaagaggttaccaagtaatggagtgttcttgttcgttttagcgagtggcctattctctgcttttccatatcagctaatcccctgcctacgcctccaaaacgtcgaagccgcacgtgagaatctccataatagcaaatttctccctctagaggagacatgagaggcgcgcggagcagagcagagtggtggtatcaacaagggaagagggcccgatgatggaataagcgacggatgcacgcctgtgccgtgcgtgcgcgctcgctgtgctgagcgcctttttttctctcgttgctgttccctgcactctccgctggggaacgcacccacggtcatggtgtccctttctctctctcgcttctccttcctcgcgtacccatcaatgaggagctttttggaaccatgtgatcaccaagactgggcttctaaaaaaagtatcccaaacaacgcaattggatttttagtattataattcgttgaacttcgcatatttgctatctgagtcagatttagccgacgtcaactcgttgttacggcagtccgtttcttagaacggatccacggccgagcgcttgtctgcgctctcc

SEQ ID NO: 166100 - DNA, 480 bp, Zea Mays
gcttgatgactggcctgggcgcaatctgggcgatctggcggactcaaccatggccttcacgctggcgtaggggcactagagggcgtagaccacggtggagcgggctaaaggcggcgctggattgctccgacgagcaaacgcgcgagctatagagcagggatgaccaaattaagggcatgggcaggttgctcaccttgagcagaagcgctggcatcgcgaagcaacaacggaggcgcagggtttcgatggggcgacggtggcagactccggctgcgcatgaaaaagctccagtgagcgtggaccggacgcagcagggagggagagggcacaccgaaggatgcccgagcagctgatagtaaggcgaagctcaccgtggcactggacggggcacgggagcaacgacagccacggaataggcagtgggcgtcggcgggtggtggcggagctccctgttcgcgtgggcagagcgagagagagggc

SEQ ID NO: 166101 - DNA, 1174 bp, Zea Mays
ctcgtttgcaaatgaccctgaccgaagaggtaccggccgccatgaaccatccgatccacaacagtcggcccagattagatcatcacttcaatgaagcagtacggcaccggaaccgtccgatttaaaaccgagggctacgatcgcattcgccgagggagttcttcatcttcaatcctaactgcacaatcatctcacaatggttccgatcaaaactctgaaccggtatcaagtcgctcacttctccaccattggccaggatccaacggcccaggctaatcgtcctcctcctgcggccaaacagaggcaccggcgcgttgagcacggcggagctccaccggagcacaggcgatctaaggcctcggcgccccaaatcaggcctaggtaattgctacgtgtaacaaaagcgaaggcgagcacagagagcagattcttactagcaatagggtcgcaggaatggttgcccacggcacgggacgggttcacgacgatgacgagcaattgccgaggacaccagccgactacccccgattgtactctctcctggatacggcaagacccgaccaacccacggataaccctgcaggaacccaactctcgacgtcgacggaaacctgcggcggtgcctccccgactttcttacaatcccccactgtgcctcgcaagcaagcgcggtgaaggcgttcgggggtggggaagataatccaagcacgggcatggttttataggcacacggcgaggctggcgacccggatagcccgcaccaaccggaacccgcagatcacggcgtgccatcgccatgcacggcgagtcagttgggaggaggagctggtatccaggtcccggttgtctgcgacactatttctccagtacgcgaagtaagtgccagacccaatggtcccccccgggcgaagtccccatgaacgacaagatccaggcgagttcgatagccctgcgcgcggcagagatctagcggagcccgaaacaagctgagcagggagaacgactagatggggtgggtccacgagccagtgaggcatttggctcaggcgcgcgcggtgcttgctgaccatgcggtcccacagtcggccacacatgcaaagtgggcgcgagggagcaggccgtgcccaggagaagggttcaggcgcgcgtgtggtagtgggctgaggagttgggg

SEQ ID NO: 166102 - DNA, 603 bp, Zea Mays
ggcctgcgtggagaaaacgagggttccgctggggagcgggttgtaatatattttgattttgtaagatactctttaagcactacttatcaggtgatattacaacttacctgcacgctgctttttctttgttgtgtgtgttgttaccaacttcttccctggtacttgccccccctgggatatggcctcgacgtgtcgaggctggatgccaggattcttaggaaggaactggtgacatggcccccaaggggtaatctcaactgggacccgacctgcacacagtcttggctaggaatttttagtagcgcacccatagggtccgctagctggtatttcttatcatttgattcacgcaacaggaccggctgcagagtggtggggcatgtaggcatacggtacttgaccatactaagcgatttcacggccccaaaccaccccaatgtctaattgtcgtgcctggctactcaaatttggatgttgctataccagccagggagtgagactgcatgggtggttaagataataataatggctgtaaactcgagaataaaaccaacagaaaaacaaatctgcgggtcgaacctcttccttaaaaccggatataca

SEQ ID NO: 166103 - DNA, 1188 bp, Zea Mays
tggatacacacattgattccagattggagaccatacttcttcagtttgcagagttattttctgaaccagttggcctgcctcctagtagacaatgtgatcatgctattcctctaatagatggagctcaaccttgtaatgtgaagccttatcgttatcctcctcttctcaatgatgaaatcgagaagcaagtcaaagatatgttagagcaaggtgtaattcagaagagtcacagctcttttgcttctccagtgctgctagtaaaaaaagaaagaccatacttggcgtttttgtgtggactacagatatctcaatgccctaactattaaaagcaagtaaccagtgcccatttttgatcaattaatggatgagctgtcagctgccaagtggttcagtaaactggacttaagggcagggtatcaccagatattgctgcaacaaggagaagaacacaagactgcctttcaaactcatatgtgacatttcgaatttaaagtaatggcttttggccttaccggcgctcccaacacatttttggaagccatgaatgatactctagcaccagttctaaggaagtgtgctctggtttttttttatgacatcttaatatacagtccctcttttggaacccatctagagcatttgacactggtgttacagctgttgcagaaggataattggaaggttaaacgttctaagtgtgactttgctcagacaagcatatgttatttaggacatgtaatcagtgctgatggagtagcaactgatccatcaaagatacaagtgattgaacagtggcctgttcctacatctgtcaaagccttgaggagcttcttggggttggccggcttctatcggaaatttgtgcggcactttgctactatcagcagacccctcacagagttgttaaagaaacatgtaattttcatttggacaaccgtgcatcagcaagcatttgattgcctgaagaaagccttggtgtctgcaccagtattagccctgcctgacttctttgtcacttttagcatttacactgatgcttgtctgactggtgtgggagcagtattggttcaaaaagggcacccgttggcgtacctcagcaaagcactgggacccagaaatcaaggtttatctacctatgagaaagaatacatggctattttgctagcagtagcacaatggagatcatat

SEQ ID NO: 166104 - DNA, 460 bp, Zea Mays
ccctaattagcatatttatcccactctagaataacaaccacgagcagaatatataactcaaccaatagagtcatgatgaattgtataacctatctactcccacctaacatcaaacaaagtttgatctacaccatgtagtccatctcacccataactatcttaaccatatttccccaacttcgatgatatacactgaccccgactcaataagaccaagactggagaagaaaagatcaacctcgtcaaggaaggagagaagtcaaactcgatcttcagatgcattaccacccaacaaggagtcctttctcaccataagctatcttaccctagctattcttgccctaacctatctatctcttatatcctacataataggtggctagaaacccatgctttcctaaatacctatttattagtataaaaaacttttcaatattgaactaaaagacaattacaagca

SEQ ID NO: 166105 - DNA, 506 bp, Zea Mays
ggagatttagctttttccgtcacatcctgctccgcagccatgccagcatttggagattcttgctcagccttatcttcagttgcggcaggcttcgtctcagcaggcgctgaaggcctagctttggtttctgtatgagccatagcagcttcgacaaccttttttataggagcaggagtcaatgctcttgtcttcatgacggcgtctaacatgctagccattcttcaagacgtctaacatgctagccattcttctcctcttgggagttgtggcgggagcttttgcaaccttcggcaattttgcttctaccggtgggctcagaatttctggcagcactattgtttttttccaactctagctttttggctgccacatcttcggcttcgactggctcaactataagcaccttcggaactatagccgattcctcagctcttcgagcggcgggaacagcttgttgtgcttcagcagcagaagatgtctcttcaccaaattttggcactatggcc

SEQ ID NO: 166106 - DNA, 597 bp, Zea Mays
cggtacgatgcgggcacacgacggagccattactccgatgagaaattggttgagcacaggaggataacttcgctagtgaatccccgagaatcctcccggaggctaggcgcatctcctaggtccgcttcccggtgcatcagggatggcgaatcgaggtccctcgatgacggcctccaacttctctgttcgtccggtgatgtcgaccgagctctcgaccttgcaagaaacccactacaacctgatcctatggccaagggggtgtgcccgtggtagccataaataccccaggtggagatccaccatcaaggtcgaccgtaaggattgcgattttcccggtgcgtgaaacgagctagatgcgcttggtctgttacggagagaaggatggtccacacgacagtgattacacaacagcgtgcgtacaccagtgagcgaccgaccatggggccccacctgccagcaccagatgcgcgcgtatgaatgaatccggccaagtggcacacgcggcgagaacaggaggttgggcgcggagaggggggatgtgggccgctggtggagaatttcggcccaggtgagatttcatgttttatttcttttttt

SEQ ID NO: 166107 - DNA, 328 bp, Zea Mays
ggagacgggtcctacattatgcagcttcagcccacctaattgggcctataaatgaaccaaacattgactccagctatgagctaccccataaaacacaatccacctcaaccgattaaattaagctggtctgtaaatgcaagatcaattttcaggcccgctccgatagtgtaatcccaccagcagtcccgtgcgcgagaagagagtagggcgaatgggcgaatgcaaagcacacctggagaagaagctttacgacgttcgcctcctcaccgccggttgccggcggtccgttcgaagcttggtgattggatggccgattcgccgagcatcg

SEQ ID NO: 166108 - DNA, 493 bp, Zea Mays
cgggcttagccgccacgaggctcaactcaatccgggcgccagatatttaccagcgcgagcttatctgctgcccacggtgcacgaatcgtggcgatccgtcaacaaccccggcgaaaagtcaccggcgacgagcaggggggtgaatcgtgatcttcttccgtttggggcttactgtaccatggcgaatggagttcagtcatcctgacagaccgtttttgagcttaattttctcccaaacctgtatggcaacacataccaaattatgtagcaaagttgttcctgtatagaagctctacaactttgttatagcaatcctaggtagattcccactggagcctagtcgaaatggctctcaaacttggaccaaagtcactgtcaacttaaagttcagactgtatcagtctgacagtccaactttggacataaatatctcagaattcttcatggtaccaaggcatgagttctatagtaaagttgtgctccttccatagat

SEQ ID NO: 166109 - DNA, 326 bp, Zea Mays
ccaagagagatgtcaccaaatccttgtctatcaactgaagcccttttaccgagattaatagaatcatcattccacccttcatcggtaatgttgtcaattttaaagaaaatgtcatacagaaaaggtttgacaccaacttcaatgatagggggaatcatagcaacactcttcacatgaactttgaatctcacaatttctttagagtttaaagagttaatatccacttcttccaccgccccaatagtggatcccaattcacaaatagtctggtagttctgaagttcttccggaacattctcagccacaatccacaccgaatgcagttt

SEQ ID NO: 166110 - DNA, 424 bp, Zea Mays
acctagtctttatctctgactgcggagctgacaccataatcggtgtggattagggcgtctcccgcggttgtcaaagtactcaaatagatagtctaggtgaaattcaattggacgcgaagggctgagagcagcgcgctagcggttgacagagggaacactcggtagcgtcgagaagcttccaagggaatacccagcgctctgcagtatgatgtcgtttttctgcacctgacgtcgccggcgatttcttcctcaccgttgaggacgcctaagcatgtctccttttgctgccgacccagcgaccctaggcgctaggtatgaacccgtagtgggctgagagaaagaagaaaagtcgacgctagatatttcgtacaagtatatatcacctacagtcgggtgaaagatgcataagggcatgtttggtccc

SEQ ID NO: 166111 - DNA, 1093 bp, Zea Mays
gagacaacaacacagatcaaggtgtaatagctgcttaattgcattgcaaagaaaacgatcctgacctcaaatttgcgcacatcggatcggatttctttcttggattcctgacctcagaatattctaataatctcttgaaaattttagagggtctttttagtagtagagagactagtgggcgggcacacacatgcatcaaagagcgtgaaataaagctgcgccgtttttcttatgaactaactgaggcatgcagtagcacttacgattttccttgtagatgttgcctgatgctgtcgattagatcttgctcatcaccggagcccccccagtagcggcacccttgttggcccttaatcttggatagcatggtggcgagaagcctggtggtatcctgcaggttacgggacgcccgaaggaaagccccgcaatggaacctcccttcatagcagtggtacagtcttctggcaagtgttgtcttcccaacgccaggcaggccaaggattgccaccgtcttgagctgctgatcactttccaaagccagcaacctgactagctgctcgtcatggctgtcaggctgtagagtatcatcagaatagacggcacggcgactactgctttttgcaggctcttcttgtggcctagggccattctctttggtggtggttcttgaactagcagacttgatgtacgcttgggctatttctttcgccggattcacacgggagatgaggccggagagatcttttgcgctgattagagcggggcgctgcctcgtcgccttgctccggacccaactgatctgccaggagcagccaccacgggagtgctgcgccatctccagatagtcctcagcatcataacaaagttcctgcaactggctcgtcaggctcatcttcagcgtggacgacgacgtagcagagtcatcctcgtcctcatcctccttggaaagatccaggacggaggaccgtagctcttcgagatatcctatgagagcctggacctcagcgtctggcggcccccgccatgaatctggaaaggaacagctctggacgagcttttccaggatagacatggaaacagaagcacctaattc

SEQ ID NO: 166112 - DNA, 886 bp, Zea Mays
ggtggctgggcattgttatgccagttatctgtatgataataacttgcatatggtggtgtgaatccctccaactccctttgtgtcagaagatattcggttctaagtatgggctcgcttcggctttggtgcatcgaaggtggagggtagttttgttgtgatgtaagacatgtctgcacgctacgtgtaccataccaatctgagtatggtacgttgtacggtacgtggtaggtcatcagacagtcctacaggagttcgaacagtccgcgagggtacgtcgaatggcccgtttgatgccggatgattcgagattgagcttagatggtccgaccattattagtggtgctgacatatcacacagggattatgggggcagtggttacactgggtaggagtttattggcatactatataatgactaggcttgtaagggcccaggcccttgtgtagccattgggttagacatagatatcttggtgctagtctcatgtgatgggaagctagtaatagtagatttttcgaatccacgtgtgagtttcttaagtgatttctctacccctcccatatgttgttctaattgattcctttgatgatctatataatgcttaatagattgtatcatcgttagaattacttacattgctattttggagcgaaggtacgagggaaacgagttagatctccccttacttggtaatattctgatgtcgttccactgtgaagtgtgaccagaacttctccttcacctcttcgcgcacctagggcattgttgtcatgcttcttcatcccattgcttcatgagatcgttgaattcttgctgctcatctgttgacaaactctcgagagtcatcttgagaacgttgccttgtgagacatcagaacgatcttt

SEQ ID NO: 166113 - DNA, 323 bp, Zea Mays
ccagtcggtctccaaaccacaaaattcccttactatcctggcggaagcacttgtatttttctgccttttgcttgagcatgtctttgataacctgaacacctttatccccaatctgtgcttggactatttgctcttgcaatgtgggctccaccgagatataacttaattcaccggagggaacaacttccaggttcagcttacacaactcatcacatagggtggtaactcttgcatccatgctcatacagttacactgggcctttctgctcaaggcatctgccacaacattggccttgccaggatggtaatgcacctccaaatcg

SEQ ID NO: 166114 - DNA, 430 bp, Zea Mays
gtcagccagaactcgattcaaaatctaatagcccagtcctcccgtgcacccgctccaatagccactccgtctcctcgtgctttgcggagtcccagttctggcacgacttcttctcacccaccctcctccctctcgtctagccgtcgtcggcgctgctcgtggtgtcactgcctcggtccggctctagtggttgtgcatatcttcccttctcctcgctgcaccgctagaccagcgccacctcctgcgatcaccggcatcccacctcttctcctcagtgctagtgtgctccctctgctcctgacgtcgatccaccactgctggatcggggggactgtgtagggtctttgtcccgacagactctgcacgcggtggttctcatgtcgcgacaccaccagcttcctgtgtgtgtggtgggctcacgacgtcatgg

SEQ ID NO: 166115 - DNA, 368 bp, Zea Mays
cgcatgatctggatgccttcggtttcggtgacacatttaagcatgggttgactggcccccttcttgtatagctggccctcaatgattgcgaagtcccggctttggtgcttgaggcgcttggcctcgttgacgtcgcttggatggtaatatccttgtaggaacagggttattggggcctgccaatcttcggtcatgatgaggttgagtggttgactatgcgatgaccctcggtgtcgttggttatttgtagaccctctggactgcggatggctggcgtgccgatgacgtggtagaacacgtcggagggcaaggcttcgcctctggcggctgctttggtcaatgcgtcgtcctcctcgttcctggctcgg

SEQ ID NO: 166116 - DNA, 1513 bp, Zea Mays
ccgtcggcttcaatcattcctccatggaagcgcttcgggcggacgtctcacggatcgcagcgcgcgccgatcctcctccacacgccggcatcctcggcgcatacgagtcgacggggggacgcccaccggttcccgcagcgcccgttgacggcccttgggggcacggcttccacaactactgtcgggaggggggccaagggttttcctacacccaaggtccactcccgcacaatggtatgcaacctgaatctgacctcattccgttcatgtcttctgttcctcatcatcatgatacactagttggatcaatgtacccccaaacttcacacctcctcggtcaattgcctaaagtgccttttcctccttttgatggggacaatcccaagctgtggcaaactcgctgtgaggattattttaccatgtattcagttgatccgagggtgtggatccgtatagctacaatgcatttctcaggacctgcagcccgttggcttcaatctgtagaaccacaattgccacatatttcctgggttgattttgggggtctgattagggagcgtttcggtcgagatcagcatgaaattctcattcgccaactctttcatatcaaacaaacaaccactgtcgctgtttatgtcgagcagttttcccaattagttgaccaactcaaagcttacagcaccatttccgacccactatactatacaatgagattcatcgatggtctccgtgatgacattaaaagtgttgtattagttcaacgtcctcgcacattggattctgcctttgttttggcccaattgcaggaagaggtgggcgccacgcgcagagatactcggaagttcgatgcaccagtcaatttgaggtccttcgcgcgtacagctttgccactacctccaccccctcctcggcaaacaagcaatttcaagtcagacgtggaaccagtgcccaacacgtccaagtctcaatcaactgacgacaagttctccaccttatatgcttatcgcagagctaaaggactgtgctacaagtgtgggcttcagtattctcgcggtcaccgttgtgcagatactgtatccctgcaagttgtggaggaactgtggcaactcatcaatccaccagcgtcagacattgaatgtcagtcggagaatgagggcgaacttcagtccatgctgctctcccaagctgctcttcagggcacagtggctcctcggacgatgaaatttcatggcactatccaaggcattgatttattggtgttactcgattctggtagttcacactcatttattagctcccaggtggctgaacatattcaaggggtgtgtccattgccaaaccaactgtctgtacaagtagccaacggtgagagactacactgtatgcagcatgtgccacaggccgtgtggacattgggaggttgcgaatttcagtctactctccgcattctaccactgcaaacatacgatctaattgttggtatggattggctcgagcttttcagtccaatgat

SEQ ID NO: 166117 - DNA, 595 bp, Zea Mays
ggctttccaggagatggtgctgcaccagtttgccgccctcaccgctgccatcgaccgcatgtccagtaggtcgccaacaccaccgccgcccccagcgcccaccacccctagcactacttctttcccctatggaatgccaggctatggtagcatatctgcccttccaacccacaccgcgccatccataccatcaccaccaatgccaccaccatcgctccactcccatctacctccaccacccttccatcatcaacctctgccttgctgccgcccatatcaaccataaccatacccatccatcagatacccttcccacactccacgtaaaaatcccaggctttcccgacccccaccatagcgcataccccccaacctgtagcagcaccctcacaacccacactaccataaccttccctttcccaccctcaacggcaaggaagatcctgttggttggctgtcccgctgtgagagctttttctacaatcaagggacgccggagatggacaaagtctggatggcccacatactatctcacgggcgcggcacagctgtggtccgtcatactacggcgcgacgagcccacactgcgttggtc

SEQ ID NO: 166118 - DNA, 631 bp, Zea Mays
agccacccaccctcctactccctgcaaaccctacgtttccttcctacacctctatcgggaaggaaagtgaaccacctttgttttatgtgagccatgtttgtctactttgtctgtgtcccatgtattctatagaataggttgatcatcctcatcctaaacctccatgcattgcatgcatatagattcgatagtttacgcgatcgtgatcaagggagttcaaggtgatgtcatggagctaccttccgaaggataacaatagtaccaagaggagctcatgacaagtcaagaaactagttgttctgtatctattgccacaactccctgagtaatacgggcaagccccggtgcatcccacccagtttaccctatatgagttcacactagcttgtgcatatatgtttaggaattgaatgaaacccatctgcatagataaccccttcataatcctatccttgtaacctaagtagattaggccgagcccaccgcttagaattattaatcacgttagccaatgagtgactggtaagcactcaataggataaaaaatatgatttctctattcctaaacaagtgagcgaatggtaagccctcactagggaaacatgacatttatcctcccttaatatgacct

SEQ ID NO: 166119 - DNA, 363 bp, Zea Mays
catttggctcatcaaattggctcctgtatttgaacgtatacttcaaataatttaagccaccttggctagacccagcagtagcctccttcggcatctcccacccacttccgagtggccacactttgtaagcaatatgctcctggactaagtccttggtgcttatgtaagtgcatactgtgttaaaagcagcttggcacacttgtacattgtttccaagggcaagggatggtctcctaatgccgaaatgagaccatataggatgttggataatccccttgatgtcttccctttcaaccagatcattcttcacatagaaccattcttgcatccaggccccccggccatctcttgcaaaatgttgga

SEQ ID NO: 166120 - DNA, 1248 bp, Zea Mays
atatctccaaattggaacttgtcatggcacaatataataaaaggataaatttgtcacaagtttgaatttaaaactagaatttaaatttgaattggaaaatctaaaagggaaaagagaaaggaaaatataaaaagaaaaaagggaaaacaacctatatgggtcgcggccctcatttctggcccatccccacagttcatcccgcgaggcccaacttggccgtccgcgcgccctgggtggcgtgccgacacgtggggcccgtgtgccagtcaaacgagcgcgtgggatcttcgggctgtggcgatgacgggtgggacccgcacgtcagaagcttcttctcccccccagttttcggatccaccgcttccactgcactctgttgaccgaatcacagggccggatttctcgggcaagccgtttcaaccaccgttacctggtattgcggctcggtctgcggaccataaagagcagtgccaagagaccccatctccctcaatctattcgagccggtagccattgccaagccaccatcgcagggagataggaaaaaaaggccaccgacaacacctggatactaccttgcccgtgctcagtctcggatctgggaaggttcgcgggtgctcgtggatcaactccctgaccgcctgtaagctgccgcgcttagaacccagagaacactgccgccgtgcgccattagcgaatgggagaattcgccgtcgctgctgatccgcacaggagccacgccgggtgtgttgcgccggtgtggggagcttcgtcgcgtcttcgtggagccgtcggccactttcgcggggaaaagaaagctctcgtggccggcgattgctcactggaaccgctgatctacggcggggccgccgggcgtcgtgggcagcaacacctgcacgactatagtgagtatgaacaccataatcgatttcagtttttcccccgcaacgtgtagatgcatttggattaagccctcgtggccggaatcacgcaaggacgagtccggcgatgccgccgccggtacgactccgggcgccgccgtgctctgctttagggaattagggggaatcgccctgaccgtcgattgcgcgatatggggctaagattagataatgcgtagcgattcgatcggatgtgccctgcaccgtctgatgttgatccaacggccgttatcgctgcttaccctttcagccatgtaactttgcagaagagcccctctggaattatagattagaacccgccatccac

SEQ ID NO: 166121 - DNA, 345 bp, Zea Mays
atccctatgtcaaggacctccggtccgaaggtaactggactgcgactacgaagatcgtagttgtgttccatggtcgccgacggggttattcccacgctgtagcccttggttgtctgggttatccccccaagacgccgggtagagagagttggggaaggggagattagattggtgataatttttgcgtaatttcctcatcccaccaattacaatttataggcccaaatctgaaccgcaaggagctaatcactcctaaattctaggcaaccaacaaggcagctaatcctgactttctaacttatctgaaccgccaggagctaatcactcctaaattctaggcaccca

SEQ ID NO: 166122 - DNA, 325 bp, Zea Mays
gttcctggtcacttgacaggggaagagatagtcgatgccgtcagatattggagggatggctcggattagatgggtgggcatcggttcagtggtgaatccgtgctgttgattgaacagcgtgcggtctggaccagatctcagcgtaacggttcactagggttgatctagagcgttggcggttgatcggacgaactagaatagatcgggacgggatccccctccatccattgatcgccgatataacggcctcgggagcccactgagccacttaaacctagatctagtccagcgcgtctgtcttcgatcggacggcctcgattcaccg

SEQ ID NO: 166123 - DNA, 1220 bp, Zea Mays
ttgtttcaaaacaccaaacatttgataattcgcaaagtctttttctacataagtgatacaaattttttagaacaatcttaacttagtgaagttatgatcgagggggatgttagaaaggaaactatgttgtatatgactttgactaggactctaagtccagatattctagtttgtatctagatgagttaacatgattgtaatatgatcaaacttaataattgtcacattgctttgagaaaatctttcaccatattaaaaacacaaaaaagagaaaaacacaagagaatcattattatccacgtcgaggccgcatgatccaccacccgcagtcaagcctgtgtcgaggcggccaccctgttgctgagaaaatgtggcaagggagaaatgataggagagagagggggaaggagattcaatgtgggagacatagaagagagaagatgattagactatccacaacacatcttcctaaagctttaggggcaacctaaagccgcaacaatagtttttaaagaacaccctgaatttaagaacatgtcttcttgtccctaaatctagggtgttctttcactctatttttttatactctagactacgaattaaacacaaaattaataagaaagtactattttagactatgcaaatacatatgtgaaaaatccaatttaaaatatattaagaatatgttgtatcgtgtacaaatgttgtatttagagggaaccgttgcgagagtttggatctagggtgatggaatcttttagagggtggtgaaaagtaagatttagagagatggtatagtgggaccgctacggataatctacgaaaaaggaacatatgtggacacgcaagaattcaaagttgaaaacaattcaaatctaggacaagagaatgaactatcaatatcatgttatccattatcaatcgataatgacaatactcatattattgtcgattttaaattgtgcgaccatgatagaccgatagggattgtgtattccttagcgtcagattgggagccagaaaactggagaggattgaaagagataaaatccttttttatttcaaaattgaataagaaggggatattaaccctataatttcctctgttttatggcttccaaaatagttcctagtggtgtgaaaaaactacgtcacattcctatgcaattataaataggagtacgcgctaccagaatcgcgtcctttgctgagtatctaag

SEQ ID NO: 166124 - DNA, 494 bp, Zea Mays
cgacatccccttgacaatcctatgacaccttccgttcataccgaggatccagcgtctgtacatgacagaggaatccgcgaaacagatgacatggcacaaaaatggaaaacgatacaatcctgacaagatggtgcacacatcagatggtaagcatggaaacactttgatgccattcaccgtgagaaagtcgaagaggctcgtaatgtacgtgttgcgttggccacagatgggttcaatccctatggaatgagcactaccccgtacacatgttggctcgtgtttgttatcccaatcaatctccccccaggtgtgtgctttcaaaggcagaatatattcgtgtcgttgataattcccggacacccggggaataaaatgggcgtgtacatggagcctttgatcgatgaattggtacgttcctgggaggaaggggtatggacatatgactgaggtacgaagacaaacttcagaatgcatgtttggtactagtactccat

SEQ ID NO: 166125 - DNA, 738 bp, Zea Mays
agagcatcgagcaaacccattggatcaatgtacttaccggcgtcgaggtccaagcgggctggccacggtgaagtgccgaccgtggcgaagtgttgacgacggcgaggaaattcgcttgccccagccataggttccgccaggtgagggcgcgcacatcaaccaggcgacgctgcgaagctacccgaccaaaatcaaagccctggcactagcgtggacggaaaatcagccacgacggcggtcgataagggtctcggtgcttcgcgggtcaggagcccagctcacacacacggtttgccgacgccgcgaggggtgagcgagactagttgatagggcgcgagcgaagcctttccccccatatatcctggatcccagggggttaccgcgcgagcccgacatatccggcacggtggttcatggcggagttcgcggctaggaaatcggcgacgccgttcacccgactgcgcctgacgtggggctgggaaagtggagccggacccagggacccaacggacagcgaccaggggcacgaccgacaacgcgggccccgctaggcggtgggagcacgcgctggtccacccatgccgaaaagctcggcttcagttgcgcgcgattccggttttcacggggaagaaagctctggcgcggatttggggaggagataagcctgatgcatggggtccacacagcagagtagcgagcacacgcgggggagaccggctaatagagcccacacgtcgg

SEQ ID NO: 166126 - DNA, 614 bp, Zea Mays
ggccaccgctccggcgagcctccgccgtgcggggtactttggtgcgactgctgtgcggggcgacggggtgaagaagggtggtggccgtcgatctcgtgatggacgacggtggatagacgagggagtgggagattttgtaccatcggattcaattgggtggcccagatctgagacaacgtgccggttcagatgaaaacaccgggggccgctcgattgcaatctaacggatgggagtccatctgctatgttaaaatcgtgtccgttcgatttgatcctgtggctggcgtttggtggtagcgtggtcacgtgttagccattggatctggatccagtgatccgcgcggcgtactggttcgtgtgagagtgatttaatctggccgtccaacccgcagtaccgagccgattttgtaaaagagccctcggattactacgaaatcaacccgcagtacacccagggacgctctgtgtcttaggaaatcttacctcgaggcccccgtgttatctgtaaatagtgcgcccagtccagaagattagaaaaatcaggaaaatgttatagaaattgaattttagtgtaaaaataaatactagaatgtgtttaattcatagaaaatgca

SEQ ID NO: 166127 - DNA, 688 bp, Zea Mays
tggacggcgggttgatttggaaacttcacgagggctcttatgaaaaaccacccaggcgaaagggtatgaatgagtttcagtcatccgatccaatctcaatggcccagaacagcccgagcccacagctaccctagttttaatctgacccgtggatccatcaatcaacggccaaaggaatgcctcatgtactgatctaacctcccccgcccacatcagatgtgacggttagagcgcttcttccccgaccgaggccgagtagcgaaatgaccaggccgttggcggaggtgcgctcgccgatgacaggcttctccctccctggtgggtctacgcgtggtaaaaaagatgcagagggattgaagggaccttaccagtgtttattccatcctgagttccttccgtggagggtgcaatcaagcggcaccaacttcatcaattgcagcttagattcaagcactgctgcaccagggccaccactgcttcatccaccccgccgtcacgtatgagcccatctgttcatggtgaaaacgcgaccacaacgacctccccagcctcagtggcatctatcccgacggcatgctcgacgatgaagatccgcaccgggtgtcctttatctccttaccgcacggcacaaccggtgacaagagaatctccccatggtggcgagcactagttccctcgcatggtcctg

SEQ ID NO: 166128 - DNA, 1390 bp, Zea Mays
atcagttaatttgaggtccttctcgcgcacagctttgccactacctccaccccgtcctcggcaaccaagcaatttcaagtcagacgtggaaccagtgcccaacatgtccaagtctcagtcaacttatgacaagttctccaccttatatgcttatcgcagagctaaaggactttgctacaagtgtgggctttagtattctcgcggtcaccgttgtgcagatactgtatccctgcaagttgtggaggaattgtggcaactcatcaatccaccagcgtcagacactgaatgtcagtctgagaatgagggcaaacttcattccatgctgctctcccaagctgctcttcagggcacagtggctcctcggacgatgaaatttcatggcactatccaaggcatggatttattggtgttactggattctggtagttcacactcatttattagctcacaagtggcagaacatattcaaggggtgtatccattgccaaatcaactgtctgtacaagttgccaacggtgagagactacattgtatgcaacatgtgccacaggccgtgtggacattgggaggttgcaaattttagtctaatctccgcattttgccactgcaaacatacgatctaattgttggtatggattggctcgagcttttcagtccaatgatggtccattgggcagtaaaatggttggtcatcccatatcgtggctccactgtcaagctatttggattgtctttggctacaggccattgctcggtcattgaattttgtcagctctctgcactgtcggataaagaacagtctgttctctcaaccttacagcctgaccttcagtcgctgctgcacaagtaccattctctttttgccataccgcaagggttgcctccaccgaaagagtacgaccaccagattcctttattacccggtgctcagcctttccgcatgaggccctatcgttatgcgccggctctcaaatctgagatagaacaccaagtggctgaaatgttaaagtatggtattgttcagcatagtcaaagcgagttctcatcctcggtaattctggttaaaaagaaggatgacaattaccgtttatgtgtggactaccgccatctcaatgctctgactgtcaagactcgctttctggttccagtcatcgatgaatttctggatgagcttcatggtgcggcttggttctccaccctggatctccgtgctcgttttcaccagatacgaatggcaccgcaagatcaacacaagacaacgtttcagactcaccatgggcagttcgaattcagggttatgtcttttagcttgacccgggcaccagcgacatttaagcatgccatgaatcgcacattggcttcgttacttcggaaatgtgctctggtattt

SEQ ID NO: 166129 - DNA, 714 bp, Zea Mays
agcgtgtcgaataatataatcaaggacttcggaaggcgcttcaggagtaggagcggcagctttttcaggcaaaatctgttctatagcttcttctttcgctgccttttctccaatttccgagggtttctcgtcgggctccgaaggtctagcttcggcgctagcctggctcgttgtagcttcaacttcggtcagttttgttttggtttcaatttgcactttcgaagccttagcaattttccctggagtagagcttgaagcttttatcgtctccagcacatctagtacactggccatcctttttctcttgggggtcgctgctagacctttttgtgccttcggcaccgccactactgccgaagggcttagaacttctaatgttttcgtccctttgattcttggtttctcaattttgtcagtcttcagcattgcagccggctcttcaatcctctgcgtaggagcaggtcctcttgcttcaatagctgaagaagtatcaccgccaaattcaggtactatggccggttcaatgtagcgcggtcggtgggtaaggaccttcaactttttcctcttcggtgcaggctcgcttgaagcagccgaagcagcagcctttccagaagttgcaccctttcttttctgaccccgcggcaggtagcgatagtcagggtacacaaatccaatagcatcaaaaaccctatttagtcttttctttttttggct

SEQ ID NO: 166130 - DNA, 1678 bp, Zea Mays
gcagcttgtgatttccgttacatttcagacaggagtcataccagcatgaaaccagaagaaatcaaggagtacagaaagcagaagcgagcaaaggccgagaagagtctagatgcgtatgtgcagatggcaaaggctgttacatttcaggttgcctgtgcgaaagtaataatcgagacggatgatgtagctgaaggacttgaggagctcatctctcttaataacgtaactgagtttgtcatgggagcagctgcagaccgacacttctctaggtacggatcagactaacaaaatcgctctacttccttaaattggatgcacatcttacttccatgattctgaatgattaaccagaacgtcaccatactctctcacacttgaggacctgggatacttaaacaagttttcttacaagctggttatgtggttgcagtaacagaatactctattttctcttctaacaagaaatggataggaagctatagcatactcagaccaagcaatttcttaagagcataccttgcaatcgcgcattctaacagatgctctcaaactgtagagaaatgaacacgccaaagtcgatgacagcgctcaagcttttcaagacagcagctccatcatgcaagatgtggtttacttgtaaaggtcatttgatatgtaccaggtaaagggcgaggtccagctgacaccagaaatttttagcacttccagacttctatatatctacgaatagtacattccatttcagctgggaacccaatctactgtgtcattaaacaagaactctccccctgattgtcccaaaatatagtcagtattatattcaggatagaggggttgcaaatgatgaaaaaatattaaccatgcatatcaacacttacagggaagcaaatgaaagccttcctgccatacttgcatcacctgaaaaaagcaacgcgccgctgtcaccggcgcacaacgtttcaagtcaaatgggatcaatggcaaccgagttagaatacaaagaatcaagccacaaaggatacatttcaagctcatcggctgcagcagaaatgacggaatgggattatctttttggaggtgactatcctaaatatacatacgagatgtaattcttgcaaaaaaaaagttatgtagttctttgcctcaaataatttagttaaaatattatgtactcacatataaaattttcatagaatgcctaagagattgaaatttagttgtgaagtcatctaacatgaattttaggcatcagtgactagtgatgcttacaaataaattcaagacattacaacttatgtatgtttgtaatcaattgtattatttacctatgctcaaagtaatatgataaatgaaacctagggtttgcacccaaaccaaccatttttagatagatgccaaaaatcaaagcaaccatttttagatcatggaaaagcacccactctcacatgcgatacatgtctacaaaaaggagaggtttcctatgtgagcaaagtgaagctgctttcagccatgcaaccattttgaaggtagtcacactgattttccactgcgatgataacacagattggagaatgatagtttacgggtcatcaggaactgacgatgctgtcagcttctctgaaactgctgctctaccttcagttattggcgatacacatgaaacaacacaagtggtgca

SEQ ID NO: 166131 - DNA, 872 bp, Zea Mays
atttacacagactcagaaatccccgagttggacggtgggttgattttccagaaatcagagggttcttttgcaattgtacacgactgaaagggtacgctctaatttggaccgccagatcgattccaacggtcgggattagatccgccataatccgaaccggtacacgttggccgccatcggatcgatgatcaacggaccaaagccatccacaccagccctcggtcgtgaccgctagatctgatcctaacgcccaagatttcatctagccgaatgggtatgcatggcgaaatctcagccgttaacatagaaatcggtggacataatgcttgcccccaaccttcacctccaccggtcatcagcagaaggcagcaccaacatccctatggcggcgccacggtttccccacggtggaagtcgccggagttcttcgggacggtgccccattgctccccctacccctcaacaccgagattcgcaacgaggagaaagatttgaacacgtcggggatacttaccgccgtagaagggctacggagggagctggcctcatttgacaatggcaccaggcgcggaggtgagccataggtgagaactcccggccatgccccaccgccatcaagccagcagatgcgttgcctaggtgcagcgcagattggagtatccccagcttccctcgtaaagccattaccattgcttgactacgaccctgatgtgcactctctctcctttcccttccccggatccctggcaaccccaaggctgcagcccgacatggaggtcgaagacaaccgcaccaccgcaacgaaacgacgggataccctagatttattgtccgaacgcaaggccgaggaacagcaaatcccattgacccgc

SEQ ID NO: 166132 - DNA, 500 bp, Zea Mays
aaaaaaaagaaaaaggaatgaaacccctaactgggcctcagattcacatttggcccaccccgaaaacccctccgcgcggcccaacttgaatttcccctcccgcgcacgactcattgtcgggtgggccgtgttgtgtgtcgctgaggcgcacgcactcgcgaccgtgtttcgccgcctggtgggacccccatgttggctgtttcttcgaccttcagctctgtgcgtcttcttgcaaccacctcgccgaacggagcggcgggaattgtggcaacgaccacgacaactacgggggatcgagtccagcttggaaccttcggaagcgagatccttggcctataaagcgtcgtgcaccaggccctcgcggtttccccttttacagcaccgccgccgtgagccattaatgaaaaagaaaacaagctgcctccgtccaggggatagccgggcgcagtgtacacgtgcggaacctgggcgcttctccggctggcgtggttcatcaccac

SEQ ID NO: 166133 - DNA, 392 bp, Zea Mays
cgaccacaagtcaacaatgcagtgcatcgtcatatcaatcacatgacgccaaaacatctccccttggaatacgacgaccttcgacttcacaacgtacatctcctaggtgtataaatagggcaacatagttcttccaaagggcaagcggacacgcagggcgaacactcagtagtttcccactaagtctttagatattggcacttgcctcaatcagttccagggacttggggacttcccctctcccgttgtgcttgtaatccctactgcaggcactcaggtgcgagtaatataagccacatcccctctctgctggaagtagggctttacattgcccgaaccatgataaactgtttgtgtcaactcgcacaccatctagactctgggcacacgac

SEQ ID NO: 166134 - DNA, 597 bp, Zea Mays
aaagtgcagtatatattgcaaaataatgctttgtatgggcatatgcacagtctgctggccatagtctagagaccccttaatagcatgcacaatcacatttagtatagggtctcttaaggggtctttagagggaggtacaagagatgtgctcttcacgaagagtccatctctacacgactccatacatattatcgcataagtacatttatgatctaggactcagagttgtacatgtcctaatgccctcgttccatcgaagttggtgctacagtaaacacttacagcatgtggtcttaaataagactaaagcccctttggtaggattattttaaaggctcctccaatagctccaaaaaatccaccaaatggagagttcctttattggcttctccgtaaaaatggaaaagagctaccgtcctcccctcttgtgaaaataggagctagtttccaaccatatagggggctccttcagggtagggatatcaatggatgggtgtggtacggatggaacaaacacccatatatgtcgatatccggtacatcaagccacacctcgcacctataatgcctacttggtgtgttttacgcccatgtcta

SEQ ID NO: 166135 - DNA, 509 bp, Zea Mays
gtagcagtccagagagacacctaaagagagaaagcctaaaaactatgagggtcgacacacagcggaagcaacctaaagagagaaagcctaaaaaccgtgagggtcggcacacagcggaagcaggcgcagaacaacagtcggctaagctgtcacaagcaattcactgaacaccttgtgggcgtgaaccaaacgaagcacttaaccttcagatcaggcaaccacacattgtctagcagtacaacaacattatatgcatatcaatcagctcactacagcatcaaccccatcaatagatcaccaacataccaaagaacccatgtatgcctctcatgccaatatgaccatacaacaaaaacttgagatatggctccaatagcaagtaagatgatgagtaattagcacatatgacaagtagaatacccaagcaagtgaagatttacgcgggaaactcctagatagatgctagacaaatggatagtttgggggcagcccgcctcttatttatagag

SEQ ID NO: 166136 - DNA, 1056 bp, Zea Mays
ggcatcgttcgtggtgaaccacaaaaaggtttgcatataccaaaaattagtgagacactcatgttcagtctcactattggactgaagaaaataaggttggaagagacccagaacattcgtggtttcctcaacaacgtgaacataaaacgcctcgccaatgagttgaatcacaagataaattgaatgtcttgcctcgtaccttttgaattataatacttgatttttgcttatttatttgattgtgcttatttgtaaatacatttacttcgttgactcgccactgaccatctataagattagcttctaggtatgttactgttgagttctctgtgttacgtgtaagtgtggcagtatcatgcctatattattcgctgctttgagttaattttttacagacctatttactcacctcatgtgatttcacttccatattcaggtccggggattcttccctctgttccaacctgcctttcctctgaaactaaaataaataaatgtacaggtgcagagaacgaatttcagcagcagtgacatggaattattagattctcaaatcaaacttttggcagcgcatggaggctgctagagccagggaaccacaaccacaggaaccaaaaaataataataataaattagaacaaaaataatcttgtccattgaccaagaaacatccaacttgcaggctgcaccagaaggttagtacagaaaagaaaaggtccatacaaaaaacatgcacattgaccagctcacatgaccccatttctctcaagaattccactaacaaccgttgaatatttcaactgcacaaggctttatgcagagttgactcagctcaagggcaatcaaatgtcatgtaacaaactgaagtattgtggcaacaatacaaatcacaactccatctaaacaaccccatcacacatgttggagcacctccaagagttaccacaaccaacccccaatctagatttgtttagcaagatttgaagagagaaaaaaactgttctccaacaagtttctatctgaactcttaatctttccgctatcgggaaaatcgat

SEQ ID NO: 166137 - DNA, 748 bp, Zea Mays
gtcctagtataattagaaagtcgtccgcgtctccatcacttgttcgaatattagccacaacatttttgtacgtgtccttaatgagtccaacgtactttgttggaactttatgtttgtccaaagctcaccgcatatcattcattagtatttttccataagccatctccaagtaaataaaacccaaccatgtgtagatcctttttttgttccctactgctccatcacttgtcttattaagaaaatggcttccatggttgaccttccaggcatgtaatcaaattggtttatagcgaacctcgttattcctctttttttagaacaccgcaaaagtcatgcaaatcatatcattagaagatagataaaaacaaacgaggtgactgaagagtcagccccgagtacaaggatggttaggccataggcacatatagatataaatgtgcatgagcccaccaacagaacacatccaccaccacacgaccattaacaacctagcctaacctctaaagatgagttggcgggtgagaaactcatgtagaggggaggctcccgccacactccaaaaaataccctcattctccacattttgtaggacagtttgaacacaagacattttatcttcaaaacacaaacattccgatgcttccaaatctcccaggcgatcaacatgacgaaggaattaaggcctttccttagctccttcgtaatttccttgaccattcagccccaccagcttaagaatctcttacca

SEQ ID NO: 166138 - DNA, 343 bp, Zea Mays
gcaaaacatgagctgaagaggttggcgtggccttggctacaaacatgtacttacttgtcttggagtttctgcgctgcgtgtagctgatgagcagctgtgcgtggaagaagaaaccgagctatggagtgcatcatggttcatggatgaagcagcacagggcgtcagaccagcacggctgggacggagcaatccgcaccgcacgcctgatgtcggaactctccaggacatggaccggacatgtaatatctctgcatacgcacagccataaaggctttcgctagctagaacgatcgatggagcctctttcccttctcttcttaattaaatccggcgaagcaaagtg

SEQ ID NO: 166139 - DNA, 958 bp, Zea Mays
gtttaaatctacaattcgattggctatcataagcctatacccctgccacaatattgttatctcttcaatcaacggttgcataactacattgatttttgatattggagccttagggcccagaagaaccagggcaagaaacatgaccccttctttcatgcatttgctggagggaggttttatggcatcatgaaaccgaccaacatgagtacagagtggaacttctgctgaaaggagcgaatctgtccatcgacaaaccaagatgaacacttctagggtcccttgcaaattctagatcaaaaggtctagtgccttccatgcctctctatctgatggatgcaccatgatatcaagatcttggttctgatgatccccttccttatgccacctcatttgcttcactgtctcctgatttatacataatcgtataatccgcggagtaataggcatgtactagagctgcttgatcagcacttctatagtaacctcagtctcatcctcgtctaccaccactgcataccttgacttaccgcaatgcatgcaatgggtgttattctggtggtccttctagaacaacatgcaattatttttgcacacatcaatcttttcatagttcataccgacacccgagacgatctttttagattgatacaagttctctggcatcttatggttcggtacgatgagatcaatattcaacttcatgatatcagttatttgagaagttatactttgacttcatcaccataagacatgttaccacctgaagtacaggcacattggtaccctcgtgcacttttgcgtctaaggcttctaggagcttgtaaaattgttgcacttccttctgtggcggcggcgtgcggggctgcaggggttggggcgctagcgttggtgcgtcactgatggcaggagggcaaagggctgtggcgacggggtcagggtgtggggctgcaggtgcggt

SEQ ID NO: 166140 - DNA, 379 bp, Zea Mays
aggaggatgatggcggggtcccgttggatctccttttcatggccggatgtggtgactgcgtagcgtttcgaataggggtaacgggaaccgtccgatcgggatcggatgatggtcataactctgggattcattaaaccgggaccgtcagatctagatccgagggaccacgctgagtaccgattcgccagtgtccagatctaatcagatccgttgatagttgatccatcggcccagatttcaggataccctttcgccctgactattttggtaaagagccctcctggaatttgagaactaacccgctgtctagttaacaatgcgctgagtcttagagacttttacactagacccccttctgttctcagaatttgaggcccag

SEQ ID NO: 166141 - DNA, 451 bp, Zea Mays
cgcacgttgaagaggaggggcgctgggccgcatgtcgaattgctgggctgcacgaacgctagacataggcgctggtatgggatttgtttgattagtaccataccagccactgaaagagacggaacgtggcttataaacgttgctgtggatcatccgttgctcattctaactcctccagctctagtgccacactgaggtatgtctttttgcgcggctgcttgggtgattttggcaggtgtgtacggcctgcctgtgggggcccacatgtaggaggcgtgtagaccggtggggcaggtagatgacaaaataggtccacggttcagaggcagaacggccgttggcaaaacatgtcagaggcagaacggcagactattattgcttacttaataagtagtggagatatgagcatatcacacgatgtaccacgaaacataggatggacgtgttgctg

SEQ ID NO: 166142 - DNA, 560 bp, Zea Mays
aacaacgatggaacagccatatatcgtcaccgacacattgttaatgctcctgttgtgccatttctgtgcagcgtcacataagtcactaaaaattagatagcaccaatcaatttgagggaatcgctccatttcttctgtaagtagaacctcattgtaagaaatagaccagctagctgttgggaatagcagccggttgaagagaatcagaaaaaaaacatctgatagaaagatcgtcatcctggcctagcctcaatctgtcctggagctttgaaataacaaactcatccttgctaatattcaaggaggcccgaagtgttgccgcagcgttcgcttcatcaatattaaggggctttccaccacccaaatttggaagaccatatctgatggatagtctgtttggtgattttgagttctttgtctggaccaatacgaagagtcatgtctctggggtctagcttctgcatgagccaacaaagaagtgttcgacatccaattgcatcaattgtcatgtcaagaatactagagaatcattttctgactatagcttgacgttgcctttc

SEQ ID NO: 166143 - DNA, 559 bp, Zea Mays
gcataaaacaagcataagcataatttctcaataaaagtgtaccttgttccagcatctaccaacctttggcttagatatgtcaccacatgctccttcccctcagtttcttgtgtcagaacagccccaatgaccttatcttcagctgcaatgtataatcggaatggtactcctgctcgtggcgcttttaatacgggagccgaagataagtattttttgatgagatcaaatgcttcttgctgttctgccccccaagcgaattcagcatcattcttaagccgaagaataggggtgaacgcatcaatcttcccggctaggttagaaataaaccttcgtaaataattcaccttgccgagaaacttctgtacctcgaccttacaggtcggaggtcccacattccaaatagacttgattcggtcagggtctatctctataccatgttcatggatgacaaatcctaaaaacttaccagccgacactccaaaagcacatttacgtgggttcattttcaaaccataccgacacattttatcaaaggctttgtgcaaatcagctatatgag

SEQ ID NO: 166144 - DNA, 605 bp, Zea Mays
gctcaatagcatggcggtctgcctgagggtgtagctcaacacagtcatggggaatagggttcatgacccgatcaaaagccacgaaggtaccccagataagttggccgccatgaagggaggagcgcatagtgattgcagtagtactgggcggagccaagatagaggtgttgccgttggctaaggcaacggcggggcactcggtggcgagatgaggaacactatggagagtccgtgcaagaaggggatgctcgagagtggcaggtgtaggggtgctgcagaggtggcaccggcggtgtagggggcctcgcaccatgctcgctatgtgagaaggcgtcgacggtgagggcccaagtcgggggtggtgcgttgtagtgcagtgaggaaagcgcgacgctgtgacatggcactatagtggcgatgagagagaagtggtcacctatgggatggcaatggagaaagttgtagccacttgttgtaggagcccgtgttgccggtggggaaggaggcggtcgcgccagtgccggaagaaatgacagcagccgcactagagggggctgtcccaccgtagattggggtgggagccatgctgctatagtgggtggtgg

SEQ ID NO: 166145 - DNA, 743 bp, Zea Mays
tgcacacagctagggcttaccgccgacacctagggtcgccctgtcagcgggccattcgcaccacacacctcggtgcaatagtcgctgatgtcgcggggccattcgccagtcattccttcaccgcgcgcgtcgctcgtctcactcacggatggggccagagcaccagtctctacaccgcgccaatcacactaatcggtgggcatcggatcactgtggatcttctccaatccacgatgggcacaccgacctacgtaacaaaccctgcgatcgtcgcggactccagctggcaaccccaaccgacctcggcgactacaaatagagggcctcctcggtcacactcgcgtgcacctactcccaaacacctgtcatctgccctaacaaccgcgtagtgatccgcaaggcagagacgttctgtcaccgtcaggtttgcagcatggtgcggagttgggactagtctgaggatcctcacgatgccgcaaggagggaagctcgcacctcacctgggaaagcctgtgggtggggaacctgggattgctcgttggagctcgagcacacccacgcagccgcacttcaccgagactcggctaccgcacgacgtaatcaatagtgagaactcctcccctgtgaccgccctgctattctcagcgtatagtgcacttcggatttaggaattggggcgcttgcggtccagtaattggtcaccggactttgtccaaaccatggtcgcgccatgccagggggac

SEQ ID NO: 166146 - DNA, 563 bp, Zea Mays
gagagctcttgctgtcttcactttctcacttgtgtctagtatataaaatgtaaacaccaacgttctatgaaaactatcgagacttatccttatatttgtcggtgttgcagtacagtagaactacgactatcacaggttgatagcttgacggtagatgaacacaacactagcacctttgctcaagatcacgctcactagcttttgcacatagcagcacttctctcttgtttggctacaacacccaccaagcactaaatctatcacaaaatacaatagatagtgatagagaatgattctacaattgtttgctgcctttgggattcatttgtgtactggttgaggtcgtgggatgacctatttatagccctaagacctcccatagccattgtagaacagaattggaaactgcagactcgagggcaccagacctccaacagtcacctgcctccgcacgatctgattgactgccttccataccgggggccatcggactgagccacgtcagctagccgttggactgggtccgatgcactaccagacctttactgttcaacatctagcga

SEQ ID NO: 166147 - DNA, 466 bp, Zea Mays
caatgtggccatggactcgttcgctccataccctcgcatactccctgttcctcgcgccatcgtcggtgagagagagaactccttcgcgtgtggagaaattgctgtcgtgatccatcgccgccgtggaacctagcctgcgaagcttttcggaccaaaagggctggccttgtgggttcatggggttccttgggttgagttcagggcaccgccgtgtggacttgaagcctgggaagctcggaatttctcgccgtcggcgtgcgtcgtgccgcaccgtgaaacacttcttcgccggtcaccaagctaggtacgttacccacccgcgtactcgtttcgtgcctcacaacgtatagaagcaactcaatcgggatttagggcgtcggggttgggaaaccaggtagctccggcgagttccgccgtaatggtggggcggcgccgcttcacgcgactggactggggaagatgcccc

SEQ ID NO: 166148 - DNA, 1501 bp, Zea Mays
tcgtcgcatctctgattatcgaacttttagaaaaatgaaatttccctcgttttatccaataacatgaggcttcttgcgctaagctatttgctcaagaattctcaactctagatatatgccgaatgtcaaattcatcaaaagagtgtactatgtcccaatatctctcaaggtcatcatttagcatatcgtataagcattgatattttcctaaaatttgttggacaaccagctgagaatcaccaaatacttctacatgtgttactcccatataattcaaaagttctaaaccgatcaagagagcttcgtattcgacttgattattagtgcaatgggttttcaattggctagagaagtcaaaagtggcattccttggtgaaacaagcacgatgctaatcctttgtccttcattgcaaaccgattcatcaaaatacaaagtctagggactaataatgagatatgacatatctatctcaagagtatcatcaatctgatgctctacaacaaaatcagctatgacctggcctttcatggatgccaaagattcataggccaaatcatattctataagtgcataagcccatttaccaattctaccactcatgattgggtttatcagcatatgtttgattacatctgtttgacacaaaactgtgcaagagctagataggaggtaatatctaagcttggtgcatgcataaaacaaacatagacataatttctcaataaaagagtatcttattttagcatccaccaatcttcgacttagataagttatgtaatgctcctttcccttgctctcctaagtcagaacaacttcgatgaccttatcttcagctgcgacatataacctaaaagggaagccactctttggtgctttcaacactggaactaaatataagtaatcctcaataagatcaaaaacatgatgttgctctgctcccaagtgaaatcgacattatccttaaatagaagaatgggagtaaaagcatcaaccttcccgacaagattagaaatgaatctccataactaacttattttgccgagaaacctttgcatttcaagcttactagtaggtgctcctatgttccgaataacctttattcgattgggatcaacctctatgccatgttcatgaatggtgaatcctaagaattttccagccgacactccaaaggcatatttgtgcgggttcaattttagcccatacctatgcatcttatcaaaggttttgcgcaaatcgactagatgagaattaaatgcttccgatttgactactatatcatctatgtatacctccacaatgtttcctaataactcaaggaagatcaaattcgtagccctttgataagtggcactgacattctttaacccaaatgtcatgataacccactcggagaaaccaataatgtctagacatataaaggtcgttttggaagcatcctcttcagccacaaagatttgattatatctgacattcccatcaagaaaactaataactcta

SEQ ID NO: 166149 - DNA, 621 bp, Zea Mays
atttacgttgttttagtttacgttttacgctgaaatcattcgagtcagaacccgtgcacgatcggctgcacgcgattttcacgccataattttgggctttgtttgctgttacaaaatagatataggatttacgctaaatttcgtactcatttatgttgttttagctcacgttttacgctggaatcggcccgagccaggaccccgctcatgatcggctgcacgcgattttcacgccgtaattttaggccccatttgctgttacaaaacagatataggatttacgctaaatttcgtactcatttacgctgttttagcctacggtttacgctggaatccgcccgagccagaaccagaaccacatactgcatgatttatgctgtcaagtacatgtcattatgcagtcgtaaacgctgttggagattttaaatgttgcatggtttacgctatcatgtctcacagcgttatgcaatcgtaaaccgacatgcacatgcaaatattcgttcccgtgaatcgtggcagaaacttttccatttatgcatgagttatgcacatttccacatacctttatgcgtgcgtatatcggttgcagcgtctcagccgggatacgttgctatcctatgc

SEQ ID NO: 166150 - DNA, 1054 bp, Zea Mays
catgttgcttcccctatctgtccgcgttgccactgtcgtgccccctcgctcgtccgtgcctccaccaccatggcccctgtgcttgtccgtgcctccaccgtgtaggcccctgcgctcatctgtggtggctgaatactctacatcggcatgtgctatgtttttcttttaatacctagatgattgcctctgcttttcttatagcacgattggctctcattgtttcatattgttgtgcgcttgcagtttgcataggtcatggtggttaattttggagaggaaaggaccaaaggtggaaggaccaacatttaactcgacaacactatcatcttcatcgaatatctagggattggtatgtttcttttctttagatatatggtgcctaaacatgagatttgagatgatttggaatttatgtgctataaatttagttagctatttgaatgtgcattcatgaatcatgagatgtgtctgaggctttgtgttgttatctaggtgtgtgtgctcatataaattcaatatttctgtctcaagttcagtcaaagtgcataccaatgcctgaatcgatgcatttcataaagactccagcggcccctctcttgtacaatacttctccaatcctatgactacgtagtgggccttgcattcctccgctggccccgatgcgatactcgggtgttgtatctcctggacaaagatgcctgatggagcttgtgcccggctcaatcctagctttgatagagtatctactgctgcattgcgatctctttctatgtggtggaactctaagccttcgaatttatcttcaatcttcctgactgccgcacagtaattgcccattgaatcggtggagcagtcccaacccttgttgacctgactgatgacaactacggaatccccataagccgtcaatctcttgatcccaagtgagacaacaatgttgagtccatgtatcaaggcttcatactctgctacatagttggaagctggaaatagaagctacaacgcgtacttgagctgatctccttcagtggccatgaagaggattctagcccct

SEQ ID NO: 166151 - DNA, 338 bp, Zea Mays
gtccgatccttggccaaggaaacaagaatggaagcatatcaacagttgttgttcatcactttctcactgccaccagagcgtatcagctgagcaaagcccctcatgcagatgcaggcatatgcagcgatatgcatacatgatcgtcgattgtccatcagagggactgatgaataaccaaatgccattgccattgcatgagattgtttcgctttgatgcacggggcgaatcctattggccttcttggaatcctgggcatctcctctaaaatggaagcccagcagcattaatatttgcccttggcccagggcccaggcaacctcaccactcgggaagtcat

SEQ ID NO: 166152 - DNA, 549 bp, Zea Mays
attcctgaacatggcgacacgctcgagctccatcgatgatagcagccggtaactttttttccatttttttctccattctggttctagaatcctctacagccttactgaacttccattgcaaaggacttcgacgactctgaccgacgaccaccgcaggtttccaagggcgcagactcgaacttgcgaactgatgctggggctagagctagattcgtccaaaatgtccctggccattgtatgagaaagagggtgcctaagccgaagaatcttctggatggatatcgtcctcaggtttctccaagtgataggactccctctgcctctaacgttcttcaatcaattgggtaaataaaattcagttaaagtaaatatacatgttgtccagatttagtatgttttatgtcggataaataaaattcagtttaagtaaatatacatgatgtctagatttagtatgtttttatgttggataaataaaatttagtttaagtaaaatttagtttaagtaatttacatgttgtaacgtcttcagtttaagtagatttttgc

SEQ ID NO: 166153 - DNA, 717 bp, Zea Mays
ccagaccgctcgcatgggatccaacagcaagatttctatgcgacgaagggtatgtgctatcacatctgaatcgtatgctctagaatctacggttcacaactcattttcctccgatctaatcctaggcgctggatggaaatccaacggcggtcgtgcatcagctccaaaccgacgacgccgagcgacggagctgtgccccatacggcggaggccgtggccggagatggccatcccggtgcacaactccctaaactccgattagaacggagctacatgtgaagaacggtaagtcaaaattcatgggtacgaggctcatcggtggagaaggcgtgcccgagctggccacggcacacggatttcccgcgattgatcttcaacgccggcgagaaatcctggataggtcagaggcaatcaccgcacggaaaggccacgagcaggtgtggacggtctaggcaactcttcttggcggcttcagatctctccaccagctgcacagatggatctccacctcccgccgtggatcactcctcccttccagcataccaatggctgtgacttcacggcggagacgtaaacggacgggggaacgtgaggtctggttcgttttatagcccggaggccaagtctaggcaacccaaggcgggttgcctcgaccaagcgcgaaatccagggtcagtgtggcgattgttacgcccgtagcttcggtcagggtagttg

SEQ ID NO: 166154 - DNA, 444 bp, Zea Mays
accaaaattgcctggcaaaaacgcaggaggttaagatgtgttgcactgtttcctgggcttggtcacatgaagggcaaacagcagggtgaggcagccccctcttttgcaatctatcggcagtccaaactctgtcccgaattgccagccataagaagaacttgcatttggggtgcccaagacttccacaacctcttccaaggttcaaacgctatagaacctgcgaagagggccttataagaggatttagccgaatagatacctgaggtttcatgcctccaagagtgtatatcatccccatccttcagaaccacctcattaaccatatcccacataaggtattgttgtaaaccaaccaaagataggggaggtttgaaatccctcacccaagagctgttatcaagggcctgagccattgtcctagtgtacacgactttcttatgcacc

SEQ ID NO: 166155 - DNA, 356 bp, Zea Mays
cgaagatgcctatagtcgggtcagccgaagccaaagatgatgtggccaaagagctagaattagaaaaagtagtgatgctgccaaaaattctgagcccaccgatggaggcagaattgccgaaggtgacaaaggctcctgccacaattcccaagagaaggagaatggctagcgtgttagacgctgtcattgaaaccacaaaagcattaactcctgctcccacgaaaaaagttgccgaagctgctacaaccgaggctgaagtcaaagctgtgcctttagtgtctgttgatacaaaacctgctgcaactgatgaaggggccgagcaagaatctctagggtttggcataactatggagaaa

SEQ ID NO: 166156 - DNA, 706 bp, Zea Mays
aacaagtttccttacttaactgtatagtagaggatagcgatgatctacaaaatgagtctgtccttcccatggccagtcatgatgttttagttggagaaaacaaaaatgaggctgatgaagatcaaaatcttgtttgtaaaaattctttcagtctgattaatcataatacaaaagcagctgatggtatagaagcatttgatatgattctcaaccaagcagatgctctacaataccattgcctaggcgacgggcatcatcagaatgccccaagttgtgttcaagaagaaaatccacttggtgctagtgcatatgcagaagtttgcaaggataagacaacacaaactttgttccagccttctatggacaacaaagctggatctatagcacctcaaatgaacagagatgttcaatctgaaatattaccggaagaaactactaggcaagatggcatgaacatgaacccgaatattgtttctgaaaatagagatatcagatatctaaatcatggaaggcagtccttgaacaaggcggaggtcaatgtatctaagagtgggcgggataaattggctgtgaagcaaaataagtgcaagaaaaatgaacagccgaaagaagataaagaccacacagcaaagactcaaaatgttagtttgtctaaatatgattacttcatgattagtaacttcttgtatgcttcactgatgtcttg

SEQ ID NO: 166157 - DNA, 693 bp, Zea Mays
ttgcaacgtcatcgcttcagatccatacatcaagtggaagggtgtgaacccggttgctcggcacactgtcgtattcagggcccatacgacttcaggtaattggtcggcccatttgccctttttgtcgtcaaggagccttttcttgatggcgctaaagatcttgccattggcgtgttcgacgacactgttggattgtgggtggtatacagaggcgaagacaggcttggtgccgatggatctgcagaattccctgaagtctttgctatcgaacagtttgccgttgtcgattgtgagttcggacgggtctccgaagcagcagacgatgttttagcagaagaatttttgggcggtcttcgatgttatggtggagactgctctggcctcaatccactttttgaaatattcaatggcaatgaaggtgaacttgaggttcccttgagctgtgggcagtggtccaacgatgtctagcccccaacgttgaagtggccatgtgtgtgcgatgagcttggtgaattgcgaagggttgcctgagcgaggggagaacttctggcatgcttcgcatgacctggtgactcggttagctttgcaaattatcgcgggccagtaaaatccctgatgaatcaccttggctgcgagggcccttggtcctgagtgtgagccgtaggttccactgtggacttcgcggaggatctc

SEQ ID NO: 166158 - DNA, 455 bp, Zea Mays
ctccacataaaaaacaaccacctttagaagcaaagggaaatcctagagaccaaaaggtagagaaccaacatgcaggcccgtgtgagacaactaaccatggatgaagaggagaaagcgagaccactagagcaggaaattacagatatgtagtacgaagacccccctgtcaccaacggccagttgcagctgttaataatcaattttttatcatttccacaggcttgcccatatgcaatttgctttccaaggactaaactacctcgatgagtgaatccctctcttggcacagctccaagactctccatggtcgcacaactatagagcgggcacctatcccaactataatggcaatacagagccaatccaatacacaatgagttactaggtcgccatcatatcctcgagagaagattactccaccatgtctaagtcattcatcatcgctctcaaaggcc

SEQ ID NO: 166159 - DNA, 766 bp, Zea Mays
ggctttcaatatcagactttgatcaagcactggaagaggtcgttcccgaagatattttatcagagcctcctaaggctgacattccaaccatctgttcacaggtcccagatggtggtattatgctgcatgattctgctgggcaagaggtaacccgggtggtatctcgtgcctcgtcgaccttagaaggcggtattccttgcaaaagcgttgatccaggtcttccagctcatatggacgtggctgagggatcttcagccctagaggtggctgctgcggaaggcccagccctcgagggtggcgccggtagcgacccagtccccgagggtgttggagcgggctccctttctgctgcttctatggatgtccacgttggatcgcccctagtccggttcgaagaggctgtggtgacacacgtttctatggctctcgctggtcaagtcgctttagaagccagcgtatcagacgctaggagcctgccgcctactgatggggctgaagttcccccaagtcatgctcttgagattattcctgttgatctcccctcatcgagccatgcaccgactcttcctgctttgggtcttcccctgttcctttccaatcttcaggtgagtcaactttttgctttttattgttcgtactggcgaattatcttttttgcttatctgtccatgaccactggattttattggcggtgtatccacccaactgagatcttgcggcgctattgttcccgatcaagcttcatctctgatgcagtggaaccctc

SEQ ID NO: 166160 - DNA, 644 bp, Zea Mays
attttagaccagtgtttaagtttgtatatttagactaaaggtgaaactcacaacaaattctggaatttaaactatgaaagcaagtgaaaaagaaaaagaaaggaaaacaaaaagaaaagagaaaccagctcctacctaggccgatttcaaccgtttgcagcccaactaacctaaaccctatacccatcagcgctgtcggctccgctgcagccgctagaccttttgcaccgacgcgcgggccccaaccgtcatccggacttcgcacgtgccaaatccacccgctggcgctggtttgtggggcccatccgctagatccctcttcaagctcgtgcgaatcggtccgggttgaccgccgaaatcttcgccgcctgaccaggacatgctcgacttaggctcttggggtcagattccttccacgcggatatcgtggggccccctcgaccgaacgccatcacggactttgtgcccgctgctataaaactgagaactacctactcccggaccgtgcggctgcgatggttggggaatcagttgaatcccgcgacatccactcgacgccagctgggtgtgtcgtcatctcgccgtgctacttttccatggcgcctaggtccgacaaccctgctgctccatccagccatctcctc

SEQ ID NO: 166161 - DNA, 694 bp, Zea Mays
tcccgagagaccgaaggccatgacccgaaactcgaagtgaccgatatgcgtttggaacgcggtcttgtactcttcaccatgctgtaacaaaatctggtggtagccggctttcaggtcaagcttgctaaaccaatgagcatgagctaactcgtccatgagttggtcaaacaccggaaccgggtaccgactcttgagggttaatgcatttaagtaccgataatccacacaaaagcgccaggtgttgtctttctttttgaccagcaagacaggtgaagcgaaaggacttcgactcttctgtatcaccccttgtgctaacatgtccgaaacttgtttctctatctcgtctttcagcactgggggatatcggtatggtcggatgttgaatggttgagcaccttgaatcaggggaatagtatgatcacaatgacggttaggaggtaaacccacaggatcagcaaaaacagcagcaaagtcattgagaatgagctgaatatcagggtgaatctctggtgctactgagaaagttgactggtcatcagattgtgttgccaacactgaaacttccaccactgtaccaacaggaacgtttggtgtcaatccttgaagaacaactgttgtcccattataaggtatagccatccatttagctgcccagtccaccctcatgggactgaagcgctcaagccaatccatc

SEQ ID NO: 166162 - DNA, 290 bp, Zea Mays
attttatactatttttacttacgtagcaacgcacggacacatatctagtgctttatgaagtgatgtattataagtttattctataaattttggtgaaatcaaatgcattatacaaactaaatagaaaagtgaggagtgaaaagaagaccagacatacccaaaacttgctcaagatgaaaagggaagaaaagacgagcacaggctgtcggatacgcgcatcacgaggcaaaatccaaccgttagcggcgtcctccccgtaccgaggcgaaaccctgctaaaaccccgactt

SEQ ID NO: 166163 - DNA, 462 bp, Zea Mays
gagctctgtagttttaaaaatacaaagaatttgcctagggtcaacatatcaaacttgtagagctcctataggagtacaactttgctatagggattaagccttggtgtcatgagaaattttgagataattagatccaaagtcgggctgtcaggcaaccctaagtctgaatcctcactagcagtaaagtaggatgaacttagagctcgatttagagttagattcattgctcgattgagggtagttgctatagcagaattatagttgaaataaagggctacaagtttgctacagatggattggtgagttttcacacaaaaatctgagatctgggcactgtaatcctgtctgtcagatgctctgaatgagatttcccatgatacagtgcactgaaaatatccccagtacactgaatgtcacagccggcgatctccacggctggattcacgccgccgttgtgattcg

SEQ ID NO: 166164 - DNA, 996 bp, Zea Mays
cttggatcgaagtttgagagccatttcgactaagatccagtgagaatctacctagggttgctataacaaagttgtagagttattacagaggaacaactttgctatagatgtttgggcttggtaccatagaaaatctggagaaaataggacctaaagttgctctgtgaggttatttgaaggagcactcgccatggtacagtgtcgtgtatggatcagatcgccagcgcgactgacctcaacgccgacggcttcctccaccgtgattcgtgctgccgacgtcatgattcgtgcccaggggggatggatagcgtcgcggggtgaacgatcttcgccgctggtgagctggacgccactccggctagccgcggtaccgcttccctttattcaccgccctcggataaggattttcaccgccattaagccgtcgccgttgtccgccatgtggctctcactttccaccgcatcgtcgtaagccttagcggctccccgttgatcgccggagcaattgccacggcgctagccacccagccacttcgccagtaacttcttcctcctccgaccgccgcgcgtcaccgttaaaattcccggccgccgctcttgctccctataaattttgccctccaccagctccataaggtcatcacccacccagccaccgcgaatcgctagcaattgttcgccagagctcgcgaattttgaattcgccccaaatcagttctctgccaccccgaaacccacctcatcgcggccagccccattccggtcagttcatcctcccctctccctcgtttaagctttctcatatgtctacgatgcttgccgaaccaccaatttggactaggggatcaccaatccacgggaacgtgctcatcagtccgccatgttcacggtcgccgtggctagaacaaaccgtgtgaccattagtgaaattatgttgggggaaatggtcggggtggatccaatttcgtgtccgccgctcggtagcgccggtcatgg

SEQ ID NO: 166165 - DNA, 633 bp, Zea Mays
cgtaccagccaccaaaagtcaacaaggactatagacctagtagataagtgatgtggccctcagacactgaatcggctgctaagcggaaggctgataggtcaaaacgccggtgagctctcaaagaattctgctctgatagctaagctcagtaaaaggactcgtgggtccgggtgctgaagagaggagctgttgctggatctcgctgagctggtaataacaactccactggcacgtgacggaaacgtcaaactctggcagcagtggttcgctgaaaatcaaacagccaagggtccgcagcaagaggtagcacctcaatcttgtcacactcttggaaccgaggtggaggaactggtggagtggaagagggagcagtagcagtggaagcaggtgtggtggaggctataataggtgtggtggtaggctcaagagaggcggaagctggcatagtggaggaaggatgagtggtagtagtgactggggctaaggggccgaagcgagcaggagtggagtgagtccgagacaagaggcgacatacccgaaaagcaatctgatcagaggctatcctcagctaaccttcgtgctctacccgatctgctactgctgctgctgctcgagtagctctgtccaacttcc

SEQ ID NO: 166166 - DNA, 695 bp, Zea Mays
attcactaaatggatagagttcaagcccattgcctctttgacctcagctaaggccatggaattcatacaagacataatattcagattcgggataccaaacagcatcataactgatctaggatccaacttcacaagttcagaattcttcgacttctgcgagcaaaaaagcattcggatcaagtatgcttctatagcacacccgagagccaacgggcaagttgagcgagccaacgggatgatactggaggcactcaggaaaaaggtcttcgataagaatgaaaagttcgcaagaaaatggataagagaattgccctatgtcgtctggagcctaagaacccaacctagccgagctctgcatggaaatacccctttcttcatggtctatgggtcggaggcagtgttacccgctgatctcaaattcggagcaccaaggttgatcttcaaaaacatagcagaagtcgaagccactaggctggaggacattgatgtacttgaagaagaacggctgaacgcagtaattcaatcagcatggtaccagcagactctgagacgttatcacgacaaagccgtgcaacaacaatccttctcagtaggagatctcgtcctccgccgaattctaacgggggagggacgacacaagttatcgcccttatgggaaggacccttcgtggtagcagaagtcactcgaccaggat

SEQ ID NO: 166167 - DNA, 699 bp, Zea Mays
gggagacatctgtctgtttatgctagaaaataaaatatggttcttctgttttgtagtttcactttggtttgtactagtctggcgacaaggaattccatagtactcacaacaacaacatgttccaaggtcacttgtctgttggtttggttgtgcatcattttgggtcttgattgtctgttcatcagctgttttatttagagtgttgttttgacttgccaacacaccatattctttgcacttagtgacatcacttgtagttgacattccaaggtctgacatctgtatgggtatggaagaatagaaggaacgaaagggttgagcaaagacagattttagagagcagagaaaactcatctatctaaggttttacctagctaactgatgtcattgtggacaaaagtcacacaatacaccaacaatcatttcaaagaagcaaatcaaacatgaacacaaaggacaatgaactcaagcatactagcacaacataatccaattatactcattcaaccaaaacaaaaaggtgagacgaggtttggaataagaaagatattatgacatcaaggagttgggtaagaattatcaaggagttagacaagacatatttgttggtggccaagagtgaaataagataatcatgaactattaaattcagaataaatgatacaaccaaggatataaagtgagttagggagaaagcat

SEQ ID NO: 166168 - DNA, 583 bp, Zea Mays
taaaaccctaaacaagcctctcaagtgagatttcattagggaattctgaaattcagaattctaaatttcagaccttgagccaaatatcaagcgtgttcaccttgatccctaactcaaatcctaatggccccattgacaaaaacgtgcataactaacctctctgtcttgtgccagaagatggcatcgggacgcgtgccttggacacgtcaaaccagagatcttctccctgtgtgcgtcagtgagacaaaccagatttctcccctctctatctcttaatccagtcagccaaacctgctagcctccacacacaaacgacaaaggaacctgagaggaagagatctctcaatgggatcatggccataacctcaaagatttgggccaatccgcgcttgaactcgacctgtctctgcgctgcctcgtgctcgacgctgtgccagacgccagagcgcgcactggcgttcgtcacgcacgccccgagagcttgtcagagccccgccctcggccgtgctcgcccgcgcctataaagcctcctcgggcgcgcctcactttgccccgtgctcaccatcgctggccagacacccct

SEQ ID NO: 166169 - DNA, 338 bp, Zea Mays
cacgtctgccggatatgattctatatgggtgattgtggacagactaactaaagtagcccactttattccagtgaagaccacgtattcaggagccaagttggcagagttgtacatggcacagattgtctgtctgcatggtgtgccaaagaaaatcgtgtctgatcgaggatcacagtttacctctcggtattggaagaagttacacgagtcattggatatgagattgaattttagttcggcttaccacccccagactgatgggcagacagagaggactaaccaagtgttagaagatatgttaagagcttgtgcccttaagcatggtggtagttgggata

SEQ ID NO: 166170 - DNA, 396 bp, Zea Mays
tgaaggggtaaggagtgtttagggccatccgattacgatccagtggtccggattcaatccccccataatcgaaccgtacgcatccacggccgcacgctccgcgatcaacggcccagcagtagccacaccatgatcacaccagaacagcccgtatccgttggtttggttatcaacggttcagatcaatccgcacgaagaggtatcctcagcttctaatctggcgcgctagcataagatccaatggcggctgatcaaacaccttcttcacctccccagacggaaaacacggcggtatggatagcccccatggcggagccatggccggctatggccgtcccgcgcaacggtgctccaagctcaaaaccgaatgccgcaaaatcacatggaggacaaagc

SEQ ID NO: 166171 - DNA, 564 bp, Zea Mays
cagtagaccgccttaggtagcttgtatatcgcctaagacactgccctggtaaaagccacgatagcgctcgtgccagtgacttcccctctctccggccgccagcacacttccttcaaattggacgccaccgccgtaggactctataaattgctgcccccatgagctccgctaggtaattatgcatccaaagcaccagctcttgcctccgatcgtccaccagagtctcccaatttcccatttcccccaaatcggtcagaacgccgccgcgagacatctcgccgtggccagatgtctacgggttagttcatgcccttccgtgtgatgttctagcttccctcatgtcccctgttgctcatagacccgttcgattggactagaccgccttgaatcgtctagaacacgttggtttgactccggttttcatcgccgttgtggccagaaagattccgacccagattagtgtaattagttgaggggattagggtcgccaggggtagaatttggtgtcgaccgagtaagaagcttagtctttctgtattctttccggtacaggctcgccggaga

SEQ ID NO: 166172 - DNA, 731 bp, Zea Mays
gttgaatctttttttggtgtgctgaatgcatgttcagcctcaggttgctgcaccgacgatgtagcctgtatgttgggagacatcagcgtggggtgcgtgtcccagtgacgcacgagcaagtgattgtcgaggcgcggaataatactcctggcatcaaggcacgatggtgtctgtacattggggtgcggcggcgagctatggtccatcgtggtcgaggcgtcgggacacagacctgtagtcgaggtgtcgggacgtggagctgtagccgaggtgtcggagtgcggagttggagtcttggcgttgggccacggtgacgccggcagctggccatcgagctgcatcgcaggagcatccaccatcgggagaatacgaacagctcgtggcctggaagcttatgagacaaggaagcttacgtgagaagcttgttctctgttggaagacaaggtaaagaaacaaagatcgtggagtgcgggaggtgttttttgcaaaatagtcaggtaccgttcgattcaatatgtacgatctggatgttacttgtgcacatgtgcatttcttagctatgtgcattcgatactttgccaaataacatgcccacaagctttatctattcaactctcatgctccactagtttgctccatgcccgagcctcgatctagtgttccacaacttagcaatactcaatgcactacgactagaggctatggaagctagtgcctgcactatcgctcgc

SEQ ID NO: 166173 - DNA, 1077 bp, Zea Mays
cccagtggtgccgcgccctctaccatgtacctctggtttagcaagggtgattcatgcatggttagttggttacctgcaaaaaacagttcgtcagcagacataccacactattttgaacttaaacttatacatggggcaattagagctaaagcataagtgctttcggataaattttccttttgtattttttgcaaaccatatagcctcatatgtgtaatgtcatatatttcattgtcaatactatatagaagctcttgcacattgcgttgagttgttggctatttgtcgaaaggcgagagcctcctagaccccctcttcgtcgcctctgcgacaaaatcctccgacgaacatggttgatgcctgcattagattaaaagagaactatgttgccacaagcctaaagaaatgttgggatgctatcaagttcatttcagatttaatattaaagatttggtcagacgcatcccaaagaaatacttaaaaatctatggaggatgagagttagacggtggctggctcaagtgtatagcttagattgtcctaaatgattggccagccggtgtgtttcgtcggtgcttagtgcgtaacaatcaaaaaaattatatgggcactgcttaccttttttggttcatcaccaaccactcacgctctcttcgagcccaacttccccacaaatcgcctcacgccatatcatcacgggcggtgagtccctggtgaagcggaggcgggagtcgtagtgcggcacgaagttgtgtcgggcaccgccacgttgctccattccggtggagcggcggtgactaggttaggggaagtggcgagactcgagaggaggtgcgggacaggcatggcgcagtggcaatagcgttgaagatttcggggttgcttcgcttctctggattgcagcactgcacgcagctgactcatgtttcactcgtagggggtcgttagtgtttagcatcagagacccggttataggcaggacaacaggttggattggaaaagggataatgacttttttgtaaaatggatgacaggtgaactgcataccttttttggctagtcaccaaccactcgcgc

SEQ ID NO: 166174 - DNA, 1281 bp, Zea Mays
gtgctgcaacaattcattatccaagtggaggcatagcaacaattgtttgctgctatagtcgtttcatgcttgtggcagcagctagcaggcgacagacaatgaagtggtggtggcgggcaaccagtataggcgtacaaggagcttggtttttttgttaaagattcagggagcttcagggaggtggaaggtgttttctgataaaataccgaggcgggagaggcaaccgtttgattgaagattaggggctgagatattatatgtgcaccatgtgcaccaaagcttcatgtgcacagatactttgcctattacaaatcctgttcgaaacgacgtcagctattgtatccacgtcagcccacaaactttcagccgtccaatgatttattgatggtcacagaagtgtcggacttcttgtgcttttttcccttccatacggctctcgaaacttcatccccatccattgtctctcgcccaccagtccactgcgcaccaccctgccatggacgacatggacagagtccacctcgccgtggacgacatggacagcgccgcccgctctgcagcctgttcgtcccagcgtcctatgtcgccgcgacctacaggtacttctcgtccacgctccctcctctgctgtgcactacacgtagctactgatctagttcaccgtcatttttttgccgcctccttcgttttagggttcctttttttgaccggccgcgcttcgatttaaagtttcttcgctatctctgttttagggtttgagtttttgctaaacaatcagtgacctccctcacaaatcatttacagatttgcgtttatcacatgtacaatttccaaatgttactgtatactcaaaggtttacggtttgttttcttggaatcacagaatttttttcgtacattacaaagcgtctaccagggatcttgtccgtcttctggttttcaagattaaaaaaacctctttcttagggtttattttcttcctctgttacacccattttcattgcaacttccttttcgaaacatgttgagtaatacccctcctccttaaggactgcaacaacgaggtaattatctcttgtattattatgttttctattaaggtatcattagtcgactgcatgttatgctccactaaaattttattttttttcacccgaccttgtttgttccaccgagttggtaatctcatatggcattaaattagaatacacaattttttttatcttactagatgtctaccttatgatttgatcatgagatcatgttaatgtgtggtatgcc

SEQ ID NO: 166175 - DNA, 460 bp, Zea Mays
gggatgtgttgggtaaacccacaataaaatccatgcaaatatcctcccatgatggtatgggaaggggctgtaaggtacctgctaccttcaaatgactagctttgactctctggcaagtgtcacactcagatatatacttagcgatttccctcttcatcctggtccactaatacaaggatatgagatcatgatacatcttgttactgccggggttcatggaaaatttggaaagatgagcttcatccaatattttcttcctgagctctggatttttaggaaccaccaatcggtcttcaaaccatagaactcccttgctgtcctgacggaagcatttgtacttatcccccttttggttgagcatctccttaatgacttgaacacccttgtcacccatctgtgccatgattatctgctcatgtagagtgggttccactgacatataactcaaggttcctaagga

SEQ ID NO: 166176 - DNA, 441 bp, Zea Mays
tccaatcaggggcctgaaaagcgacaaaggttggtgatccgacctttcaatcaaaactgttcttcacctcatccaccctcctaccccttcaaacagcctgtattcatccgccctgccactgcccccacttcaacaacttagccgagtgcccctggtgctcgtttccccgcactcccgagctcagcaactggctgctacaattgtgggaagtctggacatatcatcaaagactgcccatatccgaggcggaacaactccaataattagcagaacccggggagttccagccaaggtaagggtaacacgacaaataatgcagcgggcaagaatatgaagaaaactgggcgaatctactatacacaagtggccactacaccggagggagagccggttatgatgggtacgtttctcgtggccaattaccctgcagtcattctcttt

SEQ ID NO: 166177 - DNA, 464 bp, Zea Mays
caatgatgaacaaggatctccaggatgctgcgcagaagcgtcgggcggtcgtcaggctcctcgatcctaggcgtgaagcgaagagggcgtgggggagcgtgaaggctgccgccgccggcggtagccagccgacgctgcccgcgaaaccagccgcacccggctccagcaaggtgtcggagagtgcgaaggccgttgctgccagtagaatcaagtcgacccagggcgaggccacgaaggttcgggagctgccctcgccgtggaaacgcgttgccgacttcggcacaaatattagcatggacgactatttcgtcggtatgttttttttgactggcggtacgttgcagggtcaggcgaggggcaaatggttgttgtcccgcctgtggtggcaaccacggtgtcaaccgcggtggtcggagcgaagggtggcactttctgcgcaagcggcgagatttcatcggccgctg

SEQ ID NO: 166178 - DNA, 661 bp, Zea Mays
gttgggcacctggaatacggtgcagtgattaacgcctcacaaatacgacacacgatgcataagaaaatggaggagatgaatggggagattgggaagtagcagtgtagggcataaaatttgcagaggaacttgagcacattgggaagccggacgaccgtcggcgggcgtgtagaagaccaatgtgacgcggggcggaggattgtcagcggcgggcgcctcgacgacactgtcaacggcggcgccgattagggttgagggcgtgcaggggcggaggaacgacgaatcgccctggcgacacctaaagaatcgcggcgagtcgaccaggaaggttgactgcgcggggagttagggtatagaagtgtttgaccgcgtggaaagtgggcctaagccggtatttctggaacgtgggttcggatgaggtatttacgctaaatcgatattgtggcataaacattggatgaaaatagcgtaaacatgttttgactatggcagtggtggttgaccgcgtggaaaatgggcctaacccgctttttctcgaacgtgggttcgggggtgttactctgtttacgctaaattggtttgctgtttgcgctaaattggttcacttgcataaatagtgaacggacgtgggcttaaatagatttattggtgttgatggtcg

SEQ ID NO: 166179 - DNA, 334 bp, Zea Mays
ctttattaataactacaccaagtggcaggggatgcccacaccttggtgacaatcattacaaagatccaacttcatcacgagttcatgacgacagacatagaaaaacatgataagtaaactagcactaactaaaactaagactaagacattgaattaaacattattatagactccgactctatcgatctatggctccaaatctatctaggtcctgcagtcaggggtgccataagcataacgaccatggggcgacgagcagtaagggtgctgaatcctgaccggagcgggggaaccaccatcctgatagtggcacgcaacgcactctgcacgcagt

SEQ ID NO: 166180 - DNA, 650 bp, Zea Mays
catgcaaccacactatttgatcaacataaatttctgcatacttctctgtcttgtgggtggtatgcactggtaagaaatgagcggtcttggtcaatctatccacaataacccaaatggaatcatggtgcctagaggtgttgggcaatcccacgataaagtccatgcaaatgtcctcccatttccaagatggtatgggaaggggttgcaaagggcctgctgccttcaaatgactggctttaatcctttggcaggtgtcacactcggatatatacttggcaatttccctcttcatcctggtccaccagtataaggatctgagatcatggtacatcttgttgctaccagggtgcatggagaatttggaaaggtgagcttcatccaatatcctcttttccgagttcagggtccttgggaacaaccaatcgatctccaaaccataaaatccccttgctgtcctgacggaagcacttgtatttctccgccttctgcttgatcatttcttcgataacctgcacacccttgtcttcaatctgtgccctaactatttgctcatgcagtgtgggctccaccgagatataatttaaatcacccgaagaaacaacctccaggttcaatttgcacaactcatcacacagggtggtaactcttgc

SEQ ID NO: 166181 - DNA, 1355 bp, Zea Mays
gttgcgatagacgtcatggcttcttctccacaggcatagcgggtcatgctgccaacgtcacatggactgccatcatccgccccttgatgacttaacaaaggcccactctgaggtcatctagcagttgatcgacctcatggtgaagcaggtcgctgtcctctcacgactggccaccatggagggccactaggcatcctcaatggtagacgccataccctaggtctttccctacgggatgatggggtatgagacaatgatgttcccgtccttcacctacaacaacaaggaggacccctaaactggctcaactattgtgaaaagttcctccgtgggcaacggtcagtcaacggggcacctgttccaggccttagggtacctattccgcccaccaggacacttcttgtgccgcccggactcccagggcatctgttctttcccctgaggcatctgttccaatcctcaaggcattttgtgcgccaaccaccggtgctcggcccctggggcatatgctctagcctctagggaatttgttttggcccctgggacagggcacctattctgccctctgggcacttcatgcatcgaccaccgttgctcaagtcctcggtgcacttcttgcaccggtccccaatgccctagcccccggggcatctgttccgccccctagggcactcattgcgccgaccctaggttagtcgacccttagggtcgttcttgcgtcggccttcaaggcatctgttctagcccctagggcatctgttctggccctcaaggcacttcttgtgccggtcccgtggcaactcgtctttcggctctcgaggcaactcttcttgctcctgcggcacttgtttcgcccccggggcaccttggcattagggacatcccggtgtggcgtggaccaacagccatcagacgagaaggcatagggatccttgcagttgcacactgcatagcatcgtcacattccatcactagcctttatgaggacgtctccgttggttgttgcaactgctcccaggtctcgacacccaatagactacgccataagatcaaggtgattgtacacatatcacttcgtcaccatgggaacatcaacatctgcaagcatggccaccaacacagcttgaggatgatgtgtcttgcaggagtagaatagtgttatggcaagtggagctgtttggatagataagaaaagaatatgttagattgttttggttagttaggataagaaaaaatttggttagttaggataagaaaagagataagttacattgatttggttaggatatttccttagaggtcaagtaagtctctctatataaggagagatgatgtatgtatcaatctaatcaagc

SEQ ID NO: 166182 - DNA, 386 bp, Zea Mays
caacacatggtgcagccgcatgttggcgatgacaggggcgatgatgagtggcagtatgccggcccctgccatgttgttggggcagtcggatgccccgaaggagatggtggtgctcctccatcgttgatgtggggcagccttcgggacccctggagttgccgacaggacctcacggcgcagggacttgacgttcctgcgggaggtgagttcccagctcccgccgtacatgacgtacagcttcttgcgacggtcgctgtcatccccagagtcggaatctccagtgaagacatccttgtggtccccctcgggtggttgatacccaagttctcattctcccgcggccacttcgtcattgtcgaccctctccttactaggccgacgacgag

SEQ ID NO: 166183 - DNA, 576 bp, Zea Mays
gttcagttaggtttgagggcgatgcagggcctttggcctatcaataaccggttctgtgtcagtttgtatttggatcatatcttctggatgttcatattttatacatcatgagattgaagataaatgtttgcaaatgcacatggaggttgaagacaaggatagagcaaacgtcaatgcactcctcaaccaaacacagaacggagcggctctgctctaatacgctctccaaccaaacaaaaaacagagtggctccattctgcttaccaaacatagaatagatcgattccgttctcagaaattagaatggagctattccattctagttggctccccaaccaaacacatcctaaaaggcagttggtttcagcagctcctatatacgagctcgaaagatacggaaaggagggagagtaccctagatttggggggtatggcagtatggagaggggatgcccgtttttcgcatcgacgtctgcaacttgttggagagatgaacagtgatcgcggtctcctctttttcacatgcgggatgcctttatgggacccgctgggttggtctaaagtgtttgttttggg

SEQ ID NO: 166184 - DNA, 556 bp, Zea Mays
tgcgccggcggatgattgtattcttgaatctgccttgttgatagctcttggcgcccaccgagtgcatcaacaagacaacaagaaaccggtccctatacgaatggtattggctaccgtgttcagttcgtccgcgcggttgttgggaaaaaaaaatggacggtttagttaggctggtgcgcagccggacaggacaaatacacccgtgcggtggttaggcagcggagattgacgcatcattgcgacctcgcaaatggtccttgtctccctggtggttgtatgctctgttccaacatccgttgaggaactgcgcttggtgtgtgtggtccagttcctgcaattagcgtggttgttgttcgtcgcggcatcttcgtgggatttggtagatctgcaagaaagtgagtgctgcttttcaatggagttctttagcaatcagtgagatttggtttgccataggccgccttcttttcctgggtctactgattgagccctcccagtcccatgtgcttgccattaagcaacttgacaatcaatgaaaaggtgagggggtccgaaggag

SEQ ID NO: 166185 - DNA, 584 bp, Zea Mays
cgacaagcccgactagggaatgacggtagccccgccacggcgcggtaacgtcacttggtggcacaatttctccagagcgatgatgaccgagatggaagaaaggaggggaaggaagggacaagccctgatttgcagcttgctttatggacgcgagggtgacagagatgccgcaacgggctcgcgataatggcgcggccggccctccgaacgtggcggttagcacggggaaggaggtcgtgcaacagtaagttgggtccgcgggaccagtgactaaaggagttgggctacacatactagtggatgatgaggcgggcccacgtgacagcgattccagcgagtgccgcacgcctgggagaccgacgatgcagacccacatgtcggcgctacagtcttctgggccgtgcgcgtggagcaaaagaaaggggaagtgggccgattagggtggctgctggccaatttagcttagaaaccttttttttattttccattctcttttcttcctttccaaattcaaacttccatctcaaatttaaattctaatcttgtggcaaatttatcctcagatttatattgtgccattatag

SEQ ID NO: 166186 - DNA, 399 bp, Zea Mays
atccttctctgatccattccctctggtgcaaacagatggctttgggtgatcaaggagagcaccgcaacaagatgccgacagagcaccgtggatagatgaagcagcctacctgtcgtggtggaagaagcaacagtggttagtggcaaagccctcaagagcaggcccagcaagatatgcaaattgagatgtatgggctatcgaatcaggaggatgcttgtcctggcactccaaaaagtatcaatgagtatactactcttatatgattcattataatgaggaagtccaagaaaggaggcccaagacactcaggacatacatacagtgaactatcagaatgagttccatactatcagggaagctcgcatgagaatgccctacgttgtgcctaaggaaagaatc

SEQ ID NO: 166187 - DNA, 555 bp, Zea Mays
tctctatcccttcttcttcttaatccatccacttgaaacaacgctaaatgcacataaaaaatatccacaacctctcccacacagcacaaccagatcacttcatttacctccaccttcctaactcaatcgcatccaatggttagaaatcccttgtcatcactcatgcaccatcaacgacaccctcttccgcaagccatcaacaacataatttctgcgcctcagcaccgactccaccgatcctgcctcaccagatgcagtcagcgctgcgccaccagtagaaagccacgctcatgtgatccgcttccttgcggactcgctccacagccaccgcccaaccacatcgaacgcaatcaacggcgcgccaccgggagagagcatcgtgccaccacgagaaagcaccactccatcgatccatgcccttgtcgacgcgctcaacgccactccacaaccccacaacgccccgacccgccccacgcctcccgcacacaacgcccaacactgtctcgtcctccgacgcgatcaacgtcgtgcaaccgccacatgccccgctcccac

SEQ ID NO: 166188 - DNA, 362 bp, Zea Mays
cttttacagaagaagaaggagccttcggttgccgagaagcccgctgaaccaaaaaagcgaaggattattactgtcattgaggctattgaagaaacaccgccatcggcctcagcgctgaaaacagaagcagccgaagctgctcctgccgaagcttctacttccaaaactgcagcaaccaaagccacaaatttggaaaacacactttctgacattgatgaaatgattttgaatatggctgaggaagaaactgctgcagctgctgaggaaacctcggctgcagtgcctaaaaaaagggagaagatgcctggaaaagagaaggagcttgccgaagatgcttcggaagaaagaaatttcaactttct

SEQ ID NO: 166189 - DNA, 602 bp, Zea Mays
cttgagaattacagaagaaggtccaaggctttgatgcagtctatcatgattgtgcatgtgaacaaggccactcatagcaccgttcagcaacttaagaacaaagtatctccttaactccaatttgtatgctcgatcgaaagggttccagaatggcgtccctccagatttttccttcaattgccttgcactagttacatttgcatagtctgcagcactatatctcccgtcatcacggaaggcgagccactgtcataaagctaagtcagtcttgcatgcattctgtggggagcctggcaacgaggtagttatgagtaatatacctgttctccagttgctgtctcgaaggcccctaaaagaaactggatgttctcgcatatgtcactagcatcactctgtaaatagaggccaaggaatagttttgtgtgcgtaaatatcatgtgtaagataatagttcaggcttgcagtttctattagcagtttatggtttacgtaacctgaagaaacgcatgagtccttaactcattcagtgccatcaaatcagcttcagaagcatcagcacgggctccagggtatacctttgtttcaaatcctatgtcttagca

SEQ ID NO: 166190 - DNA, 585 bp, Zea Mays
ccactagccatcacgttctgtcccccatcctctgtgatcaacggaattcccctgaaccagttttttccgccaccgtgaacaactcttccgtggccagcactcctcgggttagtgcatacccaattgattcgagttcttgcttgtttttagccccctgttgctctcggagccggccaattggagtttgcctgagtctcacatcaccggaacacccctctgctccgtagaacgccgctgcgacgccctctctgtcgacccgcttttctactcttgcccagcccaaattctagcgtgtacgtaaactctggtgaacccgtgaagcttacccaagcttcaatttagtcagccatgctttcggttatccggaacgcattgatccattcgaccatccgcactgtcgccatgaactggttgattcaaagccccgttagtaaaattgattgaggggaaatgcgcgggaggagttcaatccagtgtttgccgctcgggagcaccagtctttgtgccatccggccagtctaacctcgccggtgttcaaagctccgccgtgcgatgtcatggtcctggcgcggtgaagaattagaa

SEQ ID NO: 166191 - DNA, 374 bp, Zea Mays
gacgagtcctgtgtcactagtttgtccaggaatatctataagaaaaacaaaggaaccagttgcacttggtattttccattctcaccggccgaggccaaccaagagcagggcagcagacttgaagcagactcgcaaccggcatccgaactctggtgcgaactcgagcttgctcggccatgctccatgcctccctgtgcggcggcgctgccgcggctgagatttcgcgccaccaggagtaataactgcttgtagccggggtcacgcgtcggccgtcgctgcttcccaccttcaccgaccactggcaaaagtgaagtgcccctccaacccaacccagcgcccagcaacaaaaaacaggtaagaaatctgaagcaccg

SEQ ID NO: 166192 - DNA, 806 bp, Zea Mays
gtgcagccggactagcacaacaagtgcgcaaaaaccgaagtcttcctccaaagactatccgtgcaaaagtcgcctaagggtgcagccggactagcacaacaagtgcgcaaaaaccgaagtcttcctccaaagactatccgtgcaaaagtcgcctaggggtgcagccggactagcacaacaaagtgcgcaaaatcgaagtctccctcaaaagactatccgtgcggaagtcacctaagggtgcagccggactagcacaacaagcgcgcaaaatcgaagtctctctcaaaagactacccgtgcaacgaccgactacaagtgccgccggaccgacataataaacacgctagacctagtgcacaagtcccctacgggcacgaccggatcagcgaaggcacacagcctcttcatacaaatcatagttacatacgtacagcgagggcatcacacctaatattggttcaaccttcgggataatacccatctccctatagttaaacagcattatcctcagctcctcaccctcaaaaagacttcgcaattccccctcacctacactcgccccagctagcgaggacaacaattcccgcttgccagtcctgtccacacgaggatgaccaccctccacctcactcactctacgcttcaccaaagcccttcgacgcctacacccaacacttggacccggaacttcagcacccaccacacgcggagaagcctccgccgcagccacatccaacgccgcaaaataatccaaatcatcatccgaagactcttccgtccacaccaccaaactcccagaatcatca

SEQ ID NO: 166193 - DNA, 613 bp, Zea Mays
cttatgctgagttctcatataataatagttaacaggccagtctgaagatgtcaccgttcgagactctatatggcaggaaatataggattcctctgcattgggatcagactagagggagccagttctttgggcctaaactgattcaagaggcagaagaataagtccgtataattcgggagaatttgagggtagctcaaaccagacaaaagagctacgcagataatagaagaagaccactcgaatttgagggaggagactatgtgtacctcaaggtatccccacttcgtggaatgaggagatttaaagtcaagggcgaattgtcccctcgctatattggaccattctgagtttttaggcgagttggagagatggcctatcaactcgagctacctgatgatctgtcggatgtgcataatgtgttccacgtgtctcaacttaagaagtgtcttcgtgtccctgaggaacagttaccgatggaagagctcagtgttcagggtggtttaatttacacggagtgccctatcaagattcttgacactttggctcgagttacaaggaataaggtgataaagatgtgcaaagtgcaatggagtcaccatggagaagatgaagc

SEQ ID NO: 166194 - DNA, 480 bp, Zea Mays
cgggcatacaacagttcaacaccacccacacacatatatacctacaccctgagaccaggtacattttggaactcttgaaatatccttatgattttgtacatttgtataactaacttgttgatatttgcattcttacataggctacactaagagcgggtgggagtgggacataaccagctggaacgacttttgttaactccctcttcttgtaccctcctactggtggcggcagcagccaaagctcaaaccatccaagtggttgtccctaaatcgttgtattatactttatatttgaacttgtggttcttctttggttatggatggtgaatgatatgggttaaactgaatttatgtgttttggtgaacaaaggacttaacttgtgtcattgttgtgagttgcattggatatgtgagctatgtgttggtaatgtgaagtatgtgagctatgtaaaaattggtaatgggttggtattgaatttg

SEQ ID NO: 166195 - DNA, 450 bp, Zea Mays
atatgtgttgtattccaaatatggttgagatattgccggctaagatctataggcagttaatagaaatagatcaattgtaaccatgtaaaacttatcctttcctagaatagatctaaagctggccatactcatctatatatatgtaactcgcgccttgtttttgtgccaccagaaatatcaaacacgaagccgtcgtgatctctggagcggagaccgacgttccacctatttccatcgcgcctctgatttctacatggtaccagagcctagggttaatcatcctagcaatggcgtcctcaaactcgtcatcgaatcctctccttggtgttcaagtcacagagaaactcactcgccagaatcacggtatgtggtcggcgcaagttcttgcgatcttacgaggcgcaagactggagcggtatgtcaacggcaaagccgtcgctccatctgaag

SEQ ID NO: 166196 - DNA, 1014 bp, Zea Mays
ggcgatgtttccgcgtgggtgcaccggggtcgtggtggcgtcacgcgtgggtattgaccgcgtttatacttgcgtattttgaatgtaacggttacataaatcgtcatagcgatgtggtctggtcgctgtggtgttctggtttgcgatttatgcttgtataattcgatgttatcaactgcatatcaatcgggcttgcattgtttacgatcatatacacaagaaattatgattcatatggacacgacgtacaaccaatggtttatatcacgtacttggcgtagttcttgattaatgctttttgtaaactgtttacgacactttgcacagttctttatgcttaatatgaacacagcgtaaataaaatgtccaactgatcgtgcactgactagtggaccccacaatcccgcgctgctcccccgcgggccgactgagccaatatggtcaacgttcgagacccacccgaccacaatcaattaactcctctcgggaccaccgaaaccctaaaaaaatcagctcctccccgtcgccgtcacccgctcctacgatcgccatcgaggactgcccccaccgcttccacccgctgtaatctccgtgcttcatcgattgaccgccgtcgttctccccctggttcgtttcccctctccttctttcgagttccctacattcttttgcatagttcagtcgccaattgccatgaggttcgccacaccccttctacatccttcccattggtttgaaatttattgaatcgcctcattatctatagtatattaatatctatcactgtcagttaatattttttcaggatccgataatggcttccaatttttcaattgcataattgtttcatactgttcatttttatgtaggtactgaatgttgtttataaacaaattttatattttttataatagcaatcaatagattagtgatgttatgttactgtgttcttattgttgtttccgagagttatactacctataattttatgatttcttttgcataatttgttta

SEQ ID NO: 166197 - DNA, 1011 bp, Zea Mays
cttaagcaaacttgttagacctttaaatgtgttgttatccaaatcaccaaaactcacaaaagagattaatgcactttcaaattgctctcgttattcatctacataaattctaagagattgaatgtcatctgtcttacttccactgggggctggtgcagccggtcgaagagatgacatgtcacactccccttgtcgaaagatcttctgatgtcagtccaccttgaaattggccaggtacttctcctcgtccccctcgatcaactgtcttttgtagtcctcgaatctctactgatcttcaagcgacaatttctccatagttgacttcacgatgttgcttaagatatcggattgatcatttgaactgatcatctatggtcaatctctgctaggtcacacattttgtccccataggaatcgccaaaaaatgtgttggatccgattcgatgccaaacactaggggtgtggtgtcctctgcatgagcgccaacggttcacggtacagggccgcacagtccgtaactttgccgcatgagaggatcttccctgtacggcgtcgaacgacccacgatggcgtgggccatcttcttcttcgcgagaacactacatctcaccccgccccaagatggacctcttcgaggaggagagttccaagggtgcttcgtggtcggcaggccacttgggacgtccctacgcggcgtatggtcgaggaaaactaatactatggctagattactgctactcctagggtgagaaagtaaagaaaatgaaatattgatttattggtttgattgtgttattcgctaattggtcgtgtatatatatactaggtgtatgctcgtacattgttacagcaccaacatgttatgataaaatacattaatatgcagaagcattaatcatcattccacctatgtgctccccaatgaacaaactgatgtcaagaaaacaagaaggatggaaaacaaaaccatcgaccagcttgcttatacaagggagtagcacttttccctag

SEQ ID NO: 166198 - DNA, 517 bp, Zea Mays
tgcgaatttcgggtatgtacttggtcccttgtgttcgcctaggttctaatcagggttgggatcgcccgattttggtttaggcgagggaggctcgtcgacgatctgcgcggccgccgtggcactctgtcgaggcgttcggctgaccggcgttaggcgggtgagagaagacgagttcatgaccgtaaatgacagaatgaacgaccctgatttgtttgagaatacccctttcacgcgttgaatttggaccgtagatgcgagatcgtgcgatagaaagcaatcctgggtttgattgatcgctgaccgttagattgggatcggatgggcctagttgcataccgatttataaagccttcgatctaattgtggcccttgattcgcgatctggcggccagaaaacatgcataccccttcgcggtcacgcatttgcatatgagcccctgactaaaacagaaatagaacccgcagtcctgggctactattgaccgagtctcagaatttttatgtaagcgcccctgtg

SEQ ID NO: 166199 - DNA, 597 bp, Zea Mays
agaactctttggctgccaatagtaatatgggaacaaaaaccaacagcaagtttctgcaacaaagtaaacaatgtagttaataaaacaaacatgccagcataacagcaattttctaaaacaaaattaacaatgtagtttttgcaatattcgacaattatgttgtgaacactttcattggaaagcaataaactaggaacaagaaggcgccagcagccaccagtatctaattctgggccatagttatctgttaggggagctgctactgcaagttaggatctggagagtaagaatagggggattggtcagagtaagaatagggggactgggcagcagtttgttagtagacagccagcattaggcgatataactaagggccgcctgattgtgaggggcatgcagaagtagaggactgtcgatcatagccttttgaccctaactctaataatgttagtttgagtatcccaactttcaattcagtttagttttggcccctaaggccagttaaagtggttctggctgatgtggcagcggtttttggattgaggaagaaatactcaaacagctctatttttttggaagaaacgaatgttttcggac

SEQ ID NO: 166200 - DNA, 750 bp, Zea Mays
ctgcaatcaggacgcccccagcagtcccgttggccggaaggcacactgtctgggaggcaagagcttgaccaagggtttccttcagaaggaagtcattccattgtgagatttttgtttcttgcaaacacaccacagatgccccagaggaagaaataagattacgcacactggcacgtcttgcagcaccattcaacccacgcacattccagcataaaatcttgcagtctgatctattcatttgaaaataaaataccagttgcgctgccatacaaataagggagaggaggggcgtgccgggctggggagccccatataaggcaggccatcccaaatccaaagccagaaacacaaaggacacaaacactcgctactggcaataatagaccaccaaacactaagccatgaacacaaacttccttggagacacatcataggggaaactactaccacacaccactggcccaatgacatggccttacgccacaaattccactgcatcgactggtgccaccgtcgccctggtagatttcttcatcttgttcgtctccttcgtgccgaggttggccagtgaaataattgcctccgccttgcctttggtcagtgggcgatcaaagtgctgcgaaagttgttcaacaacgtcaagttcagataatacagatagttcattgcgatcagatgtcgaatttaattttttgaccaaaagatcttcagctatttgaagtgctcctttgccgactctattcctagcct

SEQ ID NO: 166201 - DNA, 515 bp, Zea Mays
ctagacggtgtttatgtccactcaagaaaaacaacacacatcaatatgccacatcatttctcaaaataaaacaatgaccatggaaaatttagccaaattgagtgagagaacagtccaaacataggttaaggttgtaaggcacattgggctagtcgatgaagacgtctttattttattttgagaaaaatgtggcaaattgatgtgtggtgttttccttgagtggacataaacacaatctaggtacgccttgaatagaagggattataggaaacctagtattacaaaaagttattagctagcccaataacgtcttcatccactagttgtactctaataccctctgatgcgaatacaatgcccttgacatcagggaaacgtcatttttagtttaaaaggtgatctatagttttgaattctttatattcctacttattagcatctttttggtggaaaaaagctgtcttacaaccctaacctatgtttggaaagttctctcgtgcaatttggcaaaattt

SEQ ID NO: 166202 - DNA, 685 bp, Zea Mays
ggtcggttgagtttctaggagaggaaaattgacaaacaaccatttcctatcaatatgatggagctaacagataaaaaagtcttggttcgactggatgtggccgataaagacaaaggcaaaaatattatcgttggtagtcttcacatgtcagaaacattgcaaggagtaattactcagaaggctccggacaaaaggactaacaaggtcgaaggcaccggggggcaagcatgatcggctaactgattaaagctccttacccaacgcatcgcgaacgacccggtgcttccatgtggttggtctagaacccacacatacaatctgactcatctcattgaacgctggcagcaaccagaggctgaagtgtccacacacctttaaaagcatcgataaccagaaacaggtacgtcgaagcaaaattcatctaaaacttctggtgggatggttaaagccatccctgcttttgaaaaggccgtccctgcatttggccaacaaaaccactccggtcacctacaaaggcaatacaactgaataaaacggtccaacaggcgacgcaacaagggtcgtctgttcaactaatgatgccatagtactttccactagcctattcatcgacgatatattttcctgttcaaacatggggtagtgccgcaatgaacccgtattacatgtgtcagtgctttgctta

SEQ ID NO: 166203 - DNA, 621 bp, Zea Mays
gaccactccgccagtgctcaagccaccacgctgagctacgcccggtcagccggtagaagatccgctcctatatatctcctgcacgactcacgtggtaagcactgcgttagtagtcaagcgggcggaagagggacatgcatacccggtacaacatccagtttacttcatcagcgaagtccttgggccctcaaagataaggtatcctcaagttcaaaagctactatacgtggtacttctaaccgctcgcaagctccgacactactttcacgaccacaaagtcatagtagtcacaggatttccgataggtgatattcttcacaacaaagaagctattggaagaatagtcaagtgggcatgcaagcttggagctcatgacatagagttccgaccccgcacggcgataaaaactcaggcactggttggcttcatattagaatggactgagcaccaggtcccgtaaagcccagaggtcgctgaaatatggaaaatgtactttgatggctcgctgaagatgcaaggagcgggggcaggaattctctttattgctccctgaggtgaacaacccaagtatgcactctagctattgttttcggcaaccaataatgcaacagagtacgaagc

SEQ ID NO: 166204 - DNA, 641 bp, Zea Mays
agcaaaagctttgtttgtgtccctcctctcctccgccaaccaacgcctgagatcctccttctcggcctccgcagccgccagcctctcagccagcctgcggatcttgtttttcgcagccgactagtcccgaatagcatccgtatgctgcgcccggaggcgctcgatcctgccctctagtcgttgcctctcggcagcgaactccgaagtcagggcgcccgacgcaacatggtcggcgaaggcggtcgcctgccacgaaacatccatcaaacttgcaaccacataaaaacaacgaactaatgaagtcccaaacggcttacatgcttcagctgacgcgatgcatgcctcagctgctgggtcatagagcccgccacgtctttggcggcagtggccgacgagatctggccactggcacagaatttggaccacgggtcctacgaagtatccttcgctccaactgccaccgcaggcgaagtggccgccaccggagacgggacaatagccagctgccccgcatccgaccctgcaccataaccttgttcaaagacccactctaaaaaaaactcaccaacgaggtaatcatccacacatatgtccgtatcgaagtcagcaccacccgttgccgcttcgtcggtgcgcaccgg

SEQ ID NO: 166205 - DNA, 739 bp, Zea Mays
tcaaattctccgtgttttttttggtatttgcagattggaacatgagaggaaaagaactttaactcatggaaggaaaagatcatttttaatgcactaaacaaaagcattttatgctagtttagacagaatgcatcatcctccagtagatggttagacttatattctggcataatgtgcactaaacaagtgcctctatgacaatcgtgacttatgcatttttcaaatgatttttacaacatttcttgttatgttttacgctataattacctcaaatcacattttgttgcgtttcacaccaatttatgatacttcttgatgcgttttacgccaatcttatgatacttcttaatgtgttttatggcaacttcttaatcgtgtgatttttatgcctgaaatagtgggatcctttggttgttataacgttatcagtagtttacgctaagttatacacacttttacgcttttttgtgttcgtttttatgcaacatcgtgtgaagcgagatacacggcaactacctcaaatcgtaagcatgatttatgttgactgtaactgtcataaaaaatcatctcgttgaccattgtaacaatatttacgctatatctggcataattgacgctaaaacttgaggattttacgctcaaacatgggttgcccacacagtgtcctgtatgcaaatttttcgcatgcacaacaattttcagatctaaaaccgcacctgccataaaaatcaaaaattgc

SEQ ID NO: 166206 - DNA, 562 bp, Zea Mays
gtcgcttgtagagcagtgggaaatgccaaaggaaactatcagcaagcctgacgaaggtggactggttaggttgaaatacaccttcagatacgagggtaagtttattgagccagatgatgattggctgaagtgcatcgaagctacaagcgacgaactgcttggaccatattcaaagacagaagataacgcgctatctgcgaccttcggagggcggaagaagaagaggctgaatagagttttcgatgctattgggtttatgtaccctgattaccgctacccgctgaaagggcaaaagagaaaaagcgcaacttctggaaaaggtgatgcttcggttgctctaagtgaggctgcgccaaagaggaaatgggtgaaggtccttactcaccgaccacgcttcatcgaaccggcctcagtgcctgaatttggtggtgagacctctatggctactgaagccaaaggacctgctcttacacagaagaatgaagagccggctgcaacaccgaaggctgaaaaaattggaaagccgagagctgaagggacaaaaacatcaaaaattttaagt

SEQ ID NO: 166207 - DNA, 547 bp, Zea Mays
cgccgtgggaggaagtctgattatcttgaaatccctctcaaggacaatattaagggatggcgcttggagcggtttatcgttgaaaaccacggaaattctctccccccacggtcggggagacagccggacgttcgtactccgagttggaccgagtcccccacagatcaggaggtggctgaggctggggctttgctagctgaagttggactgctgaaggagaggggtctgactgcagaggctgtggttgctgattttgttttcaagaacattcagccgttgatggacagggcttacccggcttatctgtaccgaggcctagctgactcaactcgggtcaccaacagaagaattccctctgtagacttggtgaaccgacttgagatgattcttagaggcaaggtatcaaacgttggtgccccagtggcatactcggcctggaacctgcctccttccaaagccttcactcattttgtttcgaatccacctgttgttgatggcagtttgggccttagagtgcgaccctctgctgaagaagttaacgccttgg

SEQ ID NO: 166208 - DNA, 512 bp, Zea Mays
tctcttaatttcaaatggcaacataagtcaagctctgcaacaaaccggtagagcattataccatctacaatgttgccatatgattctgccacaaaaacccattggagcatgcttaaatttaggcttaaagttgatgtcagttcactgctagtctgaaaattcagaccttagcagcctgacagcctgattttgagcatgattatcttcaatttgttcctaacaactatgctcacaaccttaagcaaagttgttctcctttgtttgctctataactttgttatagcaatccaaggtagattcccactgaatcttagtctaaatggctctcaatcttggatcaaaatcactgtccatctgaagttcagtctatatcagcctgacagtccaactttgggcaagattatcttcaaatttctcacaagaacatggcttgcactcttaagcaaacttgttatccattaataggtctacaagtttcatgtggtaccctagggcaaaaaccctatatttta

SEQ ID NO: 166209 - DNA, 769 bp, Zea Mays
agccataaatcttgaccaccagagtggtagtgatggtaatttgtgatagaactatgaagatcttgtggagaccggatgactccttcatatgagagcagcactatctgttgttgaagactggtctcagacggatattggttttttttgctcttgctaagcaattatcaccatttgcttagtcttaacaatcagatgagttttcccagataaaacaaattcttagccttgtctgttctattccgaagcttctctttttgctgaacaatgaagagatcaaaataatgctttatagaacaagttggtatataatacgaggagaatagtttgccccactggcatcttacatcacaaataattaactatttttataagttctatctcaaaattattatacctaaaaatgttgcattaatcgatacccaatttcggagcggtatgagtaattaggtaaaccatgggcagtgataaaaaacgagctggactatacatctctgtatataaaagtctttgcttggtagcattggcttgatgccgtgaactttactaccaatataaacacacatttttcctatgtgcctcaaagcacaatgcaaccagtgaatgtccttgtgagcgctagaccctgatggtcattttacttgttgatctaaagtcaactaatggctccaaacgatgaatgatatgcatgagcccctgaaggatccttatggataaaatagtgttgtgcatattagtctaaatcttaatgattgactgtgcatttggtaat

SEQ ID NO: 166210 - DNA, 1216 bp, Zea Mays
ggtccacgacggcgacgcgcacggagagactccggcgagcacgtagaccggccgagtagggccacgacaaggttctccgagcagcggacaccaaattcaggtcctaaggaccatttcccccaaacaatttcatacttggtgatctgccaagctctgcccgcgaagacagtgcatggcgcagataggtgttcgtgttccaatcgatccatggcaattaagtttaattggatggtttggagagcatcaaggacacatgagaatgttagaacaggactgaggatgacaggatcagacctgatttgcgctggccgcggcgaggtcaagctgtgcggtgttcctgagcgttttgggggaaatcacgaattgaagctttctggtggatgattgtggccgattagcggtggttagctggctgactacctcacggagctagacacgggctcaatttatagagtccgcgggcggtggtgctcaatttggccgagccgtgttggcggccggagataaagaagaagcttgcgcggtgaattcgtgtccgccgccgtggcaacctccccgtcgacgatgggacgggtatagggagtcatggcgacgcggtggaaaggtttggacacgcggcacacagccgggaagcggcggtcaccggcgagcacatccgttccaaccgtgaggaggaaaagagagacacggggaggtcaccggagtgatttccagctcaccgtcgacgaagatcttttaccgtgtgcccttatttgcccatcccgtgcacaagtcaggccggcaacggcacgaatcacggcggaggtgtcgtcgacggtgggagttccgcgctggcagcctgatccattccagtctactgtaccatggtgaacccccattcagagcgactgacagagccttttggagcatggttttctcttaattttgaatgacaactcatcacaaaatctgcatcaaagttgtaaagcaacataccatctacaattcgactatagggatgaaacttatttgagcactggatccaaatcaaaatcgagctcaaagttcaccccatagcactataactctgaaattcaacttcaagcagtctgacagcccatctttgattgagtttttctccaaatttcacataagaccatggcttgaatccttaaacaaagttgttcccctatgattggtcttcaactttgatgtggtcacctaccatgaattccca

SEQ ID NO: 166211 - DNA, 449 bp, Zea Mays
cgcctccattcagtcctctatcgctctgcacgtcttcaggctctacgaatccgataagggcacaaggtagcaacctccgaggcggacgagcaggctctgactcaggcatccactaccgttagtccgacctccacctctgtcggtccgcctccagcgtccctgcgaccatgtagctatgacgcgtgcggcctgcacgggcaccgcgccaccactcaaatccgtccctgccattacatctcctcccaaactatacaacttcctcaacctgattccctttctttaagctagggtggagcgccttcctggctaatgggcagcgaccacctaagcggcgagcgctgtgtgcttgctgctatgtgccagtgattctcctctattgtgagtaattatttccaaatatctaattcatttccctatctggcacagttccactgaattgttttaaatgt

SEQ ID NO: 166212 - DNA, 610 bp, Zea Mays
tgatttcttaaactaaacacaaaagacagtcttaagatgtgtggcctactggccctgtgaaaggtcaaacttctagccttgattactgtattcgtgcggctgtcgcttgttggcgtccactacgtttctaaattgtctttctgtctctgcgtctgcaaaaaaaatggcaggtacttgtggaattgggcggcaaatatgtagcactgccgactgaaccttttaatgctcatgttcttttgctgcttctggttactgaacagtttagcgtccgactcgtgacgtcgcatcgaagtgacttatgttgcgtacttgcgttcctaactttgtcccaaccagcagttctagaatcgcggcttgaccttcccggatcctgctgtgccggtggcaagaaggttcagaaactggaattttcgccgtgacagtttattctcgtcgtcatccctctgtactttatgcttagcattccggcacgcctctgcatgactgcatggccccatggcacgagcaacgcagcccacaactcagtcgacgaggcatcgttgacgaaagccatctgtagcgcgcagatgcagtgctagtattgagcttaattaacaaggacaacgctgag

SEQ ID NO: 166213 - DNA, 271 bp, Zea Mays
cacgagaagtcctgctcgaggaagctcacaactcagcctactccatccacccaggaactaccaagatgtacctagacctcaaaaccagatactgatggagagggatgaagaaagagatagcacagcatgtggcccagtgtgacacctaccaacgaacgaaggccgagcaccagaagcctgcaggcctattgcaacccctcccagtgcctgaatggaagtgggaagaaataggcatggattttgtaaccagactaccccggacacaaaaagg

SEQ ID NO: 166214 - DNA, 622 bp, Zea Mays
atacgtattagtgtattcacacaaagaaccaaataagtaacattcgagatatggggtttatattgatttaggtaactgataccctacatccaatttaaagtagatcttatcttttcatatgctcgattagaggagctaattaatgattatatctagttgcctagttgagatgagatgtagtctaggatatgacaagatctgatcgagggcttacacccctcaatatataattgttgatgtagcgcactgataggcgatcgttggggcgatcaacctgggaggagctgggagatcctgctgctgttgcaatcagctctcctgtaacattgtcggctccggctaggtggcagattgcacctgccctggtcctcagatgaggagtaagcttaggtgattgcctggccttatagttggacacgagaaaacaagagtttagagtggttcaggccgccagagcgtaataccctacatctactaagtgttgtattgcttgagaacttgggagtggttggtctgagtgtgaaatcaacctcccttgctatggagcaagtgctctctcttttgtaatccatgggaggcacattacaagggatttcaggccctggcaagtgggtccacggga

SEQ ID NO: 166215 - DNA, 589 bp, Zea Mays
aagcatggcactattgctagcaacttagtttgctgctctgcacagagaggcgaacctcgggccgatctcgagggtcgaacgagacgaggacggaagaagagggttgaccgaatcagataaaatctcacggggccggatcaagcatgtgcggggtaatcatgttatcaccccatatctatccccactatctctccgttcggcacaacatgacaatggtaggatcgtgcccttttctccggtcaaacactatgcttcttttaatctgggacaacattagagcccacgacccttgtacgacaaatagagcaagacatgacgaatggactacaaggtacgagggttggtgagagtgtagggtacaaatgaaactttcacagaagcaggcccatcctgggagcttacgtcgccattacggacggcactatcctaccaagttcaaggtacacacggtccaagtcagctaccttcaaagaatcaaagctacggaacattgtaccaacgtaagcaacacgaagtatttttaactgaagtatgttagcaagtacagagcatggtaccaacactctgcatcatctcatcaacaaaagac

SEQ ID NO: 166216 - DNA, 398 bp, Zea Mays
tgggtcaccacggacaatcacttcagccgtccccgacgtagacgagcctacttcgaaggacctcatcgacggagaccgcgtctttgccctacaggccctaaacaaataccaacctcaaacaaaagcatggcgcgaccacacagtcatcccaagggaattcagcgaaggagacctcgtactcgtccggacaactcggacagagtcccgggacaagctagagccaaagtgggagggccccttcatcgtcaagacgaaggcgtcccccagcgcgtacaggctaacaacaccatccgacgaagacttagagcattcatggaatattgacaatctccgcaaattttttgtttgactcctcagggccacctcgcccttgtaattcaccaaacagttttattctg

SEQ ID NO: 166217 - DNA, 881 bp, Zea Mays
atgagctcgcgacggttgcattaaagatcaacggcccacgagcgccaccactctccccgcgctaacgaggcggcgccgccccccctttctcacccgcccaagctctggtgaggtagacaatcgacgttccccgggtgctaagcaccaaattgcaccgaactacaccatgcgaaaaccaacacgaacactagcgatgggtttcttaccgaagtaacgcagtacaggggcctggccacggtgtcgcgcgagcaggcggattggatgcagctccgatgaccaattgacgctcgccaggggcttgaattcccccggtcaacaggcggattccgtggcggctggcgaacaccctctgctctcttgtccaaccccggtagtggtgtggtcaccgatcgacggcggctggtttcccacttccacagacttaacaatggcggcggcggttggcacttgggaactagactcgcgcgagacgatagcagggaaagaacgggtcatggggacacccatttatcccacagggttccggtttggagggagggggaagtcgttcacgttcccggtcatggcggtgatatctccgtgccttccattgcgaagaagaagagtgcactgacgtgggggccccacaacgcagcgtccacgtgcgtctgtagagctcgcaggttacggttccgcccctggacccacgtgccagtgagacatcttccacacgtctgagttcgcgaggtgactgtccaaccggacccattggccagtggcccatagcgcaagccacactttcacctaggccgcgcggaggggagtgcgaagctgggccaaattggatggggttgggcccagcttggtttttttattcttttcttttatcctccttttttctt

SEQ ID NO: 166218 - DNA, 695 bp, Zea Mays
gaaaccgggggacaataatatttgtgttcagtggggatgcaagcacaaactcactttgaatggtggatcatggagattctagcaaagaattgaggcactgagttatactggttcaggctggagccctagtctagtgtagtgttgatcgtagtattgtagtagagcgtgttacggctggtgtgcttgtgtgttcatgtgcctctctccccgaaggaggagggggcctacccttttatatctcaagggtaggaccttacagtgggacttgtattctactggatagagagagggagggagggagggagagagatctgctccccaggttgtcatggtgggtccttcgtagggtcatgtgtaatcgtactctcggtatggcgtcgtttgttactctgcctcctgtagtgagtccatcgctgatgtctttgtagtggtgcacgacggcttccacggatcagtctcatggtgcgatcgtacgtggcgtggcttctcatgtcgtcatgagccctttgtcatcggttagtgtgcgcaggcgtacattcggtatggcgtgtcgtcccgtccttcagatgtacgtatgggtcactgtagagaccccggtgcccatttaccatgttgtgtgtatgttcggatgtggattgatggtgacgcatcccatcgtagctgacgtggatcagtagcactggactcagatcttt

SEQ ID NO: 166219 - DNA, 788 bp, Zea Mays
ccttttttaaccaaactgaaattgaaacgttgagatgagtaaaactgaaatcaagcattgatatggtagtgggttgagttctcatgtttgcaggaaatggatacttttctagcatgatgagggatgacaacattcaaagaggttttgatactcaaagcaatacatgccccgaaattcagtcacaatcaatgctagttggtccaataccccccaacgcaagaccgaacaataagagatccaaaaatttaagtgatgaataagacaaagttttggtttcagcgtggctcaatataagtttggatcctattgtgggcaaagatcaaaaaggtggaaggtattggtctcgtatatacgagtactttcatgaacataagaagtgtcaatcaaagcgtacacttaattctcttatgcaccaatgggagacaattcaaaaatgtgtcaataagttctgtggttgtctatcacggattgagttaagacgtcagagcggtactacaatgcaagacatggtaagatcattatttgcacactcatgttttctttgaatatcgttatatgtctctcacaaatctaaaaatattgaataggttgcacatgcatgtgctttgtacaagtctgaagatgagcatcaaaaatcttttcagttcatgcattgttggaacaagctaagaacacaacctaaatggttagctaaacttgatgatttagctgctggtagaacatccaacaagaaacagaaaacaaacccaaatgttgatgctagtctaatcttacaaactgaaaaagga

SEQ ID NO: 166220 - DNA, 304 bp, Zea Mays
gttaatagcaaaaggaagctggccaataggaacacccagttagaaacgggctcattagattggtgctctacatttatttgacccagaacctttgttcactaacatttccacttatactgctctgcaggtatgcttcccaaagtgcacctcagccctaacaacccttatcgttgtcaacctcattatttgtacttgagaattcagatactaacgaggggcatattcttggtcgcattttataaagaaacatgattgcctaactgagcatggttgcggtgtctatttgaaaatgaagggaataccc

SEQ ID NO: 166221 - DNA, 571 bp, Zea Mays
acatcgctgctttggcgactttgtttggttgggaggtgcctcaagtggggatggactgattggtggtgcctggggcagcgatggcagtagttttttttgctgtttccaatggagaatagctgttttcttatttggaatgtgagggggctcaatgatcgtgccaagagagattcggtcaaaaccctggttcttgatgtcaagccttctattgtttgtctacatgagaccaaattgtgttctatctcggactttgatattctgtctattcttgggtctggtttcagtaattttgtttctagtctagcccaggggactagaggaggtgtgttaattgcttggcatgacgggtctttggtctctgtggcttcggtcgtgaagaatttctctgtctctgtccaatttcaggaagagtctggttcttgctggtggttcacatgtgtgtatggacctcatcaggataattttaaacatgagtttattcatgaattgagagcggttcgtgatgattatgtggggccatggtttttatgtggagattttaacatgattctccgggaggaagataagaata

SEQ ID NO: 166222 - DNA, 794 bp, Zea Mays
ggaatgagagtgtttcggcccatcttccctcattccccatcgcgcgcagcccacctttccttcttggctgctcggcccatttctactctttctccccgcggacgtgtgatactctttcttttcgctggcgcatggaccgcaatgtcagcgcgttctctcccttcatcgtggccgcgcagatgctgcaacgacttcgcggaaatggcgccgatggccatgatccggggcctcagtgttgaaccgagcgcgccctcatgggtgagaatataaacgtagtcggccttccctggaaccctttaaacaaaatcgcagccacctctacaaccggataatagccattgtgccgccgccgctgcactaatattgtcgtcgtggtcggatctcggtagtagagcgtatcggggtttgctgagtgcctcagcggcctcgttggggcgtggcgggcacctctggtggaagtctggagcgtgcggtcaaacggttctcggtgagttgcttgtctgagtagtgcgcgcgcagtccttccgcttctcaccgtggtgcggctcctcctcatcgccattgccggtaataagccctcccctgtgtccgcagtacgctcgatttgggttagcaccagtccaacgacacgtagatccgcgtatgcgccgggttggttgctcaccggcgtcctccgccgtggtggtcacctgggcgccgctctctgttagagttggaggtaggaggatgtgccaggaccgtagatctgtgtgtggatggcgcggaataaaccatgagattcccctacgcttgga

SEQ ID NO: 166223 - DNA, 614 bp, Zea Mays
accagcagactctaaggcgctatcacgacaaggtcgtgcgacagcgatccttctctataggagatctcgtcctccgccgaattctaacgggggagggacgacacaagttatcgcccttatgggaaggacccttcatagtagcagaagtcactcggccaggatcatatcgtctcactcagatggacggcacagaaattgggaactcctggaatatagaacacctcaggaagttttatccctagctgtatttcaaaagctatcgggacgacgatgtactctgtaaaatggaaaatatgtcatcaataaaaaaggcttcaaagatactcggtttgttcatgattgactcgcattcttacttaacttggggtgaccactatgccctgccaacggagcaatcgacttaagtcggcaacgacttaagccggtgcaacatgctcgcgcttacttaactcggggtgaccactatgccctgccaacggagcaatcagcttaagtcggcaacgacttaagccggtgcaacatgctcgcgcttacttaactcggggtgaccactatgccctgccaacggagcaatcggcttaagtcggcaacgacttaagccggtgcaacatgct

SEQ ID NO: 166224 - DNA, 887 bp, Zea Mays
gcagcagagttagtctagaagtgcgagcatgctagttcttatcaaaacagcaatatctacccgcacaacaattgcagactattcctataacttggtcgcttgcatgctgggggctagacacgattgggcccttccagaaggctcaagggggatatactcacagacgggttgtcattgataaattcacgaagtggatagaatacaaacccatcgcctctttgacctcagcgaaggcagtggaattcattcaagaaataatgtttaggtttggaatacctaacaacattatcatagacgtgtgatctaacttcactagctcagagttctttgacttctgcgagtagaggagcatctaaatcaagtatgcatcagtggcacacccaagagctaatgggtaggtggaaagagccaacagaatgatactcgatgcactcaggaaaaaggtgttcgataagagcgaaaagctcgcgggaaaatggatcagagaactaccatatgtggtctagagcctatgaacccagctgagccgggctttacatggaaacaccatacatattcttcatggtatatgggttagaggcagtattaccagcgaatctgatctttggagcacccagactaacattcaaaagcatagctgaggcagaagcaaccagactggaagacattgatatattagaggaagaacggctgaatgtggtcattcagtcggctagataccagcaaaccctgaggcggatcagtcggctgaatattagagggacaacttcctcttcctcctcttcatcctcattaagcacacgaccaccaactctggcaccatcacaattttcaatgtcatcctcgaggttggcgctcaccgagccgtcgctgaggactgaggtagt

SEQ ID NO: 166225 - DNA, 1104 bp, Zea Mays
ggatatgatcagattcgttcagcaaagaaaaaagttatgtcacacgtcaaacagatgaggatgtgccagattcggcttcttaagctgctacaagagaaagttatgcacaaagatctggaaattgatcttgaggacccagattccatgtcacagcttaagatcaatgacagaagcattcacaacttttaacttcacataggcattctttgggcactcaagataaatttccagatctttgtgcgtatctttctcttgtagcagcttaaaaagccgaatctggcacatcctcatctgtttgacgtgtgacattacttttttctttgttaaacgaatctgatcatatccagtagtagtgcgctgaatagtattcacagcgtccaaaagagtagttgtcatctcatctcctggaacaatctcaacgtttccttttgcggtagttcttttgccctcaacactgagcttcttgttgcccataaaatttctaactttcagggggacattcgacgctttgagatctttagcgtcatcactaacttcaaatgtcagtgcctcatctccatcttcactgacccaatgtgcttttttgccctctcaccatgagcaccagaatagctaattagcagagcatttgtactgcaagacttcatgaagtcaaagattttctcttcaatcgtcaccatgattgcattgcctgcagcaccctatccatgtgtcgggcacaactcactcaaaagtcgatgcatttcgcagtacattatagagatcaaaagcttagggaagagggctggaccatatatcacacgatagtccttgacaataagcaactcaaggtacttcaaatgcagatcaagacttgggtagcttgaagattgcatcccttacagcatacttacccacaagagccttaaagaacttcgcgaatggcttgtagcaattacctatttcagactcagagcgactcatgttcagtgatctgaataccagtaaatcaaactcaggcagcacatccaggttttttttaatgaaatcggtgtcaggaatcgataagccataggtcttgctgaaatacaaagggagtaattcagatctcagtagcttgcgaac

SEQ ID NO: 166226 - DNA, 649 bp, Zea Mays
gtccgtcgggaggggaagggtgagttgtaccgtgatcccctctattgttgagatcatgaggctcggtaggcctcgatcgactgatctgaatgagtctttctttttgcgaactgttcgctacagggatccatctagggatgtgcaccgtctttttggtactccttcctgctcattctattcactggaagggaaagggtgagccgtaccatgcttccctcaatggtcgagatcatggcgcttggggagctacaaaagggtgatccaagtgaggccccaactcctttcataggatctaggtgcaaggtccgttggtgaccgtcctaatacacccaagtttcgactcatatagttgttggccctgttcgatcgggttcgatggatcattgcctctctctgtgataaaccatgagtccgacgttccctaggactcgaacttgatttagaagtgcccttggcgctcgtgcactagggtactggctcctacggtgcctacttaataatcgcccctttctctagggttttgggagcgatcacgaacccttcacgggctgaccttcgaactccaaatttttacgggatagtatgggccgcctcgtggtcatatgtcgatgagggttcactgatctttctcggcaggctagagatatta

SEQ ID NO: 166227 - DNA, 743 bp, Zea Mays
tttggttacgatgaacgactctgcgttgttgcatgaaattacagggactgctgaacgccacaatatcaacatgaatggatcaatccgaattccttcactgtttgtactaacacattgagcaatgatatctcatggcatgctaacatcacatactgatgcagttaacaccctcattgcaaacaatgaaaagaaaagaacctatccacctgagatgcacaagtcagtaattggcatcggtgttacacatggcaataagatctgaaaaagctatgcaaaaagaaaaatggctgggaagcggcttcgccaaatgattatcttgatctatggtactctttttgaagtgccgcttgcttttgctggtggagttgcttgagtggtggtaccttttcgcacacctggtgtgactgcaattatgcaaaatatgatgtataactaacagaatggtatgtggatttaagacaacatgcactttggaggaaataaattgcacagaaaatagagggaaatgaataaccccagggagtaaaagtaaaacatgccattaccatcgttctttatcaaggtttctgtgagctgttaaagagtcacatgtatacaagaaactttaaaatttccaatattatttctttatttttgaactcaagagcttcaataaaattgtatcatggtactacattagattgcttgcatcaagagttggtgagttgcactgccatacgaatataattctttaatggtctgct

SEQ ID NO: 166228 - DNA, 290 bp, Zea Mays
atgggagccatcgcagatgcctgggatccccagggaggtgatcgagcaccatctgaagatccaccctgacgccaaactggtgagtcagaagcctcggagacagtccgttgagcggcaggacttcatccgaaaggaggtccggaaggtgctggacgccggtttcatcgaagaggttcatcacccagtgtggctggccaatccagtcatagttccaaaggcaaacgggaagcttcggatgtgcatcgactacaccagccttaataaagcttgtcccaaggacccgtatccac

SEQ ID NO: 166229 - DNA, 933 bp, Zea Mays
gtggtatcagagccattcatcctcgacggtgatcgatgagttggccaaactgttgagaagaagagaaggcaacacggcacccaccaccaagctgttggtgggacacactttgtgttagaatccttggagatggagtcaaagcagaacgaagcaaggtgggaaaagatgatggctaccatcgagacgctcacggtgaaagtgcagaagatgggaggggtacaacgacagcttctgggtcaatttgaattgactgcagaagtggtgagacaggcctcagaagagcgtgatcggctgtccaggcaagtggaggcaaatggtacggaattggcaaggatcaggctagaggctatggcggagaacacggagaggcatgccgaggagtgaggaggagttgagggaacctgcgggtgggaggagagagcaaaatcaaggtgatcgaaggaaccatgatcatggggaaccctaggggtttgagagagatgccatgcatatgcatataccgaagatgatgttcccaaggtttgatggggtggaaccaggaatttggttgaccaaatgtgaagattattttaggatgtatagggtgcccgaagctatgaagggggtggctgcaagtgtataggttgaagggaggagtaggatactagagaaccttgtccagagcagtgttagagaagtttggggccaaggaatatcctagagccatgaggagattgttgggtataaggcagagaaggggagtagaggagtacatcaaggagtttgaataagctagatatgttgctgtggtgcacaaccaccaactggatgacacctttttgagatctcagtttgttgaaggtttgaagggtgaaatacaaggaatagtgatggcttagcttccaaagtggcctaaaccaatataaactgttgtgcatcatcgatgtgctcctg

SEQ ID NO: 166230 - DNA, 457 bp, Zea Mays
gggtaccccttactacagtatgaagacacggtgcccgtacgacgatctctagccgcacggtgaacagcacccgaccccaccacgtggacggctcgaggggcaccacgtggcgagaaaagatgatacatcccaagatgtatcagttggaccggacctccacgaggaagcaccggacccctttacgcacaacccggacccccgattacagtccgggactcccaagtaggcatgtcgggtcccttggatggggtccagatccctccgagtaaggtccgggccacgacgaggtcccgggacaggggataccctagcgtaagcaagggtccggtactgacacgtgtccatgccttatcttgtgcgcttgcgctccccgctcaggcggagacccggtgctgccacgtggcttgttgcctgtgacataagccagcgggcggagcctgacgtaaggcctctaggc

SEQ ID NO: 166231 - DNA, 545 bp, Zea Mays
ggttgacaatggcatagcagaaccgcacgaggtcttaggaagaatggctgattagcgctgattaagtacgaaaaccctggctagctcagcggaacgactgctggcgtttggagagaaacctccgtggagaaaggaatttagcaagaagagcttcagaccactacctggtggcacttgccaagacgggtcctggcgaggcgccttaagactgagctcaccggtgggcacacattccacctattttaaactttacactatctatcgtatgtctacaaattaaatcaagttggcaagttcatggtactgctcaaccgcatgaaatgcagtgaagtgagccgtacagaacacggagaatcagggatttttcaggtaggagtgccggatacgggataccggaggatgcattgcctgctcagtgctcaccgctcaatcccccaagcgccaccacggacatgggagggggagggtcatggtactgcgccagtgaaaacctgcagcaacaggtgattaatgacagatcttagcaaagcccaagctgtgctgat

SEQ ID NO: 166232 - DNA, 378 bp, Zea Mays
caacacaagtgactccaacaggacaatcttgggcattatagggtccgcggagttagagaaggttggtggtttgtgactcataaactcccgatgcttatccctgggtggagctagtagtggtggtggaggtagtggtggttgctgttgttgcacccttcgctcctagcgcatctcctccctctcttggcacatctcctgacgctcctgtcgcatatgcgcgtgcatatctgccatagtatcagccatttgttgcattatatgcatctgggctgcaactgctggatcagctccaactggtgaaggatttggaggattcatctctgcttgttgttgttgttgtcgtctaagcaccctccggttatgtggattggcaggtag

SEQ ID NO: 166233 - DNA, 501 bp, Zea Mays
attagacgctgtcatagagaccacgaaggccttaactcctgcttctaccaagaaaattgccgaagctgccaaaaatcaagtcaacgccaaagttgggccttcagcgcctactaagacgaaggccgtcgtgcctaacgataaggtgggtcagcaaagttcagataccggcaagacgacagagcaagtcgtgacagaaagagcaaaatctcatgtccccgaagccttagctgaggatactgattacattgttcgacatgcttcggggaagaaattatctgaagaagaaatcttggaggccaaacactgcgcccgaagactgaaatatccgaagggggccttagtgttcaatggtagttacgaagatgatttcctgtactgtctcccggataacaaagaaatatctgtttgccgggagatagctaagagtatgggatttcctaagcttgaagaaggcctttcggtcttatcgaaggatgatcttgctgacagcctcgcgtacaa

SEQ ID NO: 166234 - DNA, 784 bp, Zea Mays
aaccgaaggcacgacggcaaccagcgaggaatcttgcaatgtaagccgacttctcatttgcatgcaaatatgaaagctattgcaagcttgtcgttccaatttgcatgcaaatatgaatgccgctgcaagcttgttgtttgaataatcgaatttccaaatatgtatgtagttgcaaacttgctttgcttatttgcagatgtcacaagcagaagagccaatgcctcaactagcgttgactgagaatgttcgagtgccagagaacccagctgaagagcctgagaaagagattgctgaagcagctgcagagaaagaggtgaagaaaagaaaagctatggcacctagatcagaggtatggcagagcttcaccaagatcatagacaataattctagtgttattaaggaagctaggtgcaactattgcaagattgttataaagtgtgaggcaaaagtcaatggtacatctgcattaggcaaacacttgaaggtatgcaaaaagaatcctaataagatcaatgatgacaaacagcctgttttgcaagcatgtagtgaagatggtagtgggtctagcatcactgcttggaggtttgatccagaaatgcttagggtggcttttactgaaatgttaattacatgtgagcttccatttgcttttgctgagagactaggttttcggaagttcatgtctaaggcttgcccacgttttggggttccatctagaaggactgcaactagagatgtagttagtgcctacaacaatgagaaagagaagctaaaagaattcttc

SEQ ID NO: 166235 - DNA, 448 bp, Zea Mays
tggagatctcaaaccgatgacaacagcaagcacataaaaagatcactgtgatgggggaggaggggcagaacgaacgggaggagcagtcgaaggaattgcaacagctgctcccgccgccatcgaggaatgggaggagtgaatgggtccagcgaatgggagatgctagcgaagttgtcagccacgtcctgatttggaacgggagcaaaaaggtccaagcaggtgctctctcctctgtttatgcatcgaataggtgaaatgacattttatcggtaaacaacatgtgagaatggtgtactagcgaagaccttgcacataatggcatttgagcgaatcccacgtttcataatggcataattccatatttttcctcctgtaggaggacaagccctggctggtgcacacaacattgtatcaacatcaagcgtcttggctcatgtgcctctaggag

SEQ ID NO: 166236 - DNA, 485 bp, Zea Mays
tgtagtgcgacttgtggtaactatatgcttgtaatgaactggtgtaatgaataaaataacttggttgaaaaaaattagcatatgcataatagtaactctctccccctggcagatgacttcggataaaaccacgcctaccgcctccgggattggagcacggtttcccctaggagctgaaggagaagtcggtggagaagggagtgagacccacctccccgcacttccggagctgccattagatttagcccaagttctagccaaccaaacccgactcattgaggtcctcactagaagtctggagaatcaacgcccgaatggtggaagaccacaggacaggatgggagattttctgaggctcaagcctcccacattcgctggatccagcaatcccctcgatgctaatgactggttgcgcatgattaaaaggaagttagaagccatcagatgcctagagaatcagcgtgttcaattggctgctcatcaac

SEQ ID NO: 166237 - DNA, 621 bp, Zea Mays
gcgtttccgacttaagccgattgctccgttaatagggtatagtgatcaccctaagtcatgtaagcgtgagcatgtcgcaccgacttaaggcatttccgacttaagctgattgctccgttagtagggtatagtgatcaccctaagtcatgtaagcgtgggcgtatcgaaccgacttaaggcgtattcgacttaagtcgattgcttcattagtacggtatagtgatcaccctaagtcatgtaagcgtgagcatgtcacaccgacttaaggcgtttccgacttaaactgattgcttcgttagtagggtatagtgatcaccctaagtcgtgtaggtatgctatgccgatttcaagttatgtctgatctaggtcagttgttgatcaagaacttgtatgccttagaacatggaagctttattgataatgagaccctttgcttacaaagtacaactcatccacaagagttttgaggcattgttatggatagaattttctgaggtgctcaatattcaacaaattccccacttcggcgccatctatttgagtgagtcgataggatcctggtcgggtaacctctatgacgatgaatggaccttcccatggtggtgacagtttgtgtcgtcc

SEQ ID NO: 166238 - DNA, 581 bp, Zea Mays
ggatgatctgaacctggactgactgtggcattagtctgactttggagccaaattaaggatgatctagtgaggttaatcccaagattcatgttacatagttgaagatgttatgcaggagaacaactttgctacagtcgagttggtatgctactgcatgaaaataggagtaaaaggaccccaaagttgctttgtcaggtgccgtgaattgagtatggcattatacagtgattgaacaagatcataggttcactacacctcaccgccgatgatcttgcaccgtgattcgtgcttcggttgagatatgtgcacacgcaggcgagtgtggataaccatcaggggtaaaaagatcgtcgagggggtgaacttgggcctatgcggtcgtacccacttgcacggcgacatggctgaacgaccaccactgtggtggttgtcatctcccgtggttgtgtcacgcaatgaccgattcgccacgatgttgggggtcatggcgggtagatagttactgctcaaggtcattgtttcaccatatgccacgacgggcaggcctcggtagtaatatctcgcagccgccgtgaactcaa

SEQ ID NO: 166239 - DNA, 751 bp, Zea Mays
cgaaacttccagcacagttcatatctgaagtctctctttagaaacactcgagagtcagttttaagacataaaggaacatggtcagataatgtcctgtcaagaccagtgaccaccacatttttgaaatgaaggacccattctggactagccagaaatctatccagtatttcaaaggtgggagggaccctgttgtttgaccaggtgtacaatctttcactcaaatcaagttcaaccagactatgaatgtcaatgatagaattgaacaaggaactccaacaattagtaccaccaggcttgtttttatcagattctttccgtaagatattaaaatcacccccaccaacataggataattgcatttagaacaaaaggaagccagttccaccaatttttttttgcttatgatcattctgagcagcaccataaacattaataaaattccacacaaaaccactttctttatgagccagaagaaccctaatcatgaaatcccctttctcaacttgtctgatatcaaaaacatcagcatcaataccaacaagaagaccaccagatctccctttagctggagaccaaaaccatgcaaaatttctattacaactaatagagttcaaccaagaatcttcaaaagattttttattagtttcttgaataccaataaaatcaattctttcctttctgattaattcttttaagaattcaatttttattcctttgcccaacccctgacaattccagatgagaccaatca

SEQ ID NO: 166240 - DNA, 531 bp, Zea Mays
gccgaattgtgatgtagtagtgattgcgtaagttgaaccgaagtgtcccaagtacatgtcgtgatatggttgtattgagataataaattataagtgttgcgtgatatgagactcgatcgatgtagttaatattgaattggcctgtagagaggtggtgacatgccgaagtagtcatcgcttcctctacggttaagtcggagtcatgcgtgatgatgttatttatggggtgaatgcgtattgaaatattttatgttgtgccatatgattaggaagatgaaggatagatatgttgtttcggaaatgttagccaatagattcgaacaagcgtgatagaggttgagtcacttatgttataaaattgatgctcgacatgttaggtctcctaaaatgtggtgttttaggtgacttgtgtgttatccattttaagttgagaaatgtttaagagaagctaattaatttgctcccacccatgttttgagtcgcaatgtctaaaatggattgaatgaacttgagatgtattacaatagctgt

SEQ ID NO: 166241 - DNA, 539 bp, Zea Mays
cctgcgaaggcgttgtgtactttgtctggtatgttttgttatgctgtgctggtgtgattatagtcggtcttggcgcggatggtttgatgctgtcgtttctgcttttgttgtactagtccgggctgcgcccttaggcggcttctgcgcggatagtcttcgcggtaaacttcggttttttcgcacttgttgtgctagtccggctgcgcccttaggcgacttctgcgcggatagtcttcgcggaagacttcggattttttcgcacttgttgtgctagtccggctgcacccttaggcgacttctgcgcggatagtcttcgcggtagacttctgttttttcgcacttgttgtgctggtccggctgcacccttaggcgacttctgcgcggatagtcttcgcggtagaattcagattttttcgcacttgttgtgctagtccggctgcacccttaggcgacttctgcgcggatagtcttcgcggtagacttctgttttttcgcacttgttgtgctagtccggctgcacccttaggcgacttctgcgc

SEQ ID NO: 166242 - DNA, 618 bp, Zea Mays
gagtaataggctgcttcgcactagctttatctatcaagtttcaagtagggatgtgcctgcctactgcgagctgcggggtagtctgctcgcgtgtgactcaaggaaagagacggtcctagtcctgcgctgccgtggctttaaaacatcctgaactcggtgctccctgtccgaatccacaccactcgcacaagcgcgcccactagagtgtctatgaatcatagaaagagagagaggacagcttgagctcgccacctccgctcgctaggggcctcatgggctaccactaatattgatatgcatgtgaactaccactaatattgatattgcatgtgtactaccactaatattgatattgcataagaaacaaagtaaaagctggacaaagaagggctacgcagtgtacccatacagaacgtccaagtggcgaaacaaaactgtcattacaaaaacaagaagaccaagaatatgaaatatgagataacaagatatcaatatgagataacaatatgagataacaagatatcaaatataaactaagatatctactataaagaccgttatgcacttgcgtaatttgtaatattgctaaaaacaatatgagataacaagatatcaaat

SEQ ID NO: 166243 - DNA, 660 bp, Zea Mays
tacaggtccctgttctggtgcttgcgcggcgctcagtctcacgcggcggacatcatgtggctcaagtcaaggtgcgctggtccaactgtgatgaagcccttgacacatgggaggacgaggtggccttgcgtcaacgttttcccactgcggcggcttggggacaaccgccatctcttggagaggggaatgtcagcatagctgccaaggcacattcagaggaacagagcaccaagtcggaagccggaggagaagaaaggggccgccgtgcacgcaggccgaatcccagggttgtgggccgcgactggattaattaatgggccggaggccatgtaatgagatacttaaacagcttgtccgctgagaggaaggtcgtcgagaatgatgaaccctaattctactgttcttcttctcctccatctcaccttctctagttcctgagacttgtggcggctattctgttgtctggattgttaacacacatgcctgccgtccctgtcgcggccgcgcggcgagtctggtgggtaggggatgatcaagcaggcgggatggcgacgggagcagcagatggacgcacgcagctaaggacacgtctctgtctcggccacggcttgctagctgaaagctcccattccgagcatgcacgcacgcgcatgacactcg

SEQ ID NO: 166244 - DNA, 447 bp, Zea Mays
tgcgggttgattctctactttccaaggttcctttgcaattatgtctgagcgaaagggtatctgtcattccgagctgtccgatcggcaacagagcactatgattaggctctcattaaaacacgcttgcattcattcacaatcattggatcccgatccgatggtcccgagacattactgccgatccaacctagaccatccgattgacatccagcggccacaaatccttaccgcgaatcagtatacgcctaataatcacaaccgtccatcgaaccacccacgacacagatctattcttctacctcccgcgctggagcatgccggcgcgcagaccagggtggcgaacactctggtgaactgcccaggtgcaatcccgcaccaatacacgccccgattgatactacatgttcacagagctaaagcgaaatgggtgggaggtaactcaccgaa

SEQ ID NO: 166245 - DNA, 477 bp, Zea Mays
gacctagctagtatatcataacataacaccaattaaatattgaatgcaaaaacacaaaaaagctgttttgtatgtgatgcaataatggagtaatggtatatagttcataaaaaatatctaagaaaataagtagactctccactaaagaaggtatatatagctgtgttttggactggaaccagcagagaggactccactaattggcaacgatcttttctctgtaagatgatatcatataagattatatcagtgcttaatggtagttctttttctgagaataactaatggtttgatattatttgtttctaataacctcatactgttcaatcctcttacttggccatatttactgtacaaaattaaagtgccacagtcaatgcctccataacatgcatggtcctgtaccggagtatttttcatattgtagctagattctacattaaataatatgcacacttcatttgacccgagaatttg

SEQ ID NO: 166246 - DNA, 289 bp, Zea Mays
ctccaatccagcgcagcgccaatccaccgccgctccaatccagcgccgttccattccagcttacatccttcaatctcccagcattggagcccgattcaagaagttccaggtaatccaacattgaaatacaccgagtttgtcgtcgttttttaagcatttcggtcgattgaagtggatttgattgtaatccttattctccagctaaatgtgtgatttgtatccgtttagacatctctctaatcgggtcattgcatcgtgcattgcatctcttttttgttcaggagccccg

SEQ ID NO: 166247 - DNA, 515 bp, Zea Mays
tagttcattaaacaaatagcacgacgaaaacagtgcgtacaatcctaactacgacaatatttcacttcattttccacctagcctttacaattaccatccacttgctactctagctgtttttaatacttaattatagttatttaaccgatagcgtgatggttacgaagtcatgccgtcacttcaccttacaattcaaattaactaaataattccaatcgaacttgccaactagccaattgcgtgctaacctatttttcataccaccactacaccacatactgcatactcagaacaactcattcacatttcacatatatctttactaaaatctttcctgcatcgcttgcaacttaaaactaagctttactacgcaaacacatgacttccagtttaatcacgaatatcatcatcacaccacattgactcgattcaaaataaccctacatgttcatctcatgaacggagcatttcaacaatcattctaaaatgaactaactccattacacaacttgtat

SEQ ID NO: 166248 - DNA, 1127 bp, Zea Mays
catgaattcttctaccacatatatgctttctgctgctatgctaaacaccattggatcttgggtgggtggctgagccttacacaaaactgactttccatggtggtcagtgagaagaacggtcttatctgcgcaacttatgacgccattatgcttggttaaccaatccattcctaagatcacatcaattccgtgggatggcagtatagctaagtctgccaagaatactaccccacctaaaagaatccagacatgggagcatttgaggcagcatagaaggtctgaccctggggttcgggtgacaaaggaatttctagggatgcagtggggatgccatgcttttccacaaaaccagtggctatgaaagaatgggatgctcctgaatcaaaaagtacagcaacgggggtaaattcaactaagaactcaccgagcactactcccggggcttgctgagcttcttgagcgtcgacgtggttcactcgtgccttgccatgatactgggtcttgcttaactggctgtaggaggagggtgccttggaggcgggtgccggagcattcttggggccattcaccgagttggagtaggtaggcacggatgtattcaactgaggacaattattcttatagtgactggggtctccgcagtgccaagtgccaacaagcattggctggaggttggttgcttgcaacagatggggcatggagggaactttgaccctgctggctgaaacgtgacggagcggaccctgctggcttgttgaatcttggtcctttgggaggaaacccaaaagatcgaactctctagtgcttgtcctgctgctgagctcggatgacttggaacttcctcttgaggtgacccttttcttcttctctaaccctttccacttgtatggccttgtttgagaggtgcgagaagccgagaaaatcttgactggcgaggatagtcttgagttctggtctcagccccttcaagaaacgggccatcttcttggtttctgtgctgacatcatcaggtgcatagcgagccaattctatgaacttatggacgtattcactgacagatctccctgcttgagttaattcccgaaattcttcttccttgagctggacgatgcctaagagcacatgat

SEQ ID NO: 166249 - DNA, 460 bp, Zea Mays
attatctacaaagtggccgacgcagtccgttctaactcggctgttatttctaaaacgccgacgttaccatcattcactcggcagttatctctaaaacgccgacgtcgccttcagtcactcggcagttacctctaaaacgccgacgtcgtcttcagtcactcggcagttatctctaaaacgccgacgtcgtcataagtcactcggctgttacctctaagagcgccgatgtggtcatcagtcattccaaagctgatgtggcttcgtcatcatccgggtgttacttcagaagcgtaaatgttgacaataatagctcggccatcacccccaaaagcgacgatatgatgaccgagttactcagccagaggaatcgacttcacagataaggtaaacggaggaacgattcgagaacttcaagttacgacacaagcataacagatagagaacatcacagacaataaat

SEQ ID NO: 166250 - DNA, 1047 bp, Zea Mays
gggtgctagtttagagatgcgccgtgggaggaagtctgattatcttgaaatccctctcaaggacagtattaagggatggcgcttggagtggtttatcgttgagaacctcggaaattctctcccccacggtcagggagacagccggacgttcgtaccccgagttggaccgagtcccccacagatcaggaggttgttgaggctggggctttgctagctgaagttggactgctgaaggagaggggcctgactgcagaggttgtggttgctgattttgttttcaagaacattcagtcgttgaaggacagggcttacccggcttatctgtaccgaggcctagctgactcaactcgggttaccaataggagaattccctctctggacttggtgaaccgacttgagatgattcttagaggcaaggtatcaaatgttggtgccccagtggcatactcggcctggaacctgcctccttccaaagccttcactcattttgtttcgaatccacctgttgctaatggcagtttgggccttagagtgcgaccctctgctgaagaagttaacgccttggttgcctcgctcggggaaattcctgatgatgaacggcaagtccactttgaggtacctttggatcctagtgacgcagaaataagtgctatgcttgatttgctggctgaggactcttctgatgctactcctgctgggacgttggtggtggcgcctcccccagaaactgatgcaaccttggatattcagagacctgtcagtgctcgcccaaaacgcccttgccgagccaatcaacttgatccttctgctgctgagcagaaaaagaaaaagagacatcttcggcgagtatctagtttggatcgggacattggtccttcaattcctgctgctgaaggagtgcctgtgcctgaatttactgatgttgaccccaatgggtgtgctccacctgctgctgaccccaatgggggtgctccatctgccgctgaccccaatgggggtgctccatctgctgctgaccccaatggggatgctccatctgctgctaac

SEQ ID NO: 166251 - DNA, 273 bp, Zea Mays
gggacaaagtggaagtctacgtcgatgacatcgtggtcaagactaagagagggtcgaccctagtggaagacttaaccctggtcttcgacaagctgcgggcaacccgcacgaaactgaacccggacaaatgcgtttttggcgtttccgctaggaagttgctgggattcctggtttcgtaccggggcattgaagcgaacccggagaaaattagagcgattgaggcaatgagggccccagcccgagtcaaggacgtccagaagcttatgggatcat

SEQ ID NO: 166252 - DNA, 771 bp, Zea Mays
tttgttcttttctttgtaaacctaacagtaacacgaatccatacataacaatgacaagactgttaataccattaccacatcacatgtcataacttagctactataagtctttctaatcaattcatctttttttcgtgatgcagtcctatatacagtagaattccagaaacgtggattacctcacgcacatattattttctgggtgtcaactgatacctcacagccaaatgctaaccttatagattcttacataactgctgagataccagatccagctactgatccattaggatatgccttacttgcggaacacatggtccatggaccatgtggctattacaatcaaaattcgccttgcatgaaaagaaatcaatgctccaagcactatcctaagctctttaacagtgaaactgtagttgatatgaatggatttgcagtttacaaacgatcaaacaatgatagattcgtcatgaaatctaacattaagctagacaatagatgggttgttccctacaacatgacattactcaaaaagtatcaagcccacatcaatgtagaatggtgtaacaaaagcatattcattaagtaccttttcaaatatgttacaaagggtctagatcgcagcaagctgtatttgaaacaggttataaatggccaggacacccctattgatgaggagacaaacacaaggaatgaggtcaaggaatatttagatgctagatttatatgtccatatgattcatgttggaggatttttggttttgaaatcca

SEQ ID NO: 166253 - DNA, 1368 bp, Zea Mays
gtcattttatacttcaacggcactgcaatggtgaaatgcacagtaggtccctaaactatttccgaaatagttgtagttctataaaatttagttaaaaattgaaatccacaaggctggaaacaactacaggtacggggtcatacttttcatttgttctccagaaagggccagcattgtcgataaccattttcagcaactcaagtgacaacaccttgccgcgcagcaacatctgatcctcagggttatctggcgtcgagaacttcattgacagcttacacaggttcttcaagagtgcaagcccatcctctctaatcttgctcatcccagtatcctcctttccatccacctcggttggctccaaatgtgaccctggctctggtgcaacactcccctccattgtctcgtttataaacccctgagccacctgcacgatgctggagtcgttcaggttgcgatcagacacgtccatcatctccgtgatcgacaccgtccgaatgcgcacgtccatcgaatccacctccacgcgtgcaaacacaatcagcaggacctgcgccagcgcaagcttggcgcagagctgattggccccactgttgctgctgaggtatatgttgtagcaggtcttgagcacctggccgaggccctccccgcggatggcgacagtggggcaccgcgcggcggcgatgataacacggagggtggcaagctccattgcatcatcagagagagcgccacaggtaaggacggcggtgaagagcctggaggtgggggaagaggcatcgtccccggcgcagccgaggtcgccaaagaggaggcggtggtaaagaagtttggtgacgcaatcgagagcggggtcgacgaccttgggcgaagctgactcgagagcgagcagcagcgcgtggagggccgcgtcggcggcggcggagggcaggccgagcagcagcgaggattgcggcgagatagggtccgaagacgggtatgccggcgatgaagagaggaggtcgagtgccgcctttgccgcggccacgagcgctgagtgcttccgccatgcggcgttttttatgatccggtccagcgccggacccagaacgcggcccgacggagacgccccgccgagtggcatcgtggacgtagccatggtgaggggttctgtgcgttggttttcgccctcgtgatgaccgtcacatcattgggggaggggtggagatctgagagagggaggtggaagaaattggaatggaaagaggtgacgggtgcgtggggaggaattgagcggaggaggaagacgagggagcgaggggtagggctggaactttgacttttcatgtgcgcactcaaacagaggatggaatcacaattttggtggttgac

SEQ ID NO: 166254 - DNA, 890 bp, Zea Mays
caggaattaccacctgtcagcactcctctacctcttgctggtgctcacattgatgttccaacagatattaaaaaaggtcatgtttacacgcttcgtaaccatatcgaagtggttgaggacctctctttcatccgtgggaggagcaccaggggggcctttgaatcgaaagcctcgcagagaattcgtatggagctatggtgcatctgactctgctggagaaaaaagggaccgttcagaggagcacagaggcagggaaatcatgcgtagggactgggaccatgacgaagatgaagattttcaccagcataggcagcagggtactcgtcggcaccgcagtctctctgggtgggcgcgttcgtcgcgatgccgtggtggtgtggaggactgttacagctcgagtggaaggaacaggccatccactcctttccgtcggaggggggaaggaatgggtcagacaacctgctggatgcccaaggtaaagaacaaagtagtctcttttgcagatcctatcgtctcagatatttggcctacagatgtttctaaaggacagtttgctgctgagagtccttttccatcgggcgacatggaaaattccactcaagctgtgccggagactcatgctgctgcaaattccaaggtaaatacttcttatggctcagttattgctgatgctttgattcccccatgggctgctaagggggtttttccttctccggtccctattgttagtggtagtcaacctacaaatgttgcagagcaggtagaattatgttacaaggatgcacaagctgagtcaaatgttttcaatattcaatcaaatagtcagtggaatgatgtagtagtcgaggatagacaactgattttaactagtaatgagggtccgactgcta

SEQ ID NO: 166255 - DNA, 617 bp, Zea Mays
ctggctccggagctactagtattggcagggacacaaggtgctacttcacctcttgaaaggctcgttctgcctcttcggtccaagagaatggaccagacttctgcatcagcttgaagaaaggcagtgccctctcagccagccttgaaatgaagcggctaagggcggctagggaccccacaagcttctagacatccttgatgcatgctagaggcctcattgcctcaattgccttgatcttctctgggtttgcttcaatgccccggtgtgaaaccaggaaccccagcaacttccctgcagagacaccaaagacgcacttgtccgggttcagctttgtgcgggttgcgcgtagcctgttgaagaccaggtcaagtcttccactaaggtcgaccctctcttagtcttgaccatgatgtcatcaatgtacacctccaccctgtccctaatcaggtccccgaaagtcttactcatcgcccgtacaaatgttggcaaggcgtttttcagaccgtaaggcattacgacataacagtaaagcccatccactgttacgaaagcagtatgtttcctatcctatctagacatctggatctagtggaaaccagagtaagcatctagaaaag

SEQ ID NO: 166256 - DNA, 318 bp, Zea Mays
atgactgggaaggtaaggtgattagttttgtagacaaatggattgaggtccagttggtggggaatcatcaacaacaacaagtggtgcaggaagtatcttctttacaagtggagcggtggttgcacgacaatgatatctgggtgtttgctctgctggaagaagtgactgcagcaagcagcaaagagatccatacagatttgcaagggttgttgggagaattcacggacatctttgttgcacctacagtcttacctccatctcggccatttgatcatcatattactttgcttcaggggtctataccagttaatgctcggc

SEQ ID NO: 166257 - DNA, 546 bp, Zea Mays
gcttagatcatattccaaagcggaagacaatgcattatccacagccttcggaggccggggaaaaaagagattgaacagagtttttgatgtcattggttttgtttaccccgactaccgctatccgctgcgaggacagggaaagaagaggaaaactgctgcttcggccactccagatgagcctgcgccgaagggcaaaaagttgaaggtccttacccaccggccacgctatattgaactggccgtggtacctgagtttggcggggaggcttcttcagctgctgaaccgaaagaacctgctcctcccacgcagaagattgaagagccggctgtaatgccgaaggcaccttcggttgagctaattgaaacgtaggttgacaaagataaggctgaaaggtcaaaaactggagaagtaacaaagatgcccgggattttaagtccttcaacagaatcaacagtgctgaaggcagaaaagagttctgccataacccctagaagaaaaaggatggtaaatgtattagatattttagaaacaacggattccataag

SEQ ID NO: 166258 - DNA, 356 bp, Zea Mays
aaccgtcggtgataatggtacaggagaaaaccaagacgaccgaagtgccgaagcgaactagtgaaactgagaaaacagctaaaaaactaaaaccaaggaggtcggtagggcaaccaaagattctgagcccgtcgcaagagacggagctgccgaagatgacaaaaattcctacagcaactccaaaaaggaggagaatggccagcgtattagacgcggtcatggaatcgacaaaggtactaactcctgcctctgcagaagtacctaacataggttaaaagaatacgaaggaaactgctgaagtcgtcatgacccagtttgaaactgaagctgagcccttagctcccacagaaacgggg

SEQ ID NO: 166259 - DNA, 541 bp, Zea Mays
tgcgggacccatctggtacagcggcatgggcgtagagcaagctacagggactcgcatgacagacggatgagacagaacatcgtgcgaggaatacgtcagcacacgatatgtcagaaggagtcatgccacgcgcaaaacacgccccaagattgaccatagaggggcccactgcgcactatagctgagggaattagctgaagaactctctctttctctcatgtaaggaccgtcccttaaagtataagagggagtccctcttccctcgtacgcacgtaagcacacaagttgtaacacgcctcaaaataatactattgaaccttgttgtagtagttcatagattagctcggattctttataatcatatatggaaccatgttgtagtagttcatagattagctcgagtctttataaatgctggatccgccaccgctagcggctctccattggcaaaaacaagctgaaaatgttccaaacacacaatcatgatcacctagccaacaaaatccagatgtctgtgttttatacaatataatcaagcata

SEQ ID NO: 166260 - DNA, 708 bp, Zea Mays
ggagaagtgataggagggaggccagatctagattcacttgtcgttgatggagcagagtttagaagagattgatccaacttctgtgccacatgcttcaaatacccatcacaaattttcatgtgtcttgacaaatgagatgttgttgatccttgtatgtaagaatatagcttcttacaatagttgcattttgcctttgatatcatcttccccttctcagatggatctgacacattcaccttagtaaagacatcccaaactttagatttccccttttgcccagttcaacagtcttcaccttcttgcgccttcttttgacccccctttttacttttgctatcatcaaattcatcaattgtgacattgtccgcatcaccaatttttccacctagcactgtcagttcatcttcagacatgtcatccctcttgtcaaatgaattactttctgaatcagtccccttcccttctacagctgactccatcacttacaaatctgcaggctacaatcagtaaaaataaatccctcatgagtcatgatgcttgagtttgaattttgactgataagcagaatatcaagatgtagtataagcatttacaaacagtgtaacactgcctatggatgaaaacctgtaccgtgcataatagagaaaaccttttttcacatctaccaggcatattttgcaattttgctgtctctttctaccaggcata

SEQ ID NO: 166261 - DNA, 272 bp, Zea Mays
tcatcaaatcgcctttctgactgcctttttgtaatgatggagcttcggtggtcgcggccgagtcatccgaaattccctcgttgctttaggaatgacggccgagttacggtgggtcgtgtcggtgttttagatgtaatcagccgagtgatttatggcaacatcggtgtttttagaggtaacagccgagtgactgacggtggcgtcggcgttttagaggtaacagccgagtgattaatggcaacatcggcgttttagaagtaacaaccgagtga

SEQ ID NO: 166262 - DNA, 472 bp, Zea Mays
tgcgctttattaaccaaacaagctagtccatccgccgcaatgttaaagaggagaggagagaaaggatccccttgcctgacccctttatgtgtattgaaataaggacccatagtgtcattagtcctaacagccacttttccacccctgactgttttcattacccaatcacaccatttctctccaaagccttttttgtctaacatttggtgtaaaaactgccaattgactttatcatatgctttctcaaaatcaactttgaacattattccattttgtttttcctttttaacctcgtgaagaatctcatgtaaagctactacactatccaaaatgtacctttccttgaggaagcctgactgcgaattactaatgaccttagtaatgcatgacgccagcctgttattaagggtttttgtgataattttatagctcacatttaaaaggcagattggtctatagtttttcaattctt

SEQ ID NO: 166263 - DNA, 666 bp, Zea Mays
cctcaactactcccaaagcaattggataaatccagtcatttggatctagaccaacaacagtgaatatttgtccaccaaattttgtcttaatatggcatccgtccaagaagattttgggcctacatcctttaagaaaaccccttttgcaagcatcaatggacatataacagattgaaaatgattgtccaccaaatttagaaagaaactacttcctgggttactcctcaattcaagtccaaaattccaaagcttgttgtatagttcactctcaacaccatatatcttctttagtgctagccttctgaccctaactaacttgcttctcataggagtgacattccatttccttttcactgtccttgaaaagtttgtcaaagtcattttatcatcacttttaaaggagtcaatgtacttctcagccagccatgtagcagtacacctcctcaaattccactctctctggcatctatgagtggacacataggtcttaaccatgatgccattttctctgttgtccatagatgcaaataacattaagagcatccatgtgcataatgagccctcagcctcttgttgtcattccttggcagcttaatttcaaacctctttttcatgctatactcagtaatagctttccttagtagcttcattgactcaaacatcatc

SEQ ID NO: 166264 - DNA, 599 bp, Zea Mays
atcgtaaataagctgagtatctttgtaatctctctttattgatgacacatttccactttacagaatacattgttgccccagcagttttgaaatacagcctaggaataaaactttctgaggtgctctatgttccaggagttcccaacttctgtgccatccatctgagtgaggcgatatgatccgggccgagtgacttctaccactatgaaaggtccttcccataagggtgataacttgtgccgtccctctcccgttagaattcggcggaggacgaggtctcctatcgaaaagaaccgttgccgcacagccttgtcgtgatagcgccttagagtctgctggtaccgtgctgattggattactgcattcagtcgctcttcctcaagtacatcaacgtcctccagcctggtggcctcggcttctgctatgctttcgaagatcaatcttggcgccccaaacttgagatcagcaggtagcactgcctccgatccatagaccatgaagaaaggagtatttccatgcagggctcggctaggttgggttcttaagctccaaacgacataaggcagttctcttatccattttcccgcgattttttcatt

SEQ ID NO: 166265 - DNA, 815 bp, Zea Mays
gccagactgacttgaaccaaacctcagccttcttggacagtgctcgtgccttaaattcttctctgaatgctcatcttgactccgagaagtaggcttatgaggtaaactctcttggctgcttctgttttgctttcttttctttgatgcttagtgttgttcttgcttgtaggaggagaggcgatcactcattgcttcttgtgacaatctagacagactatatcacgacgccagcaattccttgactattctagagaggagtcaccacttcaccatgtcggacttggatcatcatcatgatgaactgagggcgtcccagtctgaagtgtcccgacttagtaagctactgtcttccaaagattctgtcatcaaggagctgtgtgcttcaaagaggctcatcacgcaagagctagaggccacccgcctcaacatcaaggccttagaggatgaccgtgtcgttatttaggcgatatgcgacaaggccatggataaggttgttcgcgccgggtggatcctgatgagaaggcctggcgtcgtggtgcctgaagacattatcaccgatgtttttgccgcgcctgctgttgtgagtcgaccatcttcttatactgctcctgcagccgagacttcctgcaaaaatgctcctgcgcagggattagtttgaatcgaaaacttctctttattgagtcagtacttcatagtgaaatagtgtactatgaattccgtgtgcatgtaattgtgctatgttggaactgatcgttctgtgagcagggtgctgagaacacccttgagaatgcgaacgagttatttttcttcgatgt

SEQ ID NO: 166266 - DNA, 492 bp, Zea Mays
gagcttgtatgaacttgtgagcctgagctaggtctaagtctaaatgagcttgagtctgtaatgctgcgtgcctccccttttatagctcaagggggcacgtacaagggtgctgagccccgacatgcgggcccaggaacataacggatgtaatacttggggcaactaatgctagtcgttagtgcaatctccttgtaccctgatatctgcggtctacgtagcattggcgtccagcggaagcttccctggcaatgtacgagtgatgatgatcgtggcgcatgcgatagtatggacatgtcgtctgccacgggaatggacaggcacgccacctgcgggatggtctggtcgctgtcagccagtagagtgatagggcaacattaaatgctgaggcggcacatcgcttgtcagtggagtagacagggcacatttaatgctgaggcggtacatcacctgccagtttgacacgcgacgcgcctcacccgcaataaatgcgcg

SEQ ID NO: 166267 - DNA, 630 bp, Zea Mays
ttttagtgcactaaataaccaacaaaatatagtaagaaagttttgccatttgaattttccaaaatccccaaatcagcccttgaacccatgccctatggaaaaattcaaaaactcagaaaactgaatttcaaacccttcctaaagattagatgtgttccctatcttccaaaactcaaatcctcgaagtccaaatatcaaagtggcgccaaaataccctaggaacactctggagaagtttgagatcaaacccaaatcgtttgacatgacttgacacatgttttttcttggtttgggcagtgctgacagagcaatctccaggccaccatatcttctcacccaggccatatcttcactcgggactcacacacgacaggaagaccatggcacggtgaagagacgctacataggatccttggcaagatatgcacgttttggtcggccaacgggcgtttgaactcgagcataatcacacttccacgtgttcgatggcgtgcccaagcgctcggccgcgcactggctgccctctacgcgcgcgccgcgcacgatcggcttctgtcccccgcgcctgcgcccagccatgcccgagggcgcctataagtacctcgggtgcacaacggtctgcccttcact

SEQ ID NO: 166268 - DNA, 407 bp, Zea Mays
aaagtcttgagtttcccaagtagcttcatcttccgtgtgttggttccattgtatcttataaaacttgagagttctccttcgagtaattttgtccttttcatccaagactcgaataggatgttatgaatatgtcaagtctggttctaaggcaacatccgtcacttcaatggttcgatctggaacccgaagacacttctttaattgagatacgtggaacacattgtgcaccgcagacaatgtttcgggtaactggagtcggtatgctactggtccacattgttcaagaacagggaaaggaccaatgtaccggggtgcaagcttcccttttaccccaaaacgagatacacccttcattggtgagactttcaggtaaacataatcttcaacttgaaagtacaagggtttgc

SEQ ID NO: 166269 - DNA, 497 bp, Zea Mays
aagaaagacaataagtttgtgtggaccccaaagtgtgaggaaagtttccagatcataaaggaaaagctcacgaccgcgtccgttttgacactaccagatatacaccaggacttcgtcatcttctgtgatgcttcaaggcaaggcttagggtgtgtcctgatgcaaaatgagaaagttattgcctatgcatcacgcttactcaagacgcatgagcagaattatcccacccacgatttggaattggcagccatagtgcatgccctaaaaatatggaggcactacctaattgggaacaaatgccacatcttcaccgatcacaagagtctgaagtatatcttcactcagccagacctcaacctccatcaaagaagatggctagaattgatcaaagattatgaccttgagatccattaccaccctggaaaggccaacatggtagcagacgccctcagccgaaaacctttcgggataaagggaaccaactttttagaaggttg

SEQ ID NO: 166270 - DNA, 494 bp, Zea Mays
ctggtgaccaccagatccaaaatcagtggccatgattcaaaaccacccagatccgttcatccagtgttcaacggtcctgatttaattacagggaaaggggtatctagcacttaatcagagccatccgcttacgatcctatggctaacggtcccttcccagctttccccctcccagcttgggccatacggcgacgctgcccaacggtgcacggtggcgcacccaccgaagaccccggaatctacaacgcacgaccctaattccctaatcgagcgaagctacacgatcctgggtgctcgacgaacatggcaaaggacttaccggaggcagatacggtctcagcggcggcgcccacgacgcgaggcggactggcagtcgattcatggtacggcgagcaatccgcgagatactgcccactgccacgagcataggcccaccggggagatccgaagagcatcgaccatgctccacgacccatgcttgaacctcgagaaat

SEQ ID NO: 166271 - DNA, 1257 bp, Zea Mays
agaaagctatcaatccactaaccgatgttcgaggcttttagatcatctatttgcctctaaagtaggagaggattccactgcagcaaggataaaccggatcgggaataggggcatcgcaagacctcaactgggccgacacacagctcataacattctgcgaacacaagaattagcaaaggagcctatttgtcaacacaagtaaagcagggcaaaggtcagctcacctgaaggttagaaaggaaaaagggaaatcccagagccggaggcatcgacatgctatcggacggtggagtactaactgaagcaatattgagggcagactcgaaccccaaaggaggattagagctcacgcccaaggcaacactcagagagacctcagctctgacagtaggcagtggattcccagcattcgggtcattgacctctaaaatgaccggaccaacaagagcagtaggaggacttgtcaacactggttcctcagactgaaccggtggcaatccagcatgaacgtccatggaagcaaccaaggaggagccgagcttggcacccttgggggttgggttatcctcagcagcaccctcgggggctgggttatcctcagtgacacctttaggggctgaagcaccctcaatcgtacccacaggagctgagaaactctggcatgcaacattaggaaccgaggtgttctcatgaattaggccgccctcaaaggtcgaagaagcatgggaaatcgtccgggttatttcttgctcgactggattactagctgagggggtgtcatctgggacctctgtacggatgacagcaccctcattttcgggaagcttcgataaaagatcttcagggacaatctcctccagtgcatggtcaatggcagacatcgtcaacctctggagactaaccagtcctgagagagcttgaattaggacgtcatcgctgtttttgctacgacaattctcatgaatcaaagggggacttcctcttcatcctcttcgtcctcgtcagtcacacgtccaccgactctggtgccaccacaattctcaatatcatcctcgaggttggcgctcgccgagccatgaccgaggactggggtggtagagtcagtccccagctccaagccagacgaacgtcgaagtcttttctttcttttcttcccctcggcagacacagctggatgacctgttcgacgcaatcttttgcgacaaacacttccaggactgcaaggtccttcatccttgccgaagacgtgcctagctg

SEQ ID NO: 166272 - DNA, 392 bp, Zea Mays
gtttatgaccagctactaggctatctattctgcctactaaattattccccttgcaaaactatcttaccatatgtctctagcctagatggttgataccagaaggggaggaggttgtagcacgaattcgtcgaagaagggttgtagctaatccggaaccagaaatgaatcctcctccgaatcccccgcctgctgatgacatggttgctgctcaaatgcgactactacaacaaatggccaacacgatgacggaaatgcaagaacagatctgtcaagaacgtcaagaaatgtgtcaagaatggtaggaacgacaacaactaccacctccaccaccaccagctccgcctagggataagcactaggagtttatgagtcacaaaccacctacattctct

SEQ ID NO: 166273 - DNA, 305 bp, Zea Mays
aagcggagcaatgcgatggtactaggatcgcaattttgcgtgcttattaagtctgaactaacagtctctgttccagtcatgcatcagggcttcaggagtgcattttgccattctgaattaccagtttggagcttactgttcagttcttatgttgtcacaagcgggcatagataatatccagcttgtccctcttcacagtgatattttatttctacatggaaagataagggtacctaataattagcttgtccctcttttgttataaaattagtcttattgtttttttaggaatagagagcccttct

SEQ ID NO: 166274 - DNA, 460 bp, Zea Mays
atcatttgtcccagtacgcaattgaccaggtcaatactgacctgaaaaagaggaattgttttatgagaggcctcaatgaccggctacagcgaaagatggccacttgcctcgatctctcctacagcagggttgtcagcacagcgctggcagttgaagcaaagaacataggcccagtgaagtcaaagggctttggaggtgacaggtccaatcaggggcctgaaaaatgacaaaggttggtgatcagacctttcaatcaaaaccgttcttcgcctcgtccaccctcataccccttcaaatagcctgtattcatccgccctgccactgcccccacctcaacaattcaaccgagtgcccctggtgctcgtttccctgcactcccgagttcatcaactagctgctccaattatgggaagtctggacatttcatcaaagactgcccatattcgaggcggaacaactc

SEQ ID NO: 166275 - DNA, 619 bp, Zea Mays
aataatacgtcttttttatcatagtagaacacaaatatgaatttagtagctttaatttagagaacttcattcacgcggacagatatgttaagattctatgaagatttattctttagtggagcgctcgatagtttcgcttcagcgcagtggtatggtagggagaaaaatatgtgctatatattaacatgtgtagaagatcataaaactaaaatatatacatctactaagttttgaggctctcaatttttggaggccctgtgcgagcatacgactcgcatgtgccttggcccggccctgataatatgatgcatcacttggcggcatgtggttacgtctttaatcgaacgtctggcgtggatgccaaagtaacaacgatggaagcagatactctacagttacgttcacgtccggtcactgacttacgagcctatgttttgaccaggctcacgcagagggctggacctaaacaggtccgagtgagggctcacactccgctcatttatatttttcaaatagcggagcttaaattttcaaactatcatacatgtgatgatgtagtttgcctctagctctaggtcttcaatgaagaggaagcgaatgacgtagcatcggagctaca

SEQ ID NO: 166276 - DNA, 524 bp, Zea Mays
gcgttgcgatctctctccacatgatgaaattccaacccttcgaatttgtcctctagctttcggacggccatgcagtatttgcccattgagtcattcgagcaatcccattctttgtttatctgacttatgaccactagtgaatctccatataccatcagtctcttgatgcctagtgacatagcattgttcagtccatgaatcaaagcttcatattctgctgcattattggacgctaagaatagtaactgaagagcatatttgagttgttcacctccaggtgcaatgaagagaattcctgcgcctgcccctgcagttttaacgagccatcgaaatacatccgccatacttctacagtctccgggttatctggcacttgttactcggtccattctgatacgaattcaactagtgcttgagtcttgattgcagtgcgaggtcgaaattcaatgtcgtgagctcccagctcgtaggcccacttggctattcttccgatggcttctttgttgtggagaatatcccctatt

SEQ ID NO: 166277 - DNA, 348 bp, Zea Mays
tactgggatgtatggggagtaacacgaagcagtgtggaggacttgcttcgactgactctgtctcgcctctgcttcggtaatttccttcttcttctgaattgtgacctggcatgtccttgttgtgtgacccttgtcctcgccgcaaaaaagacagtacagtttcctaggttggttgccaaaccttcctccactgaaacttcttcctcctctgcccctcggagccagtggtctgaaagaagtcatgcttgaagactgagaatttttatgactatgctgagcattgctggccctttcatcattggcattggagttatgaatggaccggacatgcctaggatgaagcctccc

SEQ ID NO: 166278 - DNA, 581 bp, Zea Mays
tctcaaattggtttactcttgaattgctacatctttatccatttggtgaagttgaatctaattatccacagaggacaacatgaatcagaacgtttcagggcaagtagcatcagtacacacctgaaatgaaaaggttttcttaggcgggttctccttggcggggattgctcctccttccttggctccttcctcagcttctccaaagtccactgctgcacacgattgatgcttgagagagaagaaacaattctgaaacttcgtccgcccagcccctgcccttgctcctccttatttgccatcggtggctaggcatagcgagggatggttgttgtcattaatatggataaggatgacttgtttcttgtgcggcattcgacgccatctgcgatcgcttgctcttgcatgtagggggaggcgggacgcataggcacatgtgcgaatggaggggaggatggtgtgcagggatggggcaggtactggcgcctgtatttggatggcgagcggaggcggcggatccgccagatccggcacgcacaactgttgggcgacgaggatgaggaccggcaggcgacggatctggc

SEQ ID NO: 166279 - DNA, 605 bp, Zea Mays
ggccattaagattgttgttaagtatgtgccgaagaatcagatgctaaagtgttgggatatccgcggttccaacgtcaggttgaaccatgtttttgagttgaatatcttgtcatacggtccttactcggagggggactctactgtcgctggcgaaccgaggtaaataggtgaagacccgacctaaagagggcacctcgaaggggaaggctgtggttgcagctacccgaaaaaggaaaatagatttgcaaggtatgggggatgacaagatggggctgagggcctctgggatttttgttgacgagttaatggggatgtgcgtgggtccctagtaggtgatgtcttcacctgagctctgggaaatatcttcgctcatgctgaaggttaccgggggtcgatggcattggaaggaccctatacaccgggccgctggcgatgactattttacgttccatttggctcgtggcagagaatctttccttacgggagaaatattggtgttgttgtgtcaacattgatggagaaagatcgccaagatgcctagtggaagaagcggaaggcccctcttcggatggtggatccacgccgagatgctaaggtggcgcggc

SEQ ID NO: 166280 - DNA, 377 bp, Zea Mays
actgccgactgtttttccgagttaatggagcttcattttcttcctcctcatcttccacagcaacagcgcaaacagcatcctcattggggtcagcagcaggtggagcacacccattgggttcaatgtcagcaaggccagttgcagtcatttcttcagcagcaggagctaaggtactggcgtcctcgtcaaagctggatactcgccggaggcgtcttctcttcttcttttgctcatcagcagaaggctcaggctgactagttcggttagggcgcctcgggcgagtactgacaggtttcgggacatccaaagttgtatcaacctctagaagcgacaccactgccaacgtgccatcaggagcagcatcagatgaatcctca

SEQ ID NO: 166281 - DNA, 1018 bp, Zea Mays
agaaaacagagttaactacctccagtcttccggcctgggagaggagagcagaagtacaggacagtctcccttcaatcctttgaataagaggtagaaaatggcagattctgggttttgacaggcctagaggtacaccaaggtaagtgaaaggcatagaacatgtctggcagtttaaagttctggctagaatctccaatcgcgctgggcagacattgattgggtacatacttgatttaaggtaattcactttgagacccgtcgaggtagcaaaggagtttagaactgctctgaggaaaaataattgtttggggcaagcttccaagatcaagagagtgtcgtcagcatattgaacaatcgggaaatcttgaccacagttctcagtgagtggcagctgaagaagaccctgctgtctcgccttattgattatactttgaagcaaatctgccgctagaacgaataaaagaggcgaaagggggtctccttgtcgtaccccacgcttgcaatgaaaagatttgcccggcacaccattaaggagaaccgaggacgtgccagaatggaggatatccctaatccaacccagccatttgggcccaaattctctgaaggacagcacctgaaggatcagatcgtgctcacctgtgtcaaaggccttctcaaagtccagcttgagcacaatgatttcttttttggaaacatggcacaaatggatgtattcataagcccaagctaggcaatcctggatggatctacctttgatgaagccatattgatttttgtgaacaagtgaggtcatcactgtctgaagatggttggccagcaacttggtgatgattttcatactattatttagaagcaagattggcctaaaatctctcaccaattgatcattctccttcttcggaatcaaaacaataaaagaaccattaatacttcgaagacaaacatccccttgataaaatttctcacataagtcatagaaatcctgagaaatgatcggccagcattttttgagaaaatt

SEQ ID NO: 166282 - DNA, 688 bp, Zea Mays
ccatccttgatgactgctcccacttcttgtggacctttcctctccgcctcaaatccgacacatttcccactattgctaattttttctcttttattgccactcaatttggcaccaccataaaaaacttgcaatgcgacaatggtcgtgagtttgacaactcccacgcacgagctttcttcctatcccacggtgtccaccttcgtatgtcgtgtccctatacctcccagcagaatggtagagcagaacgtgtcctccgcactgttaacaacatcgtccgttccttactctttcaagctcaccttcctgctccctattgggttgaggctcttcacaccgccacataccttctcaatctccaccccaccagcaccctcaattactccactccccatcttgcactctttggtcgccccccatcttatgaccatctccgtgtctttggctataagtgctatcccaacatctctgccactgccgcccataaacttgctccccgctccaccatgtgtgtcttccttggttactcgtctgaacacaaaggctatcgctgtcttgatatctccaccaatcgtatcatcatctcccgccacgttgtgttcgacgaatcctcctttccgttcgccgagacccctcccagctcggctcttcccactaaccttgattttttggatttcttttctgaacaggt

SEQ ID NO: 166283 - DNA, 1045 bp, Zea Mays
ttgtacagcccattttgtccttaaccagcaaaaattgttgcatgttctgctcataataagacccccacttcaaacaacctcatggttagcaagtgaaacccctatataaaaatcacaaaaatcacatgcttgtgtaggtggtttctagctcttgtgtgttgcaccattgaatatgcacctgcacagcttgtagatccccatagcttgaccgctagatcgacctaagcttccttgtgcacttctttacgtcaaaatataaatcgtttagtgtcgtttgcgcaaaccatatctaggccctatttcttttgggaagccatgtccaaatcctcgctaaactcttgtctgctcatcctagaagctaatctcaattgacgacccctcttttcacttggatctagtaatcttttcctatatgaatcacattgtgaccttatccgccgaatctcttgatcattcattgaatctacttcgtcatcttgttattttctacaacccattctcaaagtatcagatgtctggtcattctcatactctttcttcgaggatcatgaggttgttttgtcaactgcacctataagcaacatatcccttggttctgtggattttttatggtctttggttctctcatgtctctgcaggtttatcagtcttaatctcatggttgcctcctcctcatatcccatctcgtactaatgtctgacctgataatctctgtggtgatcatgtaatagtgtgtgcagttcaagaatgttcttattcgtgctctttttgccaacaaatctatgcttcaactcctataatgttcttattttctaagacatactctcaagggctccattgtaacaaccaaaatctcttttgggatttaaaaaagtctctccaaaagattaacaattaaaatatctttaatgatgatttccttcccttttccaagatggataaatggtaatataaaagttatatttaaacccttgaaattaagttttattgtcccaaagaaatatggcagggacgtcttcaattagtaattgatgaatggtgttac

SEQ ID NO: 166284 - DNA, 694 bp, Zea Mays
gcggacaggaaggtactcaacttaccacagttcggggtgaagatcttcctgtccacgtggtggcgcggatccgcggcagtgacgaaccgcgacgagcaattcccaccgccctgagactcgattgctctgaccgcgcccgcgagtatcttccccgtgcccaagcatacgcgcccaatcgcctcaccgaggcatggccatcccggcttcgaacgcatgattccatctgtgatgattcgctcagctccctcgccctcccgccgctcgccatgagacgcctcggcggcatggtgctcgaggtctgcacatcgtctcaatggaacagagaagcgaggcggggggaaattgtggcctatatacaccgagttggctaggatcaacggattccaaagtcctcccgaagctcccgtgaatctgttgtcagcttccccacgccatcggcatgaagaaaacagatgacacgttggtcccacgtgacagagaaccaaacgacgacagagagcaagcctatgaccaatagggcccacgcgttggcgctttggtggatggttgggttgcgcgggagcaagggggatgggccgcatgtggcagtttcggcccaagcgaggtagaattgttttgtttgtttttctttcttttgttcatttccatttctcatttctagttttcaaagttgaattcaaatctgtttttaaat

SEQ ID NO: 166285 - DNA, 925 bp, Zea Mays
aaaagcggagtcccctacggcacgtacacgattacaaattgaagccaactcgcaataggcacaacataattacatagcgcaatcacaaataaacaacaagcgaaggccttaatggcaccatcacacaatagtgcacatcacactatttaccctcgtagctctattgcgaagagggggagggcagcgttttcactcaatatcgcaacagagcagcgagggcaacaaaaatgtcacataggctcctccttcggaataagacccgcctcccaaaaattgaacaacatcatcctcaactcttccccctcaaacaggtcctgcaagtccccctctccaatgcacgtcccagacgtcgatgaaagtagctcacgctgagcaccccgatccaatcgcagaccaccccgaagacgagacctttccatacccattcggcgacgtcttctcccactttgtgacgactcactgatgctctgtttcgacacatccattcttcgcctccgtgagtcttcagctctcacatcagccgaggttgccagcaccttgcgagggacagatcgcggtggagactccgacgcagccaaatccaacacagcaaaataatctaggtcatcctcagaagattcctcaacccatgagaaaggactcccaaattcttcttcattcgaagaccatgacccaagctcagacccctcagacacatttccactaagaaacattgcatttgcagccatcaaaacatcattaatatcaatgtcatcagggtttgcttgcgcaggcctagacgtccgaacctgctcaacaaccaaccttcagtatcacaaaaagtaaaaccaccaaccctaaacccctagcgcatctcttcaacctgcaccggagcagacgccgccgcagggtcttcgccggagccgtcctgaggtgctgagagccc

SEQ ID NO: 166286 - DNA, 864 bp, Zea Mays
aaatggtcacttcgttagccaatagccaagcttatgccgagatttaaaatgtgggcaagttaaattaaaatcatgcttatctagacgtgtggttaaataataataattttggcttgtgtagtgaggtggtgatatgccgaagtagtcatcacttcctctatgtttttaagtcaagtcaaaatgcggggtactagtagtacgctaggcaggcggtgttccaaatagataaatcgggtgatgtggtagttgtcaagcatgatagaggttgagtcacttagctataaattgatgctcgatatgtgaggtctcctaaaatatgatgttttaagtgactcgtgtgttatccaatttaagttgagcaacggttaagaaacactgattaatcgactccaacccatattttgagttacgatgtctaaaatagtttgctaagtcttctactgtgattagccaactcatgttaaataggagtcgatttcgttaagtgtttgttatatatgtgttgtctcggattgcgataataagaggcaagccgacgtgtaggatgtatagcggtctatgttgttgcgctagttagccaaattaatagatgtgtttgggtaatatcgtagtcacagtgatttgcttgttgtagtctaaatgtgtatgtttatggtcgcgggtaaaaagtagtagtgctcatgtgatgtctaatttaaaatgcaaattgttgagtgattgtcgtgaagaatgcattgttaattggttgtagtaattttggtgcactaatgacttgaataaaatttgcaagtcgaattgttggttccaaattgattgtttcaactcgaacaaatagtaaagtgttagagtaattcaagtctctcg

SEQ ID NO: 166287 - DNA, 640 bp, Zea Mays
gcaaaggtgggagcatattcttcggaacaaaaaattattcgcggtgatcccgatggggttatccagtggattggcgaagaagccgaagcttttgatgaaatactcggtgatcgaggggatttctgtgcattcaccggtgcacgagggattacggcaattttagaaaaggccggtagtgaacatgttaaggtcgcagcccagctagaatatatttttttccgctggcgacacaaaggatccctcggccgaagcttctttactgggcggaaggttttactctaatgtttggataaagggtggtcgtgagatggctgacgaagtcattaaaaagaatgataaagaatctcacgacgcccgagaggaggctaaacgagctgaagtagctgctgaacgcgccatgattataggtacttttaaagtttttgcttcgctgttcgtttctagcttcgaaattcatcatcatattctttattgcagctgacctttcaccaccaccggagccgtacaaccccgaagctgacccggttatgaaagaagctttggatataatgaagattgctaacgaagtcgttgacgaagtcatcgacagactattacatgaagctgctgaaaaaaatactcaaggaaaattaaattcttg

SEQ ID NO: 166288 - DNA, 468 bp, Zea Mays
ttggaaagtaaaattttctaagtgtgagttcactaaaactgagatctcttatctaggtcacattatcagtcgtcaaggaattgcaactgatgtcacaaaaattgctgccatcaccaattggccgacaccatcttcagtcaaggacctgcgaagtttcttggggttagccggcttctaccgcaaatttgtgagacgctttggcatcatcagtcgccctctctttgatctcctcaagaagaactcattattcatttggacaacagaccatcagcaagcctttgacactctgaaccaggccctcagctcagccccagttctagccttgcctgatttctcccaacccttctccatttacactgatgcatgttccaagggtgtgggtgttgtcctcatgcagaatggccatcctctggcttacttaagtcgtgcactgggtcccaaaacacaaggcctctccatttacgaaaa

SEQ ID NO: 166289 - DNA, 814 bp, Zea Mays
gagtaattggggcgaacccagggcataactaaaagcgaggaggggcgcaaagggtttcttacgctccttgtggcacgcataggggtgacgctgaccggaggtgattggcgttggagcgacgaagattcagtgagataggtgctggtacatttgacgatgaggctcgttgtaggtgtcacaagcactgatgaagttgatgacgctagagatggaaacgggaacactctggtggctgtagaacactcctctgaagctcaataatgtcgatgatgacactagtagcatgctcaactcaaaaggaaaggcgacgatgaaggcgatgcaagtaggaattgttgggcattattggtgccattaagaaatggattgagcagggaaatggctagggaagttgcgtgttatcctggatatccattgacagtggcagtgagatcagtcaagcgctgcaaatgaggaattggtgacgggatgttcgctggtgaatagaaaggaaggtacatgaggttagggatgacatcccagtcccacacgctagagatagagagagaacacatgagcgcgagcgaggaggcattaacaccataggcccgtctatcagcgatcgagcaagagaaggacgcgagcacacgcaactgttaggccaaaagccactaggctagctcgggacactattttaccattgttattttttagaaagaaatttaagttaaaatttcagattcaaatccaaatgaagtccaaattatttcaaaaaaatccaaaaaattataatcaaagacaggaatactttgacaaagtttgaacttatttcttg

SEQ ID NO: 166290 - DNA, 644 bp, Zea Mays
cccgtgaagcatgggtggcaatgggggaggcacctctagtggatcgccgatgaacttcttaagaagcccaacatggaagacatcatgcagcttggaacgcgagggcacggcgaggcggacaacagcctcgttgatgcactcggtgatgcggtacggcccgacgaaatgcggcttgagcttgcccttggacagctacggtagggaagcggtagtgcgctatcaaaggcgtagaagcacccagttgcccacagcataggatactaggcagtgcatctggtcatagaacttcttttggacgtcttgagcttgcaccagccgatagctgacatccacgaggagctcttcctgagcagccatggtcttggccacagcagccacccgtgtctcccctggttcgtaggaccagatggatggaggatcccggccatacaccacctttaagagggtgtcctagagcgacaactggtatgccatgttgtagacgtactctgcccatgacagccaacgcagccagtgcttgggccagtcccccgtgaagcaccggtggtacatgacgatgactttgttggctgcctccatttggccgcccgactgggggtggaaggcgtacatcatctatagtttggccccggatagcctcatca

SEQ ID NO: 166291 - DNA, 730 bp, Zea Mays
ctggtgacacccttaacacttcgtgcatcagggtcttgaccactagtgtgcctgtcaccggcaacccctcgctccgttttttgctagagcggtcatgagcccttcgcggactggcctttcgaactctagaaataacggcaatactgtcgtgagcttttcagtccctgccaaaggaatggaatgaatttgagatcttaccaggatggagccccttggtgttcgcttggtttctcgagcagggatgttctgaaaggtggcttgatcgattttcatttcctttggctttctcgaggtcccatgtaagttgtgtagacaaaaaagaaaggaggtacattactgtcatccatgcttgttagaaagacaaaggatgcaaaaaaaaggtttttggaaagctagtcgtctcccctatctctagccctcgatgtctcttagccctgggcagctgttctagggtagggaggcagaaatggtctaggacgccgaggccttgtcaagggtggaatcatcatatctgctccatgttctgggcataagttagcatccttcctctctcatcctctagctcagcagctcacagccaaaggtggagccaagcagctaattgatgcatgggaggggaagcgaatccttcagacatgccttgccgaggactatgtgaccaacaaacatcctccacttcccgctcttcttctagactagtatcgagttggccaactactctagacggcgt

SEQ ID NO: 166292 - DNA, 1445 bp, Zea Mays
atgtaatgcgagcaaatcaatgatagtagtatctcactaggaacttgaaggggtggcattcattatgaatgtgatagtacctattcgatgccgaaaacttttcaaagatattgcaacttgcattttttttgttctatatgtatacatacgccaccatgatcatcaaaatattttcatgaccagttgtccagttaaatatccagaaaaatactgcttagtttttatccaaaacatactagttgaaagactggtgatcatgccacatttaagtggtcaatgacattaagaattagaatgacatgctagtagatgctacagcctgcaacaaacagttgggtacaatattcttgttttgtatcaatttttattatgaatagagaattgatcggtgttatacagtaaaagagtgatacgaaatataatttagacaagcgcctagccccgacaacatttcaaagcgattaagcagcagaagatactagattgtggcaagccatgattaattccaccatatcattactgtcctgctagcaagaggagcgaggttgattttccgtgacttccggggtcttttttagcgagcataacgtataacggaaattgataaatagttttcagtttgcaggtatcataatcaattcatacgaccagcggttgaaccacaatttgtcccttttaagctcagtcaagtaattgctatcctgaacacaccccccccccccctgtacacttcgcgccaaatccagcaaacagtctagtataacatcagtgcgagcagtaggaacagcatctgcaaactgcatcacatccattacccgttccttggggcgccacttggaaacgaggccgctggtggaggccgctgaggcggctgcggtagcttcgtcaatcccctcgtggcgctggtcgcacagcacgaccacctgggacaggtacgccgcgggcgccggcttctccacctcggcgacctccagctcgttcctgggctccggcccgttggcgacggggaggtcatccgcgatgtggttctggtggctgtggtggtgatggggcagcggtggcaccggggccgcggccgacgacggcgaagatgaggagtggccgagcctgaacgtcatgggatctcccaatgccatcgacgcttgctgtgcctcgcttccgcacccagtcacactccagtcaccccgcagtcatcatgaggtcgggaagctcgctcacctacatcgatcggatcgcacaagcgtggcgtgtccgaggtggggagccagatcagtgaagggtgggccggtggggagactgggcagaggttggtaggggaggggtttagggttagggtttggatgcagctgggagatgagagagagagagaggtggcaggggaagggaagcggcgtctcgatgcgtgagggagcgaggaagcaggcgacgccgagactcgagagaga

SEQ ID NO: 166293 - DNA, 1073 bp, Zea Mays
gcagacagataattctttgttgtctaggcgacagtataagaagtcatcttcgtctgtgccattgaacactaaggccccttcggatatttcagttctcgggcatagtgtttatcttcaaaaatctcttcttcagataacctttttcccgaagcatgtcgtataatataatcaagagcttcaaaaggcgcttcgggagtaggtgtgccaactttttcaggcagaatttgttctacagcttctttttccaccgccttttctctggtttccaaggatttctccttggcgggctctgaaggcctagcctcggtgttggcctggctctttgtagcttagacttcgatcagccttgtatcagtctgcgttcttgaagcctcggcagttttccctggagcagagcttgaagtttttatcgtctccagcacatccagtacactggccatccttttcctctcgggggtcattgtaagacctttttgtgccttcggcactgtcacttctgccgaagggcttaaaacttctaatgttttggtcccctcgactcctgtctcttcaatattatcggccttcggcttagtcagttcggatgaggatgccttcggcattgccgccggctcttcaatcctctgcgtaagcgcaggttctttggtttcggtagccgaagaggtttcaccaccaaattcaggcactgtggccggttcaatatagcacggtcggtgagtaagaaccttcacctttttcctcttcggcgtgggctcacttggagcaactgaagcaacatccttcccagaagttgcactctttctcttctgcccctgtggtgggtagcggtagtcagggtacataaatccaatagcatcaaaaactctatttagcctcttctttttccggctcccgaaggccgcagatagtgcgttatttttagatttggagtagaatccaagtagttcatcactggtgttttcaacacacttcagccagtcgtcgtctggttcgaaaaattggtctctaaacctgaaagtatattttaaccgaaccaaaccaccttcgttaggattgctgatggtctcttttgg

SEQ ID NO: 166294 - DNA, 415 bp, Zea Mays
ctcaatcaagttggtcgaggagtatcaggagcgagtaggggtactgaaacaagaggacagtgggcatgaacggacctgaggtgagctagccacggcgaggtcacaccgctcggtgttcttgagtgatttgggggaaatcccaaattagggagttctagtggatgattcgaggcacgggttgctctactaggtgcacaattacttagcggagcaggcggggtcagcaatttataggctcccacagcggtggccggtgaatttgagggagacgcgcggcggccggagaaagaagaaggttactggcgcgcgcgattggtggcaattaccgtggcaagctccccgacgaccaccgaacgagctaacgtgagtcacggcggtgaggttaatgtgccaaggcacgtggcgcaaggccgcg

SEQ ID NO: 166295 - DNA, 708 bp, Zea Mays
tcgcaagtagacgttcgacgaaccagaggcagtagaatctcctgctgtcgccccctcgacgtcttgttgcatttcctcagtgtcaccatgtgcctcctcggcattgttccgcgcctcctcgatctctaagggcagctgctcttcctcacatgacggggcgggaggcgcctgctccgcgtccgccctgcgagtgctcctcctctttgaaggtaaatcaagcctcggcctttggtaaagcgacgctactctcctcatcccaccacccaccatctttattcaattatctgcaattaagaacactaaactaataagcacatataaagaaggcgtaattatctaccgtaaatccattcaaccaaagatgttcccccatgaccttctttgtttgtcttttcctgtttgcacatttactgcagggacaacaaattctactcgctcctttagcagcctcactaaatgctcgttccaagaaagcatcagtcttgttgatccattcattggtgacctgaccctgacctgagcggcccatgtacatccactcaaggtcctccatcgcctaacatatatagtagagagtaacataaacaacaattgcatctacacaacgttcctactctctaaatgcttgtaagagaatatgtagggaccaactagtaaaaacaatataaaacaatactagtaatatactctagctccactccagtaaaa

SEQ ID NO: 166296 - DNA, 502 bp, Zea Mays
atcatgaaaggcttctagtgcctccccctcgccataatcctgtgtgtatgctcttggatttgtcatcacttggttgtcaagttgttctatggggatgggaatgctcaataaaattgtttggacctccttgccctagaactcctactaggaacatcttcaaggggagaaactaactacccagaagtaatggatcacctttggacctgtcacgccttactcccttaggcgatcaaccacaacaaatatggaggcagaacccctagctctgacatggtgaaataatcgaccatgatgtagacgtttcaccaccaagttgggtgatagaaaaagaaacaacaccaaaagcacattagaaaggtagagcaaattctcctcccaccccaacctcgcatccacgtctagttctggctaaggctcaggtagtgccccaccttcttaggatggacttggatcaatgtgcccccatctgagaaggcatacccctggacgcttggcgaaccac

SEQ ID NO: 166297 - DNA, 714 bp, Zea Mays
tgcaagtctgactaagcgagaggttcgattgacaaaaatgggagtatgtatgtcagagcgcgtatgtaatccaccacgacctattggtggacagtggctcaaccacttcgtagctattaagtcaacaaaggacactggataaaccgctgtaggacatgactgagtgtaacggcgggctccagggtggcctaggtgtgcctacagtaccctgacggaggaagaaggcgtcatccatggcgttccttgactgatgggaacccaagaggacaacgaactacacgacaatgcgtgacctttattctcttgaccgttaggctcttgtaacagtgttggtctttgaccttggcctataaaggaagggaaagggacacgattccgaggacaagcaatcacacacacacatcactagcacaagtcaaagcacatagcacttataaccgcacacatattcacacactagagacttgggagctcgatccctctctcgcccgtttgtaaccactactacaaaccagtgcaaggtaacatgagcaggtcaactggatttatggatgttatgcccaaactagaataaacccttgtgtcctctttgtacaccatccgctcgaagacacacacagcacaataattactagccagtggtttcgaaacaccaacagttgacacgccaggcatgagcatttttgcccgtctcgcaacatgtttccatcacac

SEQ ID NO: 166298 - DNA, 397 bp, Zea Mays
attttatcattttcctaccattttctataattgttttggctctggagataaaagaaaaagaaaaacagatgaatagcactgggccgaatccagcccaggcggcccagctacagcagaaaacacgtccacgcgcgcgagcctgaggtagttttgcacagaggcccctggtttaatagctaactcgaatcaggtttgtttactgtttccctgggccactgacggtttacagaagacccctccgacttctatttcttcgcacagctaagtccccgacgccgttcacgcgcggccgtgctccggcgagcacctgtaccggccgaacggggcaacggctgggttctccaagcggcagacatgaaatcggggctaccctgaccatttcccccaacctaattgc

SEQ ID NO: 166299 - DNA, 885 bp, Zea Mays
cttgatactggtctgatggctgttgttatacgagaactctgcataaggcaaactggactaccagtttctgtcgaacgttaacacacaggctcttgataaatcttcgaggaccttgttgaccctttcggtctgaccatctaactgggggtgataggcggtgctgaagtctagcttggtgcccatagcttgttgaaggctcatccaaaatttggaggtgaattgggttcccctgtctgacactatcttccttggaatgccatggagtctgactatctctttaagataaatccgggcaagggtggctcctccaaaggtagttttcactgggatgaagtgggctaccttggtaagacggtctattattacccagatagagtcgttcactttttgggtccagggtagtccacttacaaaatccatgcctatttcctcccacttccattcaggcatgaaaggggttgcaataggcctgcaggtttctggtgctcggcttttgttcgttggcatgtgtcacaccgggccacatactgtgctgtctctttcttcatccctctccactagtatctggttttgaggtctaggtacatcttggtggttcctgggtggatggagtaggctgagttgtgagcttcatcgagcaggacttctcgtgcctctccttttggtacacacagacggttcttgaaccaaaggactccttgttcatctgtcctgaggtccggaagttgttccttgcgagctttttccacaaaacttgctgtctccgtgtccaggcgttgagccttgcatataaggtcttctagcattggcttgacttctaggctgccattgtttcctagacatgcattcagctgagctgattccttcttccaatcttctaaaaag

SEQ ID NO: 166300 - DNA, 455 bp, Zea Mays
gccaaagtgaagacagaggcaattacaaccaagggcatcaacatagttcctagtcatttgggacgcgacaaagctccttttgaccactagccccaagaggcagagggggacaaagctttgggggaagattcagctcacaactaagaaggttgttgtgcttgttctgtggagaagataagggtcacacaatgacacaactaggacatgccaagtgataatacagaagcaaaaggagatagttgaggtcgaagcacggcagaatcagccgaagcaagtcctacatactatttcgtgctattccctgtacattcctgagtatgtgggcaatcaacaaccattttcacaacccacattgtcagtagcttcgatgagccactccctagctgcatgggccttgccaccaccacttgccatggctccaacttcatcccacaaccaacagcctaaagggcatc

SEQ ID NO: 166301 - DNA, 679 bp, Zea Mays
aaaaaaaggactggacaaggtgatataggtttagtggatcatggataaataagtaaatctaaccttcgtactgaagctaagaaggttatattagacgaggtgatctaaacttagtgtataaacgatgaataagtaaatttagcctttatactcaaattgtgggttggcaacattgatggtaaagtagcaatattggaataaagatttgtaatttatttttttactgtagataaaatagaaaaacgaatgagtacaagaaagtttgtttacgaataattttaaatcaacaattaaagcgaagtttatgtttttataaaattggaaacaaaatattcgcacctgctttgcatggtccaaatatgtttctagattttatatcttgtagcaattcttgtaatttgatatggaatattcttatcgcaatatcaggtgcgtcagaatttttttgtccacagtggtaaagactctcaataattttaggccactttgcattacatgtgaaggttacgaagaagtcaggtgggccatgaactctgcagatagctatgctgtcgtgatagttttgtatcatgtatcgtcttccactgatatgcgatggtggaagcacaattgttttccccatctcttcaccgtttatgcaacctctactaacagcatctgatataccttgtaaattttc

SEQ ID NO: 166302 - DNA, 490 bp, Zea Mays
gggtccggtatgcctcacgagtgttggcttcctcgccatctgccatctcgagactgtcttgaagagatgctttttcttccttcaattccttgatttgctgctctaggctttccacccatgagtttaggtgggtgaagtgggagaaaaggtcatccaagtggttgtcaagggtgtggagatatccggccatgtagattatggtagagttatcttcattatgatctctccctgacaaagcctagagtcttttcctcgatgcagggttatttttgttgctgggtggaaagtagcggaggggtgtctcagagacttccttactgtagttttggcatagctggtggagggctttttgggcagcattctggcaggtgtctgggaagcggtggccagtagcggtgatctgaaaaggagggtgatttgggtagcttcggctttctcccaggtagactgccatagagcacttcttgactccattctcatggtattcctt

SEQ ID NO: 166303 - DNA, 516 bp, Zea Mays
ggttgcatgaatggggctgaggcggctagacgaaggaggggagtccttggcggaccagggaatactccagcgagcaatcgcgcacgactaagggcataccaggagaaaataggggcgggattagatcagttaccttgagaggaggctcggggactctcgaacgacgtccggggcacggcgaggacacgggtcgacagcgggtgagctacaacggggtagagaaagaacttgtgagcatggattgagagagatagagggggagggggcgaaccgaggggtgtcccgggtcatgggtgacaaggcgaagctcaccgaggcaacagacacggcgagggctcgacggcgacagcagaacgggcgcgagaccacgacaaacagcggcggagctccttgggtgtgcgcgtggtgcgagatgagtgctgagagctgcgtgtgcgcgagtgagggaagaggagggcgagtgggtactaggcagctagaaaaaggccagggtggggatgggacgcggcctcggcg

SEQ ID NO: 166304 - DNA, 686 bp, Zea Mays
gctagttggaaaacgcttgtcagttttaggaatctttggagacaagatctaaataaaggactgcaaaattgaaagtgcccagcactatgtactaattgtctaatccagctaattgcgtacgatgggatcgcttggtcaaacatgttttcttggacattaggcgagtgcgtcgccgcatgtgaagttgatcggagtctgcacgcaccactttttcaatgctccaaacgctcgcacgtttgaccaaactaagaaactgatctggttcataagactacgctgcctgaatctgaccattttcagaaagaaagaaaaaaaaacccacgcatcccgtccttgccttccatcagagtgatgtgtgtggctcgccgtcttcgcagcgtagagtgaaaaaaagaaccgcagtgtagagtggaaaaaatgcagaaggggcggcaggagatgttttcgtcctaatccaacctgttgaaaattgccatgtgtgtgtttgtcgtgctaggctgatgtgatgtgaggttagcgtcacaccattgttgctgcttaaccaattctccctccctcttcgaaagcgagaggccacacgcgctgtattctagaagaagcaatcttggtgtgcgagctcctcttcttaaaggacaaacgcgctgtgaccggacctgtgagaagggaatcttgctgcattcttttcg

SEQ ID NO: 166305 - DNA, 972 bp, Zea Mays
gaacccgttcaattcctttggcagggatagaaaacctcaggatgaaccagtcgtgaattctagagtttgaaggttggtccacagagggctcacgactgctccagcaaaaatcatagcgaggggcagtaggtgacgggcacactagcagctaggaccgtgatgtgtgaaatgttgagggtgtcaccagccgtcagttctggtcgaacagaatcaacaactatgagttggtgctcgggagtttgaggaccgtccctagtagaccccaagcttggatcccgtgaaaagaaccaaggcctcactcagattagtcctttgtaactcaccaagcaccattgctagcacatcaaggaaaacgtggtacgacacatcccctcattcccacgaaggggatgcacggtggagagtaagattaaaaagatgggacaaccccctagacgaatctctgcatcgagcagaggctcgagggcttgccccgcacgattatggtggacagggcgccccaaactaagaaaaattctaagacaagccagaatctaggagacccaaaacccatgcacattgcaataccaagacggtcatgggaggtcatggattatttcctctactgacactaccccgagtacaacgttcgcggcgctgtcgaaatcacctgttaaaaggcctagatccgccatcatcgatccatcaagcaggtcgatggcataacaaaggttaccattgaagtgtagttgtgcaatgaaaagagccactgctgcaccccgatgaaccctgaactccacgacctcacaaacacggttcaggatgtcaaggaggcgcaaatcgtgattccccccacgagcgcgaatgaaccttgtggcctgatccacgcacaggttaaggcttagaccctcgagttccaactctacaaggagtccgcaaacgatcagaaacctagaagatcaggagcccagaaaccaaaccacggaggcttac

SEQ ID NO: 166306 - DNA, 2175 bp, Zea Mays
gacgtgcaatgatttgatcaatctccaggctagagaaaggttgttcaagctcggatagattaccaattggctgaatcaaagcaggtaagttgaagaccatagtagtttgctgagaggtccccaaacggttcttgaaggcattaaaaagcacagcttctttttcattgtgagagagagccaaatttccattatcatctttaagagaggagataaggttatgtctgtgcttgacagtggcattggcgtgaaagaatttagtaccggcatctccaagggtggcccatttgatttgacctctctgcttccaataaatctgttgcttagctaaaagatcttgtaaatgaaggaacaggatttctttgaagttccattcctgaatggttaaatctctgctctcctcaatgaagtctagcagttgcaccactaacttaaccttatcaatcaattttgttaagttggggagagacttacaccagccatggatatacttgtgtgcccttttaaactttgccatgaaccttttagcagggtctggttgaaagataggttgattccaagagtcttgaaagatagagtggaaatcatcaagctaaagccaatagttttcaaatctaaagatgggtggcttgggcacattgatttggacattgaccatccaagggatatgatccgaggttcctctaggaagcgagagtgcagaggtagctggaaaggtgaccgaccaagcttgtgagacaaagcaccaatcaagtttttcaagaagcgggtgacgttgcatatttgaccaagtgtatacttgtcctttgagcggaatttcctgtagccccagttgactgattgctagattaaaactcatcattctgaggtgatccccacccggtttgttgcggttgtcaggggatctaatcatattaaaatcaccgaggaagatccataatttgttatcctcaatctcaatgttggaaaaccaagaaagaaactcatctctcctgtgaggagtacaaggggcataaatgttggtgagccaccaggtttgattggtaagctttgtgtggaattgaattgtgtggccgaaagaattttgatcaataatctccccatcaaaaagagagcctttccaaattgttatgaagcccccagaagcgccaatagaaggaccgaattcaaatttatcaaaggatctgctgcagaagcggcgaatgtaggaatcatcaaaggactcttttttgtctcttggatacaaatgatatcacatttagagtctgagatgttatttcgtaaggaattccatttagtctctgagctaattcctctaatgttatgagacaaaattttcagagagcggtgtaagttctgagggccggaagacatggaaaactatcagtcttacaattaagaaataccggtatgcatagcatacaccaataggtccttgttccagaataaatccataagcagaagaattggaagggccacataaccaacatgtcaagaggggaatagggcctccaatggacccgaccggcaaagtgcaaagatagtccacataacaaataaccggacctccagccatcaaaattaaccatttcaggcagcacagagtcattgactccaacatatttaattgtatcaaacaggaaagagacctcgattccatcagagtacgtttcagaaaaagcaaaaagcgccacatgcgcgccaacaccaaccgttaaccaacaaaatagttgccaaccagtgaaaagaaaataccaaacgacccaaaagggggaggccaaagccttacaaccccaccgaggtattgtcttcatcatcattgtcatcattgaagtgagggtcccccacctgttcatcagagaagtcggattcctcatccttgctgtcggaggaagcagccggcctctgaatggcagtaccagtggccttggatctgttcaagtcttccggatttagcttggaaggggacattttacagaattcagcacccaatttcttgatgacgtcaagatgcatagaggggggggtacattgagtgcagcatgagcaatttttcttgccaatcccagtgcaatttttgaagcccttggcctttgccctaagcctggcactccttctgactgtcgtgtcgactgagataggctgcctttttctgggagttgcctctgactggggagg

SEQ ID NO: 166307 - DNA, 441 bp, Zea Mays
gttcagctttgccattttgagaggaggtgtaagggcaggagagtcgtgagtgaatgtcgctggaggcaaagaatgtggtgagggcattattaacaaactcagtgcgattatcagcctgtacaaccttgatagggaggctgaactgtttgtggacataagcgcaaaaattaatgatgtgagtggctacctcggacttacggactagagggaaagtccagcaaaagtgagtgaagtcatcgaggatgactaggtagtactgcgcaccagagacactggcaacgggagaggtccaaacatcacagtgaataagctcaaatggtagagatgaaactgaactggaatttccaaagggcagcccacgtgcttgccaagttgacatgaatgacatagagtatgagcggacttattacatgagatggaattattttgtctaagcaaatt

SEQ ID NO: 166308 - DNA, 580 bp, Zea Mays
tatccccctactacctctgtaacatcggctattcttgcgaattaatggaacttcttcttcctcttcttcgtcctcgtcaaaaatgcggacaatagatggtgcaggatcacacccattggggtcagcttcaacaggatcacacccattgggctcagctttaacaggatcacacccattgggttcagttggtgcacggtcacacccattggggtgaactgaagcaggtacaccaccattggggtcaacttcagtaaagacctctgttgatatttcttcgcaaacaggagcagaaggtccagcatcctgatccaagaatgacagtcgccgaagccgtttctttttcttcttcttctcctcagcaggggcagttgggcggctgacctggcaaagacgctttgggcaagtaccctcaggctttcgggtgtccactgttttctcagtctctggtataaccgcaacaaccattgtttcagcaggggccgaatcagaagattctccaactaacatatcgagtacaacatttatttctgcatcatctggactcgctggcatctcaaaatgaacttgcctctcatcatta

SEQ ID NO: 166309 - DNA, 470 bp, Zea Mays
acaaaaaaaacatcaagatgcaatacagttattaagcccaattaattttactagcaaatgttcgacgtcaccttgcagtacatgagatccacctggacccagatgtcgtttacttaatatatgcctgtactgtagttttaagcgcacattttattttaataagaagaagaaaaggctaaacattatatttttggcgtatacatttactgcctggtttgaactgtaggagtaaatggcagctcgttttgcttcccgaatttgaattctgaaaccattcaaaccaaaatgaggaagtttccgcgatcctaaagtttctcgcgaaaatccgcagcttgcgaaccggcctctcaaatccccagcgtttcctcgctcctccttccatttctcaacaacccggccacagacctcccctatattttctctctctttctctatgtctctctccacgcaacgatctagtctagtcgcgc

SEQ ID NO: 166310 - DNA, 626 bp, Zea Mays
gaggaatttgagagagaagggtccgccgcctgggcaatcctgctgcctgctgagtccagatacgaactcccagctgggtgattccctctattctccacgtcgtgtttcgctggtaggcatggaatagttcatcggtgcatcgggctgggactcgtcggtgcgttgccgcccagcatcgtttgctgctgctctacttcaagtgcaggtatggccccatgcgatgctccacgacctattaaaccatatagattgaagcttggtcgccgggtcgatgggtggggtagtcctagctatagcgccgccgtggggaggaagtgcgatcgccggggtagttagtgagtgggataagaaagagatagaaatgggtgctgctctggtgccgtcagtcttgagataaacggtcaggattaggcgagcacatcccacgtgggcgaccgtcgatctgtgaagtaatggtcaggatcagatcgatcttacctcttcgctatgttaaatcgtgatcgtatatttcacatccgatggtcgtcttggcgtaccggttcataaagaggattgtgtaatctacgtcgttgatcctgcatccagcggtgctcgttggccgataccccttcggccgagacactttc

SEQ ID NO: 166311 - DNA, 914 bp, Zea Mays
aaatacctccagaattagtatctctaaaggttgcaagtataaattgtaataatgggtcacaagggtttgaattaaatttgaatttaaagtgaaatttgaaaatggagaaaagaaagtgggaaaataaaaagaaaaggtcaaaacgccgttttgggccagctcctaaccatttcagcccattgctcctttaacacccgcgcggcccaaccttcccctgtgcgcacgacactggtaggcgggcccgggtcaacagacgctgcacgcgcgagctggtactgcgttgcggggtccggtcgtcagtggccgagtgttctccccacgcctggcgctaagtcactgacgcatgggccgactctatcagctcctcccctcaacagaaccgaccgcacccaccgccgcggtttgcgccggcaatcctgcactggtcgtttccctcgcgactagataatggggggggagaaagattcctgggccacgctcgccacaccatcccgcactacctttttacaccgagaccagaacatcaccaataactccgccgcgacgaaccaagtgtagccggagagagagagcgccgccatccacatctgccgctggtccgaccttgggtagcaggtcgggaaggagcgcgaacccgggaattactgattcatcgattgcgtaggctctggggtgagcaggttctcggcaattgctcaccggaacaacgctcggccgcaagatccgccatccaccactgtcgttgccgtgtcattgccgctggtatgggcctctctgcatttataccatcgcctcgtaaacgtttagcactccgactgaagcgtaagacgtctggagtgctggtgggcttagctccgatggcgctctgtcgtggggatcctagtgccgccatctgtgcggtctggaggtggggg

SEQ ID NO: 166312 - DNA, 1307 bp, Zea Mays
acaacgaagggcacaacttaattcaaaaatgggaaaacaataagcatgaagttaccattcctatacaagatattccattctacacacaagttcccatagtcgtccttttgcgaagggggggtgagggcagcgttgccacttgaattcaccaaagaacggccatgtcaacaccgacactttacataggcttcgcctttgggatcaagctagcctcccggaaattaaacaacatcagtttaagctcctcaccatcaaatagagctcgcaaatctccctcttcaaaatgctacccagttgtcggcgcaaggatgatccggcgagtcccttcctccgaccgcattctttcccgtggacgagggctctccattcccatacggtgacacctttgagggactttgatgccttgcgaagactcgcccaacagtcccacactccgtttcggcactccaatccttcttttgcccctcgccacagtcggggcaaccgtagacgaagactacgccacagtcggggcaaccttaggtgaagactccaccaaagacaaatctaatgccataaaataatctaagacatcttccgaggaatcatcgtccatcctagcgaatgggctcagcaaaccctcactttccgatgaccatgggtcaacatcagattccccactactaagcactaccaaactttggcacatcaacgatttgtcatttccattgtcaccaaaatatgcctgtgcaggcccaagcatcagaacctatgcagcagtcgactttaagtatcatacaaattaaaagcgctattgtaccacccctgctctattcattacacctacgcggaagtccgtgtcgtcgtagggtcttcagcgctgccttttatgagtgaagactgctcttcagctcctgcctcaactttggcatcttttcgagccaccgagctctctaggccggcgaggacctcaacttctttgtccctcatctcctacgaagacaacacaacaacgcattagacaatacaaacataaaagacacctttactaagggtgcaaacatacctgtgccagcgcccgatcggctctctctcggatgacatcgcggccatgaggtccccacatcctatcataaagttccccaaccaagcacttcaacacgtcgtcttccacttggaacacacctgcgccgaagtcctcgttgctccggtcaaaggcctcgaagtgcctacaaccctcgtgggccaaggcattcatagccccttcacaggacacgagcgacgcataggacatcaggctcgtcatgatagatggaagacactccagc

SEQ ID NO: 166313 - DNA, 605 bp, Zea Mays
ggatggtgcatgctaaacacccaaagggctacgttggcttctaatcacaaccacccattgttaaatcgacggtcaacgctcatcccccatccccggctgtccatccggtggcgccgctctgctccctctgccgcaaactcgccggagttcccccatcttgcgaaccgaagctccagaccatgagctattaggtgcaacacgatgccctcgccaccctgaatcaacaggatgggcacagacactcaatacttatcccagagcggcttaccctgacgcgctacgaccctagggcggcgccgccgcagcaacgaccaatttcccacagccaagtccaaattccgctacccttgtcgatcctacctattgcatgaatgcaggcgatggtctggacggggtgcttacctatggtgacacgccgcgaagtcgaactatggaaagagtggagccgcgacaattactccagcgagcgatttggcgcacgccagacggcccgagccacgaagatgccacacgattacgccctgcttttcccccggtggttccccggattcggcaaggtggggcaagtcgaagctggttcacggcggtgattccgcccccccccc

SEQ ID NO: 166314 - DNA, 2209 bp, Zea Mays
cttgggagcatttgtgctggcatagaaggtctgaccctggggttcgggtgaccaagggaatctctagaggggtagagggaatgccatgcttttccacaaaactagtggctataaaagaaagggatgctcttgaatcgaaaagtacagtagcgggagtaaattcaacaaggaactcaccgagcactactcccggagcttgctgagcctcctgagcatcgacgtgatttactcgtgcccttccttgatactgggtcttgttctgctggctgatggaggagggcaccttgggggcggatgctgaggtattcttggggccattcaccgagttggagtaagccgatcccgatggcttcagctggggacagttgttcttgaagtgactgggatctccgcagtgccaacatgcattcgcaggtggttggttgcttgcaactgagggggcatgaaaggagctctgactctgttgactgaaccgtgacggggtgggtccagttggtctactgaagcttggtcccttgggtggaaatccaaaggatcgagttttctggtgccggtcttgctgctgagctcggaggacttggaatttcctcttgagatggccttttcttcttcctttgccctttccacttgcatggctttgttggggaggtgcgagaaactgaggaagtcttggctggctaggatggtcttgagttctggtctgagccccttcaggaagcgggccatcttcttgacttcggtgctgacgtcatccggcgcgtagcgagccaactccgtgaatttgtgcacgtactcactgacagatcttccgtcttgagtcagttcccggaattcatcttcctttagctgaacgatcccttggggcacatggtgctcccggaaagccgtttcaaactccgcccaggtagcatctctgatggtgacattgaaggtatcccaccaggctaaagccattccggaaagttgatgagcagccagttgaacacgctgattttctgggcatccgatggcttctagctttcttttaatcgtgcgcagccaatcatcaacatgggggggattgctagatccggcaaacgtgggaggcttgagcctcaggaaatctcccatcctgtcttgcggtcttccaccattcgggcgttgattttccagacttcgagtgaggacctcgatgagtcaggtttggttggctagcacttgggctaaatctagaggtagttctagaggtgcggggaggtgggtctcacattcctctctatcggcttctctttcagctctcaggggaaaccctgctccaatcccggaggcggtaggtgtggttttatccaaagccatctgccaggaggagagagtcactattatgcacatgccaattgttttcaaccaagttattttattcattacaccaatacattcaagcatacagctactacaagtcgtactacacgcgagcgttctctgaggtactatcgaactctttttctaaagtttccccaaattccttgagaaggtcatcaaggctagctagggacatatcctcgacgtcggacaaattctctatcctggcgggagctggtgctggaggggccttcttcctccgctcagtttggccttcttggttcttggtcttcttttgaattttcttcgtgggggcgagcttcttcagcttcttatcgtaatccatcttcagggttcggtaggcttcacgggtgttggcctcctcgccttctgctatatcgagacactcttggagggatgccttctccttcttaagttccttgacctgctgctctaagctttccacctgggagtttaggtgggtgcagtgggaggagagatcatcgtagtggttatcgagagtgtggaggtatccggccatgtagacaatggtgggtcatcttcagggggtctctccctgacagggcctgaagtcttttcctctaggtgggggtatttttgttgctaggtgggaagtagcgaaggggggtttcaaagatctctatgctgtagttttggtatagctgtttaagggcttttcgggcaacactttggcaagtgtctgggaagcggtgcccgatgaaggtgacttggaagggagggtggtttgggtagcttcggctttctcccaggtagaccgccatagagcacttctctattccattttcgcggtattccttccagacatattcgggcttcttgcggatcccca

SEQ ID NO: 166315 - DNA, 757 bp, Zea Mays
ccaaatcactttgtttctatgtcataactctctgtgtatgtatttattcacatttcatatacttatgactatgtgactaatatgtgctcacctcttctgtcatttcagtgatctcacctgctcgcctgcatatctcctgtcttgcttggatcttttctctctcgagaagttcccaggtagccataactctatttgtggacttacctactgctctctactctcgcttatcttttcactctatcttgcagcagtcagttcaggatggtgagaacaaagaacgtcacaccgccagggggagaagatgacgaggaccatcctcgccccttcagacaggtcaagggcaagactgtctatcttgagcagcaagagggcaggaagaagaggcacctggacagagcctcacgtgcagcacttgcagcggcagcagcagtagatcaagctgagcaggatagacagtcttgtccttgacccaatctctagatttcttttgatcagattgcctatcgagttcgtcgcctcgcttctcggcctcgctccatagctcaccccactcctaccgacccaatctccactccacctcccccttcaccagctcttgtcgctcacgagccatccaccacacccgttgtgtccaccacctccaccactccagcttccactgctcccgctcccgcttccgctccacctattcctccacctcgcttcagggagcgtgacgagaccgaggtgagacctcttgctgctgatccgtgtctgc

SEQ ID NO: 166316 - DNA, 918 bp, Zea Mays
ctcacttctttatagttcatccttacgttgtatactccctgttgaggtaagatttagggcaacgactgtggtgcaagaaactcctatttacaagcgtgcaagcaacaatccttgaaccttggattcatgacgtacggtagtttatactttaacacataaaccccccaccagatattgatgtttccaaaataaccccctaaaaatcctttgaccgatggaagtcttctcagatcggattgacctgacgtccaacgagacccctaaaaacccttcccccgttccgttcccagattgtttggaagaatattaatttctgcggcagggtgaacatcaattccatgcgctctcttcatgcctgatctgcccgaggcgacgcaaggctacggtgagcagcaggatcccaccgcccagtctatgcataatttgtttttgtctttgcccgccagcgccgccatgcaagaattcaatgcacaggccctactcgaggccacgcaagactccagcgagaagctcctacccgatgcaatgcaacgcgactgttagcccttgcacgacgacagcgttaaacatgtagatcagatgactatgacaggaccaccgcagtggcattgcatcaccgctcatagagccatagcagggcgatcagagattgcacacgaattcacggattagcccgacgttgatgacatgttccctccgcctttttttgccgcacgacgtcatttctatagcatgtggcacattatgaaaaaattgcctgagaaaattgatgcgcgtcttctaaaggacaacgagtttagaaaaatggtaaactcatgtgtatggggatcagaaaaccaaatggagtttgagagcagatggcaagcttgggtaacaaaatatcagttggagaaaaacgaatggttggttgggaggtat

SEQ ID NO: 166317 - DNA, 638 bp, Zea Mays
agtggagaaaacaagcaagggtaagataggtaaggttccaacaaaatggttgaagtaaagaaaattaattaccaagtggagttacaaggagacaacgagattagcaaggatatgcaaaataaaatgaccgctcatggatcattaagaaacaatggtggtcaagggcacgttaactgaaatgtcttaaacagatattgagatataaaggtaagcacatataaaaataagagtatgcaagattccaatggtacgggcataccaagacgaagagagtacaaattgccaaaagatagcgacttaacaatagaataggaaagggtctcaaaagacaagaaggtcatggacatataaactgaaatgtttaagtaggcaatagagtttttagggttaagtatttgaattaagggataagggcatgggaaaaaatccaaaagatacagcatgtcaataccaatggaatagatatattcaaatggtagcaatttaatgacaaaagaggaaagaaccccaaaagacaagagggttatggtcagggggcatctacaaggatgtcgcaagcacaagagtgagatcagatctagtaaattgagaaaagtatagaccatactagaataaaaatacttttggcaagggggcat

SEQ ID NO: 166318 - DNA, 326 bp, Zea Mays
gccagagggtgctcggctcaccgggagagcgaaagaaaggagaaagcaccagagccgttgatctcaggatgaacggcccagggtcagataggatttggaccgtgggatggttgttgtgcggcttagatcaaacggtagtatacctccttcgtgcattagatcgtgaccatcgatttcgtgatcaacgatcctcggcgcgtaccggttcattaaagactagattcaatccaggccagtgaatcctgatcgtgcggcccacagtgcacgataccccttcggtcgtccaaatttacaaaataaaccccgggcttgttataaattaaccc

SEQ ID NO: 166319 - DNA, 506 bp, Zea Mays
gccgccgatgtcgtacctatataaactaacctaagggaaatacatagaactgttcatgatataaagctttgttgatctgatggaatgggacagatcaccattcatcaaacaggtaggtcagacgtgtgatttccaagatagaatcaaatcccatctctagtgtctactttgatgttgtgctacctcccatatctgcaagaatttcatctcctcatgtcacatgcaacttttatccacatctactatccatcaggaacaaaagaattgagttacgcgatattccgaggtgagatttttcaacaaagtttactggtcctgagtctaggctttgctgctaccagcaatggaatagtagttggcaatgttggctcgaagaacaaggaccatgaagcacatgtgagatttcgctgacagatttgagtaaacactgggcctgcaacctttcaggctttgtgtaactgagccatcgatgcgagtttcttgtatggaaaatcagaaaaaacatg

SEQ ID NO: 166320 - DNA, 423 bp, Zea Mays
cttttggtaccatctttcttctccacgaacaagacaagagcggcccaaggcgaagtgcttggccggatgtaacctttctctgacagttcatcaatctgctccttgagctcaaccaactctggtccggatattctgtaagctctcttaaagataggggcggttccaggaagaagctctatagcaaactcaactttccgctctggtggcatacctggtaagtcctttggaaacacatctgggaactcggacacaaccttgatactctcgattgggtctgcttcactgctatcgacagccatctggtaacaactttctttctttggctcaggcgggactaactcggtcaccacctcctctcctagtggggacaccaacttgattgttctcttatcacaactgataactgcctgatacttatctagc

SEQ ID NO: 166321 - DNA, 815 bp, Zea Mays
ggcagtttgggccttagagtgcgaccctctgctgaagaagttagcgccttggttgcctcgctcggggagattcctgatgatgaacggcaggtccattttgaggtgcccctgaatcctagtgatgcagagataagtgctatgcttgatttgctggctaaggactcttctgatgctgctcctgctgggacattggtggtggcgcccctcccagaggctggtacgaccttggatattcagaagcctgccagtactcacccgaggcgcccttgccgagccaatcaacctgatccttctgctgatgagcagaaaaagaaaaagagacgcctccggcgagtatccagtttggatctggacgttggtacttcggttcctactgctgaagaagtgcctgtgactgaatttattgacgctgaccccaatgggtgtgcccaatctgctgctgatcccgatgtgggtgttccatctgttgctgatcccaatgggggtgctgcctgtgttgctaatgaagacgacggggaggaagaggatgaagttcctttgactcggaaaaacagtcggcagttcatcgctagtggtgaaagtagtggagttccttctcctgctttgtctgctctcattggtctgcaagaattgtccctggcaaattttgatcagactcttgaggatatggttccagaggatttgttatcagagccagcagatgatggtgtgatggaggtttgtgctgatgtgcttgatgctggattgaggtcatcctgtgcctcgtcgaccttagagcgcgatttcgagggtcaggagactgacttggatcgtcc

SEQ ID NO: 166322 - DNA, 1165 bp, Zea Mays
ccgtggacggtggagcaggaactccggcgagcttgcactggccaggatacacgatgaccggtgctcccacatggctaacacctaattcaacccttaataactgtttcccctcaatcaatttcactagtgcagctctaattcgtccagtccacggagacaacgcagacaatggatgaacaaacatgttcccggtgatctagggtagtctagctcaattgaatgggtcgagcagcattaggagaacccaaggatgctgagacaagagagcagagagtataaacaaacctagaacaagctagccacggcgaggatgctttcatggtggcggaaaccgatttgggggaactttgaaattggcgcgctctagtggatgatttgaggcacgaattgttggattaggtgcttgactacttagcagagccgagggtgtgcgcaatttatagtgtgcttgagcggtggccagtgaattggatggagacgcgcggcggccagagaggaggaggggcactggcgcacacgattagtggctttcaccgtggcagactcaccagcgacgagccagggctatagagcggtttacggcgacgtggtgaagctttagggcatgtggcatccgatcaacggcggcaaatcccggtgaacttatctgagccgaccgcaaagcaaagggatacggcgaccagccgccggtgttatccccaggcgatgatcttttacccagaagcgttatccattcatcggtgagcacgaatcacaacggcggcgtgaatccgggcgcacggtcgcctgcggtgagcttctctacgctagcgtcctaatccggttactgtaccatcgcgaggcttcatcagttggtctgacataggatctttagaagcatttttcttgaatttttgcatgacaacttgctaatcagtttgtagcaaacttgtagccctatatacaaactacaattctgttgcagagatcatactcagttatttattccttggagcataaatccagcataaagttatgcaaaactcactaacagtccatattcagtttctgatttgtcttacagctaaactttagggccaattatctccatctttttgtataacacaatgcttaatcccttaagcaaagttgtactcctatagtagctctagacttttgatgtgtt

SEQ ID NO: 166323 - DNA, 361 bp, Zea Mays
aactcgaagctttccgcttgggcgccatctcaacctcgctggcgagtggagcagaagcgatattgcaggaaagcagagaaagcctggatgcaaaaagctaagcaaaaactagggcacggagcgtggaggcgtgcgacagtgcagtacatatggggttttcccgggccagatgctgtttctaaaaagtgcccagtcatcacccagcggttatatctaaaacgctggcgtgccatgtcatcactcagccgttatttctaaaacgctggcgtgccatgtcatcactcggccgctatctccaaaacggcagacacggctcaaattgactcagctgttgtttctaaaaacgctgacgttatctgac

SEQ ID NO: 166324 - DNA, 584 bp, Zea Mays
ggtgcggtccccacccacaccgcccctgctcccatcgagcttgttggggatgggacctctcacatctccggcattgggccccatcccgccatcctccttgctgccctcactgcgcagcaacatcagcagcacacctggtgtccccctcgttgttcctgcagcagccacccttcccagcggcgtgaccgcacccaccggggtctcaccatcctccgcctctctagcttcgcctttggcgactccttccattgtggctcccatcctaggtaccgttcttgtgcgcgtcctcctccacaacatacacttgtctggggcaccctcgcggattttgatcatgccatgggccttgtccttcatgattgcgtcgagcttcacccacatgcaggccacctcgtgcctggaccacttgttttccccgagctgtgattgcctccttagagatcgagacattggtgtcttcctcccctacctaggcctttgtcggagctcctcccctggctctttccacgcaccccgtggcttcactaccctctcccaccgactgggtggtcgactccgaagcctccttccataccactcccatc

SEQ ID NO: 166325 - DNA, 539 bp, Zea Mays
ttcaaaatgcatgttagttgtcctattagtgctactccttccctatatatcttgggctctcagacgaccgaaaaatattcgaccctgtgtgtatgaggtggcgtggcatggttataatatactactgatggggtggcatagtgctactgtgaagtgtgcaaaaatggttcattttgtacagctttgtgttctgcgtacgtgtacccagacggtccagagtaatgggccaaacggtctgagattatatccggatggttcgactgtatatgacgctaactaggtggtctgcgtgtacgcctgtgtagggtcagacagttggcaaaacatgtcgaacgatccaactgtgtccagagccggtcacatgccaggcggtagcggttgtggtggtgctatgaacgtattcatcggcatatcatacaatgactgggtaccagatgacccatttgcagccgatgtattaggtgcgggtggctccgtattaggttcgtgcgagggaaaactaggggcagtagatttttcatacgaacgtgtccgtactt

SEQ ID NO: 166326 - DNA, 274 bp, Zea Mays
cgattctgagccgaacggtctacgaacttagcgtaggagcgtctcctttcctgcgtgctttcagaaggtccatgcctagggtcgaatggtccgtgatggcagagggtcttcttctctaggaataacctggatctcgcctttcaggaggaacccatcggagaaaagagttccagggttttcttagggtcagcaggccgcccaagacgcctctagacgacgtcgggcccaagagagatgaagaaataggtcgagggagactaatactagggctaga

SEQ ID NO: 166327 - DNA, 420 bp, Zea Mays
cgatgagcacatgaatccggtgccgaaacggaaatcaatcgaaacaaaagaaacagggatcccaagaagaggaacggacggcggcgacggagtcgacgagaagaaaggagcggttgcagttaggggggaaaggaatacaacacagcagaggggcttcatataagagattgggagaaagcagcggcatgggcgctgcggtggaaggacagggcacagtgagtcgacgctgttacggatacggagtacgctgagagggacggcaagtcgcggatttatcggagtttgaaatccggtgaacaacatcacatggcggtatgggcacgcgaaacggaccgcaacggagagaactgaggagagaggagatgggcactgaccagagaagcagcgacgcgccggccgcccgcgctggccgccaccaac

SEQ ID NO: 166328 - DNA, 587 bp, Zea Mays
cttgtgctttcatctcttcacaacgcgaggtccacgacggcgagcggcgccagaccaaactccggcgaacctgtactggccaaactacgcaatggctagccctcccctttgctagacaccaaattcaaccttatacgactatttcccctcaatcaatttcactagcgaagctctaaatcatccagtccacggggacagcgcaggcaacaagtgaacaagcgtgttcccggtgatctagggtagtctagctcaatcgagtgagtcgagcagcattaggagatcataaggacactaaaatgaatgatcagagagtatgaacaaacctggaacaagctggccacggcgagggctctttcacggtggcggaaaacagatttggggagaaagagaaattggagagctgtggtggctaatcggaggcaggagcgggtgctctgacttcgtgattatctaacggagctagcgatatgcttaatttatagtgttcaagagcggtggcctccaattttggattggcgcgctggcagtcggagaggaagaggggcactggcgcacacgattggtggccacaaccgtggcaacctcac

SEQ ID NO: 166329 - DNA, 557 bp, Zea Mays
gttctgccgttctgccgtcgttagtcccgcgcaacaaaataaacagtacatgcacaagtttatacaccatgttctgttccatctctctcaataagcaacatagaatccacagctgcccttataagccatgtttcttcactctcaatgcccgatgtggcactaataaaataaatggcacgcgcctgtggcattttttcgtgcggcccaatgcattttgtggatctgaggcccattcatttgcagccggcgtccagcccacagagggagcgtgcgcgtgacctagcctcctccattcctcgcgatgcccgagtccgagtgggaggtacgacggtggaggagctccgttatcggcgtcgaagcgcggtcccatgccgagtccaacccgcgccgctgcgacctctctctcgaccgcgagtacgccgcgcgccaagcgagagccagctgctctacgtcaagatccggtaaaccttacctcccagcaatggcgagaacttccaatttcattccttgcacttcccgcctctccctcgaactctcggtcccaccgctgttccccc

SEQ ID NO: 166330 - DNA, 783 bp, Zea Mays
ttcagtgtctccagaatgagatgttaccgttgttttcttctggctcctgtcgtaattgcctgtttcttctcccggataacaaccactaccctggccgaccctcgggcgacggtggttcgtgagttgtgcaacaaaaccaaagatgacggtcctggggcggtttgggccaacaacttcgtcgtcgccttcgacaacctgaactcggatctcgagcaaaagggatggggggtaacctccgttgggcaagatcctatcaccttctacgcgctcgtgcaatgcctagaagatctcagcacggttgactgcacactgtgctactcagagataaggtctcttctcccgaaatgctatccggagatcggaggccggatatatctcgatggctgctttatgaggtacgcgaactactctttcttcggcgaggccgtggactcgttggatacaagcgtgtgctcttccagtaaccgcagctcagagaagcggggcttcggttcagctgtggatgccgtgttgagcaacgtgacttccttggctgtcaagagcggcaaagggttcgcagtcacttcagctttcggatcaacagaatttgcagcttatgcacttgctcagtgctgggagaacctgaacacttctagctgtgcagcctgtctcagtgcagctgcaggttcggtggccaaatgtgcaccggcagaggaaggccgtgcactctttgccggctgcttcgtcagatattcgacagcacctttctggaactcggaggattctggctccagctcaaagaag

SEQ ID NO: 166331 - DNA, 501 bp, Zea Mays
caggtattttcacgagtaagaaaacatattccatgcccacgtgtgatatatatttcatttcacaaagcccagtcagcacataacaggtgacctaacgaactgcagcatgaacagactccagcgaccctgtaaatgaatttatctggagtagactttcggcgaccggggggtggttccaagttcttcagcagctcgcatcaccatagatgcaacggagaagttcaaacaagcaaggcagtgctgtgattaggatgacgcaacaaacaaacccggccgcctggccggtgagcttggaaggaagtcagctctcgagcaaggctttggtttctcctggcatttcattttttccccccgctcactcatcggagttggaagaaagacgtcagcatgacgtgacgacagacgtacagggggtacagatggttggttcacggagtctttccttcttttatggtcttgcgtctttgtcagcgacatggacgacaacggaacagggacacc

SEQ ID NO: 166332 - DNA, 466 bp, Zea Mays
gggacttgtattctacttgatagagaaagagagagaaagggagagagagatctgctccccgatttggcatggtgggtccttcgtagggtcgtgtgtagccatactcccggtattgcgtcatctgttactctagctcctgtagcgagtccattgctgacgcctttgtagtggtgtgcggtgggtcccacggatcagttttatggtgcagtcgtacgtgatgtggcttctattgtcatcatgatcccttcgtcacatgtcagtgtgcgtaggcgtacactcggtatggcacgttgtcctgtccttccgatgtatgggtcattgtagagaccctggtgcccattcatcgtgatgtgtgtatgtccagatgtggcttgatggtgatgcatcatgtcgtagctgatgtggatcagtagcactagattcagatctttgcctcatcgggttgctcgatagtgagttggtcggc

SEQ ID NO: 166333 - DNA, 461 bp, Zea Mays
caacggtccaagtgctggaggcggcatcccaaaggctggcaactggactcctgtttgttatgccactttctacaaattagatgcaagtcaatattaaggaagtacgaaatgaaacaagtttatagttgttataaaaacatatcgcatcatcttattgagaggaaagcctgttgttggacccataggttcgcatagtactcgttctattatctttggtgctcagctcgctgcctcttatattgtgcttgttgcctaaaagcttctcgcgacatagtaatctccattttctgggcatgggcacacgaatgagatgcttatgcggaagatgatacaaactatcaacctcaatgtctcagctccctagagtcaaacgaagaaccaatatactcactccactcaatactcagtacaatcataaacatatatgagcataacttaaaaatcaaaatgaaatactctca

SEQ ID NO: 166334 - DNA, 1019 bp, Zea Mays
ctcctttcgataagagtcggctagtggtccggagacacaccccaaaagatacctacgggtgattcgcctggtcccaaacccatttgatggggttcgagggctcgatgcctccctacgtgggacaccatcacgaatcgctcccgggggtctcggatatgtcttaaggtaccttgtgtcgcaacccgagctagggccacgtacgggcgtacccacagtcatccctgactctggctctggggcggttatggagcccttccgagaggccaaccttcgaacccctgatcagtgatgggatgggagccctggcatcttgaggcggcttttccgaaccctgctgagggcctaaccttcgaacctctgaacaatattcctccttgcctttttccctcccgagtgaggcgcccgaggtagaagacgccttcttctggttaactgctgaggggataaaggggaagggaggcagagggtggagggtgtaccttttgagtcagaaagcgaaacggcgcttggcgtgttttttctcggagggggcacagtcatttaatgcgacaggacgtcctgtcggtcagccaaccatttgcggcggcatgcacgcgggattcaaaacgaccatcgtctagtctgttacgattcacaccttggtggctttgcccgcccctataaattagctcgagatagacgcttcagaccgttaccgtgtcgcttcagcatccctgctttacacgtcgtcctcgccttctgcaaaaaaagagctcatcgtcttcttcctccatcccgatggccgagaagattagtgttcttcccctcgcgacccatggcccatctcctccatcaccgatgaggatttggaggtgttggtcgatgcaggtctgcttcgccccgctcccacggcccacaacccgagtggttcccgtcgggcgatgagcagatgtcggatccgctcgcaagatatgtggtgagcttcacctcgtttcatgagcgggggtttggagttccggcgagccgcttcatcctggctc

SEQ ID NO: 166335 - DNA, 621 bp, Zea Mays
ggtgcaatgattgtcaagtatgaagcatgtctaggttgcttgtaaaatgttatacttcttgaggcatgcattgttgtattaagtcaaccattcatttggtattcaattgatatctctttgtgatgaaattgagagtatgccttgatcaagagatgttgtgatcccctctagttctgagaaagctagaatgtgcaaagtgcaagttattcaaatacttgatgcacaagctcagggggagcacacataactcgtgtcttttgagactaattgtttcttgagcgatcttgtgtagtctcaaggtggaaaagagaagatgagcaagaaatggagcaatcaggacttgggtacctctgtaagtcaagaaattggtatcttaagtcgtaagtaaatgcatatttttagattgctcatgctctacaatatttggtgatactagatgcttatccttaaatatcatggaactatgataataaatgacctttcaattggtagccgtgataattgacctcttttgataatcactagaataaaagcttcatcttgggccactatactataacttgctctaagcttggtgacttagcaacaataaaaagttaggatgaagaatcaggcacaagt

SEQ ID NO: 166336 - DNA, 757 bp, Zea Mays
acgacgtgtgcgcgtctcggacccgagcgtctaattcaattgagcttgctgtcgacccctctctagctctctctctcgcccctatgccctcccgcacccgcacccgcacccgcacccgcaccacgctgctgccactcatcgtcctacctccgctgccctccatctctgctccgcttcggacctcccccacttgcacgagacgtgaccaacactgcacaactatcgtccgaactgctgggtatatgttagtacaccaaggatgaagacgacaatggaacctgcttcaaagggcatcctaggagcggagggtgcgctacatgaaccaagagcaaagaggaaactgagcccaatagcagggcgaccggcctagactgggtgcactcgttcccctggcctgctccaacgtttgttggttccccaagctgcttggcatacaatctcgatggactttattgaagggctaccacggtcttaaagttttgactgcatattagtggtggtagacgtatttactaagtatgctcactttattccattgtcccatcctttttcagttgttaccattgctcagtccttctttcagcacgtttacaagttgcatgggcttttagttgctattgtgtctgagcgcgataagattttcacgagtattttttggaaggaactcttcaagctagccggggtcagtctccacatgactagcgcttaccatcctcaaacagacgggcaaacaaagcgcattaatcaatgtctcgat

SEQ ID NO: 166337 - DNA, 526 bp, Zea Mays
cggtgaccgtataatgctcctaggtaaaaagatcttcgcttggggataactctggtggctggccgccgtacccccttgccttgcggccggcgcagataagctcaccagcgttggctgcctgccgatcttatgccacgtgcccaggcatcttaccacgtcgcggttagtcgtgttaggcatatccggtgatcgccggagggtccgccacggtgaaagccactaagcgcttgcgccagtgcccctcttcctctccgaccgccgcgcgtcttcgtccaattcaccggccaccactcacggactctataaattgggcatgccatcagctccgtagggtagtcaagcaccaaaccaccaagccgtgccctcaattgatctccagagctcgctaatttctcattctccccaaatctgttctccaccaccgtgaaagagccctcaccgtggtcagcgtattccaggtctgttcgtactccctgctctcttgttctagcatccttaagtcctcctgaagctccttgaccaattc

SEQ ID NO: 166338 - DNA, 519 bp, Zea Mays
cagcaaggtggaaacagagagtatcgtgcttccgatttacctaagatgtcatttcccaagttccagggaactgaaccaggcgtttggtttgataagtgcatggagtatttcaacgtctaccaggtgcctgagtttatgtggccttcatctgcttatttacacatggagggaaacgcagctaggtgggcgcaggtgtacaagaggaggcaggggctaggaaactgggcacaattcactcaagcagtgcaagagaagtttggggcagaggagaatgcacagacgatgaggggcttactgcacttatcacagaaatctagtttggaggagtacattcatgcattcgaagaagctagatatgctactatattgcacaatcctgaaatgggagaaacattctttgtttctcagtttgtgaagggtttgaagggggagttgcagggacatgttttagctcaactgcctcggacagtagatcgagctattctcctggctcagattcagcaagaggttgtggaaatg

SEQ ID NO: 166339 - DNA, 506 bp, Zea Mays
gtgaagcttcacctagagtgacgaatagcatgtgtgtgtagcacttagtaggctagtgcataaagagtttcagtcatatttaggattgtcaagtattaatgcagtaaaggcctatgtattatatttcctagtctgatagctcaataccaaagtttatcgtgcttccaaagttggccatatgcgtataaagcacctagtaagctagtacataaagagtcccagacaagtattaatgcggtaaaggcctctgcccactaaattgggcttcaattggagccacttctcaacagggaaagcctgacagctagatgacaatctgcccctctatattactcagaattatgcagttcaagacagtggggagagttttctccttccatgggttctccatggctccatgctgcatacatccaatgaagttgcagctgttaactgaaggctgcagctatttttgcagatgtcaactaaaggctgcaatcgtttttttattacctagctgactcaca

SEQ ID NO: 166340 - DNA, 624 bp, Zea Mays
attcgaaggttatgtgtaaaatttcctttgtgcgtactgtcgcgtcttcgaaggtattaatgttttgtaagctctattctgcattctgtcggctttactagataagggatccgattaaaaagaaggcaaatggatcacgcacaattgtgtagcatatgaaaattaaaccgtttgttgttactttagtttcccatcgtcctttcgtccctatctcgtttatcttcggatttttgaagatacagagagaacctatccactatcctttagctgtgttgccctgtaattatttcttgtaggaactttagtccaacaaataaggatttggagtgtgacgtgatgccatactagattgaaacacatagacgagcatggaaatgaaggtatacaagactgggggagcatatagatagtgttgagagaccatgtgaggtgattttaaatcatgtttggatctagatgacacactatggtaagttcaaggacctaaaattaaaatcttaagttttaaactagatgacatcccaagttggtttatgtacctaaaatcataaaccgaacacaaatgacatcgtaagacaagtttaatactatatgaaaactaaaaagaaatatttgttgtacaag

SEQ ID NO: 166341 - DNA, 363 bp, Zea Mays
tcccgcttattggtgaaactaagccataagtccacccaaacaccttgcttaattctcaagccgcttagcccaccatccaaaatacaacgtccatcccgattttctagtacgcggcctggaaagcgcttatattgtaagcgaaatgattttcccccacatggcccctctggcccccacccctgtcctctacgcctccttccgcggcgcctcccctgtgaccgccccccagtcccgtcttccccacctccctgctctccgcagcaggcatcgcccacctccatgccagccgtcctccactgtcggccttcatgccacctgccaggtcccgtcttccagccccccgccgccagcctccctccagtc

SEQ ID NO: 166342 - DNA, 387 bp, Zea Mays
ccgccgctgccgatttgggccgccgccgctccgattcaacgcttcccttcctcgtctccctccctcttgctggttcttcgctgggcgacggggacgcctagctacttttgggtgcctggacactttaaaaactatgcgcgttacatcattcattgtgtatcagcaaaacatccaggcctctcataatgttatcatcatgattagggttaaacaaggataaggaaaaggtgagaaggatggctgctatttcggtgacctgggaacatagtcctcaagattcagccatttacgtctcaatgacaatgctcctctgggcacctgaatctgatacttttagtttctgaaagttacaagggaagggaattgtgcatgtccaaggaactgtac

SEQ ID NO: 166343 - DNA, 680 bp, Zea Mays
tgaaatggtgacatgctttcgtagtcatcatgtcgtctgttgatgacctaactgaaggtcgtaggaaaggtcgattacccgtgtgttattattgtcaccttgcgcttctgtatgaattgcaatgtgaagtagtagactctctatgtgatgctagatgtctaggtagacttcatgaattgtggtgctcggaccgtcgagatgaagttaagtcggtcgatgccgattaagtagttaaaatgattaatggaataatcatggggttaaaactagaaactagtgttcttgcacccgtttgggatgttgtagcccaattgcgcatggttatgatcgcgggtaaaaattagtagtgctcatgtggtgtctaagcaaaaatgcaaactagtgggtgaaagacgctttgatatacctatatgccggatttggggattgtggtgaatgcgttgattaattgtgcatggtagttctaaagcgcaaaataacttgtataaaaattagtaggtctacttgttagtcctcatttgattaatctaactctaacaaatgataaagtgctagaataattcaagtttctcgaacgcgacgattcctgaattttataggagctgaaatttgttgattgctgttttggactgcacgcgctgttttagttgtgctgtatgtttgatgaactaaattgtatt

SEQ ID NO: 166344 - DNA, 461 bp, Zea Mays
cggtggcggcccaattcgctgcccagtaccctacgcatcctcaccggtgatggcatgcgcaaaagggggtgcggcgaacgggtcacagcggtcagggtcccgattatatggctcgaggggtagcaacaaccaccccggaatccatgggttccattgggaatttccggtcatggagaaaggagttcggcgagcaggcgcacctgccaagttggtcccaccatcagggaagacgacgcacggcgcagactgacgaagtgggtccatttggccggtgaaaccgcgcgcgcaagtttagccagttagctaggatcaacgcggcggcatccttcagtcaacgcgcacccgaaatccacggggaagaagaagaccggatggcgattgggtcccacgtcgcagtgactaaaacaaaagaaaagtgggaagaggctagcttgggccgtgaaagggaattcggtagtggg

SEQ ID NO: 166345 - DNA, 305 bp, Zea Mays
gttgatgaccgaggcaaggatctctggtttgctcctgctttcctttcccttccccggctggtctttatatagccagtgaaaatatcaagggggttggattcttgaacttgcagcatggataactgtgagcatgagattttagtcgtggcttactcaagaagatccatgcagattcatagagcacagtcatgcagggtgaagattatccacggcgagggggggtaaggataggagagcactgtagtggatatttctaccagtgatatttctgctgatggcctgattttgaatatctctgtcctccc

SEQ ID NO: 166346 - DNA, 348 bp, Zea Mays
gcagaacgcatcgcaaggcagtcagctcattataccctcattggggaaacactatacagaaggggcgcgtcaggagtcctcatgaaatgcattctctcagatacagggaagcagctgctagaagaggtccatgctggacaatgtgggatacacgcagcatccagaaccctggttgggaaggttttcaggtcaggtttctactggccaacagcaaagagtgacgcagccgagttagtccagaggtgcgaagcctgccagtacttgtcgaaacaacagcatctaccagcacagcaactgcaaaccatacctgtaacctggccgttcgcgtgctggggactggatatgatt

SEQ ID NO: 166347 - DNA, 507 bp, Zea Mays
tcctctaatttttacttgacaactcatctgaggctctgtagcaaagttgtagtcctatagatcctctttatctttgttatagcaatcctagtcgaattcctactggatttaactcaaatctgatcacaagttcgaccactaccactggtgaccatatttcagtcagcaaaccgactgacaacccaacttggcgcctatttttctcttaactttgcatgacaaccatatttactctcttaagcaaagttattcccatatggtagatctacaatattgatgtggtgacccagaacaaaatcccttttgtttgaaagttacaaggtcccaaagtggaacctaatttctgaaaatcagacttagccatatggttacaaaagtggtgtttatgcaaataggcccaaaacctagggttcaagttgcaaacccacatatttgtgaaccaaatgacccaagatgctttaacttcatagtttttgcactttagtccaaaagtggactaattttgca

SEQ ID NO: 166348 - DNA, 542 bp, Zea Mays
cctttagaaagttcaattaataagatcatattagttgaataacaaaatgaataaatacagaaatgtgcacctcataatgaaattcttgtatttatattcaaatttgtgaatcaattttgagtttaaagaattagaattcgaaaataaaaggggaatagaaaacaaaagggatggaaaagataaagggagataaaagaagaatagaagaaaacattagtgggtctcgttgtcatttcggcccaactggacaacccccgctcagccaacacctcagcccatagaaccaaccgcgctcactaggatgcgtgtgggtcaccaacatgcgggccccgcgggcaggcactcacccttgcgcacacggtaccctgactggtggggcctcgcggtcagttaactgggcggacaacatgtcttctgttgctcttccgtcacgcttacgtgtggggcccactgtccaaaatcgtcatctccaaccaacgcggcgggctcctgtacagcaaaacggactccgtaacaaactcaagtgaatcccgcggtctccg

SEQ ID NO: 166349 - DNA, 429 bp, Zea Mays
attattccttatcaagaatcttcggtgttgttgcaaggcttgtctgctgtttgttctccaggttcagtggttgctgtccatcagttggaacctgtctcgcagtctgtgacggacttgaaattaccttcacctctgttggcattgttgtctgaatttctcacagtgttcgagcctccttctggtcttcctccttctcgttactgtgatcatagtattccattgataccgggagcctctcctgtcaaggttcgtccatatcggtatcccccggcagtgaaggatgagatcgaaagacagatcaaggtgatgttacagtctggaattgttcagcctagtgtgagtcctttttcttcttcagttttattggttaaaaagaaggataatacatggcgtttttgtgttgattttcggcacttaaatgcaatcaca

SEQ ID NO: 166350 - DNA, 1297 bp, Zea Mays
gggttaggagattagggttccaaaccttgggttaaattttgggatgttacaaacctaccccacttaaaggaatctcgcccccgagatttagactgggcttgagaaaaggtaagggtattccctcctcaaggagtcctcactctcccaggtagcttcctcttctccttctctgctccactgaactttacagagtctcacttctgagttgcgggtctttcggactgccgagtcaagaatctttactggcttttctcggtactgaagatccttctgaatctatattgcctcttcttcgatgtgattttctagtacttgcaggaatttgcggagctgggacacgtgaaacacattgtggatatctgacatggattctggcaattcgaggcagtatgctgtgggtcctactctgccaatgataggataggggccaacgaaccgcagagctagcttcccttttacttgaaatcttttgactccgcgcattgaggagaccttgaggtagacgaagtctccttcctcaaatccgagttctctccacctgttgtctccataatttttctgccgattctgagcttcaagtaatcttttgcggatcaggacaactttctcttctgcctctttaacaaaggcaggtccttctagtgtcttttcccctatgttggaccacattagaggggtctggcacttccatccatacaatgcttcgaatggtgacaccttgatactggcctggtagatgttgttatacgagaactctgcatacgacaaactggactcccaatttctgtcaaacgtcaacacacaggctcttaataaatccttgaggaccttgttgaccctttctgtctgaccatctgactgggggtgataggcggtgctgaagtctagcttggtgcccatagcttgctgaaggctcatccaaaattttgaggtgaactgtgttcccctgtctgacactatcttccgtggaataccatggagtctgactatctctttaagatatatccgggcaagggtggtggctcctccgaaggtagttttcactgggatgaagtgggccactttggtaagacggtctattatcacccatatagagtcgttccctttttgggtccggggcagtccggttacaaaatccatgcctatttcttcccacttccattcgggcactagaaggggttgcaataggcctgcaggcttctgatgctcggccttagttcattggcaagtgtcgcaccgggccacatactgtgctatctctttcttcattcctctccactagtatctagttttgagg

SEQ ID NO: 166351 - DNA, 507 bp, Zea Mays
aacttatactaatctagagcttattcaatctaatgtgagtcacttaacaagttaacactagtgaaataaactggatcctactcctataaaccttgttctcccctcatacacttaaacctaaattagtgcattaaaccaactcaaccgtgagtagaagagctaacccaaccaatagagtcatgatagattgcataatctgtctatacccatctaacatcaaacaaacttttgacccatatcatgtagtttatctcatccatatccatcttaaccatattccccaaccccgatgatatacactaacctcgaatcaatgtgaccaagaccggatatgaaaagatcaacatcgacaaggaaggatataacagtcaaagcgaatcccgagatgaatcaagacttaaacatttcggataaagtcttttccttgccataatatttcttacctcaacttgtccaagcttataacttacataataagtagctggatacctatgctctcctaatcac

SEQ ID NO: 166352 - DNA, 638 bp, Zea Mays
cacaggggatgtcttagtcatcccctaaatattttacacgcacacatgcttgcccctgccagtaatcccaactcacgtcactattcccgctcattcccatcctgcttcacacacgccaagaatccaccacaatcccatccatcacagccacacaccacatacacacaccaagtcgcatgaatagtatatgtatagggtagtagcatgatatcaagtaggagcaatgatatcaacaaaggcttatcaatcaaacggcatgaatatcaaaaggcgagacattcatgaaggctaggaatgagatctcgggtttttaggggtctcactcccatttgtcgctcggaactttggcctagcactactgcatataatcatgtctataggaagggcgaggatgttagggtgacctattgtagtgaagtcctcctcgagctcggggacatactccgagtcgtcggcttcctcctcaggctcctcgggtcctagtatcgacaagatcccgaacaaatcgggagcacaaacattcaataagacgcaaaaagatgcaacaccaagcaagatgggtaataccggggttaggtttattcattaggtggagatgggaagttatcaggtattattcgaagttagaacagattcat

SEQ ID NO: 166353 - DNA, 792 bp, Zea Mays
gtgacattttcactgatcataaaagtctcaagtatattttcactcaaaagaagctgaatttgaggcagcgtcggtggctcgaattgattaaagattatgatttgtccattcattatcacctggggaaggaaaatgtggtggctgatgcccttagcaggtccggggttccaaaagtggccttgcctttgatcgctgatctggaccatttggggatcgctttgtgctatgtcggcaccgctagtgaggagactcggatgcttattcattcctccctcatggagagagtgcgtgtggctcagcagccggatcgattattgcaggaagctcgaaagagggttggcgatggtaaaccccgggagttcaccattgatgagaatgatttggttcgtttcaggggccgtctttgtgtgccacaaaaatcagaggtgaagatggatatcttgagagaagctcataaaacgccttacaccgttcaccctggcgaaaccaaaatgtacagagatttgaagcaaaacttctggtggaagtggatgaaggttgacgtttctaagtatgtggccgcctgtgaagtatgtcagcgcgtgaaggtcgagcataagaggcctgcaggtttactgaagccattggaaattccggagtggaagtgggagcatatcaccgttgattttgtggtgggcttacctcgttctcctcggggaagggatgctatatgggtgatagtggatcgcttgactaagtctgcgcactttattcccatgaagaccacaaattcagcttcagagttggttccct

SEQ ID NO: 166354 - DNA, 441 bp, Zea Mays
gcctgttgtctgcataacttttctgccgactctgagcttcaagtaatcttttgcggatcagggcaactttctcttcggcctctttcacaaaggcaggtccttccagtgtcttctcccctatgttggaccacattaggggggtctggcacttttgtccatacaatgcttcaaacggtgacatcttgatactggcctgatggctgttgttatacgagaattcagcatacggcaaactggactcccagtttctgtcgaacgtcaacacacaggctcttaataaatcctcgagaaccttgttgaccctttccgtctgaccatctgactgggggtgataggcggtgctgaagtctaacttagtgcccatagcttgctgaaggctcttccaaaattttgaagtgaactgtgtccccctgtctgacactatcttccgagggataccat

SEQ ID NO: 166355 - DNA, 478 bp, Zea Mays
gcctgctactcgctgcgacactacacaggttgatggggcttgctgtcgcattttgttgaacatgtctagggtgcgttgcggaggaagagataacgtggtcgttgcagctccacggcctaggcgagggtgcgcaggggagatgctcgggcgtcggctagggatgagctgcaggtatccatggagctagggaagagcagtgtcactggtggtgaagatggtggtcgaagcagagccaccgtggtcggagattaagcacagactggattatgaaaattgagtgtgttctaaatgtgatgttatatttttgtttcggaacacggaaccagtttggtcaacgactaaatcggcttcggttaatttgagttatttcgctcttgataaattgttgcgaccgtgttttcattaaattcgtctgaaccaaaatcatgagactggttgattctctgaattcgctttacgatgaagtcgagcagaactc

SEQ ID NO: 166356 - DNA, 502 bp, Zea Mays
ggaaggggttgcaaagggcctcctgccttcaaatgactggctttgaccctctggcaggtgtcacactcggatatgtacttggcaatttccctcttcattctggtccaccagtataaggatctgagatcatggtacatcttgtcgctgccagggtgcatggagaattttgaaaggtgagcttcatccaatatcttctttctaagctcagggtccttgggaacaaccaatcgatctccaaaccatagaattcccttgctgtcctgacgaaagcacttgtatttctccacattttgcttgatcatttctttaataacccaaacacccttgtcgtcaatctgtgcccggactatttgctcttgtaaggtgggttccaccgagatataatttaaatcacctgaagaaacaacttccaggttcagcttgcacaactcatcacacagggtggtaactctcgcatccatgctcatacaattgcactgggcctttctgctcaaggcatctg

SEQ ID NO: 166357 - DNA, 538 bp, Zea Mays
agacatcggtcaagcatggtgttaccgtgcaagatctgcggcgagttggggaaggcgacctgagagtgtggtcccatttaactgcgaccagggttctccagcgcatgtgagggtgaggaggctggtgattgggccgcgatgtcagcaggcgcgaaagcgtaaagggatgggccacgcgagcgatggggaagtgttctggttggccacattggcccacgcgtccgtgagaatagattcctgagcgcgactggagactgagcagtaggcccgcgtgccagtgagcgcaacaaccacacgcgggaaggggaggccagtgagcaggagcgggacccaccggtcagagacccacacccagggcagcgcggtggatttgggctgtctggacaattacgacccaaatacacgaatttccccccatttcttttctaaattccttttctatttgaatttctaatttccaattttcaaatatccaaaccaaatttcaagccttgctttgaattctagatctcaaatatcccctaaaagtctacatgag

SEQ ID NO: 166358 - DNA, 528 bp, Zea Mays
gggagctgtcattggctcgacatgttaagctttgccaactgttgggcccctccataatccctgcccttgtgcggttgtacaaagctactatatgctgcactacaacgaccttttgaatcagcacctatccagcaagtgaagctaggaccaactgttgacaacaatgcttcaacgccccacaatcaaagtgagccagccaatttggctggccctgctgtgtctgtgtgggagttgtacgcccgatgatacaggtctcctgatgccatcagaacatatgtagtagttgtttacactgcaatatctggcaccactaaccaggatggcagtggttacagcacaaccataccaatctgacatagaaatgttgatgtacatcacccagcattttccagaaaggtgagcaaattgcagagctgaccattggcgtgggaactaaacagacactgacgcacaactgcacaggtatatttgagctggaccaaagcaattcaccaaactcaaacatcggctttaatctccaagtggttg

SEQ ID NO: 166359 - DNA, 791 bp, Zea Mays
aatgaaaccctaagttttgggcctatttgcaaaaaaaccacttttgtgaccatatagctaagtctgaaaacagttgatcagggctaactttggagctctgtagatcgaaaaattcaaagaatttgccctgggtcaatgtaacaaagttgtagagccattgtagaagaacaactttgctacaggtgttaagtcttggtgccatgaggaatttggagataatttgatccaaagatgggctatcaagcgattttttaactgaaaatggcgcattgttcatcgaacttcagaaagatctcgccggcgataagaacgccaccgcggttggggatgggtctgcggccatggtaaagatcatccgcgacgtggcgttaaaacattgcggtggcactgcccggttaatcggcggtcaccggaccatcgtcgtggctctgcccgcgcgggtgagctcgccatcgcggttacagctccgcgattctcatccaactccggccatcggcctataaattgagctcggatcctgcttcttcaccacatcatgcacacaagctcttgtgcaatcgactcaatttcaccagaagaactcacacagtccacaaaaccattccgcccctgttcttcgcactgccatgaagaactcctccgtggacagcactcctcgggtcaataactccccgattgcttcttgttctagcttgtttatagctttctattgctctcggagccgaccaattgaagtttgctagagtcccatcaccggaacactcctctgctccgtagaacgccgccgcgac

SEQ ID NO: 166360 - DNA, 672 bp, Zea Mays
aggtttcagccgccactacaattccgcgtcggcagtagaaatgaggcgcattagtgtctgctcggtggtagtccgggtcataaccaagccatcaggggaattaattagtcagcaaaccaccataggattgggaattgctcgccggtcattcaagctcgccgcagattcgcctggtaccgtagccgagcagcaccgccttactttcacaggtaacccttgtcttgtttcattcctggagctgtgcacttcgttttgtagccatcaatttgagtctcgggccctggcgcggcgatttgggtgctcgccaaatcggccgcctccgccgtcataggggaatagtcgcgcgcttcagtccgaggaaggatacagtgtagtgaccataggtttctcctcgaacgacttagattagatttcgggcgccaattaggtgggaatgactggggtcgtccgatccttctcggttggctgcgattagaagtcaagacaacccttcgcttcattaaatcttgaccgtaggatgcaaatcgtccagtagagattggatcttgacgtagcgtgttattggccatcgatctcggatccgtcgtctagggaggtgcgcgggtgagtagagcgcctggttttaatcttgttggtgtttcaaccccggggggtccctggaccgacgagtaa

SEQ ID NO: 166361 - DNA, 616 bp, Zea Mays
catctaccatgggtgtgggcggagctcgccgtccatgggtttggccgccacgactgcgtgctagaaaggggcgggatgcgcaggggctcggccatggaggggctgtgagcacggcacgctgcatagggaaaacttggacggggctacatttccatgggaaagagggctctgccgggaggagacgaactgttgcacgccgccgtggtgagcacagagaggagcacgagggagagaggagaagggagcatacctggtaaccgaaggctcacacgatctggatctaggaaagtggatatctgcgttgggaagagggtttcagcattggagaaataggagaaggtacgtctgcgtacatatagaggaggggtgaggcgatgctgctatgtgcccgacgcattgggcgttgcgcgacgaggcaaggcaaaacgaggtgactgcgactgattttgagtcgatgtgtgcgtgtggaatagataacaatttagggaaaacggaaatgatccatggcctgaagtgtcagcgagaggagcatgtgaggtgattgtgtctacgcgatacggcgagtgcggggaggaggttgcacgcacagcattgcgtgacgagacgacacgaggtg

SEQ ID NO: 166362 - DNA, 370 bp, Zea Mays
acaatttgtgggagaaaaagaaacaagatgatgtagacaaagaactgaagaaggaagaaagattcgacgaatcactagaaattgagaaggagagacttgagatagagcgcacaagggttgcaaatgaacaaaaatgtatgcatatgaagagaatgctagagcctagaggaagaataatgaaagtgggttgcagtcaatggtgatgatctggagcttcctcgcagtcctgatgatctggagcaagaaggtggttgtagtcatcaccgtcgcctcctcactcttcctgctcgagtccggcggaccgagcgcctgcaggagccacacgtggtgagcgcctgcaggagccacacgtgcgaaccgccagggaata

SEQ ID NO: 166363 - DNA, 750 bp, Zea Mays
cgggtgaagacaatgtactacagggccccgataagactccgatagcatgtgggatcaagcaccggggtcgtcgtcagaggaggccttgccctgagtgtccatcagagtcatacagggcttgcagtcagccatgcaagtgcgctcgaggatatcgacatgtactaatgctggtggagaaacatgccatggtgacaacattccaaggtgacccctaggaagtggtgcaactctcttaggtccttcaccgtgaacttttgctggcggaaggagatgatgcaccataggagctcgagggaggagaccttgagaacaatgtcgtcaacatatagaaggaagtatgccacgtccggaccacgacggaagacgaaaagggaggtgtccaccttggcctcgatgaaaccctacgagagcaagaaggtgtaaaaacgactgtaccaagcacgtggcgccttattgaggccatagagggaccgattgagcttgcagaccatatcggggtgagccaggtccacaaaactactgactgagtgttatacaccatctttgacaaagtcccaaagaggaaggcattcttgacgttgagctgatgcaccagccagtcccgcgagagagccaaagttagtacggttcgaatgatagtaggcttcaccatggggctgaaggtctcgtcataatcaaccccgggacgctaggtgaaaattcacagtatctagtgagccttgtaccggtctaaagagccatcctccttca

SEQ ID NO: 166364 - DNA, 576 bp, Zea Mays
cattaataaactaaatgctttatttttagttgatagttttggtagtgttacatcaactccatccgatttcaccccagcgccttctggtctcctccacttgtcatgctaggatggaccattcttccttggatcttctcatcgcgtcggccgcctgatcagcctggttctgtagccgctgttgccccgtctccaccgcctctaaacgctgatcaaccctctcgagcaccagcatcatcttctctatcctcacctccagcgtttgttccccggtcgacatgacgtccagaaggatgtgtgtctgcaccgacggcttcacgggtggcgctgtcttgttgccgtccaaagatcgaagggtctaataccacttgtcacgcatgtggtcaacggtgcttcgctgccggcgtgagtagtgacagtgttcgtcggcatgaattcgcaagacacaggtatgggtggaattttgtttctattctgttcatagagaatctcagtttgttacaagttggctcatatatgcccgcgccacttgctcaacacatacacagcccatcatgcctcacggcccataacatccca

SEQ ID NO: 166365 - DNA, 1339 bp, Zea Mays
tttaaaagttaaaacattaatgtttgcattattcccaactatttaactacattcaaatactataacattaatggaggggagatgcacgtaccatccacagagtcagcatactacgcactctactatgcaagagtgccgacacatcagaggttttgagtagaaacttctgaaagagtctaaaccagaagacctaaagccaaaaagctccaaaaccaccaacaataacgactcagacgatgatgccggggcaagttcctaaagccaatgcaagccatcatttatatcattggtagccccgactcgtacgagtctaagagaaaaacaatagttggagatgaggtacgtctactctgtgtagccggccacaccagagttcctccactagtcaaatgtgtcgattacatttgacagatctaatcactctggtcatgtgccacggttagggtggtatcttctgatattgaatccaacagttggcgacacacgactccactgagtcctcattgatggtggatgtagtctgaatattctcttcgtcgaaaccttcaggaagatggggctatcggaaatcatagaagttgagtcttgtgccattttacgacattatcccgggcaagtccatgattccactagggtagatcactctgcttgttatatttggcaccaagaaaaacttctgcatagaatttttgcacttcaaggtggaaaattttgacgcgacacatcatgcaatcatcgaaagacctaggctcaccaagttcatggcaatcccctattacgcatacctagtccttaaaataccatattctaatgggatgatcatggtcaatgccaacctaaagtaatcatacatctgtgatatagaaaggtgaagcctagttttgttgcaggtcatgcatgtaggtagagtttgatagcctaaaggagtctctccggctgagtcatccagaggtaggacgagaggaggatcttgaacctccactgaagaaggcatcattgcaggccgagtccaagcttactaagcaattctagttagatcccaatgactcttccaagaccacacacatctgggccagcatttcatcatcgtcatccgagtcactaactcggatcattactttcttcctcttcttagaggaggaaggaggattggttttcattgtgaaagatggaccaacagaagccctttcggctaattgctctagaaaatggtttggtctggattcttcatagtttttggcgacccatgcgggttcctcctacggagtacaatgcacaccaacatttatattgaagtatgagctagataactcggaacacaagatgaagtgacagagtt

SEQ ID NO: 166366 - DNA, 375 bp, Zea Mays
cagaacaagacccgaagagcgggtcgacggtgagggggtcacggcggtgtttgacagcgcacgggtgcgttcctgtgatgagcttcggccaaactctaaattgtcgtatctaggagcaataggagatcaaagactaactaaaacagggagtaatttgagagttactgaccagaggaacgctggccacgaagaagttcttcacggcggagcaagaacagaggagagagggaattggggctgcgcaagttctctggcggaattgagtcgattgcttaaacactgaggtgcgtaatggggggaagaagcggagtccgagctcaatttataggccgtcgaccggagttggagaagaagcgcggacttcacggcggattc

SEQ ID NO: 166367 - DNA, 557 bp, Zea Mays
cacgcggtgtacacacgtggtgctggcaagcaacgcctgattgtgggagtgtatgttgatgacctcgtcatcacggggggcgacgtccaagagctggaacaattcaaggagcaaatgaagaagacgtttcagatgactgacatgggtctgctccggttttaccttagactggaggtggaacaaagtcaagccgggatcaccataagtcagggaagttatgcactgaagattctgcagggagccgggctggcagactgcaatgccagtcacacacccatggagtcaaggctgaaactcaataagtatagtaatgatgattgtgttgacgcaactgagtacagaaggctcattggtgcacttcgttatttggtgaactcgaggccggatctggcgtatgcagttggctatgtctcacggttcatggagaagcccactgttgaacaccttgttgcagtcaagcgcatacttcgttatgttgcagggacagtgcatcttggatgtcattaccagaaggaagcgaggaaggtggatctccttggttatagtgacagcgatca

SEQ ID NO: 166368 - DNA, 574 bp, Zea Mays
ctcaaatttaaaacgataaggcaatcgaacaagctcaagttttttctttgttccctttagctttggcatgctccattcacttgacgttggagatgttctattagccaagtattcttgaaccagatctctagtgctgatttgctcagccactaccctgaattctgatatagacagttggcatgctgaccctggctgcttgttgcacaaaggtctggtcattccgaagcttaaagccaacgggcacatgaccatcgtcatcagtttcccccttctcttttcatcggctttaatataaaaccattcactcttccagccggtcggccacttggtgcgatagctgaggactggagcctttgtatccttgcgatacgtgaagttgtagctgccaaaattttcatgaagaccatctgccctggccttcgtctggtagtgcaattcatgcactcggcagaatgcttcgacatcaaggctcatcccttggcttcggagggcccagatgaagacactaagcctaacaatggcgttaggggtcaactgataaagataaatttcaaaatttttcaaaacctctcct

SEQ ID NO: 166369 - DNA, 809 bp, Zea Mays
cctgcccaaactctaatctcgtcgcagaagaattctgcctgatatttgataccagagttgtatcagatgtcgtcactcttctttgcgggacagtgtttatggagggggaaaagttcatcatgtcacgccctcaccagtgccgcgcaaaaggcacgcaaggtcatgacctaccgcaccatcgtggatacattcgtcaccatgacatagttccacatgctaacacgcacaatatcaacagtggacaattttgatataggtgaactaggaggcgggatggtggtacaccatcaagccagaggaaggtgaggagatcatctaccactacgaccacctagcgctcatcgtgaacctacacttcgtgtacgcccaacatcagggttgctcttctatagaggagaatagtgacaacaatgtgagcgacgattaagcagcttgttaggagttcgtcgcggtgtcaaagcagcttgttaggagttccaagtccgctgactttttctcgataggtaggacaacaaccttatgaaggcggacacctgaagttgcacaatggcaaaggtcgtcactgtgccacggtaaatcccaaactccacagcctcacgaacacgctccgggatgtcaggagacacgtcctctgattcctccctcgcgtatgaacgaatcttgtagcctaatctacgcataggaaaaagcccaacgttttaggcataggacctgcgacgaaccactaggtagtcaggaatttagaaagcgtcgagatcccaaatgtcggaccatgatagtttacttgcccccgaatcgtttagagtcgc

SEQ ID NO: 166370 - DNA, 649 bp, Zea Mays
ggcctttaggtcaggtttctattggtcgacggcgaagaaagatgcgacagatttagtccagaggtgcaaagcatgctagttcctatctaagcagcaacacctaccagcccagcagctgcaaactatccccataacttggccttttgcatgatgtgggctggacatgatcgaaccattcaagaaagctcaaggaggatacacccatgtacttgttgccatcgacaaatttataaagtggatagagtagacctcagccaacgcagtggagttcgtccaagaaatcatattcagattcgggatacccaacagcatcatcacagacctaggatctaacttcaccagcgcagagttctttgatttttgtgaacggaggagcatccaagtcaagtatgcattagtggcgcacccgagagctaatgggcaggtagaaagagcgaacagaatgatagttaaggcactcaggaagaaaatatttgacaagaatgagaagctcgcgggcaaatggatcagggaactgcctttgtagtctggagtctgcgaacccaaccgagccgggctctacacaggaacactccattcttcatggtgtatggatcaaaggaagtgttgccaacagacctgatctttggggcatctaggctggcattcg

SEQ ID NO: 166371 - DNA, 725 bp, Zea Mays
tgcaaagccagccagactgcctgtggttgcattggatgatatgccacccgctgtagcacgaatgcatgcatgatggagcttctctaaccagtagagtttctggccgggggctgagcagatatggagcagggatagtagtaacgtgcagtgcactagcgttttccgaaagctgtacgtgtcatcgatctgttggcgcgcgcgcacaaacacgtacgtacgtagaaatgcatgacaagctagccaatagtcttggcaactccattggccaccacgaggttctcggttgttgtgcctaggcagtacatagagttctttctactctcacaatcaaccttacaaatattttagaaaatcagcaaaaagtaggcaatgtgctcaaaccttgaatcagcaattaatgtattttagtttgaatgcacccacttttaacttggatctgctactgttgtttcggctaggataaggaccgacaaaagtgattaattccctgttgccgggcccacacactaatccctgtcgatatttattcttgtgggtatttgaagaggccaatgagagttattcaatccccatcggctggctgacttcttggccggacgatggaaattaacttaagtcggcttcggcactaaaaaatagcactaacggttgataacggaatccgtctgtaaaaaatgcaccccactgttcaggttttggtgtaaagcaatccctgtgcatggtcg

SEQ ID NO: 166372 - DNA, 506 bp, Zea Mays
ccaaggcgttaacttcttcagtagagggtcgcactctaaggcccaaactgccatcagcaacaggtggattcgaaacaaaatgagtgaaggctttggaaggaggcaggttccaggccgagtatgccactggggcaccaacatttgataccttgcctctaagaatcatctcaagtcggttcaccaagtctacggagggaattcttctgttggtaacccgagttgagtcagctaggcctcggtacagataagtcgggtaagccctgtccttcaacagctgaatgttcttgaaaacaaaatcagcaaccacagcctctacagtcagacccctctccttcagtagtccaacttcagctagcaaagccccagcctcagccacctcctgatctgtgggggactcggtccaactcggagtacgaacgtccgactgtctccccgaccgtggggggagagaatttccgtggttctcaacgataaaccactccaagcgccatcccttaatactgtcc

SEQ ID NO: 166373 - DNA, 1182 bp, Zea Mays
cgttcagacaactcggacagagtcacggggcaagctggagccaaagtgggagggtcctttcatcgtcaagatgaaggcgtcccctagtgcgtacaggctaacaacgccatccggtgaggacctagagcattcttggaatatcgataatctccgcaaattttttgtttgaatcctcagggctaacacgcccttgtaattcaccaaacagtatcattccggcccgcactcttttcgtcccgggggtgaggtttttaatgaggcggagccatgtaatatacccgcaaaaatcccccgcaaaaactaagacacaatatgtcgaaaaagaccgcatcgacggtcttcggcattcgaccacaccgaggtcaccgcgaggggaagcactagctaccctcgcgtgcgacactccgcgcaaaagtcgcctaagggtgcagccggagtagcacaacaagtgcgcaaattagaagtcttttccaaaagactctccgtgcaaaagtcgcctaagggtgcagccggaataataggcgcgcaaaatcgaagtcttttccaaaagactctccgtgcaaaagtcgcctaagggtgcagccggaataataggcgcgcaaaatcgaagtcttttccaaaagactctccatgcaaaagtcgcctaagggcgcagctggaataataggcacgcaaaatcgaagtcttttccaaaaagactctccatgcagaagtcgcccacgggcgcggccggatcaacgaaggcgcgcagccttatcatacaaatagcagttacatacacatcaagggcatcatatattacattggctcaaccttcaggatgatacccatctccctgtagttgaacagcattatcctcaattcctcatcctcaaaaagatttcgcagctccccctcacctacactcaccccaatcggcaaggacaacaattctcgcttaccagtcccgtccacgcgaagacgaccactctccatgtcactacgataacgcctaccactttgcgacaattcactcactctccgttttgccaccgcccttcatcgcctatacccagcactcgcgctcgggagctcctcgaaaccctccgcgcgcggcgaaggctccgctacatccacatccaacgctgcaaaataatccaagtccacatctgaagactcctccgtccacgcaatcaaactccc

SEQ ID NO: 166374 - DNA, 445 bp, Zea Mays
aggctggtggatgctgaaacaaggtacacttttatcgagaagttatgcttatgcctattttatgcatgcaccaagtgtagatgttatttactgtctagtcattgcaccgttgccggtcaaaccgatgtgatcaaatacatgttgcaaaacccaattatgagtggtagaattggtaaatgggcttatgcacttatagaatatgacttggcctatgaaccattgaaatctatgaaaggccaggttgtagcatattttattgtagaacatcagatcgatgatgctcataacctagatatatcatacctcactgttactccctggactttatattttgatggatcagtttacaatgaaggacaaagaattggcatcgtgcttgttttactaagtaatgtttcctttgacttctctagccgattgaaaacttattgcactaacaatcaag

SEQ ID NO: 166375 - DNA, 447 bp, Zea Mays
ggccgcccacactgtccgctcaaattcagcgccaccgccccggggatctataaattgaccccgcagtgagcttcacaacatcatcgcgcacccagccaccaaatatcgtcctcaatcgttcacctgagagctcgaattcctaatttcccccaaatcggtttgaacaccccgtaagaacacttcaccgcggccagcctattcaaggtgaattcatactcctctgttgattgttctagcatccctaggtcctccttaagctttccgacccctttaattgcactgtaccatcacctatcgccgggaacacgacgatcttgccgctctgctcacggccaccatggccagagcacaccccttgattattagtgcaattatgttgggggaagtacttctctggggtagaatccggggtaaaccgaagattagcgccggtcatagccccaatcg

SEQ ID NO: 166376 - DNA, 1154 bp, Zea Mays
cggagctgcgcgcgcccggcggcgcccccgccgcggccgccacgcagaagggggacgtgttcgcgttcggcgtcgtgctgctggaggccgtgaccgggcgcgagcccacggagggggagggcggcgtggacctggaggcctgggtgcgccgcgcgttcaaggaggagcggccgctgtcggaggtggtcgaccccacgctgctcggcgaggtgcacgccaagaagcaggtcctggccgtcttccacgtcgcgctcgggtgcacggagcccgaccccgagatgcgcccgcgcatgcgcgccgtcgccgagagcctcgaccggatcggctgacttccagcgcgacggcgtccggccggccgccggttactgatcatcaactacgtaggtgcaatccaacgcataaaagagactcgcagtcctgttcatgtagattagcgcagttaagcattgtggatttcagagacggtaaacgcaggtaaaaacaatcatcatccgctccatctgtgaatgacgaaggtgaatcactcgacgtagcaggctataggctagcagccgtgctaatattttgtggcaccccttgatccattccaaagcgaactctgttgggagttttctatcgttttgccactgcctacaactgtgcggcgctttgcccaaaagcttgcgatgcgttccttggggacctgggactctgggaggcagagagagcagacaggcttttggccctaggctgtgcggttcacctttggcttggtcgaattgactctgaaaagatgcgacaatgacacaaggtgtgctgcacccttctggtcagtgcactgtcctcttgcctgtgctgctgtgcagtgcaggagcagcatgcttttgcaagtttgcatgcgtaggagtaagtgacaaacaaccaacaggacgccagcgtcaagaggtgtcgattggtcattggagaagggctgttcggatggagattttgtttgaatttcttgatgcaaaaccattgcctgaaacgtgtagcaatcatgctcatgccgaacgttagttgctgtacatctgcagataaaactaggtgcaaatggtctttttgcaatagttattaatcagcgcatcgacgattccttcacgttttcgacagcgtcggattcctgaataaagtcgtcg

SEQ ID NO: 166377 - DNA, 516 bp, Zea Mays
gcattcaccaacatttagcatttgctccttggatcgttaagggtcgctagccacaaccaaatatgttgaacctcagcattagccgtctccaaagctatgcgagtcgctcccaaatccctcagaaggatgtccactgtccgcctcgaggggatcggcgaggtgaacggatgtgacaagaagtcgtgacacatttgtgcctcggaagaggcgatcgccaccctaaggagcaaagcgaggattaacaagaagagggacaagaggaaaccccgagataaggtagtctggtcataccatttcctcaaataatccctcctgggagatctgctccgatccatgggcgaaaggagatgccggctaataaggagatccccggacaaggctgctcgcactccccctctctttcttttaaagagggagggtactcagaaaagctcacacagaaaggggaagcgggagagactcaagggccctacaatacaaaaaaaccagggaacaaagttttctttattaatttag

SEQ ID NO: 166378 - DNA, 731 bp, Zea Mays
gccttggagaagttgcatctgcgcaacaatgaactgctccatgtttgagttgggtggtggtggtggcaactactgaccaacatgttgattacgggtgtttctaggacctaggcgatcgttcaccatctagttggttagaaagtgcatcctttagacaagtgaagagtagagaaaaattctagggggaatagcttttactgaagttaagattatttgtaaattttaaatgttcttatggccatcatcccataagatcattgcactcaatcaaaaatccaaatccaacattatgcaaacatcaccatcacatggttgttattataatcatagtatcataaggagtttcattatctaatgcaaaactgaacttattacaatatgacttatacatctagagtagcctagtgatagatcctagttcatcatagtgaatcctcttgcggggcggggacacaactatgccagggacttgggcttcgggtggattccttcctttgagttgagcttcgagggctgcaatcctaacatgtgattcttcaagttctccatgtacccttgaaatatccggggtagcactgtccaagttagtgttaagacctgccaccacacctacaatggtgatgaggcgatcttttctagcttcacctggaacaacactggtctagctttctccatgaagacgtagaggaagatgtctgtacctcatgtcatgcagctgctaccgataagtg

SEQ ID NO: 166379 - DNA, 505 bp, Zea Mays
ttactcgacttagggtgaccactaaaccctactaacggagcaatcggcttaagttggcaatgacttaagacggcgcaacatgctcacgcttactcgacttagggtgaccactataccctactaacggagcaatcggcttaagttgacagtgacttaagatggtgcaacatgctcacgcttactcgacttagggtgaccactataccctactaacggagcaatcgacttaagtcgacagtgacttaagactgtgcaacatgctcacgcttactcaacttagggtgaccactataccctactaacagagcaatcagcttaagtcggcaatgacttaagatggtgcaacatgctcatgcttactcgacttagtgtaacatgctcgcattcactcatcttagggcgacctctatgccttaccagctgatcaattaacataaattaggaaaagagtccaaaaccagcatatcacacttatttctataatcattcatgacaactgttgaat

SEQ ID NO: 166380 - DNA, 488 bp, Zea Mays
ttgtgtcactgttctgtgggccagccatgtcagctgtctcgcccagctcgggtccgttggacaccgccagatccggcgtcgccgcaccgcgatttcagggagtccctgaacattcatcggggttgttacaagtgtgcgccttcactggatccttgggcccaccaggtctgcggctcggtccgctcatcaccggcggaaaccgcctctgcggagttcacgttggtcgctgccgcacatccgggagctgcatgcctcgaccataaaagagcctgccctgccctttctccaagccacccaagcggccgagtgcgataaacgccaataccgggaggagatcagagagggagaaatcgagaggagagagagggacgaatgacgccgccctggaatctcgctcgtgctgccgccgcgggggcaagtcccatgcgctggtgctggcaccttggaatcgggcctatatgcctcgccagagcgtgtggaagtcgcgg

SEQ ID NO: 166381 - DNA, 437 bp, Zea Mays
attttttgttgctgagaactaattacattttctgttgcatttaataggctcacccaaaggttgcaaggtttcgcaagaagccctttcctcttttctactctttagaagcactttatgaaggtgagtgtgtgtccatttcctcttttctaatcttttctaataggttatgagttattatacctattcatatatgttcatttttgtaggtagtgtggctatgggagacttaaatttcacatcaagtcaacaattgcctccttatgctcctctacctgttgatactcttgctccccctgctattgttcctcctcttgctcctcctgctagcgttcctcctgctcctacttttgttgttccttcagctaggagtacgtctaaacagactctccatccattcaatacaaatccatttgatttggatggacaagagatgacaa

SEQ ID NO: 166382 - DNA, 354 bp, Zea Mays
aaaatggaaacagccatccaacgtcagtgaagtacgaagctttctgggaatggcagggtattaccgccgctttatcaaaggattctccagcatagcgaaacctatgaccgaacttctcaaaaaggacaataagtttgtgtggactccaaaatgtgaggaaagtttccagatcatcaaggaaaagcttacaaccacgcccgttttgacactaccggacatacaccaggatttcgtcattttctgtgacgcttcaagacaaggcttagggtgtgtcttgatgcaaaatgagagagttattgcctacgcatcccgcttactcaagccacacgagcagaactaccctacccacgactt

SEQ ID NO: 166383 - DNA, 518 bp, Zea Mays
aaatttattactgaatagcacaaggctgtctaggctggagagtttacctatactcgaaggtacggcgcctgtaaacaggttatctgacagatctagtatttggagcttttgaagcctacctatccccgaaggtacggtcccggttatttggtttccacccatcagtaacgcttccagctcataggagagattagaaacagcatttggcaaaatgccagaaatgttatttagctcaagattaagatatttcagatgactgcaattgaccaaaggggttagaaaatcccaatctttagtatccacgacttgaagctgattgttgcctaattcaagattagttaagctgccgtggacaccaatattaggtggaattcggccatgaaatctgttcccgtggaggatgagctgttggagcacagaaatattggacagggaggatggaactggaccctcaaatttgttatagcatacactaaatgctacaatatttggaagtgtaaatccaatatctggaggta

SEQ ID NO: 166384 - DNA, 620 bp, Zea Mays
aacgaacggtgagattggcagcaacactcacaattcttgcttgcaatgatagtgtccaggtctgcatcatcttgaaatcttcaaccggattatttcctaggtcctttcaaaatgttaatcaaatcctaatatcattccacacctatttgcatctgtattgctatactatcctgagagtccaaccaaatcagatcctaaatcttgaaaaacaattgaactgctattcatacaaagcaaccaaacgtccagaatgtagcgacttgagtattgtacacatcttgcgggcaaaacatataaaccaattaacagatgcaagctaggtcgcccgtacctgcaaaagaagtagcttaggcgtcgcaaggggagcaccacggcggtggcgtccgccacgttgtggcattccctcaccgtgacgccagagatgaaactgcctttagcccttcacgacataccacgtgctccacatcaccgttgtggatggccagatgacgggagatacggcggccgcggtgagcgcggggccgaaggctggacgagcggagcagccgaggcgtggggccgcaggatggaggagccgaggtgctcgggcggagggtggaggccatgcagtggaggaacgg

SEQ ID NO: 166385 - DNA, 561 bp, Zea Mays
tcttctgaaatttgaagcggtaagggagtcgaccaagttcataatttttcccttcttccttcttatttggcattccccatctgctagaggttgggaaagttttgtttgccaagtattcctgcactaaatccctattgctaatatacccagtcaccactctaaattctacttcggctagttggcatggggagccaagctgcatgttgcataatggtctcgtcatgccgaagcttaatttcaaagggctcatcaccatactcataagcttctctcttttcttctcgtcagccttcacataaaaccactcatttgtccagccagtagaccatttggtgtggtatccaattacaggggccttcttatcttttcgatatggaaaattatagcacccaaagtttttgtgcagaccgtcggctctcgccttcgtctgctagtgaagttcgtgcactcggcggaacccttcggtattggcacttttaccctgacttcggaaagcccatatgtaaatgctaagcctaacaatagcatttggggtcagctggtggagatatatttcaaatc

SEQ ID NO: 166386 - DNA, 366 bp, Zea Mays
caaggggtccaagctctctgccgtaaccacctctaaggttgacgggttttcagctacttccaggggactagaacaatacaagtcagcatcccgaccctcgagatcatgctctaaggtcgacgaggcacgggatgacctcaacccagcatcgggcacggcagcacaagcctctgttgcatcatcatccacaggctctgacaacaagtcctccgggaccatatcctctagagtttgatcaaagttggccagggacagttcttgcagaccaataagggcagacaatgcaggagaaggaactccactacttccgccgctggcaatgaactgccgactgtttttctgagttaatggagcttcattttcttc

SEQ ID NO: 166387 - DNA, 524 bp, Zea Mays
ctttctttgccttatggtctttgttcttcttgggggtgtctttttcatttgagatcaaggcatgagagtctcttgtcttgattggggcttcttcagattcatgttgttgaatctttgcaaatagttggtgaggcatcatttcctcatagtcatcacggtctcttatcatccttgctagactcttgtccttttctttgtatgctctcatgaatagtctagtaaccttggagtcactccaatcttcacttccaagcactcttattttgtttaccaacaccattaaccgatcaaagagtgattgaagtgactcacccttagtccaatcttatctagcaagctcactctccaaagcttcaattctatgtcccttatctttggggtctccttcatgtgacattttaagaatgttccaaatgtcacgagcatcttctcttccttggactttccggtattctttcagacaaagacttccttttattatgctcaccgcttgagcattgcggtgaacttcttgcatcatttcc

SEQ ID NO: 166388 - DNA, 638 bp, Zea Mays
tttgttatgaagctaatgcaatatgaacggacataaacataattaaaatgtgaaagttataaataaaatgggattgtagatcatttagtattatcttcacattaaggaataaaccttggggtggattggtaaagtcgtagggacacatgcgcaaaggtccacaccggccagggacggcgggttagtaaagaaaaattccagggaccctactgcaaagtgctgcggtggcataaccccgagcacgctctggccgttagatcgcgcaccgagggtccagattaaacgtaacttaaaacgaaccggtacgaagtgctgaccatcagatcagagatcaacgttctagattttatgaagatcggcccacacatctgggatccaagggtccatattgctcgtgccttcccccaatcctatcctaccaattttgatcggacgactagggacccatcttccctacccgaccaccaaaggggcggcgaaatcgggcgcacccggcagtggccggctcaccagagactgccataccgacgcacaggcatctatcccccccatacccgaggcatgctacgcagtaaggagatggaggtagaatgaactgtgacttttctttccgatgcttgcgtcacgacgagctccac

SEQ ID NO: 166389 - DNA, 399 bp, Zea Mays
ttacttatgaccataaacaatacacatatatttaatgtccagacagcacacataataaatctagcaacaatctatttgttttgtactcagtacgcccaatatgaacggtactgaaactcaccaaatggagcacatcacgcagctgccggtagaaaccccaaacccaagaccaattattggggtatcctttttcgtcagttcgttcattcatagatagtttgtggtccaattgaatatccatctactcattctgctagctatacttaaaaaaagaactgatctaggaacgaaacgaaaaaatggcagggagctgtttaggccgcctagaaaccacatgatagggtcgaacttgttgtgtgtgtatagatccaatgactgaaaatgtagtagctgttcaca

SEQ ID NO: 166390 - DNA, 634 bp, Zea Mays
actccaaaagaaaagagttgcggcgatgagaaacacgtgcagccagctggtgataaggcacacgtcctcccgtggacttacgggcagtgagcctacgacgagccatctgttacaatgtcagatgggtgaggattagggtgagaaagtttttatcgattaatagcgcagacaaaacccctaccctatctttaaaaaagagcgatgtaataaatgaacaagatgatggttatgccaatgtatgcacataacttacggcctcacaacatgttcgtgttaacgcaataagcagtggcatacccgttcactcgttatcgtgcaactacaccaactactcgcattgaggttagtatacctacagaaaaagttcattccaacccatccccacgatgcgacaacattaattgaaaaataatgacaagataccactatcctcgctaagttgcggtaagaaattctatcggtccttatacaacatgcatggtgacccacacatgaggacaaccgactagccccagtttgcatggtcctactctttcttttcttaccttggcggcgaaatgacgacatattatactaaccattcatagaatctagaaaataatatgcaatgcatggaaccctccccaaggttagc

SEQ ID NO: 166391 - DNA, 720 bp, Zea Mays
tgaaaatcttctcagcagcttcgttaagaagtttgttgacagcttcgtcaacagcttcttcagcaattcttatagtttctaccgtcgccttcatggctggatcagcttcgagatcatatggctcaggtggcggtgaaagttcagctacagtaaaagtaataagtttttaatctaaagccagaaaaatactaaagctacgaaacagttaaaatacctatgcacctagcgcgctcggcagcctcttcgactcgcttggcttcttctcaggcttcataagtttctttctcattcttcattatagcttcatgggctagttctcggtcgcctttcatccaaatgttggagtaaaaatttccgcccatcagagtcgcctcagccgaaggatccttcgtgttctccacagtgaagacaacctccgtctgggttgtagctttaacgtgttcgcagccagatttttccaaaattgctgcaacccctctagcaccggcaaaagcgcagaaatcaccgcgatcattaaggatctcttcaaaagctttggcttcttcaccgatccattcgatgattccttcgagatcgcctctaataaatttctactcggatgagtaagcacccacctttgcagaactgtcttttagcttcttggcacaatccaaggatttttcgtaatatctctccttcgattctcgaagctcaactacattcttttgcaatcttgcgcta

SEQ ID NO: 166392 - DNA, 673 bp, Zea Mays
ctactctcgggcgatggagattcctagacgccacccttaataaagatgctctaaagctatctctagcagcttatccattctcatacctatatttaaactttactttgtgatagtacaacctacagtacaaaatagcgtttttgaataaaatttagatagactgctgaagacggtctaaagcctcctcgtcatctacctcgagttctacggtcgtccgtccaaactcctgccaggcgacaaagcagccatgaatttgcgtcatcttgagcacgcactgcatcacttatcgcccttgacttcccatctggcccaaactcctggaggctggaacacccgccagtagttgcccagtacgcaagagcaacaaccagcagccacagccacagctttccgaggtgcaggcttcacatggctgcaacttgactctcataggcaggtcacgctgtcccccgctcaaagcaagctagaacaccgtgcagcgcctccgccctcccaggatagcgaccggccgccagcctgcgtgctcttccagtcttcgtcatggcctacacgatcatgctcatatacacctgtgaatgtgatggcgacaatatacctcgggtgcatagataggaggcatctggtcttgagagagatcaccacattcttggcagaaacggtttttatgattgct

SEQ ID NO: 166393 - DNA, 394 bp, Zea Mays
gtgaaggggtatgagttggtctcatctggtcgattgagcacgaacggactggattagatcgaccctggatacagtttcgccttcactcaccatcgttagatccgaaatccacggcacagccccgtccacgcataacgttcatcagggccgatggattgaatcacgacggtcatggtttaatgtaccgaaacgttaagctgtttctaatctcaacccttcgtttagcatccgacggctagcacataatcccttccctgagtcacccccaaatcccaacggcacgctcatcgcggcggagcgccatgaccggagtagtgcgcccacactgttcccgctgccatccagcaattaacttgcgctacatcgatataagaccatggcgagaaggtgggat

SEQ ID NO: 166394 - DNA, 661 bp, Zea Mays
tgtagatttctgcatatttctctgccctgtgggtggtatgtaccggcaagaaatgagctatcttggtcaacctatccacaatgacccaaatagaatcgtggtgtcgggaggtattgggcaatcccacaatgaaatccatgcaaatgtcctcccatttccaggatggtatgggaaggggctgtaaggtgcttgctaccttcaaatgactggccttgactctctggcaggtgtcgcattcagatatatacttcgcaatttccctcttcattctggtccaccagtacaaggatctgaggtcatgatacatcttgttactgcccgggtgcatagagaatttggaaaggtgagtttcatccaatattttcattctgagctcggggttcttgggaaccaccaatcggtctccaaaccatagaatccctttgctgtccttacggaagcatttgtatttatcctccttctgtttgatcatttccttaatgacttggacacccttgtcaccaatctgtgccctgactatttgctcatgtaaggtgggctccactgaaatataacttacagcaccggaggaaacgacttctatgatcagcttgcacaactcatcacatagggtggtgatccttgcatccatattcatacaattgcactatgctttcctgct

SEQ ID NO: 166395 - DNA, 600 bp, Zea Mays
tggtgagcaaagcaatgaacataataagctgagggactttctctcatgattagtgattgcaatccattaaattcacctctcatattactggcaccatcatagccttggcctctgacttgctttaagcttagtttaagttttgcaaacatgacatcaatagaagacttgagggaaatgatgttgtttctgcaacataaaccaaaccaacaaatctctctttgacaattccacattgatcaacataccgcaaaacaatagccatttgttctttccaagaaacatctctagactcatcaactagcaaggaaaaaacatcagctccaagttcctcaagaatagaatgcaatatttcatttgcaaagcacttaacaatatccctctggatttcaggagccactaaaagactattagctgatgcatttttacctgttaccttacgcaattctggattttgctctgttgtgtaatcacgaaattccctaaaatttcctttgttgtaagacttctcagattcatcatgaccccgaaaagacaagccttgcttcactaatatcctagcgacattaatggacccatttagatgagtcaaatatgccttct

SEQ ID NO: 166396 - DNA, 832 bp, Zea Mays
cctggaccttgagaactctcattagatgcccacatcatgcctcccatctccagctcttgtgcactgagtttttctagcctcttgtgctagattgataatccgagtgggcttctcggttgtttgggcatattgggcttcttaagttcaaatttagtacctgtactatcgttagctgatttctctattgtttgggtactgctagccgaagtatctaatacttcctccggctctgtaatgcatgaatttagatctgaacttttggcttttctattatacttctttgctacataaatttgcttgaccattcgatccttattttgagctctagatcgattcttataaataaaacggtctttgtcgtatggtcgctcctcaaaatcaaaattgaaatgagatgaatattctatgttatgtggtctaaaatatgaagaagaataagcatttgaatcattccagccccaagatggataaggatgaaagtacgaaggagctgaaccatattgcattggtattggcagcccaaaaggaggatatgttgctgatgcatgaaactcttctccccaatcttgatttctagatttacgcttcggaagtgattttgatggcttcaaaggtgctctagatggcttagcaatgccagtttgatcaacatcttttgccttaatttgctcatgatatttagccagaagttgctcaaaagtaaccttcggcctcttacccttttgtttatcatgaccttcacctccaaaacatttacatttaggcatacctggtgcaccatgccccatggcgcatccggtcttattagcctttcttttgtccggagcctttc

SEQ ID NO: 166397 - DNA, 559 bp, Zea Mays
cgtgctcccccaacttcactcgcgtctgcctccgccctccgcccaaaactcaatccaatccagggccaggctaggccaggccaaccaaaccctaagccctgcgccatgcctagcgcttgtggcatccatgggctgaccgcgtcatagtggggagcccgcatccggagctagggtcccgtcctcggcgacaccgccatggagtgggacagcgagtctaacagcgctggcagcgtcgacgccggcaataaagagcagaaggagagggaggcaagggtggaggtggcgacgtcgggggcgccagtgggatgttcacgttcgcgattgaaaggcatgttgtgcgcgtccgggccctgcgagctcgtcaacatcaacgcgctcgagcccgattgccccatcatctatgccaatcgcttcgaggcggccacgggctaccacactgaggaggtactaggcaaaaattggtcggtgctatcttatcccatagattctttcatttcaattcgtcactcagtcacgagtcgcgggacgacaagccaacaaggggtcgcgacgaaatctc

SEQ ID NO: 166398 - DNA, 772 bp, Zea Mays
gcgggagctgtggttgcagcggcggagaggcgaagctcctcgagaagcagatcgttcttggcctccgcaaggtgggaaacagcttcatgcgggtgaggatgggcgccacgcgatcgaagcgaggactcagaccacggaggaggttgagcacgatgctctaatcggtcatgggggccccgagggtgcagagagcgtccgccatcatcttcatctgacaacagtactcgtccacagagagatcgccctgaacaagctggcggaaggcggtctcaaggtacaaaatccgagtctggcagttgccgatgaactgagcctcaagggcaccccagatacggtgagcagtatcggccgacacacgaatgatgtcctgaagctcggtcgtgagggtgccatggatccaagagagcaccacttcgtccatcaggagccaatcctccgtcggtgcagcgaccgcgaggaggacgtggtcggcgagggcgtagcggcggagggtctgtaggacctggtcgcgccactgaggatactgagttgagttcagcgcgagaatgtcggtgacggttgcccggatgctggtgagggccgccgcctgggcgtgaagagaggcacgaagtgtcgaggctgggacgggcgtgggctcaaaagtgtcggcgctgtgacgagcggacatgggagaaccatccaacatgcccttgcgagcgaggcgacgataggtctcggcgtactggcgctcgatggcgtcaacaaccgcctgttccttctcaagggcacgggc

SEQ ID NO: 166399 - DNA, 364 bp, Zea Mays
aagaggttccctctcaggaccaggacagaccgacagagagtgtgtacctttaatatctgagaccctatggggggtctccaaagcctgcagaaccgggtgctgttttatgacttaggaattgttttgaaaagattataggtgccagttgcccaactcagaaactgtatttgctcgcagccacctattggaccagaacgggatgccttccccattaccaactatgaattccacagcaaccttgaaaataacctgagcattttgagtgatttgaaattttgaataggtaatcctgcccaaggcgagaactgtctgtcttgtcaagacaaagccacctaacgcggagaggccatcctaaatacaccag

SEQ ID NO: 166400 - DNA, 659 bp, Zea Mays
ctcttttgcagtctcacggccgaaagggtacgagaccatctgggtcgttggatcttgctctaaccgcccagattaggcgcacacaatatgaaccgatatgtgatactgaccgctagatctaaggttgaaggctcacattcctcggaccgaaggtgtacaccacagatgatctcgccagtccaaatactatcccatggttctaaacctctcacacctccatctaaccatggttgtttatcacgagattgacgtcactggcttcttcttcctccccgactaccgcactacgatcgcatgcactaggaggattcagacccagcgagcggcggactagtggccctagatcaaggtttggagcatggacaaaacttgcgcaacacagaaatgatggcgaactaccaggtcgcgaccttaccggcgtcagtagcgtgggtagggtcgcccacgggagatcagtgcgacgacactccctggctcaccaatggcggtgcgccggccctccgactcgatgatgcccgagtcgaccgctatcgtacgggaaacgtcgcggaccgcccctgcttgactctaccctcggcgtcccgcgctcacctcgcacttcgacggtcgcaccaaccctctgtcctctcctttttttttctctctctcctatcgacagc

SEQ ID NO: 166401 - DNA, 753 bp, Zea Mays
ccggatcgccaatcgccgagtcgttgccacgcgcgcccctttcttctctctctgcgccatcggcctgccctgtcagttccgctccctctgtgctcgccgtggaccggcgcgtgtgcactcgcgcacgtcgccggatttctcggacacgatgcccgcccacgcgcccagctcccttcttagagccctgcttgtgccccgtgcacaccccttgcctcatttcactcagcttcaccctctctcgcgctctgcccacgccaccagccgccgccggagacccatgcccgcgttcccgagctccgccccgaggtgagacacccgtccccgtgcccaatttcccctattgagccatgtgttcggccaatttcatcttcgccggtgctcggccgcggcggtccgccgtgctcgcgcggtggcatgtcgatttagcccggtctagttcaccggagtaggtccctgtgtcacccctgcctctgctaaagttagccaaggccttagcgtgccttaagccccctccccgtggctagaatggctcaccggagttactccagcccgtttgaggctttctcaccgctgttctcccctctctgcccatggattcatggcctcttccccgccattgagttcgtcgtggcgccctctccctctctgcccaactccggcgaccccggagccaccctagctcacgccagcctcaacttcggcgacctcaccaccgcggagaggagcggcgccgccctcagccgtctatttccc

SEQ ID NO: 166402 - DNA, 756 bp, Zea Mays
ggtttctggccgttggatctaaatcaagcgcccagattacattcaggcgttgtaacacaattgcgctccctgtgaccgtcggatcagagatctggggccgagatccaatcacgctcgcctacccgctgaaccatccgatataatctaacggctctcatttaatgtaccgaagcggtacgcttgccctaatcgtggtcgtcaccgaacagatcgatggcaaccgtttcaccgcgcggcatccaatccaggccctacactgccgatcggacgacgcgcaatccagcttcaaccctaaggctgggtgacggcggtggccgtgcccctacggcggcgccattgatgcagaccgcaattctcccagcccgcacgccaagacctgacccaaactgagctacgcagagagaggatggaaccgaactcacagaggggcactcaccgacgaacggcaactcggagattcccgaccacgacgcggcggaggcgatacccgacggcgagcaattccgggatccccgttcactaatccagcgcgccgaggccaccagcacccttcctgcgccctggcgaaaccactagacacggcgcagaggaagcggcggcaatgagcgcccggttccactactccgacccgcggcggctctgctcaacaatggtggcgtaggctttccgcgcaatttgaggtggcggctaggggtaaacgacgcaaccgtggcgagggttagtatttatagggtcccgggattccggccgcacctc

SEQ ID NO: 166403 - DNA, 660 bp, Zea Mays
ttgttcttgattctgacttcattcagagcttgataatcgatgcacatcctcctagtgccatccttcttctccacgaacaagacaggggcggcccaaggtgaggtacttggtctgatgtaacctttctctgacagctcatctatttgcttcttgagctcaaccaactctggtttagataccttgtaggctcttttagaaatgggggcggtgccaggaataagccctatggcaaactcaacttttcgctcaggtggcatgcctggtaaatcttttgggaacacatccagaaattctgacacaaccttgatagtctcgagtggatctgcctccttgctatcaatagtcatctggtgacaacctcctttacttagctcgggtgagactagctcagtcaccacttcttctcctagtggggacaccaacttaattgtcctcttatcacaactgataactgcttggtacttatctagccaatttatccctagataacaactattccctgagtacccattactatgaggttagcggggaactatatcccccttatttccacacttacattcaagcaaacactatcggctcgaacttttccaccgtctgagtcaatttgaattggtgttgacatggttgttattggaagattatgtgcttctacccatg

SEQ ID NO: 166404 - DNA, 647 bp, Zea Mays
tcaaacaacgagcaaggaatatatcaatctcttttagtgcacgtcccttatttatacacgacttgcacaaaacgcaacatgttcggtaccacttaataagaattcgaatttgtggttttggtatttgatgtaagttgggcttgtctttttgttgaaaaatcccctttggaatcaaacaacgagcaaggaatatatcaatctcttttagtgcacgtcccttatttatacacgacttgcacaaaacgcaacatgttcggtaccacttaataagaattcgaatttgtggttttggtatttgatgtaagttgggcttgtctttttcttgaaaaaatcccctttggaatcaaacaacgagcaaggaagatattaaaacactaggaatgggcaaattttgtgatcctatatccattttgccacttttaaaactttattccgccctttataatatgaaagttctttcataggagattggtcacaaaaaatgacttttatattgtaattaagctccccctatatacattaatacatatgatgaaaatgatattctattgatattagcataaaagtaaaacttatcaatagtagaagggtaaattaaaacaaacatgattttaatatatacaatgcatggagaaagcatgtaagag

SEQ ID NO: 166405 - DNA, 431 bp, Zea Mays
aatacaggcctattagtttcatccacagttttgctatgctggtcaccaagctgctggccaacaggttgggtccccgtcttcatgagttggtggcagccaatcagagcgcttttgtgagagggagatcaattcatgataactttatgctggttcagcagtctattaagtcgctacacaagagaaaggttacgggtctattcttaaaattagatatctccagggcgttcgattccgtgtcatgggccttcattattgaaattcttatccatcttggctttggtccaatctggtggaatcttatttcctccctaatgttcatgtattctacgcaagtacttcttaatggctcgcctggtgatcgtattgctcatcggcgaggccttcgtcagggtgatcccctttctcctatgctgtttgtgatggttatggac

SEQ ID NO: 166406 - DNA, 363 bp, Zea Mays
aggaagaatccgttcaatccatatgtggaagtcatgactcttcatccctaagactcgtagagtagataagttcacccctactcaggttagctgcatacccatcagggaacatcaacatcttgatccactgaagtacttccttcctctgggccgtacttaggacgaaattggccttaggccttctccatgtctttccaccacttgtcggcttcatctcttggtttggtatatcacataacgctgccagatccactcttgcctttacgttatcctttgacttatcaggaatgtccataattgttgcccaaagtgccttggcaacattcttttcagtgtgcatcacgtcaatgttgtgtggaagga

SEQ ID NO: 166407 - DNA, 912 bp, Zea Mays
aactcagtgtcatcagcggaaatcaaaactctgtcatcaggagcgccgacctctaaggcgacttcctgacccaaagctcgtgccgctaccatgcaaccaaaatgcggaggagaagaccctacatgaacatccatggaagtatgagagggagaacccactcggacaccctcgggggctgggtcatagctcgcgctacccatccgagccggatcatctccggcaacaccctcgggggctaggcaaacgctagcgccatccttgaggaccgagctctctgtagcagccacctctaaggctgaaggaccttcaaccacttccatggaaacagagcaatccagatcagcctctcgactcttaagaccacgctccaaggtcgacgaggcacgagatgctgcttgggataactctaacccggcattaggcacatcagcacaaacttccatcattccaccatctacaggctccgacaacagatcttctgggaccatgtcttcgagagtctgatcaaaatttgccagagacaattcttgtagaccaacgagagcagacaaagctagagaaggaacaccactactctccccgctggctatgtagcgccggctgttcttccgaatcaagggaatttcctcctcttctttctcatcttcatcaataatgcgaatagtacacccattgggataaactttggccggattacaccccattgggttcaacatcatcaaggtcacacccattgggtgcagcatcagtcgggtcacacccattgggatcagcttcagcaaaaatcggcactggcacttcctcagcagcaggagcagaagggccggcatcctgattcaagcatgacactcgccgaagacgtctctttttctttttcttcccctcagcaggagaagttggatgattggtccg

SEQ ID NO: 166408 - DNA, 1111 bp, Zea Mays
gtcaccaccaaccttgatcaggtataaagtcagttacccgctgttcttcagcaattttaccttgttattccattacttttatacccaaccatcctatttatcaacctactgtcgtgaagatcgggccaccctagtaccaaatataactcggtacatatcatctggtatcaaagcatttgttgtcacggtaggtcttactgtcatccacttatttatcacattgttcatccatctcatattttgttttgtcctatagtccaaagccacaaaaaacctataaccctttggcagtactgttaccttgtgttgtttaaagttcctcaagttgctagttaccaccatcgtattcatatcgtgtcattgcatttgatctcggcaccctattagtgttataaaaaagagagaaagaaaaaatagagaagagaaagaagtcaaaaaaagtgaatttttttgaaaggggattgtgttgcagtgtgttgctgaaaattcagtttacattgatttggtgagaatcattccagcaacgatttcatatcttgtagcacgtcaacacacttggttgacagtaccatagcccaccttgatcggcctcctatagctccactaaaaatctgaaccgggacgtttgacttgtgatcctttcaatcgctctaccacctctgtcgaagttgtcacaccggcaccatcacggtcctagagatcaggaaaaagcttgggtaagtaagaggtgagatcgagtgttccacaaatactttcatattctactttctcttgcttccctctaacatggtaggatccaattcaagtgttcacggagagccccggtttcttgggctaaattgcatcagatggccgactcactctagggggccatggaaaggatgttaaatgaacgtttgtccatgacaggaggtcgaaggctacatcatcatgatccagaagaatttaactgcgaagaatccagagatgagaattatggtttcggccatgaattcgatcccttcagcgatggccgtagaggttatgctgatggtcgccacactaatttcgataatttgcgtggaaggcgtcatgcacacggacgccgagtaagatttgaagacgaggagtc

SEQ ID NO: 166409 - DNA, 842 bp, Zea Mays
ggcctatcaagactaccttgacagtaaaagagaccaaactattcctagcatgctcaaaatggatattgccaagagactggaattctggttctggtttctgcatacaggtatgcatccagagatcctacagacctgcattaacataacaagagtccctccaatgagcatacttttccaaatgttttgaactgcttaggttacatatatttctgcatccaattaaacatctcaaaagtcaacaaataagtatttctttagtagagatcaagggccatgagtataagaggcaggctccataaaagttttaataaactcttatgcggcctacaaccacgacctttgactctcgtattactctgactgtagataaccaaactcacacaagagtaatcttagagagcggggctaaaatgagaagtgtgaaatactaaaagaccttgaaaaagttagcacactcattaacaaatggccagatttttaccagttcttgattgaggcacttaaattgtacaggttaaaaacaatgagtataagtgggaggtggatccgagcacgaggctacagacgccggactccgcctcatatatcaccagcagctccgcgatgttgtacccttccagaaccacaatatgcacctgcaaatttagcaagcctgaatcagtcgatcagaaatgacgtcggtgtggcggcatccacccgacacgagagaaactaatccagctaaatttccaacatagatgccaccatttggaagggtattcccgttaaatagaaagacacattaaggctatcttcactcaatttatattaaaatgtttatatagtagtgcttccaagatttc

SEQ ID NO: 166410 - DNA, 364 bp, Zea Mays
gggcgcatagtgggcctcgcccgggtgggacaaataataactgaagtgacgacgcgggagatagctgaaaatctcgaagaatattgaacgtgtataccgatggtgcgtgtgtcctgcagagggatcaccttgtgtgtccgcagagggatcacctgaactctaaagacgcgtcctgagcacgaccgagcaccggatcactcaaatgataacttggagaaggaaaccaagcaccgaaagaataggcatacttgtagcaacagaaagtagactcgattggactcaatgatctataaagggatgtctcttcagtcaactatataaggctgcaaaagtacccctacaaaaaagagagagcactccatta

SEQ ID NO: 166411 - DNA, 709 bp, Zea Mays
caagaaatccaaggacaacagcaaaatccattaatccacatggataagccatttaaagataaggttgataaaatgacgtcatgatccttggagaagggggtatgagactgactagaaatgagagatttaggcagatcaacatccgatacttgagaacgggttatagcagataaccagataatagggtagaatcattaaaggatccggagatttggatgataaggccacaacatgattcacagggaaaatgattaccagattcggacaaaggagaggtaagaaaacaagatctgctaggatgagcagcagaaatgctatgaagattcaggacaggatctatggaaagaaacatggccttgatagggtttgtgcaacttgacaccaaacaacaatttttttgatgtaacaagtgcacaaggagacttgggttggtctagcggtcaagctatggggatccacaaaccgtgcaggtgtaacttcaagggtagaacacacaaggggtagagaataccaacataagcatgattttttaagaggtttcacttgctaaactcaaggttgtttggggggtcttttcatgagaaggatggacaacatttttttgcaaaaagggttacaataccacctagatagcaagacaagagaaacacataacactacctaacaagacttaccaatctgacacgaggtaaggtatttcttatagttc

SEQ ID NO: 166412 - DNA, 487 bp, Zea Mays
agttaacgcaagtgatttatcctggttcgggacttggaaagccctacttccagtagagggggatgaggcttatattactcacaccgaggtgcctgtagtacggattacaagcacgatgggagaggagaagtccccaaatccctagaactgattgaggcaagcgccaatatcaaagactgagtggagaactgagtgttcgtctgtgtgtcctgaatgtctctctaggggaactctactatcctatttatacatgaaggggatgtctgcagtgaagcccggtgtcattgtattcaaaggagagatgtcttggagccttgcaagccgacgtgacggtgcactgcattgttgacttgtgcccgctggtttcccgctgagagccaaggcagaggccgaggggttggccatacgtccgagcccctcagggaaggggatacccatatcgtagttgttgtaacagggttcgatatgggtaaaaagcctgcttatg

SEQ ID NO: 166413 - DNA, 350 bp, Zea Mays
gaggggggcgctgcggttgggtgagtgcgagggcggggagagcgtgaatgtgaggcaggggcgagctgagggagtgtgtggggtctttacctagcgctcgggcgacatgggcgggtcgtggggacgtgggcgcgggtctgatggcgcgggcgcacgccatgggcgcggcggttgcggtggaagggggtgggtctgacgggcagggcccgcgagccagcgagagcgggtgcgcgcgagcgcgcaacggtgctgacggggcggtcccactaggcatagagagaggaagggagtgagcgagaggggcggggcgccgacaggtggggctcgcctgtcagaggacgcgggtgccc

SEQ ID NO: 166414 - DNA, 763 bp, Zea Mays
ggaagagatgagtcagtttctcctataagtgtaaactttattttagccattgccgctagaatttttgttgttatactaaaaggtttgtttccttgtactaacagggaatttgattctcaaaattgcatctctggctgtgaacgtgaccagattcatcgagagggaaaagatgggggacttaatttcttgtgttggtttcgagattatgtagataaaaatgacaatatacacccggaccttcgacaattatccctaggagtagtaactggcagacgttatggtcggtatgatgtcaatggttttagattccgttccacaaggttcgaagatgatcatcctctagcagccacgacaaattctggagttgtaactagagctgtcgatgatgaaggaaggtgactaattattatggagtcattaatgatatactcgagtacaagttttttggagataaacaactcaaagtggtgttcttcgattgtgattggttttctccaaatacaacgcgagaaaatcaatatggcatggtggaagtcaaacacaacgatagattaaaaggccacgacactataatccttgcccaccaatgcgagcaggtgtattatatgacatatccatctaagaaaaagggtttggttgattggagggtagtgtacaaagttaatcctcgtgctcctggtgatgttggttatgttgaaagtcaaatcgagcaggaagtgggggttgctgagattttccaagacgaagaacttaccagcacgtt

SEQ ID NO: 166415 - DNA, 666 bp, Zea Mays
gtactcttgtactagatctctaatgctgatttcggctgccaccactttgaattctacttcggctaactggcatggggaaccaagctgcatgtggcacaagggccttgtcattccgaagcttaacttcaatggactcatgaccatagtcattagcttctcccttttcttctcgtctgcttttatgtagaaccattcgcttgtccaaccggtcggccacttggtacgatagccaattaccggggccttcgtatctttctgatatgcgaagttgtagcagccgaagttattatgaagaccatccgctctgcccttcgtttgatagtgcagctcatgcacttggcagaaagcttcgacattaggactcataccctggcttcggagagcccatatgtagacttgtgtaacgattgcattaggtgtcaactgatgaaagtatatctcaaaattctttaaaacctctccaatcatctcacgaaaagggaatcaaagccctgccctaaagaagctcttaaaaacaacgatttaagcctcccttggctgcggaactacctcctccccggcaaaccggacaagcttgctctcgacttcgccaaagtagcccaatttttttatcataaccatgtcgtctgccgtcacagtagatttaccaaattcaatatggctagg

SEQ ID NO: 166416 - DNA, 452 bp, Zea Mays
ggccgcgaccatgattaccacgtccgccacgcctagcgtaatttgtagagaaccagtgttcagctgcatgtcggtgatatgttgtagttgccgagcttcgaagccaggaggtgtgcgtagatgtcatcaagggaaataggctcgattctggtggttagcgatgtaacaaacggatcatattcagcgggaagaccggcgagtaaatatgcaatcacctcgtcatcacgcagggtttcattggcaacagcaagttcaggggtgatgcctttgatcttccgaaaatagtcagctgctgaaagatcatgcttcttcgccgtggcgagctgaacccgaagttttagtgtgcgggccttcatggaggaggagaactagcgctgcagggattcccaaacttccctggacgaggtggccgtgatcacatcatgaagaatgtcttttgtgatggaagatag

SEQ ID NO: 166417 - DNA, 502 bp, Zea Mays
gtcaggctgtgctagcacgggtgctgttgtcagatgctgccttagtgcatgaaaggcatcctcacatttctgactccattcgtactttactccattctttaacaattccatcattggcttagcaatcctggagaaatccggaatgaatcgccgataatatcctgccaatcccagaaaactttgaacttgtcgcacggtggtaggaggcttccaatccatcacttcttgcactttctcaggaccaactgatatcccatcctgagaaaaggtgtgacccaagaatttgatttccctcaaccagaaatcacactttgagagtttggcatacaaatgatgatcacgcagtcgctgaagtacggtatgcaagtgcatagtatgcccctgttcatttcttgaatatactagaatgtcatcaatgaaaacctccacaaacttgtctagttctggcatgaacactgaattcatcaaatacatgaaatatgccagggcattggtcagcccg

SEQ ID NO: 166418 - DNA, 965 bp, Zea Mays
gcatatgatgagaagacctagggataaaataaataaggaagggggttagattagggttccaaaccttgggtttgaaaaaattgggatgttacaaacctaccccacttaaaggaatatcgccctcgagattcagacggggctcgagaaaaggtaagggtattccctcctcagagagtcctcactttcccaggtagcttcctcttctccttctctgcttcactgaaccttacagagtctcacttctgagttgcgggtctttcggactgctgagtcaagaatctttattggcttttcccggtactggagatctttttgaatctgaattgtctcttcctcgatgtggttctctggtacttgcaggcacttacggagctgggacacatgaaacacattgtgaatatccgacatgaattctagtagttcaaggaggtatgctgcgggtcccactctgctaatgacgggatagggaccgacgaaatgcggtgctaactttcctttcatttggaaccttttgaccccacgcgtcaaggagaccttgaggtatacgaagtctccttcctcaaatctgagttctctccgtcggttgtctgcataacttttctggcgactctgggcttcaagtaacctcttgcggatcagggcaaccttctcttcgacctctctaacaaagtcgggtccttccagtgtcctttcccttacattggaccacattaggggggtctagcactttcgtccatacaatgcttcgaacggtgacatcttgatactggcctaatggttgttgttatatgagaattcggcatacggcaaactagactcccaattcatgtcgaacgtcaacacacaggctcttagtaaatcttcgaggaccttgttgaccctctccgtttgaccatctgactgagggtgataagcggtgctgaaatctaacttggtgcccatagcttgctgaaggctcttccaaa

SEQ ID NO: 166419 - DNA, 959 bp, Zea Mays
gcagataggccctcctcctttttctttacaatccgcgatccccgacggtgaatggcgatagacggagcttcggtgagcttgtactggtcggaatgggcaacggctagggctctagcttggctgacacttaatttaacccctaacaatcatttccactcaactaatttcaaggttcaaggtctcattctctctgcccatggtgaccgtgcgatcaacagaaaacttgaagtgttcccggtgatctaccccggtgtagtgcaattggttgggccgatgagcttcaaggatatatcagagtactgaaacaaaggaacagagggtgggaatggacctgtaacgcgctggccacggcgaggtcactccgtgcggtgctctggaccgatttgggggaaatttcaaattggtgggctctagtggacgatttgaggcacgagttgatggattgggtgcttgactacctagcggagccgacaacacactcaatttataggatccggggacggtggtccgtgaattggagatggcgcggtggcgaccggagagggaaggagttactggcgcaagcaattcatggatgttaccgtggcaagaccaccggcgacgacctggctatctaaggtggcttagtgcaacgtggtaattagcctgaggcgtggcacggccgtggtgaagggcgcaaactccggtgatggccgcttggccacgtcgctggcgcaagtgggcacgacataggacaaaacagtgctccaagttcatccgtggtgaagatcttttcacccggggatcgttatccatgtttaaccaagcatgaatcgcggcgttggcatgaatccacgtgcaaggtcaccggcagcgaggtgccctaaacttggcgatctgatccaatcattgtaccatcgcgctagtctttagtggttctgatagaacgatttgtagcgcttcgttcttcaatttttgtg

SEQ ID NO: 166420 - DNA, 432 bp, Zea Mays
gtgaattatcatgtatacttcaacagttcacttaaacaaatgatgaaaaactgaaaactggaccaaataaaaaaacctacctccatctagttctgtttgcgcctgcagttgaatagcttgcactgcagacactggtacgggaaaaaatggttaatgaaagaacagctgaacaaattgatgactagaaatggtgaccgatatctaggccgacgatgcaaggagcttaatggagtcaatctcagccacaatctgtcttacagactcacagaacatgtcagtagcaggaagataaatcaactcgctgggactgggaatgccaatcattcaccagaaacaaacatcagcaagatgatccgccctgccactgctgttagaaataaacccggcgtgtgtgtgcacgacgccggtgtgtgcgtcgtgtttgtgttgtgc

SEQ ID NO: 166421 - DNA, 781 bp, Zea Mays
ggacatcgtcgggccactgcctacggcccaagggaacctaaagttcaccttcgtcgccgtcgaatattttacaaagtggatcgaggccaagccagtctccacgataacaacgaagagtgcccaaaattcttctggcaaaacattgtctgtcgcttcggagtcccattcgagctaatagtcgacaacggcaaacagttcgatagccaagacttcagggaattttgcagctccatcggcacaaagtcagtcttcgcctttgtctaccacccacaatccaacgacgtcgtcgaacgcgccaacggcaagattttcagcgccattaagaaaaaggctccttgacaacaaaaagggcaaatgggcggaccaattacccaaagtcatatgggcactgaatacgacagagtgacgagcaaccgggttcacaccctttcgcctgatgtatggatccgaagcaatgacaccgcaagagttaaagcacgggtccccccgaacaaacaaatcagccgtccccgacgtcaacgaaccgacctccaaagatctcatcgacggggaccgcgtcctcaccccgcaggccctaaacaagtatcaggtctagaccaaggcatggcgtgacaacgctgtcgtcccaaaagaattcaacgaaggggacctagtactcatgaggaccaccaggacagagtcccggggcaagctagagccgaagtgggaagggtcatacatagtcaagacaaaggcatccctaagtgcctacagattaacaacttcatccgttgaagactta

SEQ ID NO: 166422 - DNA, 361 bp, Zea Mays
aaaatcttctttccactggcggcaccttaactcagccgcctgtggagaccgtttcatgttgaacagttgtgtcttttcaactgtccctatagccttaactcagccgcgtgtggagaccgtttcatgttgaacagttgtgtcttttaaactgtccctgtccttgtccctgtagaattgaaacggcaatcgccgaacacgaagcggcgacttttgactcctctttgctcctcgaagttcgagtaaacgtcaattcagttctcgatttgaatgtatttaaatggtcatcggccacatttccattcatcacaactcagaaaaaacaggcacatttccacatttccattcatcgccacaatgccta

SEQ ID NO: 166423 - DNA, 427 bp, Zea Mays
taccgataaccttcgctccagtttgatctcggacgcagcctaacttttcatcgtcaacaccaccgaagagtagtgcccctggttgatatccgcaggatatggcatattcttttaactcttctttctcaaccttcgtcaactcttgtccaattaagttttgaaagttgaaaatttcctctttcgaagcgtcttcagctatttccttctccttctcaggctctgtggccatggtttcttcggtggctgcagcagcttcttctgtggccatgtccagaagtatcttatcaatgttagaaagtgtgctttctagatttgcatcttcaacaggtttagcttcggcagttgtagcttcgggcggtgcagcttcgatagctgtagcgctctcaacagctggtgcttttgaagccgaagctggtcgtggtgtccc

SEQ ID NO: 166424 - DNA, 1034 bp, Zea Mays
gtcaatttagacaaaatatgaattttctaaagattaaataagattctagaattgtttttatataaagtaattcattttataaatcattttctctaattttccattcccctagactgcgcgcaatattattaggaaacttggggttcggtctgtaaaaatacagggcctggtcgtaattattgaacacggtgcgcggacggcgggttaatttgtaagtaccacggggtctctttagcaatccagccaaggcgaaggggtatggaccaaagatatccgttggatcgcccacggacggcatagattagattgttatttaatcgaataactctttagcacgacccatccgatcaaatatctacggtggagattttacgagggctaatccagtatcgcccgtccaatctaaacggacggtgatgaactcccagatcaaagcgtcaagaaccgacccaatcttggtcgttcgttggccaatcaacgatccgaactctatctcctacctttggcagactgggcacgacagcgcccacacccaccgcggccatgacccgccgaagaaacgccacctaacgcgcccgcaaatgaaacccggctttgaccagagctacgcatagaggacggtaaggtgaacttagcaggggctcacataccgagagtcgagttgcgtagcacctaggctaccgaacacagcacgagtctgtggtggcaagcttcacttccgccacccgccacatcacccactgcccccgtccgtagaggatgaagacaccaaccatgcattctggcgtgccacgagactttctctaacgcctcgctgaagatatggacgcaccacgatccctcatcctggttcgcactgttccccggcgaccatggcttctctcaatccagtggcatggtgaacatggcgagatgaggcgaggtgcgaagggcggctttagatatatatggccagggctacggcgagccatgggtttatgcgccatgcgcggagtccgttcgatggtgcccagcacgcaaggtcaagcggatct

SEQ ID NO: 166425 - DNA, 338 bp, Zea Mays
cgcggccgttcatccgctccacagtccgcgcgcggttggtcactgacactgcgacgcgggccccgatcgcagatccttcactcatgctcgcgcgacacttcctctgttacaccgccgcgtgggacccatcagccagactcgtcacccacctcgcggaagacttgccgctgaaccagggactccatcgtttccgccggtgatttcgcgcactcccggccaagtcttgccccggggtttcagatttggttacttggtcgtgcgttctggacccccttccctctccatttaattagcgcccgacccgagccatccttccagccgccattagtcatctccgc

SEQ ID NO: 166426 - DNA, 692 bp, Zea Mays
gtccaggtccgtggtccgtcttgtccccaagtcagtcgtgtgttcatcagtcagtcgtctgcaggttttccacgcgctgaggccaggaacgccgggacgtgaaatgaggcatgcgccaaatacatgaacctcgtgccatgtgccgacgcaacttgacacccgtggccgtcgaatgattgggaccaaatatcggttttctgtgccgtcgcgtctcaactctccagcgtacagagtactagtatgtagtatcggtttgttttgttttgtttcgttggttggtttcaatgcaccagagtccagaccgctatcgaccgcgtcatcgtcattgtgttttagtatatagttttttattatcagtctataattacttcaacgtcacatcagtttttcttttagatttttagtttcaatagacacgatgttttagtaaaactagcgaagtgctacgttgctaagatttcatttatgtttaagtgtagagtttaaaaaacaaaggcatgttggttaggtggatgtaagacatgttagctagatgaacgtaagggcttgttcgttagggttggaattggctggtatgatggcctgatccatgggtgtcatcccaacctggatcaaatatcagcccacgaagaaatagttgttcgcttagcccacacgtgtttacaaaccaggcccaatccacacgaaaaacc

SEQ ID NO: 166427 - DNA, 818 bp, Zea Mays
gagccatcgcagatgcctgggatccctagggaggtgatcgagcaccatctgaagatcaaccctgacgctaggccggtgagtcagaagcctcgcagacaatccatcgagcgacaggacttcatccgaaaggaggtccggaagctgccagacgccggctttattgaagaggtccatcacccagtgtggctggccaacccagtcatcgtccccaaggcgaatgggaagcttcggatgtgcattgactacaccagtcttaacaaggcttgtctcaaagacccgtatccacttccatgaatagatcaaatcatggattccacctccgggtgcgaccttttgtctttcttagatgcttactctggtttccatcaaatccagatgtctaggggagataggaagcataccgcttttgtaacagcggatgggctttactactatgtcgtgatgccctacggtctgaaaaatgccttgtcaacatttgtgcgggcgatgagtaagagttttggggacctgatcagggacaaagtggaagtatacgtagatgacatcgtagtcaagaccaagagagggtcgaccctagtggaagacttgaccctagttttcgacaggctgcgggcaacccgcacaaagctgaacccggacaagtgcgtctttggtgtctctgtagggaagttgctggggttcctggtttcgtaccggggcattgaggcaaacccggagaaaatcaaggtgattgaagcaatgcgggccccgacctgtatcaaggacgtccagaagcttgcagggtcattacccgcccttagccgcttcatttcgaggct

SEQ ID NO: 166428 - DNA, 597 bp, Zea Mays
acttgcccttttcctcttgggtgctgtatcattctccgtgtctttaacctctccatgtgttctacaccactccgaccctaccacctcccctcgcccatcatgcgtagattctctccttctcaatatttcatatgtacattcttactgttacttgcaagctagcttttgaatatttcagttttttattcatattctctctttcccccatttcattttgaattttgccgacctgctttgcttctccttgcgtaaaaactcgctttagcttttggtttgtaggattaagaaaatctagctagctactccccgagccaaagatggagcacatgattgccaatagccacgccacggctacaagagcctaaaaaatggaatattgttgggtggatgcagtcacgcggcaagtatcttcgctgtccactgcctctcacgtgatcgcttttgcttaacaaaattcaaagaaaaatatgccatatggatcgagatgcctttcaacgactggtagattttaattacctgatctacgcgtagcatgcacaagcttagcaccacgcaaagaacagatacattgacatttcgccaacaaacctagctgcc

SEQ ID NO: 166429 - DNA, 476 bp, Zea Mays
tcttctttttgacggacaagagtaatacaagagagcgtgactgacatgtctttggatctatcagtgtgtatatcaatgtgtaggctggtgttggctcaccgaggcatggtacctagtgtgcttcaccatttgtgaaacagcacctgatacatcacgcaggggccctcctctctacaaggcacttttcacggttttggcaagggtctacggcaataatgcggctcatgggcatgtgccacccgaaacaccgcacagcacagcacagcacggtggacgtaagaacaggacagagtcctgaacaccggatagacatagacccatgacaagtcggtggccgggggcgggcacatgtgttttacacatgcatgcagctcattagtttgttactaggtggatacctttcatctatgcacatgttcaccgtatgcaatgcaagtgcaacgatgatagattcagattagatagatagagcacgc

SEQ ID NO: 166430 - DNA, 1316 bp, Zea Mays
atttgtgttcggtggggaaattagtgcggactcacttcgaatggtgagcctctggaactcgagcgatggattaggcttgcgccctagtccagtgtagtgttgattgtagtattgctccagaacgtgttacaactggtgtgcttgtgtgttcagaaaagaggggggtccttcccttttatagtttaagggctggactttacaatggggacatgtattctactcgagggggctcggccagaggcccttgggtagcgtaggtcctctgatgatgtctgtaaggtcatgcgtagccgtactcttatcatggcgtattgtcccgtccactcatcgtacgggccctttagctggtcttctgctgacatcctcatggtaatgtgcggggggtcccgcaggtcagtcgtatggagcagccatgcgtcaagcggtcttgtctatcgtcacgagcctgcgtcactagtcggtgtgcgtaggtgtacacccgatattggtgtatctgctgcgcactacccggtattcaggtcaatgtagaagctccgatgctgaggtactttatgaatagggccatccggtcccttgaggctatgggagtgcgtctggggacatacttggggaggtgcagtcatgtcgatagcggccactcggcgtgccctcgacctaccattcaggtgactggccatatcctagggacttcgcaacatttgacttgggtttccgtcttgcttctctttcttggttgggacttgggtggtcattttgcctcacgaactttctcgacagggacccggtcggtcgctccgcctcgcggacttgctcgatagggacctggttggtttctctacctcgcggacttgctcggcaaggacgtggtcggtggctccgtctcgcagacttgctcggtagggattcagtcgggtgctctgcctcgccaacttgctcgacaggaacctggttggttgctccgcctcacgtatttgctcggtagggacctagtcgattgctccacctcatggacttcctaggcagggacctggtaggccgctccgcctcgcggacttgctcggtagggagacttcggtcgacaagaaggtttacatgccttattttgggtaccccgttcctaggtacccgatagcagcctcgagcccctgagcaattcatgtgaattgcttatgggtttattgcgcagtttagggatgaacccttcctacgatggtcgtcatgcactgactatgggtccacttttgctcagctattaccgacgattgaaatattgggtgcacgcgagcacatatgctagatttgcccctgagtccccg

SEQ ID NO: 166431 - DNA, 916 bp, Zea Mays
ctcaggaattggagcaaggattcccctaggcatcgaaggcaaggatggggggaagggagcgagacccacctccctacacctcaggaaataccactagatctagcccaagttctagccaatcagactcgactcattgaggtcctcaccaaaagcctcgagaatcagcgcccgaatggaggaagaccacatgacaggatgggagaatttctaaggctcaagcctcccacgtttgctagatccagcaacccactcgatgctgatgattgactgcacacagtaaagaggaagctagaagccattggatgccctgaagatcagcgcgtttacctggctgtccaccaattatcttggatgactctatcctggtgggacaccttcagtgctgttgtgagaaatgacacctgggcagaatttgaggctgctttccgtgagcatcacgtgccctcaggaatcgttcaacttaaggaagaggaatttcgagacttgactcaaggaggacgatctgttagtgaatacatccacaaattcacggagcttgcttgctatgcaccagatgatgttagtacagaagtcaagaagatggtccatttcctaaaagggttaaggccggagctcaaaactatccttgctagctaagacttcctcagcttctcgcacctctcaaacacggccatctaggtagaaagagcccgagaagaagaaagaggtcacctcaagagaaaatttcaaattctctgatcttaacagcaagacaggcactagaagatttgatcttttggattccctcccaaggggtcaaatttcagtaagccagcaggatctactccaccgcatttcaaccagcctagtcaaagttccttttgcactcagtctgttgcaagcaatcaacctccagccaatgcttgttggcactatg

SEQ ID NO: 166432 - DNA, 622 bp, Zea Mays
gctcttactaaggagcagggtgagacacatgtgcagtggtcaagagatgatgagaataccatgttcctcatcctggcagcacatagttcctgttccaggaacttggcaacagtctcgtccccaccttgtcgaatccttccttaaatagcgtatcacattccttgacccattaacctgggtacatcaccccttaccatataagaccccaatttgacgatcaactaaacctaaagatagaaacatcgtacattggatgtgttctttcatgaactcaactttacaaagtctaaactgaactctaatttccaaatcctatcacaaccttccataaaataaacttatgtccagacatcttaaaccaagcaggtgggggaggggagggggctacgtcgatcaagaaaggtaagagtacaactgcacctattgcacaagacatgtccctgctgctggtttggctagggcagcagcaatcccaacactgccttctgttgctgccggttctgctaggccaagcaggcccattaagcgcagcccattgcacccagtcccataacagttgcacagcacaggaatggaaatggaacacggtaaaaagaaatattgccaggatacaccaaaaaca

SEQ ID NO: 166433 - DNA, 935 bp, Zea Mays
ggcgaactggtaagagaagggcacatggagaacccgaatctcaccaagggccaccttttcgcggacgaagtgaatgtcgatctcgatgtgcttcgttcgcttgtggtggacggggttggccgtcatgtagactgcactgacgttgtcgcagaagacaacagtggcggagggtagctggatgtggagctcctggagtaactgtcgacgccagcaacactcggccacaacatgagccacaacccgatattctgcctcggcgctggagcgggacaccgtggtctggcgcttggaggactgggaaaccagattgtcgccgagatagacgcagaagccagaggtggaccgtcgagagtctggacagcctgcccagtcagcgtcagagtaggcagtcaacgtgtcgacagatccggtgccaatgtgaagacctaaggagagagtcccctggacgaagcgtaggatgtgcttgataagcgcacggtgaggctcgcgcggggcatgcatgaagaggcacacctgctgaacagcataggccagatcaggacgagtcagcgtcaggtactgaagagcccccgccaggctcctgtactcatatgtgtccttctctgacagaagaaccccgtcggtcgcggatagcttggcgtgagtgtcaactggtgtcagtgtcgaatgacactcagccatgtccgcgcgctgaagaagctcgacagcgtactgttgctgggagaggaagaggccatctgaggagcgtgtgacaacgatgccgaggaagtggtggaaggcgccaagatctgtcatggcgaactcggagctcagccgagccataatgcgctgaaggagggccgaggacgaggcggtgagaacgatgtcgtcgacgtacagcagtaggtaggcgaggctcgtcccctctcgaaaaatgaaaagggacgtgtcggagg

SEQ ID NO: 166434 - DNA, 815 bp, Zea Mays
atcaaccaccaaaattaattatagaaaatggttaaccctatttccctttcaccccttcatgaatcttcgtgatgactccacgtgtcacatttgattccctccaaaacacgttgttggattttgagtccaaacccgcaaaaccatcactaggtggttttgaggctcaaccaccaaacttcgcaggtactgtactccatacacgcccccacatactgaatgtgtttctcgctagtccccaattgcggtagcaacatgatttgttctgccatgtcctcgcacctgctgatacccctagatgtctaccgtcacagctagtcatctagcttctctagttcctcaatcaagatccattgctcatccttcacctctcctgatccatcgacacaaactcgcatgaccttcacatttttgatgtcgaccatggcctcagactccacacctgtgcaacacaagccaatagacatgttgcacaaactcacgtcccagagtccacacgactcaacccaagatgccactccattgataatcactcatcacaaacctgaaccataagggcacatatcaacctcttgtgtttgcaacactaatcacttccccaattttaagtgtaatgatcctctcgacctacctattgatcatccctagacatgatcatgggccacctgactcgaccaaaccgacccgacccgtccgaaaaaacccgacccgatcaatgcaatgggcgagtacatgccataggttttgacccacaacaatccacgggttgggtacggaccatgatttttgacccaaaacccgaccgaactcagaaaaat

SEQ ID NO: 166435 - DNA, 309 bp, Zea Mays
aggcagagacaatctagattcaaaaagatctccagtaccgggaaaagccaataaagattcttgactcagcagtccgaaagacccgcaactcagaagtaagactctgtaaagttcagtggagcagagaaggagaagaggaagctacctgggaaagcgaggactctttgaggagggaatacccttaccttttctcgaaccccgtctaaatcttgagggcaagattcctttaagtggggtaggtttgtaacatcccaaaaattcaacccgaggtttggaaccctaatcccccctatttatctctccctaaac

SEQ ID NO: 166436 - DNA, 611 bp, Zea Mays
tgacgatcgaagaagggctatgtacgatggtttcaatagtgacaccctagggcactttgatgcatgggttaaggttgttaacgaattcgtggcgcgcgcatttgctaacaagcctcgtatggtgaagtgcccgtgtactaggtgtcgaaacctgattcgactggacaatttttccctctccattcatatttgcaaatatggctttaagccagaccatctggtgtggcgcgggcatggagaggtggacgcaccttcggagtcgaacacagacgacaaagtagaccgaatggaggacatactagatgacatctgacatgagtatccaaaactgaagaccgacggacccagccggaggaagtgcaacaattttacaagttgctagaagtcgcggatgcaaaagttcatgagggcaccaaagtgaccatacttcaggtagtaacacgacttatgacgatgaagtccaagtacaacttcttaaataactgctacaacaatatcatgaagttgattattaatctcctcccgtcgatccataagatgccagagaacttgtattagtctaaaaagattgtctaaggtctcggcatgaactatgagaagattaatgcatg

SEQ ID NO: 166437 - DNA, 1218 bp, Zea Mays
catagattttgtagaaagtaaaaaagaagcagttgtgccagtattaatgatgaaattattgtatatgatgtaatgcaagatgcgaagtgtagcaattgtatatgaattatgcactatttatttattgagtatgaattcttaaaatacaagcactatttcgtcacttagaaatcatggcatccctgagattagggatagaacttacagaggtgttgtatgttccatgagtttcatactagaattccatctatctgagatagcctgtaggaccctggacatgtgacttatgtgattatatacgtccttcctaaggaggggacaatttatgacgtccttcccctaagagcaccctgcatagtaccagctcttcaactgaaaaggctctgaagcgcacctcactatcatggtaacaccacagagtttgctggtaccgtgccgactaaattaccacgtaatgtcgttcttcctcgagtgtgtcaatttcttcgagccgagttgtctcttcttctgcgatgtcttttaacatcagcctttgtgccccaaatgctaaaacagtaggtaatactgccttcgacccatacaccatgaagaatggcgtgttgccctgtagtgcttgactcgattgagttctaagactctagacaatgtatgggacctcctcgatccatttcctagctaacttcttgttcttgtcgaagaccttttttcttaatgcatctaagatcagaccattagcccattcacttgaccattggtcttgaatgtgctactgaagcatacttgataagtattcccttctacccactgaaatcaaagaattttacccctgtgaagttggatcccaagtcagtgatgatgctaacgggcactccaaatctgaagattatttcctagatgaactctactacttttgctgttgtcaatgatgtaattggcttgtactcaatccatttggtgaacttgtctatggctactagtacatgtgcacttccaccctgtgcttgcttgaatgacctaatcatgtccaacccccagcatgcaataggataggaaacatggatagtttgtaattgctgcactggaaggtgttgttgcttggccaagaactagtagacttcacatcttttgactatgtcttctgtatcttgcttagatgtagaccagtagaaccctgctctaaatgtatttcccactagtgtcctcgaggttgcatgaaca

SEQ ID NO: 166438 - DNA, 371 bp, Zea Mays
caccagtgaatcttcgtataccatcaacctcttaatacccagtgatatggcaatgttcaatccgtggatcaaagcttcatattctgctgcattgttagatgctgagaataacaactgaagagcatatttgagttgttcacctccaggtgcaatgaagaggatccctgcgcctgccccctacagcttcagcgagccatcaaaatacatccgccacacttctgcagtctccgggttatctggtacttgttgctcggtccactctgatacgaagtcaactagtgcttgagtctttattgcagtgcgaggccaaaactcagtgtcgtgagctcccagctcgcaggcccacttggctattcttccaatggcttctt

SEQ ID NO: 166439 - DNA, 1066 bp, Zea Mays
aggatgcgcctgatgccttgagtcgcccttcttcctcagttgcccctgcgaaagacattgccaaatagagatgtttcgccgtagtgacgtgtttagaagatactgaatgtacttgtgaattatatgtgtgtgtgatcattgtgcttggatattcggtggatagagcactagaatgtgctcctggtgctgacaactataacatttgtctctgttgtcaggatgtaatagtcatcttgaacgattgtagaagtaaatgtggtgtgctagttttggagttttttttcctaacttatgtcaatcgcttggttggtaaggcatagtggttgctctaagatgagtagacatgagcatgttgcaccgtcttaagtcattgccgacttaagccgattgctccgttagtagggtatagtggtcacactaagtcgagtaagcgcgagcatgtcgcactgtcttaagtcgtcgccgacttaagccgattgctccgttagtagggtatagtggtcaccctaagtcgagtaagcgcgagcatgtcgcaccgtcttaagttgtcgccgacttaagctgattgcttcgttagtagggtatagtggtcaccctaagtcgagtaagcgcgagcatgttgcaccatcttaagttattgctgacttaaggcgattgctccgttagtagggtatagtggtcaccctaagtcgagtaagcgtgagcatgtcgcaccatcttaagtcgtcgccgacttaagccgattgctccattagtagggtatagtggtcaccctaagtcgagtaagcgcgagcatgttgcaccgtcttaagttattgccgacttaaggtgattgctccgttagtagggtatagtggtcaccctaagtcgagtaagcgcgagcatgttgcaccgtcttaagtcattaccgacttaagtcgattgctccgttagtagtgtatagtggtcaccctaagtcgagtaagcatgagcatgttgcaccgtcttaagtcattgcctacttaagccgattgctccgttagtagggtatagtggtcaccctaagtcgagtaagtgtgctggttcc

SEQ ID NO: 166440 - DNA, 522 bp, Zea Mays
gcctgttttgtggaatctgtgttgcttataggtactctcaataaggtatcctcattggaacccaacattataaatgacatcattgagcatagacatatgtccaagctgaaactgaacgcatgagcccacaagacaaatatttctgctatctaaaaggtaaactcctggggcctttccgtgtgaagggaatccatgttttatgcacattagcttttcacttgatgaattctcacttatcttcaattatttgttactaggcttcaactactcaaaaagtgaagatgaccttaaacagtttcatttcgccttattacccgaatacttgctgcgagatcatgttattttagggaattcccaatcatccttcactcattgcaaactgttgaggaggaataactatttggcagatgcagacatgcagtagcttcacacttcgttcatcggacaacagttctttgaactgagtagagtggaaggcaacttcacctaacacccatccatgacccagcttacatataggca

SEQ ID NO: 166441 - DNA, 551 bp, Zea Mays
cccgcgtccccggccatccagctcaccggagaccgctccaagcctccccgagctccgccctgaggtgagacacccgtccctgtgcccaatttcccttattgcgccctgtgttcgtccaatttcgccttcgctggtggtcggccgcggcggtccgccgtgctcgcgcggtggtcggccgatttagcccggtctagttcaccgaagtagttcccggtgtcactcctatctctgttgaagccagcccaggccttagcgcgccttaagtcccctccccgtggctggaatcgctcattggagttgctctggcccgcccgaggtcatctcaccgccgttctaccctctctgcccgtagattcatggcctcttccccgccattgagttcgccgtggcgccatctccctctctacccaactccgacgaccccggagccaccctagctcgcgcctgcctcaactccggcaacctcaccgccgcgaagaggagcggcgccgcccgtagccgtctatttccccagtctgatcccctccgtccgattcaaatcgaacgaccca

SEQ ID NO: 166442 - DNA, 294 bp, Zea Mays
tatgtgcttttagaaatcacaactttaagggtgcatgatcttttgagttaaacaaggttaactttacttatgtaagacccttgggtggtatacttggtaaattgggttaaacttagctaaggtaagtggtaggtttatttttttggggttccactgagttctttttaagtcttagggagaattgataagttctcaagttaggcttattgaggtggggtttattccttcattccttttcttttattctctttaatgtttggaagtaggtttgaactacaagttgcttttataaaa

SEQ ID NO: 166443 - DNA, 806 bp, Zea Mays
attcagccaatgaaaggcacttatcccaattcttcccatagtgcaacacacatgccctcaacatgtcttccaaaatctgattcaccctttctgtctgaccatctgtttgaggatggtatgctgagcttcttattacatgggacccaagtgattcttgcagttgctcccagaaacgtgctacgaacgatgctgctctgtctgacacaatagtccttggtattccatgcaaacgaactatctggtcaacatagatctcagcatacttctctgccctgtgggtggtatgtaccggcaagaaatgagctgtcttgggcaacctatccacaatgacacaaatagaaccatggtgtcgggatgtgttgggtaaacccacaataaaatccttgcaaatatcctcccatttccaagctggtacgggaagaggctgtaaggtaccagctaccttcaaatgactagctttgactctctggcaagtgtcgcattcagacacatacttagcattttccctcttcattctggtccaccactacaaggatctgagaacatgatacatcttgttactgccggggtgcatggaaaatttggaaagatgagcttcatccaatattttccttctgagttcggaatttttaggaacaaccaatcggtcttcaaaccatagaactcccctgctatcttgtcgaaagcattggtacttatccaccttttgcttgagcatatcatatatgacttgaacacccttgtcaccaatctgtgccatgactatttgctcatgtaaagtgggctccactaagatataactcaag

SEQ ID NO: 166444 - DNA, 545 bp, Zea Mays
gaaggatacgacatcaggcgtagactcatcttaacagacccttatcttaggacccttcataaatataccatgaggatgtatgtatagtttaaaggaaggggtacatcagcaaatggacacaatcagagctaaactcttgtggcaaagggccaatgagaaatcagaatatcatatggtcaagtgggagaacaagtgctaatgccttgtttgctatgagagggtgattctgatataccattttgtagacaattttcccttcttttaatttgaaagacccgtgaatattgattgaaatcatgcagaggagctagacgcagactatagacaatttacccttctctcagtttgtagtcaattttccttttttgacgtgttctggcgctagatgcgagctgcaaaggagctgctatattttgttcagcttttggcgtgaagaagctagcagcagcaccgaaaaaatttctgaacctttagctgcagatcatttggtttggtttcttgactgtaggatacaatagtgcatgtttatcaggcttaaaccctcg

SEQ ID NO: 166445 - DNA, 301 bp, Zea Mays
tggatacgggtccttgggacaggccttgttcaggctggtgtagtcgatgcacatccgaagcttcccattcgctttggggacaatgactgggttggccagccacactgggtgatgaacctcttcaatgaagccagcgtctagcagcttccggacctccttttgaatgaagtcctgccgctcgacggactgtctgtgaggcttctgactcaccggcctggcgtcggggttgatcttcagatggtgctcgatcacctccctggggatcccaggcatctgcgacggctcccatgcgaacacgtcg

SEQ ID NO: 166446 - DNA, 282 bp, Zea Mays
cacaaatgcgcgaagcgcgatagaagggcttttaggaactgaggtacgaccaagtattataatacgttttgcctcggtcttttgatacctgacctcttttgattcctcttccggttgaattttccttactagcgcggtgttacggttgtttatctcggttccctcggttccccgtttctcagaacggatccaccgctccccgagctccacccggcggcggtcccattctctttgccggtggcgctcccgtcgtctttgccggcggcactcccgtcctcttcg

SEQ ID NO: 166447 - DNA, 513 bp, Zea Mays
taccttcattgcacctgggacctgatacatgttgaagtagtcctcacatcgattcaaccaaattgccggttccttgcctccaaacttggggaaaagcatcttaggtacatgctgttgcaactcccttcctccttgatcctggttcggtaatgcccctcttctacctcctatatccgatgactctggtcccattccaacatcctccatctctcttgccatagcttctaacctcatcctagcaaacgccttcccgttctcctccacacgcatggatagagttgtcctctcatcggcaacctgtttcaccaagtcggtagtcaattctgactgtcccaatagctagtgatgcaccttctccatagcctcaactttccctgtcaacctctccaacatcaccatcatcttttcccaccttgcttccccttgtttagcttctgtcgccatggcttccaacaccagcctcgactgcggcgaaggtttgacaaagggcgtcgtggtgatcacctcctcttc

SEQ ID NO: 166448 - DNA, 403 bp, Zea Mays
ggaaataacgatgtgagacgactcctacacgaggctagtgaacatcctgatgctgatttgagcttgcgattaattcatctatggagccgcaatgaggagattggagcttctgtgacggtgctggttcgctttagtcacgaatctcatcgttcacctatgttttctcttcttcccttcgtggagcagaagttggggttccctgatccacgcttggaggagactctagacccttctctcaggttgttcaggctcctccgcagcccagcttgaatttggtgttccgaacaaagcagtgatttaacattgcatattacagcaaatattatatgccatcctttctcttgttagtgcaacattgtttgtttaatgaccacttgtgtagtgacattatgcccaaatgctt

SEQ ID NO: 166449 - DNA, 361 bp, Zea Mays
gatagaccttatatcaatgtctacagttttagagagagggagagagagagagagtccttcggttgtcatggtggcccctctaggtcatgtggtgtagtgctttcggtatggcgccatcagtcacacctattcctgtggcaagttcgggttgatgtccccgtggtagcatgcggcgggtcccacggcttagcctcgtggctcgatttagatggcacgctttctcctatcgtcgtggaccctacgtcgtccttctgtgcacactgattcacctattcagtatggtgccccgtcttgtcgcttctgacatatcgactactatggagacttcggtactgaggtcacctctgaccggggctgcttc

SEQ ID NO: 166450 - DNA, 557 bp, Zea Mays
gcagttttggatgctcttctgccattgagctctttgtttctggctcttctactggaccgacactagctttgactgacgcaacataaattaccttcgaagccaagggggtagcatcggcatgttcaacaatctccatcctttctatatcaagcactgcagccgtcctctccaaagaacgtgacttcggcctgcgagtcaaaaccttagctgtttttggtttaggcgcaacgaaagaggatgaaattgtcacttttctttttggcccttgctttcgggtaggaaagcagtaatcaggataaaaaaatccaatcacatcaaaatctctgtgtagtctcctcctgtcgcgagcaccaaaagcagttgtcatggcttcgtccattgccttcgcataacctcccaacagctcatcgctggtagcatcaatagcctctaaccaatcgtcattcggctcgtcaaattgacttatatagcggaaagtgtatcttagatcaaccagaccaccttcgctgggcccagcagcagtctcctttggcatctctcagtcatttacaagcagc

SEQ ID NO: 166451 - DNA, 1171 bp, Zea Mays
gccttgggtgaaggtcacttcttagacaactgcgaacatctggttcaagcaatttttgatcatgatctcagttcatcccattttgagttcttttgagaaaccccaaccaaagcaggaattctaatctgcgcatggagttttgttttgctctggtttaaacttcaggaatcatcgtctttccttcagcgcaagttttcctgcgtgacattatcgctccctagcactatcagcctactgtgcggcactaccgctccctctgatttgttattttgcctttgattttctccagatagtcgagcaagttcttctctagcattttggtgtagtcaattgacactagattgatctgcacaatgcttttatgctttttgtgtcctatggggtttgtgtttgaatttgggattaagtcacggtgttatcaagcaaagaatttttagtggctcccattcaccccctctaatcgtctcaccggtccttcatatagagatagtgcaggtccatgggttatagaaggaaggctaaccaaaggtgcaccctacacctgtacgcattttagagagaacctaagctgcctctgtcgcctttcccttgccttgttttttattgctggtgatcagaagtcagaatagagggatgaggagggtcatgaaagggcacataggacgttggtgacgcgtagatgggaggtacaacctatggttgttggggccgtgcgccatcacgtagagggcgatggcctcgcacctcgtcttggagttgcactagttggtgccatcacatatataggagaaaaggtgacatgagattgtagtgttaaaggtcgactagagcagtttgactagaggaggaagaagacacgtcacacactaggaaggcaacagcctaggagggggaggagaggtgggcggcacaccctagaaagttagaggcaacataagcataatggatctattaggctctggtaccatctcaggccttattcggttagaggtggatcgagtgggatcggaggggatcctcctattcaaatttgaatagaagggaatttaatcctttctaatccctcttcatctacccctaactgaacaggctcttaaaaggattaccatcaaggattgatgtattactgtgagccgttaggtggtttatatagagtacatggcgtagaaag

SEQ ID NO: 166452 - DNA, 441 bp, Zea Mays
ttgaagcatcgcaataaacctcaaagggtttggtattgtcaggctgggctaacacgggtgctgttgtcagatgttgtctcaatgcgtgaaaggcatcttcacatttctgagtccattcatactttatccctttcttcagcaactcagtcattggcttggcaatcctggagaaatccggaataaatcaccgataatatcctgccaatcccagaaaactacggatctgtcgtactgtggtagggggcttccaattcgtcacttcttgcactttctcaagatcaactgataccccatcctgagaaatggtatgacccagaaattttatctccttcagccagaaatcacatttggacagcttagcatataaacgatgatcacgcagtcgcagaagtacgatgtgtagatgctcagtatgctcatcttaatttttggaataaacca

SEQ ID NO: 166453 - DNA, 474 bp, Zea Mays
caacacaaaatatggaaagtaccttagtttttcaactatcctcatctatagtatgtgtaagctggcagggtgtgtagtgagtacggaaaatatgattgtaagagatgttcatatctagctggatatatattgcctaagacttcaaccttggaggcctatcgacgcattattgcttcattcaagaaggttgttggtgtttcaaactagcaccgacgagtaaattcgtgtatgtgcattttaggcccagatggtgtgctaaatggtggcaagagttatactggttcttacagaatgtcctacttctagtcttcgattgctcacactaccagtacctgattgctcgtagtgggggttacaagttggcaagagagggatagatcccatgtctctatatgttgtttgtctaatggctacacaaatctcacttgcgattgtatgtcttctcatgttcttctctctcgggtcccctcttaa

SEQ ID NO: 166454 - DNA, 1032 bp, Zea Mays
ggtttgtaagtcgcccgcgcgcgtctctgctgtgctgtcgctggttggtgggaccagggcattaggtccctcttccccacgtcaacggccacgcgaaatcggtggagtagcttgccgcaaattcgtccacctcaaccggccggagctcaaccaactttgtgcatgtcggggccgcttccccggggccgttggcctcaacccttcccttttcctaatccgcccgataaaagccgagttgcctcctctcttccctcgacctttccgtgctcgcagccaccatagacaccgccaacgaagggagccaccgccgtgggaactcgcatctgtggttgctcgggtcataagggttggccggaggggcttcacagagatgcaggaaggtggtcgtcatcacgaagaaggcattcctcggtgggtgaacccggaattcctcgacgtatttcgttcaccgccgcgagaccacccacgccgtggaccaccctcgattcatcatccctgccggtgagaactctccccttgcgttcgtcgtgccttgcactatatgaattgcactttagattagagtatagggccctcctggacggggtggccgaactccggccatctctccgacgtctgggctggcggcgccaccgtgcttggtcgatgtggggtgcaggcgtgttggcgccgtccgattcaaattggacgatcgcgattagatgtgaggtacccgttcgggttggagtgatctgggccgttaaatccgatctggaccgccctagtgggatcacgattctttaaaatctgagcctttggattttgatccggtgactgtggttgcgtaccatttcagtataaaatgaatctaatttggacgcttgaactaggatccaacggctgaagtcagcgcataccccttcggcctggctctattgcaaatgagccctcctagaatttgaaaaccaacccgcagtccattgcgactgtatactgagtctgaggaatctttgtgttttagccctgaactccttggaaattggcgcccagtcc

SEQ ID NO: 166455 - DNA, 566 bp, Zea Mays
cgaagaagaaggcattatgtaccgtctgcgacggcaagaagtttgtttcacctgagccagatcaccagcggcgagagatttcccgacacagttggcgctgaaaaaatgtccggtgacgtcgatgtcgacaacggtacacaaaaacggctcagcaggcgtgaccgcgtgagacaaaaacctcaccacggtcggcaccggcttttatagctcaagaaaaacgcctcgagaaactaaaagtcgcacaatgaaacgtcacatctcaacgatcacattacgaaaccccccgagggaccacttcaacctgggatcgagggcagtgttcgaccatctcccgaaaaaagtcttcggaaccagctcaccaagttgaaccggtccctagggggcttgtgttggagcgaaggccgagcgccccctcgatcagtctaacccggccactatcaagctgactttggtgcatgtacggtttgcgaaggggcacttcgatttgtgtcaacgtcaaagtcttcgattgcaacttttggaggggacaaagcgaagggtcacaatagccgaagggggctcgccgc

SEQ ID NO: 166456 - DNA, 305 bp, Zea Mays
gtcaaagctaaaatagtttgacttaggataaacttaaaacgactaaatcatgtggacggagggagtactaagttttgcaattttttaacatgtcagcattacattactaaggcatttattcagcaagtgaggtgcgcaaccttaagtttgatcacccggacaagttctgtgttctgataaatataatgtcaagaatagttcagaatgcaacatatatcaaataacgtaggaaaaaattgcatatatttttgttgatgaacttgtcaccgaagactgcaaacttatcctaacatgaaacataaata

SEQ ID NO: 166457 - DNA, 1230 bp, Zea Mays
tttggagtagacttctatattcaatagaggagaggaggcttacaatatataggccacacatgtgacgcaccagggaagggtatggcagtctggtgccaatcagagcaggcctaccaaaagagagatatcctgtttccgatattcatacagcagatctggctacctaaggaaggaacctctagttaccataacataccatgttgctatactagcctagacctctagttgccataacagaccatgttgctatactagcctagacagaagtgcctcatgcaggaggcaatccaggaagactaccaaaacagtctaaccccccgcagtcaaaacatctagccaatgcaaatgttgagactggtcttgaactcaagaaacacgaaggaaggcaggcctttcgtaaagatgtctgcaaactgagaggtggtaggaacatgctgaacgcgaacttcaccagtagcaacccgctcacgaacaaaatggatatatatctcgacatgcttcgtccgatggtgctgaactagattagtggataagtagacaacgctgatgttgtcacaataaacaagggtgtttctatgaagagggttgtgaagttcttggaggagttgtcgtagccaacaagcctcggcaacactatttgcaacagcacggtactcaacttcagcactggagcgagaaacaactttttgtcggttggaagaccaggagacaagattatctccaagaaacgccgcataaccagaggtggagcgacgagtgtccagacacccagcccaatcagcatcagttaataccacgagctcggaaacagacgtggagcgtgggagaagaccatgatcagtcgtaccttgaaggtagcgaataatactcttcagagcagtcaggtgggactcgtggggatcatgcatatgaaggcaaatttgctgaactgcataggtaatatcaggtctggtgaaagtcagatactgaagggcactagccagactccggtactaagtagcatcttggacaacaggtccactgtcagtggcgagcttggactggagatcaaccgttgtggagcaaggtttgcaaccagacatgcctgcacgatcaatgatatcaagaacatatgtgcgctggtgcaggaagagaccaactggtcttcgctcaactgcaatcccaagaaagtgatggagaggcccaagatccttcattggaaaatctgtctgaagagccgcaatgacacgc

SEQ ID NO: 166458 - DNA, 565 bp, Zea Mays
tcgtacaattccaccgcagccgagcactgcatcaatcaggcaccgattcatggtatggaccacacccatcgcattcgccttcctctcaacatcgtataggatcgttcggattgagtcttggtggtgaatttgggctaacagcgtcggcacggctgcaaatcgaggcctccgccatgggaagggatctgtgctcgatggcagatgcgattggttgaggaattagattcagggagtcatcgatttggcaagggttgagctaattggagaatggtgctcgggatggtcggattcgcagttccgacgatctcgccgccgcgcggtggctttgctctggtggtctgctgctcggggtagacgatggattagagccgcccgtttgatgatgtgtggttctgattagaacacgtgtacccgttgcgcgattcgatcccgaccgatggatcgagaccggatgggttacatcagaacgagcttaatccaatatgggccgtagatctcgtatcctgtggtcataaatagatatcggttcagcgcggttgtggatttaatctgcgccctcgatttt

SEQ ID NO: 166459 - DNA, 497 bp, Zea Mays
aagcaaccaacctccagccaatgcctgttggcattgcggagaccccagtcattacaagaataattgtcctcagttgaagacatccatgcctacctactccaactcggtgaatggccccaagagtgccccagcacccgcctccaaggcaccatcctccaacagccagctaagcaagacccagtgtcatggaagggcacaagtaaaccatgtcgacgctcaagaggctcagcaagcccagggagtagtgctcggtgagttcctagttgaatttactcccatcactgtactttttgattcaggagcatctcattcattcatagccactggttttgtggaaaagcatggcattcccactgcatatctagaaattcccttggtcacccgaaccctaggggcagaccttccatgccacctcaaatgctcccaagtcaggattcttttaagtggggtagtgttcttggcagacttagccgtcttgccatcccacgaagttgatg

SEQ ID NO: 166460 - DNA, 328 bp, Zea Mays
gtcacatcgcagaggagttagttcagattcagaaggatctgcagtaccgagaaaagccagtggagattctcgattcaaccatccgaaaaaacccgaaacttagaagtaaggctctgtaaagtccagtggagcagagaaggagaagaggaggctacctaggagagtgaggactcattgaggagggcatacccttaccttttctcaaacccagcctgaatctcgagggcaagattcttttaagtggggtaggtctgtaacatcccagttttcatccccagaatagaaaccctagactcctaacccccccttaaattcctcctaagaccgc

SEQ ID NO: 166461 - DNA, 593 bp, Zea Mays
agcgtacacataaagaaggttggcagagctgaaaaaactgaatttactaactccaagcgtccagcctgagataaaaaatttgaggagcaagataatctcttttcaattctttggataagaggcagaaactgctggattcgaggtttcgcaagacccagaggcaatccaagataggtgaacggcattgcaccaatttggcagttgagagttcttgaaaggatctccatcttctcaggattaacattaattggatacatattggatttgttatagttaaccttcagaccagtggaagaagcaaaagagttaagaattgccttaagaaagaatagttgcctcgggcaggcctccaatataagaagagtatcatcagcatactgaacaataggaaaatcctgatcaccaatatcaggaagaggaagcttaagcagattcaaatgccttgccttattaataatgctctgaagaagatcagccgccaagacaaacaaaagtggtgaaagaggatcgccttgtcgaactcctcgtttgcagtgaaaggatttaccagggactccattgagtaacaccgaagaagtgcctgagtgaagaat

SEQ ID NO: 166462 - DNA, 954 bp, Zea Mays
ggaaaagagtgcaggcctaaatagcattatacaaagaattacaaaggcgcttaggccttgggacttgaatgaaaaatttccggagattatcgatgttccaggaatgttctaagtcttcgctggacgacgttgctagcttgtaagcactagaggatgccttcgccttgactatgtaaggcccttcccgctttgcctctagcttgccctaggactctattcgggtggttcttacaagtacgaggtccccttcattgaactctcttgggatgactgtgttgtcatgccaggctttggtctggatttgatatttgttgagggtctgcaaggcgaggacacggtctccatcgataagatctttggaagttagtacatcgacttcggggacgactgatttgtttgttcggggggacccatgctttaactcttgcggcgtcattgcctcagaaccatacatcaagcggaagggagtgaacccggttgctcgacactctatcgtattcagggcccatactacttcagctaattggtcggcccatttgccctttttgtcatcgagaagtctcttcttgatggcactaaaaatcttgccattggcgcgctcgacgacgccgttggattgtggggtgtatacagaggcgaagacaggcttggtgctgatggaacagcagaattccctaaagtcttggctgtcgaactatttaccgttgtcgactgtgagttcggacgggactccaaaacggcagacaatgttttgccagaagaatttttgggcggtctttgatgttattgtggagactgccctaacctcaatccactttgtgaatattcaacggtgacgatggtgaacttgaggtttccttgatctgtgggtagtggtccaacgatgtccagccccagcgttgaagtggccatgtgtgggcgatgagcttggtgaattgcgaagggttacctgag

SEQ ID NO: 166463 - DNA, 829 bp, Zea Mays
attggcaagttcttgcacaaaaatctgagatctaggcattgcaattcggtctgtcaggcactctgaatcagggtttcgatggtacagtgttaagatcagattgccaggatcagatcatctcgccaccggcgatcacgcgcttggattcgcacctgaagctacgattcgtgctcaacaaagtactgattgttgctcggggtagtaaatatcaccgtgcggatgaacttgagccactgttcactccgaccgccgtgttcgcctagctcacggccgattttgatgaactcaccagagttagccacctcacgaccttgcgccacgtactttggtgctttaaccacggcgcagtgagtcaccttagcccacccattcatcgccggtgagcttgccacggtaaacgccaccaattgcttgcgccagtgcacccttttctctctggccgccaccgcgccatctcaaattcacgggccaccgctcaagggccctgtaaattgagcacacccttggctccgctatgtaattatgcacccaacacacctgctcgtgcctccaattactcaccagagcccctaaattgctcacttcccccaaatcggttttccgccgctgtaaggagggcctcaccgtggccagtgcgctccaggtccaatcatgtcctctgctctcttgtttcagcacccttatgtgcccctgatgcttctcgacccgaccgattaggctagaaccccttagatcgccgggaacacttcatgctgtccattgatcccgctgtcaccgtgggcagggtgatttagagctcaaatctaacaattaagttgtcacacccggg

SEQ ID NO: 166464 - DNA, 546 bp, Zea Mays
attttattcactatatgggttgcggtattattctgaaatttcccagggtcaaatctataaaaaccaggacttaagtgcagttacttgtttacagcagtggaccgtgggttaattcacatgatcatcaggggccctttgccaattatggtcgacagcagaacgagcacgcaccccgagccgctcgatcaggatccgacgcactagattaaatattgaaccagtacacagccctggctgcccgattcacatccaacgattcagattcaatctagtcgaaggggccattacacatactcatcacagccgcacgatcccaatcagacacaccggatcaccactggacacgatctaattccacccgtcagccactaatcggacgaccgacgcgctatcatcctcctcccgctccccacacacggcgacggcgcagacccgaggcctagacctcaccggagcggcctatcgacgcgcccaagcctaaaatccccatctggatgaagataccccacgcggacgcgaaaactaatggacgccaaaggtttttac

SEQ ID NO: 166465 - DNA, 665 bp, Zea Mays
cggttaaattcttctggatcatgatgatgtagccttcgacctcctgtcgtgggtagacgttcatttaacatcctttccatggcccttatgagtgagtcggccatctgatgcaattcagcccgagagatagggggctccctgtctccatgttttccaccgtgaacacttgaattggatcctaccatgttagagggaagcaagagaaagtagaatatgaaagtatttgtggaacactcgatctcacctcttacttacccaagctctttcctgatctctaggactgtgatggtgccgatgtgatagcttcgacataggtggtagagcggtcgaaaggatcacaagtcaaacgtcccggtttaggttttttagtggagctataggaggctgatcaaggtgggctatggtactgtcaaccgagtgtgttgacgtgctaaaagatatgaaattgttgctggaaagattctcaccaaatcaatgtaaactgaaattttcagcaacacactgcaacacaatcccctttcacaattttttcacttcttttttgacttctttctcttcttcttttttataacactaatggggtgctgagatcaaatgcaatgacacaatatgaatacgatggtggtaactagcaacttgaggaattttaaacaacacaaggtaac

SEQ ID NO: 166466 - DNA, 607 bp, Zea Mays
gaaggttcgggaaattcatcagaatattttggccgctcagagccgtcagaagagttatgctgatgtgaggaggcaggacttggaatttgtagtgggtgaccaagtccttctcagggtatcacctactaaaggaattgtttggttcggcgtctctggaaagcttagcccaagatacattggaccgttcactatcgtggcccaggtgggcagcttggcttatcgcttgcgattgctggattccatggcaggggtgcacccagtatttcatgtctctatgttgaggaaatttttgcaggatccggaccatcaaatcgagatggaaccgattgttgtgcagcaggatctgactctggagtgtcgtccggtgcgtatcttggagtcctcggagcgtgttatgagaaggagatcaattaagtatgttaaggtcttgtggactaatcagtctgagcgtgaggctacatgggaacttgaggagctgatgtggcagaaatatcccaaacttttcgttatgggtgagttttgttgattcattaatctttcttttgtcgttccgatagaagcatcagaattcgaggtcgaattctttttaaggggggtagagtgtgat

SEQ ID NO: 166467 - DNA, 510 bp, Zea Mays
gctaactttcctttcatttggaaccttttgacaccacgcatcggggagaccttgaggtatacgaaatctccttcctcaaatccgagttctctccgtttgttgtctgcataacttttctgtcgactctgagcttcaagtaacctcttgcggatcagggcaactttctcttcggcttctttaacaaagtcgggtccttctagtatcctttcccctacattggaccacattaggggggtttggcactttcgtccatacaatgcttcgaacggtgacattttgatactggtctgatggctgttgttatatgagaattcggcatacggcaaactggactcccaattcctgtcgaacgtcaacacacaggctcttagtaaatattcgaggaccttgttgactctctccgtttgaccatctaactgagggtgataggtggtgctgaaatctaacttggtgcccatagcttgctaaaggctcttccaaaattttgaggtgaactgcgtccctctatct

SEQ ID NO: 166468 - DNA, 387 bp, Zea Mays
ctggccctctgctcagttgcggcaggctctgcctccgtgggcgccgaaggcccagcttctgtttcaacacgagccatcacagcttcgacaactttctctacaggggtaggagttagtgaccttgtcgtctccatgacaacgtctagtacgctagccattcttctcctcttgggagttgtggcgggagcttttgcaacctttggcaattctgcttctaccggtgggctcagaatttctggcagcactattgttttttcaaactctagctttttggccaccccatcttcggcttcgactggctcaactataggcaccttcggcactatagtcgattcctcagcgctccgagcggcgggagcagcttgttccgcttcggcagcggaagat

SEQ ID NO: 166469 - DNA, 512 bp, Zea Mays
gcatgttgcaccgccttaagtcgtcgccgacttaagtcgattgctccgttagtagggcatagtggtcaccctgagttaagtaagcgtgagcatgttgcaccgccttaagtcgtcaccaacttaagtcgattgctccgttagtagggcatagtggtcaccctgagttaagtaagcgtgagcatgttgcactgccttaagtcgtcaccaacttaagtcgattgctccgttagtagggcatagtggtcaccttgagttaagtaagcgtgagcatgttgcaccgccttaagtcgttgccgacttaagtcgattgctccgttagtagggcatagtggtcaccccgagtcgagtaagaatgcaagtcaattgtaaatgaactgagtatctttgaaacctcttttttattgatgacatattcccactttacagagtacatcgtcatcccagcagttttgagatacagctagggataaaactttctgaggtgttctatgttccaggagttcccaacttct

SEQ ID NO: 166470 - DNA, 448 bp, Zea Mays
cttgcaccagccgtgaggcggcggcgaccattgcaccaggatgacgcggtgatcacgacgacgcatgcgcggtgggatgaaacggtggctcaccggtctgctgcctacgccttccggccacggagagagctgggacgacgacggcgcatggtggcatagactcgggttgggcgccgacatcgctggtagagagcacgccatgtcgtggtcgatcaaccaggtatactcggatcttgcagcgcgtttgtacgatcgctactgtctgatcagctgttcgtgcagtggatctcccgacgtgctggcaagcaacgcgagatgagcaaccgaccagcgagcgaatgcacacgaccaggtgatcgatcggcggatacgagaggttagggacagcgcagcacgcaagcgccggcgtggtgaaacggcggctcgatcgtcggccggtctgccctcc

SEQ ID NO: 166471 - DNA, 349 bp, Zea Mays
gttctgttgctcgtcttggtcctgcatctcttcttggacgtggttggattgagctctggagtcttggggctgctgccgtctgatgcctggaactcgtaggttcttcgaagtttcgcggctgcacacgcgtatttgctcattttcctccgtatgagcctatgcggtgtcctgttagttgtttgagctctttatgcagtcgtgttgcttgattggattggaacagtagtggtatttctgtacttctgttggaaactgatcgaatgcactgtgggcgtttggctgctcagttttcttagttcacttcacctcatcacctgatttttttcccagcagttcctttcgcctgatt

SEQ ID NO: 166472 - DNA, 905 bp, Zea Mays
ggaaacctcggaccggagatgctgttctaatttgcccgaggccaacctcggtgggagacacagtcatggctcgaccgaggccaaccttggacgagagaacgcagtcacgactcgcccaaggccaacctcaggcgggagcatagaaacgctccatgggccgcttgatggccccctcgatggtttgcctagcaaggtatgcccttaagccgcaaccaagctagatcagctcgacccagggagacgaagacagggacgactgagttatgcgcagaaggagtgttgatgccccgcccagggaggttgcgcatacctgaagagctagatgctcagagataactcggatgaagggtgatcgtactccggataagaagaaatgcatgtcacgttaaaagatagatgcagatagagttagatagtcatcacgacttgtaaatggataaccctctagtcatctatataaggtcgaggggtacctattcgaaggcatctcatctcgtcacatcccatcaccacctcatagctcattagccttctcaaagcaactacgccaccagtagatcgacaggagaattcaccatccaccgtccatagctcatctgtaacccgtgtacaccagtaatacttaaatactcagcctccacatgacgtagggtgttacgcattccagcggcccgaacatgtataaacttttgtgtgatctgacgtgcacccgcacgtatcatcgagtcgcaatcaacaacattgccctgcccaaaatcatcacgtcaagaatccagtggtgcacagtcaggtcataaacaccgacgacggcgacggatcaatcgccggcggagaagacaaagagtagtcatggaggatttgggcagcctgacggcgtcggttgaaaagaattggcaccagtgact

SEQ ID NO: 166473 - DNA, 987 bp, Zea Mays
tgccaggagtattgccagaacagaaaaagccaaattacctgaagattataaaagaacgaaggaaatcccaagtcacgagaagctaggtggtggttcgacgaaggaatatcaatcggggcaatctgaagaacatcgccagggattaattcaacaccactagcaggcatcagaactctagcatctgttgcgctgacctctaaggcgactccctcatttgaagcatgtgctgctattatgtcaccagaatgtggtggagaagacccgacatggacatccatggaggtatgagaaggggagctcgctcggacaccctcgggggctgggttgcagctcgcagtgcccatcaaagccggatcatcaccggcgacaccatcgggggctgggttgcagcttgcgctacccacccgagctggatcattaccggcaacacctccgggggctgggcaatggctagcaccacccttgaggactgggttctttgcaacagccacctctaaggctgaaggattctcagtcacctccatgggaattgagcgaccatgaccgacctcttggctccgaagaccgctttccaaggtcgacgacgcacgagatactgcccaggagacctctaatcccaaatctggagtgtcagagcagacgtccatcatatcaccatcagtcggctctgacagcatatctttaggaataacatcctcgagagcctcatcaaaatttgttatggataattcttgcagaccaacaagagcagacagagctggagaaggaatgtcgctatcccccccccccactgactctgtaacatcgactgttcttccaaatcaatgggacttcctcttcttcttcttcgtcctcgacaataatacgaaccataaacggcgcagggtcacacccattgggatcagctctggcagggtcacacccattgggatcagctctggcagggtcacacccattgggctcagcatcaacagggtcacacccatt

SEQ ID NO: 166474 - DNA, 400 bp, Zea Mays
tgatgatcggggtttcgttgcagagacgcctaccctgcctccatcaacccccctggctaactcagaagctgggacagtagcagacctccaacctgatgaagaaagaagagatgaagcaggaagaaatgtgtttttcatgaagatcaccaagcaaacatcaagcttactgccttgtccaagaactgaaatgcaaacattacccccatcttctccacctgctgtttttgtggcaagacgaagtcgccgagttgcaggtgtaggattggaattcgatgtgcaggacttggggagtagaaccatcaagaaagtcatgaaatccttgcaggtaatttcagaaaatgagggcattagtcagtaggccttggaggaatatgccagattgtttaagcaccccttgtcc

SEQ ID NO: 166475 - DNA, 680 bp, Zea Mays
agggctttggcgcagcaggttcgacgatgaataatggtagttgctgcgcggtgtcgtggaacagagaagatggagaattctgttgttgacgaacgtttagcaataggcgccggggatacatcggcgtcgtggcgcgaactccagtagaacaggcgatggcggtgaggttcaacacaacgacgagctcaagcgacgtcgttgtgcgataatagcacggcgagcaactgcagcagctcggtatggcgacgtcggtaacaacagcaagcatggtgtagcatgacaagtagcccgcacggctctcgcgacgtcagggtggtgaccaagcgcaggcgcagcgtacgccgacgagcactagcaaggggattcaacgaactataatgacgtgtcacgagagattggaatcaacaacggaaatggtgcggtggtgtagtgtgtgcaagaagctcaagcaagaggggagcaggcgagtagagacccgaaggactgataagagagtgtggcgtggtgagaagcgcggacgggtctgctcttatagttgagcagaggaaggggagagggcgtctggtgccagcttaaaggtgccttgaaggctatttgctgtggtgttgaatgtcgtgattgaaatctccattaatggaggaggtaaggctgggaaagaaaccatcgtgacgagaaacggg

SEQ ID NO: 166476 - DNA, 1016 bp, Zea Mays
tgaacagggcaccttgcatctgaccggtatacaaaagtatagcaaccaaaatttttatggtactgctcttttccagtagcctacgtctcataaagaagctcgtggatgttgcaaaaacagtcagcatttggctctaaaccgtgactcctcaccgcctagataaagatccctaccttgatcaaagctttggagtaagctgataaaggtatattttgaacctttttaaaacctcgaccaacatcttgtgaagaggaaaacacaacctagccttcaaaaatctttggtagacaaccacttcattcttttcaagaagaggaatggttgcatccccaccaggcctcactatggaaacatcatggaaatatttacctttcatagcttcaatatgtcctttcttcatagttcacttctaaaagtttatatggcttggtttctagggtcgctcttcgacatcatcaacatccccctcaaaatcaaagtcctcgctatcttcggagttgtgtgacaacccagccagtattacatcaacgatctttgcagtattagtcttctccatggcctccaagaacccagcaaatgcgagctcctcattcttgctcccctcggtcatcttagtcaaaaccaaaaaaatccaccaaagctgaaacaagcgcaaactttaccagcaaaaaccttcagttcaaaacactagctattctagcaacaaacagacgaataatgtgattaatgtgcatatggttttcatcctatttatacataaaaattgagctagggctgaatgaaataaggcaggagatgaagaaaaatgtaaaatcaccactacaggatggtccccgcattttaggtatttcgatgattagctcagggaaggtattttttggacctttggcaaaaggccttcgttcatttcacagtctgagtttgttgtgaggaaatgacctaagactgtgaggggctattgttgggggccttcgaccttcaaaggtcctcaaaacactaattaaccattgcttctt

SEQ ID NO: 166477 - DNA, 531 bp, Zea Mays
gtcgttaaacactaaagctcccttcggatatttcaattttcgcgcatagtgtctggcttccagaacttcttcttcggacaactttttccccaaagcatgacaataaatataatcagcatcctcgacagcggcttcgggggcaggggattttgctctctctcccgcgtctggtccttctgatatgccagtgtctgaagcctgtggatcaactttatcttcaggtgtgacggccttcgtctcaataggcgctgaaggcccagcttcagccacatcttggactttggtagcttcagcaattttcttaggagcagggctcaaggccttcgtagtctctataacagcgtctaatacgctggccatccacctcctcttgggagttgcggcaggagttttttgcatttttgacaaatctacctctgtcggtgggctctggatttctggcatttttatcaccttttccaccggtggctcttcagccttatcacctctagcttcgactagcccgactataagcaccttcggcactacaat

SEQ ID NO: 166478 - DNA, 386 bp, Zea Mays
aacaaaattgacaacatccagaaaggttgtttcaaacacaaccaaggtggcaagttgtaagggattaaaatgacaggccatatagtgtacgcaacattgaccatcccaaatggattgaagcagacccaaccgaatgttacgaggatcagaagcaaaatctttgcatatgttatctacccgcttccatgccttagagtcagcagggtgcctcattttgttatcttggactaagccctccttgtgccaacacatatattcagatgtggtcggatccatatacaaccattaatatcgaggaataactgggcaatatcttaggattttctgcggggcacgctagttggttgcctcctcctgatgcctagaaaccgttagttgcccgcgag

SEQ ID NO: 166479 - DNA, 686 bp, Zea Mays
catatagtggaacagtgtttattcaacacatatgtgggatgggtctctcataagaccacttgaaccatcgcattcaccacacattatttcaatagtgcccataatgtatgaacttcaagctcgtgattttcactttgcgattattggttcaacctcgattgcatttatcattgacccgataagagagcttcaaacactcatgcctaggactttgttttggatccctttgcaatctagagaggcaagataggtgtcgacatatttgtctcccacatttaataatgatctccgtcatttcccaaaacgaaagattcgttgttccgtattcccagcacattgatattgcgcgcattgctaggaacttcatcatcaagatgaacctcttcatgaggcaaatcaccatcagggtgaattaatcagaggaaagttatcatagaccacgtgaatctgcaatcagaacatatgcgttgactaaggctgatggatcatattcgcaggcgtccccaagaatagatcaaataccaataagtcaaatgtggatatgatattaatcccgggtatatccacatctacatcaggtagaagcattcagaccaatatggttactcctcaacgatttctggcaaactccatatacacaggagtacacaccgaacgacaggttcagtttggcttttgtgcgttta

SEQ ID NO: 166480 - DNA, 1763 bp, Zea Mays
agaagacccccaacagcgggtattttagcacacaataaacttgaatccatctagaaatagcacaaaaatatcacattagaaggatcgataatcattttactactaaagcacatatcattcctagttttccaagtggcccaaagtacaaccagtacaaccccacatccaaacatcaccaaatcatcatgtttttactaattttctacctagtccccaaacaaggaatcagaattattcacaaggttacctaatacgctatttgttatgataatggagtccttaatgttccatcgggttcatgataacttctgttttggtggaacgtggtactacgactcttatggtgatcaaccgtgtcactaatccggttgatctcgttaagaaggctaatccatgtcagtgaatcgaaaacacaagaaagaacttgaaagtacacagctcaacaaaaatgctaacaatatatgtatgactaagatcacaaaagtggggttttataaccctataatgacaattattcaaagataatttttaaaagcaaaacttgagtcctaacatgagtagtggctactaattatatatcctaaggctatcacaccccttgaacgtgtcccctaatgggctctaagacaacacatgcctagccaaccaaaaaattgtgacacaacactaacatattttgaatgctgacttatttcgataatttcattaattccggtggaaattagaccttagatcaaaattattagttagcttatgaaaatatatttctattcatatattgatcataaaaaatggattatgtatgtcgtgtatgtctcgcacatctgttttactacaggatggtcctaaaggtccactcagactcaaactcgagttggactaatgcctttaattggtcttgggcgttctttttgatcttcacctccacaccttcaattacttcatgaccctctctaatgttatcaagcacgataacataattagataatctattcccaaaattatcgaaaggatcacttacctttgaaaatttaatcatcacatttgtgctcaagtcattggaccttatataacgatcggatgattagtaggcgcatctgaaggtgtgatgtccttatcatccttcctcaattgaaatggagtcattcttgactcaattcttcatctaaatatggctttaaatctgcaacgttaaagatggactaaccctagacatagattcttctttagaggtacttttaatcctattcccctactttagcaccactgctcagttctacccctctagtagtaatggatgaggcgtttttaatactagagaggtgcaaaactgatctatgacgctaagctaggagcatatatttaaaagtccctacctctacaagtgaatgatttcttgaaagactttgttagcaatgtgaatgtcatcgtcgcttttatgatagggaataaaagttatcacttcagataaatgatcaaccaccacaaaaatactatcccccctattagttctttgcaattccaaaacaaagttcatatatatatatccacccaagaaatagaagaaatgaaccaacatatacaaaccatatgggttcaaccgcgatttagctatttgacatgtcgtgtatcaagctacgaacctctctacatcttgcctcatccttggatagaagaagtatgtgaccaacactttatcttcttgacattaaaatgttccatcaatccacctccatgtgcctcttgcaacaacaaaagacgaa

SEQ ID NO: 166481 - DNA, 703 bp, Zea Mays
attcataattgaagttctgcggaaattcgaaattcaaattcatcagttgacgccgaacgttatggtagcattggagaagtatgtgtggccggtgtcttcatatggtggagagtcatctattgaggtcttcgccaaaagttattgcttgcattggcagaagaaaaagataggttgactgattgcgcaatttgggtcctgcacaatcacgctgaggactgggaagacttcggccaaagtagttgagattgttccttgtgctaagaataagtgggtgaactaatgggattttttgttttatgtggcgttgggggatgtcaaagtgttgcctagtttgcctcggccattttatgctcgcattgttatgtggccttcccacaatttaaagtgaagcaagcggatcaaaacgaggaggcccttcgcaatgcagcccggttgagcagcggccgagacctagtagaagagtctgttgccagcggtgtgtggccgatggctcacgagtggaatctgggcaaaattcggcctcgcccgatgacgtctttgggggatcagatggtgcgtagccctgccttcgctattgatttgcaaggatgggacgtggtcgccttcgtgtgggaggtggagctagaggaaattaagattgttggaaaatatgtgccaaagacggagatattgagaagctgggatattcacggttccaacgtta

SEQ ID NO: 166482 - DNA, 496 bp, Zea Mays
cctcagtgcaagagttcaaataagggggatagagttccccgctgacctaatagtaatgggtatccgggatgcgaccatagatgtcatcctagggatgaattggctaacaaaatatcaagcaattcttagttgtgacaagaggacggtgaagttagtatccttgtcaggagaggaagtgttagtggaattggtcttgtttggaccaaggaaatgaagttgtcaccaagtcactgcccatattgaggaaattgagccatcagaagctatcaaggtagtatcagaattcccatatgtgtttcccgaggagttaccaggcatgccacctgaaagaaaagttgaatttgccatagagcttaaacctagcacaacccctatttacaagggagtctatcgagtgtccggatcaaaattggtggaactcaagaagcagattgatgaattgttagagaaagactacatcagaccaagtacattgccttgggcagccccaatgtta

SEQ ID NO: 166483 - DNA, 566 bp, Zea Mays
gtaggaagccaccccgcgtcctcgccatcggtcggccttggtgtcgggtctggggagcacccaatggagcagcgctattcatcggtcaaccagatacggcctcggactgcgcagtgattgccccatagttgtcgtcggtgagccacccttcttcctcgtacctctttcttctctgctcggtatgcattcgatgttgggcgttgcagtgaggatggggcggatatgcgagtccacggtctcgtccacggctccgctggcgtcgtctgacccttctgtccatgcccgctccgctgtactagcgcttgcgctgccgtcgtggtatgtgtcgcggggaagaagacgagctcgtggccgttgccttcacgatggacggtctggatcggaacctagatagcgctaggttatatgaaatcatatcggtttgattctaatcgagtggccgagatttggtaccggttcggtatagataggttctaatctgggaccttgaaatttgatcggatgcccctagctcacccgtaccccttcggccatgccaatttgcgtaaaagccctcctggaatttg

SEQ ID NO: 166484 - DNA, 1025 bp, Zea Mays
agtataacagggtcaactttgagtttgaattcaaccttgatccagtgctcaaataagtttaaaccctatagtcgagttgtagctggtatgtagcactacaactttgatgcagagacttagacatgttgccacagggaattgagagaaattggagctccaaagtactctgtcagctgctctgaattggtgttcaccatggtacagtgctctgttgaagatcagaccgccagcgccaaaagatctcaccgccggtggccgtcgtcgttgatcgattgcgtgctgcgactcgtgcgccgtggccttggataagcacaaaccagtaaatatcccagcgtctggtccactcgagctcggtctcggctaagcatgccgtactttcctcccagccgtcggtcgctcagataactctcaccaccgtcgtgctgtcaccgtcgcgcaccacgtgccttagcgctagctctcgttgcggtgaatcatgcggcgcatgtccggtgatcaccggagttactgccacgccctaggacacgtaaccacgcgcgccaggcttcttcttcacctctggccgccagctcgccgtgggcaaattgagagccaccgctctcggagtctttaaattgagcccaccgttagctccgcaacctcatcacgtaccccatcgtccagtatcacccccagtcctgccaccgtgagctccaattccaagttttccccaaacctgttcgaatccaccgtgaaggtccgttcaccgcggccagcacaagccaggtccgatactgtcatcctcagtcttgttctaacattcccttgtgcccttgatgctctccaaaccatccaattgaactagaccgccatgaatcgacgggaacgcactcatcggtccgccttgtccacggtcgccgtggctagaccaaaccttgtgtccattaacgaaattatgttgggggaaatggtcggggtagatccaatttcatgtcagtcgcttggaaaccctagccgttgtcccaatcggccggcgtagatgctcg

SEQ ID NO: 166485 - DNA, 651 bp, Zea Mays
ggctgatcttaatatgaggcagagaagatggttagaattgatcaaagactatgatttagaagtgcattaccatccgggcagggccaatgttgtggcagatgccttaagtcgaaaggcccagtgcaactgtgtaactatggactccaaggtcaccactctgtgtgacgagttgtgtaagctgaacctggaagttgtttcctcaggtactttgagttatatttcagtagagcccactctacatgagcatagagtcatggcacaaatgggtgacaagggtgttcaagttattaaggatatactcgaacaaaaggtggataagtacaaatgctttcgtcaggacggcaagggagttctatggtttgaagaccgattggttgttcctaagaatcccgaactcaggaagaaaatattggatgaagctcatctttccaaattttccatgcaccccggtagtagcaagatgtatcatgatctcaaatctttgtattggtggaccagaatgaagagggaaattgctaagtatgtatttgaatgcgatacttgccaaagaatcaaggctagccatttgaaggtagcgggtaccttacagcctcttcccataccatcttggaaatgggaggacctcagcatggattttattgtgggtttgcc

SEQ ID NO: 166486 - DNA, 576 bp, Zea Mays
gtgggttttatacaattgaccatcctaactataaatcctagctacgccacgccctgtagtacctctcctggtcctctctaaggcatcctgcaaaccattcttgctgcctgatgttcacctcactgccatcgaggaatgtgaactagaggttgttgcttctttgctgacagcaggtttgccccgtcgcaaatatgctatagtgctggcggcaatgaccacctactgtcatattaagatatgataggtcgtcagctgcttagtgaataaagagttaattcctttcgttggctcatatattttcttgcttaataaaaaacgaacgctcattcaggatgttgcagtgttccatgccacacccctccttttgtgctttgctcacttcatgttcgcaacaatgattaatagcctaggtaactatccgtattttataaatcttgatgctaacgttagtttattggtttgcttcttcacaaaaagaattattagtttgattgctgcttaaatacatgaacattattgaggagtaacttcagatttcatctgtattaaaatgatccttggttagaaatattggat

SEQ ID NO: 166487 - DNA, 1362 bp, Zea Mays
tagaaacattcactaaaatatttatgcataaaggatatgcattagaaactcttatttatgtgtgtatttgcttaaatgattaaaatcataaataaataaatggaattatacttttttgtcttggagattttggttgtacatttcatttaaatttaaaacttcaactcagattcaacgttgaaattgaaatagaaaaaaaaagataggaaaaaaaacgaacctgacattggacctggcatcctgacgttggactcaatccatctccatcccatatagccgagctacatatcctagtgttacctgatttttttcctctatttatttatcccttgccggagattaaatcaacatgatctcatgcgtgacgtcaattattcccacgtaacactgcctgtgggccccttggctagcggtgtctctcagatgcgagctcgttaaacagacgcttccgtaagcatcaccagggtggttgcgacctgtgcatggctgttcagacttggttccctcggagtatatgtctggcaacacctttggccatggcgcagataatggttaagctaggctgccaggctaaaccttagtcgagcggagcgagagaaagacaaagaagggtatgtcgtcgcggcaggcgatcgtcgcgtgcacggccaggtctgagcgcgacatgtggtatagaaggatagcaggagatcaggatcgtgcgcgtgcgagtttccatgcagaagaccatctggggatgcaagatccctcgtcgaagatgcaaagctgtcgatctgtttccagccatatgcaacctcgccttcacctctacaactgtggtgagtcacccgatctaatcatggccccgcggtgcgtagaacctcttgcatgaaatttagttcgctggaaaatctgggtcgtgggattggagttggccggcaatggcaccgtcgccctaggcgctctcatccctcgcgtccgtcggtcggagtgaagaagacaaccgggatccattgatccgggagcgtacggctaggattagatcgtgtatacccgttcggccgggacgcttcggggccgttagatcctggttgaaggatagggatcggatcgcaccgtaataaaatcatggcctttggatctgatccgtgggcttgcattgcatgcgcttcatgatctaatctggacggtcaaatagcgatcggacggatcgagttagacagtaccccttcggcttgagtttttacaaaagaaccctcgggttttcaattatccaacccgccgtcctatgcgggggaaaactgagtcttaagcaattttatgagttagaccctgggttctctgttattgtgtgcgcagctcaggactcagagaaaataggag

SEQ ID NO: 166488 - DNA, 391 bp, Zea Mays
gcttgtgtatgtgtaagggcttgtaaaatggagttgtgtgccctcgcgtgcctgtgcctgcgagggctgtgtactttgtctggtgtgattggttatgctgtgccagcatgattataattggtcttggtgtcgtttctgcttttgttgtactgggtcggctgcgcccttaggcggctcttgcgcgaagtctttgcgataggcttcggatttttgcgcgcttgtgcttagtccggctgcacctttcggcgacttctgcgtggatagtcttcgcgatagccttcggatttttgcgcacttgttgtgcttagtccggctgcacccttaggcgacttctgcgcggatagttttcgcgatagacttcggatttttgcgcacttgttgtgctaagtcc

SEQ ID NO: 166489 - DNA, 329 bp, Zea Mays
gggtgataaatcctccacccaggcaaacccatcaacctcaagtcatccaaggcttgaagaaggtcatcaaccccaaaggatgccaaccgtggtagaagatgaacatgaaagtgttgatggtgaagtgcctcttgatcaagtggatgatgaggaggagcaaattcaaagacaaccatcagtgccttatcctcgagtccaccataccattcaaagagaccatcatatggacaacatcctgggtagcatcaggagaggggtaacaactcgatccctagcattttttgtgaattttactcgtttgtctcctctcttgagccactcaaggttga

SEQ ID NO: 166490 - DNA, 1006 bp, Zea Mays
ggtagggcttcggttccctctacatgagatgataggagaagttttaaagaattttaagatataccttcatcagttgacacccaatgcaatcgttagacttagtgtctacatatgggctctccgaagccagggtaagctttttaccaagtgcacgagctgcactaccagaaaaagggcaaagcggatggtcttcataagaactttggctgctacaactttgcatatcggaaagatatgaaggccccggtaattggctatcgcaccaagtggccgaccggttggacaagcgaatggttttacataaaggcggacgagaagaaaagagagaagttaatgactatggtcatgagtccaatgaaattaagcttcgtgatgacaaggcccttgtgccacatgcaacttggctccccatgccatctagctgaagtggaattcagagtggtagctgccgaaatcagcactagagatctagtacaagagtacttggcaaataggacatttccgacctctagtggctggggaatgcctaagaaaaaggaggggggaaggtacgaacttgttcggctcccttatcgattcaaatttgagaaacagttcaagaagccatgcaaagagtggctagaaatgatcgaaaccatgtgtaacgaaatgcttggcaactataccaagaaggaagaccaattaatgactgctgacttcggcacccgaccgaaacaaaggttgaaccgggtgatggatgcattaaactttgaatacccggattacgagaagcctgacaaaggggtcgaaggggtgaaaagaaaaaggactgtcagcatcctgaataggcaagccgctcggttagtaaaagaagatgaaatttttttgaagaaaacaaaaacagctctagaaccgaaggcaacaatctccaaaaagcgaaagcttggcacaacgccctcttctgggccgaagatagatgagacaggagaagaagctccttcgatgccctctgccgccgaagtagccg

SEQ ID NO: 166491 - DNA, 474 bp, Zea Mays
tccagcagcacttcccatcgcacaatacaatgcatcaacccattaattcgagatctagagcccaggaaaactttccggccccaccgagaaggccggaaaggaacgatcaaacatatgaaccatataggacaagtggcaatgcaccacgtagttcaaaccaatgggggaaagacaatatgctaatatccagccaaccccacctatgtttgatcagagagccggtggtctcgcaccggctgccattgatatagtaagggaagaaatagtcggggcgttccgagataagctcggagtaagcatggtccctggggggcaatcatatcggaaaccttatgacagtcgatttgatcaccactcatacccacagggaaccaggatacccgaattcgcgaaattttcgggtgatcaaggaaagaacacacgtgaacacatagtccaatttttagcacaattaggagagttggccgacacaga

SEQ ID NO: 166492 - DNA, 676 bp, Zea Mays
ttgtaatgcgagattgctgcaggttccaccacttcaaatcaggggtctgctcttgtggcgatttctggtgaatggattttgaacaaaatggttgtgcattcaatactcagccagtgtcccccttgaacaatatcactggtaagttgacttctagatgttttattgcctttcgtctgtcaggttggatgttattcctaacagaaaaggagtgagttagcacttattccaggtaacattcagatatcttagattccgacatgaaacattgcactaatcactcagcatcagggaatagtaaatcagtggcaataggtagtacctgccaacagcgcttatgagataaggatgcatgccgatgcaggggcgtaccaattgtgaggtcgctacaccgtggaatccccttgtgtgggcaatgccgtccatctcgctctctccctgtttgctagcgttggcgcgtgtactacctgtttgactttgacagaatggcagcatgcatgggtgtgtgactctgtctgcgcacggtggcctgagccaaaaaggttgagcatttttcagatatacgtgctataatagtcagagaggccccacagggccataatagcatttttcaatgtattgtaaaatatttgctaaaatgctgtataaaaataaatttctaggcataatgacagttccg

SEQ ID NO: 166493 - DNA, 1135 bp, Zea Mays
ggaccatcgaatcaaatccgaaaggccacgattagatcgcctcaattatgaactggtatgctctatcagccattggatctgtatgctacagttgtgattagatcttaataatactcgaaccggtatcccacgacgaccattgaatatcagatcatcggtgcatacctaattaactgagatcgatcttataaccgtctgattcggcattgctggccccgattaaagcccatcccacacaaatcggtatgttataaggcccgttagattgaagatcaacaaccctgattcgtttacgtgaaggggtacgcatccatcaatcaggaccacccacacggagatcaacggcactcatctcttcttctaccttcgtcaatccgagcacagcggcaacaccccccgcggcggtgccctggccggagtaaggctccctaccaccccgcaacccaatcctttggtaaaaatcaggctacacgctgctgagatcaagttgaacatggtcagaaagtcataccggctaatggggtgacgatggagcttgcccacggtgcatgtcaggttcgcggcgtagcgccagcgccggtgaacaattacgcgcacaccaattggtgtccgtgcttgtgtagacctaacgcacgagcagcgtgctatgacaaattcccgtgatgctctctccaagcccccgctacgatggggcactcatcggccgcggcagatcttcccccgactctttgttctcgcggcaactgtgatgagtttgctacgatggtttcgggtacggcttggcgtggctattggtacagggcgagatgacaccagggcatgggcatatataccctgggatccatcggttgagtgcccagctagatcgacggaggttacggtagccgctcgcgtagctcgcggttcggttatggtgaggaagaaagacctgtgaaccgtagggacgaaaacggtcgaaaacaatcgaaaaaacacttatattggttttggtttcattttataacaacggtacgaaaaccaaaacgaaaatcttacggtcggtatacgggatcgaaattatcggtcattcgaaaatgaaaaagtccaaacaaaaatatgttgaaaacgaccgaaatatgataaacttgtcggtaat

SEQ ID NO: 166494 - DNA, 393 bp, Zea Mays
gctttattgctccattagttctgtagactttctcccttttgtgggtgcaaagaatgttagattacatgattatcttttcatgatggcaagaacaaggtctagaaagattaggagttctgtttcaatagaactacttgtttcgtggtgctttgaggtgaggtgtttgatctttttaaacattcatctggtgtggatgtttcaccatttaattaaaatgaattgttgaagttggtaagggttgtgcttagtgcatattaccccttcataaaagagtgttgttttaagacattgatgttgatgtatagctgcatccaaattcgatggtgtgaaaattgtagtgttgattgcatctatgacttgctttgagcttcattgcatgttgtttcatgcttg

SEQ ID NO: 166495 - DNA, 304 bp, Zea Mays
gcaacaagtacctgacaacccggaggctacagaagtatggcgaatgtatttcgatggctcactgaaactgcagggagcaggcgcaagaatcctcttcattgcccctggaggtgaacaactcaagtatgctcttcagttatcattcccagcatcaaataatgaagcagaatatgaggctctgatccatggattgaacattgccatatcactgggcattaagaggttgatggtatacggagattcactggtggtcataagtcagataaataaagactaggattgctcgactgattctatgggcaag

SEQ ID NO: 166496 - DNA, 442 bp, Zea Mays
cgagctagcccacttagtgactacagggttcattagggaggtgttgcatcctgagtggctagcaaatcatgttcttgtactaaaaaagaataaagtggattagcgcatgtgcgtcgactataccgatctcaacaagcattgtccgaaggatccctttggcctgcctagaatagatcaggtagtcgactcgactgctggctgctctatgctatccttcctagattgttattcaggataccattagatcagcttagcaaaagaggatgaggagaagactgctttcatcacgccgtttggagctttctgctatacctccatgtcgttcgaccttaagaacacgggagcaacttaccagagagccatccaaacatgcttagccgatcactggggcaagcgggtggaagcctacattgatgatgtggtaatcaaaacagaaaactca

SEQ ID NO: 166497 - DNA, 366 bp, Zea Mays
gtccttttgatccaagacttgaataggatgctctgaatatgtcaagtctggttctaaggcaacatccgttacttcaatggttcgatcgggaacccgaagacacttcttcaattgagacacgtggaacacattatgtactgcagacaaggtttcgggtaactggagtcggtatgccactggtccacattgttcaagaacagggaaaggactaatgtaccgggtgcaagcttcccttttaccccgaaacgtgatatacccttcatcggtgagactttgaggtagacataatccccaactagaaagtacaagggttgtcgtcgcttgtctgcataactcttttgacgagcttgagcttctttcaaatta

SEQ ID NO: 166498 - DNA, 503 bp, Zea Mays
ttcacatttatatactattaattcacaatacaatacaataatatttattgaggtgtagctcacgagtcgactttgagacgagccgagcctctttcttcatctcggctcgtttgcagccctaatgaccatattcagagaaaaaactcaaccagcttgaagcatgacctccccctaggcaactcagtgatattcttccttgtgttctatatttttcttccttatgttgccgaacactacagtaatcaaaggaagtgctgataagatctccggtttgctgaaaaagctctcatccacactttgatcaagatccaccaaagtcaggccccttgttagctcttttgcatgggtcgacacaataatcttgacattcccaactgggttactctgtccaaactgtacaaggcagcaagtttgaattggactcgccactcttgtgagattgccgcaccctccttctaggaagtgaccattactgttccttgcaacgaatccccatccacgcc

SEQ ID NO: 166499 - DNA, 1099 bp, Zea Mays
ctcttaatgttcagaggaaaggaaggctttgtttcgctgaccgtgaaataaatttgtttaatgttgccaatcttcatgtcagtttctgtacatctcttctcgaccacgagagttgcatgcctaatattgcttttattttggctaggtttgcctctatccctctgtgtgacacaaggtagcccaataacttgccctggcggaccctaaacacacactattctggattgaggcaaagtgtggcttcacgcatgcttgcgaatgttttggtgtggttggcgaggtggtccttcttatttttgcaagtggtgactatgacatcgacatatgtgaacacattgtgctacctgcttctctagaatagtcttcgcgagtcttcaaaaggtggagccagtgtttatgaggccttcgggcatgcacatgaagccgtacatgccaaagggtttaataaagctagtcttgtctttgtcttctttcatgtaaatctagtgataacccgagaagcaatcaaggagcgacatgacttcgcacactatcgtcgagttgacaatcttgtctattcttggcaaaggggaaatcatccttagggcagtccttattaaggctagtgaactccatgcacatcctccacttgccatttttctttttaccatgactacattggcgagccacgtcggataatcgattggctcaataaactttgcctcaagtaaccggtggacttcgacctttgcgacctccgtcttctcatctgacattatgcgaagcttttatttcttaggatggattgagggacctatgcttaagccatgctcaattactgtatggctgacgccgatgaggtccaacgctgaccacacaaacacgtctctgttacggtttaggcaggatatcactttttctttctctgactggctgaggtcttcgctgatcaatattgtctgattaggtaccaatgagtttaagggaacctttttggcttcctcgttgctttggatcagagtctttattgcttctattttttttgactaagggcggctgaggcccttgcgttttgcggtaaggcaatgtgcatttcattgcccagggtgaaagccacttt

SEQ ID NO: 166500 - DNA, 604 bp, Zea Mays
cccccattgaggtcagcatcagtaaattcaggaacaggcacttcttcagtagcaggaaccgaaggaccaacatcccgatccaaactagatactcgccggagacgtctctttttctttttctgctcgtcagcaggaggatcaagttgattggctcgagaagggcgtctcgggcgagcactgacaggcttctgaatatccaaggttgtatcagtttctgggggaggtgccaccaccaacgtcccagcaggagcagcatcagaagagtcctcagccagcaaatcaagcatagcacttatttctgtgtcactaggatccaaaggtacctcaaaatggacttgccgctcatcatctggaatttccccgagcgaggcaaccaaggcgttaacttcttcagcagagggtcgcactctaagacccaaactgccatcagcaacagatggattcgaaacaaaatgagtgaaagctttggaaggaggcaggttccaggccgagtatgccactggggcaccaacgtttgataccctgcctctaaggatcatctcaagtcggttcaccaagtctatagagggaattcttttgttggtaacccaagttgagtcagcta

SEQ ID NO: 166501 - DNA, 775 bp, Zea Mays
atgatttgtagctagttagttgagctacaactttgttaaagacggattagcaagttcttacacgaaaatccgagatctgggcactacaaatctgtctgtcaggcacactgaacaagttcctaatggtacagtgtccggatcagaacgccaggttcagatgcctcaccgctggtgaccgtgcacccggattcgtgcccgcaacggtgattcgtgcccagcgcagatggataacgaagaagggtaagaaatatcgtaccgtggatgaactccgaccactattctactccggccgccgtactcgcctaagacacgaccgcttcggataggctcacctgagttagtcacctcgtgaccttgtgccacgtgccttggtgctttaaccccgccacagtgagtcaccgtagccacccaataatcgccggtgagctcaccacggtgaaagccaccaattgattgcgcaagtgcaccccttctcttcggtcgccgcgcgtcattcccccaattagtcaccactgctcatggatcctataaattgagcacaccctcggctccactagatattaaagcattcaatccacccactcgtgcctccaattactcaccagagaaccccaatttgggatttcccccaaatcggtcggaaacaccacgcgaagtgacctcgccgtggctagcttgtttcaggtccgttcatgctctctgctctcccgtttcagtgcccttaggttctcctgatgctcctcgacccattcaattaagctagactgcactagat

SEQ ID NO: 166502 - DNA, 587 bp, Zea Mays
ggtgactccattgcactttgcacatctttataaccttatttcttgtaactcgagtcaatgtatcaagaatcctgatgcggtactcagcataagtcaaatctttcttgaacactaaggtcctccattggtaactgctcttcaggcaccctgagacatttcttcagctgagatacatgaaaaacatcatgaacatccgcaagatgatccggtaactccaattgatatgccacctctcccactcgctttaagattaagaagggtccaataaagcgaggggacaactttcctttgactttgaatcttctcatacccctgagtggtgacccttcaaatagacataatctccctccttaaactcaagcagccttctccgggtatcagcatagcttttctgccttgactgtgcagttctcagattctcccttatttgctgaacttgttcctctgcttcttgtataatctcaggcccaaacaactgcctttcaccagtttgatcccaatacagtggagtcctgcactttctaccatacaaagcctcaaacggcgacatcttcaaactggtctgatagctattattgtaagagaac

SEQ ID NO: 166503 - DNA, 536 bp, Zea Mays
tttcatgaggtcttggatccccaggagctaaggcagcaagctcagctcttgttgtgatagccatgccagatgcagctacggttcctctataagtctcaagaacgattaatgagggtgtgaaatggtgcttccgctccattgttaaatatgctcacaaacattctgcaaattcgtgcctcataaacataatagataacctgcagtaggtcttgcaatcatgcagtcctacaacattggaggcctaaaataaatagattaaaaaaatagcctgcagtaggtcttgcagtcctacaacattggaggcagattgtgaacaacataataactctcctcagttcctttggtgcacgggccacgggccaacgttcttagggcatgtatttggattacccggtgactaatggtgcgattgatttatgcataatgttagacaaggacttagatgatgcacgttcatgtaagcttggaaacttcccacctctagtaatttgctttggtccgtattatctgccttatacacccttcaccctgctgac

SEQ ID NO: 166504 - DNA, 346 bp, Zea Mays
caatttccctcgcaaatgtgcaaaaattgactgataaaggggtttggtgaaaatgtcagccaactgtggatgggttatcaacgtggcgcaaatcgatatcgcctttctccgaatggtcacgaagaatgtgaaagcgaacataatgtgcttggccttcgaacgtagcacatgattcttggcaacacttatggcacttgtgctatcacaaagcagaggcacatgatgaacatccaagccaaaatctcctaaagtagccatcatccataacaactgtgagcaacagctagcggcagagacatactcaacctctgtggtagactgagcaatgctagactatttgtgcaaa

SEQ ID NO: 166505 - DNA, 541 bp, Zea Mays
cgccagtggatgaactccggccactgttcactctagccgccgtgtctgcttagctcacggccacttcgaatctcccctcaccggagttagacacctcacagccttgcgccatgtgcctcggcactttaaccacaccgccgtgactcatgttagcccatccaatgatcgccggtgaggttgccatggtaatggccaccaatcacgtgcgccagtgcacccccctcctctccaaccgccaccgcgcgagttcaaattcaccgaccaccactcaagagccctataaattgagcacaccctcggctctgttaggtattccagcatccaatccaccactcgtgcctccaattactcgccagagcccacgaattgctcagtttcgccaaacctgttttccgccaccgtgaacaagctctcaccgtggttactgcaattcaggtccggtattgccctctactctcttgtttcagcactcctacataccactgatgctcctcgacccattcaattaggctagactgccctagatcgtcgagaacacccg

SEQ ID NO: 166506 - DNA, 916 bp, Zea Mays
ggagggggctgttgacgaaggtgcacttactgttgaagctaaacaagctgatatcaaggaagaaaatgttgatgaagaagaggaagactataacactctgatcccaacaaaacccagccacttggattttgaaaattctactgtgtctgaggccgacgtgcccatgatgatgaagttgggttacttcgaagaagctgagaagaagctcattcattttgtcgtagaagaaaccactccagagccgaatgatgacgaagtagtagttttcaaaagctttttcagagcaggattgcggtttccgcttcacgagatgatcggagaagttctggataattataaaatctatcttcatcagctgacccctaatgctatcgttaggctcagcatcttcatctgggcccttcgaagccaaggaatggacccaaatgctgaagctttctgccgagttcatgaattgcattaccaaacgaaggccagagaagacgggttacatgaaaatttcggttgttataacttcgcgtatcgtaaggatacgaaggctccggtgctcagctatcgtaccaagtggccaaccggctggaaaagtgaatggttctatatcaaggccgatgagaagaagagggagaagttgaagacgatggtcatgagcccactgagtttaagcttcggacttactaggcccctgtgcagcatgacttcggggtcaccatgccaacaagctgtagcggaattcagggtggtagctgaacatatcagcactagagatctagtaaaagaataccaggccaacagggtatctccaacgttgagtgaatggagtatgccaaagctgaagggaacaaggaagaagaatgaacttgttcgattgccctatcgcttcaagtttgagaaacaattcaaagagccctgccaagag

SEQ ID NO: 166507 - DNA, 504 bp, Zea Mays
cagagggactagcgatagtggtggtaggagtggcggaggctacgggtgtgatggaagttgtgggtgtagctgcggtgcaggaaagctctggagtagtggaagtggtaggggtaggagtgcaagcggagctgaggctagtggagcagaagttggtggagtaggtgaggggtctaggacagccgggggagtgcgcagacgagaagactgttgttgtatctaaatggaagttgatcagcaccaatgtgaatttgccctccctactttgctcgctctgctgctgcaagcattgctcgagtagctctatccaacatgcgattttcttgcctccttgctgctctaggtagactgccttgctgcctagtagggcaaggtgggtcctaatcatcacctccacctgacggacccatgttcttgacatgggccatactaacactaaactgagtccaactctgaaactaccaatagctgactacccacacattgcccactcacgcgctgaggcac

SEQ ID NO: 166508 - DNA, 1342 bp, Zea Mays
caaaaccctgtttgggccgacagctatcctatctggcccatctccggaagacgcgcgcgcggcccaaaccaccaaaccggcgccgacaagtggggcccatcggtcagcctcgcccgctacttgctcgcgcggccgcttccttcgctccatcgctgacacgcgggaccgcgctgtcgggtcttcccctccgcggaactcgcgttcgggcgtaacagaacccgcgcggctcgctcgtccgcacaccgaccgccgggaaatccgtgaatcgttggccagccacccaccctcgtgtccgaagcgttgcgcgacgccgtgactggttccactgacgtgtgggccgcgtctgtcgggtcgtcgtcctcaatcaccgtaccaagctccgcaggcgccactgcgatcttcgcggctgtgggcgttgtgcccgagtccgtcgctcgcatgcttataagggatcgggccgagtctcctccttccccacctcttcttcgtttgaactcagccgccaattcgccaacgcttgtcggggggaaacgaatccaccgccgcgggaggagcgtggtgtcgtggtcagctcggtgtttaccaccgccctcggtgagttctccttcccatgtatcgctagaatctctagcacgtctaaggtagctcggagttggcttaggtgcgttagttcgcgtggccactgtcgattgcaatggcgccgccgcggcacgcttggggccgggtcctacgctcgacatcagccgaaattagttgtagcattgagttctgggagtcgtcaattgcgcgtgggaaaagtgaatcggggtttggcgctcgggagcggctgattggcagcctcgccggcgtgctccgccgagcgtgcggggcggcgccgccgtgcgggtgtgctccgttgggggaatccatgcaggccgttggatggtgtgtgggcggccgcgattagattagggcaggaacgattcaatcggttgatcgtgtccgtcggtggcagatcaacgaccaggggagtgtatgactttgttttcatcgtagacgtaggatcttgatctgatggccagtagtgcttaccggttcatgtgcgactgatttaatctgagcccttggtttagatcgggcggccaccattcaacgataccccttcgaccagaagattatgcataagagaccctgaagtttactctatttaaaccgccgtcccgtgtactattgacggtgtctcgggtttcttgcgccgaggcccctgcactttataataataatgcgcgcagtccagtgacataggaaattgaataaattaatacagaaaacgcttttctagtataaaaataattctagatct

SEQ ID NO: 166509 - DNA, 445 bp, Zea Mays
gagcccctatttcattaggaaataggataagtgtcattacgaaccacaacgatgggatataacccatcaccaaaaggagcgcctagtggaactaacctctacattctatcatactagataagcaaagatcagtccccactagcaacagttcaggtgaaaccaccgtttttaagcagagcttatatacaatggcaacatgccaaaagcagctacacagctaacatcccagatgcatataaaccaccaaaatgacaacccatcacttgagctgtagccaactaccaacaagcgccaaaagaaatcttcaaccagcaatacgacggtccctcagacaccacccaaaagccctgctcatcgcctcatttgctatccttctgattagccgacttccttggaccaccatcttttttccctctctttctggcgaatagcccaagaatccagc

SEQ ID NO: 166510 - DNA, 359 bp, Zea Mays
tggaagattggaagaaagaatcagctcagctaaatgcatgtctgggagacaacggtagcctggaagtcaagccaaatctagaagatctcatatgcaaggcccaacgcctggacgtagaaacaaccaaacttatggaaagaacacgaaaggagcaacttccggacctcaggacagataatcaaggagccctctggttcaaggatcgcctgtgcgtgccagtgggagaaacacgagaaaccctgctcgatgaagcccacaactcggcttactctatccacccagggaccaccaagatgtacttagaccttaagaccagatattggtggaaagggatgaaaagggaaatagcacagtatgtg

SEQ ID NO: 166511 - DNA, 625 bp, Zea Mays
gaaaggaagtgtcgtgacctaggcatgggtccggtattgacgcgtgtccagactctatccggagcacctccgctccccactcggtcgagggtctaatgctgccacatggcttattgtctgtgacgtaggccagcgagcgaagcatgacgtaagggctctgggccgcgcggccctcgcatttattgcggagaggacacgccgcctgtcacccttctgacaggcgatgtgcccccacggcatttattgcgtcctatccattccactggcaggcggcgccagggccaccctgcagacggcgcacatgtccagtccgttgccggaacagtgtgcccgtgctgcgcggtgcactgtactcatcccttatacgagaagcttccccctgcacgccgaggctatacagatcttgggtgtcagggcgcaagaagatcgctccagcagcaagtattagtagctacatccgccgtgttcctgggcccacatgtcggggctcaatactcttgtacatgtccccctttagctataaaaggggaggcatgcgacgttacaacacaagctcaatctttaggcttagacccaagtcatccaagacaactcaagctctcaagcaatataacacacagtggag

SEQ ID NO: 166512 - DNA, 284 bp, Zea Mays
gcattatggaagccgcaacgccagatgtagctgttgccacggcaatcttgccctagttgcatagcgtcgcgaggagcactctgtatagataagtcttcccggtgccaccaggtccatccacaaagaacaatccgccctgatcggtgtcaacggcagacataatcttatcataggcgtccctctgttcctcgttaagagagtctttaagagccacatctcccgctgtcggttcgatactttcctcctcgtaaacctccctagcagtaccaatagcatcgtcatac

SEQ ID NO: 166513 - DNA, 359 bp, Zea Mays
ggtgaatgtattggaaattgtctcgatattcaacaatcatttgcagacgggatgtgtctggataatgtgttcatgcagtgtttcatcctgtgttttcgcgatgaagaaataaataattgctcgtccatcaacaaaaacagacttgtactggatgtcaatgttggtgtatgtacaattcattaatacctacctatttttgcaattgtttacatacagttttatatgacacaataattatgattatgcagactctcctcaattttgaggagcatgaacgctacaacaagtctcctcagatttttgatcaaactgtccttgatgcttatctggacaagacactgccccagctggacaacttt

SEQ ID NO: 166514 - DNA, 573 bp, Zea Mays
gcgggtatgggaaagtgggttgtcgggagcgtgctctcagacgtgttctgcggcggcgaggtaaggttctcgatgccctatcgcgataatattcaatcggttgggccgacaagctatgttaacattcaaggatgctagaacatggcacagaggggaaggaacaaacctgggaatagttggtcacggtcgggtgcctcacggcggcgtaactgaccacgatggggaaaactgcaatttgtgagctctggtgggtaattggaagcgaggaagggtgcactaggcgcgtaaccagaaggcggatcagggagagcctttaatttatagtagctacatgagtgctttgtgaatttgggatgagaatatctcacgaccagaagggatgtgagtcaccagagggcaactgttgtggcgctcggtgaggtaaagcccctggcagtaaatgggctgtccacagcgacctattgcaacgtggtaacgtctccaagaatgaggcatcctcgcggcgagcggcagacgccgacggggacattccgtccggtcgcgaagcaagtggttacggtggccagctcacaa

SEQ ID NO: 166515 - DNA, 693 bp, Zea Mays
atcataagaagccaggtgatggctcgacgagggaacatcaactagggcaatctgaagagcatcattagggatcaactcaacatcaccagtagacattagaactctagcatcaggtgcgccggtctctaaggtgacttccttgtttaaagcatgtaccgttgccgtgccatcagaatgaggaggagaagacccaacgtggacatccatggaggtatgagaaggggagcctgcccggacaccctcgggcgctaggtcgtagctcgcgctacccatccgagccggatcattaccggcaacaccctcgggggctgggtaaccgcttgcaccatcctcagggaccgggttccctgcagcagccacctctaaggctgaaggattctcagtcacctccatgggaattgaacaaccttgaccagcctcttggccccgaagactacactccaaggtcgacgaggcacgagacgccgctcgggataactctaatcccacatctggaatgtcagagcaaacgttcatcataccaccgtccgtgggctcgaacaacaaatcttcatgaacaacatcctcgaaagcctaatcaaaatttgctagggataattcttgtagaccaacgagctcctcactgactatgtaatgccgactattcttccgaattaaggggacttcctcttcttcttcttcttcctcgtcaac

SEQ ID NO: 166516 - DNA, 403 bp, Zea Mays
caatacctggagcaactccaccgtgagggcgacgagatgggtctgcagaaccatagcaaagatcgtgtagcctcgtcgatgactcaagaaaaccaaacaactctctgatctgattagcatgtaaagtgacattctctcgcttaaagcaaaatctcatccactggtggtcgatgtcaatccagactatagcgtagaagactttgaccgactcctcaacatagcaaccaccaaaatccaagagagtggacatgccaggtagttagatgatgtgacccacaatctctgtatccaccgatgagccctcaaggcgatctgaacagtctgctgagctctgtagaacgactcccgagtttgtgtgctgaacagaggaccagctgtcgagtcacgctgtgctagaaactag

SEQ ID NO: 166517 - DNA, 349 bp, Zea Mays
gggcgtgtttgtaaagccagagttgttgcgtcgttgggatgtgatgtggctcggcaacaatgacacaatatgcctgttcttgctagtgacaatgtggttgctatgggtgagggatcggcaaccttggtttgagctgaggttcatcgttggaagtcagagctgctcttcacttacgtgtggagcttggcaatgacgaccggtggactccgttagtgtgaccctgctaaacttggtgtgcatgccggttcgctttggattcaagccggccggttgtttggactgctgcggctttaatctatagagacaaaaacactcagcagaagccggtacggattaaaactgagcgaac

SEQ ID NO: 166518 - DNA, 636 bp, Zea Mays
gcgaaggtagactgaccggacggagcaacgactggtgcccccaagcggctgacaccgaattgaacctcccccggccatttcccccaacttaatttgaagaatggagatctaaattgttctggccacggcgaccgtagaccatgcgaatagaggaacgtgttcccgacgatgggtggcggtttagttcaattgggcaggtctatgagcatcacgggtatgtgagatcactcaaacgagggagcagaaggtttgaactgacctcaattgcacaggccgcggcgaggttggtttcacagcggcggaaactgtgattgggggaagtgagcgattctccggctatgggggctaatcggagatgggagtggtggctatggcttcgcaatttggagacgaaggtcaaagctcggttgatttgagcgaagggagcgaggacggggtgaatttataggcgcggtgaagcacgaccgtggccacggtgataaccattgctggccctagctggcaatcaacgatggcaccgagcacgacactccccttagagcttgccacgttcaaccgcggccgtaaggcagtcaaatccgtgatggcgtggccgaacagaggagagcggcgccggtgaccggacatggccggaag

SEQ ID NO: 166519 - DNA, 393 bp, Zea Mays
gctctcccggctccggagctaccagtattggcaaggacacaaggtgctgctttaactcttgaaaggctcgttctacctcttcggcccaagagaatggaccgaacttccgcaatagcctaaagaagggcagtgctctctcagccagtcttgaaatgaagcggctaagggcggccagtgaccccgtaagtttctagacgtccttgatgcgggccggaggcctcattgcctcaattgcctttatcttctctgggtttgcttcgatgccccggtgtgaaaccaggaatcccagcaactttcctgcggagacaccaaagacgcacttatccgagttcaaattcgtgcgtgttgcgcgcagcttgttgaagaccagggttaagtcttccactagggtcg

SEQ ID NO: 166520 - DNA, 617 bp, Zea Mays
gcaacgtgttggtcacttgctttcgatcactatacataataaaaacaagacaacacaatattaaaagacagataaccttcatcatgaaggagttgtcccttcagggtaactccttcggcgatgaaagttaagctttaagtgaataaatgaacgtacaatatgaatataaaagagtttgaatacgacaattcaattaggatatcttcataacatattcctcccttcgtaagttaactttacaattgtacctttgttgctgtggaaagagttacaatgaagatgctatagagagagaattacgtagcaattgtttagtccaccaaaaaggtactttatgcagggcactgttcatctatttatagagagtcatacagtttcgtacaaaattacatttataccctcagagattacacacaaagtttatatatatcatagggttgacattgtccttttctctctgtgacttggataacaccttctccttgtatcatcttcctgtgttgttatgaagaagctgccttcgttacccttccactattccacgtcgaagctattctgattccgaagctcctgtaattcttggcaatatgctgataacaaatggtcagaagacgaag

SEQ ID NO: 166521 - DNA, 671 bp, Zea Mays
ttaaaattacgtacaaataagtggatttatatactaatatttaaatgatatcatattgttttcttaattgtagaagctagattttaatgtgagtggagtaagcttgagaagaccagataacgcgaagccaaagggcagaacaatcaatgataacgaaaaaagagttattaagttgggggcaaaaggagacaagaaaaagaacaaaaagtgtcaaaggtgtggcattgctgatggtcacaatagtcgcacttgtctatctatggaggagaataggcttcggttggccttactggtcgaaagagagggcggcccataggttctaggaacaagggttcatctaatgctccaaattggaatgagacatgcacttcaaaaaaacattgcggtggtgtcacagacaatgattcatctagtggggagtagatgatttcttattttatgacaaatgtaatgtagtgccatacttgttattagaaatatggatgaatttataaatgctggaaccagtcgatattcacaaagtataagtaataatgatgtactgcatgaaatggaaggttttgtaaactgtatacgaaatatgcgtaattgtgttgtgaaaacagtgtaaatcgacgctggacaaatcttggtggcaaaaactggctaaaaatgtctttgtgaagaaaaca

SEQ ID NO: 166522 - DNA, 589 bp, Zea Mays
ggtactgcatcttctgaaatctttcatttcccattcttgatctgtactttcatggtgtcataaaggttgattccggtgacgtgagttaggtgatagtcgggtctttgtttcagaatcactaaatgtatgatttggttgtatgaacgagttgatctgccattgtgaagaggaacaacattacctgctgtttaattagttggttctcttcgattccttgattcctttattactgaatgttgagcaggccaatatgtacttaaatagatggaagtatgaataatttatacggctaattcgtcttactcgaagttacctcgcactattcagatttgttaaagtgtactcttttcttattcctcagactctctgcattccctttaggcagcacaacaactctcgtggttgtagcctccagatatctgatcttcttggtttatgttctattttttttggccaagtcatgttcttccgcttttgttttttccaattcggtcataggccaggttctcttctcttatttttcttttccccattttcccttctcccttcttttataagatttccttagatcagaatttgcggacaaagc

SEQ ID NO: 166523 - DNA, 403 bp, Zea Mays
cagttttctcctactgggctggctacctcacttttggcccagttctctgcaaccggcccatttcttctcccgcactcctccatttctccacgatcgcgcgcacttacaccaggggcccggtggccagtctattgacgtgcgccgtatcactgatctatgggacccactcatcaggacctcccccttcctcgctcggtctcgaacagaagccgtggacgccgccatggattcttcacgattcttcacctgattcaatgcctatctgatctcttcccgggttctctcccaagatccatgcaccgctcaaccaaccctcccctgattttctcgctgccagtctggattgtgcggagggtagctaacaacttcaccgctggccgcgcggatttaacaaacgccgcgc

SEQ ID NO: 166524 - DNA, 355 bp, Zea Mays
ggcgggtttattataaccaaacagaggggctcttcataaaatttgccgcgtgaaggggtatgaagtgagctcggtcgttggattagattcggacagccaaagatctaatcagaactggtagaccccggtggccgtaatatctgagagcaacggctgagatcctaaataacagaaatcgccagtcgcccgatcgatccaaaatcaacggctcacacaacaccacgaaccggtaagagatcgatctaatcgccatggttgatacctgatccaacggctacgacgcgatcccctacccatctctccttaccgcagaccaaacacagcggcgccgcccgaagggcgcaccggcgacaag

SEQ ID NO: 166525 - DNA, 409 bp, Zea Mays
ctaagtgaggtgctttgtgatcaaacaaaatgtatgcatatgatgaaagaaaatttagtggaggtcttggaattagaggatgaaaggaggggaaagggtagattagggtttcaaacctgggttaggatttttgggatgctacagtcaccttttggcgtgtggtgtgcgagagagagacaaccgttgaaagtgacactctgactgcctctgcccgacttatctgcctgtcacggacggtccgcgccctattaatttagacggtctgctctactgactcggactatccagatcctgatacggcggacggtccgcagtccttacccggactgtccgcggcctgatactcaaatctccaaactttgtccactttctgattttttgaatttcaaatttgatttgtcgctcatat

SEQ ID NO: 166526 - DNA, 846 bp, Zea Mays
agccttcgacatttgacgcacaaaacaatcaccgcaattggcagcctcgactaccctcgcgtgcgacatgtccaagcaaaagtcgcctaagggtgcagccggacaaaagcacaatatgtgcgcgacatcacccatagggtgcgaagtcttcatggaaagacacgtccgagcaaaagtcgcctaagggtgcagctggacgaaagcacaataagtgtgcaacatcacccacatggtgcgaagtcttcacggaaagacatgtacgagcaaaagccatctaagggtgtagccggacaaaagtgtaagtgtgcgtcaccaccgcagggtgtgaagtcccctacaaaagcaacttccaaaacagatatcgcctaggggcgcaaccgataactaaagtgttgcatagtcatccctacgacacgaacacgattactcatacaagcgcgcaatctcaaatatacaacaaacaaagggctcaacggcaccatcacgcaataatacaaatcacaactgttaccctcacaactctattgggaagagggggagggcactgttttcactcactatcacaacaagagcagtgagggcaactaaaatgtcacataggctccgccttcagaataagacccgcctcctggaaattgaacaacatcatcctcaactcttccccctcaaataggtcccgcaagtccccctctccaatgcatgtcccggacgtcgaggaaagtagctcgcgctgaccaccctgatccagtcgaagacgagacctttccatacccattcggcgacttcttccacttcgtgacgactcgctggtgctctgttttgacacaaccaccctccgcctccacg

SEQ ID NO: 166527 - DNA, 466 bp, Zea Mays
ttatgcgggagggtattaagaactgcaaaataatggttgtggtgagaagttgcagaactggactgttggtacttccgtacttgaggtactttgagcatgtagatcttcactcaaagatttgattgatccttttatggggtgttctgtttgaggaatgagttaatccatcatccgcacattcctcacttgtttctatcattctatggtttgtgtgttggaatcactccactcggcaagtgctaatcacaagcacttgaaaaactagtttgctttctggtgaacacacacacgcacgagacaagctaacaggagagagttttctggccgaacagactcactgccttgcctttttttcattgatttatagacccaaagtacatgcaaatgcccagccgacccagccaaaagactcggccaacactcaagccatgatcctaaactcatgccatgatcctaagcagacgcc

SEQ ID NO: 166528 - DNA, 589 bp, Zea Mays
accacagattacactacgcacgagcgttttccactaaagtgtccccaaactccctgagaagatcatccaggctagtcagggacacttcctcgacgtcagaaaagttctctatccctagggaaggtagtgttggcggggcttcttccttcgggtcagtcttgcatccttggctcatgaaacactttcagatcttcttgactagggagagcttcttcagcctcttagcatagtccatcttcagggcccggtatgcctcacgagtgttgtcctcctcaccttctgccatcttgagactgtcttgaagagccgccttttcttccttcaattccttgatttgaagctataggctttccacccgagagtttaggtgggtgtagtgggagaaaaggttgtcaaatggttgtcaagggtgtggagatatccggtgatgtagattatggtagggtcatcttcattatgatctctccctgacaaagcctagagtctttacctccaagtacgggtatttttgttgctgggtggaaagtagcggaggggtgtctcagagacttccctaatgtagttttggcatagctggtggagggttttt

SEQ ID NO: 166529 - DNA, 839 bp, Zea Mays
tagaaattgagataaggaaagttataaggactttcctcatcagccagcttgatccaaagggtagaatagaactgagcaataacttcatcattccaatcgtattggaatgtcataatgttcttcatcctcttcctctcacaggccctaaaagcctgtgtcatctctggatcaccaattgcttcacatccttcctagttaatatatctctgatgcaggataggctgatgcttcttgggaagaatcacagaattgtaaaaatcgacatgttggagggtccagaaccgattaccatcgatcctagcatcacgaatgcgtaatgtaggattttggaagcggatgtcctggagaagggcagaccctccgctggcagtgaaatccgtgactggctcattggcagatcgacgggcctccgccctgtgaagaaccaacccctggataatgggtgcgttggcagaagggagatcaacttcatcatccttgcctccatcatcatcgctagttggctcccaggcctgtggatttgccgtgggtcgagaccgaccggagggattccgggccgttcgaccgcgaccaccatgagaccctgaggcctcagcaccttgcatcacatttccggatcctcgcccgcgtttggatctagaacgcggaggagtttcttcacgaatttcttgatcatcatcagagtcagattcaactactgaaggattcctacgacgcaccatccttaagataaaaaaggagaacatatggtgagcgaggaaatcgatgttcaaggattttaacaaacacgtttgagtaaagacacgtatgatattgagcatgcacttcaaccgttcatg

SEQ ID NO: 166530 - DNA, 756 bp, Zea Mays
ggctgttgaaggagtttgctgatattttcacagttcctactcaattgccacctgctagacagtttgatcatcacattccactggttccaggagcggtgcgccggtgccagttaattctaaaccctatagatactcaccttttcacaaggatgaaatagagcgtcaggtctgcattattgcaagctggattgatcattcctagttctagtccctttgcctctccagttcttttagtgaaaaagaaggatgggacatggcggttttgtgttgattacagacgactgaatgatctcactattaagaacatgtttcctatgccattggtggaagagattttggaggagttggtgggtacaatttttcacaagcttggacttgacaactggataccaccaaatcaggatggcagagtctgagcctctgaggaatataaaactgcttttaaaactcatcaagggcattatcaattccgtgttatgccttttggacttacaaatgccccggctacattccaatgtgcaatgaactcgattttggccccttttctcaggaaatttgccatggtttttattgatgatattctcatttatagtgattcttggactgctcatctttgagcatattcggttggtgttcacaaaactgagggagtatcagttcttcctttaaaaggactcaatgtgattttggcaaaactgaactcacttatttgggccatattatttcacagaagggtgttgctgcagatccttctaa

SEQ ID NO: 166531 - DNA, 306 bp, Zea Mays
ggcgaacgtgccaggaccgttggattgtgcgtgtgcgggcgagatttagggtggcttaccgattcgcttgcaacgttggatcgacgatggatggataggattagagctccatttcattaaatcttggtcgtcgatctccgatcgggcggtgggtatcgtgtaccgcttcagtgaagattagatctaatctgcgccctagaattctaatcgaacggcccacgttagtccataccccttcgcgggtcagatttattaaagagaccctggaccttttggaaatagaacccgccatccagagcacagcgc

SEQ ID NO: 166532 - DNA, 506 bp, Zea Mays
ctttcctggatgcctactccggttttcatcaaatccggatgtctagggaggataggaagcacaccgcttttgtaacggtagatgggctgtactgttatgttgtgatgccttatggtctaaaaaacgccctgccaacatttgttcgggcgatgagtaagaccttcggggatctgatccaggacaaggtggaggtttacgtcgatgacattgtggtcaagactagaagggggtcgaccgtagtggaggatctgaccctggtctttgacaagctgcgggcaacccgcaccaaacgaaacccggagaaatgcatcttcggcgtctccgcaggaaagctgctgggtttcctggtttcataccggggcattgaagctaacccagaaaagatcaaggctatcgagataatgaggcctcccgcccgtgtcaaggacatccagaagcttgcgggatctctggctgcccttagccgcttcatttcaaggttggctgagagggcagtgcctttcttc

SEQ ID NO: 166533 - DNA, 412 bp, Zea Mays
tgaacatggatctaagtctagcagcttgtctcctatctttatcccttaaagcaaagaacttgctcggattcaagtatagggctgctccatatagtttttgctccatttgattttcccatcttttttcaaagcatgatagtacatctgcttgcaatcttggcttatctttcaatgactcctttatggtggtttttgcaacatccattgctgccatgatttctagggttgctagtgtctcatctccatcagtaatccttagagcaatgaggagtggttgtgaagcccttagacagttttccactttttcccaaaatggcatagaaagcacaattcttgtgatttgcctcccttcttcagtgttgggaaacttagttaggtgccactcatcactgacaaataaactctttagacc

SEQ ID NO: 166534 - DNA, 577 bp, Zea Mays
tcaactctataccaactacagcatattatatcaatttttctctttcctctcgcctcctcctcgctcagctcctctgcgcctggtgactttcgtgcatgtgcgtcctctgtaggtctgggcataaaaaccgaaaaccgaacaccgaaaccgaaaaaaccggaaccgaacaaaccaaattacttttcggttaacaatctacagaaaccgaactaatttcggtgttcggttttttatttcggtttacaccgaaaaccgaaatcacatgggccatcaacccatcgcccatcggccactagctgaagttggcccatgaggccatcacgcattcacgcatacaccgatacacgtacacacattcacgccaatacgccatcgcctaccgccgaaccctagctagccaactgccaagcgccgccagtcgtcatatcgactgccgagtcactgcttgtccgcctgggcgtctggcggccaccgcgcgccaccagttaccagccgcagctggtcagcatcggcccaccatccacgtccaccagtcgtccagccgtcacggcggcacgccggcactgcttgccagtcg

SEQ ID NO: 166535 - DNA, 435 bp, Zea Mays
tttcactctatcttgcagcagtcagttcaggatggtgagggcaaagaacgtcacaccatcaggggaggagatgacgaggaccctccttgccccttcatacaggtcaagggcaagaccgtctatcttgagcagcaagagggcaggaagaaaagtcgcctggaccgagccgcacgtgcagcggcatcagcaacaacagatcaggctgagaagggagaccagctctagatttcttctgatcagattgcctatcgagtttgtcgcctcgcgtctcggcctcgctccactgctcccccactccttccgccatagtctccactccacctcccacttcgctagctcttgtcgctcacgagccatccaccacacccgctatgtccaccacctccaccactccaacttctactgctccagctcccgtttccggtcgcctattcc

SEQ ID NO: 166536 - DNA, 436 bp, Zea Mays
atttaggcgggagggctttcgtgatcacctcgagcccttttccctctggttccttcctcggatggactccacagctgggtcgcccgacgggccgcaggtcgggagaacgccacgtcgtgttggccagggatcgaggtaaggcttcctcttgctcgagtgtccctttctttcttcggggtgaatctgatgcttcccctttttcattacagggaagcccttgtcgattgggaagcatcaccctctattggatctttgtggtcgggccctctgtcttccctcccctaggagtcccgggagagttatgacgttttttgtgtaccgtaagaggctatcgacgtcgaactacttcgcgcgtagcttgtcgaggcctatggtcatgtagtcggttaggcaaccatcccttgtttattatctagctttcatgtcccttctctta

SEQ ID NO: 166537 - DNA, 848 bp, Zea Mays
tcccagaccaaccagaggtctggtgggagttcacagaatcgtcaaggtggcgccaataacacgcaggccagaagcaacaaacgcacctgtccaacccaatggctgcttcaagtgcggtgagctaggccactatgccaacaactgcccaaggcgcaaccagcagacaccccagaaaagcaataaccaaagaaatgaccagaacacccccgctcgtggatctgcacaaaacaagactccacagaaccagagtagaggaagggtcaatcacgtcactgcagaatcagtgcctgaggatgccgacatagtgtatggtatgttccttgttaactccatacctgcatcagttttatttgactctggagcatcacattcgtttataactgagtcatttgtggaaaaacacaacatacctaagtaccctcttaagaaggtattacacattagttcaccatgaggtaacatgaaggccacacactcatgcccccatgttaatatcaagattcaaggaatagatttttcagtcgacccagtggtcctaggatccaacggtattgatgtgattcttggatgcgattggttgaaaagttgtgatggagtgatacagtgtgccaatggaacaattatgttgacaagccctcaaggtgaaagaatccaagttaacatagacaagtcaacagatgaaaaagggaaaacaatgatcaatcacttggaagaaaagcccttggaaaatatcaaagtagtgtgcgaatacccagacgtatttccagaggaattaccaggtatgccacctgaccgtgatatagagttttctattgaattattacccggaaccgcacctatctcgaaaa

SEQ ID NO: 166538 - DNA, 839 bp, Zea Mays
gtagagccctaggctctcgtgcttgtgtgggaagtgtacatgctaagtttcttctgccctttacagtgaggcctccgcccctttatatagccaaggtaacgggtggccatcgttataatgaagatttttatggcgtatgtcattccctaccatttggagtcaatctccttttggtactccctgaaggtccgtcatggtgagtgcactcaccccgtcattcataagttgatcagtccgttggggacaattgggtcctgcaggtgtccaaagtcttaccataagatacgtccctagggcccatatgagtagtttattttggagttccattcttctgctcatgacttgttcatacatttaacttccttgtgcctgaggcgggggctttcatgattcgtggctcctttttcgtgcttctgaggcgaggtggttggacagaatcgagtcctttgtacaataactatttatacacactgtgtaccccatatcaggggcatgttccgaagcgtcagcgagtattaaatgtgctaaccttttatgttattttttagtcttggtgtcctattcgggaagtacggtctagtttggccctgattagtgctgggaattgggccggaccgggccaacctggcttgaggttgtcatgcttcgggccaaacaggtttgagccaagaagacctaaaaatctttcgggccatgctatgctagcccaaacagaagaaacagtggcctagcccggcgctaaagtatgtcgtgccttcgtttggcggtgttggctcgacccttatatttgaaccacataaagtctaaatattcaaccatataaagtcaattgcttacta

SEQ ID NO: 166539 - DNA, 820 bp, Zea Mays
agcaaatcgagtcacacctggcctaacaagatcaccacctagcttctctctcattaggttgtgaattctaccatgcttgtagatgaacctcgacactttcttagccatattgatgcagctattaaagtccttgatctttccaatgtcctctaatagcaaatccaaacaatgggcagcacaaggtgtccaaaacaaatgggggatcctatccatcaagattctccctgcagctttaaaattggctccattgtctgtgacaacttgcaccacatgctctcttccaatcttgtcaatttgcttcgccaaaaaatcagccaacatgttagcattagctacctcacttgaagcatcaacagaagctaaaaagtaggtctgtgtcggactgtttactagaaaattgatcaagtgacggtgtgctgcgtcggtccacccatcggacataagcgtgcaaccatattccctccaagacgcttcatgcttcgacctcaactcggatgtcctcttaacagccctctcaagccaaggcaccctagcttcatggtatgatggaccacgatatccaggaccatattgcccaatagactccaacataatctcccaacttcttgacttgacgacatgcaatggtatcttattttcataaagaaattcagctacatggtcgtcaactatttgtttagcttcttttcccttttttgtgcagtgctctagagtggattgagacgttttggatttgtgcctctctgcaactacctcttctagtgtcttgcagagcatggaagcaatcgactttgaaggcttctgagtaattggttttgtt

SEQ ID NO: 166540 - DNA, 879 bp, Zea Mays
ccccatgccaagcttttcatcagccaaaacataaaagtattttcgtcaactctcagaatcacactaacatatgtgtactgatggtgtaggcgcaggatgaacctatatacaacaacaagggctccacttgccaagttgatcgggataagcgtaaacaaaagcatccaatctgagataatgatgaactgaggcccggaggcctgagtgatgaaaccaaccaacaaacattcagacatctcacactgatctgatgaagctctttataaaaagagcagcccacagacagagatattcttattctagcaccatgtgatggatgcaaaaaataaaggcagcctaatctcacgccacctactgccgctaatgtaggtcaaacaaagccagttaggacctgggactctcctgcagagctcaaatgagagcagagcaatgagccgtcaggcaatcatgacatcaacagtgtggcatgcgctgcagatcccaagataacaactgtgcagtgcagaggccatgcacatccaagcgcttttttgcttaacaaagattcttcatcgcgttcgcattcgcatcgagttgttttaagggatcttctactcttcttttctctctccctctctctctcatggactgcaaagcgaaagggcgtgcgcaaaagcaggaggctattcgatggattggcatgcgaaagcagagggaaagctagcaatggcgcaagtggagcccgcctgtcataggcacagcagcagcagcagtaacgctgtgcatgcgaggcatgccatggcgatcggcaaagcgacgaggcggcgggggtgaaaaaggcgcacggatggggggaaaacaaaggaacatggcatcacgatgcaaaaacaaacaagtggc

SEQ ID NO: 166541 - DNA, 443 bp, Zea Mays
tcaccccatcttctaatcatgatcgtccattccggatccaatggcccaaggataatcttccacctttcaccctcaaacgcgacgacagaactggactcacggcggcgcttctccgccgagcgcggtcaccgctactttgtgccccaaaacctaatccgaagggcactatacatagaggagagttggcaaagggcagggaggcggtcttacctcggatttgtgacgatagcagcttcgtccacgtggttgcacggtcggcggatatttcccagcgatagcgagcaattctccacgcgacacaggcacttgacttcaaccgcggccatgcacggcctcacggacgatggcgaccctcccccagccaagcaccgaggacggaaaaccggcaccagcggagatcaccgacggcggaccaattcgctccctcggccaacaccctctct

SEQ ID NO: 166542 - DNA, 1359 bp, Zea Mays
tgcgttcaggcctcgtcctgcgataagccattcatataatttcaggagaaaacgaagccttaacaatctggtatcggacatgccagggttcaacgaagacgacaatgtggcatgtgctgcccaagcaccgtcgttggagtcaatcgccacgattctcgctgaagtacaacgccaacttgggggcttcactgagtatatgatgtccatcttttcccatgtcgccgcggtgaagaacgcacaatgaacctctaccgccacaactcctcctggatttccgtatgacatgccaggttatggtggccttcccccgagcactagagggaccgacggaccgtagcctctttcaactgccaccgactgaatcaccgcatccgcggatgcagccaccgcacataccctccggtccaagcaatctcgtgacttctccccttggcactttggtaggatccagagccttcgacgtaacgtggtgaccggcaagcagtacaatattgatgatctatgtgatcgattttttttagtttttaatgtctttagaaaaaagacaagtcaatatctttaggtgtccaaatctcgttctttgggtggatcggtactacaattgtagagtccatacttaggtaccataagtcatgccgccgagcctcttagtttggtgtggtgtcaataagcttggattttcggttcttcagatttgtttttataaatttcggtttttaaaaactataatcgaaatatgtatctagattaaacggaatccaaatatgtatctaggtgtcctaggactgtatgtattagtgtaaaagatcaatataaagaaagatgttgtgccttgattatgtctcttacctcgcggtgcaacatcacgacgcctctcgcccacgtgcgttcaggcctcgtcctgcgataagccattcatataatttcaggagaaaatgaagccttaacaatctggtatcggacatgccagggttcaacgaagacgacaatgtggcatgtgctgcccaagcaccgtcgttggagtcaatcgccacgattcttgctgaagtacaacgccaacttgggggcttcactgagtatatgatgtccatcttttcccatgtcgccgcggtggagaacgcacaaggaacctctaccgccacaactcctcctggatttccgtatgacatgccaggttacggtggccttcccccgagcactagagggaccgacggaccgtagcctctttcaactgccaccgactgaatcaccgcatccgcggatgcagccaccgcacataccctcgccgccatgacaattccactccacctgctaccctttccgcactcggcgtcacccctaccaccattgccgccattg

SEQ ID NO: 166543 - DNA, 688 bp, Zea Mays
gctccctcgactcgcgcacgcatgcatggtgcccgcgccgtcgtctccgtgtcgttttaatccccgttccaccgctggttggccctcgatcggccacgtacgtacgcatcttctggctcacgacgatagccgaggaattcgaaggaccgaacgagaagctcctgcgtggtgtcaacgtctaccctaccgtaccagctagccaccacacgcgtagcgcgggaaatgccggcggcggcggccatgacgacgaggcgggtggtgctggaggtgctacggtcggcctcccgcgacgccttccaggtggccttctccttcgcggcgaggccgcccgtgtccaccatgctcaagccggccatcaccaagcccctctaccaccaccaccacgacaacgactaatctggcgcagatctacagcacggccgtcggcatgccttcacagcccggtgggtgtgacgactattgatgacgtactaccacatttcgtcgctcctattctagtaagcaacgcaaaagaaaatgttgtaagattgagcctgagagcttgagtcaccaatgtaaattgtatacgactgactatatatagagcatgctctgtaaccatatatattgcccgggccccccttgccctcgcaatctatgctctacagcaatggatctttattccttgtgttagaacataatataagtg

SEQ ID NO: 166544 - DNA, 334 bp, Zea Mays
caactatcagctacgacggaactaaacctgaacgaaccaaactaccagaagcagcacaggatcagcacagagctgaccaaagacatagttcgcaaagatcaaactagagtagcacaaaactaaacagcttcagccccaatatagcccaaagttttcagcagcctggagctaccgaggcgaggggggattacagcaaacgcaatgatgatgaaccaaaatagccaaacatagcagaatcttcattggatccgtctgtcgactggcttccaaccacgagtcttgttgtagatctcacatgccatccttctgattttgaggcttccttgttccacca

SEQ ID NO: 166545 - DNA, 510 bp, Zea Mays
agaattttgcttgaaattcaaagatgaatcatggttgaatttgaaatagaaatcataaaaagaaaacagaaatgggaccaaaaccgcatctgggccaaattttctctcgcacggcccactcccgcctcccttttctttttagggctttttacatttggaccactagtctggtcactttgctcatttttgccactaaatttacatcgtgctcagtttgacccctcgctcgtgaagttttgctcagttttgccattgtcatccttttccgtccatgtgagccgtcactgaatcatgggacccgcggacccatgtggaacccacatgcaggaaccaatttatccccaaattgaaccgattttgatcgattccccactgctcccgctgttgttgctacatccggcatcgccccgctggccgctgctccggcctggtgccgctcggcctgctctcgcctggcgctgccttgattgctctcgtcagacgccacagtaggcaagatcatcgccgctc

SEQ ID NO: 166546 - DNA, 877 bp, Zea Mays
gtcaagtcgaggtgcagatcgccggcggtggtgactagaggagggctggccgcgtgcgcaggcagtcaggctcgtcggcggtgcgcgctccggcctgctcaccatggtagagctcaatcaaggtgctcggggagcttcacaggaagtcagtggtgccgtgggtgcaatgaatttgaaaatggctcaccatgaagctcggtccacgtgcggcgacggtcggctggagtccggcgatggtaatctggtgcctccggcgaagtagtgttcagtgtaagggttcaggaagctttatggggctctagggaagcaagccgaggagctggattggatggaggtgggccggagtagacggtccacggtgggtgggctcgggcggccgctggcacgccgtgcgcagagagaactccagcgaacttgtgctcgggcggggctgagagcgtgcaggggagtacggttgtggccttgggttgcattataggcgcgagtgagggcgtggggtcgggcgtcgcttggcgcgggcaagggcacccaacgccggggcatgctctggtgcgccataacaggtcgaacacgtggacatttgcttctgccctggttcaaacgcttgctgagcaaccaaacgtgcaaatcttgccaaaaatcctgtgtaatgtctcttctctgtgccaagggctatctgtcttgtgtgagttccaagtgaagatatggtcgggtgtgggagatatggtggcgccaagtcaagtctgtctggactgttcagcccgagacaaaacccatgccaattcatgacaaatggttttggtttgagttcaaatttttccaaggtgttccttgggtattttggcgcccttttgtcaattggaccattttgatttcg

SEQ ID NO: 166547 - DNA, 440 bp, Zea Mays
ttaaagatgctaaggcaaagctacatcctgggtgtgatgcattcacgaagctttcctttcttgtcaccatatttcatttgaaatgcttacatggatggactcaggagtcatttacatcacttcttggtgttctttctgccgcactccctgaagaggcaaacttaccaaaaaactaccatgcagcaaagaaaataattcgaggactaggtcttgattatgttaagattcatgcatgtccaaaggattgcatgcttttctatggtgaccaggcgaaacaagaaacttgccatatttgcaacacttcacgttgggcagaaagaaaaaagaagggtgaagcaacaaaaacaaagggatataagaagaaaccagcaaagatcttgcggtattttcctttgataccgaggctgaagaggttgtatgctaatgagcaaacagcaagc

SEQ ID NO: 166548 - DNA, 957 bp, Zea Mays
ctttaggcaaatggagccctagaggggattatagcaaaaaggctatgtaaatcacattgtcatgacttgggctaattataaaaattgtagtacacttaataccctacaagagttagtaagagaatgaccccaaaaagaattcataaaaaccccaaaaaggtcaccaaagagaaggacataaaagaaaaatcaggtttttctcaagttcaaagctgaccctctatcaaagatcaaacatgttcaccttgttcccaacctcaaaaccttatggcccaattgacaaaatggcgcctaaagtcccctagaacaccctggaaaagtttgaaaccaaccctaagtcgtttgacccgacttgacatgacttttgtctcggtgtggacagctcggacagacacaacttcacctcctcgtaacttgccaaccagaggtcaaatccacttgagcactacatgagatacaacgggtatactacaaggaagaaatcttatacagggattttgggtagatacgaagagatcacgggccaatcgacgcttgaaagtgaccagaacaaatgctgccacgtgctcgatgccttgtctaaccggccaagcgcgcactggccgctgccgcgtgcacccccgcgcgtggtcggccacccccgtgcccacgcccgtaccgtgcctgcgaacgggtataaagcccaccctcgtgcacgaccatcttccctattgcctcccccgcaccgcgcctaaccctcccaagctcgcccacaactccgacgacctccccgcgacccgccagagccgcccgagggcaaccatcatggccaaaccctttcccgcccacctccactcgatccgagccctcggatagcttccccaggaggccgtgaagcttgcccgagcttgagccgagaaccagccccaccggaatagtgtaatcgcgctcgccggagttcgtgaacccgccggagca

SEQ ID NO: 166549 - DNA, 373 bp, Zea Mays
aaacaacgtaaatgagtacgaaatttagcgtaaatcctatatctgttttgtaacagcaaacggagcccaaaattacggcgtgaaaatcgcgtgcagccgatcgtgcgcgggttctggctcgggcggattccagagtaaaacgtgagctaaaacagcgtaaatgaatacgaaatttagcgtaaatcctatatctattttgtaacagcaaacagggcccaaaattatggcgtgaaaatcgtgtgcagccgatcgtgctagggttctgactcgggtggatttaatcataaaacgtgaaccgaaatagcgtaaatgaatacgaaatttacgtaaattatagacctgtttcgtaacagcgaatgaggcccgaaaatta

SEQ ID NO: 166550 - DNA, 424 bp, Zea Mays
agaaaattcgccccaccccagatttgctttatggaggtcctatcctgcttaatcttgcaaccattatttttaactaacccacccacacggattccctccatcgctggtatatggcatccggaactataatcctgtaggtccggaaacccgaggtccgactctaaagaaagggctccagacacactggtcggccagccaggccagatcctacaggtcataagtcaaaggatgaaggataccagttaatgggtctgatgggtggactactgaaactccctagctgaggctgtgtgcaggtccaggtcccagtcgaaataccctcctgggggtcaggtcaccaactcctccttaaatatactggcatccagcctcgacaagtcgagaccgcatcctagaggggccaggaaccaggggagaagttgac

SEQ ID NO: 166551 - DNA, 731 bp, Zea Mays
ggaaaaggcactggaagggcctgcctttgttaaagaggctgaggagaaagttgccctgatccacagaagattacttgaagctcagagttggcagaagagttatgcggacaacaggcggagagaactcagatttgagaaaggagacttcgtctacctcaaggtctctccgatgcgtggtgtcagaaggttgcaagtgaaaggaaagctagcaccgagattcgtcggcccctaccccatcattcgcagagtgggacccgcagcgtaccatcttgaattaccagaatccatgtctaatgtccacaatgtgtttcacgtgtcctagctccgcaaatgcctgcaagtaccagaaagtcacatcgaagaagaggcaatacaaattcagaaagatctttagtactgtgagaagccaataaaaattcttgactcagcagtccggaagacccacaactcagaagtgagactctgtaaagttcagtggagcagagaaggggaagaggaagctacctgggagagtgaggactctttgaggagggaatacccttatcttttctcaaatccagtctaaatctcgagggcgagattcctttaagtggggtaggtttgtaacatcccaaaatttcaacctaaggtttggaaccctaatctctcaaccccccttatttttatctctccctaaactccaccccttaggtcatctcatcatatgcatacactttgattgttagaagcac

SEQ ID NO: 166552 - DNA, 495 bp, Zea Mays
tcgccgacccatgcggcgatgcgctggaccctggcgcgctgctctgcctggagatcttcaagtgtcttcttcattgcctccaccgtctgggggcccggtgctgcctgtgccgcttgcgccgcctcgaactggcggaccagctcctccagcgcccgcttcttctcctccgcctcgagctcatgatcggccagcaacttctcccgcctttcaaacatttcctcccagaaggcgaggtccttctcccgctaggtgagatctgtcgcccgcttatccagggaagcatctttctccttgaggttctcctcgaccagggcaaagctgctggccttgtcatccagctcccgctacagcctttgcaggctctccacagctgcggtctgctggacccgctgctcctccaggattttgttgaaggcattcagcttggcctggagctccgtgacgacctcctccctctggtccaagtgctcctccttcttggccagcctcttctcc

SEQ ID NO: 166553 - DNA, 398 bp, Zea Mays
aaattttcccccttagaaaatgtcgccgcgcacaaggagaacagcgcgcaaacatactggaccgattggtgtgccgtgtcaccagctggccccaagacatgataatagtagtagtggaagcaacgatcctataggggatctcgaagctgaagtaagtcggctccaagcggaactccgccgcaggacggctatatgggtcgtagatggcgaccgaataaatgaattgagaagagacgtccgccatctgcgagatcagctcgcggaccgggatttggcactcgactgggttgttcaatctcgttcgcttgcatgggccaaggaggaaaaagctcaagctcgagtagccgagctcaacttggtcgttgataacctgcagtcatattgcaataccttacatg

SEQ ID NO: 166554 - DNA, 882 bp, Zea Mays
ctgcagcctgcacggcggcgttttggcagcgcgtgctttggctttttgtgaacagtgatgggaatgttgttccttctgccctgagtcctgaccgacagtctcctcgttggagaaagaatgtatgcggagaccccgcgacagagcgaatgagtgagcagcgctggactgtctctactctgtaagctgtgaaagcatgaatttgtgcgccgaactttcactgctctgctaggcacttgctactccaactgttacaacaagcacccatcagcgctgcgctcgtgggcatagtgagacccattcctccttcaaccaaggggatagaagccgacagcaagcaatggcacatggttttcgtgtcgacgcggaaaaggccagtcagtaccgtgtactgcgtacaacctgataagctctgctcagcgggactcacagtgcatgtcgcccgacgctttcgtcgtcggcgtggataacctaaccattcaccaagcacttcacgtattgcctgacgatcatatcatatcaagcaccagcgcagcaggtctggtcgggacacacgacgccgggcaaaaatgaaggaaggactaaggagggggcattcgaagcgacgacgcctctgcccgagcacgttctcccgtcgtcaggtctcgctcggcagcactgcacaccgccagtggcccggctccatgccggcccaacccaactgcgaactgtcaactgcctgccttgtattccggtccgcgtaaggttcggtggccagtcagtgtccgcggcagccaaaacagtcgccgcgtgctccgtcaggcatcagcatcaggcttcccagtcgaaacgtctcgctctcggagtgttcccggcgtcagatcgatcgatgcatccatgttgtct

SEQ ID NO: 166555 - DNA, 957 bp, Zea Mays
acaccataggacggtgggttggttctataaaaacagaggggccaaagtgcaaatccgcgcccgcgaaggggtacaggaggatctctaccgttggattagatacgagtgcgccagattaggttgtcgcaccatataatggttaacctgccccaatcgtccgatctggagtatacgacacggattgaccagacttcgtcgccaccggaatgagaggggaccgctggatccaaaagctacggtccagactttataacttgaagccaaacctatgtcgtccgattacgcacgaaaggcccagattcattcttgcttccacgatgcacacacctgtttacagccctcgatcacaggatcaacggccaagcacttatcttcctcggcgagacacccaggcgtagttgtggtgcgcccaacggcggacacgccatggccctgcccatggcttctcccccgcccctcgccaaggcgattaactggttgctacggactctaacccgcgcccaatctttaccccgcaactcaacaaagtccgttcgactcctatgatgctatgggttagcgcccggaagaagcagcacaacagtgcggacacctgtgcctcgccaaagccagcattgagtcctactcgaatatgaaatgacaacgagcgagaattgatgtttaccggatgctggacgagttggcgatgcccgcgacccgacactggatttctcctacgcacagcagggatttcggcaccgcacgtgctccccctcggttcttcacaactctccacggcttcgttggtgaaagagacggaagaggggagagggccagcaccttatattatggtcgcgacatgcagcgagaggatctcgctcgcgcggtggtggcggtggtaacggcgtttgcgcgattccggcagggatgaggatagtgcgtgggtcccactcgacagaggaatacccgaggctggcc

SEQ ID NO: 166556 - DNA, 807 bp, Zea Mays
ccaatataaggagtgcagtgagcggtcaagtgttgtctcccttctgtcccaaagacaatggactcctccttttatagtcgcaagggggaagcctatgagtacaagggttgtcgcgctgttgttgtgatcagaggagatgagtccgagcccctatagcagtatggttgaagggattgcccttgtccttggcaccgtctttggtcaggagaaggatgtctaatccctgtaacctgcactttgaccaggtagagagtcgaggctaggttgggggctcggacgcgtgccccagtctgtcctgtgcaagggtgcagatgaatcatttataagcatgtcgagtcgtagtggttgaaatagcgctcgacatggtgaaaagtttgtggtaatatgacccgtgcgtcatccgagatgggggaaagcagattggacaccgtccttgtggtttctgtagccatcctatctttagaggggttcgcgggggaggaggcgacatcgtgtgtttctctgttggtgatgtttgtcgaggccaggctcaggcaagacggagacttctctcgaggtcgagcccgggtcggcacactgatacgtagtcatgcctagagtggttggaatagcagtcggagtggtctcatgcgagatttgggaaagggtaggtggcatttaatgctcttctgctatggcagttggccgaggtcgagctcgagcgaggcggggatttcttccgagactgaggccttgaccagacgttgcatgtcccactcagagtggtcaaaatagtggccggagtgggggaacagtgcccagtattca

SEQ ID NO: 166557 - DNA, 791 bp, Zea Mays
ctctaaataagcttctctagaagatggatgagtacatcaggtggataacgatttccgtcagagaagagaagaagcccagagatatgcagaattgactaggggcttcggggggaggtttaacccaaggcatgtcaggtagcattcacaacccacttcaaaacaaagacaaaaccagccagactcaagggcaacataatcaatcacaaggctcaaggacccagcaacaaccctctcaggacaactttgtttgccagccccaagaggaggcagaggaggacgaatattcagaggaagagtcaattcccaactaaggaagttgttcggtatgttctatggagaagacaaggggcaaaccacaaggacatgtcaggtaacaatccaaaaatagaaggaaattgacgaagcatagcaggatcaaccaaaacaagtcctccaaacttccccatactactcctcatacatcctagagtatgtccatcatcatcagccaagccaacaacctttaggatccattgctttggcaaccagtctttagctcactagatcgtgcactagcctttcataccaacatcttcctcatatgagcaacaacttccaggtccaccacagatccaacaacagttttatgaacaaaacacaccacacacgatacaagggaacaatctgaggcctaaacgatcaacagcgttgtcccggagtcgaagcatatctattgaagcacctgatgggctgggtcaagaagtcaaagctacagagaaaacttgaaaaacctattctaatctcaatttatg

SEQ ID NO: 166558 - DNA, 850 bp, Zea Mays
tatcgcaagatcaacgattcagctgcactcgctcaaatccgatcgcccatcaacgatccgaccgtccaacacccacccgacggcgcaagtgtatcttcctccctcggatacaggcagcgaccaggcgctgttagtggcacggccgacggcggacacgccatggccatccccatggtttctctctcttatccgagcgcgcggccaaggaaacaaaccccatctaagccgtagatcaacacgccaacagtccagaccccttcatctaccgctatccgagctccacggagttccagcccccatggtggcgcactgcgcagaccggagagagcaccaacgcagagcattccccgctgcagaatccatcgcatgaggtccgcggccgactcagcacacaaccccctaccgtcgagcacagtaacgcgacacagagattagctcgggctaattaaaagggcttactcaggaataatggcacagaggactttgaccatggcacgcggtggattgcgacgtcgttccttcgaggcgagtcccggcgccctaacttgatgccgcaaaggacgccgccgagggtacggggagcgccgcagccgccacgcgcgtccagagcccggacgactcctccccgcggtcgcccagaccacggcgcacagctccaacttcggttttatgggtggagggtcatcggatgcggtcgttcttatagtgcccaggtacgaggtccgagttggagtcccatatcccaaccataccgcgacgaaatcgcagcaaaccaggaaatgggccaaattgagggaccgaggcccaggtaaggtctcttttctttttttcttttcttcccaaagtttat

SEQ ID NO: 166559 - DNA, 415 bp, Zea Mays
ctctaaagcgctgatgatatcttcagtcgctcggcagctatctctaaagcaccgacgatatcttcagttgctcgacggctatctctaaagcgctgatgatatcctcaatcgctcggcggttatctctaaaaaacgctgacgttgttacaggtcactcggttgtcgcatctgagagcgaagacgtggtcaacagttattctgatgcgggcacggtttcatcatcactcggactctaattcaaacacgtaaatatcgacagtagtaagctcggccatcacccctgaagcggcgatacgatgcccgagttattcagttactattccgaatgaatcaactccacaaataagagatcgacctactatgaagcacagtaactagtaccagaggaggcaaagtcgttcttcattaagggaag

SEQ ID NO: 166560 - DNA, 503 bp, Zea Mays
cttaggtgctttatgctttaaaatgttgtttcttttggtgtacctaaggaaccttcttaatcatggtgtacttagacattgcgctttatatgtatgatcttgtcgttttcaattggtatatgtggtgcaatgattatcatgtatgaagcatgcctaggttgcctgtaaaatgttatactccttgaggcatgcattgttgtattaagtcaactattcaattggtatctctttgtgatgaaattgatagagtatgccttgaccaagatatgttgtgatcccctctagttctaaggaagctagaatgtgcaaagtgcaagtcattcaaatacttgatgcacaactttagggggagcgtcttttgagactaattgtttcatgagtgatcctgtatagtctcaaggtggaaaagggaagatgagcaagaaatggagcaatcaggacttgggtacctccacaagtcgagtaattggtatctaaagttgtgagtaattacgtatttaaag

SEQ ID NO: 166561 - DNA, 583 bp, Zea Mays
cctcaagagttttgaggcattgttatggatagaatttcctgaggtgctcaatattccatgaattccccacttcggtgccatccatttgagtgagctgatgggatcctggccatgtaacctttgcaacgatgaatggtccttcccatggtagtgagaatttgtgtcgtccctctcccgtcagcactcggcggaggaccaaatctcccactatgaaggatcgatgttgtactattttaccgtgatagcgcctcagggtttgctggtatctgaccgactgaatgaccacatttagttgttcttcctctagtacgtcgatgtcccctagcctagttgcttctgcttcggctatgctttcgaatgttaatctaggtgctccaaagatcagatctgctggtaacactgccttcgatccatacaccatgaagaatggggtgtttccatgtaacgctcggctcggttgggttcgcaggctccagactacatatggtagttccctgatcgattttcctgcgagcttctcgctcttgtcaaacacttttttcctgagtgcatcaagtatcatcccgttggctctttccacctg

SEQ ID NO: 166562 - DNA, 888 bp, Zea Mays
ccgggcccgaagcccaaaacccaaaatacccgaacccgtacccatttagcccaaagcccggtactcaaattatttatgcgggtaatgaaattgaaaacccgaatttagttcgggcctaatcgggtaacgggtcgcggtacccgaagtacccataatacccgaagttaattttgttgtgcgtcttgtagcttttctataggctttcagccaaaagaagtctagttgccaagcccactaatgccccaccctggagccacgcagccactacccatgaacatccaggctccaaacatcacccaaactagcccacgcgcagcacccaaactagccaggccgcccactgtcccagctcccaaccaagcaccaggcgctcctagggctaggaaccctagccgccgcagcgccgtcgatagccggtctccaacgctcctcggctccgatggttgatgcttcctccgctctcgtcctcgttcgacactccgactgaccgccggtgtggatcgtgctgtgctaatgcctcctctccttcattcatctgccatggtccttgaccagctagaagttccccgtgctccttcattcatctgccatggtccttgactagctagaagttccctgtgcctcctctccttcattcatctgtcgtttggtgcctcctccccactcctccagtcatccagtacaacgacgaaacaggagcaacatcaccaaggtccttgactagctagaagttccaaaccgggtacaatgggctacccatacccgaacccgaaaatttcgggtacccaatatatcgggtatagagtatagtaaacctgttttcgggtatagtttctagatacccgaaattttaaaagcccaaaaaacccgacccgaattttcgggcta

SEQ ID NO: 166563 - DNA, 653 bp, Zea Mays
ttcaatgtgacacgccacgtcgccaccaggttttggacgattttgcacgggtaagttaagttcaagactcgttttctagttttttgagttcggggacccaaataacataatatgctaagttctaagcgccgatccattttactcccggtctaatatagtattcttcgggttttttctggctttatgcaattgtgggatgttcatgttcctcgtttgctgtgttacaggctcattggattcatgtctcacaatggccggagatcatttgggcttccagttttagtggtgacgctaggttaatggattcttggtcatcttttgcagcaattagacggtgcttttcaacgagtcaggtacatgcatatgcaagaagctcccgtggtgtttgatcatgaagtgtttccaaggtttgatgcatgtattgtggatgattgatggggtgatgttccttgatatagtcgtttagcacctaatagagatagtagcataggtatagtgaacaaactacagtaattaagcagcaattttattgaaaaataacaagatgctacaattatgttatttctgacacttggattcgatcagagatcagacattatcagcacttgaagcagataggagcgcgcgtatagattaatagatctagtccaaat

SEQ ID NO: 166564 - DNA, 360 bp, Zea Mays
gtgaaactaacttattacaacataaatgaaaaatctaaagcagcctgatgatggatcctggttctccatagcagatcctcttgcggggagggataacaccatggcagggacttgaacttcagggggattccttccatcaagctgagcttccagggctgtgatccttgtgtgtgcatcctccagctccaagtgtactctagagaggtccagagtagcactatccaggtcggtgttcagacctgccaccacaccagctagggtgttgaggcgatcttctccagctccacctggaacaatgctggtctggctttctccacgaatacgcagaggaagatgcatgtacttcgtgttgtgcagctg

SEQ ID NO: 166565 - DNA, 536 bp, Zea Mays
gagagcggggggcgaagggagtacccaaagcggaagcttgacgacgtaggttgtcgtcagtctcccgctgacgtcgagccacctcatggacatctgcagcaatgtttcggcacatggagaagaatgccgcaaacccgtgggccaagcgagcacccatcccacggccacgacctcgaccacgaccacgaccacgtggcgtgggagatccgcggccaggggaaggatgcgaggcaccggcagcagcagcagcaccagcagacggacccgcagatgtatgagcacgagaactggagggggctttcctgaggcgccctgctggattgtttggatcaatctagaaaggggtatatgactgatgtctggtacctttgtcaaatctgaactgggtcacaacctcaatcatcttcatgataaacggagcatgaagacaccccttcaaaggaaagcaggcgacatgaatgatttcctgccaaatcatgtcaaagacatttatcctttctaagctattgggtttcatgaaagagagcaagaccttg

SEQ ID NO: 166566 - DNA, 1192 bp, Zea Mays
aaacaagtattgtgatacctgacactgatggaattatttcataactaaaagtacccacattatgattcaattccaacaaatttatcttgggaatattccatagtttgctagtactctttttaaaaatacttgttcactcttttcacatggcccagtgagcaaaaggagtttgaatccacttgtacagtctatactgtcgttccactgcttgtttgcgctgcataattacatgtacttctttggattacaatgtcttttccatgttctttgcaactaatttgcggggcccaattttgttattccttaagctctcacatgtttatttctaaagctcacttttctgtggcttcttataacaggacaataatatcccaatacaaattgctgcattcaaaggatgggagaaatgcgtggagattcttctccctcacgcaccccatttgccacaatatgaaggcctgagcatctctgaaataatccactgggaaagaaccgtgagttcagaccaacaacttggaacaaaatatttccatttttcttttgtagcatgatggttggattggtgttagtagcttttatgaatactgtaatgcagatttctttgcaccactgatttggaatatggtttctacttgacttttgggcgtgcatgtgctgtaggagcgcttccgcagaagcagtagtgcaattgaacagggagatgttgcgtactggaaaaaagaacatgatattgcgttgagattctacaatgaagtaaattattgcgttctccaaatgatattttaattgcatttatagatgccaatataactctccagcctctgtattattggatgattgcaggctgctcaggttggtcacgaggtcgcaaccttgtatgcaaagaagagtctttgctatctgcatctgcgtgatccagcaaaatttatcgatgaagcaattaactacataaatatggtgcagccagatttatcgacacttaaccctgagtctgatgctaagaaattggtgctggtgagttgttggtgctagcaattaacgacgccacaatgtgtcatatgcactattgttttgttgacggttcctgttttaggaatttggtagaacctggaaagcaccggggtctagttcgaggcaggattctggaagtagcccgactaacaaaactggcgaaacatccagcaggtttgaa

SEQ ID NO: 166567 - DNA, 1313 bp, Zea Mays
cagactccaaagtagtcgccggccaggttgagaaggagtactctacaaaggaccctgcgctcatgcagtatctcacagctgtccgtagcctcgagagacaattcaagggtttcaccctacagcatgtcgaccgcgccaagaacgaagaggctgacgcattggctaaggcagcggccaagggcgaggccttgccctccgatgtgttctaccacgtcattggcacactagctgtccataaccccgaaggcctgcaaataacttaggacaccgaaggccaccacatcattaacctcatcatggctgaagactggcgggcaccaataacacagtacctgcaaggccactaccatccaagcgatcgcaatgaggccaaacgactaaagcatagaagcagggacttcgcattagtcgagggtcagctgtacaaaaaaggggatcagctagcccatgttgaagtgcataactgaaaccgaaggcatgacaatcctccgcgaagttcacaacggaacctgtggctctcactcaggacccagggctctcgctgccaaagtgattcgtcagggattttattggcccgcaataatctgcaccgccaatcgagtcacaaggtcatgcaaagcatgccaaaagttctcccctcgctcaggcagcccctcacaattcaccaaactcatcgcccatacatggccacttcaatgctgggggctagacatggttggaccactgcctacagctcaagggaacctcaagttcaccttcgtcgctgtcgaatatttcacaaagtggattgaggccatggcagtatccataataacatcgaagaccgcccaaaaattcttctggcaaaacattatctgccgcttcggagtctcgtccgaactcatagtcgacaacgacaaacagttcgacaaccaagacttcagggatttctgcttttccatcggcaccaagcctgtcttcgcctcggtgtaccacccacaatccaacagtgttgttgagcgtgccaatggcaagatttttagtgccatcaagaaaaggcttcttgacgacaaaaagggcaaatggaccgaccaattactcgaagtggtatgggccctgaacacgacagagtgtcgggcaaccgggttcacacctttctgcctattgtatggatctgaagccatgacaccgcaagagttaaagcatgggcccctcgaacaaacaaatcagcagtccccgatgtcgacgaaccaacttccaaagatctcatcgacggagaccgcgtcctcgccctacaggccctcgacaaatataaagttcaaaccaaagcctgg

SEQ ID NO: 166568 - DNA, 761 bp, Zea Mays
gcacaaactagggacctaccaaggctgtggtgctcgcacaattttggacaaagactaccaggaacggccggtcgacgtgagccatgtccgcgatggcgttcctggacattaatgcgacgttccctaagctacgatgtggtggcgttcaatcgaccgagaccgagagcttcactagcatcagaggaggcagaaacatgggtcagagggacatgaacggacctgagatcggctggccacaatgaggtgtctcacggcggcgcgactaaccgaattggggaaaataggaattcaggggcggtggtggctaattggcggtgaggagcggtgcactggcttcataacaagatagcggagtaggccgaacactcaatttatagagaccactcgagggtttcgagaatttgggatggatgagcttgcggccggagcgaaggtgagtcaccggagttcgctcaacgtggcactcactagggtagagtcctggggtggtaactaaccatttcacacgacacattgcgacgtggtaacatggtcagtagcgtggcgtatctagggtaacggtgacggccgcgcggccacgccgcggggcaagtgggtacggcaaagctgactctatccactctccttcagatctttttacccccccgcgactatccactcgccacagagcacgaatgtagcaccggcgcggatcacggcgtgaagatcaccgacggcaaaattcactgaatcgggcgatcttgttcagtccactgttcacc

SEQ ID NO: 166569 - DNA, 677 bp, Zea Mays
tgaatactatacaatacaaataaaattataattaaataacttcaccacagttggtatgatcaaaataaataattagtcaatgtacaaaggtgccacaaagtttgaatttaaattgaagtttgaatttggaaagaaggaaaagataaaagaaaagaaagtaaaaagaggaaggaataaaagctaactgggcctcagatttcctcggcccacctcctctttgctttccttgtgcgcggcccagaacagcaaaatggcgctgacatgtgggccctccaggtcagtcgtgcccatgtcttcctcctctccgttacaccgacccgtggggcccgcggggcaggctctcccacgcgctagcccagtttccttccgccaccagtcgctagcatgtggaccccaccgggcagtcccgtgaccgccgcacgtggaactcgtcttcctcctccggaacgtccgcgcggacttgtcgcggcggtgtaaaccaccacgcgcaaaccgagggcacatggaccaagcacgttctaggcgaataaatggattcgtccgggtattctccgcccacctcgccacttctcgcagctccactaggtccgcaaccgacctaatttccagagccgccacagtcatcggagggagcgctaagtgccgccggtgaacatcgtcccgttgccgcattcgcc

SEQ ID NO: 166570 - DNA, 312 bp, Zea Mays
gtggcacgtgcgcggtggcaggaaacggcgccgcgggttcactgcttgtgtttgagtaatcgagacgtcgtcgtcgtcgtcatcacccttcgatacggtcgcgtggtttggaaagtctcgctgctgcagatctgtgcatccgttcggccggcgttgcgcgacgggatcgtagggacggacaacgcccgatgccgacgggtccgctcggaaggagcgagcgaaattgcctactccagcccccgtcctcctctgcccgtatgtttaattttctatttgtagagtatgaatataggggtaaaagaaggtggcagt

SEQ ID NO: 166571 - DNA, 329 bp, Zea Mays
gcacgccgtcgggcttggaggtgttcggggaaggaggacggtttctgaccgtcgatgcgcgatgtgcggctcaaatcgaatcagacgtagggattaggctggaactcaccgtggccattgatctcgacgtggacggttacgattagactcagctcttccccttttgttattctgacccggaccgttggatctatcttgagcggaccagattagatcgtggataagctatttggttacatcggacccgggccgtcagatcccgatctagcggttggtgctgcgtaccgattgaaggttttatctggtgcaccggatcttgatcgtgcggc

SEQ ID NO: 166572 - DNA, 529 bp, Zea Mays
ctctaatggtgaccgtcggcctagctgctgaagacgtcgcctggggggtcgtacaagacgttgtacgctgtggaggtggcggccgcgcactcccagcgtgaccctactgatgtcgagtaggtcatacctatagacataaggctagggccccgcttgaaggcggatgtaataactttgtttctgtgaggtactttcgagtactatttatcaagcagtagtagtacttatctatgtaccacttgtccctgttgtgtgtggtgttgctgactcctccctggtacctagcccccctgggatgcaggctcgatgtgtcgaggctttataccagcatacctaagaaagagttggcaatggcccccaggaggtagcctcgactgggacctagacctgtacacagctttggctatggaacgttagtagtacacccataggacccttcgtctgacattagccatcctttcacacatgcacgagacctacaggacctagtcttggaagccaagttgtgcgtccgaaccccctggaccgt

SEQ ID NO: 166573 - DNA, 585 bp, Zea Mays
ggcacctcgctcacggggcaaactctagcgaacttgagctcgggttggattagtgacgcgcgggggtgtacggtcgaggccggagtggcttttatagacgcgggcgcgggcgtggacgcggggttggcacggcgtggggctgcgcgcgtgggcggagcgccgagggcgtgctctggcgcgccaagacgcgtcgaacacgtggtcgtgttcatctgcccgagttcttgcgccaacagagctccaaaacgtgtgaatcttaccaaatgtcgtgtgtaagatatcttcctggcacctagggctagctagtttgtgtaagttccaatggaagatctgccctagatcacaagatatgtgggcgccaagtcttgtctgtctgcactgttcaccagtgacaaaaccgatgtcaaaccatgtcaaactacctcagtttgaaatcaaattttcagggatgtgccttgggtaatttgtccactttttgctatttggtccaagtggttttggtgccagcataaaggtgaacacctttgatctttgggtttggggtggttttggggacttagagaattttgaatggctctagtgtac

SEQ ID NO: 166574 - DNA, 1177 bp, Zea Mays
ggtgagcccccacaacacaaccatagaacaaaaggtggaagtaggtggataattggctcctttgtgtgcgccaccatgtttcctggtagagtacgcacttgtgctatacacctacacatatacccaggtaatggttggtgtctggaccaaatgataggattgttgagcaccaccatgcaattagcatgaagaggcccacccactagctaaactattcatctctgttgtgccagtgcctttgtccactcactcaccacaaactctcttatgctaagctcttgctcgcatgccaccatatatgcagggtatgggtatctctctcttctctacgcacatatgaatgagcactcagtttcatcgtcgtcgtccttcgtctctccatagaaaacacaccagctgcttctcgttcttccgcgtcgtacgtaccagtaccaccctcctggattaccacctccatagctttgatatctctcatccatcgattccctcctagaatccaatccgatgcggcggccaccacccccgccccaagtggcgtcctcgtgagaggttggcagcgagctacatcagcgagaagcctagggcgcgcagtatatctcggaatgtgctggctcccaacagccgcgaagcgattctcccctcaccctcgaccacgagccgcctatataaccatctccatggctccccctcccaacccccaccagagctagcggcatcactgtcatcgagctcgaccgacgaccgtcgatcggtacccgtcgtcgtcgcggcgtcgtcgacgacggcataataatataataaccaggccagggcagggaagatggtgaagttctccaagcagtttgaggggcagcttgtccccgagtggaagcatgccttcctggactactgcctgctcaaaaaggatctcaagaggatgcagcacgcccggcaccatgctgctgccgaccgtcgccaagcagcaggcctaaccgacacgcaagaaactgccgccggccaccacgcggaacgggcctctctctctctgtcccagtggctcctggacaggctccccgctggcctcttcggctccaatgctcccaacagggatcgtcatggggtcatacacgtacgtacacgatgcgaactaacacctgttgctacacgcaccgtccacgcagcatacatagtccatgtt

SEQ ID NO: 166575 - DNA, 401 bp, Zea Mays
cggcggatgggtaggctattagtgggattctaccttggcatcacagcaccacccgccctcgctatctcacaagggtcccatcgcaccgtcgtaacgcgataatggctattgcttgctgccaccgcctttcgtctcatcgtcgccatctaccgtcgcatcgtcgcctaccctcgctatcccatgcctattgtcacctcaccgtcgtcattttgcggtggagtcgctgactctccacaccgacgtgctaatgcgcccgcttcgccctaacgtctagtccccgctagtccacccctttgttctctccaactctcctttagggtggccaaaataaagtttcgatattcatgttattttagaacactactcatactatcacttaatctctaggttattatcatgga

SEQ ID NO: 166576 - DNA, 508 bp, Zea Mays
cggagttctcttacaataatagctatcaggccagtttgaagatgtcaccgtttgaggctttatatggcagaaagtgtaggactccactgtattgggatcaaactggtgaaaggcagttgtttgggcctgagattatacaagaagcagaagaacaagtctagcaaataagggagaatttgagaactgcacaatccaggcagaaaagctatgctgatacccggagaagactgctagagtttaaggagggagattatgtctatttgaaagtgtcaccactcaggggtatgagaagatttaaagtcaaaggaaagttgtcccctcgctttattggacccttcttaatattaaagcgagtgggagaggtggcatgtcaattggagttaccagatcatcttacggatgttcatgatgtctttcatgtatctcagctaaagaaatgtctcagggtacctgaagagcagttaccaatggaggaccttagtgttcaagatgatctgacttatgctga

SEQ ID NO: 166577 - DNA, 698 bp, Zea Mays
tgtctgtggccgtgccgtggcccggttcgccgtgcatcccgtgcgacgcgtcccggcgcgtcaacggcaacggcaacagcgacacgcccaggagacagacctcgtcgcgccgcgacgacgacgtcgttggcgctggctgcgtaccgcgggggaccatgtccgggacgatggcgtaccatggggggcagttgttgcagccggagctgtcccgtcgtgagtcacagtcgtccgctcggtggcacggcggcgctgagggcggcaacgcgtggggtatggtcttggtgaccgcgagccgtggcggtgagattcgggtgtaccagaacttcggcctgcctttgaccaatctcttccactagctagaaaggatagccagagtttgctggtgctgtctcgtttctggtctaatatttccaaaggaatagattttgcagatgagctgatgtacaggctgatataccagaagaacattttcaggaaaaaaatagacgggaaggatagaagtgcagtgtaaacccctatacctgagagtagaaaatttgcgtggcattatatttgataacgtaggaagaacacatagattacatgtcccaagcatagcagaaacatcggcaaatatacataaactaattaaacatctatttcataaggaacaccataataattagaatatctcagctagcacatgtaagccaaatttg

SEQ ID NO: 166578 - DNA, 352 bp, Zea Mays
cggcgaggtgttttcatctccaccagtgaagctcagtcgacatccaaattcgcgaagttccctccaccgttcccaaaattgacagtgcatggtgaaactatagtcctttacggacgtgtagccttaatctcgcctcccaattccacccgagaccgttgcggcttcgtttttacccttttctgttacccgcgagccaggatcctccgcgccccgtggtcagctcgtcctaggtctgctcctgcttgttttaatcatgttccagtatctatatgcgctagtgatgctcatcggccctgccctttttgcttagtcacaatcaatcacccggaacacatgaactcgcttcggtatt

SEQ ID NO: 166579 - DNA, 439 bp, Zea Mays
ggaaacccaaggacaccctgcagtctagcagaacttgggtcaggtcagcgaaaccaaccttgacagggagaatcgcaaccagcagcaggtgcacaccatcaccaaccaacatgccgtcggagacatagtttgccgtcaggagtacccctctcaaaaccgcggcaacaacacaagaggaagaggcagaggccgagccaagtagtcgcgaagattttactgtctgtttcacggcgaagactgcgcacacctcaccagggactgcccgaagaccaaggccaccaaggatagaatggccagagcctagccaaccgacaaccaacgagtcgtcgcgcacacctatcacccccagcaataccaccagcaaccataccacaacgagcaaatccaccaccaacccaaccacgcataccatcaccatcaagaggtgcaaattctcccc

SEQ ID NO: 166580 - DNA, 425 bp, Zea Mays
gatgtggtgggcctgaccttttctagtgctaatgttttatatagaccttggctccgccgccaccgcctagggactgagccctagggctaagggtgcggacgtgtcatcgaaaaccatcatcgcaagccccaggcctagcaataaggtcgtgccacacggtagggactactacgaggaggaagatgacgatagcggcttcaggtcccaactgctgttggaaaacaaccatacaatgttctcgccaccgacgctactctacaactatcattcgcacaacaaggtgtgatatatacccatcatcgattcgatcgatctcctctatacacgattccatcttggtcttccattattaaccactccatatatgccaagttgcaagcaaatatgtatacaacattaggtttaagactggtcaggcccgtcgc

SEQ ID NO: 166581 - DNA, 466 bp, Zea Mays
gtgccactgacatttcagaaaactcccctgggttttactaaacctaacccaaggtccttctctcaattaaacagtacccacggcggaggaaagggcggaggggcttaccgtcggagagattgctccggtgaggtggtcgagggcgtaggggaggtcgtgacggtcacgccgatgtgcggatcgtctctggggatagtcggagtaggccggtccacgtgcgcaggcgggggagctcgtcggcggcgagggctccgacctatccagggcgatagagttcaattaaaccagtcggtgagcttcactaggtatcaaggaaggcatggacgcgaggaattgaagaatagctcacctgatagctcggtctacgcgcggtggcgggcggccaaagtccggcgacggtgatctcgctgttccggtgaggcagggcctcaatccttgcttggagaagcttcacggcttcacaggg

SEQ ID NO: 166582 - DNA, 371 bp, Zea Mays
gcatcgggcaacactccagagtaagatcttgctgcacagcgatcggttcgaacttgatttgatggtccagatcccgcagatacttcctcaacatagagacatgaaataccgggtgtacccctatcatggattccggcaattgcaagcgataagccaagctgccaacctaggcagagatagagaatggtccaatgtacctcgggctaagctttcctgagacaccgaaccgaacgactcctctagtaggtgataccttgagaaggacttgatcacccactgcaaattccaagtcctgcctcctcacatcagcataactcttctgacggctctgagcggctagaatattctgacgaatctcccgaactttctca

SEQ ID NO: 166583 - DNA, 540 bp, Zea Mays
atcacgttcgttcggtttaaccgggctagctcaaacctcaagaaaacaataaccatagacacgacctataaacgcctaagccaggtagtcatcaacagactaacgaaacataggcttatcccttgtagacacctaatttcagaatgcgaatagcagtaacctaactagctcctttttcaggttaacccacataacatactaaccgaataaaacatcaagaaaatgctaaactatatgcacgctctaaactctactaagctagggcacatcacggggagatcacaacacctaggttcatcagcctaggacattaagaagaacaagacaattcaactaattttctaaactattttctcatactactacgcatcgcacaccaactaaataggacaacacattcctttattaagtaggcagagtgccgtcaaacattacatattcaaatagccatcaacatctatttatgaccgttatcccaccactagacatagcatataatgactactagcaaaccattaatttcctcaaataaactaaggc

SEQ ID NO: 166584 - DNA, 1267 bp, Zea Mays
ggttcatatcgtcttctgcgtgtacgtagttgtttcttcttcaattctctttgtagaggttcttgggcagctcagacaccagctcgtcgtcgagctccccgaggcttgccgccgcgctgctgcagcatggcgactgcagtgccaaggacgatggtgtggtgggatgacagcggtgagagggagggaggatctggagagaagcacaaggaccaagaagaggagagtgcgatggcatatatatttttctatgttcctgtagcgtggctaggaagaatcgtcagtcatcgccccttttaacttttccaaatgcagagaaactctgttcctttaaattgaacctcttctctacgttctgtgtagtgaaactctcatctaactgagctttgttccttcgtttgatttcacatctttttttgattcacctgatgcacaagtgtcagcgtcagacgtggacatctagctaagatctgttcttaggccatgctattattttgacagcaagatcctatggccgaaattgtgagactgaccagttgcaatgtcaatgagttagagtatttaagggcagaagatatgaaggaacaaccctatgaggcaaaacgtggtaagttgatatctcactcagtttttctaaagcttcttttaggtacgttcttaatctttttcagaacagcgccataacctactaatagttgttcatcttttttctcgttgccataatttttatctggtgtgataaaaaactcgaaatcttctatgccgtgattttgagttaaatgattctggtttggttcgtcaagattatgaaaaatattgtgtcctattttctatttgaggtttacatatgcctgaagtaatagccacatatttagactcatggttctttttgtttcttattcctaaagcacaagcccccctccaaatgtgtaacttgttatgtcttggtacataagcttcactatgtcacttgaaattttgtatgcggtgagtgcatttatgttttgtatccctgaaactgatgtttcttgtttcgtgggcatgaagatgagatgtttcaagtatttcttatttgaatgaaacatttatggatgcagttctttagtttatttagctttagtggagtgtttttcactatatttgagccaagagctgattggtttggtgcagaagatgatcttttttcttacgttctgatacacatgttctgtttcaccagagttgacaaaagaccccgaactctactgcactgattctgtgtcacccttgc

SEQ ID NO: 166585 - DNA, 435 bp, Zea Mays
cagaagtagagaaggttgctgtaataaggattagggcaaagaaagattccattatggatggtggatcttgactcatctggtgattccgttttgccctttgaagacttgagttggtgcttatcctcccttgacgtggttggtcttctttggcccacgatcctggagttgccatccgagttgaggacatatggctaagggcatatagttaggatagctagggtatatgaggtagttaggtttaaatatagttttactttgtttttgggatatctggattaggcaacctatgatgtgggtttggttgttgtttagggacgagttagtccaaggtattaatttagggtaagatatgtttatagaattagggcctaatttatgtcgccaactttatgtaacttatttaagtaactcagtttggattatatcatattagat

SEQ ID NO: 166586 - DNA, 710 bp, Zea Mays
cgcctggctggtagggcatagtggtcgccctaagataagtagacgtgagcatatcgcatcgacataagtcattgttgacttaagccgattgctccgttagtagggtatagtggtcaccctaagccgagttagcgtgagcatgtcgcaccatcttaagtcatcgccgacttaagtcgattactccgttagtagggtatagtggtcaccctaagacgagttagcgtgaacatgtcgcaccgtcttaagtcgttgccaacttaaggcgattgcttcgttagtagggtatagtggtcaccctaagccgagttagcgtgagcatgtcgcactgtcttaagtcgtcgccgacttaaggcgattgctccgttagtagggtatagtgatcaccctaagtcgagtaagcgtgttgatttcaaatccaatcaaattgaagttagctaatagtcaagagtctgaatgcctttgaaaatgaaaactttattgatgatggagtcccccgattacagagtacaatgttgcttcgagagcttttgaggccttgttagggataaaactttctaagatgctctatgttccatgagttccccacttccatgccatccatttgagtaagccggtatgatcctggtcgagtaatttctgatacaatgaatggcccttcccatagtggtgacaatttgtgtcatccttcccccgttagaattcggtgaagg

SEQ ID NO: 166587 - DNA, 292 bp, Zea Mays
tttatttcccggttgtgcctacggctggattgccattcctcctactgttattaacctaaatcatgttaacctgaaccataataaccgatgcaaagtctcatgtgacagcgactgtgtacatacaaagttccctaggcagctagaccatgagccgagtagttatatggttggtaattctgtgatattacttctattcaggtcatgaatggtagcaagaaagttttgagtaatggcctaacttgattttactggaatcagatatcgtgtatgacaggagtcatcaattgctggt

SEQ ID NO: 166588 - DNA, 392 bp, Zea Mays
attcgatgtttgggagctggacacccagagctgttctcgccggtgagtgcgccggtgaggtctgcgcgtacggctcgacgaccgctctcctgtgaagacgacgcgatggctgccgtcggatcgctgtgcaacggggaggattagatgcaggctgaacgtttccagtggacaatatggaccgttggatccgatcgggtggtggccgagcgttccgcgcgatttaaaaccctgaccgtcggatcgagatccgaggatctataatgcgtaccgattcagggtaattgagtctaatctgcgccctcgacgttggatcggacggtcagatttaacccgtaccccttcgcgatggtcatttttctaaagagcccttccagaattgataaatcaacccg

SEQ ID NO: 166589 - DNA, 871 bp, Zea Mays
ggtcaacattcctaggtggtggttgtttcatcgcattctagaagaagttttggatctcctgggccttgtcttcatgagagagggcccatccattgccgacctttagtcgttgaatgaaattttttcgcctcctagagctagctttgcagtgaaagaattgggtgttggcatcaccgaatctaaggcttaacatacgggaattatgccttttccgtgccctttcaataacagcatagccaaggatacgcatcttcagtctgcttcagagacttgacttgaagtccgacaaccacctattttcttgtgctaggtctagcctaaggagaacttccatggccatatgcatgaacagcctagaatcaggaacaagcctggagctccatcccctgagcgcccgactgtgctctagagtttataatacagcctatggaaaggttcatgattttgggtcggcttcgaccaagcgtgcttcaccacctgcttgaaacccggtaaaaccgtccaaaaattctcaaatttgaaggagcgcggacgcctcggcctagcattattagatagaagcagcgggcagtggtcagagactgaagatgaaagagtgtgcagcccatagttgtcgaaaaactcctcccactctgggttgcaaaagaacctatcaagcctgaccaaagtggggtgtcgcctctcattgctccaagtgaattttctattttgcagaggaatttcctttcggtcacaattatcgagagcttgtctaaaaaactgcacaaggcgatgatttgttctagaattatttttgtcactagctttgtatgtgcaattgaaatccccgaggatcagccatggggaagacaaaggaggtctctgatcgttc

SEQ ID NO: 166590 - DNA, 389 bp, Zea Mays
agggtgataacttgtgccgtccctctcccgttagaattcggcggaggacgaggtctcctatcgaaaagaaccgttgccgcacagccttgtcgtgatagcgccttagagtctgctggtaccgtgctgattggattactgcattcagtcgctcttcctcaagtacatcaacgtcctccagcctggtggcctcggcttctgctatgctttcgaagatcaatcttggtgccccaaacttgagatcagcaggtagcactgcctctgatccatagaccatgaagaaaggagtatttccatgcagggctcggctaggttgggttcttaagctccaaacgacataagacagttttcttatccattttcccgcgaatttttcattcttatcgaagacc

SEQ ID NO: 166591 - DNA, 557 bp, Zea Mays
agaggtaacagccgaattatgctagattgcatcggtgttttagaggcaacagccgagctatgctgggctatgccggcgttttaaaaataatagccgagtggtgcttggcgacgtcagcgttttagaggtaacagtcgagtcatgctgagccacatcgacgttttagaaataacagccgagtggtgctaggcgacgtcgtcattttagaggtaacagtcgagtcatgctaagccatgtcagcgttttagaaataacagccgagtggtgcttggcgacgtcagcattttagaggtaacagccgagtcatatcgagccacgtctgtgttttagaaatgacaatcgagtggtgactaagcactttttagaaacaatgtctgacccgggaaaaccccatttatatcacgtcgccgcacagctctgcgttcttagccctacccttacttttttgcctccgaacaccctctgttttcctttgatttcgcttccgctcaatccaccgacgagattgcgatggctcccaagcggaagaaccagaattctactgctgcggtcattcc

SEQ ID NO: 166592 - DNA, 357 bp, Zea Mays
cttctagatggtttgattggatattttggctcagttatggtacaacaccagttggcactcggctattcaatcttccccgtttgaagtgctttatggcactccccaagcagtttggattgactgttcttgcactttgtgactcctccaccttgacagcttggttgcaagaacgtgccactatgcaaggtttcattcaacagcatttggctcgagctcaccttcgtatgaagtctgaagctgacaagcagcgtactgaccgtgtctttgctgttggtgattgggtttatctgaagttgcatccctatgtgcagacatccttagctcctcgctctaaccagaagccagcctaccgtttct

SEQ ID NO: 166593 - DNA, 631 bp, Zea Mays
attgtacgcccccatgtacggtcttatgtgtatccccactgacatgtggggtcagtcaaccttagtcatggaaggagatcaacactggagtctctacagtgacccttatgccgggaaggacgggacgacacaccatatcgagtgtatgcctacgcatgctagaaggtgacacagggctcatgacgataggcgaagccacaccacgcatgaccgcgccacgagattgatccacggggcccaccacacactactacgaagacatcaacacagacttgctacagggaccttcatgacgaacgagcggtgcagtacaccatattgggagtatagctacataggaccctacagacgaccatagggataccacgtcaacccggggcatcagttttctcttttgtagaaaactactcttctttgtaagatcccttccttgagctataaaagaacatgtcctcctccttctacacagacgcacacgagctgtaacaccgttctcagacaattttacgatcaccacaacactggactcgagcgccagtctaaacaagtataactccccgtctcacaccccctcttggaatccctatgattcaccatttagagtgagtccacgctagcatcctctcaccga

SEQ ID NO: 166594 - DNA, 307 bp, Zea Mays
cttgcgcccatgccaagcctcatacggtgtcatcccgttgagtgccttggtgggcgagcggttgaggatgtagaccgctgtcaccaccgcctctccccagaagacagtcggcattcccctctgcttgagagcccgagccatccccgataccgtctggttgcgccgctcgacgacgtcgttctgctgcgggctgtacggcgtggagtagtggcgttgaacgccctcatccgtgtagtacgacgtgaactcagctgttgtcggtacgcagcacgcgcaacttgaagccgcactccgcctctacagcgac

SEQ ID NO: 166595 - DNA, 906 bp, Zea Mays
ttcaaccttgatccagtgctcaactgagtttaatccccatagtcgatttgtagctggtttattgcactacaatattgctgcagatcactggttgtgttgccatagaaatctgagaagaaatcggtcctaaactatggctgtcacgttgactgaatggtgcagcccatggtacagtaactgaaactgttcagactgccatcgtcgtatcttcaccgccggcgacctccctgcgcgaagattcgtgccgccgccgtcctaattcgtgcaccgggcttggagataacgcttcgggtaaaagatcatcaccccgtgcgctggacaccactccgatgactcaccgccgtacttccccctgctttgcggcttcagcagataagctcgccggtgaaccgccgtcgcacggccttgcgccgcgtgtccaagcctcgccaccgcaccgccatgattcactttagctccccgttgatcaccggaatagctaccacggcgttgaacacgtattcactgcgtcggtattcttccttatctccggccgcctgcgttgttcgaccaaattgcgcgccgccgtcgaagctccctataaattgaaggccgggactgctgcgctaggtcattgcaaagccatagcacccgctcccacccttaatcattaacccgagcccatgaatttcccttttcccccaaactggtctctgccacagcgaagatcaagctccccgcggccagcgcgattcaggtcagtccatgtcttctgcttccccgtttaagtactctcatgtgtctacgatgcttgctgacccacacaattgagctaggcaccctctggtcaccgggaacacgattgtctagccgcaacgctcacggtcaccgtggccagagccaaccaagcacccatttgcgaaatta

SEQ ID NO: 166596 - DNA, 341 bp, Zea Mays
aatttttaccatagtgtagcacacaggctcgcaacatgtcttcgaggatttgatttactctttctgtctggccatctgtctgtggatgatatgcggagcttcttattgcatgggtcccaagtgattcttgtagctgctcctaaaagcgtgccacaaacagtgctcctctgtcagatacaatggtcttcggaatgccatgcaaacgcactatttgatcaacatagacttctgcatacttctctgtcttgtgggtggtgtgtaccggcaagaaatgagctatcttggtcaatctgtccacaatgacccaaatggaatcatggtgccgggaggtattgggcaat

SEQ ID NO: 166597 - DNA, 555 bp, Zea Mays
ggctgaccagctaaccagccaggtaaactgtgctcagccgtacactaggcatgcatggagagctagccattgtacttattacgttgcggctcaaaatgtcttgttttgcagatcccactgctaagacacctcaagttcacggggtgctacttcatggctgaaactttcagaactcacgcgtatggaagttgtaccagcagctcccaatacaagaacctggcatatgtgctctctttcctgccatactactggcgagcaatgcaggtagattgatattgaacgaatctagcagatctatctgctcatcagactaactaaaatggtctactgctgcatgctagtgtctgagaaggtacttggaagaaggccacgacatgaaccagcttgctaacaccggcaagtacgtatcagcgatggtgtttaaaccagaaagcgtcccgtggcacggaaaaccatgggagctctgacttttggttggggtgaaagagtgggtagagatgttgtgttgtttatttcgagcatgggattttttttcttctgcaaaaatctaggggg

SEQ ID NO: 166598 - DNA, 685 bp, Zea Mays
ctttaaatccgggtgtgacaatactttggagaaaatgacgatagactggttcgttttgctagggaagggttattccaaagctaaaagatgatgaagtcatagtctttaaaagcttcttgagggcagggcttcggttccccctttacgagatgatcgatgaggttctgaagaacatcgaaatttatctacatcagctgacccccaatgccatagttagacttagtgtgtacatttgggctctttgaggccaaggaaagagtgccaatgccgaagggttctatcgggtgcacgaactccattatcagacgaaggctagagccgatggtctgcacaaaaactttgggtgctaccactttgcataccaaaaggacaccaaggctcctgtgattggttaccgcaccaagtggccgactgggtagacaaatgagtggttttacgtgaaggctgatgagaagaagagggagaagcttatgagtatggtaatgagtcccttaagactgagtttcggcatgactcgaccactgtgcaacatgcagctggggtctccctgccaactcgccgaagtgaaatttagagtcatggcggagcatagggacttggtgcaagaatatttggcaaatagaacattcccaacttctggtgggtgggggatgccgaagaagaaggaagaaggaaaaagtatgaa

SEQ ID NO: 166599 - DNA, 568 bp, Zea Mays
gaaaaagactttttctctctacttctctctcaaacttgggttaaaatgcgctaactctgatgtttggaccaaattgtgttttagttgcatattttgtaggatcacctattcaccccctctaggtgctcagcttcatatacacaaagcgatagaagttcagtaacagtttcaaatgcatcataagcaaattaaggagattttgggctcgtgtattatggccatttagaggataataccgaagctatcgccagaatgtgtgcttgcatcatcatcacatgggattgatgaattcataaatgaggtacgtataaacaaaaactttaggcaccaagaaaagacacataaaatcttacttttataatcatttttttcttgattcatatatgtgtcttgctatgatgttatctacatccaaagcttgataaataaaggcaaactatggtgtctctgattggttattgctgggagagaggaagatctattgggactgtgccacagtggtgaaagagtcctttgtgcttgcgacttggtgatgcctacctatcacgccaactgtaggagcactacg

SEQ ID NO: 166600 - DNA, 300 bp, Zea Mays
tggaaaaaaacaggctacacacagccgcagatgtttttgttcagagctctgggagagttagggcatacacaatggagacggccaggggatcggagaactgcggagaagctacgacgacgacgacaccctgtacaaccgatggccggcatactgtaactccccgggctgcgttaccggcgccaggaattcttaaagacaccaacacagttcaaccaagtttggtgggaacaactcagcggataccgatgaggacaattggtgaacatgagcaggacacaccacacattctcgaaagccatg

SEQ ID NO: 166601 - DNA, 808 bp, Zea Mays
tcacttcgtcgccgtcctcgggccgccaccgggaatcctcgcaccgcgaacacactgtctgcggaattcgggtccggggcttcatgtttttgtgaggaatacatgtgtggtgttgcggtgactggggtaccgtcggtgcgcttagaatcgctcgcctgtgttcttcttccgccgcgtcgcgtggacaactgcctctgcaccatcaatcgccgtcgggtaactactctacttgccaagctttgtcttcgctacgtgtattccggtttagatcgaagctttaggcgcgggatcaggtaatgggggattccggcgatggcgctccgccgtgggggccctggtcttccctccggccgtggtctgggggtaggagacgttgtagccaccgttacctgttagatgtgcggctcagattggaaaccagttatcgattcggacgcgttcgcctgagacattcgattagtgatccgagggtagggatcagatctgggcattgtaaaaccctagccgttgatctatcaacatatgcccaggatcagagggggaaatacatcgtttcatttaattaaatcagcatcgttgattcccaatccaacgcatagcatcgcataccgattcgggtgtgggcttgatataatcagaaccctcggttgtcgatcggacggctctgaacgaaggataccccttcaaccctgtaaaactgcaaaagagaccctatgctattttagattcaacccgacgtccatttgtggggcgctctgtgtcttagagatttttaccttgagaccccagagttcctctagttttctgc

SEQ ID NO: 166602 - DNA, 567 bp, Zea Mays
acttggtgggcaaattttgtagcagttccatcggctggacatcaagtcacttggggagaattcaagctagcattccatgaacactatgttctagagggagtgcttcacatgaaacaagaggagttcattcgactaaagcaagggggagatactataatgcagtatctcaacaagtttaaccatctatcccaatatgccatcaaccaagtgaatattgatctgaagaaaaggaattgttttatgaggggactcaatgccaggctccaacggaaaatggccacctgcctggatcttacttacagcagagctgtcagcacgacattggccgtagaagccaagaacacaggccatggaaaatcaaagggatttggaggtgataggtctaaacagggacctgagaagcgaaccaggttggtaatccgaccttttaatcagaatcgttcttcgcctcgtccaccctcctatccgttcaaacagcctgttttcattcgtcctaccactgcccccacttctacaaatcagccgagtgcccctggtactcgtttccccgctcttcctagttcttcc

SEQ ID NO: 166603 - DNA, 499 bp, Zea Mays
cgggtagttaagattcgggacggatacaggacaggaccgggtaataatacgggcggataaggaacggataacagatactaatcgggtaggtaccggatagttgtcgggtagttcgtaccgatgacattaattgcctaaccatccaacaaacacataaattaagcaatacatgttggtattactgccctcatcgtgcttatgagatgagtgagtgatcattaactaacaggaacaagctaaaacaaataaagacgggagaaaatggcaagtaaaagaaggtccagcccaaatcttttaagtattccaaccctagcactacaatgcatgagctctccgtctcgtcaacccagcaccgccaccctttttcttgcttccctcaaaacttcatgaggccacagtagacgctgccactgccaggtacactggccacataactcatttgctaatgtgctttccccatcctcctcggctcctgcttgttgcgtatgctcccaacacc

SEQ ID NO: 166604 - DNA, 352 bp, Zea Mays
cggaacaccaacaccagggacctgttttaaatgcctttctatagagattggaatgcgtgttgatttcttgggtttcatggggtctctttactaaaacaccatgaccgaagaggtatggatgcaatatgaccgttcgatctaactctaatgctctagattagatcgagacatatccaaaccggtaaacaacgttggccattcgattctggatatacgatcaaaagaccgtccacaccacgatctaaacctgatccgatcgtttgccgatctgtggctaagattaaatccagcccccttcaaaccggtacgtgtttgatgccgcccgctccaagatctacgaccaagatttaat

SEQ ID NO: 166605 - DNA, 372 bp, Zea Mays
cgttgatggcatactggcgctggtgaaggaagattccgtgggagcggcgctcaacagtgaccctgaggaagtggtggagagggcccaagtccttcatcacgaactcacgctccaatgcagcaatcgtgtgctcgaggagtatgacattggacaccatgagcacggtgtcgttgacatagagcaagaggtagacagtgttgtcgtcgacatagagcaagaggtagacagtgttgtcgtcgagccgaaagatgaatagggacgtgtcgacaaccagcttggaagtcaaagagggtcgaaggaggccatagtcgagagtgtcatggaggtagtgaagaatctacttcgcatcggtgaggtgtggcttccgcgggg

SEQ ID NO: 166606 - DNA, 568 bp, Zea Mays
gaaactcttcgtttgttcctcagaagatttcaaacaatgaggaaccgtatccccgaggttgctgaggcggatgtgatcgaagacttctatcggggatccaatgacccggctttcgttcgagccatacttcaaaaagcacctgccacctctgaacaactgttcagggaggtagatgtctacatcaccgcggatgagcaagatcaggacctcattggaggcgccaatcccgtaccgccaaccctgcgaagggacatgaaccagcaaccagacaaacactaggagaagaggccccgagaggaggtacataccgccgggccacctgccgctcgagcccgcggcgcaccccgcggaggggtaaggacactggatgagattcttgactcctagtgctcgtaccacaaggacatgcggcacaccctgcagaactgcagggatttcaaaaactccatcaggcatgtccgaccattcgaaccgctatcgcttcccccacctcgaggagagcctaatgagcctaggcagcctcagcagtaggaaggaagtagaggcggagccttcccacgcatcgaca

SEQ ID NO: 166607 - DNA, 641 bp, Zea Mays
ttaaagtactgcttttagaaccagtcatttgttaaacacccacaggccacaacacgcttgctgctgttgctatgtagcttcgcttccttttagcagtagactacactaaccgaggggcaaataaagtaatcttggcattaatcaacacttgatagaactagtgttcatcataactgggaaaaaatgacaaatactgaataaactccagcggaacccccccccatgttctgcgtatatacaatgattgcgactccgtttgtttaaccccaacagaactgagggcaggtgttaataatagctaacttacatacccagtccaacatatagagcttgaaaagcttggcattttgttccaatgtcttatcccattgaaagtagcgatcagataaggcagaaacatcctaggcgtgctgcttagtccaaaagagtatggaacttttgctcaataccttcgcaagcatgtcgagaagcaccacagctcgacgaaccctccactggaacattttacggaacatatcctgatgctctctaaaatgcacctacgccaagatcaatcctagttcgagctatacgctaatccaacccacgtctcctctttccggagcccaacttgcggattgaaaaaattatcaaagggtaac

SEQ ID NO: 166608 - DNA, 478 bp, Zea Mays
gttcttgattgtgacttcattcagagctcgataatcaatgcacatcctcctagtcccatccttcttctccacgaacaagacaggggcggcccaaggtgaggtgcttggtctgatgtagcatttctctaacaactcatctatttgcttcttgagctcaatcaactctggtccagataccctgtaggctcttttaaaaatgggggcggtaacaggaagaagctctatggcaaactcaactttccgctcaggtggcatacctggtaaatctttagggaacacgtccagaaactatgacatcaccttgatagtttcgagtggatctgcctccttgctatcaatcgtcatctggtgacaacctcctttccttggctcgggtgagactaactcagtcaccacttcttctcctagtggggacaccaacttaattgtcctcctatcacaactgataactgcttggtacttatctagccagtttatc

SEQ ID NO: 166609 - DNA, 1004 bp, Zea Mays
cggcgatgagggagggcggcgagggagggtgtgtgcttcgtcggcggcgaaactcggccggagaggtgggcattgcaagcgaaacgggttgagatcggtttggaggtgggcggcatcacagccgcccgcgcgcggcgtggaggaaggacgtcggagaagaggaccgccgcggcaccgcacaccgtcgtcgattggaggcaaccttctgcagcaacgtcgacaagattggcggcttcccccaacggtaccatgtcgccgtgagcccgcatcacctagcgccgccgtcgaagtagcaatagaaggttgaaccgttggcgtcgggggtgggtcctcgcgctcgaccgttggccagaatggatgggggagagctccgagcctcgcggatatgggggcgacgggggtggccggtggatttcggtggctgtatgggggtctgctggacgacgctacagtggccccttgctggatagaaggtctgccgtgagttcttgtaaaactgcttgtcaatctgtgcagtgagttcatcttttcctgaatctttgtccgttacatgtacatgcttctttttcctttcatacatgtacatggtctccgtcgaactagcagcattggggttacatcccagccatcgtcttttgctgtcctgatggtagggacaagaaaccggaagtagttttgttttcttccctttatgacatttatatatgtattaacagaaagctattgtcctgcagcactaccattcatgagcatggccaccacaccggaggaattcttcatcaaggatctcatggagcagccaccattgtccccacctgtcttccttgaactcccccacaagcccaatgccagcaatgaggaccgacatcaagtccctaacaatgacatgacgctcccttacatctcacgcatgctcatggaggacgatgacgatgagcttggtgatcaccctgcgctactccaggtgcagcagtccttcgctaagatcctctcctcccctcccc

SEQ ID NO: 166610 - DNA, 489 bp, Zea Mays
tttagttttatttgactctggagcatcccattcatttataactgagtcattcatggaaaaatataacctaccaaagcaccctcttaagaagaagttacacattagttcaccgggaggtgacatgaaggccacacattcatgcctccgtgttaatctcaagattcaaggaatcgattttccagtcaacctagtggtcttaggatccaacggtattgatgtgattcttggatgcgactggttgaaaagttgtgatggagtgatacagtgtgccaaaggaacaattatgttgacaagtccacaaggtgaaagaatccaagttagcacagacaagccaacaaatgcaaaaggagagacaatggtaaatcacttggaagaaaagcccctggaaaatatcaaggtagtgtgtgaatacccagacgtattttcggaggaattaccaggtatgccacctgaccgtgatatagagttttctattgaattattacccgg

SEQ ID NO: 166611 - DNA, 785 bp, Zea Mays
cagcttctagctcctgtgcaacaagtttctttgaagcacgaagatctctaatggttgaatccttggttgataacagttgtccaagcctctgaacttcatcttgggatacttacagctcgtgacgatggtggtccaggtccgacatagtgaagcggtggctcctttccaaaattgtcaaggagttgctagcatcacggtataacctgtccagattatcacgagaggctgcgagagctcgtttctcctcctacgaacaagaagcaacattcagcacccagccaacaataagcgtggcaaagtcaaccaagggagtttacctcatgcgccatcctttccgagtcaagctgagcattgagggaggaattcaaagaacgcgtgccatccaaagaagcagagacttgggccaagttggcttgaccttgagaatacttctcctcaagggcagagcaccgttgggttaagtcggcttgatttcgaagatatttctcctcaagttcagagcaccgctgggccatatccgacaatgcagctgaaagggatgcatgactaagaacaaggtgatcaataaaaacagttagggaagctataagaacacaaaccagcattggacgccttcaggtcatcaatctgtttttggagtaacaatggattccattgcatcagagtcagagcttgctcgggaacagtggctccacaggatctcagctgagcagaaattccatcgacaagagcctatgatcaaagacagatgagcagaagaaagataactcactaatatgaacaat

SEQ ID NO: 166612 - DNA, 303 bp, Zea Mays
tgggaggggagaatggagctcaccagagcgacggggaagtgcggcggcgctagctcgattggctcggggagaagcggaggaggtggtcggagctggtgtggagagaacggggctcgggcggctccttttataggcgcccgggagagggatggaggggacggcgagcgccgacgagctcgccatgatggcgggaatggagcaaacagtgattgggacggctcgggcaggcgaggggtgaggggacggcttgggtacagtggcggggtggtcgctgaggccggtgcgagccttaatggcgatgcg

SEQ ID NO: 166613 - DNA, 1001 bp, Zea Mays
ctgtggtcgttaaaaatagaatccaacgttgccttcacgacgaccacactgattggcgccaatacctacctctccccgcgcgtaaacagaaaaagaattaacacgatctaaaacaaccccgcctgaatcaaagcaggggcagccacaacgtcttcctcctcccctctcgttccttgttaatagatcaatctgcgcagcacggacagccacatcgtcttcctcgtcccctctgtaattcctagccagccaccacgtcttcctcctaccctctataattcctaggtcaaagggagcaggggcagccatcccccatcccttcccttccaggtcgcaaccatcttcctcctcccctctatattttttaggtcaaacagagcaagggcaggcatcccccatcacgtcccttccaggtgagctcgttttcctcccccttcctaattcttttgttcagatatctccgacggtctttcctttgcatccagaatcatgtagtaaatcatgtagtagggcgctggttgaactgctcctcctaccaatgataataatcccagaggcaccgactagatgcattcgtgccaattcaaaaaggcagcatgtccagaattgtaatgcagtggcccagaattgttagaagtggtagctgcaatgatcttccctcctccctagaacaacacccccctcatccgatgtgcccctaatttatattttggaaccacacaaggcagttcgtccaagcaaaagggtgttcctgctgtaatcttcagagaatatatgttaattagttagattacacaagtttatatgttaattgtgaggcatagtggctgatatgtgagaagtgtatacagaaattacttgtatcaaatgggaattcagaccattgtggttgtggttgagatcaaaatctactacagtattttagtttaattagtgatgctgctagaacaatttacttttcagtgttgtgtttcggttaatattattcatggatatcagtttca

SEQ ID NO: 166614 - DNA, 635 bp, Zea Mays
ggacgaacgccgaccgtccgattgtgaatagaggaactagattaaaacggcgaaacgctaccgcgcatctaatcacagccgtcaacactcatctaacggccagagggccatcatcttccctacgccggggcacggcggcgcagcgccacccatgcggcggcagccattgccgcgcacggccaactggcgatccggcgcctaaccttcatcactgaccccagataaacgacgcggaggatataacgaactgggttacgatgtgttaccggtgggtgaggcgacgactactccggtccacagcgcgacgacgttttacaactctggcgagctccatccctgtgtctccgatcgtcttctgccccgaaaccgacgtacatgcgctcagcacacaccagcgaactcagccaagccctggtcacctccaatcgcgtagcgaagcttctcggcgttgacgtccagcggctccgcagcgatgcgtccgcgccggcgaggaattccttcctcttcgcccgacaatcttgcctggtgaggccacgaacatcttccatgtggcctagtgaagcttccgggaacgaatccgaggacgcgacgacgatgagcatgcggaattgactacggcggcggcgaggcttttc

SEQ ID NO: 166615 - DNA, 1044 bp, Zea Mays
ctttcctccccttcggactctgctttcctcggcttcggggtataaagccgggggcatgtgcggaagatccgccgctgtccatcccatccgtgcatcgccgctgggagccatagaaggggtcaggggcgttcgcctgcaaccaaggagcgtgcgcgggcttgcaatcggacgtgagcgtcgccatggtccaacgaattcctcgccgtcgctcctacgccgccgcgggtccgctcctcgctatggctagctctcgtcaccaaatttctagtctggtaagttgcatccctaggttcgcctttatcctgtagtcgtattgcgcgcgcatgtggtcggtttgggtagcggagtgtggggttggacgttcgccggcgagtacgccgccgggcgagctctgtttctcgcgcggggtgttctgtcgatggcgtggggcgtatcctccgtcgatcagtgaacgaacgagcgcgattagttcatcttactggtgcgagggggacgaagtttggtcgttggatcatagatgaaggagtgggatcggatctcgcgcgtattaaatctagggccttggatctagatccaacgatccctggcacatacagattcctcgacggcaggatctaatccttgccacaggactcagatcgtgtggctcgggttatctcgtaccccttcgggcgacgactttgcaaaagaatccctgaaccttggagaattaaactcgcagtccaccgcgggtaggttctgagtctgtggaacctttgcgttttaaccccaaactctctgcaaattatgcacgccatccaggactcgaaagaaagaaataaatgaatatagaaaatgaattcctagtgtaaaaataatcctaaaacttgtttaattcatacaaaactcattttaactcctttttagtccattcaggttctcataattttgtattaatattgcctactacttggtaacactgttttgacatgaaacctatactagaattgattactcaataaattttgtagcaagcacataaaatcttcggaaattcataactcc

SEQ ID NO: 166616 - DNA, 963 bp, Zea Mays
cgagccatgctgagacccaggctacggaggccaggggtcgacatggcgtagagacgataatgatggtgctagagcccttcgccgactacgccgccagtattaaagagagtgaccagatgagcccaaacgatcgaagcacatgtcgacaagcatgactttaccgaggtaaaacacctcgttttactacaacacgatagctccttccgtaagaagttatcggtaaccgacccccacattggcatataaaagggggagggtcagccacgaagagatggacccccacgacaagagacatacatggacatagagacgaacacacaatggaggacagacagaagaccacaccggaggacctagaggactacagaggccggagccaatgcaaggagcgcgccgccacgacgcccaaggcttagctaggttgagagcaccagattcgtagtccttaggccacctcatgaataagagacttggaagccacctccctctctcacctgcttgtaaccctaatatgagtattgagcaataaaggtgttggtagcgtgaaccgccgaagactggatgtagggacgttctgcacgaaccagtataaatcttacgcccactgggcacaccatccagaccgtcaaacatgcacaaacaaatttacttgtcagagtttgttcaaaaaccacgacagttggcacgccaggtagggggattgcacgttttaatgacttctctctccagatggctagctgcgccatagtttggaccctcggaatgaccattcgttttggaaacctcgacttcgtcattgacaactagggaacaatgatcaaggccccgaaatcccaatcccctcgatggacatcgtcgatattgctagggggtttagaggcctctagcttagctccacttagggaaacaatgggcgtctgtgcacgataggacccgcttgtgtcgagtttgtgggaatgatgg

SEQ ID NO: 166617 - DNA, 594 bp, Zea Mays
gacttcagggatttctgcttctccattggcaccaagcttgccttcgcctcagtgtaccacccacaatccaacggcgtcatggagcgcgccaacggcaagattttcacggcaatcaagaaaatgctcctcgatgacaagaagggcaaatgggtcgacctgctacctgaagcagtctaggcactgaacacgaccaagtgtcgggcgaccagattcactccctttcgcctactatacggatcggaggccatgaccccgcaggaaatcaaacatgggtccccgcggacaagtgcttcagcagtacccgacgtcgacgagccaacttccaaagacctcattgacgaagaccgtgtcttctccctgcaggccctcgacaaatatcaagcccaaatgaaggcctggcgcaactacgcagtcgtcccaagagaattcaacgaaggggacctcgtacttgtccgcacaacccagacagagtcacggggtaagctggaaccaaagtgggaaggaccatttatcgtcaagacgaagtcgtctcccagcgcgtacagattaacaacacaatctagcgaagacctgaaacattcctggaatgtagat

SEQ ID NO: 166618 - DNA, 1390 bp, Zea Mays
ctttcattggtggattcatcattgcattcacgagaggatggctcctggcccttgtcatgctttcaagcgtccctccgattgccattgccggtgcaattgtttcaaagttgatgacagggctctccacccgaatgcaagcaaactacagtgatgctggaaacgtggtggagcaaactcttggtgccattaggacggtttgtgctattagctagcaaacacttcttccttttttgttttgtctattcatttactatcatcaccagtaacttcctgatatatatcctgcttacctggtttatctgtccatgcttatctgaaggttgtttcattcaatggcgagaatcaggctataacaaaatataacatgttcataagaaaggcgtaccggtcttctctgcaagaaggtgctgtaaatgcccttggattcggttctgtgatagcaatcttattttcaagttatggcttggctgtttggtatggatctaagctgatagtcgagcgaggttacaatggtggcatggtcatttctgttatcatgtctgtcatgatcggagcaatgtaagatttctgttatcatttaaaattttcttaaacgaacaatgacaatgacaataagcgagctatatatgtttctgtgtggacgagccttgactccgtcacagtgacagtgactgtatctatcttctgcctattaaaatgtaaagtgtaccatttgtgcttccaaggaaaacatctgcttaacttctaatactaaatacccaataaggattaaatcatgcatctttcagacaaaacattttgtatctattctttcagaccatcggttatatctactgatttcggttataaatacttcttttctgcaggtccttaggccaggcaacacgatcagtgacagcttttgcagaaggccaaggagcagcacatagaatgttcaagataattgaacgcaagccagatattgacatagatgataacacaggtatcatattggaggatgtcaagggtgatgttcaactgaaggacgtgtacttcagctatcccaccaggcctgaacatttgattttcgatggattctcgttgcaagtacaaagtggaacaacaatggccctggttggtgacagcggcagtgggaaatcgaccgtgatcagtttggtagaaaggttctatgacccacaggctggagaagtcttgattgacggggtcgacattagaggaatgaagcttggatggatgagaggaaaaattggtcttgtcaaccaagagccggtgctattctcaactacaatcagggaaaacattgcctatggaacagaaaagccaacacttgaagatatcaatagagcgatacagctcgctaatgctgctatattcatcgacaagttaccaa

SEQ ID NO: 166619 - DNA, 716 bp, Zea Mays
tattttccgtatcaaactttcattttcgatgtttctgaaataccgatatcatttccgtttccggagttaccatttctgatttcgctttcgataaaaaaatatgaaaataataatgattttagtattttccgaccatttccgaccgattccatccctaataagcacaagcatggaggctgccggctggcagtggctgggcaacgccacctcaccaccatgcgtccacgcagcactacggcaggcacgtcgtgaacccatgacacacagggaagactgttgttcgtcaaaagggagcagggacgtcgctgcaacctagattggatcttggttcttgcataaggattgatgaatgacgatgagtcacgaacgctagaacgcagtaataggcaacaaccggcacgcgtgctcactgctcagcgcctcggccagccgcgggcagctagcggactcatgtagatggtatagccgtatagggttttaagtgggcaagttttaatgggccaagaaggcctgggccaaaatcatctcccgcttaatgtataacatgataaaacggaaatttttcggtaaaatacgggatactataaatatgggcgagaaacacctctaattattttcgttcccgttcccgagcagaccgacctgattctcgtactgtttttatattttcccagaaaaacaaaaacatatggtttcgaacgagaatgtggaacggg

SEQ ID NO: 166620 - DNA, 628 bp, Zea Mays
ggacgatgcttgatgagcataggactcctaggcgtttttgggccgaagcgatcaacactgcttgccatgtgtccaatcgcatctttcttcgggcttttctgaacaaaacttcttatgagctgcgatttggacggccacccaaggttagacatttcagggtatttggctgcagatgatttgtgctaaaacagtgtaatctggacaagtttgagtcctgatcttctgatggggtttttctgggttatgcattacattctcgtgcttatcgtgttcttaacctagatactaaccgcattatggagacttgtgaggttacattagatgagattgcaccttgtccatcccctgtctttgagcctgcaggtgtagattagatgggacagaccatctttatggaggaggagcacgacgatgccgattgggttgctctcgagccaactccaccggccgccccagtcgagcctgcttccactactacggctgacggaccctaccccactccttccaccacttggggtccacttgagccagttcttgctgagattggaggagttgaagctgctgttgagggggaggccacttcctcaagggaggctccacagcatattcagcgtcgtcacccacctca

SEQ ID NO: 166621 - DNA, 374 bp, Zea Mays
aaaagattacttgaagctcagagtcggcagaaaagttatgcggacaacaggcggagagaactcagatttgaggaaggagacttcgtatacctcaaggtctcccccatgcgtggtgtcaaaagattccaagtgaaaggaaagctagcaccgtgattcgtcggcacctatcccatcattggcagagtgggacccgcagcataccgtcttgaattaccagaatccatgtctgatatccacaatgtgtttcatgtgtcccagctccgcaaatgcctaaaagtaccagaaagtcacatcgaagaagagacaatccagattcagaaagatcttcagtaccgagaaaggccaataaagattcttgactcagcagttcgaaa

SEQ ID NO: 166622 - DNA, 314 bp, Zea Mays
gtagtcgaccccagggcgctgggtgaagccccggagcacataacgggccttgtaccgctccagggacccgtcggcgtgcagtttcagcttgaagatccatttcccggtgaccacgttggtgccagggggagaaggcaccaggtcacaggtgtggttagcctggagagcctcgcactccgcttccatggcgcgccgccactgtgggtcggcaagctcaccacgaacagtcgtgggcaccggcggaagagccgaagaagaggtcgtggagagaatcaggtgattaggtggtcgaaggacaccggccgcgcgtcggg

SEQ ID NO: 166623 - DNA, 776 bp, Zea Mays
gggagggcggctagggttaggggaggttagtgggccgaatcaagattcgcggcccaactcgcccacgcgacaactcccgaccccgttgcaagcgcctaaccaaagaaattctactaccctactggtgaatgattttcctcaaattccaaattcccaaaacgcaacaaccgaaagagaaaaaaacaaaaagaataacctccaacttctcttctttgcaaaccgggtatcacactctaccacccttaaaaagaattcgacctcgaattctgacgcttctatcggaacgacaaaaggaaagattaatgaatcaacaacacttacccacaacaaaaagtttcggatacttctgccgcatcagctcctcaagttcccatgtagcctcgcgctcagactgattagtccataagaccttgacatacttaattgatctcttcctcaatacacgctccgagaattccaatatacgcaccgaacgacactccaaagtcagatcctgctgcaccgcaattggttccatctcaatctgatggtccggatcccgcaagagcttcctcaacatagagacatgaaaaaccgggtgtacccctgccatggaatccggcagtagcaagcgataagccaggctgcccactcgggccaaaatagtgaacggtctaatgtatctcgggctaagctttccagagacaccgaaccgaacaactcctttagtaggtgataccctgagaaggacttggtcacccacagcaaattccagatcccgcctcctcacatcagca

SEQ ID NO: 166624 - DNA, 751 bp, Zea Mays
cagggaccccggattcttccttgccgtgcgcctggtgccgagccgccttgcccttcgcacctcgccatcgtcggtcgcgcgattcgtcgtcttccaggcctcggcaaggtactctgttgggtcgcctgggtgttgtggagctgcgcctcctaccaattcaacgggtagaactccggagccgtgtggaatccatcgacagcgttcgtccgccgccgcgtgtgcgcgttgcgccaccgtcctggccatcggccgaagagaggtaccaggaaccgtagatctaaatattgacggccgtgatagattcaagaggtaacggttagttcggggcgtttgtaaccgtcgatcttggattcggtgggtgagatctgatctcctgccccaaccctcggatcgattatgggtcgtggatcttggatctgatggccaatggcgcatactggttcattaaagactttgatctattggggccgtccgatgttgatccaacggccacgaaacgttcttaccccttcaatcggttcttttacaaaagagcccctgcacttagtagaaatcaacccaccgtccatctctgggggaatcccgagtctcaggaatttttgcataataacccctgtgtctctctgttatttgcgcccagaccagaagcttggaaattcaggaaaaataatttaggaaatggtttttatgtataaaaatatatccagaacttatttaattcatagaaattccatttttactcttttttaac

SEQ ID NO: 166625 - DNA, 493 bp, Zea Mays
caagggttatataacaatattagggattagaaaaccacttataatataatatcgccattaccgatctagtcgaaaatcttaatactaaagaacaatcctatcaccttagccaagaagtcaaataatagatccaggggatccataacaaaacttcttgcagagtggggataagatagagaatagggcatcgttgatagcttcgaaaaggtttcttctggcaaatttcgcttcaagttccgcatccctagcttgatcatcttgtagtgttttcgagtagagtcttctgatagaccaaaatcagactagaagagttgaaaataaaagagacgagttttaatataaagtaaattttaatggaggaaaatatatcaaactttgaaagactaactgggctttccatttctaactaatctagcgacctacggtcacattgctttgataccacttctgtcacacccgtttctgatgggcagagccgggtgcatcgcatatg

SEQ ID NO: 166626 - DNA, 641 bp, Zea Mays
ctaatgggtgttcgcgatggtacaatagctgaacaagatcagattcaatgaacctcgctgacggcgatctccgcgctgcgatctgtgctgtccgtcacgattcgtgtcagctcgggtaggatattactacggacgtgaaaagatcagaggtggagtggattgagccgacttcgtcgtacccacttgcaccggcgacatggctgcacaaccgtcaccgtcgtgtcgtcgtctcgctcggttgtgacacgccctgagtcgattcaccacgttgtcgcaagctgtaaggactaggtagtgaccgtcgtagatagttagccagtgagcgccacgttagcgatcttcggtgactcttcccccttctcaccgtgagcgcttccctgtccaaattcgccctcttcacggtcgtcttctataaattgatgcctcggcctattctgtctaatttttacgaacccagtgaaccactcctcgcgctcgatcgtccatcgtagcgtcctaatttgggattccccccaaatccattctccgcaccaccgtgagcacccctccgtcgacccactatcctgttcctccacccgccttcctagctgccgttcttgagtcctggtatgttgctaaagcttatcgcgcccccaatttgt

SEQ ID NO: 166627 - DNA, 506 bp, Zea Mays
tggggcggtagaatttggtggagcaccggcgagatgatcgccgtgggcaggggcgctccctagctcggctctgttggggggaagatgactggtctgccatcggatggccactggacggagtagattagaacgcgcataccggttggatcccgacggtagagatctgatcggatggatcagggcaactccgaggtatttaaatctgcgttgttgatcgcggtttgggcggtctgcgccgcgtgctgtttcgctgatgttatgatctaatccgcgccgcccgcgcgggatccaacggccagatttagacgataccccttcgcgggtatgttttataaaagagaccctgcctttcatgtatatcaacccgccgtccagggactctctgagtcttagaaacacttacaccgagacccctgctgttttctattattgaggcccagtccagtgggttattaaatcagaaaaatgaattggaaaaggagtttttaaaataaaaacaataccta

SEQ ID NO: 166628 - DNA, 392 bp, Zea Mays
gtccgagccagcagatggtggcatgatggatgtttgccctgatgtgcctgatgctgggctggaattgtctcgggcggtgtcccgcacctcgtcgaccttggagcgcagtcttaagggtcaggaggccggcccggattgcattgttcctatggaagtggtcgagggtcctttagccttagagatggctgcctcggagggctcgaccctcaaagatagcgctggtgcttacccagcccccgagggtgttgccggggatgatccggctcggatgggtagcgcgagcgatgacccagcccccgagggtgttcgagttggttctccctctaacacttccatggatgttcacgtgggatcttctcctccgcactctgattgtatggcagcagcacgag

SEQ ID NO: 166629 - DNA, 314 bp, Zea Mays
cgaagagctttaggaggacctagggatgctagaacaagccacgaagagacttgaactgacctgagctgagctggtcgtggcgaggtcgttttcacggtggcggaaaactaaattgggggaaatccggaattggtgctctgcagtgaacgattgctggtgattcttggtggctggatgcttaactatcctatggagctcatcgtggcttcaatttattggaaggaagagcggtggcgctcaatttggctgagcagtgctggcggccggagaaggagaagagcactggcgcagtggattggtgtccaacaccgtgg

SEQ ID NO: 166630 - DNA, 794 bp, Zea Mays
tcagagttggctggacttgacacaacttttatcacctagcgagcatccttatctggaggcgagcgccctaatcctcctcgtcggtggcgatgcaacgacggaaaaagcggacaatggttgttgcgaaatggatagggtttgttgctagagcgacaaccgcgagaacgctattgcgcgaacaaataggatatggatgtgatatgatctgggtccgcaggttgattttgaagaaatacatggggttctttgtaaaaaatgacgcgtgacgaccgttgaaactggtgctttaatatagtagagaataaaagagtaacttttgtcttctggagcatggatgccattttcgcaagaagaacgtgttcttactggtgagctgttgacagagtgaatgattcagcaaaccactcgaccgacaagagctagatgaagccatgtgctatatgactacctactaacaatgacgtaatagcgactgttgtgtaagtagacctaggtgcaaatgtatcggcgagctttttagaccggtgagccttttagacctttagattatgatctaattgtgggtagatgtaaccgtagagggctttttgatgctacatgagctggtggcgagggtttaaatgttaattgtgatctataattgaatcatgatctaaaggtctagaagatatgtttgtatctcaattttgcttgcacaacaatcatttccctatctaattccgaattggattcttagagcaatagagatggttttgtttatttgtctgagctagatgcctagagcaactctaaga

SEQ ID NO: 166631 - DNA, 627 bp, Zea Mays
ggagatggtcgctggccacaccaatgctgggatgggactcatccccaatggtactagcgctgtgctcacctcgccagcccaagcagcgatgcgctgagctccggcgcattgctctgcccggaggtcgtcaagtgtcttcctcaacacctccatagcctaggggcccgaggccgactacgtcgcctgtaccgcctggaactggcggacctgcccctccagcgcccgcaccttcccttccagacacttcactttctcctcgacctcgagctcaagctcatccagtaacttgttccgccttgcccacatctcctccctgaaggcgaggtcctcctcttgccaagcgaggtcagttgttcgtttcgccagggaggcttcctttgccttgaggtttccctcaacacgagcaatgtcgctggccttgtcggagagctcctgctacagcttcttcagcttcacctctgccgcagcttgcttgtcccgctgtttctccagcactgtattataagctttcagcctatcatggagcgctgtgacggcctcctctttttggtctaggtgtttttttattcctggccaagcttctttcctttcgggtcacttcctcctcttggtcagacaccttccaga

SEQ ID NO: 166632 - DNA, 282 bp, Zea Mays
cctggttctgccattcccattccccttagtcatacaatgtttgacagatcgtcccacacccgtggcatttctcattcccatccacaacgtcgtctgacaggtgggtcccacaaccgtggcatcttctccgtttcccattcccacacatgtgtgccgctttggcatggcatgtgggtcccacctgtaagggtagtctgccattcccatcgtgcaattcattccctgttctgccacactgagcacgccgggcccacctgccattcctcccatcatgcacaatcc

SEQ ID NO: 166633 - DNA, 314 bp, Zea Mays
gtggatcattaacaatccattggtcccaatctccttgaatgttgtctgctggctgagcttggacattgtcttctggcgggaaattaagatcccagcccacagccggcacaggttgacctaaaccaaaaaactcaagagggggctgctgaccatcctccgggaccactggcaccgggtcctcatcttgaggctgaccccccagcaaagtttgttggatgatctcacattgcactgtccacgagtcaccaataaagccatcaacttctgaaaaaacaatgaactgtgggacctcctccagagacgtgacccgaacc

SEQ ID NO: 166634 - DNA, 468 bp, Zea Mays
ggtggattcttgcatggacttggtgtttgtgtgcagaccgtatcggagatactgcctgtggggtgagatgtgacggggtgtgtgtaggctaggtccaggtagagaggatggtggcacccgcgttatcctcttacataaataaagtaatgatatataagtactgcacatcagcacaagggaaagaaacacctgtcaaagactgaaacgagagaagtgcttgtgatgacgaccaaactacgagcagagatcatgacttcagcggtagcatgggcacgaagatttagcaagtttcttcctgctgacattctccaaccaaagtaatcagcccactcttgttcatctgttccagcgctcaatcaagcatttatgctgaattgctgctttcctatgttcgagaacgccatgacagtaacgggccacgcagctggcgagtcagcacagcagcacctcgatctcctcggtgtgcat

SEQ ID NO: 166635 - DNA, 275 bp, Zea Mays
taagtcccgatcagcaagctgatcctgcaggtgacggatgtcccttcttagttcatttattctatctccgtctacgacccaagcatcggtcctgtgttgcagcgctgcttgaagtcgactcactcgggcttcaagatctcctatggggtcattactcccactgctactgctttcatgtcgaggggccagttgatgccggggcacaccgattggtccagttgacttgcgtgccgttagccttgtgcgtggcggcatctttctaagggggaaaatgt

SEQ ID NO: 166636 - DNA, 647 bp, Zea Mays
ctgcgtactattcatctatgtctctgacattcacagttaggcccctgcacttctgtttcttcgcaacgccaagtccacgacggtgaacggcgacgagcatgcctccggcgaacttgtactggccggaacacgcaacagctgctgcactaactcggctaacactaaatcctacccaagcgaccctaatccctcgactaattgcacaattccgggccgaaatctctctgtccacaacgacggtgaagatcagagacaatccaaggtgttcatgatgatttggtgcggtttagcttaatcaaatgggtctacgagcaacaggaagcttgagggaggctagaaaaccaatcaaagaagcttgaactgacctacagagggctgaccacggagaagtgttcacgtggaaatggatttggggaaaatgcaaaattaggaggctctagtggatgatcagaggtgcgagttggtgcgctgggtgcgtaataacctagtggagctcactggggcagcaattaatagtcctacgacggtggcgtttttgagaaggcgcgttggcggtcggagagaggggaagtgcactggcgtgggtgatcgtggctttcaccgtggcaaagcctccgacgatggatgatcttactactacagttcac

SEQ ID NO: 166637 - DNA, 689 bp, Zea Mays
aggcccctgttggtttaaatatatgaaaggaagccctcgaccgatttcaatgtgtcactgacacaatactctctgcccctcctaagttccttgtctttcaaaattgagtccttgattccggtcggcggcgcggacgaacctccctgccacaccacggcgctggagagcccgagcacccattagatacctaccagacctaattctaatctaaaccgagcagccatgggcatggatgtagcttataaaccccagaacaacctaaccgcgcctacgacggggtcccagttccgtggcatctaccgagacgatacaagcaccggaggattcgaattaagggcacagggagcactagcaggatacggacgacgcgacgcttacatgaattggcatctgaccgactgagttttggtgggttgacaccagagtagttcaagtggcgtcgagcccatgttccaactaaactatgaccgtaaagactaaacggatacctcggtgagcttcaccagtttataaggacatagaacatggatgcatatacgttgaaccataccatagtcacctggccacgtgaggctgaggcgtcggtgacgtggtcaccaaacacgttgagtcacttgaccaaggaagttgggcgaatccaaggtatagtttggggaaaggaaggcaacagaactatgttgaagctacac

SEQ ID NO: 166638 - DNA, 457 bp, Zea Mays
gtccaggggttgtagaacgatagccgcaccgaccctagcctctatcgctagggccaccacgggtagagccatcgcccctgtggccgcccttacggggttggcgatcgtcgtcagagctgggagcctgaagaggaactccaggattgggggcggtaggagggcgcgtatgaactcttgtcgatagagggtgcgccgtagtggacgcggggactcatcgtccatggtaagctcctcgaggaacaactcgttgcggatgtcgtggaaggaggggaacaggacggttcgcttgatgagcgccttcagatggtcataccgccgcctaagagcacacagaaggttgaggacgagggtgtggccagacacggtctcgccgaggttgtggagggagttcgccacacccttcatccgacgacggtactcgccgggagacaacatcaacaaggacgtggtcgtcgag

SEQ ID NO: 166639 - DNA, 486 bp, Zea Mays
tgcgctcccttaggaacgactttggagcttcggaacttactctgcgctcccttaggaacgactttggagcttcggaacttactctgtgctcccttaggaacgactttggagcttcagaacttggttttgtcacactcgatggtgtaaccacaggtttattacatcgagttgaaagttaaaccttcttgtattgtcttttgcgatggaaatagaaaagcaaaaggagtaggactggatcaaatcagagctttcttttggccaaaacattatgtcatctttagtagatatgcctagattcgggcacaatactgttaactgtgcgagcttcagactgctcccgaaggtcacattgttgttcaggccgaagatgcccttttggctactgatcatgatttggggcggtggtaattgagcccaagaggcttgagattgacttgttgaagctacagaagccgtaggctgttcattgcctacgtattctaggat

SEQ ID NO: 166640 - DNA, 860 bp, Zea Mays
attgctctgttagtagggtatagtggtcaccctaagtcgagtaagcgcgagcatgttgcaccgtcttaagtcattgccgacttaagccgattgctccgttagtagggtatagtggtcaccctaagtcgagtaagcgcgagcatgttgcaccgtcttaagtcattaccgacttaagccgattgctccgttaatagggtatagtggtcaccctcaatcgagtaagcgcgagcatgttgcaccgtcttaagtcattgccgacttaagccgattgctccgttagtagggtatagtggtcaccctcggttgagtaagtgttctgatttcaagtttaatcaagtcaaagtcgatggataaccaatagtttgaatgctttcgagaatgaaatcttttattgatgatgtattttccaattacagaatacaacattgctccgatagttcttgctaagggtaaaacttcctgaggtgttctatattccacaaattccctacttccgtgccatccatttgagtaagccgatatgatcctggccgagtgacctccgacactatgaatggcccctcccatatcggtgataatttgtgccgtccttctcccgttagaattccgcgaaggaccaaatctcccactatgaaggatcgatgttgtatagtcttatcatgatagtgcctcagggtctgctgatatctagctgactgaattactgtattcaaccgctcttcttccagtatgtcaatatcttctagcctagtagcctccgcttcagctatgttttcgaagaccagccttggtgccccaaacctgaggtcgacaggtagcactgcctctgaaccatagaccatgaagaagggggtgtttcc

SEQ ID NO: 166641 - DNA, 471 bp, Zea Mays
ggccttggatgtggctgcggcggaggcttctccgcgtgtgatggatgctgaagttcttcctggtctgagtgctgggcgtagacggcgaagggcggtggcgaagcggagagttagtgaggtgtcgcggagtgatgggcgtcattgtggtgaggtggagggtggtcgtcttcgtgtggacggggctggtaaacgggaattgttgtcctcgccggctggggcgagtgtaggagagggggagctgcggaatctttttgagggtgaagagctaaggataatgctgtttaactacagggagatgggcatcatcccgaaggttgaaccattgtaaggtgtgatgccctcgctgcatgtatgtaactataatttgtatgatgaggctgtgtgccttcgctgacccggccgtgcccgtaggggacttgtgcacttgatctagcgcatttattgtgttggtctggttgcatccttagtcgg

SEQ ID NO: 166642 - DNA, 618 bp, Zea Mays
ctctgacgtgtgggccaccggggggaagggcattgtagatcttctctccaacaacctcgccgatttccctggcgacaatgacgtctgcacgaccgtatcccttgcgcccgagccgacctgcgggggagcataaaacctcgtcgtgtgctccctcctccacctggcgtgaaccctagatcgagcaccttgtgacttccgccgccatcatcgtcacaccgtagggagagagagaccttctatgaaccacgtgttgtgccgagagggagagagggttgctggacccgtggagctctggcgcagactactggacttcatcagccgaacctcggtgcgcatcggtgaccaacatcgtcaactaccgcatctaggggagctctccatcgccgcgaagccttcgaccaccgtggaccgacctattcgtcttgtcaattgccggtgagaacatctcctccagttccgccatggtctagtagtgcgatagcacgggttcaattagtgaatgggagcgagaattgcagaaccgggcaacgctggcgatggcaccgccgcttggcaaccctgtgcaccgccgtggtccgatcagagttgggggaaaggtttatggccgttggattgtgc

SEQ ID NO: 166643 - DNA, 674 bp, Zea Mays
gttttgacgcttggaggaccaggagatgagattgtcaccatgaacgcagtatagcccgaggttgacctgcgcgtatccgagcaaccagcccaatcaacatcaatgtagaccacaagatcagtcgttgtagatgggcacaacaggaggccaagataaagggtgccacaaatgtatcatagaattcgtttcagcgtggcaaggtgtggttcccggggagagtgcatgtgaaggaaacttgttgaacaacataggcaatatcaggtcgggtgaatgtcaaccactgcaaagcaccaacaagactgcgaaaatccgaagcgtcagttaccggcgcaccatctgctgaagcaaccttcagatttgtatcaaccagagtgaggcaaggcttgcactctgacatccctacacgatcaagaagttccaccatgtactgcttctgagagagaaggccatcacctgagggctgaacatgcataccaaagaagtgatgtagcacaccaagatccttcatggagaactcctgttgtagggccgaaatgatccgacacagaagggtcggtgaggaagcagtgaggacgatgtcatcaacatagagcagcaaataggcagtgtcagatccacgctggaagacaaatagtgatgtgtcaaacttggcctcaacaaatccaagggagagc

SEQ ID NO: 166644 - DNA, 419 bp, Zea Mays
gtaccgcgggcggcgccgcggcgtttggatcgcacggtggtgagaagtgggtagcacgcattaggccctcgatttcgtgatgtacagttctgaatagatcggggtataatgtttcacctagatggattccccaccgtggatctatgatcgtgtgggagtcgggcggaccacgtttcattaaatcacggtcgttgcactctgatcttacggattttgctgcatatcgattcagttgtatgcggatctggtgagcgccactgatatctaatcgaacgaccgagatcggtgtgtaccccttcgcagtgccatttttctaaagagcccttctatttttagaaaaccaacccgcagtccactcgggttgttcactgagtctaggataacttaccagctagcccctgcacttctcgggaattgac

SEQ ID NO: 166645 - DNA, 497 bp, Zea Mays
caacttttcatccgcgaccataaccatgcgcaatttggctacaacatcccaaacgggtgcaagaacactagtttctagttttaaccccataattgttccattaatcattttaactacttaatcggcatcgaccgacttaaccttcatctggacggtccgagcaccacaattcacgaaaatctacctagacatctagcatcacatagagagcctactacttcacattgcaattcatgcagaaccgcaaggtgacaataataacacacatgtaatcgacctttttctacgaccttcagttaggtcaccaaccgacgacatgatgactacgaaggcatgtcaccatttcatcgcacccattcatcgcctatatgcgcactaattcttttcttgcggcacatgcactcaaaatcaatccacactacacaaaatacacttatctcttatttatgcgtagacttaacacctttcgggataaagcatcactataaacaccttac

SEQ ID NO: 166646 - DNA, 446 bp, Zea Mays
gtaggaaacaagagcaccaacatttgatactttgcctctcaagatcatgtctagccggctcaccaaatccttagcaggaattctcctattagtaacccgagtggagtcaataacaccattgtacaagtaagtcgggtatgctctgtctttcaggggctggatgttcttaaaaacaaaatcaacaaccacagcttcggcggtcagacctctttccttcagcagacagacttcagcaagcataaccttagcctctgttacttccaaggcagtaggagactcaatccaacttggagtgcgcacatctggttgtcttctcgaccgaggggggagggacttgccgtggttttccacaataaaccactcaagacgccaccccttaatgttgtccttaagcggaatatcaagatattccgttttccttccgcgcctcatttccagactcgcac

SEQ ID NO: 166647 - DNA, 680 bp, Zea Mays
ggtcaacctatccacgatgacccaaatagaatcgtgatgtcgggatgtgttgggtaaacccataataaaatccatgtaaatatcctcccatttccaagctggtatgggaagaggctgtaaggtaccggctaccttcaaatgactagctttgactctctgacaagtgtcgcattcagatacatatttagcaatttctctcttcattctggtccaccagtacaaggatctgagatcatgatacatcttgttactgccggggtgcatggagaatttggaaaggtgagcttcgtccaatattttcttcctgagttcagggttcttaggaacaaccaatcggtatccaaaccatagaattcccttgttgtcctgacggaaggatttgtacttatctaccttttgttcgatcatttccttaatgacttgaacacccttttcaccgatctgtgccatgattatctgctcatgtagagtgggctccactgagagataactcaaggtacctgaggaaacaacttctatgttcagcttgcataactcgtcacatagagtggcgatcttggagtccataatcacacagttgcactaggccgtccgacttaaggcatctgccacaacatttgccttgccaggatggtaatgcacttccaagtcatagtccttgattaattccaaccatcttc

SEQ ID NO: 166648 - DNA, 667 bp, Zea Mays
gtggcgatgaaggatgacgagggggttccaaggctgcctctaatgatcttgtgctagcactgctacgtcaccttcccccagtttaaagtaaagaagggggatgcgaacaaaggtgcccttcgttgtgtgtagaaaacaatcagtggtcgtgatctggtggtagaggtcattgattgtggagtgtggtcgtttgtgcacagttgggaataagggtgaaaatggccagtaacggtcagaaaaacctctcaccgttttcacccacataaatttttgttcagtccgaatcggtaaacgggaaagtcagaaatggataacggccgataaattccagtatatcgaaaacggataaatccgagcaaaatagctcgaaattgatcggtaaacggtaactataatcggaaaagctcacaataaacaaatcctaaccacacagatgttcattcacatccacatacaagtctcattcacaaaagtacacaaaacacaatcttgtccacatataattagtcatacactcatacatgtccactcttaaattttaacacacaacacataagtcttaaaacacgattattcattcacattcacatacaagtctcaaccacacaaatatacaatacatagtcatgaccacacataaatgatcatacatgttcactaaagtttt

SEQ ID NO: 166649 - DNA, 645 bp, Zea Mays
gctaacgaggccgtgataagacgaggagcgtgaaaccctgataacatatattaatttatttttttcttacaaatcttttggaaaaatgagccttgtcatttcttcttagggaacacgaaatctatataattgtttgccaagcatcaggcaaagggttcgactgacgtttctaggtcctcgagctcgtcgtctcgccatccgatggcatattcgagacacacttgatccagcttaatcaagtcttcgtaatgagaccgagtaacgactagggcgtggttgaccccgagccggaacacgtcagcctctagttcacgaatgcggccagcgacgagtaccatccgagaagttggagcaaacgattcctctggccatggaatctcgagatggtcgcgcacgacattgatggctgcacacaaactggtgtgctcggcgtcaagagcccgcagacggtcctccacacacgaaagctcatctagcacttctgctagcaaaaataaaaccccataaggatcgacgaaacctagaaaagttaggaaagtaaacggagtcttaccttccgcggggtgcctcgatgaagtgccctcagtacccttttccggtggtagtgcctcgacagactccaattgggccctacgtgcgtacgcc

SEQ ID NO: 166650 - DNA, 360 bp, Zea Mays
gggtgtaagattttgtttttgtgatgctaaaactcggttgctgcgtaggttccgacgtatgggcctgcgcaagcaaccgctgcagctgatactaattttgtggtggccacaaccgtagtgtctgccaatgacagtttaactggttctggatctgggtgtttttcgtctgatggtgagtctgggagtctgttttcctagaccgaagagtcttcagatgaggacttggattattttgctgcgttagatgtggccgcggcggagtcctcgccgcgtgtggaggttggcgaggcggctgatcttcctagtgcgaggaccaagtgccggcggcgaagggtggtgtcgaagcatagcgtgggtgat

SEQ ID NO: 166651 - DNA, 298 bp, Zea Mays
gcagaagtcgcctaagggtgcagccggactagcacaacaagtgcgaaaaatcgaagtctaccgcggagactatccgtgcagaagtcgcctacgggtgcagacggactaacacaacaagtgcgaaaaatcgaagtcctccgcgaagactatccgtgcaatagttgcccaaaggcgcagccggacgaagcataacaaaagcgaaaacgactacaccaaactgtccgcgcaaagaccaactacatgtgcaccagtccagcataacaaatacacctgtccaagtacgtaacaccttcgcgag

SEQ ID NO: 166652 - DNA, 1288 bp, Zea Mays
atttaaacattagatatatcgacaattaaggagatctatgataatggttgatggagcaagcatatcttgattttagacgatcgggggagtaaaattcggcgccctaaagctcagatttctggtgcatgtaaaaatactgggccgggaggctcccaaacccctttctggttcagtatatgaagtatttttactcctataagtttagttgtgaagtattactaagcaaatcattcacactttatggtgatctgttagactcttactctataccatgacatggtaatatggtagatactttttgtttcttatatgtcacttctgagtatatgttgttgaaaccttactgttcatgctcttgttagtttccttactttaaccctccttttttatacgtatgtttggctattacactgttcaggtgaatttcaatggatagctttatttcttctagaatatgcacgacaacatattcagtatctttttcagctacatatatgtgttacatgctcgtacctttgccttcttacagggcaaataaagatgtctcactaaactgagaaatgagcttaaaatattggagaccgaacatgcagaatgtcttgtgaaggcaagatcaaataggcaaatcaagtctttcaggtgaaatatttagtaattagtattggttctcacagtaaaacatatatgctcaaagacttctctattccacaactccagatttctatgattttttttcaattttgatgctatttgttggcatgtcgtacttttcatgtttctgtgtggcctagatatctattttcatgttcttgtttctttgtattacctaaacaaactctcctaaatactgaacatcgtcgtactagatatattacaaaataatttacgtgaactgatgtatttcttgtcacagtgtcggcttgcactccaaaggaaacacttgcaatactgaagttataaaaggatttttcagatcttgcctgcatactaccagatgctggaggtactgtgtttcagattcactgcttggagcgatcagcatatttatcagtgttatgagctctgtgctgtgacaagcccacctctcattggtacaattgttacctatacatttttctctacaagctccagatataagtaatcaaatcatagatgatataatcattggataaattgtatattcttgtactgtattcccttagttccgaattatagttcactttggttttgtcccaagtcaaacttcttaaattttgagcaattttatagaaattcacaccaatatctg

SEQ ID NO: 166653 - DNA, 456 bp, Zea Mays
taaatcttcgtcggaaggtgttaccagcctgtacgcgctgggggatgccttcgtcttgacaatgaatggaccttcccattttggctccagcttgccctgtgactctgtccgggtggtccggacgagtacgaggtctcctttgttgaattcctttgggacgacggtgttgttgcgccaggccttggtttgagcctggtatctgtcgagagtctgtagggcgaggacacggtctccatcgatgagatctttggaagttggttcgtcgacatcggggactgctgatgtgtttgtcatgggcgatccatgctttatctcctgcagcgtcatggcttcgaatccatacaataggcgaaaaggtgtgaacccggttgcctgacattctatagtgtttagggcccataactcttcaggtagttggacgacccatttgccctttttatcgtcgagaagtctttt

SEQ ID NO: 166654 - DNA, 377 bp, Zea Mays
gcgctaatcacgtcgtttatattaataaggtaggagtctcaatttggaaattggttacgatagttaatttatatattcaatcgtctatcttattctatgttaatctactaaaagtgatcgcgtttacattagtgcatgtagctaattcttttgttagaaccaattggaactagaacacgtggcgtctagttattcaccaacccgtagtgcccctcgagcataagccttaacccctgcgaaaccttccctcgtttctttctaaccaaggtaaattcatcatcgtatgtggtactctatgcatatctgctttacctgttctcttgtatggtgtactgttggtttcctaatttcaatggatggatgtatgtatgtttgcg

SEQ ID NO: 166655 - DNA, 703 bp, Zea Mays
gttgcctggaggctggagctggtccgtggcccgcgtctgtggttgacagggtgtgtggctggtggctgggaccagggaatgccgtggtcgagtgggccatgtcaaattatatgcattgtcaagtggcatattaggaaggacgaatattttttttctattataaaccttattatataagggtcttcgacacaatctgtactcacgtcgaaagcccgcgatcctactactaatttcggtgctggtgaggaagcgatcgagaggctccgacgggtgccgcacgtccagcgtcgcgttgatccatcgcttcgggtcaaagtcctccgccccgaactccgacgcgtccacgaccaccatttccggtgcacatcgggagaaagcgtgcgcgtcccttcactgcttctctgtctcggctcctcgggtgtctgcaggggagtaggggacgaagatttttttctattataaaccttattatataagggtcttcgacacaatctgtactcacgtcgaaagcccgcaatcctactactaattttggtgctggcgaggaagcgatcgagaggctccgacgggtggcgcgcgtccagcgtcgcgttgatccactgcttcgggtcgaagtcctccgccccgaactccgacacgtccacgaccaccatttccggtgcacgtcgggagaaagcgcgtgcgtcccttcactgcttctctg

SEQ ID NO: 166656 - DNA, 750 bp, Zea Mays
gcatatacgccaggtcactagtgtcactgattatattgagcagttcgcacaacttgtagaccacctcaatgcttatcagtcacaggcagatcctctttactataccaccaaatttattgatgggttgcgtgatgatgttcgtgctactgttttagtgcaacgccctcgcgatctcgatactgcctatgttcttgctcagttgcaggaggaggtgcacgacgcacaagcctcgcgagaccaagacgtatgccagaggtgtaccgcggccatatgcttcttcggccgccaccttggacatcaaaaatccatcctcagccaagctggacacatcgacatctaaaccctccacggttgaagatagattgactgcattatatgcttaccgcaaggcaaaagggctctgttacaagtgtgggctgcaatattcccgtggccaccgatgtgctgattcagtccaacttcatctcgttgaggaagtttggcaatcccttcaattatctgatgaagaggacagtcctaattcacccactgctgaagaggccaatatgatttccttgtcacaggctgccacagtgcgtgctgacgcccctaaaaccatcagatttctgggccatattgggggaatggaaattctgatactgctggactctgggagttctgtgtccttcatcagtcggcgagtggccgatcatcttccccattgtacaccagtgtccaaacccttgctcgtgcaagtggcaaatggtggac

SEQ ID NO: 166657 - DNA, 290 bp, Zea Mays
cgttgatccagcaattgacgattgcgattagatctcaagtcacccctttgtcattttaaatccgaaccaaccggctataatcgtgagattcagggagatttggagtcgtgggcgttcgtcgaccatggatctctgatcttgcggtcaacgtagggtaccattttgatatttgggcgatctaatcctggcagttgcattctgatcggacgatcctgatcgattggtaccccttcgccattttgcataatcgaccccctccttttaatgaataagcccaccgtctgttacaa

SEQ ID NO: 166658 - DNA, 600 bp, Zea Mays
atgcagctagcaaccatcttataactaattggcagcaagctactaaagcaaaaatagtgtccttatactgtgatcgtctagaaaccatcttataactaaagcacgatgaccagcagttctaaatagcatttgattaaccatttcttttctggatggccattttattcacgagtcatattgcccaaaccaggggtgttgttcaaacgaataatcagcacaaagaacattgtggaggtggtgtatacgaaccctaaacctatctaggcataaatgaaacagatctaagtgaggagggaagtgaaaatacgttaccaggatcacaaaccctaaaacctaatgcgatcacatgttgtacaatgagcatctccatctaatcgggccagccagagcagatcaaacctccgcgcgaacgcctctaatcagtggagcacctcctcttgcctggaacgttgttgagggcaaaaggggaagatgagcaggacaatgttgttgagggcagaatggggagatgagcaggacttatctgtgctgacgcgtgacttgagctccatagcttggtgttgtagtctgtcatccttctccatggctccacgctcgcgg

SEQ ID NO: 166659 - DNA, 908 bp, Zea Mays
ctcttacgtaagacgacataatgctgcaaccaccacttcaaggcaatcaggtccttgaaaacccgacacttttcaatcatcatgctaggactgacctcaagagaatctagagctcccttccttctgtatttgcctcatgagaaagattaagatcgatgaactcatgcactattgaattccggtggtctagaataacacgttgcaacatctcaatatcactctttgtgagttcaccaactggacggtcatcatttgaatcaacgaccataacaaaggcataagacgcctcttaattcctaaattcaggactattggaggcaataaatccatctccgaatcaaccatgtgccacggtcgtagaatgaaccacaagagcaggggtctctcctgcaacatgcaccgatgtacaagaataaattcatggcaatgaaatgagcaaagtgctcatgctccaaaatgaacatgtgatcccaatgaaacttactgcaagtggtctgttccaaagggatacccacaggagaagttgtctgcaggtcatgagtcccacaatcatctcctggctgacttaatgggatcaaattggggccagattgagcatcagacacacttggcacgtcatgcataacacgatcatagtctttaggggtacggtctactacaacccaccgcaccacaacctccataacttgcaagtgggtcttcatagccgaaataacataattctcccactacagttgagaatcaattgggatgacatgtcttatgacgttagtggatgaccaatgttaagcactccatcaaccacgatgtcgtcatcttcatggtaacctagcttttgtttagcctttgtaaacaactcactcaagaagggtctaccaacgaataccacgggcacgtgtcgcatgtca

SEQ ID NO: 166660 - DNA, 364 bp, Zea Mays
tgaatatcccagagtcagacaaattcttattcattatttatatttgaaaaattaaatcaagacgagaaacacacggactgaaccaaacaagatcagcttcgatattgtaaactgtatttaatttgaatcaattcgaaacccgataattttatccgcagtctgaacaagaaaacagattaattatgaatattgggtcccggctgtaattatctcagctcgatttaattttgcagcacttctatcgtcgagttctaataatatttacttgggccaaaatcacaagagtgggtcgagattccaaattcatgttctcttaatccataaattttaaatagacacaaggctcgacatttcgcgaaataaa

SEQ ID NO: 166661 - DNA, 550 bp, Zea Mays
accgaggcatagagaaccccaagtcgaaacgcagtggcctgcagttcgtgaatgcggccagagacgagcgccatccgggtagtacgagtggacacttcccctgactgcgaaaccccaaggtgatcacatacgaggtcgatggccctggacagattggagcgctcagcgctaaggactcggaggcactcctccgcacgcgcgagctcctccaacaccatcgctggtaaacaaaaaataggaaaatgtgtcagtgaatcgctgagactaaaagggtcaaaagttagggatgggagagtatgatactcaccttcagtcaaggaccccgacgcagatccatcgacatgaccgcttggcgaccatgtcttcccaagacttggctggtctgttaggaggccatcatttgtctcgaccgtgggatgctcaggttgtatcggttggccgaactcggaccttgccagcccaactcccccagcagcaggacttcgaacggtggtgcgagtcccatgcctcctcaaatggtcaaagcatctaggcccctggttggttttag

SEQ ID NO: 166662 - DNA, 581 bp, Zea Mays
gcgcaaaattactaaagaatacaggggctacatcataaaaagttctaagactcaggttaacccgaggtggactgcgggttaaatgcgaataaatacagggtctctttagtaaagtggttagggcgaaggggtattttctgctgtgagccgatcgatctacatcggaccgccaagatcaaatcagccatcgtgtgaaccggtacccttttatgaccgcaggatctgagatcaacggccctggagtttaaagtactaagattgccccccatacacatgatttgaatcagacgacatagatctgaccacgaaagggtacgcgggccttctaatcacaatcgttcatccattgatccacggcggaagggtcttctctccctgacacaccgtcggtgacggagaacacccaccacggcggcgccattgacggtgaatcctgcacgagcgccacgtgattatgcggaaagcggagaggggaaagtggcgggtaacaaggtggtggctataccgcggattatgcactcagacgacccgaccacgacgcacgacggaaagcccagggatccttggcgtcggcgagcaat

SEQ ID NO: 166663 - DNA, 327 bp, Zea Mays
aagaagaaaggcccatgagactgaatcaaaagctttagtaatatcgagcttcaagaacaggctagcaacctttttcccgtggagggatttaatggagtgctgcaccatcatataattatcatgtatggatcgaccactgatgaaagcactttgattcgccgcaaccaacttctggaggtgagaggccaggcggttagctaggatttttgtgaccaacttggcaaaactgtggataagacttatagtcctatagtcaccagctgcaatagctcatgccttcttaggaatcagtgttagaaaagccaagttcagcaaccacaattttgt

SEQ ID NO: 166664 - DNA, 393 bp, Zea Mays
tcggcggaggacgagatctcctactgagaaggatcgctattgcacagccttgtcgtgatagcgccttagaatctgctggtatcatgctgattggattactgcgttcagccgttcttcctcgagtacatcaatgtcctccatcctagtggcttcggcttctgctatgcttttgaagatcagccttggcgccccgaacttgagatcggcgggtaacactgcctctgacccatagaccatgaagaaaggagtgtttccatgcagagctcggctaggctgggttcttaggctccaaacgacgtagggcaattcccttatccactttcctgcaaacttttcattcttatcgaagacctttttcctgagtgcctccagtatcatcccgttggctcgctc

SEQ ID NO: 166665 - DNA, 706 bp, Zea Mays
agattacgattcacccctcctgcccatcgccggtgaccgtcgccgtcgattaccgctcgccgtgattcgtgcgccgtggacatcagataagcatcacccagtaaaaatcttcaccgctgtgagctaggctccactccggtgacccccctgccttcccctctgctttgcggctggcacgataagctcaccgtcgaccgccgcctctcggccgtgtgccgcgtggctcaactctttcaccgtgtcgccgtgacctcctccgaactctccgtggctcaccggaattactgccacactataggacacgtattcgccgcgccaggcttcttccttatctccggccgccaccgcgccatcgtcaattcaagcgccaccgcccgtcctccctataaattgagcccatgactagctccgtgaggtcgtcagctaactagccaccgctaatcggccacaatcatccaccagtgaccgcgaattcggagtttcccccaaatccgatttccgccaccgtgaaacaagcttcgccgtggtcagccatactccggttagctcctcccctctgctcccttgtttaagcactcttatgcgtctacgatgcttaccgagccattgaattgaactaagagtcctctggtcgccgggaacacggctgtcttgccgcgatgctcacggccaccgtggccagagctccatatttgatcaatagcgc

SEQ ID NO: 166666 - DNA, 676 bp, Zea Mays
ttctctctgatccgattgtcctcagattgcctcttctctgtaagaaaaggcatcaaagattaagggttcaattgtgtaacatgaataaagaagctaaattgtattgcagggaaatgatagaacaaggatgtagcaactgataacaccacggttgggacatagaaatgtctttgtgcaaagagaactctaaatatacctatagaggagcgttgcgtgaagagacgatctgtgcatcagccttgatagaacctcgatgtccaaccacatagattatagttttaggattctctaaaaaaaagaattttaggattaatagaagtctgaaccgctaaattaacatacatcattaccatttggttggcttgcaggtgatatgatcgggtctatgtacgatgtggcattttactcaaaatcctccctcgcagctttgcagtttcaactggagaaggatgatgcagtgatcctctaagaaaacagaaaaggttgacgttgagccaacaatagaatttgccaaaccagacccatttgcaaaactgtttgctccatcacaatatcctgaaagtagcaacatagcaaaaccagccatgatcagaactggagcatctcgatgagcaaacttaatagtggataagagcatccatcaactacaggcacctgaatgtatgaaaaagatgat

SEQ ID NO: 166667 - DNA, 552 bp, Zea Mays
ttggaattttgtttccgatccatgaagttggtttatctactactgggataatggctccatgcaaccgctgcctgcctcagctcctcctcgctttcccaccggcccgttcgggacgatctgtcgagtgacctgccattttgaccacgcaaaaaaggaggaggtccctatgctaggctagcatttcacatgctaattaacttctagctagcatcgttatgttgatgctagcaccctagcgaggcagctttgattcttcaccaacaatcttggagccacaacatcgaacacccggagcaagcagacatccagggcgacaaaagcccaaacaccattgagccaagcggagagacgaaaggcctccatatttttcaacaaccacgcaaaatgaaggacttctggatagcaccctcaagaaggagagacaacgccgaatcgtcgccggcgcccgcctacctagtatactataggcagtgtttcctccaaagattcagcatagcaacagtgatcgttagcaccatggagaatgttgcagggacaaccaccgcctatgcc

SEQ ID NO: 166668 - DNA, 907 bp, Zea Mays
ttaataattcgaccggcaaccacacctattctgtgtgtgagcactttagtaagaatcttaaaactaacattaagctaacaaataggtctataatcctggattttcatagcgatctctttcttaggaattaacgtaatgactccgaagttaaggctatacaccggaagggagttattatggaagtcggcaaacagagccattaaatcatttttaattacttcccagaatacttgatagaattctacaggaaatctatccggtcccggggctttattatgctccatttggaagactgcctttcggtctttctccattacaaacggcgcagttaaaatttcattctccgcatctgaaacttgggggatgtcgtgagtaaacgattcctccaattcaacagaagtttggtttggtttaccaaataggcctttatagtagctagtaatgtgttttttaagttcctcctcgtccactatacttgacccgttatcatcttctaggctatagattctctgtttacggtgtttaccattatccactaactggaaatatttcgtattatcgtcaccttccagcagatgtttgactttggctctttggaagagtcgaatttcctcctctcttagaattccagccaaccgttcattaataaatgccttcatagctagttcattaggcgagagacgagtaacctccgtctttttatctaggtcatcgattaatttagtaagttggactttttctttcttcattgttccagccgtattttttgcccatcctctaaggtgctggcgtacagcccaaattttgttctgccacttttccatggaattgttgccccttgtttcatgctcccagatagaggtaaccatatcatggaaatcgtctctaattagccaaccaagctcaa

SEQ ID NO: 166669 - DNA, 434 bp, Zea Mays
gtgctacaaatgaaactggaagagttcatccgactgaagcaggagggagattctgtgatgcagtatctcaataaattcaatcatctctcccagtacaccattgaccaagtggatacagacctgaaaaagaataattgatttatgaggggactaaatgacaaactccagcataagatggcaacgtgtctggacctcacatacagcagggctgtcagtacagcactagcagttgaagccaaaaatgcgggacaccgaaaatcaaagggatatgcgggtgaaagatcaactcaaggacgtgaaaagagaacaaggttggtaatctgacctttcaatccaaaacgttcttcacctcttccaccttcatatccattcaaacagtccgtattaattcgtcccactcctgcccccactctgtccaatcagctgagtgcccc

SEQ ID NO: 166670 - DNA, 1267 bp, Zea Mays
aaaaaaggagttaagaagtaatttctattaattaaacaagttctagggtttatttttgtataaaaatcattttctgtaattcatttataatcaggccgagctctctgtctaaaattctaattcctgaatacaccaggggtcacggtgtaaaccatcccaagacacagagtataagctaggtggacggcgggttatttgtggcaaaggaaaggggcttaagtgcaaagtagcatggccgaaggggtatccccggatcctagccgtccgatccacagcagacgcaccagattagatttaagcaagttactcatctgcgctcacccccgaccgtcggatcctagatccacggatgaaggacgctcctgccccgatctgacctagaccgttcattactgaatcgacgccacagatctattctcgcgaatcggtacacagtcgtctaatctccaccgtaggagacgatccaacggccaggaggccaccttctttcctctatcctttcttctaccctgggcaccccctctcctcactgcgacccgagcccgtcggagcaacagcccctcccccatggcggcgcagtgcacaacccggcaggagacttcaccgtcgtaggcctcaccaatcccccgacgcaccgaacccgacccgagtcgattgcagtgagttccaccctggatcgtggtatttgtggcgcagaccaccatggtccacggccatggagttgctggtggtgatgtatggccgctcggctcaccgaaattcgagcttagcacgactacgtactagaatgcgatgacaaacacgaactagggggaattgctcaccgattaataatgatgcgcggagtccggttctcgacgtgggacggcgccaggtcgggtggcttgctccaacgacaaattgccgacattgtgaaggtcgatttccccttcgccacgcacacgagcgcacgcctggtggtgcgacgaagcctccggcccgatcccaagactttgacggtgattaactcatggaccagcggtggcggccgactgacccacaactacgactatggttctcacccggcgaccacgagaaagggcccagggtacgggaattgacttatacgcagcagggcggctcgcgtggaagcggttagctcagctcgatttgcgggcggaggtagttggggagatccagcatctccggcggaggactcggtcagcgcgatccggttgcgcatacatccatcagctggaggaggacggcccttacaaacggggcccgc

SEQ ID NO: 166671 - DNA, 597 bp, Zea Mays
ccgtgtctgaccgaggatcacaatttacttcttggttttgggagaagttgcatcagagcttggatacccagttgagttttagtttgccctaccatccccaaactgatgggcagacagagaggactaatcaagtgctggaggatatgttaagagcttgtgctcttaaacatggtggaagttgggataagagcttaccatatgtggagttctcatacaataatagctaccaggccagtttgaagatgtcaccatttgaggctctatatggcagaaagtgcaggactcctctatattgggatcagactggagaaagacagttctttggcctgagcatattcaagaggcagaagaacaagtgtgaatgataagagagaatttgagaattgcacaatcaaggcagaagagctatgctgatacccggagaagactactggagtttaaggagggtgatcacgtgtatctgaaggtgtcaccactccggggtatgagaagatttaaagttaaaggaaaggtgtctccccgcttcattggacctttcttgatcttaaagcgagtgggagaagttgcatatcaacttgaactacccgatcacctggc

SEQ ID NO: 166672 - DNA, 1229 bp, Zea Mays
gggggtacttattctggatagtgacttcattcagagctcggttgtaacaccccaggtgttacttagggtttctcccccagtacccacacttgtgacctgttaccacatgtggtttagttgagcattaggcagcaaacttgaggagccaaaccttgatcaagtcttatccaccctagaaatcaaaccctaaccatatgaggcttaaagaagaaggtgaaatgccaaaaccctaaaaatcctctctttagagcaatggaacactaaaaagaaactcaaaaaagaccaagaagatcacattgtcatgacttgggccaattataaagttgtgatacacttaaatacctacaaaaaatagtaagagggtttacccaaaaaagttttgcaaaatctccaaacaagccactcaagtgggggtttctatagaaatgagaatttcagattcctgaaattcagcccctcaccaaactcgagcatgttcaccctgatccctaactcaaaaccactcggcacaattgtcaaaatggcgccaaaataccattagaacaccttggagaaacttggggtcaaaccaaatccgtttgacacaggttagcacacctttactctcagattgggtctgttagacagaccaatcttggggacgtgactactcactgcacagcccaagaaacgcctcgacctccacacacaaacgacacagggtagtcgggagaagaaatcttacaacaggatcttgcccaaaatcgtgaagatctggagccaacgggcgcttgaatacgaccacactcaactccgtcacgtgcttgacgccgtggcaatggggctgagcgcgcactggcgctcctccacgcacgcctcgagcgcttgttagaccgaccgcttgcctacgctcgcccacgcctataaagccctcccgggtatgcagcactcaactacgcactcccgcttcactgtcccgaccaagttcctagctccgacaagcgctgcgccacccgcccgagccacccaaactccgaccaccgtggctagctcaccctagctatccctctcctgcgccaaccgctcggctaggttcaccggagtcccatgaagcttcccaagcccctggaccgagcacgacctcaccagaagcgtcggatcatcctcgttggaatccgccacccgccggagcacgtggatcaggtaaaccgttgcaccactgtcaaattccttacgcgcacagcttccac

SEQ ID NO: 166673 - DNA, 454 bp, Zea Mays
cccggtcgtcacctctcccttctctcttccttgcatcccatcacctctctcttgggccaaccatggccgctgatgccagctccggcgagcagcagccccaccgcgtgtccatggcgccaccggccgtggcagcagccatggcgttgctctgcgcgccctgcaccctggccgaaaatgatcgcgccccggtcgtccctacgcgaccctgatcagcaaccgttttggcgtgtgtgcggtgcatggaggagaaccagtcaaaccaccttgcatgcgagatagagaatcagggaaccgcccatgcccctctgcgctggctgcatgtagcaaaaatcaagggcgtctaggagagaaaaaaggaattgtcattggacccaggcacatgcacaataggtttccatgcatagggccagccaataaaaatattgccctcaccccatctaagggtttaactttg

SEQ ID NO: 166674 - DNA, 688 bp, Zea Mays
agtgaggagtgaggtgaggcgcgtctgggggtggtcttaaaggcgcgggcgagcacggccgaggggtggctctgacacgcactcggggtgtgcgcgggtgagcgccagtgcgcgctatggcgcttggggcatgacgtcgagcacgaggcagcgcagagagaggtcatgttcaagcgcggattggctccaaatctttgcgattatggccatgatcccgttgagagatctcttcccctgacattcctttgtcgtttgtgtgtggaggcttatgggttttgctgactgcatcaagagatatggagggatgaagttgggtttgtctcactgctgaactccgagagaaaatcccgggtttgacgtgtctagggaacaaatctcaatgccatcttcacacatgttgcagaggggttagtttagaacaattttgtcaatggggaattaaggatttgagctagggatcaaggtgaacgcgctcaagttctaggtgaaggctgaaattcagaaatctgaatttcaaattctccctagagagcttcctcttggatggcctttttggggtttttaataaactattttggtcaatgttttataacaattgttgtagcttaatgtgtgtatttcaacttttataattggcccaagccatgattccatgtttttcatggtctttttacccatttcttccttt

SEQ ID NO: 166675 - DNA, 378 bp, Zea Mays
tgttcagatgcatcattccataaacccaatgctaaagctctgttctagtatatcctggtgcatggttactgtcaggaataatggactatggttaggacctgctaaaagtaatcttccatggaaaagtttgcaccagttgatatggagatggaggtatgctatgctaccagatctaccagcaccaaatgaatatgcttttgcaatggctttgagcagcactgcagcatgaagaaatatcgattcgcaaatttaattagacatgccattttcaatagcgtatatgtatacatctgcatttgcctcctggtgtcatttccaagacgcttttagtctccttaaacttaggctccgtttcataggactctttctctgttcagc

SEQ ID NO: 166676 - DNA, 279 bp, Zea Mays
caacaataaaataccattgtgtcattgtgtggctggattggattgctctgcggctgcgacaaaaagtggaaccaaccatcattgcatgcatgcagatgcttgatgcttttggtcatgactcatgagagagaatggtcaatggtgtgtgtatggctgtgcacatgcagatgcacttagtctgttggacgcggggacctgaattaaccggttggctgttgtgtgtgtgcgagtcaagcgtttgaagtgttggcagggagctcggcgccatgatctacggcg

SEQ ID NO: 166677 - DNA, 527 bp, Zea Mays
acgcgggaagcgccctacgatcgtgtatataaggccaagggggatccccatcactttcatggcattagcacctcaccacttaatagacaccacttgtaaacacctcccacatacaaagtcatcctagggagtagggtattacgctcctcaagcggcccgaacctgctaaaactcgctcgactctctctttctcgtacccccggcatgaaccattgagttacaatccacgacaccgtcctacccaaaagaaccacgagggtaccctaggtgtgcggtcggacattaaacatcgacacttccactgttcatccagacttcaaagtaaaatttcccaccaagggcagtagcttcagctaatggttccttaatatcatttgctgaaactgaaaattctagctgaattacagcctttgtgtgttcacagccagctttttcaaacaatgacacggcccctcgggcacccacacaggcacagaaatcccctctgcaagtaaggacttcatcaaaagcttcaacttcaccttcaa

SEQ ID NO: 166678 - DNA, 441 bp, Zea Mays
aaggaggaagaatttatgcataccaaagaatttcctatgatgcaatacctggatgaggaggctggtccatcttgtgcgcctttagttaagccagcagattctaatgttccattccggcgaaggaaatacagttcactaaggccatttagcacaatagcaactaagtcaaacatatttggaagtacttcaaattctaatgctgatgttccagtttgtcagcttgagagattcacacccattgtactaaataagaatgtgcagcgtgtgcaagctgctaaggaattcatagaaaatagtgctggagctgaaaatttggaagatttctctgcagtttggaagcagacatattatcctcaggatggcagtgaggatcaaatcagggagctacaggtcccacgggaagtctttccgccaacagagaatttggttgttaaacagcac

SEQ ID NO: 166679 - DNA, 708 bp, Zea Mays
ggaaatgtcctgctctctctcgaagcagaccttcgacacacgagacgagatgagagttctctggattcgctcgcgactagcatgccacatgcatatatccatcatcatcggcaggaagaattatgcatggtcgtttgattaattattattacagacgtacgacacgtctccagctgcaaaactggaggctcacgagtgcatgatgcatgatcgccaaaatcatcgtctctttgattcggactgaatgatgtacggtgatcgtcatggacagctaaacatcacattggtaacatacatatgcatgggtagcatatctctactatcctacgtgatctcctctgcggtgccggtgcctcgatcgattggtaacgtattatatttgggctgctatatctagacaaaatgcagcagggatgaccagcacactacttgttactgggctccaagcttttcagggttcgtagcctgccctgaaaaacaccaccatatcgcagttaattgcatgtactacgcaaggacagtgtatggatacaccaagaacacagtcctaacacgcgcctttgagtttgaggtctattctatattgttatttcctgacgtgcaggtcatgcatgctcccattgatttccatggccactctctgtctgacttgcatactaccgttagtctcgtttatggtcgtttatggacgatgtcccgacagatgcc

SEQ ID NO: 166680 - DNA, 611 bp, Zea Mays
gtttgtatgcggtagaacatataagctttattgataatgagacctttcgcttataaagtacatcttgtccaccagagttttgaggtactgctatggatagaatttcctgaggtgttcaatattccacgaatttcccacttcggttccatccattcgggtaagtcgataggatcctgtccaggtaacttctgcaacaatgaatggtccttcccatgggggtgacagtttgtgtcgtccttctctcgtcggcactcggcggaggactagatctcatactacggaggatcgatgttgcactgctttgtcgtggtagtgcctcagagtttgctggtatctggccgactgaatgacaacattcaggcgttcttcctctaatatatcaacatcttccagcctggatgcttctgactcagctatgtttttaaatgttagcctgggtgctcaaaagatcagatccgctagtaatactgcctccaatccatataccatgaagaatggggtgtttccatgcaaggcccagcttggctgcgttcacaggctccagaccacatacggtagttctctgatccattttcctgcaagcttttcgctcttgtcgaacacctttttcc

SEQ ID NO: 166681 - DNA, 906 bp, Zea Mays
aatttctacaagaatggtaggctaataggtgtcacatgactacccttccacctctcctcgcccctcagctcgccgctgccatttctgcccccgcccagtcccccgtctccgcagcccccaagccagctgccactactagaggtgagccactaccgaatctgtcgcgtagagttattgcgtcggatttgctcctcccgtccttcgttggaggtcgggatttccaaggtccctagtgctctagcctcgctgttaatgggatgggacatctgggcgtggtggcgaaggaggatgatttagacccgctgctcctggatttgctctcggcccatgccttgcccctacacagctactccccttggctatgtcgccctcccgtgccagctcctgccgagtgaacatagaaaatgggaagaaggtggtagatctttcaagaccctccctagacagcacaattcattcaatccatctttcacctccgcagttcatatagacggaccagtccctgtaggtaggttcaagccagctccctatataccgttgctcatgttgtagatctagtgcagtccgagaggtctggtgagctcattgatggtcgcacagatggctgggaagtggtcagacctcgatattgttggaggaggaacaagcacaggccttgcccgagctccaacgcattacgcgaggaaaggagaaagaagttcctgaagcacgtcgagggtaaatgctgcaactgtttcgctaccaaccaaagagctttgaattgcaacaacacaaccaagtgttggagatgtcttatggaagggcaccaggtggcttcctgtcctatccataaagggggagtagggaggacctcatctttccccgcgttgaccattaccactactccctctgccatttctaggctca

SEQ ID NO: 166682 - DNA, 314 bp, Zea Mays
ctggcaagaaatgagctgttttggtcagtctatgaacgatgacccaaatagaatcgtggtgtcgggatgtgttgggcaatcccacaataaaatccatgcaaatatcctcccatttccaagatggtatgggaaggggctgtaaggtacctgctaccttcaaatgactagccttgattctttggcaagtgttgcattcagctatatacttagcaatttccctattcatctgggtccaccaatacaaggatctgagatcacgatacatcttgttactgcaggggtgcatgaaaaatttggaaagatgagcttcatcc

SEQ ID NO: 166683 - DNA, 720 bp, Zea Mays
ggccaagagagccctcacacacgagctccacttatatttatagccgacaactcaaacctaggcgttatgtgcaactagcacaacttctgtgcacacgcggacggtccgccgtaccagtaacgactataaagaccgtttgaaacctgtcagtgctgtctgtcagtgctgtcagaaaaagttaagcccaaacggtctgccctcctgggccggacggtccgggacatatcaacttggaataccagagcactggccagttaaaacaactcgagcggactgtccgccattcatggtcggatggtccgcacatggaccacttaccgtctggctaaaaaccctggatggtctgtagtgcaaggactcaaaaacacattgtccctgtccgaactcaacttggtttatgcggacggtccggcctcctggctcgaacggtccgcgaagggagacagagacagggcgccagcagacttctctggcagagtcacggatggtccggcctcctggcccagacggtccgtcgaccacagagttgatattttgcgcttttcaaaagattttgtattttgaaaaacgaagcgtttttagccctcatgcaaatgcaactgtttatgctctatgaggcactaagttttacaccgatcaagttcattgacccctcttaatagtacgactatctatcctattaatccggtcaatttcttctctaaacacccgctgaccggc

SEQ ID NO: 166684 - DNA, 1179 bp, Zea Mays
ggaactggctgccaaggttggtataagtgcaaggcaggttaagttttggtttcaaaaccgacgctctcagattaaggtatatctctacgggtgcctagctcgatggtttggaatcatggccagtaacattcatataaaaatatcatgcatataaaaaaatgccactagcccacactatacatacataggttcttatggagggaatggtgaattggtgaccggtgaggtacaaaatactcccaggagtttcatgcgtgttttcagccttgtgctttagatctggtaaaaaaattagagaatggattttcacattatggtcaaaatatcatgcatataaactaccatcaatttattttcaactatgtaaacacatatatgtttaatagttggtaccatagtgtgagttagcaggagtcattcatatatgcttcatctaagcatctaattaagtgtccatgcattgttcaagccttacagtaacttcaaaactataactcattgtacaatgttttgtgcccttaatttccattcataatttaaggctaaacacactcatacattatatgaaaagtaatcacatgtattaatttcttaagatgaaacatacaggtgaggtcctgtggaactgagaacaacaaatatcggcgacaaaacgctgagctgctcgcaacgaacatggaactcaaggagcaactgaaaggaatgacatgcagtagatgcgatgccccaacaataatgcagaaatggcagttgatggatgaaaatgctaagcttagggaaatgtactcgctcgccagtgcagaactgaccaagctcatgcaggaagcaaatctccctccctctgtgatactagaggatatggcattagttacttccatgaacccattgtccagcaatgctagcagcagtcgtagcaccatcaaccaggatgagcttctctcatatgttgagtgtgctatcaaagagtttgagatgctagtaagggatggtacgccgttgtggctgccgaccatcggtggcgacgtgctcaacagtaaggagtatgcctgccagagattcccaagattacatgggacgatccgcccagaagggtttgttgtggaggccacaagggacactgccatagtcaagggatcagccccagacattgttgacatcctcactgatgtggtaagcttg

SEQ ID NO: 166685 - DNA, 318 bp, Zea Mays
taccacccgcaatccaacggagttgtggaacgcgcaaatggcaaaattttcacagccgtcaagaagatgctcctcgacgacaaaaagggcaagtgggccgacctgatacctgaagcggtctgggcactaaacacgactgagtgcagggcgactgggttcacccctttccgccttctatatggatcggaggccatgaccccgcaagaaataaaacatgggtcaccacggacagtcccgtcagccgtccccgacgtggacgagcccacttcgaaggacctcatcgatggagactgcgtcttcgccctacaggctctaaac

SEQ ID NO: 166686 - DNA, 396 bp, Zea Mays
cggttgggcaagcttcgtttcagcaggcactgagggccctgcctcggtttcagcctgggttattgtagctttgacttctatttgcttagtatcagctttgggttgcgttttgtcagcttcggcaaccttccctgtgggagcgggacttatggagtcggttgtttccaatacatctaatacatttaccatcctccttctcctaggagttgtggcagaactcttttgtgccttcagcgctgttgcttctgttgaaggacttaaaatccctggcatctttgttaattcttcagtttttgacctttcagctttatctttgtcaaccttcttttcaactaactcagccgaaggtgccttcggcattatagtcggctcttcagtcctctgcatgggaggaac

SEQ ID NO: 166687 - DNA, 935 bp, Zea Mays
ccgttcgtttcggctggtttggaccattcctagcctccttccaggtggaaagaaataacctggattggaattcggcccggattgaaacagtcgttcgtttaaacttggatcaaaaacagaagccatctggtttggagattgtctgttgttcatggcccggtacgaaatctggtctcgtgtcctccggattggatcttggcagcgacacagtgagacgcgcaaagctggcggtggataaggcaaagaggcggcagcgcaaagtggcagtgcagtcggaacgacgaccctctacgccactccccatgtgtttctcgttctcgtcggtcaaggcggtcgggcgggttagccagtggtgaccgccgccatgtatttgaccaagctttccggacgcaggtgagagtcacgccgtcgtacatgatcccggcaaatcttcgtccggccatcccgaatcctgtgctggcaagctgtggtccatggccgtgtggcacgccaccattggcaggcacaggcacagccatcaccatgcctcagagctgggcgggtggctacctcagttttccacggccactgaagcatcagttgtgcagggtgcatgcatatgtgtgtgggtggtgttacctctcctagtgcagaactcccctaggcataccccttcttcagagtgcttctaattattagaaacaacactcctcgctgtagtagcacaatcagttgtgtggttaagtcaaagatgaccgaggtctgtgctatgctgttcactggtgcattagcctgatctcattttgtgcagctcaagtatggtatggtggtttttgctcttgattctggattttgcttttgggtgagaggatagatattattcaagaactcatccaataaaaccgaactacatttgcaaatcattccagctagttttgttcctgggctggaatgag

SEQ ID NO: 166688 - DNA, 530 bp, Zea Mays
ctcacggcggtagagctcaattaaaccttttggggagcttcactaggtttagtgtgcccggttaattgaacaatggctcacctaaggtctctagccatgcacgcctacaaggttgcgagatccatcgtgggtgaactggctactccgacaaagtagagcataggttggggcttcggggagcttcacagggctctagggaagctatcgacgagttcggtttgggtggagagtggctgggatggcttggccatagtggttggggctcgggtgcgtttgtaggcggtagtgctccctgttctcatgtgatcaccagcgattaaatctcgggctcggttcataggtgggggaagagatgctactaaggggtcgaatgggatttataagcgagggcgcggcttgggtgcggtggtggccaatcatgggcatgggctaggcgcgctcccgagtgctaacccacatcgaacacatggcttggttgcgtttgcacctcttctcacacatgtagtcacttgttgttaggggccttcctc

SEQ ID NO: 166689 - DNA, 289 bp, Zea Mays
ccggagtaggcgtccaaaaaggacaaaaggtcgcaccccgaggtagagtccacgatctgatctatacgtggcggtggatacaggtccttgggacatgccttatttaggctggtgtagtcgatgcacatccgaagcttcccgtttgcctttggcacgatgactgggttggccagccacacggggtgatgaacctcttcgatgaagccggcgtgcaacagcttccggacctcctcacggatgaagtcatgccgctccacggactgtctccgtggcttctggcttactggct

SEQ ID NO: 166690 - DNA, 776 bp, Zea Mays
tacggacatgtggactgcaaaccatcaaagaaaaggttatatggcagtgacagctcattttttggatgatgactggaaactaagaagtttccttattaggtaataaccaagcatttgagctttatgctattgatgataacaatcttgcaactaccttgatgataacttatggcttgttaattttgcaggtttatatatgtcccagctccacacacagcagatgttatcactgatgttctccatgaggttcttttggattggcgtattgaaagaaatctatccacaatcacgcttgacaactgtagcactaatgatagcctcatgagaaatatgataggcacaagtaatgaggatctcacaaggactatgactgcaattgaaggcaagttgccactttcctcttgtatgttgcatggtaaattagtacacatgcgatgtgcttgccatattctaaatttgattgtgaaagatgggatgagtgtaatggagttaggaatggatagtattcgtgaaagtgttgcattttggtcagccacacctaaaaggcatgaaaagtttgagaaaatggtaattcaaatgaaaggaaaatatgaaaaaagaatagctctagactgtaagactagatggaactccacttatgtgatgcttagcactgcattattgtaccaagatgtttttgaacgccttgctgcacgtgccccatctgctccaacaccagaagactggaagtttgctaaagaactctgtgaaaaacttaagatgttttatgatgtaac

SEQ ID NO: 166691 - DNA, 860 bp, Zea Mays
ttcttcttctcctcgacaggtgcagtcgggcggttcactcggcgtgaacgctttgggcgggcaccttcaggtttccggatctccacctcttcgccaaattcttgtccagtcgtgatggccatctgctcggtgcgggtagaatcggacgattccccggccagcaggctaagcacggtgtccatctcagcatcatcggtgctagctggcatttcaaagtgagttttcctctcagcctcaggaagactcccaagtggagcaatcaagacctcaatgtcctcgggagagggtcgcactctatgacccgggctaccatcacgagcaggagggttggagacaaattcagagaatggcctatttggcggcaggttccacgcagagtaagctaaaggatcaccagcattcgagaccctacccctcagaatcatatccagtcggctcagcaaatcctcattgggaatctttctgtttgtgacccgggtggaatcactgatgccggtatataagtaagcagggtaaattctgtccttcaagggttgaatgtttttgaagacgaagtcagcaaccatagcttcagcagtcagacccccatcctttagcaagcagatctcagcaagtaatactttggcctgagttatctctgaaaaggtgggagactctacccagctgggggtgcgaacatctggttgcctccatgaccgagggggagagatttgcaatgattttccacgatgaaccactcaagacgccatcctttaatgctgtccttgaggggaatatcgagatactccactttccttccccagcgaagctctaaacttgcaccgccaacaagctgatgctaccccccagccatcccgggc

SEQ ID NO: 166692 - DNA, 653 bp, Zea Mays
atcgtcccctccggatgatgtgaccgcaacctggtagctcatgatgtactgtgctgggtcggtgctaccattgtacttgggataagtacctgctctaaagttgctaggccaaggtaaagcatggagttgtggtgcaagtgggcttcgctcatcaaggtaatttatcccctgtaaagtggttggagtcgtgactagtatgtagggagaattctgctacatttggtgacggccttcgctttgcatatctgcgatttattgttctagctctatggccttctgctcttcatctaatattatctgcctgaccttggcctgcatggtaatgcgctggcgcttggctataagtatttatttctgcttttgtaaatgattattcttgatgcaaagagcaggcaacttgagttggtcttcggctaaaatgcctaagatttcgccatcttcgatgatgtcctctgcctctggaggggtgaaacctggcatgggtgcctgaggtactccctcagagctgcatgtccgcacggtgccctctagggtaggtggattatcttggcgttgtcttttgctattgactgtctcgtcattgaaggcctcctgagggatgtcgttcgcgagaggagccttgcccttcttttcagctagaagggccaccttcg

SEQ ID NO: 166693 - DNA, 636 bp, Zea Mays
cgcgccatcgggcccatgtttaaatagaagagaaactactatataatttgtatggcaagatgaagtgaaattaagatgcagaggcaagaaaactaatgaagaacactattactgaaactattttgcatctgttctgagttactactgcagtttgaagcatggcaactctgtgttttaatgttgtttatggtacaatctttttataacattactttgtatgagtaagccaatgttaaccaacatgtgtgtttctaaactcctacatgatgtcctctacaaaattttaaatccaaactcactatacatgaagaaacaaaaaacaaatctcatatgggtaaactgggactgctgaactaaattgttgggggcatctggacataggtcaaacatgaagggggagtttggactttttccttgaagaaagataaaaaattcagaattaccttgcagataacagatttttgggagtaattaagtcaacaaagaaaatatgttcttgtctcaaccttctttgcaacctctaaaatttgatggaatcaatcaggcatgaaaatattttgatagaagatagctagcaagatccaaaccttatatacaccatctgtgcttgaggagctagaaagacaaagggtggtg

SEQ ID NO: 166694 - DNA, 308 bp, Zea Mays
tcagtcgctaggtaccagtagaccttgaggcgctaccacgacaaagttgtgcggcattgatcctttgtagtgggagacttggtcctccgccgagtgctaacgggggagggacgacacaagatgtcaccaccatgggaaggaccattcatcatagcagaattcacatggccgggatcctatcggcttactcaaatggatggcacagaagtggggaactcatggaatatttagcacctcagaaagttctacccttagcgatgcctcaaaagtctcgaaggaaagttgtactatgtaactagaaggtttca

SEQ ID NO: 166695 - DNA, 340 bp, Zea Mays
cagaagaatggactacgggtgtataacacccaagcacatcggcgagtaagtgtacttgtggagctatgaagatgacgttgacaaagtcaagcgagaacacatgacatggtgatcgtttggtcgagagtagactgtgacacacgtcatggttagggaggaggcatcgaggatacgtttctctagatgattggtggtttgggcctcaaaacgaccaatagatagtttaccgagtttgtgcctcaaaactcgagatgaagttcaggatggacattggggtggcacatggacatcatcacgaagcttgcatcaatgcaaagcaatgtcgtgaagagcttgtgat

SEQ ID NO: 166696 - DNA, 666 bp, Zea Mays
ttcttttcagtgtgcatcacgttaatgttgtgtggaaggagcagatcgtcataataggggagccgagtcaagcccgacttatgtgtccacatatgctgctcaccatatcccacaaaaccaccttctgtattggtcacgagcccatctatctattgacaaatttcggcaccagtcatcgttgcaggtgggtggtctgtcactacgacacctttcgtaaagttcttgatgtctaggtagaatggatggttaggagggaatattttccaccctttttcaaccaaatgaacctaagagcttcgttgcaaactgggcatgggaaattaccgtgaacacaccaagcgcagaatagcccatacgctggtaagtcatgcatgtagtactggtaccaaacatgcattttgaagtttgtctttgtagctcggtcatacgtccataccccttcctcccaagcacgtactaattcatcgatcaaaggctccatgtacacacccattttattcctcgggtgttcgggaattatcaatgacacaaatatattctgcctttgaaagcacacaccggggggagattgattgggataacaaacacgggccaacatgtgtatggggcagcgctcattccatagggattgaacccatctgtggccagcgcaacacgtacattacg

SEQ ID NO: 166697 - DNA, 296 bp, Zea Mays
tgaactgctacttaaatggtacatatttagctgaattacttactggtggcattgcagattatatgtttctgtcttaaagatacattagtaggatgtagtactcacactacttctgttctcatctcttcacacactacatctgttcacagcctgatttagaggcatgcatgacgttgtagtagccgagaccacccaaaagcactcccaacgcctgaccacaagagctagcagatagcagccctactgttggcaatccaataatcacatacgaagttttctttgaaattttctgagtc

SEQ ID NO: 166698 - DNA, 420 bp, Zea Mays
gagcaaactctgcacgttccataagctcaggcacattgactgtctcaatacgtcgcggactatggttcaagaccttcaccttcttcgccttcggtgcactagaggacgccgaagcagtagttttccttttcccctttgttttcgagcaggaaaacaatagtgagggtagataaacccgataacatcaaaaaccctattcagtctctttttccctcgagcgccgaaggccactgtcatggcttcatcttcggccctcaaataggctccaagcagttcatcacttgttgcctctataacatccaaccaatcatcattcagtacgtcaaaccgatcccaaaatcaaaatgtgtacttcagatagatcaggccactttggctggagccagcggcagcttccttcggcatttcccatccactcac

SEQ ID NO: 166699 - DNA, 569 bp, Zea Mays
ggtgaagaggcgcactaccgcaggcggtagcatgctcttcatgcggcgtactggtccgctgctttcggcggagacgaaggggcgcatttgccgcgggcggtggcgtgctcctcacgcggtggactagtccgctgctttcgacagagacgaagaggcacaattaccacgggcggtggcgttctccacacgcggcggttcgccttctctgcacatggaggccgatgcccaaggagtatgactcgtgggcccagacccccgtgccagagactgggtcaccttggcgcgcgtcgggtgaggtcttctatggcgctttggggcgtcagtggaggaatccttctttaaaaagggactcccccaagcgtggtagccattctcatcagcgcccttttttcccttgagctctctgtgctcttatgccattgtagccgccatggccttgctagaccctcccgtgcgccttcagcccgaggtggcactcaacttggtgcgcaactcgctcggatggggtgtgctggcgtttgccggaaggatccatgttggtgtctctcctcacggtgacctcgtagccg

SEQ ID NO: 166700 - DNA, 504 bp, Zea Mays
gccgtgcttccatcaggcgcatttcctcgagcacctggcggttactggcgtcggtgtactccatcgctgcggctgtggcccgagtacgccgtggaccgttgccgctcggatccagaatgcctaaatctgataccagattgttagcacgtgtggaggagaggagtagcagaggcagggattggaggtagaagaagggtattggggagacggcggcggccaagacagccaacccccaggtactcgtattatctttctgttgtttgatgccctctctgtctcagcgttcccaggtttatacgccttattacaactcagcccaacaggcctacacaacccactccggcccaaatactttcacgctacgacgctttactcgttgtggacgcgcagcggcttcctcctcggactcgccctccacgtatttgtctgcacgaccgacgtcctggctgttggagctgacaccgcgccactcggtgaactaactcgccggtgggcactgccgcc

SEQ ID NO: 166701 - DNA, 694 bp, Zea Mays
aaaaactttggttgcttcaagtgactgttgccttttgctgctttttctgtttacgcgcttgatagttcacccatatgcctaatgctggcagcgttttagaggtaaccgccgagtgatgcctgatactgccggcgttttagaggtaaacgtcgagtaatgcctaatactgccggcattttagaggtaaccgccgagtaatgtctgattctaccgacgttttagaggtaaccgtcgagtgatgtctgatactgccggcattttagaggtaaccgtcgagtaatgcctgattctgccggcgttttagaggtaaccaccgagtgatgtctgatactgtcggcgttttagaggtaaccgccgagtaatgcctgattctgtcggcgttttagaggtaaccgccgagtgatgcctcatattgccggcgttttagaggtaactgccgagtgatgcctgaaaatttgctttctcgagtagtgacctggcactttttagaaatagtgcccgacccgggaaaccccacttatactcgcaccgacgtgctttttttatttctgagccctaacttcactttttccctttgaaccactcctctgcttccctgagatctcgatcctgctcgttccaccggaaagattgcgatgatgccgaatcggaagaggcatagcaccgttgctgcaatcatcccgcctatcgaccc

SEQ ID NO: 166702 - DNA, 417 bp, Zea Mays
gtctcatcatagtaaactctaggacactaagtgaagccctagagaacccatcgtgccttgtacctatctagagaaccatctgactttagaaccatccaccttcctcttatgtgtccagactcacttgctagtttccacattactgtctgaggatgggacaccaagttacaggtgttgttggcaaggagggtctcatactcttcctccataacgggatactagtgaggatcaactagggcactgcgaacggaagatggcataagggagaccgacgaagaggtcacaaagaggacaagataatcaaccagggaagaaacccagcgacttgtcgtatcaccttgggttgacttggcgagggtcatggtgaagggggatgatacatcatcggcttggcctagcagtagggcagtgcaccca

SEQ ID NO: 166703 - DNA, 507 bp, Zea Mays
agcccactctttaggccggcacgccctccagtcttgaatcctctgacattgtagtttcttgagcgagggggtgttgcgccttcgccccaacacagtactttcacatttgtctgttagtctagcagtagacctaatcctagccatttcagtccttaagacgaagctagattcaactaattgcatgtttgtctgaagcttacacagcaattgcatggaaagaagagagtttcggcttcagtaaaaaatttcaacagcacaacgacgcaatagcaatgaatgttgtggtaacttctcaccaactcgcatgtttacatagccctacatgtaaagaaggtgaaccgccgaaatgcgtgtactgattgatcggtggacctataagccccgtaaattttttattcgttttttaatagcaagctcagaggtgtttttcggaccttcagcatccagaagccttcatgtttttcgcggatcgagctcattatgaaaaaacgacctagcaccgtgaag

SEQ ID NO: 166704 - DNA, 302 bp, Zea Mays
cgaggtctcctactacgaaggatcgatgccgtatggccttgtcatgttagcgcctcagagtttgctgatatcgggctgactgaatcaccgtattcaatcgttcttcttctagtatatcgacatcctccagtctagtagcttcagcttctgctatattttcaaagattaaccttggtgccccaaacttgagatcggcaggtagcactgcttccgaaccatagaccataaagaaaggtgtgtttccatgcagagctcgactaggttgagttctcaggctccaaataacatacggcagctctctg

SEQ ID NO: 166705 - DNA, 880 bp, Zea Mays
ttgtcatgttactcagtctgagtccctcaatcgatcgagtttgagttccttgatcccaccactcagtgacttcattgttggagtgtcttaggtacccctggtttatatccttaacacattgctctcaccaaatatccgctatagagcaaagcgattgaaatagacaaaaaagaacacttacactaacaacatggtagccgatgacttcagccaacgtcgaatcccccacctagaggatgtctcttcgtattgtgcaatgcaaaagaatcgacacaaacttctaagaacttcatgccccttgatgggaaggtgtccaatgttctagtaatcaaagccacatgccatctttgcactataggagactcctagaaaaccagcaatctagtaagactcttccttggtctgatccatctcccctaaagagctagaacttgagtacagttgtggataaccatagtcgtgatgttttgctcccaacttcaaacccccatggcccaaattaaaattggacatctaccatgtcatgggcgacacaaatagacccctgccaaaatctagacttgcccttctcttgttccctttaacccattaactcagcatacctcttcttcgatgactttttcgatgccaaatttttatgacattgccactagcatctcacatcaagggctcaactgattaggcccccttcttgacctaatgttctttcacgaaattttccaccaggatcaccgtttattcatcatggaaagtatcaatggtgatgagtagtattattgagtatagattgtgagaagtatgttggtgactagtagatttactctggcaatcaggactagtaagagaactttgaataaggaaagtacaacatgagaccatc

SEQ ID NO: 166706 - DNA, 361 bp, Zea Mays
tgaagtttgaaatatgaatttagggctaaatctatgattaaataaaaatatagggggatatccaaaagaaaccaggggcctgcgcgctaaaacagaggacagcgggttgatttcctaaaactagggggctcttaagcaaaactcacacgcgaaggggtacagggtaacctcggccatcagatcagagatcagcggcccagattagatcgtgcaggcgcgcgcggacgcggctgacaagcggggctagggcatcagtgggtcagggcgggctgaccaacttggcccagaggtagagatgcgggggagggggaagagagagaggcggttggatctagatcggagggctgggattagatctgct

SEQ ID NO: 166707 - DNA, 510 bp, Zea Mays
gtattacgctggaccatccgactctacacgagtccatgcgcagactgcccaagtcgcgccatatatggccgatccgtccgggtacagccctggaccattcggcccgatcacggaccgtcctattctttatgacagacggtctgggtacgagactacccatgtggcaccatatacggctggacaatccggatataccttcggaccatttggccaggtcacggaccatccggcctcttacgccggaccgtccggatatgcatacgcagagccgagagctacgcaatacgcgcagttcccgcattcatcgcagcagcattatggtgccccaccagcaacacattataatcataccataccacctcatggacatagggctgaatactattcggccacaagagagcctgaggggtatagggcaggagctggtgacattaataggacacctaacacacacctcaaacatccttgggaggaaagccgacagagtaacgtcaggcaacctgaaatctc

SEQ ID NO: 166708 - DNA, 794 bp, Zea Mays
aaatgagcccaaagttgggctgtcagtcaacctgaagtctgaattctgattatcagtgacataggatgaactttgggagccctttcgaagataatccagtgagtgtttgagtctgaccaccataacaagattgtagctggtatgaaagactgcaagtttgttactgagagattagcaagttctcatgcagaaattggagttatgggtcctgcaagttggtcggacagaggctctgaattggagttctcatggtacagtgaactgaggaagatcttcagatacatcgcccctcaccgtcggtgaacgtcgtgtcgtgattcgcatcgtcactacgattcgtgccctctggtatggagataatcacgaccgcgtaaagatcttggcgctagataaactcggacccgatcgacggggagttcgccgcacccacttggattgcggtcggctgaattggtcctcgccggcgctggccgcttaccgaccatgcgccacgtgcccgggcgtcttaccacatcgcagtaggtcgtgttaagcatatccggtgatcgccggtgagtccgccacggtgaaagccactaatcgattgcgctagtgcccctcctcctctccgaccaccgcgcgtctccatcaaattcaccggccaccgttcaagcacactataaattgcacacaccctcggctccgctaagtagtcaagcacctaatccagcaactcgtgcctcaaatcatccactagagcgcgccaatttcaaagttcccccaaatcggtttccgccaccgtgaaagcgtcctcg

SEQ ID NO: 166709 - DNA, 1932 bp, Zea Mays
gtattgttttaatgttttgcaaataggaccctggataggaagctttaaccctaaataggcattagaggggtaaaacttaacccaaattgagaaaacctaaaaaactttaggggaaaagtcataaaatgaccccaagaataaacttgaattacctttatacccctaagataccagaaaccctaattggaaccctggagaaccctaaaaccaaaccctaggggcttatgtgcaaaattggtccacttttgggctaaagtgcaaaaaccaagccaaataggtattttaagtcatttggttcacaaatatgtggacttgaaagccaaaccctaagttttggactcatttgcaaaaaggaccccaattttgattcctatgctaagtctgaaatcagggttatagacccaactttggggttgtgtagctttcacaagagtgagaattcatattaggtcaccacatcaaaattgtagcccaattataggacaagtttgcttaagagtgcaagccatgttcttgtgaaaagttgggaaataattgagcttgaagttggactgtcagactgcttgatgtctgaaattcagattaacagtgggatgacatgaacttagggcttgattttaagcaagatccagtgactttttgtgggagcacattgtagcaaagttatagatggattgtagttctacaactttgctgcagatcattgggtatgttgccatgaaaatttgtgagcaaatcgagcctaaactatggctgtcaggttgactgaatgctgcagcccatggtacagtgcccaaccggatcagatcagccgccgcagaagaatcccaccgctgacgaccttcgccgtgattcacgccaccgctgttggattcgtgctctgggcgagtggataacatcgtgcggtagaagcccctcgccgacggtgagctggaggtcactccggtgacatcaccgtggctctctctccctctttgcggctgagcggattaacacgccggcgaccgccgtcttccggccatgcgcagcgtggctctcgctttccaccgcaccaccgcgccttaccctcgctctccgtggctcaccggagttactgccacgccataggacacgtattcaccgcgccaggcttcttcctcatctccggccgccaccgcgccatcgtcaattcaagcgccaccgctcgctccgcctataaattgagccaccggccagctgctctaggtcgtaccaaagccatagccaccactcccgtctccgattaacccccatagccagagaatcgctcacttcccccaattcagtttccgccaccgtgaaacgagcctcaccgtcgccagccatactccggtcagttcccgtcttctgctcccttgtttaagcgttctcatgcatctgcgatgctccccgacccctttaatcgaaccaaaccgcctgggatcgccgggaacgcaacactttaaccgccatgctcacggccgccgtggccagagctccgtagttgattataagcgcaattaagttaggggaaatgatcatggtagccccgatttcatgtccgctgctcagggaacccagccgtagccccaatcggccggtctaggacctcgccggagtctctccgcgcgtgggcgccgtcggggacctccctctgcaaagaattaggatttcaggggttcctttgcaatctgtcagcgacacagtgcaacagtaaagaagttcgttctccaattagccaaaccccgagggcctctgtgcaagtctgccagctcgggcgcgcgcgcgggcgcctttctgccctagctgggccgcctgggctggatttagcccagatccgttcctctttttctctttttctttttactccagagccaaaacaattatagaaaacagtagaaaaatgataaaattgtgaaaccaattttcctaggc

SEQ ID NO: 166710 - DNA, 851 bp, Zea Mays
tgccgatctcctccccgccactcgactatataaaccgaaccccgcatcgcaccgagcgcaccatcgccaagcttcaccacgcacctgagagagagtgtgggagagaaaatctatgccgccgtaggttaagccgtgggtaccacaccgacgaactcgggatgatcgatcgggggcattcgcggccgcactgggttggtgtttgtgtcctctctgtgcggtagtaggggaggtacaacaaggaatttcacatcaaggattcgtccgccgccgtcggaccgcctcgcatcgtggtctgcttgtgacccgtctcgatttaaggtaatctcaccctctgttggtccgtcatgatgttgggagcattttgacacctcgccacttgatctgtcgagctccgggcactagatttggtcacgacggggcggcgccgccgcgggctgttcaccatcgtgttgggtatcggctgagggaagaggacggtgccgtggctgcaagatccgaaatgggtggtcaagattagatcgtgaaaatattaagcctcgaccatccgatgctagttgaacgcttgggatcgcgccgtgtataccccctgtgcgcttctaatcccgaccgtagattttggatccaatggctgtgggcctataccggttcgatgctgtcccgatgtgatatgggcccaccatctctaatcgggcggccaggacttatccgtaccccttcgcttggcattcttacttaagagcccctgggtttcaccaaaatgaacctgcagtccaatgcgtgggaaacctgtgtctgggttattttgcgaattaaaccccgaccttctctgtattagtgcgcccagtccagga

SEQ ID NO: 166711 - DNA, 785 bp, Zea Mays
ctggaggttcctagagtgcatatagggagctgcattggtgagctagtgcatatatgaagctctaaggcgtccatggttatcatgtaatgtatgtgagatggtaatgttttttaggtgatgctacctaggttgggtgctagagcttaccatttctcttcaagaaaataagtttcgggccctaggttgggggatgtctcctccttccccttctctttttgctccttctctcctagcttcaccgtataaataagagagaggcttctagataggcctgctgcccttagagatctcacttagcctatctttttcccctcatcctttcaccttcttccttgatttcttcccctttcttgcttagatataaaaaaaaagtttgatgtatttgggaagagtaagagtggaggtgtcttgttggtgttgccatgaggtttgtactagcatgtgattgagtccaaggagagggtgaaatggacaactcacaaactacatggccaagccgccaacagcatgttccgacaaatatcgaatgtccctattattggactatccattggagcgcatctatggctgatagaccgatgaagagtaaccgctcgaccatccgtcatctccagctgaccggtttaccaatgctcaaaattactagctttagcattaatgcataatatatttaccaatgctcaaaattaaattctttggcaatcttgttctgcgatgaattaaccaaacatgccatgcatagtcaaacctacacaaacacaaatgaggaaactatacatagacat

SEQ ID NO: 166712 - DNA, 1284 bp, Zea Mays
cggatggaatatcttatgctagcttgctggctaggctagaggtaagccagatagtttgccttggtgctctagcccccgagggtgcttcggttggctctccttctactgtttccatggatgtccatgttggatcgtcgatgccctagattgatgatgttgttgtaacgaattatgttgcgcccattgagccagcagacccaaccaccttggagatcagaggttctggtgttggaaaccccatgggtgtctctggcactgaaatcccaatgggtgtacctgacgttgaagtcctaatgggtgtatctaatgctaaagtcctaatgggtgtcgcgcttagcctgtgtgatccgggtccttcaacgcttgtccctgctcagacttcgacttctgctaatatcattgcctctaggagcacctcagcagttccaggtttgggatttcccttgttcttatcgaatttacaggtattgtatgtcccgtgctacattgcctttaccaatgggtgttctgcttgctgacttctgcattcacagagtgtcctggacctgatggcttctcaactggaggcgcatggagttttggtgcctgagcaaatatcttccttgtcgcggtggaatcctctttctcttcagaagcaagtggtcgatctgaagtctgctaacgctggtgagctttcttgctgttgtttctcgccgactttcttgtttttgtttgcattattgatggtcgctaaatgcttcttcaacttttactcaatggttcttagatactaaggagaagtgtgcccgaaatcaagcggagcttgatcaggtaaccaggttgcttgatggtgcctgtgccatgaactccttgctacagtcaaactttgacttggagaagaaaacccacaaggtaactcgccaggagcttcaggttacttagagcatctccaagagtgggacttaaaattgggccttaaaaaatgaaataaggccggatagaaatgtgtataggacccaacaattgtgttagctccaacagtgagtcctatacaacgtcatttagttaaatctggtttatctattggttttggcggaagatttcccgccacaccgtacttgttttgcacgccggttgctatgctttgttggacggccggagacctaagcatttggcaacacatcttccttcaccctgtagatacaggaggttggcgcacctttcatcacgtgtgttcgcagggacaggccgacggccagagagaatactgcagctttcatcacgcctggtatgctttgattttca

SEQ ID NO: 166713 - DNA, 459 bp, Zea Mays
tatacttgaactgagacagataaaaaccttttgaagtctactgaacttcaatacccaagaaaaaagctaagtggacccaaatcagacatctgaaattccttactaagatactgcttgacatgagaaatatgttctgagttgtcacctgtaatcagcatatcatgcacatataatagaagtaaagtgcgcccttttggagagacatgaacaaacaatgcaggatcatgttcattagaagagaaaccagcagctgtgatgacagagatgaatcactcaaaccaagcacgagaggcttgtttcagaccatacaatgcacgacgaagacgagaaacgtgtcctgagggagtatcaacccccggaggaggatgcatatacacttcttcatgtagatcaccattgagaaaagcattcttgacatccatctgggagatagtccaagaagatgaggctgcaactgca

SEQ ID NO: 166714 - DNA, 758 bp, Zea Mays
tggttttcaactttttcagccaaatcttgaatgacggttttgtttttctcttcctccagatcttgttgcatctttagaaccttgcttaacaatatgctctgtcgaagtgatcttcgtcagaacacaacacagaagttaacaataataataataaaataacaaaaatatttgttaccttgaagttagcataaagcaagcttccggcaatgtggtgtcgttgataacgacacaagtccgcttccagcttcggcaagccaatgcttttggaaagggttctaacaattttggcttcggtgcggttccgaaggcatcttaatttcccttcgttaaccccaccaaaaagcatagcccccgatttgtatccgcaagatatggcatattttctcaactcctctttttcggcgtccgttaattcttgtccgagcaaatcttgaaagttaaaatcttcttcttctgaaatttcatcaatttgctcattccccttctcagttgccgtattcattgtagccacggtagcttcctcttcagccattttcagcagtatgttgtcaataacctcaagtgtggttttcaggttcgactcttcggtggccctggcttcggccccggtagtttcggcttcgccggattcagcttcagcagttttcatttcagtagcttcggcttcggcagtttcagcaaaaacagtttttgacaccgttgccggtggcggcgtctgatggatcacatctgttacttgaataattctccgctttttt

SEQ ID NO: 166715 - DNA, 591 bp, Zea Mays
cttctgctttgcggctggagcggattagctcgccggtgaaccaccgcctcccggccttgcgtcgcgtggctttgctttccaccgcgacgccgtgactcgctacggctgtccaatcgtcgccggtgagctcgccacgacggtggccacgaattcacagcgcctaagttcttcttcatctctggccgccagcacggctcggccaaattgatcactaccgctcgctcctcctataaattgagcccgcggctagcttcacaacatcatcacgcaccaagccacccagtattgcccccagccgatcaccagcgagctctaattccggatttcccccaattcgggtttccgccacccgaaaccgacctcatcgcggccagctcccttcccggtcagtccaaccctccctctccctcgtttaagctttctcacatgtctacgatgcttgccgaaccaccaatttggactgcgggctcaccaatcaccgggaacgcactcaattgtccgccacccattcggttcacgtggacagagcttgatagctcaccatttgtgcaattaagttaggggaaatgctctctgggtcatggatttggt

SEQ ID NO: 166716 - DNA, 865 bp, Zea Mays
gccgaatccagcccaggcggcccagctaaggcagaaaggcgcccgcgcgcgcgcccgcgctggcagacttgcgcagaggcccttggggttttaactaactgcgaacgagcctttttactatttaacccagtcactgacgtttgcataaaagtccttcctcttctatctattctgagtttaaagtccccgacgccgttcacgcgcggccgtgctccggcgagcacctgtaccggccgaacggggcaacgactgagttctccgagcgacagacatgaaatcggggctagcctgaccatttcccctaacttaattgcgctattgatcaactatggagctctggccacggtggccgtgagtatggcgactatacggtcgtgttcccgatgaccagaggactctaagttcaattcagtggctcggcaagcatcgtagacgcataagaaggcttaaacaagggagcagaggggaggagctaaccggagttgagctgacgacggtgaggctcgtttcacggtggcggaaatcggatttgggggaaactccgaattcgcggatctcagcgaacgatcggggctaattcaaggtggctggttagcttaggactttacggaactagtggggggctcaatttatagggagcgacagcggcggcgatcaattcgagcaagttgtgttggcagccggaggggaggaagaaggcgctggccgtgcgagtacgtgtccacagtcgtggcgagctcgccggcaacgatttgacgacagtaagaagccacggcgacgcgatgggaagttaaagccacgcggcgcaaggctaggaggcggcggtcaccggcgttcttatcgatctccgccgcggtgacgcatg

SEQ ID NO: 166717 - DNA, 695 bp, Zea Mays
gctagccgtcagcgcggcgaggccatcctttgcccctcttgcccctgcccatggtcgtgtgagaaatggagaagtggcgaagaagaagagagtaagtgatcaaggatgagtgaagaaaacagccagggcaagcgggctatttaaagaggtcgaggggtgaccgttcacttcctacctcgctcgctgatgagtcgcaagaattcaataagcaattcaaaccgcctgaaatgagtcaggcaactagcgtcgtttcacgtaacacgacaccgtttggacctaattcaatcgctcaggcaaatgattacacccctccgtcacatcaagttactacttcaggataacacgataaacactctacgcagagcagacaccccttgggcacacccattgggtgtatccccagaattttcaagatttcctgaagagagtgatacccacaaagtatacataatgaatgtaccgcgacaaaaagaagagatcggctgaaacgggaggaagcccaagtgtggttactgaagcgcaagtccaatcaacagaagcattaaagttcagggcagagtggtgtccagctgaaggctttctgtctcaaccagccagatgtccaacttgtcaccgatcaaattgattccagacttaacaaggcatggacatatggcatcacttggttattctgaaaatgctgatttcaaaagaag

SEQ ID NO: 166718 - DNA, 282 bp, Zea Mays
ctttctctctctcctcttcctttctcagtcttgttaccagccgccgccgccatttctgtttctcctctttccactccaaactctctcgagccctcacctttttggaagtgtggttggagatccgttcttcccggcgtgtttccaccatcttcctccatctcgttgggagatcttgaccccatcttcggatcgaggtattgttctatgttatttccttgtactcgatcctacgtgttattgattatcttatgtatcattcgttgggtacattttagtttaagt

SEQ ID NO: 166719 - DNA, 380 bp, Zea Mays
attattaaatcgatgtatttttttgcttaaatgttacgtaaagaaggatgtacgagtccggccactcaaactgtaccggatatgtctactccagcatcccagcatgagacgcagttgacagacacacaggtacatgaattactattaatacaacaacatattcgtgtactattacaaagttgccctgatgaagttgacattgatccactggttcatacaattataacgaaacagaccaaaacacctacaaccccagtggtaatgtttttttattacttgtattttccttgaaggtttgtattcatcgttttctttaaataacatataaccattatatttttttcagggtcaacatggtgacgctggcaagaacatgccga

SEQ ID NO: 166720 - DNA, 880 bp, Zea Mays
ctcctatttcgctggctggcgggcccacttcgcagccgctggtgatcgcgcgcctatcatctctgcctctggtgtgtgggcccatgtcttcaggagtcatcttccccaactgaacgcgtttccctggccgattttcatgccgtcttcaccggatctccgctcggccgccgtgcatggcgcaaccaaccctctctactcggactctccccctttaacgcatatataggtagccgcgaccccccttgccgtgcggtcagctgagaacggaagaagagaccaagagagagagaaggctggccgccaggggggaaatcgaggttcggtcgccgtgggggcctccaagctttgccggtgagctttgccatggcgcgggaaacgtttccgtggcccttctggaggattgggctgttcgtgactccagaatcgctcaccggagcaaccccatcgccgcagatccgccacgaccgtggctgggtccttgcgcctcgacgttcgccggtatgatcacttccgttgtgttcgccatcgcttccacttcgtaatgatcccattggattgaagaatagcgcgccggggtgatgtgtcgcgtgcaccggcgatggcgccgtcgcatgggctgggcggcgccgcctctgctcaggtgttggtgttggggaggataatgggaggcaactggccgtccgtcccactgtgatcggctaggattagatatatgcatacccttcgatggatcgatcctggttcgttgatcttggatccatccgctggcatgggataccggttcggggtggtgctcgaattaatctgagccttccatctcaaatccagcggccaatcttcacccttaccccttcgttgaggactttttacatatgagacc

SEQ ID NO: 166721 - DNA, 1272 bp, Zea Mays
tcaagagcatatagctttcagagtctggccccttgttaatgaatgggaaatgccgaaggagagtgtggatgggtctagccagagtgctgggaaaggtggcttagtctacttaaaatatacataccgatatagaaatcagtttggtgagcctgatgacgaatggcttgatgctattgaagcaacatgtgatgaaatgctaggggcttatacgaaggctgaagacgaggctatgaacactgcgtttggtgcccgaggaaaaagaagattaaatagggtgtttgatgctattggttttatttaccctgactactgcttccctgtctgaggcaaaggacaaaagaggaaaagtgctataaaatctccttcggccactccgaagcagaaaagggtgaaaattttggtgaaccggcccaaaatcgtattatgttgaaagagcggcagtgatacctgctctgacgactgcggtggcgtcggagacgaaggttccatctccgaaaaaagactgatcagttattttgaaggtaatggcccttgattttcattttttgactggtttagtttgtagcatggtgtttgtttttattttaaaactttaatataggagaaggaaaaagccgaggagggagggattactaatgttccgaatcgggacgaagtacccctgggtaccatggagccgaagatgtcaaccagcgcgcaggatcagccgaaggcgagaactggcgcaacaaggacccctcgaaagggtaaaagaatagccaacgttctgaaggctgtccttaagcctgcaaagatggcttcgcccacagcggcaaagattaccgaaggtcctctcagcgcacctgtcgctgaaaatgtgactactgagttgaaggtggttgcctgcgcagaggcctttattaacgaggacaaggctagttcttcaaaagtctattcaacgacaaatgttggcccagaaaaagaacaagagaaaaccgaagcttctgcagctgatggtttgacagaggaaaagatttcattagcaaccaaaagagcaccgcctgcgctccacgaatatattattcgccacgcctcgagtggaaaattgactactgaacagattgatgaagttcagaattatgctgaggatttgaagtatccttcgggctcccttgtatacgggagcaatgatgaggatgactatctgtactgcctaccagatagtaaagaggtcgaagtatgccacgagatgatggataaaatgggctatccgaagcttgaactcggattatc

SEQ ID NO: 166722 - DNA, 406 bp, Zea Mays
gaacagacctactagccagacgaaaactgataacaaccaacgagctctttgaccactaaagcaacctgctccgctgatctatgctgattatggaagattctattgtttctttctaaccaaacgctccaccaaaagtaaatcataaggccgttgaaaagtcttctcgaatgcttgctgcacatacttcttaaattcctccaccaatcatacaaagactcggtaccatagatccctctaaaggacgaaaggttcgcccaagacaagattttgtcccacacctccctgctgaagggacagtccttgcataagtgaatcgttgtttcaaaggtcaaattacagaggcaacaagaaggattgcaaggccatccccttttcaagaggttctctgctgtcaacactctattgt

SEQ ID NO: 166723 - DNA, 331 bp, Zea Mays
tttcctgtacctgtgatagaggaactcttggatgagttgggacatgctgcatggttcaccagtttggacctgaccgccagttaccaccaaattcgtcttcatccatccgatacttacaagacaacatttcaaacccactctgaccactatgaattccgcgtcatggctttcggcttggcaggggcaccgacaactttccaacaggctatgaatgcaatattatcatctttgttgaggcgttgtgtgcttgtatttttggatgatatattggtttacagttcttcctttgaggatcacctacgccatgtgcgtctggttttggaattattgc

SEQ ID NO: 166724 - DNA, 855 bp, Zea Mays
gccggactagttccgcgcgcaaatcattgttgccgcgggaaatgcattgttaaactagcgcgtgaaacgcaaacaaatgccggagagagcggttcaacttttcgagctccgattctttctttctttctttccttttcaccagcatgattcatgttccggcattgtttataccgcgccagcgaccagcctttgtgttgtggatgtggtgtggagtagacccatgtatgggatgtgggatagaggtaggtagtatgcgtttatagagtaaagtttgaaaataaggagtgagatagaaaggagtcttatgataaattggatccgtcggatttggttctagcatacatgagacgaagatcgatcattgatcctttggacggatttgctattgttagtgtttcgaacctccgctccgacaagtaaatttgtgtgcgcgtgtcctgggttccggatggtgtgatcggtgggcgcaagttttatactagttcgagcagaacgtccctacattcagttttcggcggcttgcgttaccgacacatttattgatcgatgctcgtaataggggttacaagcgggcgagagagggagaaaagagcttccaagtctcttatgcgtgggtggacctaagaactataggactatagctctcttgctaagccttggacgtcgcgatagttcgctccggcctccgtggtcctctggttcgtctgttgttctcctcttccgtcgagagtcatcctgtgtctcgtggccatcctcctccttttataggctaaggtggggtcgactaccggtagctttctcgaaaaggacctactatgttgtggtaaaaccaaacgttttacctcggtgaagatg

SEQ ID NO: 166725 - DNA, 1287 bp, Zea Mays
ggggtatcttgcatcctgaaccgcccgatccaaacccgacgcaccggattagatcgcgcatcataaaacgtaggcatccttttgaccgttagatccaacatccacggatgagggtgatcccgacccgactcacccgtcaccgtccgatatcgcgccaacgttccagatttaaaacccgaaggggtatgcaacgggtctaatcacaaccacaggtggttgatccgacggcccacgcgtattcttgcccacacagccgaggtgaagcggcggcgcgccaggatccgtggcggaggaactccggtgagatccacgcccggcgctaccatgctccgaaacgaaatgggcatgtgccacacaattcccggatgatgacgaagcaggtagtggatttcttaccgggaatgaaggggccgacagggctatccacacgagcagtacgatgcacggcggattcatggcggaccacaacgacggcaacgaattgcccacgctctgaggcatcacactgcccccagagccacggacacaacccgcgagctcgactaagcacttgttaccaacgccggtgatgcagaaacccccaaccacgccaatggaggatccacggcgacacatgaatgacagcgagaaattgaagggcttccggtgatcttctcagtgcaccgggggcacggccaccatcagaaccaaccggtgaagccctcagtccacaaatcgggtcaggtcaacggtgtagtcttggattccctctctcactcggcggaacggccagtgcggcagcgacccatgcacagcggcacatctatttcctcacggtttctctgcgcggtaatggcgagagttgcaagggcagcgcgtacggcgacttgagtgcgaaggggaggacaccgcgtcgcttaagtactccgggctcggtcgcgagatcatgcggactcctcggctgcacgttgggcgacggcgaatttgccgcgcatggctccggggaagtcgcgcgtatggttgagacggcggctgggcgagatttcattgcgttgggtactggctgaccagacgggcccgcgtggcggtgatagaaatcgaccgcggcgcccaggagaaaggagctagccttccagccccatctgtcggtgcgcgagtgtgacgtggtgaggctgcgcgtgggccccaggggtcagtcggccatccgcgaatccggtggagcgggctcgcgtgcgggttgcactccaggtgggccgaattgaagcagacccggcccaggcgcacaattttcttctttttttgtttttg

SEQ ID NO: 166726 - DNA, 768 bp, Zea Mays
ctttgcttaaggggttcaacatggttgtcatgaaaaatatgaagaaaaatgcacccaaagtcgggctgtcaggctgccttcagtctgaaaccagtctgacagtgtaaccgagccatctttggactaagattcaaccttgatcaagtgagaatttggcttgggttgctatgacatgatggtagctggatcattgggctataactttgctaaagagagatcatcatgttactacttaaaacggggagcaaatctccctgcaaatcgctctgtcagctgtctgaaccaagctcaccatggtacagtataccccaaactaaatcagatcacgggattcatttcccctcgtcgccggtgatccttcgtcgtgtgtgttgattgatcgtcacgattcgtgcaccacggtcgggggataactacggtgaggtaaaaatcttggcataggatcgactcgagctcggttgcggctaagcctgccatacccccttgctcatcggtcgatcggataagagctcaccgccattggttgatcactactgtgcgccgcgtgtctaggctctataccacgtcgcaattagttatgttaagggatccggtgatcgccggatgaagcgccacggtgaaagccacccatcccgagcaccagtatccttgtttccctccggccgccagcacaacctcggggaattggacaccaccgacgatgggaactataaattgccacctccgcccgctcctttaggtaactgcgcagccggtgaagcaatccgc

SEQ ID NO: 166727 - DNA, 396 bp, Zea Mays
ggaagattgtacggtatggcaatgacaggccaacatgaatacgacgcagcagtcatattgaacgacgtgaaaccatcagttgccaagctgatacgaacgtttcttgcatcgctggcaaaatctggatcaaagttgtcaagagccttccatgcatcaccatctgacggatgcaccattaacccatcttgtctgtatgtataatctttatgccacctcatgtgcatagcggtcttcctcaagagaaacaaatgtttcactctaggagtgagaggcatgtaccgaagctgtttatgtgcaacctttgtcaccaccttctccccatcttcatttacaagctccacgtaccacgacttcccacattttaagcatttatgctctctgccatgttccttccaa

SEQ ID NO: 166728 - DNA, 1229 bp, Zea Mays
ttgcgctccacctattcgccgacatgcgcaatctcctcggtgtgcccaacacgctcaacgtgctcaccgcctacccgcttctactcgtcggggttccgggcctcgtcctctgcctctacgacagcgggtgcttcggcgtcaggtgccccccttagcacttaccctacctttgtttgatgaaatgtctaaagaagttcgtcttatgtcctagtcctagtttagtaatttgcttacacttgagtcaagtgaacagatcgatgatccttacattgaataaattttttggctaaccaatgttttttggcatagtagttgtaaaatagtccgatcttttgagtcatgcttgaaagcttcagaactcagaagaggtcaagaggaggcaataggtgattaattgttttttgctattatgtccgaatgaggttccactaatcctgtggatttttaagttaaacgagatggcactcatgaatcatgttgagaacctttgcttatatgtcttctagccatctgcttgcttgcttgaggaaatgctttgcttcaaaatgtgcaatttaatcttgccatagtatagaatggctgggtaatggggatttgagtcatgggcgttcaattaaaagtaggttgatatgcttcaatgtaagccaataaatgaaatgtgttatgtatgcgatcctactacttcttaagataagcatcttcatgtgaaactaatctggttttctgtgaggtgtgctgcttcaagaattttttctatcactcatgacaacactcattgccttggattaaatttcactaattgataacatgccactttgttgaatcaagtagctttaaactatatctgattttctatgaggtgtgctgcttcaagaaattttatatcaggaatgacagcatactcgttcccttgaaataaatttataaatttgataacatgccattttgtggaatcatgtagcttgaggtgggaggcctcgggatggttcctcttttatgctgggaatgtagcagcagcatttggctcagcttactatcacctcaagccagatgatgaccacttaatatgggacaggttgccggtacatgaacactactttcttgttgtcatcttttcctctatagtttactcattcctttttgttttggcatggtttggattcctttttgagaaattagtgttcaaaaatgtgttttataatccaaatcgttggccataactaaaactg

SEQ ID NO: 166729 - DNA, 620 bp, Zea Mays
ccaaaccgcgtagccatggcgaccgagcaccggccctgctgccacgtgcccagctcgcccaacgccgtcgagtctcgtcgtccacccgagtaagttgtgcccatgattcttcctcgtcgaattcgtcgcatggtgtgaagtccggagctcgcctgaagtttctccgaacccgcccttcgttcactcatggtgagctcgcttcttcctctgtccatccctaccctcctcgcctcttgtcgtgctcgtcgctgcactcgctcgccgtggccgaagtccggtcgaaccagcccaggccgccgttgagccgctgcgcagacacgccgccgaagtttgcactccctctgtggttcatcactgtgaggagaagcccatcgcctactcctctctcttccgtgccctacccggtgctcgccatggccggccttggttgagcccattgcggcggtaaggccctgtggccaagctcccctgcgcgcaccgtcagtcgatccgcccagtcgtgtgtgcaacagcagcctcgccgccatcgcgcaacctgtgcaggtcgtcgaacccagtcccgaaaccggtcgtcgtacttatgcatccacgtgtgaatagtgtgttgtcgaagtttagac

SEQ ID NO: 166730 - DNA, 471 bp, Zea Mays
gaagaagaagaggaagtccccttagttcgaaagaacagtcggcgttatagagtcggtggggggagtagcgaaattccttctccagctttgtctgctcttgttggtctgcaagaattatccatagcaaattttgatcaggctctcgaagatgtcattcctgaagatatgttgtccgagccagcagatgatgatatgatagacgtttgttctgacatcccagaggtggggttagagttatcccaagtagtgtctcgtgcctcgtcgaccttggaaagcggtcttcggagtcaagaggttggtcatggtttctctattcccatggaggtgactgaaagtccttcagccttagaggtggctgttgcggagaacccagttcttaaggatggtgccagcggttgcccagcccccgagggtgttgccggtaatgatctggctcgggtgggtagcgcgagctgcgacgcagcccccgag

SEQ ID NO: 166731 - DNA, 537 bp, Zea Mays
ttggttcaagaatcgtctgtgtataccaaaaggggaggcacgagaagtcctgctcgaggaagctcacaactcagcctactccatccaccccgggactaccaagatgtacctagacctcaaaaccaaatactggtggagagggatgaaggaagagatagcacagtatgtggcccggtgtgacacttgccaacgaacgaaggccgagcaccagaagcctgcaggcctattgcaacccctcccagtgcctgaatggaagtgggaagaaataggcatggattttgtaaccggactaccccggatgcaaaaagggaatgactctatctaggtaataatagaccgtcttaccaaggtagcctatttcatcccagtaaaaactacctttggaggagccacccttgcccgaatttatctcaaagaaatagtcagactccatggcattccaagaaagatagtgtcagacagaggaacccagttcacctccaaattctggacaagccttcagaaagctatgggcaccaagctagatttcagcatcac

SEQ ID NO: 166732 - DNA, 288 bp, Zea Mays
ttcttgagttgagacacgtggaatacatcgtgtacattagatagatgatcaggtagctcgagctggtatgccatttccccaactcgcctaaagattctgaagggtccaataaagtgaggggataacttgcccttaactttgaatctcttcattccacgaagtggtgacaccttgaggtacacatgatcaccttcctcaaattctagtggccttcttcgattatcagcatagctcttttgcctggtctgtgctaccctcaagttctcccagattatacggacttgttct

SEQ ID NO: 166733 - DNA, 461 bp, Zea Mays
gcgttggtaatcggctgagttatggcattagctgaatattgactgcgccctggcaacacgacgcaatatttgtgtcgtttgaacttggctgcgtcatgtgattgctatgtcgcgctctccattaatcggatcgctcccgttgagtcagaccgccatcgctgagtcgcgtattttttgcatgtcctgtaggcactgtctgtctgccgcgagccacaattgcgcttgttgcgcacgttgcgtggatttatcgtgtaccccaattaccgagccataattgtgcctgttgcgcttattacgaaggcttgctatactgtcgtagccctgatggccgcacatgcgttgacgccagatacgctagagcttgtactcgcgtgggttgtggtgggttgttcaaggtcctgaagtcacattatgtgcaaccttcgtaaacaattttgttttcgctctatattttgtttgat

SEQ ID NO: 166734 - DNA, 555 bp, Zea Mays
aacatcacgtcgtgggctccgaacgagggagagatcggggcattgccggtgctgttcggctgcctcaccggttgcgccgtagcagagagggaattggagagcccagcgcccccaccatcacctcgcctggtggaatcgccatcgagtccacctagacaccaccggcaacaaagacaattggaaggccgagcggaattccacgttgtcctcgcccgccgccgtataattccgccgtagccgggcactgcatcaatcaggcaccgattcatggtatggatcacacccatctcgatcgccttcctcccaacgtcgtatagggtcgttcggattgagtcttggtggcgaatttgggctaacggcgtcggtgcggctgcaaatcggagcttcgccatgggcaggggcctgtgcttgatggcggatgcaactggttgggcaattaggttcaaggagctatcgactgggtgagggcttagctaatcggagaatggtgctcgggttggtgggatgcacaaccccggcggtcttgccgccgcgtggtgggctgcgccgccgtgg

SEQ ID NO: 166735 - DNA, 1083 bp, Zea Mays
gcgcagcccaccccatcctgcgtgcgctgacaaccaggacccgctgtcagccgctccatcccttcgctccgctcgcgcgttgtctcaccgtggtgtgggcccgcgtcatcagatatctcttctccgctttcctcgtgtcggtaacgaagccgccgagctactcgccgaactccgcgcgctagctccagagtccgttgggatgggttcgccggtgcgggcttgggatataaatctccccttccgtgtccttggcaactggattcaagccatatccgagcaccattacatttgccaccgctgttgcgtgagagagtagagtgaggattgcgccgccgtgcccgatcgtccatctgccaccgctggtagtagtagggaggtcgggggtcttcaccgagcgggcgcgtaaccatacgtggtgcctgcgtgccgaatcgtcgaccgcgcgccccgtggttgttcgccggagtgggcggaacgccgtcaagccgcctcgtgtcgtggtcagcccgactgtgtgcccaatcctcggtaaattcacctccctactctctgcgctgtcctcctctacgtgtagctcggttcaatttgtatatggcgctcgggaacgaccgattgcagcctcgccggcgtgcgccgccgtgcgttctgagcgcgccgccatggctcggcggtgggtagggaatgggtcttcgaacccttggattctagccaacggctgagattaagtgttgcataccgtttcggccgggcacgctgtgaccgtagatctgcgatcctacggctcagattaaacctggtctcattaaatcgtaggcgtcggagttggatcctgtggcttagatcgcgtaccgattcgcgtatacaacagtctaatctggcgcgcccaagtctgatccaacggccgggatcaaaccgtaccccttcgcgggtcacttttgttaaagagccctcagactttagtgaaatcaacccgccgtcctatatcactgtgcgctgtgtcttaggagttttactccgtagcccctgcgttttccatttattgaggcctagtccagagcagtgtaaaaccagagaaaataattt

SEQ ID NO: 166736 - DNA, 375 bp, Zea Mays
ggtatggccgcttgtagatagctgggaaatgccgaaggagaccaccaccgactctagcgaaggtggtctggtccggctgaagtataccttcagattcagggagaagtttgatgagccaaacgacgactggctgaagtgtatcgaagctacaagtggtgaactacttggagcatattccaaggcgaaagataatgctttgtccgcagccttcggaggttggggaaagaaaaggctgaacagagtttttgacgccatcggcttcgtataccccgattaccgctacctagtgcggggataggggaaaaagatgaaaactgctgcttcgaccaccccagttgagcctgtgccgaagggcaaaaaggtgaaggttcttac

SEQ ID NO: 166737 - DNA, 683 bp, Zea Mays
ctgaaaaggaatgttgctgaagctgctgaaaaatttgaagtcgaagcagtgaaacataaaatttgcgagatcgaaaggtctagagctcaaaagaactgcaatgagctttgtgcttcaaaagagtaatgttatgaaataaccttggaatgcgccgagaaattgaaggacatatttgctagagttggggcatattcttctgagcaaaaattctggcgaccctaatggagtcgtctagtggatcagcggagaagtcgaagcctttgacgaaattttaagtgaccgaggagacttctgcgcattcgctggcgcacggggtgccacgtcgatcttagagaaagctcgctgcaaacatgctaaggctgtagtttagctaggatttgttttctcggcggatgacatcaaagacccttcggctgaagcttctgcgctaggcgggagattttactccaaggtgtggttgaagggcggccgtgagatagctgatgaagcgattagaaaaaatgaaaaagaatctcacgacgctcaagaagaagctaaacgatctgaagaatctgccgagcgtgcaaggcttataggtacctttactgaggtttagcttcggaattcattttcagcttcggaattaacaagcattttttatgatgtagttgaactttcacctccaccggagccatataaccccg

SEQ ID NO: 166738 - DNA, 376 bp, Zea Mays
ggctccggtaagctgatcgaatagaagattgacccgggggaggggatacttgttcttgatggtaacttcattaagggcccgatagtccacacacattcgtagagtttgacctttcttcttcaagaaaatggccgaacagccccatggcgaggaacttggcatgataaaccccttctccaataggtcttgcagttgtgtcttcaattcagccaattcattaggaggcatgcagtaccaccttcttgagataggagccataccaagctttaactcgatcacgaactccacatccctctcaggaggtaatccaggtaaatcttcaggaaatacatctgggaattcacacactactagaatatcttgtacttcctgtatt

SEQ ID NO: 166739 - DNA, 789 bp, Zea Mays
ggaaatttaggatgaactgtcccactacaaaataatagaatgtccttggaggggctaaggccatgctcagcagagggtccatatgaccatgcaaaacactattttgcactataaattgtatagtctggactgtttataaggtagagtttgaaacagaaagtgagataggaagactgctgaagctagactaacataattgatgtttgtttccgaatttcatctcgtgttaggagaacctctcagtgttctctcctccccaaaacatacatatatatagaatgcactcaaaatgaaaagggccgtatatgtgtaccggtgtatctctacagtacacccatcatctaataataagagcaaagttacactggtagcctattggtaagcatgtgggacaccgatgcagagcaggccagcagggcatgttccattccttaacgattggaccaatcgaagctaactgtggtcagcatgtaccagttccgttcctttttccgttcacctttcctctttacaagcatcctcacttcatcagcgttcctaaaagggttttcttttagcatctttctcgcaggattgctgtcagtacacccaacttttgactcaagattcctccgcccgggttaacaaacccaaatcacagctaaacctgtccatgtcctacattcagagcttcagttgctagctaagcgaccgggagtcaacgaaaaggtgaaccacgagggtgcaaccgggcagccacagtcctgcggtgcccaatggacgatcactagcagaagcaatgagtattta

SEQ ID NO: 166740 - DNA, 638 bp, Zea Mays
ggtcgatgaagtcgaagcagcatggtgacgacgtcaagcggcagggtcaacgacatagggtcgacgagagagcgtgagtagacgcatgaagacgctttctaaaaagcttatttgcctcctcccttgcatcatctcgaaggcaactggttctagagacctgctctcctgatcgcagatgtacgttggcgctcgagatgaagaagactacagtggcagagcagaagaaagaagaggcaaaaacctaattcatgtgggctatgttttggcgatggctatcagacgccttaacaacagataaattgaagtataagataagatcagatgatgcgtactaattaaacataatgattgacgatgtggaagtgatatgatcgacaacatggaagcagtagggtcgacgaagtcgaagcagcatggtgacgatgtcaagcggcagggtcaacgacgttagtgatagggtcaacgagaagagtgtgagtagtcgcatgaagacgctttccaaaaagtttatttgcctcctcccttgcatcatctcgaaggcaactggttctagagacctgctctcccgatcgcagatgtacgttgatccgatctagaacacggttaaataaggacttggacccttatctgcaaggtgc

SEQ ID NO: 166741 - DNA, 430 bp, Zea Mays
gggctttaggggcttggggaaagactcaggcgtgttcagggcgacatggcgaactcgaccgtgggcaccatgccggtgtgggggaacaggagggcgcggtacactacggggcggatcaacatggtacggatcaactctggcgagcaatcgtgcgaagactagggcaataaacagagaaataggggcgcggggaggttgatcacctcgaggaggaacattggagcaccggagcaacagtggagacgcagggacgcctcgggtcgatggtggcaaactccaactgcatggggaagtctccgatgagcgtggaccaggcgaactagaggggttggggcgaaccgagggatgtcccgtgttgctaacgttgaggtggaactcaccgaggcaacgagcgcggcgatggctcgacgacgaccatagaatgggtgcg

SEQ ID NO: 166742 - DNA, 462 bp, Zea Mays
tttcagggaaagccaggagtctcagtgtaaatgttcctaagacacagagcgcagccgctaggacagcgggttattttccctaaaatacagggtctcttacgcaattttacaggtcgaaggggtacaggagcttttcggacgtccgatctaactctaacgcccccgattagatcgaaggctgctcaacactcccgccgcccgattaggatccaagagcccgaatcgtcccagcgatacatccgtcctacggttgatccgggccgttcccttgcaatctacgttctggatttaaaacactcaagaccgcatctgcaccaactatgatcaatccagtggcccagattacttctacaccgtgtcatgctcgggaccgtcgatcagtccatcaaccgcccacaatgtctcttcctaaccgaagtgcccaggcagcaaagctccgcccaatctccgatgagctcgccg

SEQ ID NO: 166743 - DNA, 761 bp, Zea Mays
ttccataggagcttgaagaagggcagtgccctctcaaccaacctcgaaatgaagcggctaagggctgccagtgatcccgtaagcttctagatgtccttaatatgggcgggaggcctcatcacctcaatagccttaattttctccgggttagcttcaatgccccggtatgaaaccaggaaccccagcaacttccctatggagacacagaagatgcatttctccgggtttagcttggtgcgggttgcccgcagcttgccaaaaaccagggtcaggtcttccactatagtcgacccctccctagtcttgaccatgatatcatcgacgtagatctccaccttgtcccgaatcaggtccccgaaggtcttactcatcgctcgaacaaatgttggcaaggtgtttttcaaaccgtagggcattacaacataacagtataacccatccactgtcacaaaagcggtgtgcctcctatcctccctagacatcgggatttgatggaaaccagagtaagcgtccaagaaggacaaaaggtcgcaccccgaggtagagtccatgatctgatctatacgtggcagtggatacgggtccttgggacatgccttatttacgatggtgtagtcgatgcacatccgaagcttcccgtttgcctttggcacgatgactgggttggccagccacacggggtgatgaacctcttcgatgaagccgacgtgcaacaacttctggacctcctcacggatgaagtcctatcgatccacggactg

SEQ ID NO: 166744 - DNA, 567 bp, Zea Mays
cacatggcgtcgagtcacagagatgactcagcccaccttccactcacaacctacgggccactaggaccgcgggccactcatggcctatcaagcctatgcctgagtgcgctggccgtctacagactttgcaacatgaagagctgagccgagacccaggctacgacaactaggggtcgacacaacacatgacgacaatgatggcaccaaagactcttcccctcacgccgcccatcataaatgagcacgatcaaagatgaccggacgaccaagacacatacggacaacatagcctcacctagatacaacactcagttttatctcggcataacatctccttctcgaggaagctatcagtggccgaccctcgtcgaggcctataaaaggaggaggtcagccgcatgaggaggaggccgaacagaaggcaaaagatagaagacgcatgctcgacgagactagaagacccggaggctggagcccaggcatgaaccaccgtaacatccaaggcttagtcaggaccccggtctcgtagtctttaggtctacccacgcataagagacttgggagctc

SEQ ID NO: 166745 - DNA, 578 bp, Zea Mays
ggaactcaccagagtggcccagccacgggcgggctgttcttcgcgatgcggcggaccaatttgggggaaaacggcgtcgcggcggctctaggtgaaattgggggtggagattgaggctatacggccgtaagaggctgtgttttcattgtgcgcaatcaatttgggcgaagatggagaggacagtgcgaatttaacttcgactgagcttcactggtggagatgaaagcacctcgccgtggctccttgctcaatttataggcacggcggtccggtgattgattcgcggccacgaggtgggctgttagcgcatgtcgaccacgtaagaacgaagcacagtaagagagatcgacgtatggcgacagcgcggcgaaccgcgctaagtcacgacggtcgccggtgagtaactccggccgagctcaggagatggtgccacgtacgagttacccttttcccggcgttatccatccttcaccgtgcacgaatccgggcagcgatcaacggcggcgagctgagctggtgttctgatccacccaaaacactgtaccatggcacatcttcttcagtcgcctgaaccggcc

SEQ ID NO: 166746 - DNA, 463 bp, Zea Mays
ccggttctcatcgtgaggtacgcagtgcaggatccaggtcgtcggcgtcggagctggagaagatcgaaggtcgcggcgtcagatcagaagatgaaggagagagatgggacattgagctgagcagatcggcgtgagggtttgtctcatatcgtgacatctttagccaaaggggaccattctttccgcatcgtggccttggctgcctacaaacatggactgttacatgcttacacgtatggggatgtctacacttgcatgcatgtgatcgatcctccagcaacaaatctgaccaggtctagagagagtggcatgcaaccacccaagttacattaggtactccacgtgagaaggcgacgtgcaaccgtcaagattggacgtcagacatgtcaagatcatcttggctctctagggatggcaactcgaaattccttgtcgaagaatggctcttcatccctattcctac

SEQ ID NO: 166747 - DNA, 371 bp, Zea Mays
gctggggccgtctgctcgccgctcgccgggcagcgaggaagagagaggaataggaatagaagggcgcaaggaggaagaagcgcgggtggccgtcggatcctcgtatggacggtccggattagagggagcgtatcaattgggttgggatcacgagcgccgtccgatattaatccggtggtccgcagggagcgctcctttttaaagaaccgtgatctaaccttggcctctggatctggatcctacggctgaaattggagaataccctttcggttgcgctatttgcagaagaaaccttatagatttagagattagaacccgccgtctagggaccctgttctctgtgtctaggatatcttgcgcatagccccctg

SEQ ID NO: 166748 - DNA, 774 bp, Zea Mays
ggaaaatagagtacctcgacatccccctcaaggatagcatcaaggggtggcgtctcgagtggttcattgtggaaaaccactgcaagtccctaccctctcggtcagggaggcatctagatgtccgcactccaagctgggtagaatctccaacctcttcggagataacagaggcaaaagtactgctttccgaggtctgcttgttgaaagacagaggtctgactgctgaggctctggtcgctgatttcgtcttcaagaatatcccgcttttgaaagatagggcgtacctagcttatttgtacagtggtatcaatgactctactcgggttacaaccaatagaatccccactgaagatctggtgagccaactggatatgatcctgaggggcagactgtcaaatgctggtgctcctgttgcctattctgcctggaacctaccacaacataggtcattttccgagtttgtgtccaatcctcctactcgtgatgatagcctgggtcttagagtgtgaccctcttctgaggatattgaggctctgattgccccacttcggagcgttcctgaggatgagaggcatactcactttgagatgccggctagcactgacgacgcggagatagatgctgtgcttagtttgctggctagggaaccgtctgactgaacccatgccaagccaatggctatcacagatgggcaagaacttggtgaagtggtgaaggcccagaaacccgaaggcgcccgcccaaagcgtccacgccgagtgagtcgacgtctgc

SEQ ID NO: 166749 - DNA, 622 bp, Zea Mays
atctcagtggatttgtggtttgttttaggagtaacaaaatgatcttcatcgcagtgacctctacaggcctagaatggtcttagtcctcaaactaatagcttcggcatcaacgtttagcaagaaaatgaaggaggaatcaagcgatgtgttcagcacgtttccaagaagaaaagacagtaacaccctcgacgaaccgtatagcttatatgtatatggttcgaggtcataattgtaattctatacaaagctacgcatcatgctcccctataaatagatgtacagtgatcatacacttgcgtggactttttcccaatcctaaacgtatatttcctcacagatcgctctaaaacttgggtgggtctgcatcaccttcgaacatcccgaagatagtcttgcaacatctcgttcacataataaaagaaggatgggtgtaaattgaattcgagttttattgctcagaatccctcacatttacttttgaccttctctctagatttgtccgtctatcttccataagacaaatcaagaggttattgctctgaatccctcacatttacttttgaccttctctctagatttgtccgtctatcttccataagacaaatcaagagagaattaatct

SEQ ID NO: 166750 - DNA, 658 bp, Zea Mays
tcaaacagcgataacttttaaaatataattccaaatcaagcgcataagtactcattggaaagataagacaaagccctacatgattatcatactggttaacactaattaccaacgaaaaattcccagacactgctaatactactgctgtccacccacctaaaaaatctgttttttggacagcaacatacccggattcaaacagcgataacttttaaaatataattccaaatcaagcgcataagtactcattggaaagataagacaaagccctacatgattatcatactggttatcactaattaccaacgaaaaattaccagaaactgctaatactactgctgttcacccacctgaaaaatctgttttttggacagcaacatacccagattcaaacagcgataacttttaaaatataattccaaatcaagcgcataactactcattggaaagataagacaaagccctacacgactatcatactggttatcactaattaacccacgaaaattcccagaaatccctagaactactgctgttcacccactcacaaaattcatggacagcacctctaccgattcgcatagataaacacataatcaaattgattgcagcacaaaaacaacaaaagttaatcacaaattcaccttgggatcttccc

SEQ ID NO: 166751 - DNA, 656 bp, Zea Mays
cggatgcggtcgcatgggaagcttatcaccgtgcttgtagccgttgcgacatggccggaccgccggtgtcatcgtggacactccggcgatctcaattattccacgtcgtgactcttcactacgcggtagtaaccgtggcacacttaggcttaccctctctgaaccactgcaccagtgaacgccatgattgcgccaccagtgatcttcttcctctccgaccgccagcgtgccattccaaaattgaagggcaccgctcttgaacactataaattaagcacaccgctagctccgttaggtaatcacgaagccagagcacccgctcctgcatccgattagccaccatagctctctaatttctctttctccccaaatctgttttccgcaaccgtgaaagaaccctcgccgtggctagcttgttccaggtctgttcgtgctctctattctcccgtttcagtgttcctttggttctcctaatgctcctcgacccattacattgagctagactgccctagatcaccaggaacacttctgttcatccattgtctgtgttgtctccatggactgtactatttagagctccgctagtgaggggaaacacttgttaggtgttgaattaggtctcagccaaattagagcaccggtcattaagtatcgtg

SEQ ID NO: 166752 - DNA, 586 bp, Zea Mays
aattctctagtacaggagatattagagaattgggtggatggctaatgagtaagatgaagatgatcttaaaggggggcccctaggccttatatattcgactgtgggacgttacatgcggatatgataaccacatgttcctaagtaatagtgaaccgactgagtttatcttcctataatctcgacgacttataatccttcggctccgacgtctgagggcgctgcgcgggaaagtcggatcaatgctgcggatagcgtttgagtttagcgaaccgcatgggctcgagttgatccgtcctcgtgttgatccgttctgttgaaagttcctcccctggcacacgaagggatggccttgcgaagtaatgggtctggggccttccgcgaggtcttcttgccttctagtggacccgggggatatctgtccccccacaaccgcgcccctgttcttggagctcgctgctgccacgcccctgttcccctaccgcacgtgcccccaaagctcgttgttgctcgttcgccgctcccaactctgatttcttcgcagcgtgtttgccgccattgtgccgagagacatcgcgccaccgccgag

SEQ ID NO: 166753 - DNA, 1705 bp, Zea Mays
cctccactccctttagttactccacaaaccactgaggccaccttccaaatgcaggttgccatcttctccaacatgatgtttgtatcatcttcttccttccatgtgccctctttgacggttcttttcttgaagacttttgccttctcccttttcaatttccaccactttgttctcgcaatcttggcttgtttatccctaggggcacacacttgaaaacgaaagaccgcctccataagcttacgttgagagacaacacactccctaggtatcaacttacaatccatgcatgctcgtttatcctctctttttatgaggacaaagtcaaactagctagaatgttggccactattataggccactaaatgagagtttctctttctataagtttaatattggatcgccaagcaatcctctttatcagtgcttgggacctgctatgttgaggcaacataggcagagtttcgattgtcctcacaatgatgagaacaaataggatgagaaagaaagcgagaagacaacgaaggcaataagatggtattcaaaaagaaagaaagcctacattcatgatttttccatatggcattgctcaagaagtatggagaggctcctaaggtaatcagtcctttacacgagatattacatgggtgtgtcatccctgccactgaaaaagtgattaaagctcaactggatcatggagtatcggatgttttggtgcattgggtaggtaggtcagctatagattcctcatgtgaacaattggaagaatttaagtgaagatttccaaatgtacagctcacgaacaaattgtttgttgaggaggaaaatgttattgacttttttctgtagccagagaaggcacaaccaggcagggcagccaaatcgagaaggaaataagaacagaagtggctatgatttggcaaccagatagattttgaaacagaaatatcctcaaatagtttgtgtaggagtaggtttgctgctacctgttgtgagtcggtttgttgtttcctagtttgcttagattgtgttagttatatttccattcgagtcaagagcacatgcctctatataagcgtcgtaggatgtaataggaagaacaccaaagaaatacaaatctcccagaggggcgaatccttcgacaccctagcgaagtctcacgctagagcagctgacaaagggatccaaccctctgttcggccaccgtattctctacgttctctcacacaatcatctatattgttctattcttccctgtacacacctcctagaaagaccaaaatacatcataagatgtctctcttatagcacgctagccccttcttaaatatagacctctgcaaatagactttaccctaaaggcccattagcgttctcatgaatcataattgccctttagacatatgttcaactgattcaggatcaaattcgttcataactttggattggtttgatcttcatatggtttacagtttggggttccctcgaaggagaaggctaacagatgaagacataattggaggctaacagatgaagacagaataggaagcacatgttagacgaattaaaactaaacaaacccaatccttttaccggcatgtggcatatgcggcggcatatggacttgcgagtgcacaccggagtaagaagcgatgaacgaaaaaaatggggtggagagaaattttggctctttggtattaggtataga

SEQ ID NO: 166754 - DNA, 612 bp, Zea Mays
ccaacggagcgacctcattggacggagctggcagtgcgaacggaaagctccaactgtgctgcaaggaccgccagcgtattgcgagattcaatagcctagggaggaagaagcagaactataagaacacagacgcagggtagatcaacgccggagagccgtcgccgccaccgccgcctcgtgcccttcatttgtgatgcctcagctccttcgtgtggggtattttccacccctcagggaccagacgtggttcccgatctggaacgaagaggaaatatcaggatacagtccatacgggggttaactgaatgcacatttgttcgtgggctgggcttctttccagacgagggaggtccacgggctttggtccttgttcccggccgggaagtgcttaaacgaacatggcctgaggggggtgatctctcataaatatagccaaagtagcttggagtacaagtatacaatctcctaaatagggaaagctataaccttatacaaggaagactataatcagtctatactaggctatgtacgactgtactttacatatatgtctaacacatgcctgcagtcgcagcgggagggtcccgacaaaagactggatttgaactcgtc

SEQ ID NO: 166755 - DNA, 395 bp, Zea Mays
ggttcgccgtggcttcgaggaggacgttcgccccctggcggagatggtggacccggcgctgctacgaggccccgcgctgcccaagaaggaggtggtggcggcgttccacgtcgcgctccagtgcacggagagcgacccggagctccggccacggatgaaggccgttgccgacagcctcgaaaagatcggctaatgagtcacaaggtcatgctagcgtacacaacgccatgcatgctcatccaaggtcattgttatttttattaccttttccgtctcctccccgattttctctctcttgtaattcagtcttttttttaatttccttgctgtgctctcttgcaattggtcgtttgtaattgttggctattcttttgggtgcaattcatgttttccgt

SEQ ID NO: 166756 - DNA, 799 bp, Zea Mays
agccacgcccgaccacacgcctgctcccgcgcccatgcctataagagcccacaaggcctcggctgtactccctcgcacgccctcactcctgcccaagcctgagatcaccagagtttgccacaaagagcatgcaccactgcccgccaccaccgcctgagcacgaccgtcatggccagccattcctgtagacccccaacctcgcccgagcccttggacagcttccccgtgaggccgtgaagcctaagcttgagccgaggccctgccccgctagaacagtgagatcgacctcaccggacttcggccgcccgccaccgcacgtggaccgaactacaaggtgagccattcccaaattccttgcacccacgacctcaatgaccttccatgaagctccccgactcactggatcgaactctactgtcgtgtacagggcgagcttctaggggcgacgagctcgcccgcttgcgcacgaggtcagaacagctccagccaccacaggcgacgagccgaacatcgacgtgaccctcgtgacctccccgacgtcgccgaccaccccaccggaactttactatcgccggtaagccgcgccacgacgattttcctttcagctactattctgatgaacgtaaggacagcgggttagatgctaggaaattccagggggttaagtgttaagccacagacttagctgaatagtacaccaaggactcgtttgtaaggggagaagaaaactttaaccagggacccgagtgcaaagacgtttttcttttccttttcgaatttctaagttattttaaatctg

SEQ ID NO: 166757 - DNA, 1013 bp, Zea Mays
aaggcaagggccacggcacaattaaacccaagactcagacaaccctggctatgaactgcgggttggtttcttaataactgaggggctcttacgcaagaatggcacgacgaagaggtatcacgggatctggaccgcacgatctgtttcacacgctcacgattagatctatatcatattgaaccggtacaggatcgccaccgtccatttacagatcaacagcctgggttttattgaagagcgccctgattccagccactagatcccgatcggagggtcccgatcgcacacgagaaactctacatctaggatctaatctgtccgtccgttggtcgatcaatggctggtcgtcattctcctaccacagtccgagctgggtgacgatgcctaggtcatcttctacccctggcagcacccacgcggcggtgagtgagctgtgagcaggtgctccgccaacctagtaccagtgcacgctaccctcctatggcaagcgctacgtagagcggatagcaaatcaaaacaaaggttctctacacttaccagagatcacgtcgcggagatcgacaatcatggcgggaggcggtttggcggtggtccgaggactccgacgaatagttcatcaggaatggggcagcgtttcccacggtgacacgagcgacagctccctcacacacaagcggacaccatcggcaaggatccatggcggctgcagcccactgctcctcttctctctcccgtactcacgttcggcagcgaggccgagcacgtacacaggcaccccggcgaccaaacagagtgcccagtcaagaccttggagacgacgaatcacgcgaccgatggaagaagtagccagcaccgagcgactgagggccagtggccatggatcagggagtggcacgacggagcgcagatttgtgaatccacagcactaccgacgagggaggagatggataaaaatgcactgccgccagcaggggctggacgaggcgcgaggcgagctcgggaggataaactcc

SEQ ID NO: 166758 - DNA, 746 bp, Zea Mays
gcctgcctgtcctctgagtcgacgcgctagtgaatgccacggtaacccacggtagtgaacctcccctctctgcggccgccagcgcatcttctcaaaattgggcgccaccgctgatgaactctataaattgatgccctagtgagctctgctaggttattacgcatccaaagcaccagctcttgcctcttatcgttcaccagagcctcccaaattcttacttgccccaaatcggtcggaacgccaccgtgagacatctcgccgtggccagtcatctacgggttagttcatgcccttctctgtgatgttctagcctcccttaggtctcctgttgctcgaagacccttttgattgaactagaccgcattaaatcgcctagaacaccatgatttgtcttcgatatttgttgccgccgtggacagacgaactccgagctggactagtggaattagttgagggattagtgtcgctaagggtggaattaggtgttggccaagttagggcgttggtcattgagtgtctcggccggtacaggttcaccggaaggcgtgctcaccggcgatcaccatcggggacctgacgtttcaaagaaatagaactccgagggcctaactttgaatgtcagagacacaagtaaatagtgaaaagggttcttaaccagtgattcaaacagccggggtcctctgtgcaaagacgacattgtgggcgcgcgcgcgggcgcgtttccttgttagtgggccaactcgggt

SEQ ID NO: 166759 - DNA, 520 bp, Zea Mays
gtatcaagagtcttgataagatactccgtgtaagtcaaattccattggtaactgttcttcaggcaccctgagacatttcttcagctgagatacatgaaatacatcatgaacatccacaagatgatccggtaactccaattgatatgcaacctctcccactcgctttaggattaataagggtccaataaagagaggggacaaccttcctttgactttgaatctcctcataccccggagtggtgacaccttcaaatagacataatctccctccttaaactcaagcagtcttctccgagtatcagcatagcttttctgcctggactgtgcagttcttaaattctcccttatttgttgaacttgttcctctgcttcttgtataatctcaggtccaaataactgtctttcaccagtttgattccaatacaagggagtcctgcactttctgccatataaagcctcaaacggtgacatctttaaactggcctgatagctattattataagagaactccgcatacggc

SEQ ID NO: 166760 - DNA, 271 bp, Zea Mays
tttccaaagctgatcggcgcaattccgaagcggctaatcaattgtaggacagttcaggaagcaattgttagcgccaaatggatttccgacatcagaggagccttgtcagtaggggttttgtcagattaccttcagctttgggatttgatttctggcaccgagctgcagccggaggttgaagacaggcatatcttcagtattgccccgaatggtgtatactcagccaaatcagcatatgaaggtctgttcctgggatctgtgacatttggac

SEQ ID NO: 166761 - DNA, 430 bp, Zea Mays
gtgcttttgccaagacagcaaggggatactatggtttgaagacagattggtggttcctaaaaatagagacctcaagaagggaatcttggatgaggctcagctctccaaattctccatgcacccaggaagcaccaagatgtaccaagatctaaagcccctatattggtggaccagaatgaaaagggagatagcccaatatgtatcggaatgtgacacatgtcagaggataaaggcaagccacttaaaatcagttggtgccttgcaacccctatcgataccatcatggaaatgggatgacatcagcatggatttcattgtggttctgtccaacacctctcggcaccatgattcaatctgggtcattgtggaccgatcaatgaaagtggcacattttcttccagtgcacaccaccaataaggctcataagtat

SEQ ID NO: 166762 - DNA, 558 bp, Zea Mays
tgctttccggctcggaagcatggggcgaaaaagagaattgcatcatcgaccccctctaccaagccgcaaccaaagaaaatgaaagttgtgactcacagaccgaagtaatacatcttggagagggctgctatacttcctgctgcggggatctcaaagacagaagctatttagcttccgaatatatcttcccaactttagaggtaatatccgctgtagcagccgaagtttccaccattcagttggagaagacagaaccagagagctctaagaccgaccagtagccgaagctacagagtccttctgtaattccagggttgtcaaggacagtaaccgctctagcagcgactcctaggaaagggaggaggatggccagcgttctagacgatgttctgaaaccttcgaagatggatacttctgctcctactagggtttccgaggacataatcgaagaattggaagaagctgtcgctgcaagtgctattcttgattgcaccatggatagaccttcagaaactaggccaatagagcaagtaaaggaaagtctaccagggaatttaa

SEQ ID NO: 166763 - DNA, 325 bp, Zea Mays
gcccgggctatccaccaatcatgcgaggaggaggttggatgccaaggagattgtccatttcgcctttcctttataagagaagatctatgacgggttaaagatgactgcgaagaaggcgctagctctagcatagattgttcgcttctccaccaaatgagctggagaggttttactcaaatcatcttatgatgtgcgtttactcttgaatattgttcaagcgaatgaattctttgttcgaatttgctctgtctcattctctatgatgtggttgtagattgggaagctgcccccaaagtgaacgcaatgccttgtcccgcttgtcaac

SEQ ID NO: 166764 - DNA, 954 bp, Zea Mays
tatccttttcttcctcctctgtctaatctgcgtagcccatcatgaatttttggagctttcgatagaaattccgccggtgcgtatggtggattctattgttattgatctaatgacgagtagtgcgccaattttggggttttttttgttcgggctactgtggatttattctccagtcacttatttgatggcgagatgttagatcaagttcggatgtgtatcgggtgttcttttctttgttgtgaagtatgcccctcctcgttatttccaccagcaatcgaggtcagctctggtgttgtggcgatgttgttgatcgagttttggggcaatatatcggctgtcgattgagtttttgggcaatatatcagcatgttgattgttgaatataactcgtttatatgcgctctactctggtcgatgcttttgtcgtctgtgggacatacatgccattttttttgtttaaccttttctagctgattagcagccatctgagaacgtgagaagataggtgaaattaatcttggagttctgaatccatcctatcttgtagcttcacatttgcacattgactcctggtaccatcctattggtaacaacgtcctttatattcatcttttatatccatgtaggttctctataaaagattcttttcttatatctcgttccttttcaacaccgttatcaattttatatataaatacccatattaaagacatattttattttaaatttttatgcgtacatatttgttattattctcaaatgttttatacatatcttagttttgtttaatatgatagaggagagtagaaagaatccatatatgcagaggaaagaggaacatcctctatatttagggaaccctgctggaggggatagaggagagaattacctaaatttggaggagaggagccttcataggctcttattggaggcagcctaaagggtcatctaccc

SEQ ID NO: 166765 - DNA, 1112 bp, Zea Mays
ggtgctaccaactttgatgcagtaccggacccattgtcgcaaggagctgaggctagagaagctaacaacgaattggcttccatattgagggccaccaagctatcaacttgcataggtgtggtttggtttccattattgttggtcttcgtcacaaaagaattattaatgtttctctgcttgttagcagcatggtcggtattttcctttcttcggtcagcatcctcatttcctccattgtctcgcccactatttggggtaggattaggggttatcgccggtataaaatcttgtgactccggtgtgaatgtaatatcatatccaacattgtgaaacacaacatctgttgttagtggtagttggcccttgtctatgacacccactaataaacggataacccccttccttctgtaggtcagcatatccacttccaaagttgttccaatcatggttccaattgcccaaaaccccagataatgtcgccaagcatggggaacatctgttacgtgtatccaaatttcatcgaggtgatatgcaggcttaacatctccatgcatctaccatttactgatagtgattgtaactccgctcttcaaattatatcctatatcggccatccgcagaagctcttcttcagatgggaaaactgctaggaaggaaccatctccctgaggaagagcctctcaattccagtccacccttgaaagttttgcaagttccgcttggactgccataccttcaagatcacctccatccactttgatcaaagttgttggggctggttctggtacttcaatcttgtaatcgaactcagggattctaaagaaacaaagttcattttttgcataccccatcatagctgtcgtcagttttggcatcttgaggattgggcacttttttgtgagatgtaagtccttcttgttgcaaatgacacaatcgaggtctgcaacacagttttctgtcggatgtcctgataccttacacctaaaatagaaagggtttcttggcttctttgctttcacaattttttcttcatctctttgatcagtagttggtgtggtgaccgttgctgctggttggcactgatcttgtctcccgacaggaacaaatctttt

SEQ ID NO: 166766 - DNA, 807 bp, Zea Mays
attgcactcaagcaaaaatccaaatcaaacattatgcaaacatcaccatcacatggttgttattataatcatagtatcataagaagtttcatcatctaatgcaaaaccgatcttattacaatatgacatacaaatatagagtagcctggtgatagatcgtgggtttccatagcgaatcctcttacagggcggggacacaactatgacagggacttgggctttgggtgggtttcttccttggagctgagctacgagggttgcaatcctggcatgggcttcttcaagttctccatgtaccatcgagagatccagggtagcgctgcccgggtcagtgttaagacctgccaccacacctacaagggtgttgaggcgatcttctccagcttcaccaggaacaacactagtctggctttctccatgaagacgtagaggaagatgtctgtacctcgtgtcatgcagttgctgtcgataagtgtggctaagagaccatagagctctcatagcatcattgctgactgaagcagcgtaggtagatagtggcgtcagagactcataggctgatagagtcctgaaacctctatctcctgcatccatcaccctgatatgcacgcgagtgatgtagtagaaagcccgaggaggcccagacactcaccttgtgtcatatagaggtcggacgtaggttcctagcgcatgtagtacatcataaagcaggtttgggaagtgtcccgtctcgaacattgaggtgtaatgctcagtgacaggccatatcccaacaaatttgtactcctgcgcgttgttggcttcttc

SEQ ID NO: 166767 - DNA, 317 bp, Zea Mays
acccagaccaccattaccagcaggagggttggacacaaactcagaaaatgaccggtgaggtggcaaattctagacagaataggcaacaggagcaccaacatttgacactctgcccctcagaatcatgtccagtcggctcaccaaatcttcagtgggaattttcttgttggtaacccgggtagagtcattgacaccactgtacagataagatgggtatgccctatctttcaaaggttgaatattcttgaagacgaaatcagcgaccacagcttcagcagtcaaacctctgtctttcaataaacagacctcagcaagca

SEQ ID NO: 166768 - DNA, 668 bp, Zea Mays
tgtttacaaggagtaccgaagaagatcgtgtctgatcgaggttcacagtttacctcatgattctggagaaactttcatgagaatatgagcactagagatggcaacgggtacatacccaccgggtaccacgtccccacacccgtacccgcctaataaaaatacacctgttaagatacccacattcagtcacgggtacaaaaaatcctcgtactcgcacccgtacgggtaaatttacccgatgggttacccatacccgcgagaacaacacatacaccaacaatattgtaaatatcaaataatcaacattgcaccatacatatgattatagataagtttgacaaacttcaaagagtgcaaaagcacaagcagcaagctgtaagcttgagaactagtaatattacattattacatcacaatgattatagatttataggatagataagtcacaatcaacatcacatgcacccagccaccagatttagacaattagaccacatcaagtgataagtatgcattatgtagacaacaaattccagcaatcctccattcctcattgtgcccagcgaccatcgaccaacattacactacatgctgctgctgcagttatattgttgtttcctgtagtttaaaaatagagaataaagagaataaattgctacttcatgcag

SEQ ID NO: 166769 - DNA, 421 bp, Zea Mays
ggctaatcagcctgtaggcgtatggtgagatcttcttggtggtgatgaaaggtccgggctcgagttttcctcttgcttgtattcgaggtgaccttatgcgtactaggtcaccctcatcgaactcttttgccttgatggacttgtcccttcatggttttgttgcttcttgatacctggctattgtgttgagggcctcaatccggtcgttttcgagtaagtctttggcaatggacttgtctgtgtttggggtcgagttgtcttccacttgaatttcagctcttgtggggtcaatgcctcatcatcgtacctgaatttgaagggggtgaatcatgtgcacctggtttctatcgtgttcaggccccatatgactttgggtggttggttgggccacttacccttcgtgtcatcatgtagcatcttc

SEQ ID NO: 166770 - DNA, 736 bp, Zea Mays
tggacaagttcaaggttgcaaaagaatgtggaggagctttgtgaatctaaggagagacgctgtgaaaaatccttggattgcgcaaagaaactgaaagacagttttgcaaaggtgggtgcatactcatcggagcaaaaatttattcaaggtgatcacgaaggagtcattcaatggatcggtgaagaggttgaagcttttgaacaaatacttagcgaccgtggggatttttgtgccttcgccggtgcccgaggggttgcaacaattttggagaaaactggttgtgaacatgttaaagctgcagcccaggcagaagtcatcttctccatagacgatacgaaggaaccttcaaccgaagctactctgatgggcgggaaattctattccgatgtttggatgaagggcggccgcgagatagccgacgaagcaataaagaagagtgaaaaagaatcccatgatgcccgagtagaggcaaaggaagctgaagaagctgttgaacgtgcattgattataggtacctctatttaatggccttttgctttattattcgtttctagcttcgaacccatattatcatatactttgctgcagccggcctttcgccaccaccggagccattcaatcctgaggctgaccccgtcatgaaagaagctttgggtgtgatgaaggtcgccaatacaatcgttgacgaagttgttgacagactactgaatgaagctgccgaaagagtgctaaaaga

SEQ ID NO: 166771 - DNA, 669 bp, Zea Mays
gtgtaggatagcgtgggttgaaaatataaattatgtgacatgtgattcgtgttttaaaggcgagatgtgcgaatgatcagatagtgtttcacttgtctagtcgataaacgttgtcatataattgtgctaaaattgggcatgagaaagcagtggggacacgtatgtacgtgtgtgctgtggtgtattgtagtagtggtggcgtaagataattgattgaggtatgcgggtatatgccgtaatgtggttatactcgcgacgaggaaagatgtatgtattgtgtaacacgatgtttaggtcgctattatataatcgtgtgaaggatgctcccgatggtcatgtgactaaagggtggtgtagtggtaaagcgagaagtaagtttaatatctttaaaacgattagttgatagcatctgtcggtgtcatcatgctttctgtggtatggcggatcgatgccttgatttgtcaaatattgcattccattcccgatgggtaaagtaaatatcttgttggttgattagaggtcttatatgagcgttatcgcagcccaagaattattagaagcaagtagcattcataagtcggtcctggttaaaattgaagaacaatccgataacatatgcacctaagtgctttaggtccttcagtagcaagtaagtcttatggagtttta

SEQ ID NO: 166772 - DNA, 545 bp, Zea Mays
ctcacgcgcgcacctggctatatgtggccgacagctgggacccgctcttcagccatggctgccgtctccgccagttgggccatatgcgccctgtggatcttccccaatccctggcggacgcaaccaccgaaccgagcaaggcgcggccggtcaacaccagccagcataacggcctccgcttccgccggaccgtacgcatgaggccggtgggtataaacccttttcttcccttaggtcttgccgtatccccgtacccagccattgcctgccaccgtcgtttgccgtagggagaggagtggaggtctagggcgccgccgacgtcgtctgcggccgtcaccgccgttcagtactcgggtaaggattccggggaagctccgtgtcgtgagggacctgggcaaactcctctcgccctggaatttggtcggaatcacggggaatttctctccgtcgctcacggttcgccgtcggccgcactccaccgtagccaagtaaaaccgcaccgcgattctcggtatggcaccttccctatgccttgacgtgttccc

SEQ ID NO: 166773 - DNA, 409 bp, Zea Mays
agtacctcattgttcgtaatgccccatgaagcagatggaaaaagaagtcgattgaataaaatcagagaaaagcatctgatttataactcatcatcattgccaagcactatcttgtcctaaagcttgacaacatcaaactcttctttaccaattttgagatcacgtctcagttttgcagcagcgtccacttcaccataccaatcagtaaactccctgccccctccagcacttggcaatcccaaaataagacgaaccgtctcttttgttatcttcagttccttgccagcccctgggcgtattgtcatgtcatgtggatccaacttatccatcaaccaccttatgagagatctgctctctaaggcatcagtacgcaaatcaaatatactggaaaatcccaacctagcaactg

SEQ ID NO: 166774 - DNA, 875 bp, Zea Mays
gttggctcgttacgcgcctgacgatgtcagcaccgaaaccaagaagatggcccgtttcctgaaagggctaagaccagaactcaagaccatcctcgccagccaagatttcctcagcttctcgcacctctccaacaaagccatacaagtggaaatggcaaaagaagaagaaaaagggcacctcaagtggaaattccaagttctccgagctcaacagcaagaccgacacctgagagctcgatccttcgggcttccacccaagggaccaagcttcaatagaccagctggacccactctgtcatgtttcagccagcagagttagagttcctttcaggccccctcggttgcaagcaaccaaccgccagcaaatgcctgttggtactgcggagaccccagtcacttcaagaataactgcccccagttgaaggcacccagacctacctactccaactcggtgaatggccccaagaatacctcggcacctgcctccaaggcactcccctccaacaatcagcagagcaggacccagtatcagggcagagcacgagttaatcacgtcgatgctcaagaggcccagcaagctccaggagtagtgctcgttttgtggaaaagcatggcatcccttctacacccctagaaatccctttggtcacccgaaccccagggtcagaccttctatgccagctcaaatgctcccaagttagaattcttttaagtgtggtagtgttcttggcaaacttaaccgtcttgccatcccaagggattgatgtgatcctaggaatggattggctagctaagcacaagggcatcataagttgcgcaagcaagaccgtccttctcactgatcgccaaggaaaatcagtttcttgtcaggccca

SEQ ID NO: 166775 - DNA, 312 bp, Zea Mays
cccatgttttcaactcagagaaaccacgaccaatcgacagtgttacctacttacctcaggtcaatggcgctatagtagcctggtaggcagctaagactgtctgcaacggttgcggtttgcttccccctccctccatttagaggcaactgtagaccgctatccactgcatcggtaccctctattcgtccccctgcactagagtgaccttctctctccccctcaatacaggggcacgctacactcagccgcgaccgcctctactgtcttcgcgccaactcccgctgcctgcatttgacttggcgccaagtcctg

SEQ ID NO: 166776 - DNA, 715 bp, Zea Mays
cttcaattgatggcgatgattccagactccgtgtgtttcatgtcgttaggtgatggcgttagttaccagtgttcgtcggtgttagttacttagttatcagtgttcattggttgtgttcaagtatgcaattcagtataacatgactgatcgtaggggacatagtatgtagaccatgctacctaacttatgggtcaattaaccgatccagctgtctctacagacacctagcaaccttttctttatagagctcacatgcaatccgttgtcgcattcaaaaggattctaaggatgctttgcctcacctgtattggtgttagtggttttcagtgacagggtttatgaaaacacagttcgagctcgttttcttctccattatttccccttcgtttattgcgataaaactttttggtttgggtgtacgtaggatttcagtttcctttttgtgaatgtggtcatgcttagcatattatcataaagatgcattgattattcaggacaatgatttggtcaactcaatcccttgcaaaaatgtacttgagcagttgaggatgcttttggagaagttcctgctgcggctgtttttcaggcattcaactcattagacagatgataacaatcaattacttgccttgaaatcacaatcaatatggacacttcttatctcagctatatggttttgtttcttttgatgatgggcccagatccaaactctgtc

SEQ ID NO: 166777 - DNA, 404 bp, Zea Mays
cagttggaaagaatgcggaagcgtgactgccaaccgcggggtgaatcccttttcaaggaaggctctcccgctcgcgccccaggaaatcccgtccgacgcacaccaagcgcccgcagcgacccagtccccgacatgcgggcccgggtccacatgtcatacacctggagtactggtctctgagtgcggagaaggcgaaccgccacacggggaatgaaccgccgcatgaccacgcgtcgcttcagggctactacaggaagatatttttctaaccaaggcggcggtaacgaggcgccctgcgcatgacccgatggaaccgccagacgtggggccgtgggtcagtcagccgtggggacaaatgtggcaatcgacgtgaccgagggcgaactgacagcgcatacgtcacc

SEQ ID NO: 166778 - DNA, 690 bp, Zea Mays
gggagtaaattgagttccaattggctctgtcagtcaaactctttattgaattcagagcactgttcaccatcatcagaaacatcgcgccgtggattaagatcacccccccaccggcgataagaacgccaccgcggcgtgaccggtcgtcggtggtcgcggtaaagctccttggtgtcgtggcaaaaagttaccgaggtggcgaactctggttaagcggcgaccccgtgccctcaccggaaaccgccgcgcggaaagcttgccagggcctccgcggttcgcgcttcttctccaactccagtcgacggcctataaattgagcccccccctcggcttcgccatgtattctaccagctattgcacccacctgcatcccaaaccccccaccagagaacttggatttgggatttcccccaaaccggttgaagaacaccgtgaacccaagttcaccgtggaaagctctcctcaggtccgatcctgttgtctttagtcttgttctagcatcctcatgtgcccttgatgcttaccgagcttccaattcgaactaagaaaccaccactcgtcgagaacacaaccaaacgatcatggccttcgcggttctcgtgggcaggctagaataggtcaccaattgtgcgattaacttgggggaattactcggggtagcttggatttggtatccgccgcttgggcgcg

SEQ ID NO: 166779 - DNA, 548 bp, Zea Mays
tgaaattccagcccttcaaatttgtcttccagttttcggacggctgtacagtacttgcccatagaatcattcgagcaatcctagtctttatttatctgacttatgaccaccagtgaatcttcgtataccatcaacctcttaatgcccagtgatatggcaatgttcaatccgtgaatcagagcttcatattctgctgcattatttgatgctgagaataacaactgaagagcatatttgagttgttcacctccaggggcaatgaagaggatccctgtgcctgctccctgtagtttcagcgagccatcgaaatacattcgccatacttctgcagcctccgggttaactggtacttgttgctcggtccattctgatacgaagtcaactagtgcttgagtctttattgcagtgcgaggccgaaactcaatgtcgtgagctcccagctcgcaggcccacttggctattcttttaatggcttctttgttgtgaagaatatcccctattggaaacccggtgacaactatgactttgtggtcatcaaagtagtgacg

SEQ ID NO: 166780 - DNA, 338 bp, Zea Mays
ccatctctgaggtccttaggagtaacctcagccgatctactccaccaagcttcaaaattgatatcttccatcccgggggcaagggcggacaggccgacacgttggaggagaagataccaaaattgcctcgcgaggacacaggaaacaagcaagtgatgaatagactctccttcctggtcacataaggggcaagaactaggatggggaagacccctcttagcgagccggtcagccacccaacatttattatgtaggaccaaccagaggaaaaactgacacttaggcggcgcccaggtgctccacactctttcaaagcccgccagggaggtagaaccaca

SEQ ID NO: 166781 - DNA, 333 bp, Zea Mays
tgcggcgtcaccatgaagccggggaatgggatccagcacaaaccatctcccgggatgaggcctctaaagtaggggaaacccccgacgaaagagctcttcgagaacgctgcaactcccaccgtcgtgatcgtcgccacacctaggaacgtgagcgggaacaagttgaacaggacgccaggctccgacgtgagaatctgcttccccctcggaacctattccctgactttactcgagcactgaatacgccgagtgaggtcaggtagtcctagatcagatcgccaatggcctaccgtgcaccccagacgcggagggctatcggcaggtactcaccca

SEQ ID NO: 166782 - DNA, 563 bp, Zea Mays
atgaagaagactagaatagtatagtttagatattatacttatgtaaaataagtaatgaagtcaagttgtacactggagtctgtataattattacattttggtaatgtaatatgatggtgtatgctggcatgttatattttttccaaatgtttctttgcctcagatgccatcacggattcgcgcacatgatggtgtggggacttcccgcggtagggacgatactctcaacccgccacctgtaccaccgactttggccgaggctatcgctaccctggtcaatgccaccgatgataatacgcgcttcttgcgcgaaatggcgggcaatcagttccaacagccttaggaagagctcgtcctcaaggaccgcgtgatactacatatttggaattctttaagactcgacccccgctcttcatcaaagcagaagaacctttagaagccgatgaatgggtaagagtaatggaacaaaagtttggattgattcgatgcacggagacgcaaaagccattgtttgccgcacaatagctaagagggcatgccagcacttggtgggcaaatttttc

SEQ ID NO: 166783 - DNA, 565 bp, Zea Mays
tggtggtggtccctcggaggcgattgacaatgtgtgtcgtgacgcctctcctgagccaattgggctagtgttgggctgttcgtagaggatgttgtgactctgtcctggttgcacgaatgtgtgctggtgcgccatgatctcaatcgtactcttcccgtcgcctcatctcactttcgtgctagctatcgcatgaagcattgatgtgctccgcgcatctcgtcgagtgttgatgacgtagcgcacgtccggtgtcggacgggcggggggaagaagatggttcaccgcctggatgaggatctatcggtagcctttcgcgtttggggtacgtggtaggccattggcgatttgagccagaactccatcgacttcacttagcgtgttcagggcacgagcgaagtcggcagcagattccgaggaaggagtgggttttcacgtcggagcctgacatcatgctccgctcgttcccgctcgcgctcctgagtgtggcgacgatcgcggtgttgggaattgcggcattcgcggagtgccctatcgtcaggagtctcttctacttcagatgcctcat

SEQ ID NO: 166784 - DNA, 459 bp, Zea Mays
gtcggggcgaggaggcgccgccttggtgagctcctcgaggatgaggtcattacagaccttgtggaaagacaggaacatgaccaagaaagtgatctaagtctagaggtgattgtagcgctcattgaggccacaaagaaggttgaggacaagcgcgcgatcaaagacaggctccccgaggtcacagagggaggccgccatgcctttcatttgatgacagtacttaatgacggagaggtccccctggacgaaggtctgaaaggcaacatcgaggtggagagcacgaggctcgcagttgctgaggaactactcctctatggcaccctaggccttgtccgcgctcgtgaatgacatcttgcagctcaacagggaccgtactgagaatccaagagaggaccacactatccatccacctccaagaggggatagtgagggacaccgtgtcaatgaagacatggttgt

SEQ ID NO: 166785 - DNA, 462 bp, Zea Mays
ttgtggttggggattttatctgtatgcttttagaacatctcggcattagggggaggaatgcccatatagtgtaatgcctcaatattctattaaacacacataagccaaactgaatctgtcgttcggtgtgtactcctgtgtatatggagtttgccagaaatcgttgaggagtaaccatattggtttgaatgcttctacctaatgtggatgtggatatacccgagattaatatcatatccacatttgacttattggcatttgatctattctgcggggatgcctgcggatatgatccatcggccttagtcaaagcatatgttctgattgcagattcacgtggtctgtaataactctcctccgatgaactcgccctgctggtgatttgcctcacgaagaggttcatcttgatgatgaaattcctagcaatgcgcgcaatatcattgtgctaggaatacagaacaa

SEQ ID NO: 166786 - DNA, 390 bp, Zea Mays
cgaatgccgaagaccgttgatgcggtctttttcgacatgttgcatcttagtttttgcgggggatttttgcagatatattacatggctccgcccgttaaaaacctcacccccaggaggaaaagagtgcgggcctgaataatgttgtttggtgaattacaagggcgcgtaggccctgaggacttagacaaaaaatttgcgtagattgtcaatattccaggaatggtctaggtcttcgccggatggcgttgttagcctgtatgtgctaggggacgccttcgacttgacgatgaacggaccttcccactttggctccagcttgccccgtgactctgtccgggtggttcggacgagtatgaggtctccttcgttaaattctcttgggacgactgc

SEQ ID NO: 166787 - DNA, 800 bp, Zea Mays
tgaagtcatcccaaatagcagatcgacgtttaccagtgctagaagaagtcaatgaatcaagttcattagagccagcagcatcacttaccgacctgggattatgagtgctatcgacaccgaacaaggcagcaacatcatctcccatgtcgtcgacgtcatcgggaagctaccctaactcaacgagctcctcgttgatggttctagggtaccgaccgttgtcgtcgtcgtcatccataaccgacttctatctcggcaccgtacctcgacggcagtggcggcactagcacgaccacgtagtcagccggcgacctaccaaagtcacaagcaagcagcgagggttagggttagggattaggacggtcgactggtggtgatgaactgaggaagagtgagtgagtgacataccagccaagccggagcccggagccggagacgagggtaaagtgcacgacgacggacgacgcgagagggagagccggagaagaggagattagggttagggttagagattaggatggccgactggagagagagagagagccggagagggacttatctgccaagccgcagcccggagccggagacgatgacgcgggacgatgggagggagagccggagtccgaagagcggagattagggttagggatttgtgattagggttagggatttcaccgatgcagagccggagcctggagagcggcgccgcacggaacggggctagtgacgaagatccggcagagactacggcgacggtcgacggtgaggcggtgagcagcaggcggagcgaggagcaacggaga

SEQ ID NO: 166788 - DNA, 433 bp, Zea Mays
gcacagaatgcaaaactgcaaacaagggggaaggaggggagcagggatgaccttcggatgacgagctcatcttgtgtgtcatctcatcttgtgccttgtagatgagcagggggcagggatgaccttcaagcatgagctgcatgccgacgctggtggacgatggagagccctggaggctggagcagccgacgccgacagagccacagaggacagaaagtttaggagagacgagaggggcgcaggcacaggggaggctttagagtttaggggcgcaaacagatttatacagatttatgcagctacttgaccaaaaaacggtgaagcccaatagcacatctagcccgctgcacactggtcgaccagagatggctaatcgaacgactaatcagacaatttggacgcctaatcaatgattaggacgaccagaaaaata

SEQ ID NO: 166789 - DNA, 472 bp, Zea Mays
ccaacaaccacggcaaacactgacgcttggccttccgagtgtgcatgcacgttgtggctttgtgtcgtgttcgtggatatactactagtaccaaagaagtaaggttaaaaggccgtctgatccctctggttcagatggatatgccagtatgtgcaagcggcatggtcattggtctctgagaaacatggaagtgaacttgaataaatgggatctgtctttaacggtttcctcctcaatttatactgctctagtaaaaacctaatgtagacatctgcatactgacactctgaacccaccctacgcgctcgcctcgacgccgtgccctgtggacctcatgcctagcgcaacgctctcaactacggccttgtagacctccaacgcccaggcagccagctattgcgcctgcctagcacccgaccccacccatgcagccaccacaccacgcaaaaaatagtatataatgaacactcga

SEQ ID NO: 166790 - DNA, 335 bp, Zea Mays
tatcgagtccgttgagctcgaggcaccactttgagatgcgcccgaacacgtcccgattctggacaatatcatcaaggggtgccgtagacaccaccgataaggggtgttggtcaaagtagtggatccacttccgcttggagatgtggaacgcatagagaagtttttgtatcagagggtatcgtgccttgcactccatcaacacctcactgacgaagtacacatgcttttgtaccttgagtacatgtccctcactttctctttccaccactagtgcagcgctaaccacctaggtggtggctgcaatgtaaaggagaaggtttcgcctagttcgggcg

SEQ ID NO: 166791 - DNA, 309 bp, Zea Mays
ccggattattcaccgtgctacttgccgtgcgatcgaccgaggtgtcctcgccggagatcgccgccctttgtagtcgtgccacgtgcttacacttgttatcatgtcgcaacacgtcgcagtggacagcctgtttaccgcgagggtctttaccccgttgagcgccacggtagctgcactccggtgactcaccttgctccggctgccagctttcttccccaaattcagagccacaactgttaatcactataaattgatgccccggcctgctccgttagcttatcacgaacctagagcactcactctcgcctc

SEQ ID NO: 166792 - DNA, 592 bp, Zea Mays
gtgttagagggtagtgtggcgagcagtctctgttaagctggatctccctgaatttgcttagaattgggagaaattgttgttcttagttgagctgtccggcaagttgtgcactgaacattgttcagttagctggtgcagaatcagtgttttcgtctcgttttggagcacaataactcttaatccgtgagccttaggccttggattgctgtagaaaatttgtagatctatgttttgggaataagtttagttaacttaggttggtcttttattgcttgaaatagtgaggtttgaaggggtagaaatgagagttcagacggtttgttttgagttcatttcagatggttgcagcttagttcagttttggggagcagaaaaatccccacgtctctgctatgttccacttgcagcagtttggattgaggccgtggataggagaagaattcgatgcttccagtgcctaagtcatttatgcttggtgtttattccgttgccgcagcctcctccttgatttttcttccaccgccgcacgctgttctggagatttttcttccacattcgctgctcccttatccccggcaagcttcatcccttg

SEQ ID NO: 166793 - DNA, 728 bp, Zea Mays
ctagttcaattggcagggtcggggagtatcaggagaacccaaggatattgaaacaagacagtagggagtatgaacagacctgggattcgctgaccacagtgagggctttttcacggtggcggaaacacagtttgggggaaatgggcaatttgtggtctctggtgaacgattggaggcaattgttggtgctttggatgcgtaattatcctacgaagctcacggtgtgctcaatttataggacttgggggcgatggctcgtgaatttgagttggcgcggtggcggtcggagagtgaagagagtactatcgcgagagctcggtggcatctaccgtggcggcctcaccggtgatgaaccagtagcagagagtggcttacggtgactcactgtgacgtggtaattgccgaggcatgtggcgttcgatcggcgggcggccaacaatggtgaattatctgaaccggccacaaagcagagggggtgcggtggccagccggaacagtgcccatactcaacagcggtgaagatctttctaccctggggtgttatccgggcctaagcgagcacgaatcacctcgccggcgtgaatccacgtgcgggggtcgccggtggccaggggatctgaatctgctgatatttttgttaatgtaccattgcaaactccttcagtcagtctgatagagcgaatgacagagaggtttgctccaaattttatgtaatgactgaatcaact

SEQ ID NO: 166794 - DNA, 1011 bp, Zea Mays
cttgtgcatatgattagtttgaatgtttgttagtgtaaaccctaaaatatggttttaaggaagtcaagtaagttcctttgatattgatgagttaacattagaatttatgctagtatgtgagttattattaaagcacattcttctaaataaataaatgaataaatattatttgcatatcatgttgggtctccttgattgtttcattttgaactaaactagaagtttgagattaaaactggatgtaaaaagttaaacttgaaattcaaattgaaatcagaaaatgaaaatagaaaaagaaagaatgaacaaacctactcctaggtcgtttctcaagccagcccaaacttcttactatcccctcacgtatccacggcctagcctacctccatgctagtcggcgcactaccgcaatcccatagcctagccacaccccggctccaactcttatggcccgcttccggtttcatcctgcatgggccctctaccactatagtgtggacccattgcatagcgacattcccttggcgctcctaatcgctctggccaacatgtgggacctccctgtcttgcatatctttttcgtgtgatcataaccaaatgtcggggtatccacccaggatcttggtctcatgcttcaacgtcagtgtagcaaactctaaccacgctggcatacaaatgcgagcctaccccgtgccctcgaccatccagccatgaacccaaattactgtgagccccaccaccgaggagaggcagaaagagaagggttttgtcgctgctattgattcgaccacataccaccggcgaaatcctagtgccaagccttgaagcatcgcgggagcgtgtgcaatccgctcggcgcccaatcaaaccggagcatgggcggagctagtgccgattgctcactagaacaattcggacacaatgaacccacacagcgccgtggtcggcctaccctacagctgctagtttcggtaagactctttccttgtgtttgcctcgtctctattgttg

SEQ ID NO: 166795 - DNA, 499 bp, Zea Mays
tgacccagaccaaaaaactcaaaaggaagctgctgcccatccgccggggccgctggcaccgggtcctcatcttgaggctgacctcccaacagagtttgctgaatgatctcacactgcaccgtccacgaatccccaagaaagccatcagcgtcagaaaaaacaatgaactgcgggacttcctccagagacgtgacccgcaccctgagcaaagtcctataaatattgcgtctgtcttcttcccacagaatcaatctgccaaaggagccaatagccacctgcaagtgctctgaagaacggtagtccatagggaatcccaacaacataagccagcattcccgattaaaataaagagctctatggttccaagcgtcattgtgccgctgaacagtgaaggaagcatcaagatactgttgcggaccgagcagaataaggttgtccctttcaagaatgctactgaactggaccagaacctgccccaggtgcgaccgctgaatatcac

SEQ ID NO: 166796 - DNA, 476 bp, Zea Mays
gtgcaacatgctcgcgcttactcaacttagggtgaccactataccctactaacggagcaatcggcttaagtcggcgatgacttaagacggtgcaacatgctcgcgcttactcgacttagggtgaccactataccctactaacgaagcaatcagcttaagttggcgacgacttgcacagggtgaccactataccctactaacgaagcagtcggcttaggttgacgaagacctaagacgatgctacatgctcacgttgactcggcttaggggaaccactatgccctactagcagggcaatcgactcaagtcagcacgatacgatcacatctacctatcttaaggcgaccgctatgccttaccagccaagcgattggcctaagtcagaaaaagctccaaaaccagcgcgccacatttactttcacaattgttcaggatgactgttataccctaataactaaaacaatcagtactcccgg

SEQ ID NO: 166797 - DNA, 1146 bp, Zea Mays
ccgattacagtcgtccgatctgaaacgaggcgcctagattagatccgtgacaacgcgaatcggtacgcaatcacaaccgctggatcgactacctacgtccaagattcaaaatgaccttgatttcccctcgcctgcatgatttctaccctgcggtccagatctactagcgcgaaggcgtatccttggcctaatctcgtccattcaaccatgatcgagccgctcaggttcgtcttcttcctttcccccacgaaacggcggcgcgagtccgatacacgacagcgccctgaccggtgcaagccagtacgactctcaggcgagctaacaagtccatagttcgccccaaaacaaggcgaagattattacgaacacgtgggaaacggtttcgccaaccgccacgcagttggacacccccgaccgcaatacgggcgacgcccgaacgacattccgcgcacatgggccaaattcatgcccaattcgcccacgattaatgacagcgcgacaatagctaggaaaagggatacggtgagggtaaagaaccgagggctcaccgaatgcggaggtcaaattggcgctagacttcccacggcggatccgcttagccgccgtgctccgacgagaaattcccgcacctcgggacgctccagcttcaccctgagggcacaaacaacacccacgcgtccaggtgattcttcctagcggtgcgccgatgacagaacagtggtacaactatagtttttccggtggcggcggtcttcccccaatcgagaccgatgacagctatggtggtgcgagggtttggcgacgagagcgctttggaaatgggcattgcgaagacggtcgtggcgtgggttttatctccccgctggatcgcatgcaacgcacgcgcgagatccgcgtcagcggcgtgcccgccatgcacgacgatccgttgaggacggagctgataccctgggcccaccaaatagcgacgtgaggcagtagctgagaagtaggcccgtcctgtcagcaagctaggcgcgcaaacaaatggaataaggctgaccagcggacccgcttgttgggtgcgtgcgcgcgggagcggggacatgggacgcgtaggggcattcagtttgggccgaattgttggtctgcagcccaggtgagttt

SEQ ID NO: 166798 - DNA, 406 bp, Zea Mays
cctgtacctgacccactaacaccgagtttgtccctgaacattccggctacctcgtctctgatcctctctgccatgtctggcgaccatccattaagtttgtggttggaaatctcaggttgcctgacatcactctgtcggctttcctcccagggatgtctgaggtgtgtgttagatgtcctattaatgtcacaagctcctgccctatacctctcaggctctctagtgggtgaacagtatgcagccctatgtccatgaggtggtatggcatggttataatgtgttgctggtggggctccatagtgttgctgcgatgagtgtgggaactgttgtgcagctcttggttctgcgtacgcatacccagacggtcaggcgtaaggggtcggatggtccgcgaccgggccaaatg

SEQ ID NO: 166799 - DNA, 507 bp, Zea Mays
cccaattacatcaaaaactctatttagtcttctttttcctcgagcaccgaaggcaacgctcatggcttcgtcctctgtctttgtataggctcccagtagctcatcactagttgcctcgatagcatctagccaatcgtcattgggctcgtcaaactagattctataccgaaaggtgtatctaagataaaaccaaaccaccttggctggagctagcagcagtttccttcggcatttcccattcattcacaagaggccatactttgaaagtaatgtgttcttgtacaaaatccctagtaccgatgtaagtgcatatggtgttgaaggccattaggcacgcttccacctcattcccaattgcaatatatggtcttctaatgccgaagcgcgatcatatgggatgttgaatgatgcccctcacatcctccctctgattcagatcattctttacgtagaaccattgcttcatgcaagagcccgaccatttcttctgaaatgttggcatgagat

SEQ ID NO: 166800 - DNA, 418 bp, Zea Mays
gaaggcaaacataatgtttgtgtgcgattgaccaagcatagcgtgcatcatagacaacaggtgaatttaggtacgagttcatttaaatagtgcttggtgttcatctaaagtcaatggtaggtatggcaaccataattttgggtgggcaataaaccataattcagaagtgtgtcatgtttgtttatctatataactattagaagcatgttgtatcgttgtgcagtgacgatgatgtttctagcaggttcagctgatgcctgatagggtgaccctgaacagaacgacacgcaccttgacgaggccgaaggatggatcgatttaggtggactctgctgtcaagcaagcatgatgggtggcattccatttctgatttctctggtacacgctgatgctatgctcttcctcaactcggtagaac

SEQ ID NO: 166801 - DNA, 384 bp, Zea Mays
gggagggccaaaagttaattaagtcttcatggcgtaatgtggaaaggtgctactacagttcttcagcaacttcagatgggggtcttcgttgcgtttaactttgtagtagctttggttcggtagttggtgttctttggtgtggtcttgtgaggggtcttgacactatgttgccgccagatgtaataattggtcgtaacctcattttaggccaaggtcggatgatatttatattatctaaataggatgtcaataaagtaagaaactaatcattgtcatagtagatcagaaactaattgcataaaaacaaaggagtaagaaaaacttacccctcttcttacaattccatttactgtagcttctgcactagcaactagctactttatg

SEQ ID NO: 166802 - DNA, 703 bp, Zea Mays
aaatattcatttttagggtacgagagagagagagagagtatgttttgtgtacgccaagaggggagatgtacactatcccttgggtgtcaatcaggacgaagataaaaacataatatgaggcaacaccaagaagaagagagcgaccgacgagccgagcagtcatggagacatttcctaaaaacttcgctcgcacatcaaccaagtgtagtgtcatagatgtgacggttttggaggtctctctcaatatttcgtatagatgggaagactctaatgcaactcaaccgagaaatgaaaagtgacagtgtgttgttgtgttctctattctatacgtgtcataagagttagatataataccatgagctacataaagattaaaagatatggaacctacattcattacctcatacgtcaatccaccattaactccttcattaatcggcccaaattaatggtagggttagctcaaccatacaatataatattgtagtgaataatactttcgtacaccacgagtgcactagataggttctgagaccgtctccaacaatgcacaataaagaagttgttaccatatatttagcattttttcgaaggtaaggcctccaacaatgtgcgctatcgagtccgctaaaatagcggacgttccttgtggcgactatatttggaagtgtgtcgtgcgtcctgtacccacacgtgttgcacc

SEQ ID NO: 166803 - DNA, 470 bp, Zea Mays
gtgaagtgtgcacttggtttgattttaggcgaagaaaatggaatttgggcactcggctcggaaacgatcgctagaaacggggatttgtgtaaaattgaagcctgggatatcgaattggcgtgaaatttggtgaatatgttactggaggtattgtgaaggtgcctgaaaagtttgggttcaattggagcaattttggctggtttggtcatttcaccgagcatgtggtgtgcggtgatctagggttgaggtgaaacgaccaatttagatggtgaaaccctccctaaggagctcaagacctgcagggggatacaatgggacacaaggacacacatcccacacattgattctcaggaatttcacagattggatataaggaaccaaggggtggaataggagcttcaatgggctggaaacagagaggggaaagaggagaagaagctggggctgcttatcagagaggaggaaggagg

SEQ ID NO: 166804 - DNA, 925 bp, Zea Mays
tgaatttgtattgcctcttcttcgatgtgactttctggtgcttgtaggcatttgcggagctgggacacgtgaaacacatcgtggatatcagacatggattctggtaattcaagacggtatgttgtgggtcccactctgccaatgatgggataggggccgacgaatcgcggtgctagctttcctttcacttggaaccttctgccaccacgcatcggggagaccctgaggtagacgaagtctccttcctcaaatctgagttctctccgcctgttgtccgcataactcttctgctgactctgagcttgaagtaatcttctgcggatcagggcaactttctcctcaacctcttagacaaagacaggtccttccagtgccttttcccctaagttggaccacatgagaggggtctggcattttcgtccatacaatgcttcaaacagtgacatcttgatgctggcctgatggctgttattatacgagaactctgcataaggcaaactggattcccaacttctatcgaatgttaacacacaggctcttaatagatcttcgaggaccttgttgaccctttctgtctgcccatctgtctgagggtgataggcggtgctgaagtctagcttggtgcccatagctttctgaaggcttgtccagaatttggaggtgaactgggttcctctgtctgacactatctttcttggaatgccatggagtctgactatctctttgagataaattcgggcaagggtggctcctccaaaggtagtttttactgggataaaatgggccaccttggtaagacagtctattatcacccagatagagtcattccctttttgcgtctggggtagtccggttacaaaatccatgcctatttcttcccacttccattcaggcactgggaggggttgcaataggcctgcaggct

SEQ ID NO: 166805 - DNA, 416 bp, Zea Mays
caggaaatgtaggactcctctattttggaccagactagaggaaggcagttctttggacctgaacttattcaagaggcagaagaacaagtctgtataatctgagagaatttgagggtagcacagaccagacaaaagagctatgctgataatagaagaccactggaatttgaggatggtgatcatgtgtacctcaaagtatcaccacttcgtggaatgagaagattcaaagtcaaaggaaagttgttccctcgctttattggacccttcttgattttaaagcgagtgggagaggttgcataccaattggagttaccagatcatcttgcagatgttcatgatgtatttcatgtgtctcaacttaagaagtgtctccgtgtgcctgaagaacagttaccaatggaggaccttagtgttca

SEQ ID NO: 166806 - DNA, 708 bp, Zea Mays
ggaaacacaaccacgacacatatacccgatggcggagtcctacctcgagagcccggctgaggatcccctggtctggcggcggccgttgtgggagcagttaaggattgcgtgatctgcgagctgcggaggccgttgaaggagctgacagggggctacggtcgtcttatagaacgagtccggagtggtgaggattgatcggcgcttgttacggaggtggttacgaggaacgcgcggcacttggtgttctgttgggcggaattagttggccgcgagctcggagttctccagccgcgccacgggttgggagagaatcctgcgatttgttggcgcccgcggcattcgcgctgctgttgcgagcaattggggaagaagataacactgtcagccgggacccactgccagtgtcacagcgcgctgggaggagggatgaggctgggttgtgctgcggcagcagaagaaggcgcgcagtagagaagttgggccgagagggagaagggagtgggccggccaagggaggaaacagcccatgcgcaggtttctttattttttttctatttccatttctatttcctattttctaactattcaaatttaaattgggttttgaattccaccctcaagttcaaatgcataaatagattccagcatgaaatgcgaaattgtattttatttataatatttggttatctatatgcctcaaaatataaa

SEQ ID NO: 166807 - DNA, 339 bp, Zea Mays
ctccgagacctcgacgagccgatctccaactgtaccctcgtactcaaccttctttgcggccttaatgagtgctacgacaacctaaagacttggatcatgtggtccattatatacccctcctagacggcccggaacgacctcatccttgaagagctctctatagcttccttctatcatcgtgatggctctatagcttcggtcctggtgggccatctcagcgcaccaagccctccactcctatctctaggaccccgtcgcctcgttcttctaccagctttggtggggtcaactattgttggcatcaacatggtggtggcggcagcgctggaggaggtagtg

SEQ ID NO: 166808 - DNA, 929 bp, Zea Mays
ggctatcgctgccttggtcaacgcgactacgtataatacccgctttttacgtgagatggcgggtaatcaattccagcagcatggcagaagggctcctccacagggaccgcgtgaaacttcatatctggacttctctgaaatgcgtccccactctttgttaaagctgaagaccctcttgaagctgatgagtggatcagggtaatggagcagaagttcggattaatccgttgcaccgaaacacagaagccgttgttcgctcccagcaactgagaggcgctgccagtacctggtggggaaattttgtggcagttcaaccagccggacaccaggtcacttgggatgaatttaagctcgcattctgtgaacactatattccagaaggagtgcttcacatgaaacaagaggaatttattcgactaaaacaagggggatactatgatgcagtatatcaacaaatttaatcatttatcccaatatgcgattgaccaagtaaacactgacctgaaaaagaagaactgtttcatgagaggactcaacgaccggctacaatggaaaatggccacctgtctggatcttacatacagcagagctgtcagcacagcgctggcagtagaagccaagaatactggccaaggaaaatcaaatggatttggaggtgacaggtgcaatcagggacctgagaagcgaactaggttggtaatccgaccatttaatcagaatcgttcttcgcctcgtccaccctcctatccattcaaacagcctgttttcattcgccctaccactgcccccacatttacaaatcagtcgagtgcccctagtgctcgtttccctgccctccctagttcctcaactagctgcttcaactgtgggaagtctggtcattttatcaaagactgtccatatccgaggcagaataagtccaacaatca

SEQ ID NO: 166809 - DNA, 677 bp, Zea Mays
atgcgctctcaatcctgcccgagccaaagttcaccggactttgcctcgagcacgccgtgccactgcccgccaagccacctgagccttggccaccgtggctagctccctccagccaattccaagccgcgccagtcactcggttagctttgctagtagcccgtgaagctttccaagtcctcggacccggcaaaacttcaccggagacccaggatcgtccttgccggacttcggtgaccgcaaccgctcatagaccgagcaatccggtgagccattctaaaattcctcgtgcacatatctttattgacctctggtgaagctccctgacccgttcaatcggactatggcaccgtgagcagaccagatttctcgccgctgacgagctcccgggcctgtgcacacggaccgacctactccgaccaccacagccgacgatccgcacctcgacgtgatcgccagagacccccgaacctcacccaacccctcaccggagcaacctcaccgccggtaagcccctccgcccttttcttccgtcacggtcactgttccattaggggaaggatcgcgggttcgatttcgcaaaaccctagggggttttctgcagagtcatagactcagatgaatagtgaaccaaggacctgtctataatacactgaaaacctttcacaagggaccccagt

SEQ ID NO: 166810 - DNA, 472 bp, Zea Mays
gttcccagcgatctaaggggtcttaacccaattgacggggtcggggagcatcaggggcacacaaggacattgaaacgaaagagcagagggtatgagcggacctgagacgagctagccacgacgagacctctttcacggtggtagaaagcaagtttgggggaaatccataattggtgagctctgttgagtaattggagtcatggctgggtgtcttgagtgcatgactaccctacgaacccatcagcgtgctcaatttatagcgtgcttgggcggtggtgttcaatttggacgaattgtgctggcggtcgagaggggagctgagtcactggcgcgctgattcgtggccttcaccgtggcaaacccaccggcgacgagccaaggctgaggagcggtttatggtgactcaccgtgatgtggtaaagtgttgaggcacgtagcctggccggataacgacgaactctggtgatgccaa

SEQ ID NO: 166811 - DNA, 353 bp, Zea Mays
gttgctgcgctggtagatactgttgttttgacaagtactggcaggcttcgcacctctgaactaactcggctgcatcactttttgttgttggccagtagaatcccgacctgaagactttcccgaccagtgtcctggatgctgcgtgcattccaattgtcccgcatggacctcattcagaagttgcgttccagtagttgagagaatacatttcatgaggactcctgatgcgcctcttctgtatagcgtttccccgatgagtgtgtagtgagctgactgtctagcaatgcgctcggctgcatttttgtcatctggttcctcttcattctttatatatctgatgatcggcttcctcc

SEQ ID NO: 166812 - DNA, 295 bp, Zea Mays
gaggagtgaagctcagccattggatctctgggtgatggctgtgattagagttcctggtaccgcttcggtgggatgatccgagccgttgattctccatcgggtagatctgcggtgatcttcatagatcaatgatctcagtcgtaggattagaatcgagcgtatatgagcgggccgtgtgtttccattatgggattggctttggaccgttggatctagatccaaggatatgcacgttataccgattcgaaaagagttgcagatctaatcggtgtcattcgctttagattggacggcc

SEQ ID NO: 166813 - DNA, 301 bp, Zea Mays
agacgcagtcactttgtttttcttcaccgcggaaggggcccggaatcgcggaggcggtgccgccgccccctctttcttctccaccgcagagaccaagccctcgttcttctccaccgcggcggctgaaccctaggcaatccaccccgtcgtcgagagcttcgtctacaactccgagtccgacccgccgtcaacttcagcgtcccctacgcattgaccgagccgtgcgtcgccttgggcttctcccctgcagaggatcccgaaatcggccggcctacaggcacatccacactctggtaagtcc

SEQ ID NO: 166814 - DNA, 685 bp, Zea Mays
tgcgagccgaatcatactcaagcaagccgcgcgcgggccgccggggggagagagaaccggagaagacaagtgttttctccccggaattccgcgccagctcctcctcccctgtgcattttggcagcgcagatcacgctgctcccgtccatgatccatccaccctcttctccctttctcatcaggccttgactgttctcgactcccctaatcaccagctcggtctattctcctcttcctcgccgcgctccgtcctgtctccgacacacacacgccatctgctgccgcgtaaacaccgggaaataccaggccttcctttcctgctataagcaagtttcaactccccaagttcgctgcttttggtcaatcttatctgcgctcccaggtctcagcgtcgccggtccccttttacttcgatccctctatccgatcactgcaattctaagcttcaattacctcctttctgggaaaattcactctctgataaagcaagccgttgagcggctcacgcaccacaccaccagtagctagcttcagctaagatctccatcttcccccatgctacaagctcctccaggaccgtcagccatggcagagctatagcggttgctccagttggcccgctcaagccgcgaaattcgggaccccttcccggctcccgcgccatggacggcctccccgacgccga

SEQ ID NO: 166815 - DNA, 1003 bp, Zea Mays
gtcaggtcttccccttcgttggcgcatgtaactgaacccgagctcgccggggacagttgggctcggccgggatctttgctgcggattccgcgacttcctgggcgtccgtggataaatagcgtgcccgtggactcttctccccgcctacctagcacctcctccacttattgcacgaagccgcaaccacggcgtcagctccgcgctcccccgcctctgacctcacgatcgccacgaccacctctgtgccagcccatcgcttttcttcgaccagtgggcgcctcgtcggagctcgggtgagcttcggccagcaccaatttcgcgtattgaatcccgacactgtgcgaacttcttgccgcgccgccacgcatcgcctcactctgtggacaaagcttctgcccacgccaatcaaggtgaggatcgccaccgagtctttgtttccctctgtgcattgcgtagcgcctcgtgcgaaaacgaattgcgggcccttggatcgggaattgctcaccggaattatctcattgcggaggatccgcgcgacgccatggccgaccccgacctcgtcgccatgactcggtgagactcctcgctgtatgttcaacatcgtcccctctaggttttgcaccggtcaattttgggtttgggtcgtttgagcggcaaatcgcgtgggcggcggcaagccaccgccgtgggtgcgccagcgccgccgctcgggttgctggattggggctgaattggggcgggtgccgttggcctttggatcacgatcggtcggctaggaatagaacttggataacgcttcgggcggggtcatctcagaccgctgaccagataagggagggccaggattagatctagatgttggggtgcatctggccgtagatcaaggatcctgtggctctaggtgtgtaccggttcggctgagggtaattctgatcctgtgcgtcgatctcaaatcaggcggccaggacttaaccgtaccccttcgcggcgagcattttgctaa

SEQ ID NO: 166816 - DNA, 1500 bp, Zea Mays
atctagacaagaaatgcatctcaataattgagtagatctttcagtgaaacgattgtttaattccacaataacttgatcatacaaaacaataaagatctcgtttttgaaatgataaaagtaagtcactaattgacctccacgtccccttgagcgacctcggatagtaattgtatcatccatctttggtacaataatgttatgttggttacaaaaggtttttacctcatcaaacaattcctcctatccatatcacgtacttcactaatattccgcaatgtggctccaatcaatccaacagcaaggacaatattctgatcttttctttgcaaacattgtgacaaatcaatagtcttgcctaataacctcatcatgatatgcagaataagcacaaattcaaagctctccatttgtttcaacaaaccagaagccatatatttcttatccccactagagccatcatcagccacaatctctagtacctctagaatagcatcccacctgagaacaatacgacataaagttttatgatgtgaaccccatcgagtatcccgagaatcccacatgagtttctcatggtgttgttgagccaattgatcccttctcttacaagaagcattaacactattcacaatcaagttgcacgtttggaagagatcaaatacagaagcgcaacacttagcaactgaaacaaccactaattgcaattggtgtgcaaagcaatgtatgtaaaaagcatatggactctcatctaatattcttctttgcaacccatgaaattcacccctcatgttgatgccccatcataaccttgtcctcgtaatctatccattgacaacccatagaaagaaaacataccatccaaagcaatttttagagcggatgatgtagtgttgggtacctcttgtaacccaagaaatctctcaatcacttcgcctcgttcgttgacatacctaaagaaaagaatagatgcatggttaaaaatttggcattgacaaaaaatagcaaccattcaattatagactaacctcaaaacaatcgccatttgctccttgatagaagcatctcgagcctcatcaacaagaacagaaaaagtttctattcccaatatatgaaataatagctttggtggtctgctctgcacaagctctacaaatgtctttttggatattaggtgaagtcatctgattagtacgaagcaaatttgctacatttttatccttgtctttgtaccactgtagcaactctaaaaagtttcccttatttcttgaagtagaggattcatcatgtccacgaaaagcaagtgcttgcaataaaaggaatcttacaactcccaatataacaagcaaacgacctttatattcctcttccatctttttaccccctcgattcatcacatgagacacactttgcctctgatttttgtagtcctcataggaccttctagacttattgtgatctatgccattaccatgagctccaatggtttcacgtccatctttc

SEQ ID NO: 166817 - DNA, 357 bp, Zea Mays
gccattcctaacccatgcctgtgaaggatctagataactttgcctagtatccaggtggctacaaatggcactgacgacatttcaaatgaacgcaacattgtagatttccacagcaagctacagaatgagcatagattgctacctaggacaagacaacaatctaaataagaacggcactcccaaaatcctagtagcagcattcactcttgacacggttgagcatttcaaggcagcacagaaacatccatggaagcacaacatggactgggtccccgactcccccatggagactgaacagatcggagccacggcaagacgaacaacaatggcgaaagtctctaaggggcagcatggttt

SEQ ID NO: 166818 - DNA, 488 bp, Zea Mays
ttattttattattttgcttctccatggaagggagcagctgcccgcttcttttgttttcgggaagacaatgtcgccgccttgttccacgacactgcgtcggccgcccgcctcccggcgcctcacacgccctcaaccgtcgcatccgcgcctagccacccacgacgcgtcgcacgcccgctagccgttttctcctcgcaacatttctttcggtcataatatcgtcagttaccatgacatttcctctccacggtgtttcttccattaatggtgagtgatgatgttgttactcctcaaatgttcgctgagccccctcctcctcgctataaaaaaattggtcatggttcgctctcctccttccccgcgcattctccctcgtgcattctgctcgcttcgcgccctctgctccatttgctgccgccaccgacttggagcttcgcccgacgctatagtccgcaggcccgtcgttgtctgcagcgtgctcccctgcg

SEQ ID NO: 166819 - DNA, 524 bp, Zea Mays
atttattttaactagggtaggatggcgggttgattttagtgaatcatgaggactcttctgcaaaaagacgcggccgaaggggtatggatgcgtatcggccgttggatctttcagcaagggtgcagattaaattctctccttaagtgaaacgatgcacactcccgagtgtcgatcttgaaatctactgttcagattttgaagactcgcaatccaaccgaatccacatgatctacacctgacggtccccattcactcaagctaaccggtatcggcttttaatcgtggccgtaggctggaaaatccatggttggccccaattccgcacatgtggtgaccgagcgcggcagagcagaaatcccgcgacggcgccacccatggcacatcgccggagtggcccacccaagctaccctgatgccccaaatctaaaacgaataggctgtaaatacttcggggaagacggcgaacccatgtgcgtacctcactcccaccacagcgatgcagaaccatcaggccatagtggagg

SEQ ID NO: 166820 - DNA, 351 bp, Zea Mays
taatcagtccaaacgacatgaccaaaaactcatgtaatccatatctcgtagtgaatgttgtcttgggtacatcttctgctcgaatctttaactgatgatatcctgaccttagatctatcttcgagaatatcttagctcccttcatctgatcaaacaaatcttcaatccgaggtaatggttatttattcttaattgttacttcattcaaacttctataatcaacacacattcttctcgaaccatctttcttgctcacaaatagaactggggctccccaaggggatgaacttgggcgaatgaaacctttttctagtaattcctctatttgtttcttcagttcaactaaatctt

SEQ ID NO: 166821 - DNA, 801 bp, Zea Mays
caaagattaacttgtgttaccacagaaatttgggagaaaattaagctccaacttggtctgtcagacaagctttgcactgaatcaaagcgcactgttcaccgatcttcagaaaaatcgcgccggcgataagaacgccaccgcagcgtggatggtcgtcggcgaccacggtaaaaggcttttgcaacgtggcgttaaaacggggaggtggcatggcctggttaatcggcggccaccgtgccatcaccgtggtcctatcgaagctaggctcgccgcacctcccttgcgcgtcgactgatcggataagacctcgccgccggccgattactgccgcgcgccacgtgcttaagcactagtcctcatcatggtgactcatggattgcatgcccggcgatcaccggagccattgccacggtgaaagccactttccccgtaccgagctcgcctctcctctccggccgccagcacccctcagccaaattcttcaccgtcgctcgacgcgcctataaattgagtgcgccactagctccatagggtagtcaagaaccccgccaccaagaattaccctcagtggatccccaacgagcgcgaatcttgcaattcccccaaatcggttcaaacaagccgctagaacacttcgccgtggtcagcccgattcaggtccaatctcgccctcggtttccttgtttcaacatccttgcttgctcttgatgctcgctgacccgctaaatcgaactagaccacccccaatccgcgggaacgtgtgctcccatgctcggtttccgccgtgcacatggaccggcc

SEQ ID NO: 166822 - DNA, 1353 bp, Zea Mays
catgtttttgtcgttgaacaacaatttgatgccacccgttcgccacccttgttttggccactaagacaggtaaggctgtttttggcctcgcgtgagctacaacacatgttttcatggccgaacaaccaatttagtgtccaaccatagtacactagtgttaaaaccatagtacacatttttgtccccggaggcctgtaaggctatttttggcgtcccgcgacacatgttttcttcgtcgaacaacaatttcatgcctcccgcccgccaaacatgttttggctactggcatgggaaaggttgtttttagcatctattgagctacatcacacaaaacacttaaatcctaaaccccgagccccaaaccctaaaccatgaacccgtaaccgcgaacccttagactaaaacccgacccccaaaacacaaaatcacaaatcccaaactccaaaccctaaacattaaaccccaaacgctaaccctcaaatcgaaacccgaaatctcgaatcccaaaagcctaagctctaaacctcgagccccaaacgctaaggcctgaacattgaaccccaaaccctaatttgtgaaccctatacctcgaaccctaaatcaaagacccgaccaccaaaacacaaaactccaaaccccaaacttcaaaccctaaaacacaaccctaaaaagtaatgtaaggctgtttttggcctcgcgtgagctacaacacacgttttcatggccgaacaaccaatttagtgtccaaaccatagtacactagtgtccgaaccattgtacacgcatttggccccggaggccggtaaggctatttttggcctcccgcgacacatgttttcgtcgtcgaacaacgatttcatgcctcccgcccaaactctaaacacagagccccaaaccctaaagcccgaaccctgaaccctgaaccctaaattgtgaaccctataccccaaaccctaaaacgaaaacccgaacaccaaaacacaactccaaacccaaaaacacaacactaaacagtaaagtaaggctgtttttggcctcgcttgagctacaacacacgttttcatggccgaacaaccaatttagtgtccaaaccatagtacactagtgtcactgtaaaccctaaactccaaaccccaaactccaaaccctaaaacacaaccctaaaaagtaaagtaaggctgttttgggcctcgcgtgagctacaacacaagttttcatggccgaacaaccaatttagtgtccaaaccatagtacactagtgtccgaaccattgtacacatttttggccttggaggccggtaaggctatttttggcctcccgcgacacatgttttcatcgtcgaacaacaattt

SEQ ID NO: 166823 - DNA, 401 bp, Zea Mays
gtcgtgtgattgggtgtggagtggccgaaattgtttgtcagagcatttcacccgcctcaaatctgcgggcaaccatgggcggaggtttacgatacacgatcaccagttaggagtatcccatctgctttgccatatgtcgaacaacgtgtagcagctatcggagcgggtgttagataccggagggccaggtgaggtatcaccgacgatggcgccgtcgaggactgtgccgtcgtccggcgtcaggtgaggggcgatggcgtggtgatcatttgatccgattggagggccaggaattagaggggaacttaccggttcacactttgaatcatgtccattgatctgagatcatgcgaatgtgataaggtaccagttcgggatctttcgatagtcgttgatagccc

SEQ ID NO: 166824 - DNA, 834 bp, Zea Mays
aagctgagcaagatgccaggctccgacacgagaacctatgtctcccttggaacatgttgcctgacttcgctcaggcattgaatgcaccgagtgaagtcaaggagtcctagctcaaattgccaacgacttgtcgcgcaccccaaacgcggaaggctatcggtagatcctcacccaggcggcgaaccatcttcttcccctcgcccatccgccgaatgatctacgccatgccatcaacagttagcgagacgcgcggagcaataccaatgcttggggcgatcgttggcatgaggaggagatgaggccactagaggagtacaaccgagatcatggtgcactgtgcgcacagtcttgccactagatctgagtcggcagaagcctccacgaatagcccaactccaggccggttagctcgagagagtcgacctgacgtgcgacgtcactcgcctcctcgagaccttcatcatgaccatcactgggaggaccggggaacgtacgcagtcttggcccttaccccccggctccaggcgattcaatggctgccaagcttcaaggtctccaacgtcgataagaaagaacccaagcaggacctgggcggatggctagccatctaaacgactatcgcctgggccactgaggcgtcggaggatgtcatgacagcgtacttgcccattgcccttcgctcgttcccgagggacttccaaaccatgaggaatcgcatcctcgacgtcgcgaaggttgccatgatcgaggacttctaccacgagtctaatgactctatcttcatccgagccatcctccataaggctcccgtcaccttgaaacaattgttctagg

SEQ ID NO: 166825 - DNA, 591 bp, Zea Mays
taactagaggagaagtggtgctgcgattgcggggttctagtcgtgttgattggaagccggatcgtctgtgtgacatctccaccaaattgatagttaccttcacctgacggaagatcgggcacccccgttcctatcaagtggtattcaaagactcaggtattaccgtcaggcttgccctagtttagtttaggtttttcatcctataactccagaaaattgccatacaaaaaaaatttccgctgtcctagaacccttgtttagcctttgcaattttgttttcagtttggctttgttcagttcgtgtccgtggtcgagtcgtgttgccggtttagggtgtatcttcatcgaagatcaactgccctcgctagccgctatcccatccaccattacctagatcacaagtcgatccacccattaatcgacttgccctcgctagccgccaccgcgccagccctagatagatttcagatacgccgctatcccatccaacattacctagatcacaagtcgatccaccccattaatcgctgtgattgcagatagggaatttttgccctaaccgccgctttctagtcgtgcatccaaaaatat

SEQ ID NO: 166826 - DNA, 609 bp, Zea Mays
tctcccttcttttctcgtttgccttcatataaaaccattcacttttcgaaccagtcagccacttagtacgatagctgaggaccaggaccttcgtatcctttcgacacacaaagttgtagtagccgaagttatcatgaagaccatctgctctggccttcgtttggtagtgcagctcgtgcacccggcagaaagcttcggcattgggactcataccctggcttcggagggcccatatatagacactaagtctaacgattgcaatgggtgtcagctgatgaaagtatatctcaaaatttttcaaaacttctccaatcatctcatgcagtgggaaatgaagtcctgccctgaagaagcttttaaaaactacgacttcgtcgtcttttggatctagaatcacctcttccctggcaaattgaacaagtttgctctcgacctctccaaagtagcccaatttcttcatcataaccatgtcgcgtgccgtcacagtagatttaccaaattcaatgtggctgggtttcgctggatcagaatagtgtaatcctcttcatcttcgttctcactccctccaactgcgatttgttcagcttcagcaatcgagctaccttcggc

SEQ ID NO: 166827 - DNA, 331 bp, Zea Mays
ggagctttgatatccctaacccactgccaattctcaaggtttgcgccacagttcttgaatataaggatctttttcccaccttggcttaacacctcaggggcaagtttcctgattgcagccccatttagccatctatcggtccagaacagagtgctggtgccgttcccaactatagagatcagagaatctgaaaacagattcttgacatgctgttgtataggaagcttcagtccctgccaaggcctgtttgggtccattttttccagccataaccattttgattgcaaagcccagctcatgaactgcagattagggattcccaaacctccaa

SEQ ID NO: 166828 - DNA, 619 bp, Zea Mays
ccgtgttaccacgttgcagttggtcgtgagagatagccgattaccagcccgagactttacttcgttgagcaccacgatagatgagttctggtgatttatctattcaccaccatgtgcacttccgtcccaaattcgcaaagcacgtggacaatctctataaattgagtgttcccctttcttcgtctctctcttacaaatccaacacaccactcctcactcccgatcatccaccatagctcgtgaattctggatttcccccaaattgaccagaacgccgtcgtgagacacctcgccgtggccagccattatcaggtccgttcatgtccctctgatccatgtttatacatcctctggtgctagtgaaactccaagtctcagccaattgaactctaccacgctgtagcttagggaacgccgcatcgtcgctcgggaacaccgtcgtggacatggttcatgtcgaccggccattccgggttgcctccgtccaaatttgcgcaagcaccatagtcctagtcgatcactgattcgttccaagtctttgaattgaatgcgactggctcgagtaaactagaacgggtacaccggcgatcttgctctgctttgacgcggacagatacga

SEQ ID NO: 166829 - DNA, 678 bp, Zea Mays
aatacaaagaactgcagggtgctatctaaaaattccagggcctcagtgtaaggttctttcaactgcttgggactgcgggttaattcgtggagatcccaggggttattttataactcggacgcggcgaaggggtacgggcgatctcgagccgcttgatcatgaaccaagggccgagattagatcgagaacaccactgaacgggtacgcgatcgtgaccccgataagcaatcaacggccggtacgaatcgatgcgcatataaaatcctgtccgtccgccagatcggacggcacacacgcaccaacgcaaacggtacagcctcagttaatctacaccgttcatccccaaaccgacgatggagagcacatcttcctccgcacagctcgccacagtggtgggagcagggcgccgccctgagagcacgacggcggatgcaattccgacggctccccgatttatactccaatcggaagattgctaggcaaagcacggacggaaccgaatctagggaaggtagccataccgggtatcgctcggagaaccatcatggagacgatgtcccactgctccgcgcggatgcggcaccgtcaacgagaaattgccgttcgcccaaggtctcccgagctttgaaccgacctcgactacaatccacgcatgctggtgacactactcgatcaccc

SEQ ID NO: 166830 - DNA, 534 bp, Zea Mays
tgcgagtcaatcgtaaataagctgagtatctttgtaatctctctttattgatgacacatttccactttacagaatacattgtcgccccagcagttttgaaatacagcctagggataaaacttcctgaggtgctctatgttccaggagttcccaacttctgtgtcatccatctgagtgagacgatatgatccgggccgagtgatttctgccactatgaaaggtccttcccataagggtgataacttgtgccgtccctctcccgttagaattcggcggaggacgagatctcctatcgaaaagaaccgttgccgcacagccttgtcgtgatagcgccttagagtctgctggtaccgtgctgattggatactgcattcagtcgctcttcctcaagtacatcaacgtcctccagtctggtggcctcggcttctgctatgctttcgaagatcaatcttggcgccccaaacttgagatcagcaggtagcactgcctccgatccatagaccatgaagaaaggagtgtttccatgcagggctc

SEQ ID NO: 166831 - DNA, 321 bp, Zea Mays
acagttctttgggtctgaacttattcaagaggccgaagaacaagtccgtataatttgggagaatttgagggtagcttaaaccaggcaaaagagctacgctgataatagaagaagaccactagagtttgaggaaggtgatcatgtgtacctcaaggtgtcaccacttcatggaatgaggagatttaaagttaagggcaaattgtcccctcgctttattggaccattcaaaatctttaggcgagttggggagatgccataccaacttgagctacctgataatctatctgatgtgcataatgtattccatgtgtctcaacttaa

SEQ ID NO: 166832 - DNA, 619 bp, Zea Mays
gcaatttctattcccttggtcttaggatgctcaagtccttggagccgtgtatactcctatatccttatatatgcttatcttcatacccctaatgtctatgtaagacatttcagttaacatgcccttaaccatacttgtttcttgacgatccatgagcaatcattttatttcgcaaatccttggtgatctcgttgttcccttataacatcccttggtaatgaatttttttaattcaaccatcctattggaaccttacatgtcttacccttgattgttttctccactttgccactttgcgagtcttgccttaactctatcctatgttatacttttcgttattatcatctttaccgttgactcctctatatcctacattgatgtttatctcatacctgccctttaaaatcgcccctcttccgtctcattctgagagttgtactttatctttccttcccttggtcgtatcctcttctttggcttgcgagtttgtaactccgtcctttgttgtgcttttgcttgttattgcctttacctttctcatctctcgatctttccttggtgattaccctatgcccgttatctaaattcttcgatctcccatctcagttcaagagtgggc

SEQ ID NO: 166833 - DNA, 294 bp, Zea Mays
ataatttcaaatggagtgcatggattaagcatcagaaaacatacgatttccacttgtgattgggaaaaggttcctgcacttaaaataaggcatatatcctttagggcgttcatgcgctagacagctttgccgaccagccgcccacagaggccgaatggccacctcttgaaatagtagcaaccagccatgagccatgtaacagggcaccgagaaggcgagaactccccttctagtcacatgtcatacgtacagggcttaaaagcgtaacgattccataccgtaccttcgggtagg

SEQ ID NO: 166834 - DNA, 509 bp, Zea Mays
gtccgaaacctatccagagtgcacaaactactagtctgtgttctctccatgacctagctagcacagagactagcacatttggacttggggagagaagagaaattctcatccattttatgtcaaatttcattatccatgagaggtaagccatcaagttttctattgtatcatcataggtccctgtgcttcaagcgcaatatcagtgcctctactgtacatatatagttgtacatttgagaggccattgtcatcccatacatgcagaatggagtattacatacatggaacatcactacaagtccatgtggatatttgatcatgtcatatgttaaatgcatgctgaaatacttggaaatggatgcaagctgtgtttgtggagaaagatatttgaaatgccatcacagacatcatgagagtattgtagataaatgtggatataaacaagttatgcaaatcattgttcctctcatttacagtaaactttgttcagctagacctctctctttttc

SEQ ID NO: 166835 - DNA, 683 bp, Zea Mays
ggacggtccgcgcatccaagactttgcacttttcaaacaagcttttgaaagaatttttaactcatgaaatttgaagcgctgttagtcctcatgcaaatgcaaccactagatgctctatgaggcactaagttttacacagatcaaagtcattgacccctcttaatagtacggctatctagcctactaatccgatcaagtatcttctctaaactcctcaagaccggcaaaaacgaaacctatgttatacctttgccttcacttgatccacaaccaatgcgtatgaatctccaatatttcctgttctatatggtccaaccctgcattcttatttctccaagaatcgttagcccacaagaaagttgttattaattaccaaaacatcaccaaggggcctagatgattcacacctccacaggtccgatcacgccctccttgctcttgttttagcatccctgtgtttgtgatgcttctcgacccagccaattgagctaaagcacgtaggatcaccaggaacgcttcgggttgtccgttgatcgcgctgtcaccgtgggcagagagattaggtgctagaactttgaaattggttaaggggaaatggttattaggggtcgaattaggtgtcaaccactccaaagcaccaatcattgtgtatcttggccggtacaggctcgccagagccgctg

SEQ ID NO: 166836 - DNA, 557 bp, Zea Mays
attgggcttatccacggcggcgggtcactgagtgctatccgatcaacccgagcacgaatcgaaacggcggtggcacgaatcgcgacggaggtcgtcggcggtgaaatgcgctggcgttctgatcctgttcaggcactgtaccattgcgagctgccatcagtgcacctgacagtcaatgtttgggctccattttctctcagattcatatagcaactgatccgaggttctgcaacaaaattgtagaccaatgtaccatctccatctttgttatagcagccataggcaaattctttgaagatcatgatctgtagagctccaaagatggctcaaggccactggtaatccaacttcagatttcaaacagcctgaaagtccaactttaggcttaattatctctaaattcttcttaacaactaagcttacattcttaagcaaagttgttctcctatgattgggctataattttgatgtggtgacctagggcaaagatcctatattttaaaagttacaaggctccaaagttgagccaatatcactgaaatcaaacttagactatt

SEQ ID NO: 166837 - DNA, 555 bp, Zea Mays
aggttgatgcgaccttggatgtctcgaaacctgtcaatactcgcccgaggcgtcccagccgaaccagtcagcccgagccttctgctgatgagcagaagaagaaaagaagacgcctccggcgagtgtctagctttgatgaggatgccagcaccttagctcctgctgccgaagaaatgactgcaactggccttgctgacattgatcccaatgggtgtgctccgcctgctgctgaccccaatggggatgctgtttgtgctgttgctgtggaagatgaggaggaagagaatgaaactccattaactcggaaaaacagtcggcagttcgctgctagcggtggtagtagtggggttccttctcctgccttgtctgctcttattggtctgcaagaactgtccatggccaattttgatcaagctctagaggatatggtccctgagaacttgctgttggaatctgcagacgttgatgcaacagaaacttgtgcggccgtgccagatgatgggttgaggtcatcccgtgcctcgtcgaccttagagcacgatctcgagggccggg

SEQ ID NO: 166838 - DNA, 609 bp, Zea Mays
tgaaccggttgaggtgagtgagagaggaggctctaaacactgcggagagactaaggcgagaaaggttggagtgagggaatagaaggggagcgacatataaataggcagttgagctggtccacaggaccggttcaaccgccctccaagggccggttcaaccgcttctgaccagtgcggtcagagtgccagaaacggtcagagggaaaacgccaaaaatttaaattcctgacgcgactgcgcaataaaaagcagattcttcaaacagtaaaagctgaaaaagtaatgcataagattctgaaaaggtgttccaaaaagtgactgacgcgacccgacatggcattaattaaagctgcagagattccaagcgccacaaaagtcaaaaggtgctgcgcagatgtgaccggacgaccaaaaaaatgctgcacggctgagaaaaaactgttgcgcgacctgacactgcggcgcggctgaaaaagctgcagcgtgacctgacacggctgacacgggtgcagaaaaactgcgcggacagacctgcggctgactggtcagagccagaccggttcaaccgctcctcaataccggttcaatcggttttggtcaggatagtcc

SEQ ID NO: 166839 - DNA, 525 bp, Zea Mays
aactaattctccctgaccggccaaactctgctcacccacgcaagcccatcccttcccccacgctctaacccagtcagccacttccatgtgggccccgctggtccggtctccacctgcgcgtgcctggtgccacttccatgtgggtccagcaggtcagccgggtcttcttcaccaacaaacttccgccatccgtgctccgtggtcagctcaacagatctccaccggacgagattcgcacccctccgcgcggctcttccaaccagattctccttccccctcgagcataaatacccgcgctgggactcctccagtccatcgcctgggggtcgagatggagccgctaccgaggttctttgtcttcgccaccgattgaaggttgatgtgtggtcgagaatggcctttgggacgtgttcgtgctcctcatggcgtcgccgggctgtggggcccaccgcattcatccgagtttctcgccggtgttgtgtaccgtcgtggcaccacacttcgccgtggtcggggcggtccgcg

SEQ ID NO: 166840 - DNA, 1002 bp, Zea Mays
gtagtggttccttgcctccttcatttcgcgacgagctgaaattacatgtagaggaactgaggaaaggataaaatgctggcaaagtttagctcataacatattaggccatccaaaaaaattctcaagatcggaggagacattatatgctttaattctctgcatagattgatgcaaagccacgctaaggaggagaaactgaaaggtagaagatcgattgcaagggggcaagccatcgccgaatttcagtttggttttacccccgaaaagttttttgtaaacggatagtgaggcaaccatgtaatttgtattagagagcaggtgacaatatttagagaaataaatacataatatgttggacatagctagttaaatggttaggatgacatttcactattaaaaccaacaaccagtgccatcttttgcgtagatcaaacaaccacgtcagttttgtttaagcaaactgttaactactatgaatctacctatgaggttcccaactatatagttttgtgaatcggggacatgctcggttggacgaaccatcgtgctaacgttgatgccggaggaattcaccagagcttagctgacagaagagataaagtacaatcccagtcaagcatgcgagtcaactcatcagagaatattttgctgccagtgaggccatcttgagaagcgactggcacactgaggctactggcacctccggtacgacgctgctagtaaaacttatttcaccctcctataggaaagggaagagacaatattctttcgtataagcagacatagagccaacattctttcgcataaagttctgaaccgatggctatgaactattctaaaaattgacttgctaatttgcatatggatatatatttcattatgacgtgaaaacaatttgcaagtatgtatgatatgttgttttactaaacgacttgaccaatctatatttttggtacaaaacgaataaaaattagttatcatagttataattgatattaaacg

SEQ ID NO: 166841 - DNA, 596 bp, Zea Mays
gggaggcggtgaagcctcgggtcaatggcgacgggcttcggctacgcaagaagtgctttggtgagcgtggaccgaacgaaccagagagggaaaggatgaaccgaagggtgtcccgagctgagggtgatgcggcggagcttaccgagggaaagggcgcggcgcgggctcaacgacggtcgcggaacggtggaagtctttggtgtgcggcggcggagcttgtctagttgcgcgcgtagggcgagagagggggcaagagagctcggctgaaggcgcaaagtgagctggggggagtgggcgagcggggcacggggtctaatggggcaagggcgtgcggaggtggccagagaacgcgtagacatgggcgcgtccacggcgagggatgtggacgggaggttagggacaggctgatgggtggggtccgcaaggcagagagagatagtgagcgcgtgcgaaaaagaaacggcgccgacaggtcgaccccacagagcagcgagagggagagaggaagagaagaggtgcgcgggttagcgccaacaggcggggcccgcctgtcagggaccgagggcacaagggcgcggcgcgcgctcgtggggctg

SEQ ID NO: 166842 - DNA, 543 bp, Zea Mays
cacgtagccattttgcgctggagtcggtcattcaaccctctcatgaaacaaattttcttttttaagtctgtgtccacttgatcgatggcgtattgggagagatgattaaacttgttgagatactgcattacagaatcttcccccgtgcttcagacgtatgaactcctccagcttcatctgtagcaccccttctagaacataatgttccctaaatgcctgtttgaactccgcccacgtgacctgatgtcctgcaggctgaattgctaaaaaatttgcccaccaagtgctggtaggacccctcaactgttgagcggcgaataggggcttctgtgtttcagtgcattggatcagcctgaacttttgctccatcactcgcacccactcatctacttccagaggttcttcagccttaacaaagagtggtgggcgagtttcagagaactctaaatatgtggtgtctcatggtccttgaggttgatctctgcctccatgttgctgaaattgatttctcgccaattcacgtaggaaacgcgtgttgtcagc

SEQ ID NO: 166843 - DNA, 483 bp, Zea Mays
gaaagttcctccttggggtagaaccaaacaagttgcctcccgatgatccaggtaccacctgtgactatgctggatgacaaggcatcaatactctatcgacaagtggtgcctcccataggctcggtgtagcagtccgcaaagctcctcatggaagcggctcctagtggttgcatcccaagagatgggcaatgatccactcctcgtactcgtggtcctcggtatagttgttgggaagagggtcatccttgttgacatcgacatcatcatccccatctctagggtctcctccagcagtagcatccgatgtcagtgtaggggtgcctcctgctaggtggtcggggtggggtgctcagcagtagctagctcctcctactctactttgtcctactagagactctccaacttatgcgactatcctggcacgatcaatcgtagcaagtactcagcaaggcaggacagtaggaatgaaatggtggactcacg

SEQ ID NO: 166844 - DNA, 1159 bp, Zea Mays
ggtctcatccgatttctgtcgactgttttaaggtccctcgggttgccacgacgtacgtacgtgccctgtaaattcccaccaaaaatttcctcaaggtcagcccaattttggatacacctaggtctcatgttctcgagccattctcgtgccgaatccaccaaatatagggggcttctggattatgaagtcgtcacaatctgatcctcccgcctgacatgctagatggtagtctcctagctagaggttggggttcgattccccatagtacttcgcgatgttggcaggggctctataccgctgcggtacttgtacctagaggatgtgacggctaaaggcccgtggtcctcgtggtggggccctcagacttcagtcctcattggggttgaagtgacccccgcgacgttggttgtaccgatggttattgtccgattccttctgcaatccttcaccattccctatgtcaggtgcactccgtgctcttttgcctaaccctaggtgtcgacaggttaaggtctgtgctgtgtcttactcgggttcaggtagttgccccatcaaggtgtcatttcccgctggtgtagacacggtatactggtcagccccgactcctaatgtcgcgacacgaaactcttggcctgttgttgcacgacaaggttgaggaggcctcaaatttcttggtgggtccttcattcgcttggagtttccacctcagggagtttgtccatgagtgtcgcagcgaccgtgacgttctggcttgagcagggggaatcgtggtgggccgaccccgccaaagatcaggcagcggacgctagttgttacaatgcgcgcttgccaagcaccctagcgtagccaccttgttcgccatcgtggcaatccccgcctcccggctatggggcctcggctgccccaggagaggctttgtccctacggtggttttcgggaaggcatgtcgaatcaaggcaaggcggatgtcgtggcatacattgtgatgtcgttgagggtcctaccaaggctctccgcgagcgaggaggggtcccctaccatgttgaccatgaggtattcctgggctaggctgtggctagtcctgcttgatgaggagccaaatctgccttctgatcctgataggaggaggtcaaggaacgagtatcggatggggtctagc

SEQ ID NO: 166845 - DNA, 484 bp, Zea Mays
gtttgatgaagaaattcaacaggaagagaatgagatccagccagaagaaggagatcataactgttttatctctctttaagtgctaagtgtgactgctaaaagagaagaaaatggacaacaccacaatcttttccatacctgaggtatgatcgaagataagctatgtcgcatcattgttgataatggtagctgcaacaacattgctagtcaagaattggtggacagattggaattaaaaccaaggcgtcatcctagtccatataagatgtagtggcttactgattgtggagcgttgcgtgttagtcacgtggtgaatgttcctttttctgttgggaagtacaatgatcatgtggaatgtgatgtggtccctttgcaagcatgtcaattgctgctaggtcgaccttggttatatgatcgtgatgtccagatttttggaagaaccaacaagttgtctttcttgtacaaaggagagtgaatctctttg

SEQ ID NO: 166846 - DNA, 690 bp, Zea Mays
gccgagcactaaatacagagaaccaccggggcagaaccagaaatttttcccagactcagggagcgcctgggatggactgcgggtttattcctgaaatccccaggatctcttacgaaaatatgccagggcgaaagggtatcgtctaaatctggtcgttgggtcttgcgcggatggtgcggattagatcgaactgccagcgaagcggtacgcgttcctggccacaggatccaagatctactgtcacaggttcatcgcatcccaattccacctagtcgtccgaccgtgaaccgaccgccgagataaactccgcgaaggggtacgtgctcattctaatctccaccctcgctcacggatccgacggctgacataggctcccatccctattcccctcaacggctcaaagggtcactggagaagacgcaggccacggcggcgccatttgtcaacaaccgcgatcacccgctctatcgcagtaatctccaatctaccggttgcaacatgtaacactgaaccgaccaaaacggggaagccacaaatcaccgaggatggcgcgcacaggagtccggtccacagtgaacagagactcggcacggccattgaattccgacgagcgattccccggtagtacgcccttccagatgccgatagcacccacccgcgtgcacggggcacccttgcgatggccccgac

SEQ ID NO: 166847 - DNA, 698 bp, Zea Mays
gttgagggcaagaaaagtgaagaccttgcactagctgggttttacaaagccatataaaggagtaatgctgcgaagatagctgatgagatactagccgggttgtcgcatgactccaaagacatttaagattttgatgttgacagtggtgttgatgatgccgaagatcggccgtggagaccaagttatgttaacttcggaaaatctattgtgaagaatgggcatattgaggccatgaagggtaagtatttctatgatatatccatagtgccacctagggaaaaacattgttcctctccctgaaaaggacgaagtggttgccttccgaagttttttgaagattggattgtgttttcccttcacaagatgttggttgaggtcctaaaaagatttgagatataaacacaattcatcggctgcagattggcatgaccaatcccaacccctttacaggatgtcgatagacacatatcctagacaaccacagcctcctgcgcaaatcggggctaaacccactgatctgcgcacggccggattgtccgcacgtgagcgcggaccatccgggccagtcgaggccgaccctgtttttcgaaccaaattactgaaacccgtgcctgagccgctgcatcccgtgcaaaccctaaatgaccaacggatcatccgcgcacaacgccagacagtctgaatacatcaccggacgg

SEQ ID NO: 166848 - DNA, 641 bp, Zea Mays
aggttccgctttgagcgagaggatgttacacttcatgccagccagattcgccagctgtttggattcaacgagtcatcgactcatcttcacagcttgtgctacggtacctctgatcctcctcgtcgccctcacggtagagttgctccagctacagctcatgtcgcggccttgttccgaccacccttcttagatgggtcgcgatgttctccagcagatttcactacagcagccaagtacttatatcagctcatgagacggacgcttctgccgcggatgggttacagggaggctgctactcatattcagctctggttcctcggagccctgatctctcactcagagtttgatgtcgtggacttccttatttgtgagatcgagaacaccgtgttggatggacttcgtgcccggcgtcagctgccatatgctcactatctctgccatatcttcgcacagctaatccagccaccacaattttagggcacccttgaggcctctcgcctcctctttggctcttatcgtccagcccctgaggatctagtgccagcacctgatccagtgatagacactcaggcagagggtacgacctttcatcagttcgagactcagggcgcagcagttcccgatgacgatgatgatgatga

SEQ ID NO: 166849 - DNA, 962 bp, Zea Mays
cccccgaccagcagctaatcgcacccgaggacgagctgtacacgttccgcacggacccgcgaagctccccggccaccaccgaactccgcaggcgcagccgaggtcgacgaccccaatctgcccacgccgccgacccgcacacacccgattgactctccacttagttgcgtctgggttgcttggggtcgcggagatggaggacatgggaaccctgtaccccatcacggcttataggagtcgcccggtccgaaaaaagggcaacgaacttccacgcccgcggcgcatccccgccatgcgcggcatttctgttgggagggagaggtagtcttgctgacagcggtggcccaccagccggtgtcccgaacagagcacgagcaggagcgcccgcggatgactaacccagaacggccgggcccacaggtaagtggcagagggcatggcgctcactaggctgcgcggagctacggaattgggccgtgcgcagcgaaagaaaatgggccgaggagaagcatttgggcccagacgcagattgaggttgttttctttttctttttcttttctaactttctattttattttctttcctctctgaagtttttttcaaattttgaattcaaatgatgttgtgaacttattgttctcaattgaatacttaatttgaacataccagtatgagttttatttatacaccttactttgtattttatggtatttctttccttatttcccaatcaaatttcaatttaagttatttcttattttcaactcaccattatatgtatactaatattattgttaatttaaatgcacaagcaatccaaaactccagcatgatgcacaagttgttcatgtgtcttttgttatttattctcttttaggagtgggtgttctcatatgataatatgtggagacaaaatacacaagagtgttatccctgttttctatggtctacaactttgggt

SEQ ID NO: 166850 - DNA, 330 bp, Zea Mays
cacacgcctaatactacacaaccagccacctcttgcctttctcttctctgatgaagccttgtcagttgggcacaggcctgacatctgccccctctggagaagttgcttgtccccaagcaagagcgtcgggaaagcgttgcttgaccacataaaagtcctcccaggtagctgaatcttcaggaagaccactccactgtaccaaaacttggggcactgcccgatgacccttcttcaccaatcgacgatccaacactgccacaggaagcaaattgcgagtagcaaaatccacagagcaaggcaagtcggaaaagacaggcgtatgatttggaa

SEQ ID NO: 166851 - DNA, 573 bp, Zea Mays
ggtctaggcacgcagtactaattcactagtcggtaggatccttaggtcaaaacaccgacacttggcgatgcagtctgcctcaaaatagccctcgacttgttcaactctataacagggcttaagatcaacttcaacgaaagtgtcgtcgttcccatgcacatgaatgaggaccacactcagcaatacactaccctccttgggtgtaggaaagaaagcttctcctagacctacctcaccttccccttctccccaccaaactgcgcctccatatattttcctccaccattgcaaaaactgataaatacttagcttggtggcaaatatcccttcttaacccatggcccgtctggtcctcatcaattctgtcttggataaccacctaaattatatcatgagcgctgtccaactcccgaaaggcgccatcaaggccattgaccattgtcgtcgtgttttcctttgggcgggccagaagttttcccatggctccaaatgccttgatccatgggaatttgtgctagggtgcaaggccgacagtggtcttggggagagagacctcgagttgttcaatacccg

SEQ ID NO: 166852 - DNA, 565 bp, Zea Mays
cgctcgtttcactgccatgccctgtcgacccgacgaggagcaaggttgtgccaccttcacgttgaggatgtaaagccaatttggtctcctgcgtaccttggcaagaaggcgacgagaggggtccatatcctcatgactccgtgctcgacctccacgtgcgaaccgttctcatccagttgtcccaggctgatgatagagttcctcaatgtggggatgtagtagactccggtgagcagcttgtgctcaccaaacgtggcgatgaagacgactgagccgacgcccttgatctctacgccagaggcgtccccaaacttgacagagcctcggacgctagagtcaagctcggtgaagaactcccgtcggccgatcatgtgatgagtggcgccggtgtcgaggcaccatccttcgatcatgtctttgctggagccgtcgccgaggaaagcgcgtggtttcgactcatcaaggtggaggagtgccgctgtggccggtgtcgctggagatagttcgatgcttgcgagtgctaggagcagagcttccgcctcctcctatgcgacgttggcctggc

SEQ ID NO: 166853 - DNA, 426 bp, Zea Mays
catgtgtggcccatcaccatcccttgtgacatgcgtgacctcgctgcttctaccttcaccgtgccgtcgcctgggccagacgcggcctcgtcgcccttgtctgcgctcagcgcagccccatcacctgtgcccctcacgacacgctatgctgatcccacccatgtctaccagcggcatgtgcggcttgcctcctcggtcccctctgctacaccagcccatgcctcggctccctctcgcgaggagccaccagtgcaccctcccattgctctccactagaaccccgggcatttccaccctatggttacctagcgggccgttggtgtcctccggtctgtcgaccgcttggtcctctcgatgtcatcttctccggcgctctcccttgagccgacctctatccgtagtgtgctcgccaaccccaactagcac

SEQ ID NO: 166854 - DNA, 998 bp, Zea Mays
ccataattggagccacatgtgataatggtcacaagttggggtactgggaaaccctatgtaaccttgggggtgttacacattccatagccaacattgtcaaggcctagatcttcatcatcatcgctggagtggtaagactcaaggcatcactctaagcctttgagcgccactaacgatgaactagcgggagttcctcttcctcttcctcatcctccttcatatcctccatggcataccttgctgacttatccacaccaccacactccacctcatcaaccaaatcagcatcgacaccttcatcgctaatggtcggttcagctcgagtagacaactattgcaaatccgatgtatgccgaagctttctcctcttctgcttggcctccaaggcatcaaccttgacatctagctaattaggtcgcttgcgcctagaacttgcaaggctatccaccttctccttgatggtgaccgattgcttaggggctccactctctaattcaagctctttagattcagaggactccccaactagcatgccaagaacgacttcaatctcagagtcattggtcggccattgtattaagatatgggtctatttatcctcattaggcaagcttcgatgagcagcaactatggcatcaacctcatccatagatagccacgcccgactgctagagccactacattctccatggctcagagggtttgacacaaactcaaaaaaaggactctgcaacaagaaagcaacactgtcattataaaccacctaataacttagcatctaatgattcagtgttaagtgatcaaaacttacagtagggggaagattccacactgaataagatcgaggagcaccatcattgacaatgacaccccatagcatcaactcagctcagctcaagacgtcttcctaggatccttaaccccggtatacagatatgtagggtgtactctatcctttagaggctgaatgtttttaaacacaaagtcgatcacaacag

SEQ ID NO: 166855 - DNA, 424 bp, Zea Mays
tccagctccggttacttccttctgccagtcgcaccctaacacacgattcttgctgtctaacttttctggaaacgtgggattctttccttttcccatgcacatatccatcatcgtgggcgcgatattcacagcgagttcgcgtgtgtatctgctacattataggatcgtgggcgtaacaacaatttatgcaagttcgacgtaggtcgtatgctatcgtaaacacggtttcgatccacttccataatacgcgggtgacacatcaccggcccacgttcagaatgatggcccacactctgttacgcaatatttattcaaaatttatacatgcataaaagcaccccactattcagggcgtccggctcggtccattccgatccggctcgtttacacaacctggatggggctcccccgcacctatcgaaag

SEQ ID NO: 166856 - DNA, 302 bp, Zea Mays
cagcgctgcgcatctagccttggcgatagagaactccttctcatagacctccgtgtactccccatggtgggcgccgtgcatctgctatatctcactggccttggcgatggataagaactgctcgggacacgacacatctgctgtatctgtgcctcgatgtcgtccaggatcaaaatactatactccaaaaattagaaatttccatgtggtccaggatcaaaatgttgattgtcaatgtcttgaagaccatttgctagcaacatcctctcaacaaatagaaatttctattttttggagtatag

SEQ ID NO: 166857 - DNA, 424 bp, Zea Mays
gataatccaagtcagcatcccgaccctcgagatcgcgctctaaggtcgacgaggcacgggatgacctcaacccagcatcaggcacagcagcgcaagcctccgttgcatcatcatccactggctctgttaacaagtcctctgggaccatatcctcaagagtttgatcaaagttggccagggacagttcttgcagaccaatgagggcaggcaaagcaggagaaggaactccactactttcaccgctggcgatgaactgccgactgtttttccgagttaaaggagcttcattttcttcctcctcatcttccacagtgacaacacaagcagcacccccattgggaccagcaacacaagcagcacccccattgggatcagcaacacaagcagcacccccattgggatcagcaacagatggagcacccac

SEQ ID NO: 166858 - DNA, 686 bp, Zea Mays
ggagaaatatgagtgtacaaatcaccaatatcagtaagtagttcatcaaaatcagcacaagtaatttcttctagagagctaggaacaatagcttgagtcatgtgcttctcagcaatacaatgaacttgtttcagtgctaaacaattcaggcccaattcgcattcaccatcctctgcttcatactcaaaagtttccaaattttcatcatgtatattggtgtcatgggttacatcctcctcctcactttgtgaatcatacgaaccatctgcaagtgctagaataacatgccgattggggcattcagcttgcttatgcccatgaccaccacgcttaaaacactcaatattacttgtctttttttggctgctgcagtagaggagttgtactgattagaactcatagctttgcctttcccatcagattgctttccagaagctgaaactgagcgaggggttgcacgagatggtgtagaagctgcatgagatgaaggcgtgtgtgccctcgagccttgctgttgtgaattgcgccatggagtagaactattttgtgctgaaaaagaaacatggcttttataagatccagcaagctgtcgttctgcccttttagcaaaatgaaccaattctgttagatttgtgtagttcgtcatgtccactttatcagcgatgggtttattaaggccaaccaag

SEQ ID NO: 166859 - DNA, 828 bp, Zea Mays
gacacctctatatcctacattgatgtttgtctcatacctgccctttaaaatcacccctcttccgtctcataccttcttcctcttggtcgtatcctcttacttggcttgtgagtttgtaacctcatcctttgttgtgcttttgttccttattgcctttacccttgtcatctctcaatcttgccttggcgattacgctatgttcgttatctaaaacctccaatctcccaccttagttcaagcgtggtctcttacttatctcaccagtggttatatcctatactttaccacttgcaagacttatcttaactctattcttggttgtacctagattcctggttttttatgcacatttacctctccctttatatccttgcctattatcacctttgacccttgacctctctccatatattaccatgatgtttacttatttttcttagcctcacttattccatttcaatccaagagtgttgttttccctatcccgctcttgttcgtttcctttccctttgtcgctttgcaatcttgtgtcaccttaacttcatcctttgttgagcttttgtttgatatcatccttacctttgtaatctgtagatcttgccttgatacttatcttaggtctgcttgttgaaatcccctcttttctatctcaattcgagagctatgttttacttatctcacccttggctatatcctcttctttaccgcgtgtaagccttgacatacctccattctttattgtacttataccactggctcttctgtgccttcgttttttcccttatgcccttgtctgttatcgcctttgacccttgtgatattgaggcc

SEQ ID NO: 166860 - DNA, 287 bp, Zea Mays
aacgaaacaggccagatggttccttgtcggagaacatcattgtagtggtgtcattcccggtgagggtggatccccacaaagaactcctccgacgagtatttgggcggagcgcaatcaagctcctgaggtgggaagagcacgagcaccattgggacgtcagtgcgatcccccaagccaaacgccgaggtcagaattccacacaatccgtggcatggccacgacgaacccaatctctcccctgtgttcatcgtgcacggcagtgcgaacaacgcccacgcccgcatggc

SEQ ID NO: 166861 - DNA, 628 bp, Zea Mays
gcggtgacttcggtgtggtcgaatgccgaagaccgtcgatgcggtctttttcgacatattgtgtcttagtttttgcggggaatttttgcgggtatatattacatggctccgcctcattaaaaaccacacccccgggaggaaaagagtacgggccgaaatgatactgtttggtgaattacaagggcgtgttagccctgaggatttaaacaaaaatttgcagagattatcgatattccaagaatgctctaggtcctcaccggatggcgtggttagcctgtatgcgctgggggatgccttcgtcttgacgatgaaaggaccctcccactttggctccagtttgccccgtgactctgtccgagttgtctggacgagtacgaggtccccttcatcgaattctcttgggacgacggcgtggtcgcgtcaggccttcgttttagcttggtatttgttgagagcctgcagtgcaaagacacggtctccgtccatgaggtctttggaggttggttcgtctacgtcggggatggctgaagcgcttgtccgtggtgacccatgtttgatttcctgtggggtcatggcctccgatccgtatagcaggcaaaagggagtgaatccagtcgcccggcattcg

SEQ ID NO: 166862 - DNA, 1292 bp, Zea Mays
catcaaggtagcttcggctgaaggctccttcgtgtcgtctatggagaagacggcttctgcctgggctacagctttaacatgttcatagccagtttgctccaaaactgcttcaacccctcgggcaccagcgaaggcacaaaaatccgcatgattgctaagtatttcctcaaaagcttcgacttcttcgccgatccattgagtgactccttcgagatcgcctcgaataaatttttgctccgatgagtatgcacccacctttgcaaaactatcttttagtttctttgcacagtccatggatacttcgtagcatttctctctagaaccccaaagttcttcaacattattttccagcctggagcttgtccattcacttatctcttgttttgcctttgcaagttcaaaattttcgctcatttcggcaagttttttccgaaggtcttcgacttcggcttggtgagctctggattgtgcattaagttttgcttcgttgctcttcagcttatctactaaggaaaacaatattttatctttttcaagcgcctcgttcttagtgtaataacttctgcctgaaggttcccaagggctatttggcagctttcgtcttctactttcttttgtacccttaaggccttgcttaggattaagccctacaaaaataaaggattagcacacaataataagaaaagatattaaaagtaatatgcttataaactaaaacatcctcaccttcagactgttataagcaaggttgtctacaaggtcatccttcgacatggcagataggccaagctctagcttagggaatcctatatttctgccatctcccagcaaacagatatttccttgttgtccggaaggcagtacaaaaaattgtctttgtcagtgccattaaataccaaggatccttttgggtactttaaatccctggcatattgcttagcttgaacaatatgttcttcggacaactgttttctcgaagcatgtcatatgatgaaatctagttctttagcaggtgcctcgaggataggagatttaaccgtctcggatgcgctttcttgttccaagatcaaagtagctcccgcaggatttgcttcagtagaagctggcggtccagcttcggtagtttcctttgtatttttctcacccatgcttggtacttctgaagagacaggagttagtacctttgttgattctatgacagtgtctagtacgctggccattcttctcctttttggagttactacaggcatttttgacatcttcggcagccccgtctcttgcgacaggcttag

SEQ ID NO: 166863 - DNA, 771 bp, Zea Mays
tagcagggcatagtggtcaccccgagttaaataagcgcgagcatgttgcaccgtcttaagtcgttgccgacttaagccgattgctccgttagcagggcatagtggtcaccccgagttaagtaagcgcgagcatgttgcaccgtcttaagtcgttgccgacttaagctgattgctccgttagcagggcatagtggtcaccccgagttaagtaagcgcgagcatgttgcactgtcttaagtcgttgccgacttaagccgattgctccgttagcagggcatagtggtcaccccgagttaagtaaacgcgagcatgttgcaccgtcttaagtcgttgccgacttaggccgattgctccgttagtagggcatagtggtcaccccgagttaagtaagaatgtaggtcgatcatgaacaaactgagtattcttgaagccttttttattgatgacatatttccaattttacagagtacattgtcgtcccgatagcttttgaaatacagctaaggataaaacttcctgaggtgttctatattccacgagttcccaatttatgtgtcgtccatctgagtgagacgatatgatcctggccgagtgacttctgttactatgaatggtccttcccataagggtgacaacttgtgtcgtccctcccccatttgaattcggcggaggacgagatctcccactgcaaaggatcatcgtcgcacggtcttgtcatgatagcgtctcagagtttgctggtattgtgctgattgaattactgtgttcagc

SEQ ID NO: 166864 - DNA, 902 bp, Zea Mays
cttctatttcttcgcacgaccaagtccacgacggcgctccgcacgggaagcttaactccggcgagctagaccggccggaggggaccaagaccggcgctagtcttcggtttaccccaaagtctaccccagagaggcatttcccctcattcaatttcagaattggagctctacaaccctctgcccacagtgacagcggaaaaacttaaaggagtcgagtgttccaagcgattcatggcggtataagccaattaaaggggtcggggagcatcacgggtacctgaggatactcaactgagggatcagaggtcgtgagttggcttgaaatgcactggccgcggtaaggctagttgacggtggcggaaacccggattggggagaaatcaaaattcgagctctcgaaggcatggttgctaacgattgttggtggctgggtgggtgatgatgttacacagctaggggagggctcaatttataggcggcttcgacggtggccgggaattttaacggcgacgtgcggcggtcggagataaggaagaatactggtgcagtgaacacgtgttcaccgccgtggcagtaactccggtggtcgacggggagtttagagggagtcacggcgatgcggtggcgcggttaggacactcggtggacaacggcgatggcacgacgacggtgagcaactttacccgcgggcggtgagccaggggaggagtaccgcggctgaccggggtggcttccagcttgacggcggcgaggatcttttaccccgagaggttatccacaagccgcgagcgcgaatccggacggcggcagcacgaatcgcggcgaaggtcgtcggcggggagctgagctggtgttctgatccgatcggctactgtaccatggcgagttcctttcagatgaac

SEQ ID NO: 166865 - DNA, 672 bp, Zea Mays
cgggggccttggtatccttccagtatgcaaagttatagcacctgaagttcttgtgcagaccatcggctctagcctttgtctgataatgaagttcgtgcacgcgatagaacccttccgcattggcactttttccttggctttgaagagcccatatgtaaacgctaagcctaacaatagcgttcgaggtcagctgatggagatatatctcaaatctcttcaaaacttcccctatcatatagtaaagagggaaccgaagccctgccctgaagaagctcttaaacacaacaacctcatcttccttcggctctggaactacttctcaagcaaagcgaatcagttcatcttcattttctccaaagttacctagcttcttcatcacaaccaagtcttactatggattttccaaattcaatatgaccaggtttggttgggcatataatgctatcgtcctcttcactttcgttgtcactcccgatttttgctacaacttgttcagcttcggctttggaggtaccttcggcagtagctttctcttgcataactagacctgatcgcctcatcacttctgatatgggcgctgtctcggttacttcagtctcatctccctcacgggacaccctggcagtggatcttactctagccattttagtgttgggaacactctaatcatcc

SEQ ID NO: 166866 - DNA, 668 bp, Zea Mays
gcggttcctatgtgcaagggcaagttacaaaacaaatgattcttccaagaagatgcacagaactagagagacaagatgtggttgtggagcttatatttatattaagcgcaacaatgaggggaagtatgaaattgcagcactaaatgagggacacaaccatgcatttgtgacacctagcaaacaccatttgcttcgatccaaccgttatgttagtgagaaggcgaagacaactcttttcaactgtcataaagcaagcattggaacatcacaagcatacaggctccttcaggtgggtgcgggagggtttgagtatgttggttgcacaaaaaaagacttgcaaaactactattgtgatttcagacacaaaataaaagatgcagatgcccagatgtttattgataatttctatgcactaaaggaattggaccccaattttttctttgattatgaagtgattgatggtcgattgtttcgagtgttttgggctgatacaactagcataaagaactacatgcatttcggtgatatattgtcttttgatactacttacaacacaaatcagtatgatatgaaatttgcacctttcactggggtcaaccatcatatgcgttcaattttctttggtgcttctttcttagctgatgagaagattgaaagttatatttggt

SEQ ID NO: 166867 - DNA, 1014 bp, Zea Mays
acaaggtcaccgtcaagagctcattgatgggctggaaaatattgtcaagtacgatcatcaccatctctgaaattcaaatggcaccccatacccgattgagagagttccttaatttgcaaaatatttgcagggaactcctacttgcattcgtggaacggtctaagcagagacccaagcaactgatcttctacaggttagtagtatcttccagttgcttttctgactgacatgcaatggtaattgactccctctttcaccgttagggatggcgtaagtgagagccaattcaaacaagtgctggagcaagaaatccatgagatagagaaggtagaaacaatttgagacatcaagtgttgttccctcagttagtataacatttatactttcttcaggcatggacagctctttacaatgagaagccaaagatcaccttcgtagtggtgcagaagaggcaccacacaaggctcttccccagcaatagccaatacgaggacaagagtgggaatattcgagctggttagggatgcaggcgcatttgctgttttttctattgcgttttttctacaatgcttttgctgaaacgtttatggaatttgcaggcaccgtagttgataataatatctgccacccaacagaatttgatttcttcctgtgcagccatgctggggccaaggtatgtgtgtagcatgtgttacaactaattcagaatctgaagattatagctgctcgtggaattgcagggaacaagccgtcctgcgcattaccatgtgctacgagatgacaacaagttcaccgcagatgctctgcagtctctaacatataacttgtgctacatgtaagcatgctcttcccttccctgccatcttgttttttcttgctcaactcacttgtccgatgttctttttcaggtattcatgctgcactcgctctgtgtcaatcggtatgtactttccagtgcaaaactgcagatttctgttcaatacccgtaacataagttcgttttgaattgacagc

SEQ ID NO: 166868 - DNA, 1628 bp, Zea Mays
cggggaagggaaagataagctagtagataactgtgttgtcgtgccctgtactttttagctgccaacgacatctttctcctctccctgcagtcccgaaggcataggcacgcaacgcagagtcaagcagcgggcgcaaacgtgagtggcggtcctgtagagggtggagcgggcgagcggcggcctacggagaagcgatacaacggggaactcacacagaagctttggccagcgtgagccaagtccatgggctagaacaagtatggcgtgtgccatagctatccgcgtccgtctgatcagggcgggtagttactcacgatatgcatgcatgtgattgaggtgattaggttagcatctccaaaaggctgttaatctgaccgctaatatgttttttaggaagggaaacataaaaactaaggtccaacagatatcgtaaatctgccccaaattttagcgacgctaatccttcgtgacgagctacgcatatcttcgcggccgtgatgcgcccccaatctccccttgcgtcttctcctgcgcgccatcaaactattctcgcgtgtttcccttttccacaagcctctcccccagtcggaggtcctatgtgcgatggtcgcggcttgaggttgcggcggtggcggcctaatgaatttgagatgcagccaccgaggtcagttggcccggtccggcaggggcaaggatgacgcgactacgagcagatgtatcatgtcccgtccatcggcgtccagcacacccgatggatcagcagcgacgagcagatgcatcctctcatggtctcatggaaggttaggtaccagaccgtcctcatctggcagcccttggtgacgagcattcagatccccttttgacagtcccgttcccttgcagtgacgacctgtcaacaacctttgaacacgcgaacaccagcaactcatttgtcaatggtatgaattttggattctttgttttgatgaaatgatatggataatttactaccttgcccgtctagcttgcacatcaggtctttttttcaataaccttgcagggtctataagtttgtacttaagttttgtccatttagaaattctcagtttgttaaaaattctcagatttaaatttctggtgtgctcagaatggctcataaatggtgtttgttttgtgtagaaaacatacatatctgcagtgttgcaaacgcagaagtgaggttgtctctgcaggtgcgaaggtcatgttgtcctcttgtcagccacatattgtgctagtgattttatattgtacaccgtcattgaaaaatgacccaccatttatttgccatggtcacacttatagctagctggtttgcttccggaagtaatgtggcttcttcatcgataaatgaacagaactgcaattattacattattttggctgaattaaagttaacaagtagcctagtacgtgatgaaacatatgctatctgttagctagtatcgatagatcatgcctgttcaactattctagcgcacaacataacatgaaaatcacgtacgtgaatatgggccaagcccttccttcaagtggactacttcatactctggaaatttattagttggcccaattttcatttaagtgttctattctatgaactgatggag

SEQ ID NO: 166869 - DNA, 457 bp, Zea Mays
taactcggctgcatcactttttgctgtcggccagtagaaaccagacctgaagaccttcccaaccagggtcctggatgctgcatgtatcccgcattgtccggcgtggatctcatctaacagtttcttcctagtagctgaaagaatgcacttcatgaggactcctgttgcgccccttctgtacagtgcatccccaatgagggtgtagtgggctgactgccttgcgatgcattctgctacagctttgtcatccggttcctcttcattctttatatatctgatgatgggctccctccagtcattagagtctaactctagctggctcaaaacgttgcactcttctgcttgatctgaggaaatgcttgggtgtggcacctcttggacgaaaactctaggtgaaacctgggtccgactggatcctagtttcgataacgcgtctgccaccgcgttgtgatctctt

SEQ ID NO: 166870 - DNA, 1272 bp, Zea Mays
gttcaacccctatagtcgaagtgttgctggtttatagctctacaaatttgctgcagagcctcagattagttaccatgtgaatttgagagaaaatgaggcccaaactttgtctgtcagacggactgaataccatttccccatggtacagttaccaaacggatcaggtcgccagcgcgactgtcctcgccgccgatgacttcctccgctgcgattcgtgccgtcgtcaccgtgatttgtgcccgagttgaactggtcgtgctcgtgccacgtcgccatggataagtccggccggtaaaacaaatccgaccaccgtactagctcgtcgcggtggaacccgataggctcgccggtgaccgccgcctcccggccgtgcgccgcgtggctctatctttacaccgcgtcaccgtgactccctaccactgtcttatcaacgccggtgaggttgccacggcgttagccacgaattcactgcgccacggttctctcttatctccggccgccgcgttgctcgaccaaattaagcgccgtcgtcgaagcctcctataaattgagcccccgggcagctgcgctaggtcataccgaagccatagcacccactctccccctcgattagcccccctagccggagaatcgccgttttcccccaaatcagctttctgccaccgcaaagaagacctcaccgtggccagctcggtttaggtgagctcaagtccctctgctgcttgttctagcattcttagatcctccttaagctcttcgacccccctaattgaattaggccgccacccatcgccgggaacacggctgtcttgccgtgtggttcacggtcgtcgtggtcagagcttattaattagtcgttgatgaaattagattaggggaaatgctcgggctaggtccaatttcgtgtcagttgctcggagaaccttgtcgttgccccaatcggccggtgcaggtgctcaccggagctctgccaagccgtgcgccatcggggacttgcccgtgcgaagaaatagaaaccgaaggggctttctgtaaaccgtcagcgacacatcagaatagtgaatgaacccgttcgcagttagacagaaacgcgaggtcccctgtgcaaagtagccagcgcgcgggcgcgccccgtttctctgaatggctgggccgtatgggctgcttctggcccagtactattcaaactttttcattttctttttcagagaaactttagaaatatgtagaaaactacagaaaattcataaaattgtgaaaccaattttccta

SEQ ID NO: 166871 - DNA, 648 bp, Zea Mays
tcgctatagctgtgagcaatgggcaaccatttcaaacaaagagcaaggctcagagagctccttcaatgctgatgctcctagcatcgagcatggaagcaatatgacaaggaagggtgaaaatggtgatgatgtgctggctgggcagaatgctatggtggttcacgatgctgagagcaaggaaaaccacactgtggaacaacctacacggaattcagagaccttctaagaagtaagtggacatgatgatatagaacgccacttgaacgcctctgataacaaaatggtttcttttgagaagagcaaagtagtcgctgccgttagtatgcaagatctcgagcagaaggaagtaggcggagccggaactgaacatgcaactgacaagaagggttatcttgtgagggtattatcttggtcctgtgatcttcgatcgtcacgactcgagagacttggctgatttccattatgcacggacttctctatagtcgaaaagctttagggccagtgagattgtctttgaaattgtatttgatttccatttgtcatgaactcgttaaacaaaaggcaattgagattgtatttgaaatattttgatgattataagcatttttttggttggccgaaagtagtctctactctctactcctataa

SEQ ID NO: 166872 - DNA, 687 bp, Zea Mays
tgttactgtgccaaaaataatttctcctaaagttaaatacaattttcccacacacgtggacttcatgaagaaaagaatgttagagatttagagtatatttagtaatttagatattgtgtatcgtagattgccatatgtgcaattggattaccttgtttcccaagtcttgtactctatataaaccacctaagggctcaatacaatacaatacaaccatccaattacactaattatattctcattcatgatatcatgagtctagatttagatcataaccctagctgccaccagcttccgcaactatgcgcccctagggagagattgaactctgtcgggggcaacaccacggtttcagcacccaatcccactatcatactaccattgtcatcgtcaagcaacaccagatcgtgatggatatcgcgtaggtggtgttgtccgttagttggacatcctccgtgtcgaccttctcgtcgtcaggtcgtgatggtgtcgcacctcacccactggcactgtcgcacgcttggccattccatgacccctccatgtctagcctcgcctcatccaccgacgttgtcttgtgacgggctgccctgaggaacccacccacgcgtgtttgctggagggccgagtagtgacctaatgtggctaggagtggttaggctctcatgcccatgtggctcacagcag

SEQ ID NO: 166873 - DNA, 2154 bp, Zea Mays
gtgagacccttgccaatggcgtcggttatcccctgaatggattcacaacgcaattccttttggtgatccgctatgaattgcaaccgagacgcctcgatcgtagaatatgcatcaaccgctagctggttgctcagcctgccgtagcaagtgaatgggttcggttcgttgagtctgtaatgggaacgatgtctaacaaattcaagcattgtaacatacttgcggcctgagacatcgcctcctcccacgtcagaatattttattccaaggtggtatccacgatcaccgtaagggaaaagaagcgggtactgtaaggccatgtaggatgggtgcaagcacgaaacatgtttgaggccaccctctctagcatgcacgagaacatcgtacttgaactgtgaaggtgagcaatcgcccactattatagcagcaacctcaccattggccggtaggttatattgtgcatcatgtcgtgtgttgcagcctaacaatcgtaacgtcaccttttggttgcctgcttcatctaaacgttctttagcaaagcgaaatgctgcgaccagactgttatgctcatctagcatgttaagcaataaacgggccacctctgggtctggacgatcatggacgtcagcctcattctcaaacatgcccaacctattttgtacctcgtgttcagtgtcatatatgtaaagctgtgcaaactgtggtcgcaatccatggctgggtagcagcgagccaatgcgatggtgtacgacaccattgattttgaaaacataaggtgctgtaccgttatttatcgatctatcaacgacggcacccagtgaggtaaacgcgaaaagggaattgtatgagcgaatttgcctaaggaaccttttggcacgattatcaccatcgaatcgcagcaggtcacttaagggaggcggcggacatttgtaaggctccaaaacaatcttacctcctctgcaacacaggttgtacacaagcctgcgctgcgtaattgtagaagcgcttttgacccgttcttgaaaccagaaaacagcgccacaatgtcggcactcgtctgatgggccaccatagtatgagcgatctttgtaggtctctacatgcaaagatgggtccaggatgcatggattacttgaggaatacgtagacaaaataatctaggcaggcggaacataagcacctttaagcaactcgacatacgatcgttgaagaggcggtgaggctgcatccgtgctaactataagcagcaagttggccataaaattcttagattttttgaacgcccatcagatatgaaagctaaagctgttttttgaaaaggtaggtggtagggaacagccattgctggcacctttttcagtagacgcaagcgtacaacgcatcttctgtctgcgatgttgtctgttagcagcggcaagcgacgcaggaaagtcgagtaaggaattgtcgcctgcaatcgacgtgcgcacacgtctcagtatgcgcatagagatgtagcagataaaggcagcagcaaaagccctagagccactaacctggtcgctttcgacgtaccggctatgagtggaatggaactgcataacgcgacgcatgtgccggcgccgaagtggatggccgatcaagtgtgttcatgtgtttgatagcagctgttcaaagacataacgaatgtttggttggctatgcgaaagggaaagagagagattggctttaattaaggccatattcaacccaaagaacgcataatatcagtatagactttgtgaaactgcaaaacgttgggtaacggggcctcgacgtcaacaccatatatggctaaccggtcactgccacatctccgcgaaaaactaacagggtcgtatggaagggaggatgccactgccacatctccgcgaaaaaggaggcagcaagcgcagcaataggaccaatgagaaagcagcaagcacgcaacaccatatatggctaactggtcactgcgcactgcgctatgcgaaccacatagaaacacaacaacagtactgctagctagatgtgcaaaacccatcagtaaggaaggctaacactttacaatgatcttcctcaatgggttttgggtatttattgtgttctgcctttgtaagtaaagctccaatttgggtgtgctatattaacaaattttat

SEQ ID NO: 166874 - DNA, 1282 bp, Zea Mays
cccaatttcagaatggtatgagtaattgggtaacccatgggcaatgataaaaacgagctggactatacatctctgcatataaaaatctctgcttggcagcattggcctgatgtcgtgcactttaccaccattatatatgcgcaaattctcctatgtgcttgaaagcacaatgcaaccaatgaatgttcttgtgagcgctagacctgatgtcattgtccttgttgatctgaagtcaactacttgctccaaacgataaatggtgtgcatgagccctaaagtattttgtttttatggctaacatattgttgcgcgtatcagtctaaatcctgatgattgactgtatatttggtgataataacagtaagtttgtagaattgtaaccacaaagcgacttgttgttgcgtgtcttgctggaagttgagactaatccttcacgttgaaggacaaatatgtagtattcatgccactacatcaatctaagtctaaagctcactgcataaaacccctatctgtaatgtgcgtaagatttcccaaataaatcaccacaatagcatacattggccacaaactagatgattgtggttggggattttatatgtatgcttttagaacatctcagcattagggggaggaatgcccatatagtgtaatgcctcaatattctattaaacgcacaaaagccaaactgaacccgtcgttcggaatgtactcctgtgtatatggagtttgccagaaatcgttgaggagtaaccatattggtttgaatgcttctacctgatgtagatgtggatatacccgggattaatatcatatccacatttgacttattggcatttgatctattctcggggacgcctgcgaatatgatccatcggccttagttaaagcatatgttctgattgcagattcacgtggtctgtaataactctcctccgatgaactcgccctgctggtgatttgcctcacgaagaagttcatcttgatgatgaaattcctagcaatgcgcgcaatatcattgtgctgggaatacggaacaatgaatcttttgttttgggaaatgacggagatcgttattaaatgtgggagacaaatgtgtcgacacctatcttgcctctatagattgcaatgggatccaaaacaaagtcctaggcatgagtgcttgaagctctcttatcgggtcattgataaatgcaatcgaggctgaaccaataatcgcaaaatgaaagtcgtgagcttgaagttcggacatttatgggcactattgaaataatgtgtggtgaat

SEQ ID NO: 166875 - DNA, 1579 bp, Zea Mays
acttttgcgcggagagtcttttgggaaagacttcgattttgcacacttgttgtgctattccggctgcacccttaggcgacttttgctcggagtgtcgcacgcgagggtagtaagcgctgcccctcgtggtgactttggtgtggtcgaatgccgaagaccgtcgatgcggtctttttcgacatattgtgtcttagtttttgcgggggatttttgcggttatattacatggctccgcctcattaaaaacatcaccccccaggaggaaaagagtgcgggccggaatgatattgtttggtgaattacaagggcatgttagccctgaggattcaaacaaaaaatttgtggagattatcgatattccaggaatgctctaggtcctcgccggatggcgtggttagcctgtacgcgctgggggacgccttcgtcttgacgatgaaaggaccctcccactttggctccagcttgccccgtgactctgtccgagttgttcggacgagtacgaggtcccctttgtcgaattctcttgggacgactgcgtggtcgcgccaggccttcgtttgagcttggtatttgttgagagcctgcagggcgaagacacggtctccgttgatgaggtctttggaggttggttcatctacatcggggacggctggagcgcttgtccgtggtgacccatgtttgatttcctgtggggtcatggcctccgatccgtatagcaggcgaaagggagtgaattcagtcgcccgacattcggtcgtgttcagcgcccagactgcttcaggtagcaggtcggcccatttacccttgtcgtcgagaagcattttcttggtggcagtgaaaatcttgtcgttggcgcgctccacaacgccgttggattgtgggtgatatactgaggcgaaggctagcttggtgccaatggagaagcaaaagtccctgaagtcctggctgtcaaactgtttgccattgtcgactgtgagctcagacgggactccaaatcggcagataatgttttgccagaaaaatttctgggcagtcttcgacgttattgtggatactgcccttgcctcgatccacttggtaaaatacttgacggcaacgaaggtgaacttgaggttcccttgagccgtgggtagtggcccgacaatgtctagcccccagcgttgaagtggcgatgtgtgggcgatcagctttgtcaattgcgaggggttgcccgaacggggagagaacttctggtaggcttcgcatgacctcatgactcgatttgcggtgcagattatagcgggctagtagaaaccttgatggatcaccttggcagcgagggccctaggccccgagtgagagccgcaagtgccgttgtggacttcgcgcaggatctggaggccttcggtctctgtgacacatttgagcatgagttgactgatccctttcttgtatagctggccctcaataagtgtgaagtcccgacttcggtgtttgaggcgcttggcctcgttgacatcacctggatggtaatatccttgcaagaacagggttattggggcccatcagtcttcggccatgatgaggttgacaatgcgat

SEQ ID NO: 166876 - DNA, 464 bp, Zea Mays
gccacttcatctttggagccgattgatgggtaccacaaattccttcatgtacttcggtcatggctaatatagcatcatctgggcccaagcacttaagcaggacgtcgttgactgttcggcagtagagctcatcactcatcaaaacatacttgaaagctgtacgccgaatgtttttatctgtcctgacattgggatttcgtaaataattaattatgggcgtcctccaatctcttgcatcggcttcattatcagccgaatcgattaggagaactttcctggtaaccccggacggtccggcgtcttcacgcggacggtccgcgacctggggatttggccttgcactggttatcagattttcagtattgtgaaatttccctcgttttacccgataacctgatgcatcttgtgccaaattgttagctctatgattctcaatcctagagatatgccgaatactaaattcg

SEQ ID NO: 166877 - DNA, 1254 bp, Zea Mays
ggcgcgcggagggagcagggcgaaggcgagggcgaagaggagcagggcgagggcgaagaggagcagggcgagctctggagtagccccgtcgtggatctggcggcctctccgcgcagagggcgagggcgtcggattggcggcgtggatctcccttccctcgttctgaaaggtatcttagggttctcgcagtgaaactcgcagtgaaatttcaacatccagtagcctgaagttgtcatccagtaaagtacttgacactcatcctgcgcagtgaaatttcaacatccagtaaagtatacactcgaaattttcatgggtatgagactagttggattacactcgcagtgaaattacttgacactcatctttaggggccttgttcttagggttctccctgttcttaagtatcaggtccaattatgtacattacttgcagcctgaagttgtttgttactgttgttgtagcctgaatcacatgtcgcgtgcgagtagttcgtcgaacagacgacatcaatggcctcagtatgggacagtgccacttatgccctgccccgagtgtgaacggccagagcctcttttgcggctcacatcgaggaaaactgagaatggcaactatggtcgtgagttcgtgaagtgcccatggaaggttgatccttattttgccatccctatcaactttagtttatttgggattatttatgctcaactttgtttgttttgattaggatttgcgaaaatgtgacttcttcatgtagctggatgattatatcaagatgatagaagcagaagggttggcgggcgctccaaatgaatacattgggcaccaacatgtggcaactgctaacgcgaaagcaattagtgacctgatcgctgaagttaagaaggtgaatcacaacttgagcgagatgaagaagattgttggagctttttgcgctactatgattttaatttcctcgcttttctttgtgatgaaatgtaattgcaagcatttaatttgaagtgtggcaggtttgtgtgttgtattgatgtgtgaacttttctagtgcatgctatgtagtgattggtgatctgtgttgtagtgatgtgtgaacaatatatgctagtctggcattttgtctggaatatttgagtctggcactgtctggaatatttgagttggcatgttgtctggaatatatgctagtgcatgctgtgtgaacaataccttcagcaagcccaaataaaaaaaatggaaaaaaaagaggacttcaagagtcg

SEQ ID NO: 166878 - DNA, 742 bp, Zea Mays
atactcagtagtacaactcgacttccttatttattttacataaggacattacttaaactatactactctaattctctttgtccttagccgctccactgccagcctcgggagaccgttcatctgcaaggttcatggaacgaggggctccaaaaaggtccaactccccatcaggtcctccattagctgttctagatggtctggctcccatttatgcaacttctggtggcacgttcggatgcagctggtcgtacaacacgtgtacctcttcatgcagggtgttacaatacgcttgcagattttccaaggatgcgcttagttctgctacccgggatagagccttggcctcacaatcctaggcgaaagagcgcaaatttatggcccagtcaatggccgtgttgcgttccgcaatttccagttgcaagcattgaactttcgctgacagtttagcaatgcgacgactatctcgcgcacgctccctactcccgtggcgtagctccaacatgagtcgcgccaccctggcctccagatctcctattgggtcgttgcttccgctgggtacaccatgaggtccggttgatgccggggtacaccatgagatccggttgctttgcgctgggtggtcttggttcgcgccatatctccataagagggaaaattttatttagtgtagtttaaacatgatgcatgcataacctaataatcatggaatcaacttttcgttgatcccttatttcctacgcat

SEQ ID NO: 166879 - DNA, 944 bp, Zea Mays
atcataagttatgattttttgatctttctattgaataaaaaagggtttggtttttaaattaaacagggaaaaccagtttgcactcaggtccctggttacttattttctctctctcatgcatatgccctaggcgcactattcaagtgagtgactgacagtgtgaaaacctcctatgcttatgaacaatctaacctgcgctccctgcttcaccggaatagtgacatgggcgaaaaacggagcgacggggcttatcgacggtggaagagctccggcgaggggggttggtaaggtcgaggaggttccggcgaacacgtcgatagtcggatggtggccagtggtggttggagtcactcggtccgcgagcatatgcagggatagtcggtgttgacttcgattcccgatcaacagcggcggttgtgttcaattccaccagtgaggaagcttctcaggagaacgagggtgtggctgacgcaaggaattcagtggagctgcactagtgggggctaaccacattcacttgcgctcgggtgcggtccgacgagcagtggcgctactctggcagggcgtagagacaaattgagctggccgaggaggttcactggggcttagggaagctcctggtggcggttgctcgatggttggaaggctgtgtcggtcgggccacggtggccgactcttggctggtaggcctggatgtggcatcctcgactgttgtgaactccgacgaagaacgactggcaatgtcgtggaggaagagaccgagggcacactagtatttataggcacgggcacacgtgacgctatgtctccatggtcgtggcgcaagcgtgggcacgcacgtgggttggcacgcgggcagtcggacagagcccgctcggcttctgtaaactagcgtcgaacacctgggatgttttcatctggccactctcccaggcgtattattg

SEQ ID NO: 166880 - DNA, 550 bp, Zea Mays
cccatgttggacgctgctgtttctaccactatgacaccaatccccatacaccaagttgtcacaattcgactgactaaatctatttttctcctatggcatgctcatctccttccatctccacgaagaaggttgccacatccatggtcactggtactggtgaagtttccaatgcggcatatgctagttggtatgatcaagatcaataactattgagtgtctttatctcgttgatgatcgaggaattccttcaaagaagttttcaattcaatgtcttccaaggatgtttgggactccctcctgaagaaattcacatcattcatgaaggtgcacaagaagcatatatgtggaccttcctacatcaaagaacatgatatgtttgctgtcgacttcttccacaagatcactgggctcaccactgagttcgttgtcgtcaacacccctttacgcgttgtagaggtcattgcctatctgctggcggggctcccaatcgattacgacccattcgttgcctacataacgatcaaggctgagctactcttcctcgacgaca

SEQ ID NO: 166881 - DNA, 575 bp, Zea Mays
ccggtgtcggcttaattgcttcccggagacactgcgcgccgtgaatccgcctaacttcgaggagagaagaattggccgcgcgactctcggtaataagtccttccatacttccatcttagtcgtagcttcgtgctgcaagtgtcggattcgtgttctaggcagaaattggggaataggctagtggtcgaagatggccccgccgtgggggaactgttctccggtgactggtgaaagggggaatgtgatcaggaatcgcatgccatcggattcctcgcagacgatggtgatttacgcatgcgtaccccttcaccggtatggccctgaagcgttgatctcggatcggacgtgggtgttgcgtaccgtctcatcacgctagtgatatgatcctggctgtagatttaggagcccgcggtcctggtcaaaacataccccttcggccaggtaaatttatctaagagaccctgcagttttaggtaatcaacccgcggtccagaatcaagcatactgagtcttggagcttttagcgcattaacccatgcgtttctgtttattatacgcgcggccaaggagattag

SEQ ID NO: 166882 - DNA, 732 bp, Zea Mays
atcgttttacccaactttctcgctacgcaccggaggaagttggtacagatgagaagcaccaagagcgattcttagaaggtttgatcggaccattgaactatcagttatagagccacaactttcgcaatttccagactctactcaacaaggcaataggcctagaaagcaagagaagggaattatctgaccacaagcagaaattccgaggacggtctagcagaaacacccgacaaaacaactctcaaggttctcagttttgctctggaaatcagagtggaaacaataattatcaagcgcaacgctctggatagcaagtacagagaaacaaccagaaccagcagaggaacagttcttagactggtcaaagatctagtggttatcaacaaaatcgtcaaggaaacgccgtgaacacacctaccagaaataacaatacaactactctcgtccaacctagtggaagtttcaagtgtggtgaacttgatcattatgccaacaattgccctaagcgcaacccacagacaccatagaggaacaacagtcaaagagttgatcagaatacacctgctcgtggaactgcacagaacaagactccgcagaaccagagtaagggaagagttaatcatgtgacagcagaaacagttcctgaggatatcgacgtggtgtatggtatgttccttattaactccatacctgcatcagttttatttgattctagagcatctcactctttag

SEQ ID NO: 166883 - DNA, 366 bp, Zea Mays
ctcgccttgggcccacctgtcatagactcaggggggtcttcttctacctccagccatcacgtgaacaacagagagccgcagaaaaaacgatggggctgcttgcgtggctggttcatctatggagggggccaagcagcgaggaggcggtatcatgggaggagagggtgctcctgcgctgaaccagaggggagggggaaagtggcgtggagaggaggaggagggctggtgctgccatttatagagcagagctctggacatgtcagactgcaccagcaggttgcaggtgatggcagagcgactttgggcgcccattttcgtcgttttccccttggaatcggatcaaggttactgtagaaaataccttcc

SEQ ID NO: 166884 - DNA, 503 bp, Zea Mays
cccacaaaagccagccaaagatatgacaatatcagagtttgccaacaggggagccaccatgagagcacaagtatcatcccacaaaagctagccaaagatatgacaccactatatcttgccaacagggaacacaccacgatagcacaaccttgacccataaaaggagcatatattgctctagatgtcaccaaaagattgatcaacctgccccatgcacatctaagaatagtagtgcttggccagccaggtccttagccacaacaccctatgagaatggttcatgttaacaaaagcaactccatgtgccttagggtcaagcagatgtccataggcaacaattagagcctcctcactgaaacctagcatgaacataattgtcttataaaggtcagggtggatatcatccacctcagtctctctgagtgcatctacagtattgttaacaattgtagtcacaccagatagaacagtaagatcgtcatcatttaaagttgacctcttcc

SEQ ID NO: 166885 - DNA, 666 bp, Zea Mays
gcaacggcacacgaaatattttacaaaatgtttgtgcacaacgattacatgacaatgaccaacatatatattcatcagcttcaatatatcacaaattatgtcaacaaccaatctctactatatagcattagtttgcacatgctttgttggaactctaaagttcgttacacaatcagaatagcataacctaaagtccaatccttatggtggctgatggtacaaagctacaaaagagaatcaaatgcaggtacaatctcaagaagaaagcaacccttgaagatgacatctagtctatctgtgcagtagctcagtagctcacaagataactgtggcatgatcctgagctggcctttagcatttgaagcagtgctcgttcaagaaatgagactgctgccagcctgagaacccacgttgcattataatacttttgctcagctacttcgctggttttactggtttggcgtttaagtgttttggttttaccagttctctgaaccatttgtgcccaggatgatggtactggtggccatgatgttgacccagggcatgcagaagatggggcgcgcgccatgaagagcatgagagcaggcctaggtctgccatgcacagcagctagaacacctccatcacttgagttaatgcccggtgatcatgcctgcgtaggcg

SEQ ID NO: 166886 - DNA, 750 bp, Zea Mays
gtagtagcttccttcatcatttcccattcatttgcaagaggccatactttgtaagcaatgtgctctttaactaaatctctcgtgccaatgtaggttcatatggtgttaaaggcatttggcatgcttgcacttcattcccaagtgtgattgatggccttctaatgctgaagcatgaccatatatgacgttgaatgacacccctcacgtcttccctctaattcaggtcattcttcacgtaaaaccattgtttcatccaagagcccggccacttcttttgaaatgtaggcacatgttaatttgcctcggagcggggcacgaagctgtaacggccgaagttgttatgatattgttcttttccggtcgccttcatttggtaagataactcgtgaatgttgcagaagcacttagcatccagctctagtccctgactcctcatggcccatataaaaacccccactttgataagtgcttcgggggtaagttgatgaaagaatatctcaaatgtcttcaaaacctcaaccaacatcttgtggagcggaaagcgaagaccagctttcatgaagctcttgaaaactactacctcattagcttcgggaagggtaacggtgctttctcctctagccctcactatggaaacatcatgaaaatatttgcctttcatcgtttcaatttgtccttgtttgacagttgattttccaaaaacaacatggctcggcctccacgaccgatctttgacatcttcattctcac

SEQ ID NO: 166887 - DNA, 556 bp, Zea Mays
gcttggagtggtttattgttgagaaccacggaagttctctccccccacggtcggggagacagccggatgttcgcactccaagttggaccgaatcccccactgatcaggaggtggctgaggcaggggctttgctagctgaagttggactgctgaaggagaggggcctgactgctgagactgtggttgctgattttgtctttaagaacattcaaccgttgaaggataggtcatgcccggcttatctgtaccgaggtctagctgactcgactcgggttaccaacagaagaattcccgctgcagatttggtgaaccgacttgaaatgattcttagaggcaaggtatcaaatgttggtgccccagtggcatactcggcctggaacctgcctccttccaaagccttcactcattttgtgtcgaatccacctgtcgctgatggcggtttgggccttagagtgcgaccctttgctgaagaagttaacactttggttgcctcggtcggggaaattcctgatgatgaacggcaggtccactttgaggtgcctttggatcctagcga

SEQ ID NO: 166888 - DNA, 652 bp, Zea Mays
ggtttattatgcaccgagaaaatcacatgccactaaaccatgtgatttaaacttaatgtgttttaaaatgaatgacataaataaatgtctaaggtgtcctacccaaaattaaaggtactacataggtaatcagtaatctagtccgaagaaagccataagctatctaggctggttttagatgtacaaattaaagatagatcattaatttgcgccaccgaatggtgatcatggagggcgacgaggtcaccacatctcaccctcgtcaacgacacacaaagggtaatgtaaggtcacgatctaccacaccaccatagacatactcgtcgtcgctcacacacaccaactaacagcagtggggcgatgttaatgcaagtgaacttgaaggcgacacgatggtggtacaacgtcgagctaagagaaagacaagaataccgtctaccaccacgattgtctagcgctcgccataatcctacgctttgtgacacccaacatgttggttggtcatcgatagaggagaacatcaataacacgggcgatggttaagcagatctgcatcgaggtctagccggtgagtgaggccaatacacaatagctccatcatgactttagcaccttgttatggaaggaggcagagaatacggaagatttcaca

SEQ ID NO: 166889 - DNA, 405 bp, Zea Mays
gctccagcttgcccctggactctgtccgaaccgttcggacgagtacgaggtccccttcgctaaattccctcaggatgactgcgtggtcgcgccatgcttttgtctgagcttggtatttgtttagggcctgtagagcgaagactcggtctccgtcaatgagatcctttgaagttgactcgtccacgtcggggacggctaacggaactgttcgcggggacccatgttttatttcttgtggggtcatggcctccgatccgtatagaaggcggaaaggagtaaacccggtcgccctgcactcagtcgtgtttagtgcccagaccgcctcgggtaacaaatcggtccatctgccctttttttcatcgaggagcatctttttgacagctgtgaagatttttccattggcgc

SEQ ID NO: 166890 - DNA, 975 bp, Zea Mays
gccaaggttcctttagtcgaattggagctagtttataggtgaataactttgttataatctggtcggtagcttgtcacatagaaatcaaagaaaaacacccctgaatctgcttcgtcagacagactgaaaaagatcctgatggtacagtgaacgaaaagatcttcaggtgtagtgaatgtgccatcggtgaactccgcgccatgatcctcgccggtgtcgcgattcgtgcgctctgagtgcagatattagccggtggtgaaaagatcttgactgcggatgaggtcgtgagctggccgccatacccacttgcctagcggccggtctagatgacttcgccgtaggtctgccgcttgccgcccggatgccacgtactgagaagcattaccacgtcgcagtaaactgccttaagtagcttgttcatctcctgagacactaccccagtgaaagccacgacagctcgcactagtgaacttcccctctctccggccgccagcacgccttcttcaaattggacacccaccgccgatagattctataaattgctaccccagtgagctccgctaggttattatgcacctagtgaaccagccctcgcctccaatcgttcaccatagctcctcaatttggaatttcccccaaatcgggttttctgcgccgccgagagtctctcactgtggccagccctcctcaggttggttcatgcttctctgttggatgttctagcatcccttaggtctcttgttgcttgtaggctcggttgattgaactaaactgtgctgaattgccaagaacatcatagtttctcctcagatcttgtcgtcgtcgtgggcagacgaactccgagtcggattcgtgcaattaatgaagggatagtgtcgctgagggtggaattaggtgtcagccaagttagggctctggtcgttgagtatctcggtcggtatgggttcgccggagggcatgctcaccggcgttccc

SEQ ID NO: 166891 - DNA, 934 bp, Zea Mays
tggatgtttgagtatggtgactacagttggtttatagatggatcatacgatgacaactttcatactagtcgatcagtaggttgccaagtgaatttaggagaaaatccagcttcaagttgctctatcaggtcaactgaagatgaatgccatggtacagtaactgaagatgatacccagttcattccccttcgccgctgatgaccgtcgcactgcgattcacgtcggtcgccgtgattcgtgcgctgtgacttgtggataacgatgaatgagtaaagatcatggcgcccggatcaacttgggtccggccacggctaggttccccgtaccacttgctcaccgaccgatcgggataaacctcgccgccgttggccgatcactgctgttcgccacgtgctaagcactttaccacgtcgcagtagctcggcttgcgatagttactcatcgccggtgaagtcgccacgacggaagacacgaatccactgtgcgagtaatctcccctctctccggccgccagtacttctctaccaaatggagcgccaccgccgttgcgttctataaattttagcctcctagagctccgctaggtaactgcgcgtccagtaaaccaactcttacctccaatcgttccccacaactccccaatttggaatttcccccaatttggtcaagaacaccgtgtgtttgggctcgtcgcggtcagcccgtcacaggtccgatcatgccctccttgctcttgttttagcatccttgtgtgatggtgatgcttctcgacccggtcaattaagttaagactccatagatcaccgggaacgcgctgggttggccgtagtgcttgcggtcaccgtgggcagggcgctgtagggctgtaatccagaaattgatttgggggaaacaattattaggtcttgaattcggtctcggtcaaagcaaggcg

SEQ ID NO: 166892 - DNA, 891 bp, Zea Mays
caaaatcaggaagttgcagtagtggtgcttgtgtgagcttcgacttgagggcattaaaagcttgttgttgtgatggtccccaacaaaacgacactccattctttgtcaactcgtggagaggtgctgcaatggtgctaaaatcccgcacaaatcgcctgtagaattttgcaagaccaagaaaacttcgaacctatgtgaccatggttggaagtggccaagtcatgatggcaacaatttttgcctcatccatctcaatgccctgcgatgtcacaacatatccaagaaaagacacacgatcggtgttgaaggtgcacttctcaaggttaccaaataaacgcgcatcacgcaaaacatcaaaaacaacacgtaaatgttcaatatgatcatcatgagacttactatagataagaatatcatcaaaatataccaccacaaatttaccaatgaaagcacgtaaaacctcgatcatcaatctcatgaaagcgctaggcgcattagttaacccaaaaggcatgaataaccactcatacagaccgaacttagttttaaatgttgttttccattaatcacctaaagacatacgaatctggtggtatccactatgcaagtcaattttagagaaaacaatagaaccacttaattcatcaagcatgtcatccaatctaggaataggatatctgtaccgaattgtgatgttattaatggctctacaataaacacacatgcgccaagtgccatctttcttaggaaccaaaagaacaggaacagaacaaggactaaggctctcacgagtgtacccgcggtccagaaggtcctagacctggcgctgaatctccttagtctcctcggggttggtccagtaggcagcacggctgggcaagctcgcccctg

SEQ ID NO: 166893 - DNA, 865 bp, Zea Mays
tgatgacccagaggtccacccctaacaccgacaagctctatacgacaaggaaaacggggcgggcataatggttgagaactcaccgacgctaatgacgagtcgagggccgtccccgacgcggtgcagatttgcgacggcgatgaggcccgacgagcaattacaggcaccagaatcgatcccgggagcgatactccgcacacacacgcaccacgcacgatgccgaacacccacgaccactcgaacggccaccaatcaccggcgtgggactaaggccacgacggcggatgtctccgacccactctggcggcgcccgagaggatgaagaagggggttgcagcgccacgggttttatatgcgccaccccaaagtccgagcaggaggaggaacgaccccgcgagatccccgtagaatccagcggcgcgcgcgaagtctccgggaagaagaaatgtctgtcgaggaggccccacatgtaagtgtgacagggtaaaagaatagggagagagagtggattgggccgagcagggggaaagggacagcggtagtgggctgtaggaggggtttcggcccaggttagtgggtgagtttctctttttattttcttttatattttgcatttctttctccatttcaaattttaccatttgaatatgaatttgttagtgagttttacacatagttcaagttcacaaaaataccagtataagaatatatatttatttatatatcattattactattttccctatagcacatattctttttctttttcttctcttttattttatatttccattttcaaattctagttttctagcttaagcttgtttcacaaatttgaatacaaagtgcaacaatacaataactt

SEQ ID NO: 166894 - DNA, 754 bp, Zea Mays
cgagcaggccggcgtgggcaagcaggtcggcgcgggcgggaaggccacggcgaggtgcaggcgggcgggctgctggtgaggacgacattgccggtgaggatgacttcgagctgctttgaattatggtttttaatttttgtgcaatctttgttgttgatgggtagtggcgggggtactcggttcgcgataccttcgctctgccgcagatctctaccaaaatcattctctggcacaaactaatcaatagccatggacatttgatgcaagttcgtttcagtagctataggtgctagatgcaagaaagaagatggacacctaattaaatcgttcgttacctggacgaggccctgttcttgtgcgctactagtaacatgaattgttgaaatcaatgaacaacccttggataaagtaaaccaataaagcatatgcccatgtgatcacgacgattaggcaacttgagcaagattaggaaacaaacgatttgactcttttgtcagtgcttctattcccaaatagttagggggttgtggtgagggcgatgagattacgacattatgctgtaggctactgcttgctcgtgctatgtgccttaggcattagccacctacaggctactgcttgctcgcctgctgctggccttctggctcctacaattctccgctcgtcagcttgtagttttctagttttcaacccaaggcgtcagcctacaactcgccattttagcagttcttgacttcctaattctatatatcat

SEQ ID NO: 166895 - DNA, 540 bp, Zea Mays
ttcttttatatatgggattgcacattgacgaggtccatcactcctccacaatttgcacttgttaatcacattaattagtcccttcatcatgctgccactttaatcaacaaaatggaggtgaggctaaatgcgcttcaataggttagagggtcttcgtccccttatctgagtgtgttgatctaggttgtcagaggtctagtcggcgataccagtctctaattttggctgttgtctggatggttgcaaacaactatgcattttatttgcctttcacaacggtggagacagacagttgcatgatgcgctcacatactcctgtgcgggcccaaacgattgtctgttggcggcggcggcgctagcggctagtatgcccacacctcttgtgccgagctaataagctgacgccagattgctgccttgttgattagcatgtccgcctggaggctggagccttctacgacctagtggttctagcaacattgatccgagacaaggcaaaggaaaccaagaaaaaggtcctgctaccttcgattctttttt

SEQ ID NO: 166896 - DNA, 623 bp, Zea Mays
aaatttttcacaaagtaatgcatattaaataaacaaaaacaagagtgtgccattacatctacgaattatgtatcaaaaattgtcggcatcagagtcctcttcggcgacacgtgtattaagttgttcaacccattgttgtgtttcaagaactatttcttcaaacctttgacgttttgaatttgatgaaactggttcctccattaactctatgataagagaagctaactcatttagtcctgccccttcggatacaatactaccattgttgctatcgtctgcttgatcaccgacttcttggaagacaacatcatcatcatcgttggtgcttaaattgtagttttgatatcggtaagagtgaacctgtggattaactttatatgcaacccactaggttttaaaacttttatgaggataactcaaatagtacacctaatgcgcttgacgtgccaggatgatattgttgtactcattacctttgtacattgatgcgtgctttacctccaccatcccgaattcatcaactcgcgtgccaacatgtggatcaaaccatatacaatcaaacgtcgcatgtctcaaaggtttgtgacctccaaatgtatacttggttatgtcttgaacaatac

SEQ ID NO: 166897 - DNA, 459 bp, Zea Mays
gtactcatcacatctaatggccacatgttgttcacgaagttgcttcgcctcaatgcacccatcatgatgacgctgcatgtaacgtctgattcctgcccggaccacaccactgggtgtgaggcccaaacctagccaaaaatcggtgaattgaaaaagtgggtggttttgaggctcaatgaccgaaaatgtcacgagtagcgcaccgcatgcacatcccccatctcttttggacacgtgtcgtgctagtccgtggcctcgtcggcaacacgatctactccaccatgtccttgcatcgatgcatgttgcaagtgtcagtcagcatggctagtcacccggcttctctagtccctcgatcaagaaccagtgctcgtccttcgtgcttctcggcccatcggtatgaaccgcatgatcttcaccttcgccgttgaccatcgtccctgtgctgcactctaacaccca

SEQ ID NO: 166898 - DNA, 1076 bp, Zea Mays
gggtcatgaactcgtgatcatgtacgcttggagagtgacagaggtgaggtggttatgtcgtgggggtgtcgctagagtcgtcatcgtactgcccgacgatgccacgtaggacgagaagaagtcccacaaatcatcataggatgggtcagaccccatatggttcgcgagttgtcgccttatctcgtctccctcagagagtgaggtcatctcctagtcctcatgatgcatctgtggagaaagttggaggctgccgagggcctctatgatggcctcaagatcactgggtggaagggtttaggttgccggggcactgaccatctccccttcactgttgatgatgaagtcgaggctcccaaaactaatggtcattccgggggcccatgcgacgtcgtgtctggccatccaaagtctggagaagtcatcggaacgcaaggcccctacctggcgcgctaattgtcgatgtttcgaacctccactccaataaataaatttgtgagcacgttccatggtctggatggtgtgcttagtgggtgcaagatttatactggtttgggtagaacatccctacatctagtcttcagtggttcgtgctaccgacaccttattcgtcaatgctcgtagtagggcttacaagcggtcgagagagggaggagctcttaggtctcttgtgtgtgggtggacctaaagactatgggactggagtcctaactaagccttggacgtcgcggtggcttgcacgcttggcttcggcctccgggtcttctggtctcgtcaagtgtgtgtcttctgtttggtgttctccctttgttcctccattcgtattgtggtcgacctcctccttttaaaggccggggtgggggtcgccaggtcggccactggtaggttcctcgagaaggagctaccgtactgtggtaaaaccaagcattttacctgcattgttcgcatgcgtcttggtcgccgaatcgtctctgatcatgctcattatggagagcggcatgggcgacgaagagttctggcgccatcattgccatcctggtgccgtgccaacccctagctgtcatagcctgggtctcgac

SEQ ID NO: 166899 - DNA, 876 bp, Zea Mays
tagtaacagctattgacagagacgtaggagtgtgcaactgtcagccgaggacccaattatacagtggctaagctaaatagtttagcaggcttttcagctccaactaacaactatacttgggtagacagacccatgtccacacagcctgtctgtccatccgtcgttgaaagagtttatttatatcgaaagaaaggaaatacctcaaatagtccctccattgtgaaaaaaaaaatgtgccggaagaaagagtcgccctgctttcatggtgaaaaagttgatgtcgaaagaaaagaggaagaccgcgaatcgtgttacagtaagtgttaacagttgaaaattgggtcacaggaagtgttgatatttagattgggtctcgaccaattttaaaaagacccatgtttaattttggtcggatctaacaaaaaactctataaacgcctcacagacatggcgtgcggttatgtatagtcatgaactgctgaaacaaggcttgattgcgactagaacaagaatcctcataaattgcaacagaaaccgtagtgtaggggctagtggtcacgactcaccaagggagtgaggcggcatatgcaatgctccaaagtggagacacatcaaattattgcccagccacccagtcccaggaagtaaatcgattctggacaaagaaacaagacaatttagcattgatgttgccagctttcaagtcctgcaacaaggtaagtattgttgtaacgggtaaagagggttcaagaatcctatgacaaaaataccaaagtcatcagacgcctgtgcggctgtgccatgcatagatatctttgaaaacatgatgcatcatcgtcacaggctgatagcacatgtctcaaatctcaaatcaca

SEQ ID NO: 166900 - DNA, 592 bp, Zea Mays
atcacagcggttagggcaagtcgattaatggggtggatcgacttgtgatctgggtaatggtggatgggatagcggcgtatctgcaatctatctagggctggcgcggcggcggctagcgagggcaagtcgattaatgggtggatcgacttgtgatctgggtaatggtggatagtatagcgactagcgagggtagttgatctacgacgaagatacaccctaaaccagcaacacgactcaaccacggacacgaactgaacaaagcgaatctgaaaacgaaattgcaaaggctaaacaagggttctaggacaacggaattttttttgtatggcaattatctggagttataggatgaaaaacctaaactaaactagggtaagcttgacggtaatacctgagtatttgaataccacttgataggaacgggggtgcccgatctttcgtcaggtgtaggtaactatcgatttggtggagatgtcacacagacgatctggcttccaatcaacacgactagaaccccgcaatcgcaacaccacttctcctctggttatcaaccgtgcactgcgcgattgacctcgccacgagggctaattcc

SEQ ID NO: 166901 - DNA, 471 bp, Zea Mays
cgcacgtgtctatacgcaattaaacatacatatgaagagggtagctggtaaaatgttcgtctttttctaccttggttcggcgacggggatggatttatagcggcaataaggagggcaacagggaagtcgacgatgtggtcaagttgcagcgaacagcagcacgaagggcgtggtcgttgcgcggtgatgaaatccgttgaacgacgaatggcgatgacgtcgggtgagcagttacaacagtgtcaagcgacaacaaaccaggtggctgacttctcgacgcatgcagcaagagtttcggcgaggtactgcgcagcacggtgacaagcagaggtacgcagcaatggcgggcaacagcttacgcggcgcagagtcacaaacgaggagtcgacgacgacggtggtgctgctgcgcgcgtaggcagggttcttgacgaggtgctgcgtggatgacgaggctccagcgacggcgttc

SEQ ID NO: 166902 - DNA, 315 bp, Zea Mays
atgaggcagacacgatgtggtgccaggggtaagggtttgtgctctgtagtatttagatactctgctgtgtttcttccctccaagaaaaccatcgactgagttggttcaagaagcaagtttgttctgtagcctctgctactgccttgcctgccttgcgttgtttcactaacctcccgccttccctcatgtattcatctctcattcgctcccacagtgctgccttctcttctatgtcctatggtcttccttgcaacaagttggttaccagccattcctatgaatagttacggttgaaagatgattagttactccctc

SEQ ID NO: 166903 - DNA, 1368 bp, Zea Mays
gtgctaccaagtacccatgcccattagttatacacgagtaccatgcgtgctaccaagtacccatgcccattagttagttaccgaacgcccgaatccttcggcttgttccaaggattttcgtttgggatcgcgtgctttgtttcaaggaacagaacttgcattgttgctaacaacaactgcgttccactgccaggatgtccaacgtgaccgtgtgcgtgcggttccgaccgctgagccacaaggagaggaaggccaacggcgacaacgtctgcttcaagaggctggactcggagtcttttgttctcaaggtctggaccgtggactggaccctctccagtctactgcttcctttaggctttgctgttcctgttcttagataaatgcatacggcggatgttctgttcacgcgctgtttctggcgggattcattcttccgcagctggtgggattcactgctctgttcctgtattatacaccgcaactttctagatcgattatactgaattggttgacggttatacagttaccgccgttctgaacattaacctgcttaagcatcgccctgcacaatcatgatgtagggagtagggaatagggactgtgagcacgagcggagtcaggaactagtgaatggaggatcaaaaacacacgctctctgtttgttctgcgttagctgcattcatcatccttttccctgtggccttgttggtgtcccatttcaattcttctgcttctaatgtgttgttaaactcttggattaggatgagagggaagaggatgtcgtattcagtttcgacaaggtgttctatgaagatgcccaacagtctgacgtctacaacttccttgcagtccccattgtttcaggttacatttttcccccctatttccttctagatctgttcttcgagatagtcaaagctgtttcttatcactacactcttatcacgactaaattacctaatagccgtttttcatatcatggaaacagatgccatcaatggaataaatgggactataattacttacggtcaggtatctattgcttcatacacatacactctggaccctgattgaccagttgagacagttgtacacttgttttactgcacaggatgtatatgtgtatacactttgtttctctctctcaaagcaatggccatcgcattgcaagtttccagtttactgtagacagtcatagtttgcagtgcagctatgatcaatgtcttagcgatcaacttttaaccatactgatatttatttcgaatttgcttgtgtctagaccggggcaggaaagacgtacagcatggaggtaaattaaatatcctcgagctttaatttatgggataattattgatggtgtctcttcag

SEQ ID NO: 166904 - DNA, 687 bp, Zea Mays
ctggtatgaaacaaatgatcaaaacttggtgcagtcagtgtccagtctgtcagcaagctaaagttgaaagagtaaaataccccggacttctccaacctctgccaatacctgatggtgcttggaaaatgatcacaatgaactttattgagggtctaccaatgtctgatcactcaaattgcattatggtagtggttgacaaattttctaaatatagtcactttgttccgctttgtcacccttttacagcattgggagtggctcatcacttcatggacaacatttttaaacttcatggattcccttcaactataattactgatcgtgatcggattttcaccagtgcattgtggaaagaaatgttcaaaattgcaggtgtggaattacgcttcacaacagcatatcatccccaatctgacagtcaattgaaacgcgtcaatcaatgccttgaaacttaccttcgctgttttgctcaagcatgtcctactaagtggaagaaatggctttctctagctgagttttggtacaataccagctatcactcatctttgcaactcacaccttttgaagtcttgtatggctatcctcctagacacttgggagtggacttcagagcagcctgtgatgttccttctctgcaagtttggctcgacgaaaggaaagtagtagttcaattggtccagcagcagc

SEQ ID NO: 166905 - DNA, 998 bp, Zea Mays
atgtcaacaactctacaccacgcgaggatggcgccagcccgactacagagaacctgatgggaggaaagccgacgttggaagcggaagctgatggagctgtgaagctgagaaggagaagcagagttaagaagctgaactccaaatatattggtgccaactggctgtaacacaggggatggtcgtatctctggttggggtttcagtagcaagtataaaaggcgaactgctgccatttctgtaatttggcttttggcttttggttgttgaacaaacccgaacagacttgaacagcaaagaaataacacctgcccacatcgcaaatcccagatagcgagttcctccctgtgaacgtgctaacaggtggccacagccgagctgggagggcgcgcaactggggagaagaccaggggctcgacgaagggagctcggcacgggcaaaatccgagcagcgaccggacgccatggacgagcaggggatggagacgaccgtgggagagagagagctcggccatcatggaggtgggggctggacgaccatgggacacgctggaggaaacgccggccatggaagagggcaggagagagcgccggcagaggagggagatgagggagagagaggagcgcgcgtgagggagccgctcggctgggcgcgcgcagggagcagagttgagggcgagcggtgtccagcagcttggagaagatgggcgatgggagatcgatgccggcgaggtgaagtacagggcgccaaccgcatgagctgagagggaggcgtactcacagagcttgctggcgggggcgaagacgataatgacgaccaacgtgccagggaaaaggatgagaaccagagagcgtgggcggtggctgcctggctggtgataaggcttatacctacgatctttgttgtacacgggaacagaaatatccaacagaagaacagcgactagaatatgatcaaagaaagagcggtggaacgataagaccaaatcaataaaaagaac

SEQ ID NO: 166906 - DNA, 328 bp, Zea Mays
cattaacacatgttgctatattcctacaatacccatcaggaactgttattcctcgaagtactttacagaatgcttgcctctcacttttattcatagcatatcttgctggtgacaaataccacttgtcggaaggtttctcttaggggtgtaggtcctgtctaatgttcatgtcttgtaaatctagacgagatttgagattatcttttgtctttccatctaaattgaacagtgtaccatgtagattatcaaaaacattcttctcaatatgcatcacatcaagattgtatctaagaatattatcatcccaatatggcaatgtgaagatgct

SEQ ID NO: 166907 - DNA, 508 bp, Zea Mays
agggcagtatattctacaactaatttatgcccctttgaaattgtatatgggttcaaacctattgctccgatagatttgttaccccttcaattgcaggaaagaaccaatatggaagcttccaagcgtgctgcatttgtaaaaaagatacatgagaagaaaaaggaagcaattgagctcaaagcagtgcgcaaggctgcaagcatgaacaagcataggaagaaagtgttatttgaaccgggggacttggtttggattcacttgcgcaaggagcattttcctgatcagcgcaaatccaaattgatgccacaaggggatggtccatttcgtgttcttgccaagatcaatgataatgcatacaagatagatcttccaccaagctatggcgtgagcaacacgttcaatgttgctgacctcttaccatatacgagtaaatacacttcagagtcgaggatgactccttttcaaggggagaaggatgatatgaccatgccattaagcaacacgttac

SEQ ID NO: 166908 - DNA, 586 bp, Zea Mays
cacacaaaaaccatgttggagttccaagcatattgtactacaactcctatgatagaactttgagctcgtgtgtgcaccaccgttcccatcggcgtaggccatcgctacttcaacaagtgtgtggtcgagtccaacatgaacccctcatccccgtgcacacacatttggggaaagtctatgtcgaactgacccttatagtcttatgctttgtgctactaggcctccatcgcgtgctaccgtcttttgcacttgtctcacttgtcaactcttgctcttgccaccttgcacgcttagggcattgttgtgatatacctcatcaaaaatacgcttatggtcctccgaatccacatgtagagcgggctcgcatatgcataccatctttcttatctttcatttttacttcgtttaaaagagttaactcagaggtgctatagttagagtttttacttcacgtaaaagagttaacttagaggtactatatttaggtgacaaagattattagctagtagtgtcatcaatcacaaccatgtatggtccaacttaataaaagctaataatgggttagacccccttaagggctgatttg

SEQ ID NO: 166909 - DNA, 391 bp, Zea Mays
gcggcaggtatgttgaggaatgggtccgagttttctacgcgactgtatggatcgaccctgatcatcactggatgaggtttcgttttgagcgagaggatgtcactattcatgccagccagattcaccagctatttggatttcacgagtcgtcgactcgtcttcacagcttatgctatggcacctctgaccctcctcgtcgccctcacggcgatgtcgctccgggtacagctcacgtcgcggctctgttccgaccgcccttctcagatgggtcgcgacgctctccggcagatttcactacagcagcaaagttcctatttcagcttatgagacggacacttctgccacggatgggatacagggaggctaccacacatatccagctctggctccc

SEQ ID NO: 166910 - DNA, 602 bp, Zea Mays
ggcggacaagctgacaaactctccggtgaacaactttgatgaccaactcggatgaccaactctctgatgaccaactccactgaccaactccattgatcaactctgcgaggcagaccagctgaccaactctccgactaccaacttcgccgaccaactctatgaggcggaccgactgaccaactctccgatgatcaacttagatgaccaactctgatgaccaactctctccgatgactaactccgccgaccaactctgtgaggcgagccggctgagcaactctcttcgaccaactccaccgaccaactctatgaggtggacctgctaactaagtctccaatgaccaactctgatgaccaactctgatgactaacttcaatgacgagctcttcgccaatccgctctggccgaccaacacaccgtcgagcaacccagcgaggcaaagatctgagttcagcgctattgatccgcgtcagctacgatgggacacgtcaccatcaagccacgtctagacgtatgcacatcatgtcgaatgggtatcggggtctctaaagtgacccgtacattggaaggacgagacagcgtgccttatcgggtgtacgcc

SEQ ID NO: 166911 - DNA, 572 bp, Zea Mays
gtggtcgaatgccgaagatcgtcgatgcggtctttttcgacatgttgcatcttagtttttgcgggggatttttgcagatatattacatggctccgcctcgttaaaaacctcaccacccaggaggaaaagagtgcggggctaaataatactgtttggtgaattacaagggcgcgtaggccctgaggatttaaacaaaaaaattgcggagattgtcaatattccaggaatggtctaggtcttcgccggatggcgttgttagcttgtatgcgctgggggacgcctttgacttgacgatgaatggaccctcccactttggctccagcttgccccgtgactctgtccgagtggttcggacgagtatgaggtctccttcggtgaattctcttgggacgactatgtgtcgcaccaggccttcgtttgagcttggtatgtgttgagggcctgcagggcgaagacgcggtctccgtcgatgaggtctttggacgttggttcgtctacgtcaaggacagttgatgcacttgttcgaggtgacccgtgctttatttcctgcttggtcatggcctccgatccat

SEQ ID NO: 166912 - DNA, 731 bp, Zea Mays
aattgttgaacaggagtcatgaaggttctataatattacaacacttgaataattgtcgatatcaataatatatttggagatctaggataagtccccaaacatgtcacctgaggcatactctattagcatgtcatcagtggagaggtccatagttggcttgttgttgtccgacgattcttttggaaccgaagatgaaccaccaacttccattttagcatcgttgaagtgtgcttcacaatttggacccttttgtttcttctctcggatggattttaagtacagatcaaccagatgttgtggagtacgacaagtagcagcaaaatgcatattacatccacacttgtgacaaaattttccattatcacgggatatagttgcatttttgtgtgccctctagttagccttgtgcctgcggttcttagtgaaattgcgaccatggttatgactaccaggggagttctttggtggtccattgaacttccttttgttcacgtgcttattttggacattatgaacctcaggcaatgctgctgagcccgtagggcgcatgtgatggttcttcaagagaagttcagcatttttttcagcctgggttaatgaatgaataagtcgtgaatagacctggtgtctttccttgcggtattgattgcacaataccctatccgaaggatgcatagttgagagagttttctctatcttttcagcatccgtcggttccttttcgcaaaatc

SEQ ID NO: 166913 - DNA, 553 bp, Zea Mays
ccaaacaacattcttgttgtccccaacatcatccagaagcttctttcgatccgtcctttttccagtgacaaccgttgttctatggagttcgatccctaggggcttactacacaggatcttactactagtgctgtggttgctcgttgcgacaactccgtcccttatattccattcgattccccgacccaccttcttgctcccatgttgccacgccctacgccctcgcctctaatgcctctgcctccacctagcaccgtcgtctcggccaccccggccacgatgtcctctctagattctctgccacctcggcaatcccttgtcctcgcgacaacgctacctcgcttcgccatgcatgtcagcttgggcgcacactcgcttacccttttcttcttccttgtcctgcgctactcgccccttcgacctcattcattgtgacctttggacatctcccatcctcagcatctctggtatgaggtacaatctcgtcattttggatgacttctctaactactggtggaccttttgcctcctccataagtctgacacctttccc

SEQ ID NO: 166914 - DNA, 880 bp, Zea Mays
gtaaattttgacccaataattcatgggtcgggtattggccatgatttttgaaacaaaactcgacccaacccaaggccaaaaacctgatcccacccaaaaaaaactcggcctgacatgtcaaatagggaggcacgggcccccgacactacgagtacgggccatgctaaatggcccacgaaccgaccttgacccgacctgacgtttgaacatgcatagccacaccggactggtccggtcgccaaaccgtccaggacccaaaatagtgctctctggaagtctagtctggtgcatcaccagatcggtccgatgtccatttccagactgggcacatgaaggagtctctaggaacttggtacggtgcaccaccacgagactggtcgggtgaacccagagacccaactcttccttctatttggggttttcaaatttgttttgaccccaatatttttgtgggtctatgtgagatacccagcactagttttatgcaagtgcacactacacgagacaagtctaggtcaagttacttgtctaaaacctctctttatagtagaactaaaagaaaataaaggtcctattactagattaagtgggcaacaactttttcgacactaagaactagtacaccatggcctattttgtgtcctttcttagccatttcatcaatgttcatcctttggggtgttttctcctgttgaagatcaaattcctgcattgtgacttaacttaccatataatctgcaaaatatacgttaaccacaataatcttatgttgtcattaatcgctaaaatcaataagggtttggatgcttttagacggtccatacacgcacatgcatttttcacatgggagttgttgagagaagttttttaatcttactaa

SEQ ID NO: 166915 - DNA, 899 bp, Zea Mays
gggtcattcgcatcgctgttccacaagtgtaccattacatctggttgaggaaatgtgggagatggcagccgagggggaagagaaggtggatgcaactattggtagtgatcaggaagtggctgaagaaaatgtgcaggccatctcgattgatgcagtgagtggtggggaaggcaacaagaccattcgtttatgggcatcagtgcactgtcagcaggttttagtgctggtagattcgggcagctcggccagcttcttaggcagccacctaatgggagtcatgcctggtgttcaactgttggataagccagttcgagtgaaagttgctgatgggagattgttatggagcaaatatatggtacctgactgtaagtggctctgtggaggcattacattttcaacccagttcaagattcttccattgggaagctatgatattattttgggaatggattggctggaatgtcactgtccaatgtcggtccattgggcacagaaatggctggaatttgattatggtaacagaaaagtacatctgcaaggagtccaaccaagggtagaagtttgccacaccttgacaggattacaactggattctctcatcaaacatgaagctgttgaacaactgttggagctccaagcagtggacagtaacctgtctgatcccattcccttgcccatacaacagttgctagaacagtaccaacatctgttcaccaaaccaaactgtctaccacctaaaagagttgtggatcatgctatcgacctaataccaggggcatcatctttcagactgagaccgtatcggtatactcctcaacaaaaagacgaaattgagagacaaattcgcgagatgctggacaatggtattattcaacagagttcaagcccctttgcttccc

SEQ ID NO: 166916 - DNA, 790 bp, Zea Mays
aattgttgcccatagtgcctcggcaacatacttttcagtgtgcatcacgtcaatgttttgtgaaaggagcaggtcgtcataataggggagccgagtcaagccagacttatgtgtccacatatgctgctcaccatatcccacaaaaccaccttctgtattggccacgagcccatctatctgttgacgaattttggcaccagtcatcgttgcaggtgggtggtctgtcactacgacacctttcataaagttcttgatgtctaggcggaatggatggtcagcagggagaaattgtcgatgtttattgaaggacaaatatttgccaccctttttcaaccaaatgaacctgggagcttccttgcaaattgggcatgggaacttaacgtgaacacaccaggcacagaatagcccatacaccggtaagtcatgcatggagtactggtaccaaacatgcattctgaagtttgtcttcgtagctcggtcatacgtccatagcccttcctcccaggcacgtaccaattcatcgatcaaaggctccatgtacacgcccattttattccccgggtgtccgggaattatcaacgacacgaatatattctgcctttgaaagcacacaccagggggattgattgggataacaaacacgggccaacatgtgtacggggcagcgctcattccaaagggattgaacccatctgtggccaacgcaacacgtacattacgagcctcttcggctttctcatggtgaatggcatcaaagtgtttccatgcttcaccatcggatgcgtgcacc

SEQ ID NO: 166917 - DNA, 388 bp, Zea Mays
cacatacacaaatatcttgttgaggaggcaatctttatgaagcttggagcacttcttcaaggggagttgtatctttcagggggagttttgggagatgttttgctagttgtgttgagccttttccttgctctcgagggattagcattgctttcggttttacgacaacattttgctatgatcattggctagtggtgttgagccactttctacctcttcttaagaaagatgcagttttgctttgttgtgttgagccatttgccaatgtctttggggagcaaactttgctcactcccaatgactttggtctctccaatgacttgtttctttcgcaaagtttattggttctattttctaagccagtctgctcctcctttctattcacttctcg

SEQ ID NO: 166918 - DNA, 381 bp, Zea Mays
ggtagctcttctcagaccgaggcacgaaactgtaacaaccaaagttgttgtgatactgctcctttccggtagccttcatctcatacgacaactcatggatgttgcaaaagcatctcgcatctggtcctagtccttggctcctcatagcccatataaagatctccactttaatgatggcatcgggagtaagttggtgaaggtaaatttcaaaggttttagaacctcgaccaacaatttgtccagggggaaccaaagtcccgctttcatgaagcttctgtaaactaccacttcgtcagcttcaggaagaggaacattattctctcctccggtccttacgattgagatatcacaaaaatacctccccctcattgcatcgatctg

SEQ ID NO: 166919 - DNA, 613 bp, Zea Mays
cagatccacacgcccgtggtggtgcgagatgctacgatgagcccaatcgacgatggcgccgacccttccttccgccattcccggtaatccagcgttctccctgcaacgagcgagcagacggtgatcacgcgtcggtgccgaagacgcggtgctcgacaagacgaccagaccggcagcgctacttctggatccgtaggagagaagacccaggttggatcgatggccgagggggtattgcttggggtatttatgggcgaagaacgagttcgaggtgctttatcgcggcagctcgcgccgttgcaacggatcccgaagaagcgacgatggatacgggtagtgcgcgcggcatgcacggcggattctggtggaggggatggagctgacgggctagccctggctatcagtgacaccaggacaacgagcacaaggcacctggcgaccggccccacaatgtcagtgaagcgagcgtgcaagcgcaacgcccgcgcatgcgcgtgatgaagtctccggtagatggggcccgcggagcagcgctgagtggaagataggctagctcgggtgggctggctaggggaggaaaaccgagattgggccaaaaatagcgcattcagcc

SEQ ID NO: 166920 - DNA, 962 bp, Zea Mays
aaatcataaccaattgtgattagtcagatgacttgatgaccttgcattgcacattagctgcaactagacaactcaggcaatccagacaacaaggacaggggcaacaacactcacagtgaggccagaagtaaatcaggtgggcttggagggtattgagtgttgacgacgaggtgccacagtcaatcatgtgacaggggggctccacaagtcgttgatagccaggaaaccgagagacacgtccatggcagcagaggttgattcatgtggcagcaaggtgctgccagccattggtgaaaggatatgaagcaaagtattggacgatcatgagaaaggagcggttgcaccatgaatttggaagggggtcgacaagttgtatagtttcctggcgcaggatattttggccggtaatgggtttctactgggttgttatcagacaccacatggtttacggtctgctcaatccaggccaaaacaaatgtgattatgtcacattcttaactgatcatggagtagaacaaatgaaccaaacatctcctgaattcccatgaaatcaaaacacagtatcaaaaatcagttccctgcccaagtttttcataagagatatcagaacatatattgggtgattgagatgattaagtgcatgcttgtttgttaccggaatttgccatgccaaaagttttggcaaggagaagttgagaaaaaaaatgtttgccaaagatttggcaagccaaatgtgagatgttggcaagttttggtggcaaattttggccatgaacaaatcaggctctaaaaaactggcacatcaaggactaatgtagctcagaacatagctgatagttccaattttgtgtacttgtcaagcactaacgcaggacaataataggcatatgtttaataaacacatgtccacattaactggaaacttgtttgcactgcaatgtaaacagtactggatacattta

SEQ ID NO: 166921 - DNA, 398 bp, Zea Mays
gttttcggatggctgtgcagtacttgcccatagagtcattcgagcaatcccattctttatttatctgacttatgaccaccagtgaatttccgtataccatcaacctcttaatgctcagtgatatggcaatgttcaatccgtggatcaaagcttcatattctattgcattattggatgctaagaataacaactgaagagcatatttgagttgttcacctccaggtgcaatgaagaggatccctgcgcctgccccctgcagcttcagcgagccatcgaaatacatccgccatacttctgcagtctccgggttatctggtacttgttgctcggtccactctgatacgaagtcaactagtgcttgagtctttattgtagtacgaggccgaaactcaatgtcg

SEQ ID NO: 166922 - DNA, 484 bp, Zea Mays
gattatttctttcactctagataatgttgcaaacaatgacagtgctatacgtggtctgagggctagatttgcagctagaaaggggaatgctttcatttcaaaatacttccatgtctgttgttgtgcacacatcatcaatttggttgtcaatgatggagccgctgcattagcttctttgatagaaaacctaaggttaacagtcaagtaccttaagaagtctccatcttgtatgcataagtttgttgacatttgtagatctcctgcaattcaaattggagaagggatgaggcttgatgtctcaacgaggtggggttcaacatataagatgttgcgcactactatagcttacaaagaagctataaagacataggctgattcagatttgaattataagtggaaacctacattagaagaatgagatttgtttgctgcaattgagccaattctagcctctttaggaaccactacactgtcaacttcttcc

SEQ ID NO: 166923 - DNA, 535 bp, Zea Mays
ttcttattctgttgctaagtcgctatctttcgacaatttctatgcccttggtcttggtatgctcgtacccttggaatcttgcatactcttatttttatatgtgcttacctttatatctcaatatatgtttaagacatttcagttaacgtgcccttgaccacccttgtttcttaatgatccatgagcggtcattctactttgcatatccttggtgatctcgttgtctccttgtaactccactcggtaatgaatctttacttcaacccttctgttggaaccttacctatcttacccttgattgttttatccactttgtcgtttcgcgagtcttgccttaactatatactttgttatgcttttaattattatcatatgcacccttgacacctctatatcatacattaatgtttgtctcatacctgccctttaagatcgcccctctttcatctcataccttctttctcttggtcgtatcctcttctttggctcgcgagtttgtaacctcatcctttgttatgcttttgtttcttattgc

SEQ ID NO: 166924 - DNA, 288 bp, Zea Mays
tgatgaactcttcttgtttcatatggagcactccctctggaacataatgctctcggaatgctagcttgaattcctcccaggtgatctgatgtccagccggttgaattgctacaaaatttgcccaccaagtactggcaggccctctcagctgttgtgcagcaaacagtggcttatgcgtctccgtgcaacgaatcagtccaaacttctgttccatcacttttacccactcatcagcttctagaggttcttctgctttaatgaagagcgggggtcgagtcccaaagaatt

SEQ ID NO: 166925 - DNA, 359 bp, Zea Mays
gctatgcgtgtattgtagatgggaagtgatccttgattacaggatactccttccatcattgttgtatccatacttgtgtacatgccaccgccgaggggcttttccttgtgcttatataacacgcaaccgtggacctgagaaggcaccacgttacaccaattctcacatggtaatcagagcatctatcctagcggaaaactatggcgctcacatccttttccactgccgccgccctagccgcgttttctcccctcggcatgttcccagtcacggagaagctgaccaggaataatcaccccatgtggaagctccaagtcctctccggccttcgtggtgcggagatggaaaagttcatcgac

SEQ ID NO: 166926 - DNA, 720 bp, Zea Mays
gccgagcgcttccagcgggatcctgctgatgacgagtagccgaatctacagagagaaggcaagggtcccgctgggaagcggcttgtaatattttttggtcttgtaagatatttttgggaagtattaacctaacagtgacagaacttatctatatgatatttgcctttgttgtgtgcgtttgttaccaacttctccctggtacctggcccccctggtatgtaggctcaacatgtcgaggctggatgccagtatacttacgaaaaatttgtgaccaggcccccaggaggtagtatcgactgggacccggacctgcacacagccttggctaggaagctttagtagtgcgcccataggacccttactaactggtaccttttatcctttggttcacgcaacaggacctgcaggatttagaccgggaagccaatccgtgtgtccggaccccctggatcacagctccaaatactaagacatgcgtcgcagagtggtggagcgcgtaggcttagggtatgggaccaggctaagcgaccacacagctccgaaccaccctaggggacgggtgtccgttctctagaaccggacccccggttgacggacccacaggactatagttccgaatactagggtacccgtcacataatggtggagtgtgcaggcttaggatatgtaaccaagctaaacggctacacagctccggaccaccctagtaggcaagtaccc

SEQ ID NO: 166927 - DNA, 552 bp, Zea Mays
ggctggtcaatgacgcgaacgatgaggcaacgactcaataatgcgggaacctaggatgagacgacgcacgaggagtgcccaaggcgacagggccggccacagtggagcacgcaaggaggtgtggtcggtcgtagaagggaggagcgatcgaggcttgcgtgtgaggaggcatggccgaccacgatggctcgcacaaggaggtaggaaggcgagaggacgaagatggagaaagtagaagaaaatacaacagatgtcattcaagtgcatttttgtgtcattaaacattttctatatatattgtaatttcgtactggttcgagaacttgataattaacctcttgaatttagtatatttgtctcaaagagtacctaaaatcagcgagcgagcgggaaggctatagtgctgggtcatacaccataccaccactgatgaggctgactagctttgtgaacttctgatggacttatcgattgttgaaaaactgataccgactattttgataaactatgataatcagatggtgattatcatggtggatagttctaagaaca

SEQ ID NO: 166928 - DNA, 608 bp, Zea Mays
ttactaaggaatttgtgtgctgggaaaaactttatctggcaccgcaaataacctcatggttgatctgggggatgttgttaggagttgatattgatgtttttgatataggtgccatcttggaaggtgatttctttataaagtttaatttacatgataaggtgtatggttttaaatgggctcttgtctcggtttatggacctgctcaggattgcttcaaacgagacttccgttcaaagttagttcatttgagtactactgagactttacgagttctcactggggagattttaatattttaagatctccatctgagaaaaataatgatagatttgatggtcttgacctgagagaaattgatatgtctgggcataggtacacttgggctaactctagggatattccgacatatgagaaattggatcggattttggtagctacagaatgggaggaaagataccctagagcttcagtgaatgccttgtctagaaacatatctgaccatactcctctactcctgtgcataggagttgtaactgttcatacaatgcctcctttcaagtttgaattaggatggtttctgcgggacgattttgtggtgataataaaat

SEQ ID NO: 166929 - DNA, 375 bp, Zea Mays
cttgatttgcctggcctgcctctgccgtggtcccggtccacgaggcatccacccatataaacccacacgccacagtccacgctctcatggttgccttccctgcacggcccctcccctgccccttccgctcccgcaacgggtgtgcctccgttccggccccgcccgaccttctctcacctctccagcgctcgcctcccgatcctcctgcagtcccacctccttcgccgccttctcatcgcttccaaaatcgcaaagccggatcgcggggacatggacccggacgacgagtccgcggcgcagcggaaagccgccgacttgcacctgccgcgcgtcacggagcctgcctccgcgcccgcacgcaccttctgcgccgcg

SEQ ID NO: 166930 - DNA, 789 bp, Zea Mays
cgaaggagttggtgtggtgtgcaccagcccagccctcgagtctacgtaggagttggccaaccccctaaatcggcgaaggagtcgacgaggcgagcagtagcctagcccccgagttgatgaagaagcgggtcggtaaggtaggcagcaacctagccccccgaattggcaaaggagttggcgaggcgagcagcaacttagcccccctcccaagtcagcgaaggagtcagcgagactcagcggtggtgtagcctttaagcagtcaacgagtcgcctaggcaacacgactgtggagctgcttctaagtcgatagagaagtaggtgaggcaggcagcaacccggtgccttaagtcgatgaaggagtcagcgaggcgagcaacatcttagcccccgagtcgatgaagaaacatgtcaacgtcgcgagcagcagtctagtcccctgagtcgacgaaggagtcattgaaggagtcggcgaggcgagtagcagctcagcccttgagtcggtgaaggagtcgacgagactcagcggtggcataacccttgagtagttgacatgttggcatggcgacgtggctacggagctgcctctaagtcgacgaagaagttggcgaggcaggcaccagcccagccccccaagtcagcgaaggagtcggtgaagtgggcaccggctgaaagccgcctagaggggggtggataggtgaaacctgaaaattataaagtttgaacacgaacttttcccgaggttagagttagaatgagtaataatgaatcaaagtgcggaatagagttctt

SEQ ID NO: 166931 - DNA, 590 bp, Zea Mays
atttttttagtcattaaataaggaaatgattaggaacacatggatatactatgtttagctattaggcagaagtagggggggttgcgctaataattattaggacaaagaaaaattccattatgaatggtggatcctgactcatcttggtgattccgttttgccctttgaagacttgagttggtgcttatcttcccttgacgtggttggtcttctttggccctcaatcctggagttgccatccgagttgaggacatatggctgaggacatatagctaggatagctagggtacatgaggtagttaggtttaaacataattttactttgcttttgggatatctggattaggtaacctatgatgtaggttaggttgttgtttacggacgagttggtattagacattaatttaggttaggttatgtttgaggaagcagtgtctaacccatatcaccagattaactaacctgttaataactcactttacattgaatcatattagattaggtggtgatctagattagattggtatgactagtttgactagatatgatctaattaatttgcattagatcatggttgttaaactaggtgg

SEQ ID NO: 166932 - DNA, 1306 bp, Zea Mays
tacaccgtgacaagtcttgttaagttacgctaataattatggcgcggcatcgtgattttgcggccctaaatgtgtggacacgaccaaaaaaatctaaaaaccggaatgaaatcaaacggatctatttctaaaataaaatttattacaacatttataataaaaaaacagtggtgaagctgtgtcacaacggccatgcatggtgaggctggacataacacgcacaaagacacggacagtttctggcgccgagctttgccgcatatatacgcagatacagccagcttacgctctatgcgtgaggtgtacatgcggcggatctaacaacagagaagacggtgggcttaagtccattcattttaaccagaggcattttttttatctttttacttgaagttctctctcctatgttaaaaattttattttaattaatacaacgtggtacccagaatcaactagtggaatataaaaatcatcgcttgctgatgtcatagagagacagatttctgttatccgccgctaccatatagctagctagctagctgtatattaggtctagctaggcggttgggtgctctcagcaattacttactagtcagacgaacttctttttagtatattaattgttgaaaggtttttattatgtactaattcctttcttattagttgtctgtgatattcttggtaattcacggacctgaacacccggtatagtagttgactgcgccacttcctatcatgcatttgtttgtctattctccctgcttttcttttgccttccttaacttgcttgctagctagctagctttctgatgttaacttcattgacaactcaaaccccgctttgggtacgtaggggtgcagtggtattttcttcgcccacttgtgttgtaagcagtgactttgcaaatttttcgtactagcagtaataaactacaactagttaatatagtcaacttgcttgccgctgtagcacaaccgtaccccgccccacatgggatctatatgttgttcatgtacaaactgagatgagaatatgagtatttgtaatttctatttctacgagttaattaggtttaataaaggctataaaacctaaaaaaattctactaaaaaataacatgccagtcctttaacatgggagatgggacagcagtatacccatgctgaattgaaggtggcaacaagctactagtaatactgtcctctctctctctatatatatctatggcgcaagagcctatacatacatattgtatgagaaaaaacggcgaccccatgataatccaaggcattactagagagtatt

SEQ ID NO: 166933 - DNA, 405 bp, Zea Mays
ttttatagcgccagggggcaaaagaaatctactccgagcgccagcaaccaaccccggaatccccggcggcgatccgagcttaccggagtcgcgcgcacacatgggaagagcgcttggagggttgggtccacaatccagagacaacgagccgatgagcagactgtccagcgggtccagttgtcggcgacggacagtgtgtgcgcggttgcgttcagctgacctgacggacccaccagtcggcgcgagggtgtaggtgggctgcactgagggaaatggaagatgggctggattctgagttggcggcccagtgcaagcgttttccctttttctttttatatcctattttgtctttccttttaaatgttcaaattcataaattttcaatcccattcaaattcaaacgcc

SEQ ID NO: 166934 - DNA, 561 bp, Zea Mays
cggggtcagtgccgccgtgaatcggagctccgctgtgggcaggggactgggcgcatcgttttagccatgtgattcgtagtagtcgtgtgtttatggaaaccgagtcgggtgcgtgaatccgatggggattcaccgtggggcgcgttgctggatttctccgtcgccttgggttcgcgccgccgtgttctaggggggacggatgttgaagaagagccgccatcagttgatcctcgaatgggcggccatgattagaaatagggtcgtggtagtgagaaccgtaggatctagatcctgtggacatcatggcgtaccgtttcataataggttaggtctaatccagcatgctggaatcagatcggaaggctaggaatcgttaataccccttcgccaggacatttttgttaagaagcccctgaaaaatatagaaaccaacctgccgtcctctgtgactgttccctgagtctaggaagctttaccccgtggcccctgtccttccttgtaaatgaggcgcggtccagagagttatttaaatagggaaattttattagaaatggaatttta

SEQ ID NO: 166935 - DNA, 735 bp, Zea Mays
tgcagccggatcaacacaggcgcgcgaatacggccaacaggccacatcatacaaattacagttacatacactcggcgagggcatcatatattacattggctcaaccttcgggatgatacccatctccttgtaattgaacaacattatcctcaattcctcaccctcaaaaagatttcacagatccccttcacctatgctcgccccaattgacgaggacaacaattcttgtttaccaatccggtccactcgaagacggtcacgctccatccccatacgacggcgcctaccacttcgcgaaaattcacccacactatgtttcgccaccacccttcgccgcctatacccagtactcgcactaggaagatccctggcaccctccacacgcggcgaagtctccgctgcagccacatccaacgcaacaaaataatccaagccttcatccgaggactcctccgtccaagaaaatgaactcccagattcaccatcagactcaaaacactcagatacagagccaaacaaattatcatcggcaggcactacggttgaggccgccacaaaatcagtattgtcagcagcggttgcttgcgcaggcccaaacgtcggaacctgcgcaacaaccgaggttcaatatcacagaaacaaaagtttacacttaaatccctaacccctattctgccacctgcgaaggccctaggtcttcggcagctggttcggccaccaccttcgaggcgtctg

SEQ ID NO: 166936 - DNA, 698 bp, Zea Mays
tcaacaagaggattcctactttggatttggtgagctgactagagatgatcttgagaggcaaagtgtcaaatgttggtgctcctgtcgcttattctgtttggaatctgcccccttccaagtccttttgcaattttgtgtccaatcctcctgccggtgatagtggtctgggtcttagagagtgaccctctcccgaagatattgaggtcctggttgcttcactcggtgatattcccaatgatgagaggcaagttcattatgagatgcctacgagtccaagtgatgcagagataagtgctatgctggatatgttggctggggattcttctgactcggcccctgctgaactaatgactgttgcaactatatcagagcttgaccaagtggtagacacctaaaaacctgaaggtactcgcccgaagcgtctttgccaggtcagctgtccgactgcacctgccgagggaaagaagaagaaaaagagacggcttcgacgattgtcatgcttggaccaggacgctggcccttctgctcttactgctgaagaagtaccggtagaaatctttactggagttgatcccaatgagtgcaatcctgctgatgctgatcccaatgggtgtgaccctgccaaagctaatcccaatgggtgtgaccctgccaaagctgatcccaatgggtgtgaccctgccaaagctgatcccaat

SEQ ID NO: 166937 - DNA, 761 bp, Zea Mays
tgaaattatattgatgatcaccctattgtctctatttcaggagcagcactgctggtgcaaattgttcctagagaccggagttagggcactaccaactaaaatttgagaacaaagcatagtaaaagagatcaaaaaaaacttcaatttaagttgtaagagcaacactggacatgcttcagataagaactcagatcagtcacacacagattcattgagatagatgatacaaattgattgtaacatactaataataagcagttgtcaaagtggacctaaatagattgattgaactgggttgggatgagaattgtacctacgacatcctggcggcgaggtgtgaggactcgttgtcctcctcgctcttcgacgtgcgcactcctcctctagccctggctatctagcgtccacacgtatgcctcctctctctttgggccgtgacaagcttctccttgatgggaactctttcggctccggcgtccgcatgcgctcagacaaaaaattgataatcagataagccgagagggaaactaggtgtagctgggcagtgtcgacgaagtgtcgcatgctcaccatttatcatcctcggatgcattgtcgtgttagtcaccgaaatatgtagtttttagaaaagcaaatgataaagctaaatataataaaatactaggtatgtacccgtgcgatgctacgaaacacaaattgatgagcctctaacagctcaggacattggcgacgggcaacgtgagtacaatgttgatgataaa

SEQ ID NO: 166938 - DNA, 810 bp, Zea Mays
aggctcatttcccctaaaccaatttcataaacgatgagctatcctgctctgtccacggtgatagtggttatcgcggacacctgaccacggtcccggtgattaacgaggttctagcttaattggacgggtcgacaatcatccagagcaagtaagaatgccgaaacaagaatgcagatggcgagaatggacctgatttgggctggccacggcgagcttgatttcgcggcgttcttcaatcgatttgggggaaatcccaaattggggagctgtggggaacgatcggagctacgagttggttcactggacgcacgattacctagcggaacatgctgaggcttcaatttataggatacttgagcagtggtgatcaattcggtcgagcagcgctggcgaccggaggagaaaaagagctcggtgtgtgaaacaggtggctttcaccgtggcagtcactccggtgatcaccggacatgtaccccatggttcaccatgatgagggccagcgcttaagcacgtggcgcgcaacggcgagagctcgacggcggtgaaagttatccgatcgaccgacgagctggggggggggggtacaacaagcttagccgcaatcgagctcgagttgatcctatgccaagatttttacctacccgtgcttatcttctgaccacggtgcacgaatcacggcgagcaatcaaccaccggcgacggcagggggaatgaaccacaatctgtttcagtttagggggtactgtaccatggaatacttcttcagtgtgcctgacagtcataatttagggccaaattcctctcagattt

SEQ ID NO: 166939 - DNA, 529 bp, Zea Mays
cgaggaataggatgacggtacctaatggtgatgttgttaatggctctacaatctacacacatgcgccaactaccatctttttttgggaccaaaatgacaggtacagaacaaggacttaggttctcacgtacataccacggtccaaaaggtcttggacctatcgctaaatctccttagctcttcggggtttgcccgatatgcagcacgattgggcaaacttgctctaggaatcaaatcaatttgatgctcaatcccgcaaatgggaggaagtccaggaggtatctcagtgggaaaaacatcgctgaattcctgcaaaaggttagtcacaggcgcaggcataatgctagcaatatcatcattggaaaataaagcgtctgtgcacactaaagcatagcagcaagtatcatcagcatgtattttagcaagatcagaatttgtaacaagcattacaggagctttcaaatgaatggcttgctgattttcagatttaacaggtggttcattatttgtatttgcagctctatccttg

SEQ ID NO: 166940 - DNA, 431 bp, Zea Mays
ctgagagttctccctctgagtcttgattcaccggtactgaaccttcactgtcttctactgttgtcgtagcttgaacaggcaattgatgatcaactataaaagtttcagtcaactgaaagcctgagttgtctatgaaattttcccagtcccatggtttactctcttcaaaaattacatttcggctaacaactagcctgttagtcataggatcaaatagtctataaccttttgagcctgactcataacctatgaaaaccattttgctagatctgtcagccagtttatttaaacctggaccaaccaacttcacatgggcaacacaaccaaaaattctcaaatgactgacactaggtttctttccatgccaggcttcgaaaggagtcttagagattagagcttggacttcacagcttccattttcagacttcaac

SEQ ID NO: 166941 - DNA, 717 bp, Zea Mays
ccttcatcatgatcacgatcttcatactcctcatcttcaaatcttactcgatgtccgtgtgcacgacaccttccacgcagattatcaaaatcagcgtggcgaccatcaccataacctctacggccatcaccgaagggatcgaattcatggccaaaaccagaattctcatctccggattcttcatggttaaatccttctggatcatgatgacgtagccttcgacctcctgtcatgggcagacgttcattcaacatccttcccatggcccccacgagtgagtcggccatttggtgcaattcagcccgagagacagggggctcttcgtctccatggtttccaccgtgaatacttgaattggatcctgccatgttagagggaagcaagagagagtagaatatgaaagtatttgtggaacactcgatctcacctcttacttacccgagctctttcctgatctctatgaccgtgatggtgccagtatgacagcttcgacagaggtgatagagcggtcgaaaggatcacaagtcgaacgtctcggttcaagtttttttagtggagctataggagtctgatcaaggtgggatatggtactgttaaccaagtgtgttgacgtgctaagagatatgaaattgttgctggaaagattctcaccaaatcaatgtaaactgaaattttcagcaacacactgcaacacaatcccctttcacaaaatttttt

SEQ ID NO: 166942 - DNA, 789 bp, Zea Mays
caggatttgaggaggtgctcgaccacgtactggaggaggtccgccacgcccaacgacgacaatgcaagcatcgaagctcccgtcgacaaacgaaccgaggccaaccatcacgcgctcgttaaagatccacacatgcgcatgatctctctctctccctaaccttctctctgccccgctcgactcaccactttccccgacgttcgtgtagaccggaggagaggaaaaaaaagggggtcgcggccttggatttatacccagggcggaaggagaaaatgtccgagcagggaagggcacatgcttcggtgatctcggtgatccgtttgccacaatcttcgaaccgagcggagccaggaaacgtccgccgagatctccgctgcatttgtttttctgctgcgttggcttcggggtgagcgtaagagggaaggtgtggattctgttatagggctatcgctgccatctcggccccgcatggaagtggcaggagcacaagagcgcagagtggctggtcgtggtgactgaggggagaagctagcgccaatggcccacctgtaagcgccataacaaaagaaaaggagaggagaaggagatgggctgcacggtgagggttaatgggctagccagttagaagcaacccaattagggttttgtttcctttattctttttcctgctttcttattccaaatttctatttctatttccaaatttaaacttggttttggatttctagtttaattaaatgcacaatcataaggaccagcatgagaggtcaatatatttatacatacaca

SEQ ID NO: 166943 - DNA, 531 bp, Zea Mays
gtgaggttccatggtggcggccgccctgcgcgctctcagctctgtaacgctacgctccgttgaggtaattgcttacccactcactcctcgcgattaccaggcacatgtccatgcttatatacctggagtcaggggggttcggtcccaggctagcaacggctgacgagagaaatccggccagcctactgagtccgcgcccaaggattcggggaaacaacccgagctagaggaacgcccagacgtgggtcccaccggtcatatggcacaacgagggaggttccgtgcggaggaaggtgggctatcaacggcgaggatctcgaccggatctcaacaacccagcgatttctccatcagccggtacacacgcgaggaagatgcattctgttgaagggataactgacgagacggtcccacatgaccgagactgcagggcgcgagacgggagcgaaacacagaggctggcattgcgggctcgaccggcagtgacgcacaaggctactgacatcgcggccccaggtgtcagcgcagtgg

SEQ ID NO: 166944 - DNA, 785 bp, Zea Mays
gcatgctccaagtgcttggaaacaacgtcagtattcattttataattcttgagttatagaaatcgtcgttcaattaagagggatccgcaataagttaagtaagtaatgcaatgagctcagttcaaattccttcaaaccctctaagagaatacttttctagatcatgaatgtccttggaaaaaccactcttactccccacaaaagttccaccttggttcacttctgttttcttaaaacttgctcttcagtttcaaaaaccggttcaaccggacctgaaaccggttcaaccggtttctgtactgatccttctgccacctctgtcctgctagtctgctagtcaaaagctgtcagaaaagtcgtgtgcagagtttttcgaaaactggttcaaccggatttgagctcggctcaaccgattttgagtccggtcgagtctccggctgagtaggtcagtgaaccaagaactccgtggtggaaaccggttcaaccagtttaagaactggttcaaccggttttggtccatttctcccaatggctgccagcttttgggggatcctttaaataccccccactctctctctatctcttcattcactcctgcccttccacgatatcttgactgaccaacctccaaacaaaggcatccatttcacctctcacacccgaaatcacatccccttcaatcgtttgaaggatccttggtgtgaggtgaagtcgatctaacacactgttgatttcatcttgattctcctattctcttcattcttgagctcattgcaaacttaacc

SEQ ID NO: 166945 - DNA, 374 bp, Zea Mays
gtcggtcccatgcgtatatgtatacgtgctactgctactacgtactcttcagtttagccattgccgcgcgtgcaggaaaagtttagcagtccatgaacgactcttgtctttgttcctgagctgacccgccgcacccaaagcatggcatggcatagcatagcatatcccgagcacgcacgtacaggtctgcgtcgtcggcattagtgcgctgcttccaatccaaccagtaaccatccattatgggcgcgctgtagtatgcctatgctctcgctgcctggtccaggctccagggtgtgtgtgtactgtgaggtggatcataatatctccaggaacaactttatttaatctcgcggggccagtttagccacggctcg

SEQ ID NO: 166946 - DNA, 683 bp, Zea Mays
cgctatcatgcagagaagagataacctgattgtgcaaggcagtattggaaccgagccaaatgcgacccttgtattttataagcccatcctgtaactggtaaggtccatcaggagtagcagtagctgccagttcagtgagtagtttcatagctttagggtcctgggtataaccggtcacaacatcagacaaccattgaggtgtgctcactggtatcgccgcaagagtaagatgatggggacgtctggacagagcgtctaccgcaccattgtctacgcctttcttgtatacaatctggtattgtagccccaaaagtttagtaaaaactttttgttgccacggggtcttcagacgttgttcagtgaggtgggacaagctccgttggtctgagtaaattacaaaaggtcgatgcggaagataggggcgccaatgatcgacggccaacagtatcgctaggtactccttttcataagcggataatcccatgttcttaatgctgagaggtttgcttatataggccaatgggtggtgatcttgaatgagcacaactccaatgccaccactagaggcatccgtctcaatggcgaaatgcttggagaagttgggtattgccaagacaagagccgtggataacgctgtcttcagcagagcaaacactatttgttgctcatctgtccaaacaaac

SEQ ID NO: 166947 - DNA, 572 bp, Zea Mays
gcggaacgcggggaggtcgccggagctgcgggcgagctcgagagagttaggcatggtacagaggaggcaacggtgaagatggctgtgcactagggtgggcttttatagctgcggcgtgggtgtgggcacggggcggccgagggcgcatgggggttcgcgtgcgggcgtgctctggacgcgcccctgagtgtcagcccacgccgaacacgtgggggtttacttctaccagggttcaacggccgatttggtcgacttagcgtgcagatcttagcaaaacccccgtgtacagtctcttctctgcaccaaatcctaccttttttatgtgagttccaagcaaagatatggtcagggtagagagatatgggggtgagaagttggccctgtccgagctgtccacaccgagacaaaagccatgacatgtcgtgtcaaatggcttagggttgggttcaaacttttccagcgtgttctaggggtctttgggcgccattttgtcaattgggccataaggttttgaggttgggaacaaggtgaacatgtttgatctttgaaagagggtcggttttgaacttgag

SEQ ID NO: 166948 - DNA, 762 bp, Zea Mays
cttaggaaatagatgggtagctaggtggctatttatataggccataaaggctactactactattaggaaggatgctatagcaagcacccgaaaaattagttaggtctgagaagacgactagaatgagcatgcatcatgattgccgcattataattgtctcttgtgcataaacatgcttctctacctttattccaataataataaattgtgaataatgtgatgtattgccaccttgtgaactataagaaatgccttaccccgtgttagatggttatgtcttgttatgttgtgttatgtgtttctcttgtctggctatctaggtggtagggtaattgttcaacccttgttgcaaaaaaaagtgttgcttgttttgcccataaaaagagacccccttcaccaaacaatctagtggttccctattgaaaccttaaaaaaatcatatgcttatgttattttttctagcccttgtgagttatcctacaaattacacctgcacaacttgtaaacccccataacttgaccgctagaccgacccaagtctccttgtgcacttgtggcaaaaaaaatcgtttggtgtctagttgcacaaaccctatcaaggccatgtttcttccatagatcctgtcccgaaacttcataacatttctgttgatcatcctagccgatcttgtttgcctacctctcctgcatggatctggtgatctctttccttgtgaatcatgttgtggctttatcatccgaatctctggatccttcattgat

SEQ ID NO: 166949 - DNA, 436 bp, Zea Mays
ggaagctgttgctgggtctagccaaggcggtcttgtttacctgatgtacaccttcaggtacagggatcaactcgatgagacgaacgatgactggctagatgccatcgaagcaacaagtgatgtattactgagtacatattcgagggatgaagatgatgctattaaaacaaccttcgggggtcgaggcaaaaagagactgaatagagtttttgatgttattgggtttgtatacccggattactgttacccttcgaagaagcaagggaataaaagaaagactgttgcttccgcaatttctgacacgtcgaagccaaaaaaagttaaggttttaacacaccgccctaagcacgttgaaacgaccgaagagccaaggcctattgaggggtcttctgtttctaagccaattcactcctcccctgccaaaactaggacaaag

SEQ ID NO: 166950 - DNA, 486 bp, Zea Mays
tgggatggcgggttgattacctaaaacataggggctcttttgcaagctgatgcgttcgaaggggtattgtagaatttgagccgcacgattaagatctcgtggtctggattagatctgagctctcgtaggcacgcgagccataagatcgataatgcacgacgaggattttattaacgcgtgatctgatctctgccctacgatcccgaattagcgacctagatttgatctcgcgaatggttacacattcctcaatcacagccacacgcagctgatccgacggcgaccgacccatcacctaccccagtcagagctgagcggcagcgtagctctagtctccgtggcccacgacgatgcgccattaccggggcaacagtcaatccccaccagcgcactatcccccatgcaaacaggtgcaacgctaccctaagatcccaacgaacgacataaagtagacgcacttgcgacaagggtgacacccaaaccgcc

SEQ ID NO: 166951 - DNA, 700 bp, Zea Mays
agaaatcaccgtttcataggggaaatgataacccctgcaatggcaatttgcatgtgattcttgagcagttgatggctacttgtgtatttgagtgtaggacaaaggaagagtatggaaaaatcaatggatgtgggcttttactttcccccggcaaaacgatgttggtttcatgagtttttggctttagaagcctgtgatgggacatgcgctaggtggcgcttatgaataagccaatgcaaaagccgtgccaaaatgtcacttaacatgatttaaccttagaagtcaaagaagccacactggaacccctctcatgaaaacctaccaaaaagagtcaaactataaatgttgaccacatttaagagaaccattaataccactgacttaaaatcatgtcttttgataaactgttcctcccttataatgggtaacataggataagatatatgaaattgtatatgaatgtaatttacacatagtattgatggttgaggcgccaccaattcattaacacatggtggatgacaagacaaataaaacagaaaccacacagagaggaacttatatgctgcaactacaatacaaagccaccagacaatagaaaagatcacataaaatatgcaagaccatcatcactcactaagattttcataccccacgccaatgtgtgtattgggcatttgagccccgcacaacccctccc

SEQ ID NO: 166952 - DNA, 523 bp, Zea Mays
cgaaggaaccacacatgcaaatctctgcttattgctactgcgtgcacctatacatactattatttgtctcacggtcgaatttaagaggcagtaggtgcatgatttaatgagtacgtacgacgtaaacaagtagtactccgtactgctcctacctctcgtgttctgtactattattgttgctggtgcgctgcataggaagccaccatatggccacacggccccaaccaaatgcaatttaaagctaaccatgcatttccccaactaaatggcgcagcagaaccacaccaaggattccggctaatcaagtcctgccgtatctgcgtactgccgggcgacaaccagcagcctaaacactcgttctcttcccccgtttacggcattatacagttacaacagtaatacatggcatttccgagggtcaaacacgtcggagataagtcctaagctgtcggacatgagctatttccaacggccgaaggtttatatctaacggccatgggacgtcgtcggacatacgcttatg

SEQ ID NO: 166953 - DNA, 617 bp, Zea Mays
tctcggtctgatggttgttcctggctggacgatgcacgggaaatgagatcagtggatacgccatgccaaattcgacgtggatggaaatcgcgtcgacggcgtgccgtgctcgagcaggcgctcagtcgtggattttggtccgtgtccatgacatgttgcctcaacgtgtggatgtgggggtggcacgcctattgtgcacagagcacgtacacaagccgtccgtggacttggcgttgacgaaggggaaccaatcggcagaagtcgttccgttctcgttgctaattggatgattgattagtgcgtccttgactgacccgcaccgatggaagggaagggagtcaaactttggtttgagtcggatcggaatcagaccatcggatggatgaaatggacgatgagaggagctgcctctgtgttcctgcctttcccgatcccaactcccacgcttggcgtgacgcgccttttccttttcacccatctcttccttcctcaattcgtgctccaaataagcaacaagccgacccaacgattgatcaagcaaaaagctgcttcttccatatgatccaccaccgatcacttcataactagcctcttctttccttcaattcgttcacgac

SEQ ID NO: 166954 - DNA, 379 bp, Zea Mays
atcgcttggctcacagtacaccagtattgtggcaaaaagccgtcgcagcaccgatggcatctggaaaagagcacgttcagtgagacacgcatccagtgtattgtccgactctagcagtccccttctctctgctgcctcacgaaaaagtcggtagcgtgacaccatctattgtccttagatccacataggaggtggcgccagtcacatggtttaggagaacacgaagatagtagcgctccccctcggccggatgagcagagactattctaccgacttgtccacccgtatctcgtttcctccgttgccatactttgcccttaccactctgccaagtgtaccattcaggaaagtcacgatacaggatgccacgagcctcctc

SEQ ID NO: 166955 - DNA, 796 bp, Zea Mays
ctgttcatcagattcatgaagaaggctggtgcatttgtcaggccaaaagacataactgtgaacttatacatcccatacttggtaataaatgtcgtcttcgggatgtccgaaggttggatcctgagctgatgataacttgacctcaaatttatctttgaaaacacgctggctcctcttagctggtcgaatagttcttctattctgggcaaggggtacttgttcttgattgtgacttcatttagggctcggtaatcgatccacatcctcctagtgccatccttctccacgaatagcataggggcaacccaaggtgaggtgcttactctgatgtaacctttctctgacagctcatctatttgcttcttgagctcaaccaactctggtccagataccctgtaggcgcttttaaaaatggtagtggttccaggaataatctctatggcaaactcaactttctgctcaggtggcatacctggtaaatctttcaggaacatgtcctgaaactctgacacaaccttgatagtctcgagtggatctgcctccttatcaatagccatctggtgaaaacctcctttccttggctcgggtgagactagctcagtcaccacttcttctcctaatggggacaccaacttaattgtcctcttatcacagctgataactgcttggtacttatctagccaatttatccctaggataacatctattccctgagtacccattactatgaggttagagggaaactcgatcccccttatttccacacttacattcaagcagacactatcggctcgaa

SEQ ID NO: 166956 - DNA, 528 bp, Zea Mays
catgctaatactttttaggttggtaatatttttagcacttctttattgcggcacgacactacattttttaggcttcaccactacattttcgccatgctaacattttttatataagtcgcctcatgagatagtgcactgcactcaattagttgcatgatattttttatttcacaaatacttccacattggttactaatttttactctgtacatggttaactttaacccatatggttggtcatcacatgatttgaagctgttgctgaactctgtgtgcccacaagataaaaacccactgtttcatggcaatataaaacaacactttttcatggcagcaatctactatgcttatactttcttggctcaagattatatactttgacaaaacaacgagtgacacattagagaaatagaatatttagggatcctaaagttaaatccaatgtaccataatttgacatattagcataagaaaacctattgatagataaatagcaagaatcgacaattaaacattagacaagcatgc

SEQ ID NO: 166957 - DNA, 611 bp, Zea Mays
gtcggggtttaggtttcgtccgaagagagggttctctcgacgctgtcttgcctcctgctcggcttgctcttgagcttgtcgacgatcacgtcggcgggagtgtctcctttccctaaagactcgttcatctagagtttctcccacctccaagatctcgtctcgtgatacaggctgcgccggatctcgttctctggcttcacgatgtcgccgggcattacggcgtcggttcctccgttggcgagcttctcgctgaggaggttcttccctaggcacgatcggttcgtcgtcggagatgggagacgattccactctccccccgatgaagaggacgtcggggtagaatggagttgtcgtgatgacaagcttctttctgttctcctttgagggcggaggtaccagaagggcagcttgatgggtctttgtttcttttttttccttgtaatccgtgtccatctttccatggatgaggtggacaacgggttccttcgggtgaacgaattctctgctcctggcttgtaggaggtagtcttcgcccagagcgctggaggttgcgctatttcctgcttcgttcctgccttctcagagattttcgaggaaggctttctctccgg

SEQ ID NO: 166958 - DNA, 338 bp, Zea Mays
gggcgacggctcgatctctgcgattccgggtccctctctggtgaagaagaacaaggcaacgacgtctcggtctatgcggtggagaaggtgaaggcgacgacggtcgatctgtgcgttggagacgctgaaggcgacgtcgggtagaatctctagggttcggccgccgcggtggagaagaagcagcagacgacgataatgctagggttcggctgccgcgtgcgttacggatgaggtgagctgaataactgcgtgctcgtgggtggattcgtgggcccgatacacgtactctgctgggcgaaatctacacgaaggcccatggaccgacacgtggattactg

SEQ ID NO: 166959 - DNA, 389 bp, Zea Mays
gtgctcttcgtctcctacctatcctacggttggcgctgccgatcttgccgttcttcctgctgctgctggaggagttcggactccagctccagcacctcacgccccactccatcctctaggtggccatcttcgtccacctctgcgagatgttcgtgggggtgggggcctgtactttcctcttatgccacttcttcgtgctggtgaggtctgggaagggcaaggaccacctcggtgcctactatttccagacgaggttagatccaaccgtggcctacatcgccacccttggcggcgtgaggtgggagaactagcgcaatgactgggtgatcgtcagtgctgaggccaatgaccgccttgccctgccgaacgacggaccaagactcgaccgg

SEQ ID NO: 166960 - DNA, 722 bp, Zea Mays
ataatcattcattattgccctcaaaggctcgactcttacatggtactcaagactgcctccgctcttaatcgactcctggaagacccttcgcgacaagtttttgctcaacttccagggctacagacctgaaatagatgcactagctgagttgtccctctatatacagcaggagaaagaaagcattcacgactactacaagaaatttctactgttgaaatcccagttgtcatcagtcgacgactaggtcgtgatccactatgcaatcagcggccttcgtgctggtcagctatacagccactgcaccagagaccctccatctacccttcaagagttgtatcagctcttgaaaaatatgcctagtccgaagaggtgcattaaagaaaagtggagtcacaatgtaagccaaaggagactttgcaatccaacaagtcttgggccaaggggccacaacaagaccacccccgctaggagcagggtcaacaacaactccaagttcacaacatacccaatcagtaacaaccaggacatgtccccctcgctatcatgattaccctccacagtaaggctgaggagcaacacaacaagaagccgaggccatgggataggttcccatcaacaaaagaaacattattgcaccttccatggaaaatcgtctggcattcgactaaagattgccgagtaacaaaagaatacaaggaccacatgactggagtcgcccccgc

SEQ ID NO: 166961 - DNA, 558 bp, Zea Mays
ggaatctgatgagaaaattaaggaaattaaaactctgattagtttgggtaaagccccagatttcacaaaagatgaacaaggcacaatatggtttaaaaagagaatctgtgtaccagaaatcgaacacctacgccaacttatcttaagagaagctcatgattcggcttactctattcaccctagaagtacaaagatgtaccaagacctaaaggaaaagtattggtggtacggtttgaaaagagatgtggctactcatgttgcactatgtgatgtgtgtcaacgagttaaagtcgaacaccaaagatcagcaggattgctacaacctctcaaagtaccggaatggaaatgggaagaaatcggtatggatttcatagttggactaccccgtactcgggatggctatgattccatatgggatatagtggacaggttgactaaagtggcacactttatacctgtgaagacaacttacttaggagcccaattagcagagttatacatgtcaaggattgtttgtctgcatggagtaccaaagaagatcgtatcggatcgaggaac

SEQ ID NO: 166962 - DNA, 377 bp, Zea Mays
caatgccgaagacggacaaaattgaggaaccaagaatcgaagggacgaaaacattagaagttctaagcccttcggcaagagtggcggtgccgaaggcacaaaaaggtctagcagcgaccccaagagaaaaaggatggccagtgtactagatgtgctggagacgataaaagcttcaagctctactccagggaaaattgccaaggcttcgaaagtgcaaattgaaatcgaaacaaaactgaccgaagccgaagctacaatgagccaagctagcgccgaagctgggccttcagagcctatcaaggagaaaccctcggaaattggagaaaaggcagcggaggaagaagctatagaacagatttttcctgaaaaagctgccg

SEQ ID NO: 166963 - DNA, 648 bp, Zea Mays
cgcgcgtggcgactggcgtcctctgcgacatcaagctagagcaccggtaccccgccatgaagaaacaccgtcgcgcggtcatctcctggtgtcgccccaaacgctggtaagagcacatctcagtagttcaccattgttagcgtgatgcgcagggagtttggggagatgaagggttgcgccgtaggttgggggctcgaatggcgagcttgggcagttcgctgccgtgtcttgggcgctcggccgcggcaaattgactggagaaagaaaagagagaagagagagaaccggctggaggtagacgacgcgttgggttggggacgacggtaacatagttgggagcactcctgtggccggccaacctcccctgtggcactcgtgctatgtcctgggcgagcgcagggtagccggtaatggcgggtgaagataggtttaggcgtccgccgtcgtgggccgtccgattcaagtagtgcggttgaggttagatctcacagggtcggctggtgcttttgtaaaagagacctcagcaaataatgaaaacaacccgcggtccagtctcgtgatcgcctgtatcttagtaaaatttacgccagagcccctgcacttctctatattttaggcccgatccagagacttgggaaaatagaaaat

SEQ ID NO: 166964 - DNA, 947 bp, Zea Mays
cccatttcccaaatcccacgcgccagcccagttatccacccacgcgcactgcgccttggcttgctcctgtcaccactgacaacgtgggcccactggctaggaagacctcgcgtgtgcgcaccagtcgcagacaagtggacccgtgttgccagggtcatcttctcctgatggccgcgggtgtgaaacaaatctccgaagccaccgccgcttgactcgctgatgcatgcgcggttgttgcgccctcattgtggcctacaaaaccgagccccgccgagccgtattgccacgagtctatcccttgtttcctccgccctagccatcacagaccaacagagctcggagggtccctactcgaccaccggtgagataggggaggaagaattctccgccacggtgaaatcatggtgtcaccaccgtgcggggtccgggatttggcctaggtgctgcggcccactccaccgtttgcgtattgggcggaattgagcactggggggtcgccgggtcacgtgaattgctcgccggaatcacctctccgccgtggaactgcgtgtgcacgtgggcagcttccttccgatcatcaccgttggtaagtcacctgcccattcaatcaccgtaatcccagcatcgtgttgcgccgttaggactgaagtttagaaaccgggcgcgtgaggtgggtggccaccggccatggcgccgtcgtccctggtgggcggagccaccgtgtctgggccaggtgaaagaaggcgatgtgctggccgttggatctgtgctgtccggctcagattagattaactaggtgcgggttcgatgggtgatcggtgtccgttggatcgtagacgcgtggccaggattagatcggacaccatagaaatctagaccatcggatcgtgatcgtgcggatctagcatgatttggggcgttttaaatccgaaccgtcgattgttaat

SEQ ID NO: 166965 - DNA, 481 bp, Zea Mays
cccgaaggcattgttgaatggataagtggagaagccgaaaccttcgaagaaattttgagtgatcgcggggatgtttgcgcgttttccggtgcgcgggggatttcagccatcttggagaaggctggatgtgttcacattaaagccataacccaggccgaagctgccttctctgtagatgatatgaaggatccttcagtagaggcaacattaatgggtggaaaattttacaatgatgtctgggttaatggaggtcgagagatggcccatgatattataaaaaagtgaaaaagacacccacgatgccagagcagaagcaaagcgagctgaagaagatgcagaacgcgataggcatataggtattatttttttggttttttagcttcggtacttgctttatggcttcgagctaatcaatttttcctactttagctgaactatctccgccactgaaaccgtacgatcacctagctgatccaaaaat

SEQ ID NO: 166966 - DNA, 587 bp, Zea Mays
ctaagactcacatgatcgccgcccgactacaattaggccaactgggccaattgcgtctttgccaacgggtaatagtggaggatgtcatcatcattgccaccttcttataatgggccctagctctgataccaaatgatacacccatcctaggtgggttggccgaggccaacaaattagggttgcctagagcccaacagttaattatgcacacccaactcagggaaaggccccatcgccccaaaagactagtctaatgggggagggtggctctcccttttaaggtggcttcctcctcccaagttaagcaaggtgggataattctgaggctcacacaatcgccgcctgacttcaactggaccaattgcatctttgtcaagggtaatagtggaggatgacctcagcacgatggctctgcttttgaggtatcagattccgccggtgatctcgccgctaaggtagaagagctgacgactgctttagctagtcaggataagctacttcagcttgttgctcatgagagtaaagagtttaaattcaagtatgagagcacgcttagggaacttgagcctgctagagcttcagtcatg

SEQ ID NO: 166967 - DNA, 500 bp, Zea Mays
gactcaggtgcaaggcgaaactgatggcaataaaaaaggggaagggatggagaaggagaaagtagagaggaaggagatggcttcaaggtctgagatgtggcaacattttatcaaggtcaaggatgacaaagggtttctgagggctggaaggtgcaaatattgtcaccgtgaaattaaggctgacacaaggggacatggaacatctgcattgaagaaacactttggtacatgcaaacgcaatcctcatgttttcaacaaggactcgaagcaaggcaccttgcaagcatgtcatggggaagctcctgccacttggaggtttgatcaagaagcacttagagatgcctttgctgagatggtaattgaagatgagcagcccttttgttttggtgagaagcctggctttagaaaatttatgtccaaagcatgtcctcgtttccaagttccatctagaagaacttgcacaagggacattgtacgccattactttgaagagaaagcca

SEQ ID NO: 166968 - DNA, 498 bp, Zea Mays
gagcatcttttccatggactttaactagtcgtcagcttctagtgggtctagggaggtagagaatgtgggaggtttgtggctcataaatttctggtgcttgtccctgggtggagctggtggtggtggaggtggtagttgttgtcgttcctgctgttcttgacggagttcttgacgctcttaacatatttgtgcttgcatttctgtcatcatgttggccatttgttgtagtagtcgcatttgagctgcaaccacgtcaccagtcccagcaggtgggggattcggaggaggatgcatttctggttctagatagctactgccattcttcgacaaattcgtgtgggtagatcaacacctcctcccctcctggtattaaccatctgagttagcggcataggataagatagttttgcaagagacgtaatttagtaggcagaataaatagcctagtagttggttaccagtcgaaggagattagacagaattttgggtgactgtgtt

SEQ ID NO: 166969 - DNA, 942 bp, Zea Mays
cgactccctagcagctgcggcgcctgcggccttctcgaatccctctgccgcctccaccgcctccggactccggtgaccggtgagtcggacaacggtgtggtcttcccctccctctgcagcggcgcagtgacgattcccctctgggcctcctgcctcccctcccccatcccacaacggtacaatggctatccggactccggcgtggtattctcctccctagctctcttcccccgccgccggtgtggttcctagcttccggcggtgctcttccgggtctctctctcgtggtctctctcagcccgaaaacctaaccctaatccagatctggtctctcttcctcattcctccctgccctgcccttctctctcgtcggtgtgtcgtggacgactctggtgctccggtgcgcagcgcaggtaaacaatggtggcctaacgccctatccccaatcacttttcttgtgcttaacacatttgttctttgtctttgtttcttagatccctgtcgcgcaccgttgaggagccagagtcgccgatgcccagcgaggtggttggctggtcgccatggaacttgacgcggtagccgagcacgaggagcacttgttggaaacccataacgaggaagaagatgctgctcaagccctattcggtagtagctctgctgctctccgtcgggatgctgcagcggctccttccagcgatgttgggggaacgggctccagcagtgcgacccgtaccgaggcaagcacgggtaacgaggggcgaacgaggaagagggcctccagttctccagtctgggaggactttgaacaggtgttcaactttgagaatggtaagagggtaagaactcatgccatttgtcatcactgcaaacaacaattctctgctaaatcatctgctggcactgggcactttcttaggcacaaggatagttgtaaggttaaga

SEQ ID NO: 166970 - DNA, 607 bp, Zea Mays
gaaagatgagccaatgatattcagtttgctcttggagtgatcactgacaaggacaggcagaatgacctccactgcacacaaacatgatcatatcatccttgtacaataccttagcccctgcatgcatgaagccaatttgctacatgttcttgtgactgttaccagttctgtactgacatgtaaagatctatcaatcatcgttctccttggtttgtcatctctccctgataaagactgctcactagcatgtaatggtacacctgcagcagaccaacctggctgcagaggtcaggagatgtaacagtgtgggtttgcttgctgaatgatcaggcctatcgttttcagcgagataggatgagatctaggcggaatatctgaacgttccacttcaattatgaatttacatgtggcagcaacggataacttgcacaatgaagcatgaaaggaaacatttccgtcgttggcttgatgcgatgcaagttgaggcgacgcccagaccatgatcaggctcttgaccaaataataaaacaggtttgacaataaacaacggcgacatcatggcgatacgtacgaaaagcaagcatcaaggagaggattaggcagcgac

SEQ ID NO: 166971 - DNA, 483 bp, Zea Mays
cggaatagcacaccaagcgcgttaatcgaagtctctcattaaaaagacactccgcgcaaattcgcccacgggcgcagccggaccaacacaggcgtacgaatacggcaaacaggccacattaccatacaaattacaattacatacacacggcgagggcatcacatattacatcggctcaaccttcaagatgatacccatctccctgtaattaaacaacattatcctcaattcctcaccctaaaaaagcttccgaagatcccccttgcttatgctcgccccagtcggcgaggacaataattctcgtttaccaacccggtctactcggagatggccacgttccatccccatacgacggcgcctgtcacttcgcgaaaattcacccacactatgttttcccaccacccttcgccgcctacacccagtactcgcactaggaagatccccgacaccctccacacgtggcgaagtctctgccgcagccac

SEQ ID NO: 166972 - DNA, 648 bp, Zea Mays
gatcgggtgctttggatgcgcaatgacttagcgaagctcactggggcagcaatttataggatctatcgatggtgacgtccaatttggaagaaatgtgctggcggccggagagagggaggagtcaccggagtcacataacgtggcatttactggggtagaagcctgggacgatgactaactaactcacacgacaccttacgacgtggtaatagggtctgtagcgtggcagattccggtgaatggtggtcacgatggcgatggccgtgcggccactttactaggcaagtgggtacggtgaggccaaccacagtgcccccaaactcatccgcggggaggatcgtttcactgccgagcgcaatccacttatccaaggcacgaatcatggtagccggcgcgaatccaggcgtggggtcaccggtggcgaggggtgatgcatctgccgatctttttcagtactgtaccatgggaactcaattcaggcacctgacagagcaagtttcagggtcttgatctcaaatttctatgtggtaattcgtcaatccctctataacaaagttcttatcctataatgcaacttcaattttgttatagttaccatacccaatccatcactggatcttactctaattcgatcacaaagtccatttg

SEQ ID NO: 166973 - DNA, 414 bp, Zea Mays
gccgttgggggtgagccccatcccggcactggtgtggccggcgtccatcttcgacgcgctcccggtactggattctgctgctgaccgccttcgacgtctagatcagattcttggcgcccgcttggaggccgagggcagcagactttgccggtcggtaatagaatacgtcttgacatgcttccggagccacgatccggctgtctccttggggccagtcatcgcaggtccggtggccgatgctgaagatgctgctcgtgagggcgtgcaggacgttgtggacgcggtggccgagcgctttcagcgggatcctactggcgatgagtagctaggcctgcgtggagaaaacgagggttccgctggggagcaggttgtaatataccattgatttcgcaagatactctttaggtactactt

SEQ ID NO: 166974 - DNA, 507 bp, Zea Mays
tacgaagcaatgtacccgcgtaagcaacaaagagcatttcaaccaaagtacagcaggtaattacaaagcacaggaccggcacacagtaggatctcgacaatagaggaccccttttacctttacgcactcccccacggggatccttgtaacaagctccttccttgaactataaaaaggaagggtcggcttcaacgactaagagagacacacaagaagaacaaacacgagaaggagtaagagtccctagagcctcgaagcacttagacctagatgaccatagctcacgtcatacgatcccgacccacgcacactcacaccagagttttttgaacttttctctttctcgcctgcttgtaacctcctattgagcaacttggtgtcgatagtgcaatacacgaagactagagtagggacattcgacccgaacctgtataactcttgcgtccacctcgcacatatataatttgggcctagaacacacattacaaatttactcgttgttgctta

SEQ ID NO: 166975 - DNA, 749 bp, Zea Mays
gaggtagcgaggggggtagtgatattccttctccagctctgtcagctcttgtcagtcttcaaggactttcaatatcagactttgatcaagtgctggaggaagtcatccctgaagatatgctatcagagccaactgttgatgatatcccggccatctgttcagaggtcctagacggtgggctttccttgcttgactctgctgggcaagatgcgacccgagcggtgtcttgcgcatcgtcgactttggagggcagtcttcaatgtcaagacgctggtctgagtcacccgactcccatggaggtgactgaggagccctcagccttagaggtggccgctataggagacccagcccccgagggtggtgccggaagttacccagcccccgtgggtgttgctggtagtgatccagctctggtgggtagtgcaagctatgacccagcccccgagggtgttcaggtgggctctctttcccacgcctccatggatgtccacgttgggtcgtccccacctcggtccgatggggcgacggctgcacatgcttccacagttttaaatggactagtcgccttagaggtcggcgagcttgatgcgaggagcctgctgcctgctggcggggctgagatcacccctgatgatgcccttcagattgttcctgctgatcttccctcgtcaagccatgacatagctcctcctgccttgggtctaccactgttcctctccaatcttcaggtgaatcagcctcttgctcta

SEQ ID NO: 166976 - DNA, 763 bp, Zea Mays
gtgtactatatttatgcttaggagaaactaaacatgtcctagagaaaccgaattgcagcaaagacaaacagtcgaaccgtcgtcgacaatgtacaactcatcgtaggctgtcgtgcgtgaaccgccgcatctatctctcggatacatgacccggcagccgggcatccgccgcacagcaatccatggcgacggctccacaccgtgggcaaaaaactttcggcaccgccaccaccacctttcagcttaacgcatgcgatggctatcatctttgcattgatttggtgaacattccgatcgtccctttctatgtcagcacggtgcacgggaaagagaagaggagatgcttccgccacgtcgtcgtcaggaatctctccttgcttgtaaacaagggcgcctccagcacaaattcggtgcgctgctatctcgtcaggaataatgtctcttttgagaattgaggccaccactaatgtccccccaaggtcttctgctcgtggctaattttcggcataatggacacaggacacccacgagtctattaccacacactgtggttgcttgtttatatatggcgtccatgcatggtaaaaggtagcggcagtcgttgggtgcttaagcggtgttctagcaacttacccatccaatctcttattatatctcctatgttaaactttactccgtgaatagtgctaaagtgtgaagacaacctcgtaccatgcgcatgcaaatacatgcagcggcgcagccagctcgagaggaaagtgac

SEQ ID NO: 166977 - DNA, 517 bp, Zea Mays
ctgacatgctggaggtgctggggatatcgtacgtgcgtgcgtcctgctgatgatcgatttgtccctcttttttgtagtcaaacatgctggagcgctagctggggatatcatacatgcacgtccatgagtccatccaaccaatcggctgctatatctcgtaatagatcaatacaacagtttggttttagtgtcactaccgttgctttttttttcttcccccaccattgggatcttcaattccgtgttcagttcagtatactgctcgattctgtccctctttttttagtcaaacatgtacaaatatcctcggtatcctccgcttgctctcgcccttttcatggcacgggaatcaaatctgaatcaaacacgggtcgatcccaccgccaaacagtggagtagaggcgatctggtgcggcctcgccgcttcccgcaaccgcaacccccatgtgcggttttctcgtctgcttcccctgcagtcagccagctctacccaccacactgaattggccaccagtcc

SEQ ID NO: 166978 - DNA, 509 bp, Zea Mays
gttcggcataaagccatgtttgaaaacatgatacgagagctccacttttttcaaccgaaccaagttccgacattttatacacgggcacctcgctaaacgagcatgaccagcaaatgtgagtgccacgaattcatctgcaactctcacccatgcatcagagtgcccatgagtgacactatcgaatctatcgtacatcgcccttcttcgatcgtcactaatattcaaagctaaagaaacaacatatatacacttaggtacgaaaaggccatttataaacagttaaacactaaatcaattgttccgagtttagttacatctattttatcattgtaccaagtacatttacttaattcagtgctgcatttttcatgccatcttttaattaagggagaaagctcacacattacaaaaatatataatcaaggatacgagtaacaacactagcggactactaaatttcagctaaatccaatcgagcgtggtcaagacagtagccatcttcattaccc

SEQ ID NO: 166979 - DNA, 919 bp, Zea Mays
caaagtcctttttccagttcataaattggccagatgtcgatggaatagaggagggcgtcgcaacatgaggcagtagggttttgtggtgccgtctcctggcaggagagcagcgcgaggctggtgaagtcaagtctgcaactcagcaatgagcaagcaggtgacggcggcggcagcagcagcatgatggtgacgagcagtgaaatggaggaggccatcagctactctagtatgtacgagtgggtagggtagtggcgattgggaccaggtcgtccctatcgattgaggtggtggtccattttatagcccatgcaaacagccgggcgctgctgcgtcggcgtgggccatccctctctcatttgatcggggacacagagcagagcagagcagagcaacgcagagcagagcagctagctagtgtcactctcatcactagtagtactttcgtacaaccagcccagcagcagcagactctcatcattatcgtaccactaccagcctagcagcagcattgtctgccggctatgctgctgctgcattcctacatgcttgagcaagttgtagctgtagggagggggaatcgcatcacaagagagctgaggtggagcgccgagacgagaggatatgtggcatctccatttcacatgttctgatttaattagtatgcgcgcggttgtaataataattaattaattcagaaattgaggggtggacctgctggatgctacctcgcgctttggccgatggactacaaaaccaggagtagtagacacaccatccgagaaagcctgcaatggccacacatgctatgactgcaatggcggctatggcacctaatccgagcccgccgggagcaggaggtggcggtggggacacacccttcttctccagctgccgggagcatggatctgtaggagtatgc

SEQ ID NO: 166980 - DNA, 313 bp, Zea Mays
ctgcggtggaagcttatccgcgtgtgataggtgctgaagttcttcctggtgtgagtgctgggcgtaggcggcgaagggcggtggcgaaacggagggtgagtgaggtggagggtggtcgtcttcgtgtggatggggctagcaaacaagaattgttgtcctcgccggctggggcgagtgtaggtgagggggagttgcgaaatctttttgagggtgaggagctgaggataatgttgttcaactacagggagatgggtatcatcccgaaggttgagccaatgtaaagtgtgatgccctcgctgtatgtatgtaaccg

SEQ ID NO: 166981 - DNA, 850 bp, Zea Mays
atgccaaatttttttcaaccaagttattttattcattacaccagttcatcacaagcatatagctactacaagtcgcactacacgcgagcgctttctgaggtacttccgaactccttttctaaagtgtccccaaattccttgagaaggtcatcaaggctagctagggacatatccttgacgtcggccaaattctctatcctggggggaggtggtgcttgaggggctttcttctttcgctcagtctggcatccttggctcttggtcttcttttggattttcttcgtgggggtgagcttctttagcttcttatcgtaatccatcttcagggttcggtaggcttcacgagtgttggcctcctcgccttctgctatgtcgagacactcttggagggacgccttctcctttttaagttccttgacctgttgctctaagctttccacccaggagtttaggtgggtgcagtgggaggaaaggtcatcgtagtggttatcgagagtgtggagatatccggccatgtagacgatggtggggtcatcttcggtaggatctcttcctgacagggcctgaagtcttttcctccaggtgggggtatttttgttgctaggtgggaagcaaagaagggggtttcaaagacctatctgttgtagttttggcatagctatcgaaggacttctcaggcaacattttggcaagtgtctgggaagcggtgcccgatgaaggtgacttggaagggagggtggtttgggtaactttggctttctcccaggtagactgccatagagcacttctcaatttcgttttcgcggtattctttccagacatattccggcttcttgcggatccccatgcg

SEQ ID NO: 166982 - DNA, 319 bp, Zea Mays
ggttaggcgatggtgctggtcaagaggaggcacgattggtgacgatggttggttagaaaaagactgagcatgtgaatattatgggttgtgaagaggatcaaaagatgatgacagatggttagcaacatggtcggtaggtgatgactcctaaattagtggcagtgcttgagaggatggtagcgagtcactcaattagatgtctcattgaggccaaaggatgaaattcttgatagcatatccaagtttctcaataccctcgggactagggatgtctagcatatcatcatcgtatcctaggacgacggacgaccaacgacac

SEQ ID NO: 166983 - DNA, 1516 bp, Zea Mays
gggttggtttaacaaaagtgcagggactcttttgaaagaagtgcacggcgaaggggtactaagcatcctgaaccgtccgatcaaactcgcacgacccagattagatcgagtacccttgcgaaccggtactcactggtgatcgtgagatgggcgatcgatggtggagattttaaacaacgctgccagccgcacgaccgaacgatccaggatcgacggcccgctcacgaagggtataacatttataatcacagccgccaaccgcgagatctacggtctggatcccaccccatcaaagcggtacgtttcttagaatcctggccgttaagtatccgatcgacggctgagcgtccttcttctacctaacgctaggcacggcggagtcctagcctgactggcggcaaacacgtcggtgaacagccatcccacccaacaggcattcatccctaaatctgaaaggtgttacgcgaagtggaagaagatatgagttcactagaggtgcccttaccagcaatcgcgtagccgaagccctgctctattttctctcttcttgcatctctctcctccacggcggcttgttcgcccacacggttccggcgaccgagcacccttctccctctcatgcactcatgatgccgcccaccaggacaacccgcacgaccacaccgaaggtctgagtgacgtcgcagacgcgatctggctgcagtggcacaatcctccttgcactttcctctcggtggcgctctctccctttcgcgagctcactgttggcgctggttcgacacggtgagagggcgaggatgcgcgtcggtatttatacacagtggggagggtccaagtggtcgcaacaactccgagatttccccgtgcttcgcgattctggcgccggattccgcgcattaagtgcgcctctgttgttctcgtcgcgcttggatagggatgaagggaaacctatcatacgggacccacaaggcaacgacgacagaccagatgcatgtgtgactgaggctgtaggcgtgcgagcagggaggctgagagatcggccccacacgtaagtggcgagtgcggctgaagacaagtgggccgcacaagatttctggacccggaccgaggggaagaagagtgggctgagggaaggagttttggcccaaacgcagggagaggtcccttctttttcttttcttctagtttcttattctttttctaatttctatttatgttttccattttcaattttttccaaattagattttaaattctcatttgttttcaaaagtgtgactcaaaatcaaatacataactcaagaacttcagcataaatgcaaaaatatttctttcattctttatttgcttattatttattcccttcaaataaatgtttctaaatgtaattttagtgaaagaaacatttgttaaattaaataggaaaactccctattatttatttttctgagatttgaaatcataatctaaattttataagttaaatttaaatctgagtcattaaaccctaatatat

SEQ ID NO: 166984 - DNA, 833 bp, Zea Mays
gaggaaatcagtactagcgtcagaacaaccaggcagctcgccttcctaccccagcaaccaaccaaaacaaccaaacagctctagcacaagtaggaggccgcacatgcttctattgtggggatcaaaaccattgggcgaagcactgtccaaagaaggcaactcagcagtcgccagcagtcaataccccagcaagacaaggagcaccatggcaagcacctggaggtcgtggtcaggcctacaaccatggaaaggtgaaccacctagaggccaaagcaatccaggatgctcaggacgtggcagtaggtatgtttccagtcgaatcccatccagcaaaagtattatttgacactagtgccacacattcttttgtttctacatcttgggtagaagcacataacatccccatagaaccaatgattccacctttaagagttaactcagttgggggaaaagtttagtccgataggatttgtccgaatctaaggattgaaataagggggatagacttccccgctaacctagtagtaatgggtactcaagggttatatgtcatcctagggatgaattggctacacagaaatcaagccaccgtcagttgtgacaagagaacagtcaagttggtgtccccatccggaaaggaagtattagttaagctatactttcctaaactagaagaaggagcctatcactatttgtcagtagatgacaaggaggccaacacaattaacgatattagaattgtgttggagttccccgacgtgttccctgaagagttaccaggcatgccccctgaaaggaaagttgaatttgccatagatcttatcccaggcacc

SEQ ID NO: 166985 - DNA, 650 bp, Zea Mays
ggtctcgccatggtacagtaccccaaactgaaacagatcacggttcacccccctgcccgtcgccggtggcccgtcgccgttgattgccgctcgccgtgattcgtgcgtcgtggccatcggataaacagagctcggtaaaaatccccgccgtcggtgggctggacgccaccccggccagccgcggtacttctccccttgctcatcgcccggggataaggatttcaccgccgttgtgccgtcgccgttgtccgccgcgtggctctcactttccaccgcagcaccgtaagccttagcggctctccgttgatcgccggagcaactgccacgccactggacacgtattcaccgcgccaaggttcttcctcatctccgaccgcccacactgtctgctcaaattcagcgccaccgccccggggatctataaattgaccccgcagtgagcttcacaacatcatcgcgcacccagccaccaaatatcgtcctcaatcgttcacctgagagctcgaattcctatttcccccaaatcggtttgaacaccccgtaagaacacttcaccgcggccagcctattccaggtgaattcatactcctctgttgattgttctagcatccctaggtcctccttaagctttccgacccctttaattgcac

SEQ ID NO: 166986 - DNA, 764 bp, Zea Mays
gtcggagcgaactatccaaaccttggaagatatgttgcgtgcttgtgttctatcttggaagggtagctgggaggatcatctcgctttggccgagttcgcttataacaacagctaccaggctagcatcaagatggcaccatatgaggctttatatggcaggcggtgtatctcccctctgtgctgggagaccatgggagagagatctctggttggtcctgattgggttcagcagacatctgagaaggttcggaaaattcgttagaatattttggccgctcagagccgtcagaagagttatgctgatgtgaggaggcgggacttggaatttgcagtgggtgaccaagtccttctcagggtatcacctactaaaggagttgttcggatcgatgtctccggaaagcttagaccaagatacattggaccgttcactatcttggcccaagtgggcagcctggcttatcgtttgcaattgccggattccatggcaggggtacacccggtgtttcatgtctctatgttgaggaagttcttgcgggatccggaccatcagatcgagatggaaccaattgatgtgcagcaggatcttattctggagtgtcgtccggtgcgtatcttggagtcctcggagcgtgttatgaggaagagatcaattaagtatgttaaggtcttgtggactaatcagtctgagcgcgaggctacttgggagcttgaggagctgatgcggcagaaatatcccgaactttttgttttgggtgagttttgtt

SEQ ID NO: 166987 - DNA, 698 bp, Zea Mays
gaagattttgcggttgtttccacggcaagttggttaaagtaaagccgccgtgaaaacggagaggaaaggagctcaaagaagtcacatggaacaagttaccagtgttgagaaggaagagggaaaaaagaacagattttgacagcgccgactaataaagacacgtcacttttgctgcgaataatacgctccgcgtacaaaggaagccatgtattcgtcaccaaatccccgcgaacaattccaagctccaaccaatctatctgtcgctgccagatgacacgagctagctagctagctgagcttacagacggcatgcggccccacatgccagcctatggtccaacggcgattgtttgtgtgtgcagcgacgaagtgcgtgtgtacttggattgtgcgtgtaggatttctgattttggtgtcgtaatgatgcatgcgattgccgttctaatccagaacgtcacggcgacaaaacacacgagacggccttgttggaattttactccgagattagtattaacctgtcacgttaatggcgacgtctagtctctggaccaatgtgaccattttgcttgtttgcataattccttccctttgtgacatgtggttggtgcaaaattgttctgtgtatgtataccaagggcctgtgcgtgtgaccgccggttttccggtgtccacacgtttcgttttggtgatatgcatgg

SEQ ID NO: 166988 - DNA, 399 bp, Zea Mays
ctgccttcgtgctggtggtattatctatggtcgctcatgtgcaggtgcgagcaccggtcgatgggtgggccgtgggtgcaaatgcaatatataactgactggactgccgtgtgcaagggggtcatctggaccaccaccatttttatatgccatgcaacttgacagtcatgctccatggctggtctttggctcctgccccgtctaaatccaaaccagtgaatacacacaccgcaccattgacacatcgacgcggcaaatactcaaacctagggctgtttaaattttttcacgagttaagctaacatcttagctcaatttgttaacgatccagctcgtgagcttaaatgagctataacattttaggaaaataaaactgtaacatccggaattaagggtaaa

SEQ ID NO: 166989 - DNA, 950 bp, Zea Mays
gtaagacttatgcattattcaccgatccaacttattgcataatcgatcacataaaatgcacatcggtcggacgggtaacacattttgatgggattatggctgctccctcatttcactatgtcaatcatccgcttctcttcttccttctgttggaagaacttcaccgacggtgttcgacgacctagtcgcatctgactctgcgctggcgaattctccgacaccgaagacaactagagaagggccaagccggcgagtgtgttcatcgttgtctgtagagttgaggaagcgtcaattggtgactgaacatggggacgacttcaacctaacttctttcaccgatcatccaccacctccgactgcgttgttactccagtaaccaccatctttgttagtgttttattgtgtatggtttcggtgagatcttcaatttttgcttgcgaatctagtgcgtggtattcaaatctttgggagattagggtgattattgcttatctatgtgcctgaacgatcatatctactccagtcggccatgttatcgatttcaatgaaatctggtgatgatgcccttgatttgttctttctactggtcaatctctgcctctagtttctgtacttcgtcctgtggattggaatactctacatagcggactggcagcatatattaagtaagctggacttcttgatgggttacctcgtgattcttcttctccatatcaagattccactcgggctccgtcaagaaaaactgttacttggtggagctccaactggcagcgtgccaacttgtcctcgaggtcagaatatctctttgaagcaactgcaagacatcacataaaatgagtgtggccagcaagtgataaggccgaacataaggaaacaactatcttaccagcattatgtgaagcctgagaattctctaagtcaaccaactgctttcggagcactatgac

SEQ ID NO: 166990 - DNA, 559 bp, Zea Mays
atttttgctcagccagacctcaatctccatcagcgtagatggctggaattgattaaggattatgacattgaaatccactaccaccccgaaaaggccaatgttgtagcagatgccctcagccgaaaacctttcggggagaaagcaaccaacttcttggaagactagaagaaagaatcagctcaactaaatgcttgtttgggagacaatggtagcctagaagtcaagccaatgctagaagacctcatacgcaaggctcagcgcctggacactgagacgacaagtcttgtagaaagcgctcggaaagaacaactctcggacctcaagatatatgaagaaggaaccctttggttcagggatcgtttgtgtataccaaagggggaggcacgagaaatcctgctcgacgaagcccacaactcagcctactctatccacctagggaccaccaagatgtacctagacctcaaaaccagatactagtggagagggatgaaaaaggagatagcccagtatgtggcccggtgtgacacttgccagcgaactaaggaagagcatcagaaac

SEQ ID NO: 166991 - DNA, 657 bp, Zea Mays
gttttcaccttctttgctgtcggtttggaggtggtggtgtggattcagctaaggacaacaagggatactcaatggcaagttggtcaggttgatttgagccatgtccagacctacatatcagaagtgtatctgagaaaaagagtactgaatagtcaaaatatcatgttactgttcaaattgaattattttacctatgagagtttgaaccaaagcttcctgaggcaccttggctgcaatagagatacaaaattacaaagataggaaatattttataaaaaatcagaatgcacatatggacatatggatacatgttttaaatgatttgtcgaagtatgcttacctaggaggaaaacgcattgtcttgggtgttgaggcagcgatcacgatggcactctcacatgatggctcaacattctttttccttttctttggaggacccctgcaaggcatgaacaacaatgataacatgtataatggaccccttaatataatcataaaatcagaaaagtgaaattatataagacaacatagtgcttacttcacagctaccatagcagctatgtcttcagggttaccattcttacagttgtaccaacggtgaccatatgacttgcaaatggggcactggtgtgaccccttcttttttgtgctactgcc

SEQ ID NO: 166992 - DNA, 638 bp, Zea Mays
gtgatataccaaggcgaaggcaagcttggtgccgatggagaagcagaagtccctgaagtcctggctatcaaactgtttgccattgtcgactgtgagctcggacgggactccgaatcggcaaacaatgttttgccagaagaacttctgggcagtcttcgacgttattgtggatactgccctggcctcgatccacttggtaaaatattcgacggcgacaaaggtgaacttgaggttcccttgcgccgtaggtagtggcccgacaatatccagcccccatcattgaagtggccatgtgtgggcaatcagcttggtgaactgcgaagggttactaagcggggagaaaacttctggcaagcttcacacgacctcgtgactcgattcgcgacgcagattatagcgggccaataaaatccttgacgaattaccttagcagcgagggccctgggccctaagtgagagtcacaagttccgctgtggacttcgcgtaggatctgaatgccttcggtttcggtgacacattttagcatgggttgactgatccccttcttgtatagctggccatcgactagtacgaagtcccggctttggtgcttgaggcgcttggcctcattgatgtcactcgggtggtagtatccttg

SEQ ID NO: 166993 - DNA, 773 bp, Zea Mays
gttctggggataaaagaaaaaggaaaacatttgaaaagtgctgggccgaattcagcccaggcggcccggctaaggcagaaaggcgtccgcgctcgcgcctgcgctgatgtctttacagaaaggaccccgacgtttttactaactaagaacaggttatgtcactgtttaatcaagtcactgactatttgctgaagagccctccaacttctaattctttacacgcccacgtccacgacgacggcagcgcgcggaggagctccggcgaggttctataccggccgattggggctacggcaggtttctccgagcggcggacatgaaattggggctagcctaaccatttcccctaacttaattgcacaaataaccaacccccgagctctggccacggtgaccgagagcagagcggcaagatcgccgtgttcccggcgaccagagagctcgtagtttaattcaatggcccggaaagcatccaaggcatgtgagaaagcttaaacgaggaagcaggggatgggagctgaccggagttgggctggcgacggtgagctcggtttcacggtggcgaaagcttgaattgggggaaactccaaattcgagcagatgagtggacgattgtggccaattagcggtggctagctagcagactaccccacggagctggacacgggctcaatttataggaaggatgggcggtggtcgcgaatttggtcgagacacgcggcggtcggaggtggagaagaagcactggccgcgtgagttcgagaccaacggcg

SEQ ID NO: 166994 - DNA, 533 bp, Zea Mays
ctggtgaatttggagcataaccatgagttcataactgacgaagcagagaaacaacatttacgttgcaacaaaagtagggatgctgagttcattaattttgttgatgcaatgcatgatagccgagtgccgcagcattgcatagttgattttatatcagacatgcatgatgggccagagaacgtaccggtaactgctcaagatctgaaaaacatgtaaggaatctttttatgttgcctatgtatatattgagtgccataaatattactatagtaaatatttggataatcattttttgtgcatacaaatgtaggagggcagcaaggagacgagaaaactgcgcaaatgatgagccaaacttttgtctttctttacggaatgcaagaaacagaatccacaatcttttttgtgattttcagctagacaatgatgggaaaatagtgagtacttttttgtcacacgcaagtatgcagggggaatatgcagattatggtgatgctgtgacatttgatacaacacacaagacgaatatatat

SEQ ID NO: 166995 - DNA, 636 bp, Zea Mays
gtaggattttggtgggatctaatcagctggctcaacaccatgctattcatttcaatcttttggcgtagcagtgccactggaggtcgttctggatttcatgccactcatcatcgtattcaaagcctatttgctatggcgcaagacgaaagagactgtcataacatacgttcaagctcacgtcgaagtgccaggactgttggaaccattgcctgtgcccactcaagcatggacagtacccgactgaaggccttcctgcatccagcaaatttaattctatcatcatggttgttgtggatgaattcacaaagtatgcgcaatttcagtgctttggcacattccttcactgctatgcagccatgcaggttgttcaggtctatatggaccaagtatataaactccatggattgcctcggtccatcatctttgatggagaccgcattttcccaagttcagtgtggcaaaatttattcaaactctctgacagacaacacaactactgatgagatcctcttaccatcctcaaaccgatggtcaaaccgagaggctcaatcagagcctggaatcatctctccgctgtgcagccagtcctgtccgaagcaatggagcaagtggcttttattagccgattggtatagc

SEQ ID NO: 166996 - DNA, 358 bp, Zea Mays
aattcggaggcatccgctagaatagcaaagtgggcggtggaactattagggtacaacatcactttcttgcctagaacaacaatcaaatcacaagtcctagctgatttcatcgtagactggacaggacctgtggagccgcaacaagaacatgcagaaagggtctagaccatccactgcgacggcacatggtgtcacataggagcaggtgccacgatgatcattacatcacccatcggagtcaaatacagatacgctacgcgcctcagcttcgcactcgagtccgacaaatgcacaaacaacatcacgagtacgaagcggtaatcctaggacttcgcaagttgcgagccctcggtgtgac

SEQ ID NO: 166997 - DNA, 378 bp, Zea Mays
tgtgtcaggatatataggtgtgatttaattctattattactaactgctatgaatggtagtattacggaatcagacgtgctttctgctggtgacagactgagtaggtgttgtcttgttcctgcatatgtgcgtaggtgctgaacgtccatatgtattcacgagctcaaagtcaaaccacacatagtatactacgccttgtctttcattcagtatactaattgtccatatgtattcacgagctagctacgtaagtaccgccacgatcgacgtgtatataacatacgtatccttttgcgatgatatttttctgtatatatacggctatattaattgtccgccctgtagtttgcacatccagcgagtccaaactaatccggc

SEQ ID NO: 166998 - DNA, 456 bp, Zea Mays
ggcccactggcccatcacacttacagcttaacccacacactccactcttcctctgctactattcaccacttgacaccagctttagaacgccctctcagcctcctgcttgtctacagacattcggcatctgcaattcagcaccctggtcaccttaagtcgtgacagtttccccctccagaagacttgcttgtccccaagcaagagcctatggaaaacgttgtggagtcacgatttagattgctccaacgcaacaacacctgtggaactgcacgaccccccttcttcaccaaacgccggtccagaatctcttcaggccacacatcctattgctcaaaatcagaatgccaaggaagatcagtaaacattggcgtataatttggagtaaacggtttcaactacgagacgtgaaacattgggtggatgtgagcagtttagggtaatttcaaccagtaagcc

SEQ ID NO: 166999 - DNA, 589 bp, Zea Mays
cttgaggcttggctcacggacgcgaacttttccacacggacacgacctttccagccttgccctcgacggccacacgacgcccacttcgatctcttcactgtcaccgtcccctccactcgtcttgccatcgactgcgtcctgtctgtgccgcagcgcaaggaaagtcagctcctgctacgacgcctcgaccccgcgcctctccacctcctccatgctcctccacgtggtcgtgcttcccaacacagtctaaaatggttgagtgtcctttttctcttccgcgacactttataaaacttgagtgtcctttttctcgtgacccaatccttttggcccaaaactcatagtgtatattgcaaataagttaggtctggttccaggttaacttctaatacatccatggtttggtcgggcactcacaggcacttctttagctgtgatacgtggaacacattgtgtatcgtagacaaggattcaggcaattgcagtctgtaagcaacatgtccatatcgttcaagaataggaaatggaccaatataccagggtgataactttcctttgactccaaaatggttaactcccttcattggtg

SEQ ID NO: 167000 - DNA, 441 bp, Zea Mays
gcagcagctgcttgaggacgacccctcagtcgtgtacctcactgcatacctgctcaccctagatgcccagtatgatttcttggctcagcaccacagatgattgcccgagcagaagatgcagagaagcgcaaccgtcagctccatgtgaatctcacctcagctcaagcccgtgtagctgccttggaaagtcgtgaagccattgctgttgaagccctgaagcaagccaaggatgagcatgtccagaagttgatggagacctacttggtaacccataaccaacgtagagccctatgaatccaagagcccgcttcatccaacgcagttcaacccatgaaagctgaagatccccagattcttgaaggtcacccggtctctaccagaggagaaaagaagacttgggaactaccggaaggagccatagtcttcgaaggaattccagtc

SEQ ID NO: 167001 - DNA, 593 bp, Zea Mays
aagccactacggctgcggaaggcgccgacgagggccaaccttctccggtcatctccttccccaaggccccaagctaggtcgagcctcaagcgccaggcgcgccaccgccgcggagcagccaagccttcaggtgcaacgccgccgccctcaactctaggctcccaggggcgccaccagccaccaggtatgcccgccaaccgacacctataccatcaacagtacaacacgtcttcatctcttttgtcttgtgcgactaggctagcactcaaaccctaatccctaacgtaagctatatgtaatcggatccgataaactacaattttattatagcgtttgcagaccatggcgtatgcagtccagcagtccaaaactaaacacatcatttccccctctcttttgtttatttctcttaagcttgcttggattctactgtttcatggcgtatccagaccatagacaagcatcagtgtactgcatacatgcctttcactcctttagtcctttagtatatatataatatttatgtatcatgcctgggaactttatgtgacaaatcgatttatgtatttgtatgtttgaaacttttttgtgga

SEQ ID NO: 167002 - DNA, 643 bp, Zea Mays
aaaatctgttgtttctctttgtgttgtgctagttgttcttttccagtgactacctttgtgcctaggctcacgtctctagcatggtttagcctaggaccagcacagtaccaccattgaacgattattcagcttgcttttgtaactgacatggtactagtgtattccttgctttagcctacctacaactctacatatttggactatagcttgataggtcgtgttgctgcggcaccgatacacttattccacgtttgcagactcgttggttgctgacccctcctgttgagcaaggtaagaattggtaagagcttgtgtggcaagttgagagtgagcgccttgcattagctacatcctaatagttgtggagtttttagtccttcacttttttatcttgtagcctatgttcgtctgaccatggcaggattggaggttgatgatgcttctcgtaatataccacactctcctcgcaccaagggcatcatacaacactttgtaaggctggtgaagacgcacacggaaggtcttgataatgacttgcaggtgacgaatgaaaagatggggcaattggaggccacacagatcgacacaaacaccaaacttgcaaatgtggaagtgacagttgctcatattgacaagagccttg

SEQ ID NO: 167003 - DNA, 592 bp, Zea Mays
gagtacaatgttgtttcaagagcttttgaggccttgctaggggtaaaactttctaagatgctctatgttccatgagttccccactttcgtgccatccatttgagtaagccggtatgatcctggtcgagtgacctctgatacaatgaatggcccttcccatagtggtgacaacttgtgctgtccttcccccgttagaattcggtgaaggaccaagtctcccactgcaaaggaccggtgccgcacagcttgatcatgataacgcctcaaggtctgctggtaccgggccgactgaattacggtgttcaatcgttcttcctccagtacatcaatatcttctagcctggtagcttctgcctcggctatgctttcgaaggtcaaccttggcgccccgaatatgaggtcggcgggtagcacttcttctgaaccataaaccataaagaacggggtatttctatgcagagctcgactaggttgagttctcaagctccaaaccacatatggcagctctctgatccactttcctgcaagcttttcattcttgtcaaacactttcttcctgagcgcttcaagtatcattctgttggccctttcc

SEQ ID NO: 167004 - DNA, 697 bp, Zea Mays
gaaagacagggcctacccagcttatctgtatcgagggctagccgactcaactcgagttactaacagaagaattccctctgcagacttggtgagccgactagagatgatccttaggggcaaagtgtcaaatgttggtgctccagtggcatactcggcctggaacctgcctcctcccaaagccttcaccctttttgtgtcgaatccacctgttactgatggcagtttgggccttagagcgtgaccctctgctgaagaagttagtgccttggttgcttcgcttggggagattcctgatgacaaacaacaggtccattttgaggtgcccctgaaccctagtgatgcagatataaacgctatgcttgatttgctagctgaggattcttccgatgctgctcctgctggggcgttggtagtggtgcccctcccagaggttgatacgactttggatgctcagaagcctgtcagtactcgcccgaggcgcccttgccgagccaatcagcctgatccttctgctgatgagcagaagaagaaaagaagacgcctccggcgagtatccagttttgatcaggacgctggtacctcggttcctgctactgaggaagtgcctgcgactggttctatggatgctgaccccaatgggtgtacccaatctgctgctgatcccaatgtgggtgctgcttgtgttgccaatgcggat

SEQ ID NO: 167005 - DNA, 486 bp, Zea Mays
gtttcaattttaatttcccactatctagcttctctttgataaagaatctatcaatctctatgtgcttggtacgatcatgttgcaccagattgtttgcaatattcattgcagatatgttgtcacggtttaataccatattgtcgttcctcattagtttcaattcagccaatagattcttcaactagatcatcttgctaaggcccaaggccattgctctgtattcagcctcaattgttgaccgagccacaacctcttgtttcttacttctccaggatacaatattacctcccacaaaaacacaataactagaagtagacctcttgctatcaatgctacttgcctaatcagcatgacaaaaggcctccatgtctaggtgttggttctttttgaaccaaaggcctctcctagggctactctttaagtatttcaggattcgatacaccgcttctgcatgtccttttcttggattatgcatgtagtgactta

SEQ ID NO: 167006 - DNA, 623 bp, Zea Mays
cgccaccgtcgatcggcgaccacgccgccgctgggcagggaaagtgagcagatagtgtcgccagccgccgcggaagccacccgttgactcgccgggtgaagtcaagctccaggcgacgggcgatttctcaccgaagttgtacccatttccgcctgccgcatgacgccgtggtcgggcctctgagcttcatcccctcggtaagaaaactatcgctggtgatcgctttgtctcccgcaccgcttagctcggtctaatttagtgcttagtactcgggggtgatcgatcgactacctcaccggcgtgtgccaccgtccgtgctcggtgttgccgcgcagcggatttgggggaggaagaagaaccgtgggccgtaggatctcaggttgacggctctgattagaagcaggcgataccccttcgcgacattaaatcggggacgttgatctttgatcggacgacgcaggattgatctgcgggctcggttgatgcgggccatggatcgctgatccaaccgccctggttgcgtatcgcatccctgctggggggttttaaatctgggccactaggcagagatcagacggctaggatccaaagataccccttcggccgcaagatttgcagaagag

SEQ ID NO: 167007 - DNA, 867 bp, Zea Mays
ggaggtgcgcccatcccatcttacctcatgggtttcctctcacccttttgccaactaacccttaccttactctccagggtgttggtcgcctctcttgaggcgcgaaggcgtcatggcttcgtgtggtcgtgcctcggtcattcatcttaccgaccccctggagacgactgaggatgctcttttaagagatttaaccgcagtacattcagacttataggtggctaatgttgaggtgcaacgtctacaatcacgactagcggttattaaagacccgagggcaagtaagctatcatgatccggcctttgggttctcgatcttttctaaatccctgtctacctagtggtttgtcgcatgtcctaggcccgaagcgctaggcttttcctatgtgttgatcgggctacaagattcgctcatgcatgggggaggaatcaaatgtcgcatctccttgacattctagagtggctgtggagtttgggattcaccatggtgcattgatgaccttcgcccttgtgcaacttcactacagtgaccgccttcatgaggttgctggcctacatgccgagacaacgtcagcaaacttagaactcctaacaagcggctttgacgtcgcggcgaacttcatgcttggggtgatgtcagtggaggaaataatctgtgatctcccgtaatcttgctttgcggctcatttattcctacaacgtgtatgatcattgggtccctcggaccccggttggtcctaagctctatcatggtccgaggggcgctatacgtgcaactttttcccattcaccatacccgtgtgaggcgagcccccgagcctctactcgatccagagatccgtttggggtgcttgccctatctttttg

SEQ ID NO: 167008 - DNA, 461 bp, Zea Mays
caggaagccaacgcgagagacacacgaggagagggccaggcgcaggcggtagcttctgaaaaatctaggacgcgatagaaacaaagaagtctggtgtccacgtatgttgtaagaagaaaaatatcaatgcacatcacggtgggagatgaggattggctaaaaaaaatctaaaaagacattttcccccttttttaacacaagaatatacttacgagtaaatatctggtgcgagtgctgttcggctggatttttccggtactgtagcagctaaaatactgtagctgtgtctcatataaataccaccagtagcaatccaaacagttacttttattcgaagatttcgagctgggcaagaaacacatggatcgaacaaatacgatatcggttatactagtataaactgggtctgacacaatttaaaataagatacattcatctactactcgaacacctgatcgcac

SEQ ID NO: 167009 - DNA, 421 bp, Zea Mays
ctgcttgaaaggtctaaaaccagacttaataggcagctgatgctgatgctctactatctctcggattaatcctggcatcttagtgtaatttcatctctaggatcgatctccagggacttgttcacaaaagtcggccttggagttttacgatctcctatgtcgatctcctccaaaggatcggccgatgtaaacccatgtcctaacttgtcaagatctctgaattactctattatgcctccctcagaggaattaggcggtccctgcgtggatgtggaccgtttggtctcgaaggccagaccgtccgcgacactggatccatgttgtagtggcttcccggccttaagggccgaactatcatgcgaaagaccgtaccgtccggcctcaggggccgggctatccacgacctgggctgaaccttacg

SEQ ID NO: 167010 - DNA, 1382 bp, Zea Mays
tgtgaacaccatatttaaaaaaataataattataaaataaattccactaaattatgcatcatgctgggattttattttgtgtgcattttgtgacaatataaaaatgatgtgacaagaaaaatattaagtccaaaagggaatttagaacctaaaagataaatcagaaaaaggataaaggagaatgccattcgcgggccaacctgcatgaattcggcccaccaggaaaaacacaccacgcggcccaaatcctgctcttagcgctgacgaccgggcccctctgctcagtccctctcacgcgtgacgttgagtcactgaatggtgggacccatctgtcacctctatccctcctctttcttcgccgcgccgctcggacaagctcacccctagcgcaaatcatggaaatccgttgaggggcacccacaaccgaccttcccctggcggctacatattggtaacccatcgacccccttcatgctcgccccatccgccagacccggtaccacccgacaccgagagatcaccgccgttaggttcttattgcacctccgcacggtgacagctcaccgccgccgctgactcgttccttcgctgtcgttcctgtgtcggacggtcgtcggggtgatccgcctgggctcgtggaacgtgttactggtggatcggcgctgggactgcctcggacgtcgactgaattcctcgccggagctcaaccgatcccaccattccgccactcgccgtggtcgggttcgtctgcgacaaactgcgaggtaattggtcattgattgcatttgttggatgtagagcatcatgtagcaccgtcaaaatagggcgttaggcgttgtaccgagagcttggggtcgccgggcatgccttgccgtcgtgggtgctgtccgcgccgccgtcgcgtttcgtcgccagggatggtggataatctcggtcatctgattgatcatcgacggttaggattacaagtgcgtaccgattcgccccctgctcatctcagccattgatcggagcacgagcgggtgagatcgtgctctggcgtttatgtttgcggagcaaatatgggccgtaggatctagatccaaggctccacattgagtaccggttcagaggagatcagatctaatctatgccgcacgttgttgatcgagcggccagtgctatccgatacccgttcacctggataatttgcagatgaaacctcatagatttagagattagaacccgccgtccctctccactgtacgctgtgtctcaagaaatttaccccgtagcccctgtactttccaggaattgaggcctagtccagagatgacttaaaatcgaataaatgaatagaaaatggatttttaacatgaaaataattactagatcttgataaa

SEQ ID NO: 167011 - DNA, 557 bp, Zea Mays
gggggtgtgcactgcttggtagaccatttggacactgctcagtagaccatgtgaacttgcacaacccgatgaccggtcaccgtttgcaatgtctatgcaaagaaagcacatgtagtgtgaaactctcaggctaatagagagagatatttagttggctgcccatctttaggccaactgccactgcgatgttcacaggtacaggctggtatgtttgggtcattgggtgagccacttcactgaaacgtccttctctaggggtattggattggaacggaacggttcgttcaaccccaggatgatacggagcaggaagaatccggcaaagatccttatcaacagtggaagccacgagctcggaagaaggtccacacaccacggccccaagcggacggccccaactttcccggtcttcttcattgcatgcatgtatgcatcagtcgctatgcctccaatgacgcggcaagttcgtgccatggaaaggtgaaggtgaagggaccagttgggataaccattctgataaagatgcacacggcgtccagtcctacattcaaccccac

SEQ ID NO: 167012 - DNA, 662 bp, Zea Mays
acaaatgtcacatcttcaccgatcacaagagtctgaagtatatcttcactcagccagatctcaacctccgtcaaagaagatggctggaactgatcaaagattatgaccttgagattcattatcaccccaaaaaggccaacgtggtagcaaacgccctcagccgaaaacctttcgggataaagggaaccaactttttagaagattggaagaaggaatcagctcaactgaatgcatgtttggtaaacaacggcagcctcgaagtcaaaccgatgctagaagacctcatatgcaaagctcaacgcctagactcatagacaacaagacttgtggaaaaagctcgcaaagaacaacttccggacctcaggatagatgaacagggagccctttggttcaaaaatcgtctgtgtgtaccaaaaggggaggcacgagaagtcttgctcgaggaagttcacaactcagcctactccatccacccaggaactaccaagatgtacctagacctcaaaaccagatactggtggagagggatgaagaaagagatagcacaatatgtggcccggtgtgacacttgccaatgaacgaaagccgagcaccagaagcctgccggcctattgcaaccccttcccgtgccggaatggaagtgggaagaaataggcatggat

SEQ ID NO: 167013 - DNA, 738 bp, Zea Mays
tggagaacgatagttctttgggcctgaacttattcaagaggcagaagaacaagtccgcataatctgggagaacttgagggtagctcaaaccaggcaaaagagctatgctgataatcgaagaagacccgtggagtttgaggaaggtgatcatgtgtacctcaaggtgtcaccactacgtggaatgaggacattcaaagtcaaaggcaaattgtcccctcgctttattggaccctttagaatctttaggcgagttggggagatggcataccaactcgagctacctgataatctgtctgatgtgcatgatgtattccacgtgtctcaacttaagaagtgtctctgtgtccctgaggaacagttaccaatagaagagctcggtgttcagggtgatgtgacatatacggaatatcctatcaagattcttgacactttgacttgagttacaagaaataaagtgataaagatgtgaaaagtgcaatggagtcaccatggagaagatgaagctacttgggagagagaagaagagcttcgaatagaatttccccatcttttccctagtccttcctaaatctcgaggacgagattcttgttaagggaggtaggatttgtaataccaaaaatgtaaaatgaaagcacagttgagtcacatacatgtttttggctatgtttattataacatgtgaaccaacacttcagaagtcattaattaattaatgacacccaaaaacaatatgtgca

SEQ ID NO: 167014 - DNA, 2771 bp, Zea Mays
tggtgaaaatatccccaagctgctcctctgttcggatgtagtcgactctgatcaaaccatggtctgcacactcctggatgtaatggaatctaatctcaatgtgcttactcctgtcatgtaaaactggattcttgatcagatcgtagttttattatctaccaacagcagaggtggaacaccctctttcccaagcagctcctccatcagccttgctagccaaacaccttgagttgctgccatggaagcagcaatgtactctgctacacatgaagacagagccactacccttagcttggttgactagtaaaccatgctgctggtgctcttgtggtcttcaacatctccagctatatcgctgtcaatgtatccaataagctccggcctctgttttcctctccctgcgccatacctgacgtccagttcacagttccagccacatgccgcaagatgtgtttcactgcaactaagtgttcttctctgggtgcctccataaaatgactcacatataccagagtaagcaagatcgggccaggtgtttaccagatatctgagactcctgatgatgctgctgtagttggttgtgtcggctgccagagttgtaccagtctttctgagccgaagttaaacatcagtttaatacccaatatctaagttcatatttggtgccaaagtaggaatcaacaatgcttgttcctgaacccatttcataagtgctttactttagcttctcaaaactaaaccatgggaagattaatatttgttagattatgatatggcgccgggtacacttcagaggtgagtagagaaggaggcgagcttgagggttggaacgcagtggatatgggggtagtgggcagctgatgtcgcggctggctggatgagccagggtgaccgaagagctgtccactaaggaataacttcttcgatagatccctagtacaaactatcggctggctttatagatgatgagccaccaaacctttcctattacttaacctagatatttggaaacagaaatatcaaatctaaacttcctaacaactcagcccttgattggaggatttgatttattcaatcaaaaccttcctactgacctcttcttcctttcctgtgttgactccttcctttcctatgcatgctgcccctttcctgcgcctgctgccagccttgggcgcctgtgatactggcggcccacaaactagtccacaacatttccctccacaccgacaaagaactcgtccgtgagctcgaactctggatacctctgcttgaattcttcaagtggttccctggaagcatctgtctcagcacgaccaaaccactgaatcaacaattcctaaacacctctattgagcctggcacgtaccaccttggatagtgttggtaggacacgaccatgcaagatcacaggtaatggtaccacttgtgttggcgcctccccttcaaacttcctcagcaaggaaacatggaagacatcgtgtattcgagcacgaggtggtaactgcagcttgtatgagaccagccctacccgaaggaggacctggtatcgaccgtagtactttggcccaagtttggagggagcagcagaagtcaacctgactgctgtgaactgttgtaggcgaagccacacccaatcgccgacttggaactccacctggcgacgtttcttgtcctggtaagctttcatggttacttgggcctgaagaagacgctccggatttccaccaagaacgtgacgcggtcctgcagctggtggtacagtgctgccaccttagtggagcccggctgataggacagcagggttggcggctcccggccatagacgacacggaatggcgagcacttgatggctgtctggtatgaagtattgtagcaatactctgcccatggcaaccactgcagctaggacttcggtcgatctcctgcaagacacttcaaatacatggttatgacccgatttaccacttcggattgaccgtcgggctgtgggtggaatgttgagctcatgtttagtttgacaccagccaacttgaacaactcggtccagaaaaggctggtaaagattgtgtcgcggtcgctgacgattgagtagtggagcctatgtaagcagatgatgtcatcaaagaaggccttggccacggacgctgccgtgtaggggtgccgaatagcgatgaagtgtgcatacctcgagaatttgtccaccacagtaaggaccactgtcttgccaccagcacgtggaaatccttccacaaaatccatggaaatgtcgctccaaacctccaaaaggatggttaggggctgcgggagaccgctaggatgtagatgatccatcttgttcttttggcaagtggtacacccgcgcacataatcggcggacctactgcaatgcgcctgggttgtggaaggaggcgcgccagcgattgaccgtcttctggatgccgtcatggctgcagtcgtggacgtacgccagcaggtgtggccaaagggccaaagcatctggcacatagacgcgaccgccgaaggtgatgaggtcgtccaccttagtccagccttctggagcagagccatcggttatctgtcggtgtaaagtcgcagcctgcgggtcggtgaggcgctcggtgcgcaacacctcgaagagcttgaaggagggcgtggagatggtgtggagggagtagagatggcaatgggtaaatacccaccgggtattactaccccatacccatacccacgacacaaaaataaccccaccgggtcacccatatacactggcg

SEQ ID NO: 167015 - DNA, 690 bp, Zea Mays
ggctagggcacggttgcagtttcatggtggggaggaagacaccgacatggtgggcatggaattcagcgtggcggtgcatgcacaggaatgagggtgacatgcggctgggcgtcaagatgaaggagggcggtggtgtagataggatttagggtggagaggcagagggcggtagagtagatggtgcagcaggtcgtcgaggaggcaaacaccgttaaatcaaatgtgagtagaggtggaggtggcggagggcagcgcgcaaataggtttgagggtggaggggcgacggatggggcggagcagatgatgcagtgggtcgagggggcgaatggggctaggggttgtggtgtcaaagggtggcgccgcaaactgggctgaggatggaggggcagtgggtggctgaaggggtgaagggcggtgccacatctatgggtggaggatggtggtgggcggcatttgcggattgaggttgaatgagggaagtgaggagagtggacaggaatgggggtcccacctataaggtcactagcatgacggaaatggagtgagaatccatttttatgcttaaagtgggttgatgggtaaaactgagtaaggtgcaaaactaagggtggcaacgaggagcggggttaaactaagagtagcaatgtaaaaaccctttgtctttttaaaactcgtattgcaaattttact

SEQ ID NO: 167016 - DNA, 295 bp, Zea Mays
attcctagcatcaaataatgcagcaaaatatgaggcactgatccacgggttgaacatcgccgtatcactgggcgttaagaggttgatggtatacggagattcactagtggtcataagccagataaataaagattgggattgctcgactgattctatgggcaagtaatgtacagtcgtccgaaaattagaagacaagtttgaagggttggaattccatcacgtggaaagagaccgcaacgcagcagtagacatgttgtcgaagctgggatccagtcgggcccaggtcccacccgga

SEQ ID NO: 167017 - DNA, 383 bp, Zea Mays
aaggcacagtatgatttaaaaagagaatctgtgtaccagaaatcgagcacctacgccaacttattttaagggaagcccatgattcagcttattctattcaccctataagtactaagatgtaccaggatctaaaggaaaagtattggtggtatggtttaaaaagagatgtggctactcatgttgcactatgtgacgtgtgtcaatgagttaaagccgaatataaaaaaccagcaggattgctacaacctctcaaagtaccagaatggaaatgggaacaaatcagtatggatttcatagttggactaccccgtacttgggatggctatgattcaatatgggttatagtggaccggttgactaaagtggcacactttatacctatg

SEQ ID NO: 167018 - DNA, 2504 bp, Zea Mays
ggggggaggccagttcttgatcactgttactttcgcagggtcagtggaaatacccccagcactaataacatgtcccagaaattccaacgtatcttgaccaaaacgacacttggactgcttaagctttaactgattttggtctaggatttgaaaaacctgttccaaatgttggacatgatgttccaaagtatcactgtaaacaagtatatcatccaggaaaaccactacacacttgcgtaataatggagacaatatgtggttcatgaagtcctggaatgtggctggggctcctgtaagtccaaagggcatgaccttgtactcataatgaccattatgtgtttgaaaggcagttttatattcttccccttcttgtatctgaatctgatgataaccagccatgtggtccaacttagtaaatattgtagctccacctagctcatctgtgatctcatcaaaaacaggcataggaaacctgttttttacagtgtaggcattgagcctcctgtaatcaacacataacctccactctccatctttcttcttgaccaagagtactggtgaagcaaagggacttgaactctgttgtatgatgccagactccaacatttcctgaatttgtctttctatctcattcttctggtgtggagtatacctgtagggtcgtaaccagaaagttgttgctccaggtaataggggaatagagtgatcaaatggcctctttggtggcagtccctgaggtgtagaaaacaattcctgatacttctctataactgctgcaatttccggaggtatttgcaccggaacaacttccttgttggattctgtgacagttctgagctccaacacatgctccacggcttcttgtctgattagtccagttagttggatactagacagaagagtacatgactgtaatttgggtctcaccccttgcagctgaactatcttaccttgatattcaaactccatccacttctccatccagtgtatggacatggggttaaatttttccagccagtccattcctaacacaatgtcataaccggccagtggtaaaaatttaaaatcagcgcagaaattgatgccattacataaccagggacaatcaggtacccaatattcactccacaaggtattaccatcaaccaccttcacctgaagcggatgtggcagtttctgaaccccttttactacctcaataaagtggttactcatgaaacttcccgagcttccagaatcaaccaacaccaacatctggcatccctgaatataagcccacaatctgatggtcttgttgtgctcaccaccatgtactgctgcttcagaaacagctaacacctcctcctcaacaaccttttctggagaatcatctgtttcctcggacttctcatcttcttcaccatgagacacaacagcccacatttcctccactacatgcagtggtacactttttaacagctgtggctaggattccattttttcccacatttgaaacaaaggccccttgctcttctataattcttcaaggttgtaagcttttggtcacccacccgactattgcctactagtggtttacgtcgatcgtcagggatcaccgggtttcgacctgttaacagggaacttgactgtccagccataggaggcattctcatgggagccttagaatataccaccacttctccttttctggtttcccttcttccagcatttcccattacttcttcctgcaatagagctaatgagcaggttgtgtccggttcagttggtcactggatagctaccactgctctgatttcatcccttaacccatcaatgaatctggtggtaaccatggctggtgttagttgtccctcatgagcaagtaactggtgaagaagaatatcaaactgttccacatagtcagtgacagatgtggtctgatgaatatggtaaaattgcctaatcaatagattgtgctgatctcgaccaaatctattgctcaggttggcacaaaattcctcccaactcatgtgtttcagtctgtcctccaccgattgcaaccaaaatagggcagatccttcaaagtgcatcacaacaattctgatccacatttcccgagccacttgataaaaatcgaaatatgtctcacaacgatttcgccacagtttaggatttgacccatcaaatgcaggaaaaccaacattaggtactactgtgcccgaaccctaagaccaacccccagcagagtttggaacccccgaatcaactaggaaggggctatggatctgattccaggacggatgcatacctccgttgggcgagaaattccttcctccatccatcaccggtcgatggtaaggctcgggtcgacgcagatggaaaggtgcgttcactggtaccgcggctcctgacgatggtgagttcagcaaccccctccacttggttcgcctgcgaacatcatcggtttcttctccatcttctccacttgaatctgcactgatctcatcgtttcagtcatctccttc

SEQ ID NO: 167019 - DNA, 597 bp, Zea Mays
gaggtaatgtgcatatggcagctgtcgccgggcacgaagaccatccaataccgtgtcctcgatctcacatataaggaagtcaacaacatcaaactctgaatgagagatcagggcaccgagtagccagagctggatatgagaggtagcctctctataacccatctggggcagaagcgtccgtctcatgagctgatataagtacttggccgctggagtgaaatctaccggtgagcgtcgcgacccatctatgaaaggcggttggaacagggccgcgacatgagctgtagctggagcaactccgtcgtgagggtgccaaggaggatcagaagtaccataacacaagctatgaaggcaagtcggtgactcgataaatccaaatagctggcgaatctagctagcgtgaatagtaacatcctcttgctcaaagcggaacctcatccactggtggtcggggtcgatccatactgacgcatagaacactccgacccactcctcaacatatctgtcgctggtagtcagaagagtaagaattccaagcaaatatgagagatgcacctcagagtctacaccggcggctagcagaaatgcagggagatc

SEQ ID NO: 167020 - DNA, 415 bp, Zea Mays
cagctcaacagtgcttgaaagtaatcagagggtccgtgctcttgctgaagcacgagcctcatgattgtaagagtcattcttttactatcactgctgcatcagggtcgctctacctcctcgcaagtatttactatcaattatatattttaaaaaaccaaatgaacaaacaaaccgaaatttcaggcaacaccccctatttcagattgtgcaagcataatgaaacagatcaccaaaagaattcatagaaaaagaagggagagggattcaagatcctagaggattggtgcatctcaaatcgaatcgagaggaacaaggtcgcaacgcaaagaaaggcgcaagcagagatgagcagaccggagggaaaaacaggagacgaatgctggcggcggacgcgaatgctgactggactgccatg

SEQ ID NO: 167021 - DNA, 359 bp, Zea Mays
ccgggcgcgcttccgcctccgctcttgtgggcgctctccatggcgacggggaccccgcggcgcggtgctcggcggcaacggcgagggagagggaggcgagtggggttggttggttggttgcccgcccgcccgctcgctttgcgcagtgggagtgtgtgtggagattggagaagacgaaggcgacggaggcgccctcacgctcacgccgaggataatgacaaccgcgcttatcataatagccgcgtgggcccaacggtatccctggcccacacgccatagagacgttgctgtggacgcgtccaacccggggtgctcgggtcgcgtccgtgggcaaggcaagagacaaaggtctcgccgtc

SEQ ID NO: 167022 - DNA, 765 bp, Zea Mays
caccaccaccgccccgcctctgccaccgcgagccccgtcgcccctactcagcccgtgtggatgagggccaagggcagagtgggacggaggaggtggacgggtcggggtgatagcctccagtgctgtcgaggaggacgaggaccccgggccgaagagcgatgcagcctgagcacccagagtgatctcctccagggcaaggtcatcgcggacctggaggaaggtagggaagggacgctggcgcatgatcaacgaccaaaggtgggtgtagcgatcgctgaggccgcagaggatgttgaggacgagcatgcggtcctccacgggacagcccagatcaccaagtgagtccgccacggccttcatcttgcggcagtactcaccgacactgaggtccccctggacgaaggtgaggaaggtcgcgtcgaggcggagagcccgagcttcggcgttgcccaggaactggccctcgatggctagccaaacagcccgagcgtgaggaaggttccagaggaggctatggaggtcgacggagatcgtccccacgatccaggtgagcatgatgatgtcgaggcggagccacgtggcagtcggcgccacgtcggtgaggtcgcagaggacgtggtcatctagggcgtagcggcgaagggtaaggaggagtaagtcccgccagcgtgcgtaggacagcgactctggctcgaggacgacaggaaccatgagacgaatgttctggacactcccggcctgaaggtggagctgagccacgagcgg

SEQ ID NO: 167023 - DNA, 660 bp, Zea Mays
ctggggaagaggtgattccagaaccaaaagatgacaaagtcgtagtcttcaaaagcttctttagggcaggacttcagttccccctatatgagatgattggtgaggttttgaagaagtttgagatttaccttcattaactcaccgaagccaaggaaagagtgctaacgctgaagtgttttacctagtgcacgaactctactatcagatgaaggctagagctgatgggctccacaagaactttggttgttacaacttcacataatgaaaggataccaaggctcttgtgattggttatcgcaccaagtggtcgactggctagacaaatgaatggttttatgtgaaagctgacgagaagaagagggagaagcttatgagtatggtgatgagtcccttaaggctgagcttcggcatgacacgacccttgtgcaacatgcagctcagatctccctgtcagctggccgaagtggaatttagagtcgtggcagagcatattagcactcgggacttggtgcaagaatatttggcaaacagaacatttccaacttctagtggatggggaatgccgaagaaaaaggaagaagggaataagtatgaacttgtacgacttccctatcagtttaaatttcaaaaaagcttcagcaagccctgcaccgaatggtt

SEQ ID NO: 167024 - DNA, 302 bp, Zea Mays
gttggttggggcaagaatatcctggtgtaagaaagtttagagtgagaaagaactccttgttgggtggtaatgcatgtgaagatcgtgttttacctctctccttccttgacgaggttggtcttctttggccttcatccttggtgttgccatccgcattaaggacatatggttaagatagttgtcagtgcttgggataggtaggcccaacaaggtttactttgcttttggagtaggtgaatttaggtaacttatcaggtaggttaagtaggtttgcatggccgagttggtctaaggccttattt

SEQ ID NO: 167025 - DNA, 727 bp, Zea Mays
gccagcttgtctctgggcacttgtggcatctgaacttgcacctgaggctgaggcgggggtggctgctgctgcaattgctgcattgctgctaaggtctgtttgattgcctgaactacttgagtctacatcaggaacatttgctcaatggtcatcgatggtggcggtggcaaatgctgctacggggctacctcctcttggggtgcctgctgttctagctgagcacgcctcgcacctctgcgcctattctcaggcatctgtagaaatgacacacatatatcaaatccgactctacagtctttcaacataagaaaagatgtatagaaaatcctcatagcactgaacaaataaccatcttcactgacagcttctcagataaagaggaaagcggaaatagatggattacccaactaaataattgactttattaataactacatcgagttgcaggggataccacaccttggtgacaatcataacaaagatccaacttcagtacatgtccatcataacaagcatccaacataagctaaacaaactaactctaactaagactcactagactaagacactgaactaagcattattacagactctgactctgtcgatctagggatccaaatctatccgggtcctgcagtctggggtaccatagtcgaagcgaccatggggcggtgaacagtaagggtgctgaatcccgacaggggcgggagaaccaccatccagatag

SEQ ID NO: 167026 - DNA, 309 bp, Zea Mays
accccaattgggatgaaataacaagggagcttcatcctatgcagtcgccacaggatcgtccagaccttgttgttcgcatattccgtgcgaaactagaggaattgaagaagagattgactaagcaacatattcttggaaagatccgtgcttatgtctatgtcgtggagttccagaagcgaggtttgccccatgcccattttctactcatcatgtagagaaagtacaagctaacatgtcctgagcagtatgatctcctgatctccgctgagatccctgataagaagaagtaccctcagctgtacaagatgg

SEQ ID NO: 167027 - DNA, 1775 bp, Zea Mays
cgaagttgcgagtacatcaaaaggtaattctgagaattttttcacaacgttggtgtgaaaaaacattgtgtgttctcgtcgaaccactttactcggcctatctaggacctctatgcttgtgtgcttttgttgcatacatctctcagaatttaaatacttatagccgctgaattgacttgggatagtcctttgactggtatggtatatactataaaccaaatggtaaaggtcgattctgaatagacatatatctggggtttatgtagcagaactacattgtattccaccccttggcatgcttaccataatctatatctgatctaccaggagtaagaagagtacaaaaatagccatggaatcccacatcaccacagagcttgaagctacattaggcattaatttgtccttggttcttggcgttggtagagccacaattctcgaccgcaatactgtcagtgatggtaatttgtgatagaaatataaagatcttatggagacctgttgtattctccctagtcctgatgactccttcttataagagtagtactatctgttgttgaagacggatcctaagcggatactagtcttgttttcgttcttgccaagcagttgtcatcatttgtttcatgaaaagctagttatatggtgatttttctcagataaaaatgaattcttggccttgtctgttctattccaaagcttctctttttgccgaacaacgaagagatcgaaataatgctttatagaacaaattggtatataatatgaggagaaatatttgccctgttggcagcaccacaaattattaactattgttataaattctctctcaaaattataatacctaaaaatgttgcataaattgatacccaatttcatatcggtatgagtaattgggtaaaccatgggcaataataaaacgagctggactatacatctctgcatataaaaatctctgcttggcagcattggcctgatgccgtgcacttcaccaccattatatatgcacatattctccaatgtgcttgaaagcacaatgtaaccaatgaatgtccttgtgagcgctagaccctgatggtcattttacttgttgatctgaagtcaactactagctccaaacgatgaatggtatgcatgagaccctgaaggacccttttggataacatagtgttgtgcatatcagtctaaatcttaatgattgactgtgtatttggtaataaaaacaataagtttgcagaattgtaaccatgaagcaacttgttgttgcgtgtcttgctggaagttgagactaatccttcacaatgaaggacaaatatgtagtattcatgccactacattaatctaagtccaaagctcactgcataaaacccctatatgtaatgtgcgtaagatttcccaaataaatcaccacaatagcatacattggccacaactggatgattgtggttggggattttatctgtatgcttttagaacatctcggcattagggggaggaatgcccatatagtgtaatgcctcaatattctattaaacgcacaaaagccaaactgaacctgtcgttcggtgtgtgttcctatgtatatgaagtttgccagaaatcgttgaggagtaaccatattggtttgaatgcttctacctgatgtagatgtggatatacccgggattaatatcatatccacatttgacttattgacatttgatctattctcggggacgtctgtgaatatgatccattggtcttagttaaagcatatgttctgattgcagattcac

SEQ ID NO: 167028 - DNA, 513 bp, Zea Mays
gaactcatcactcgtttcattcgttcaacaatttatctagcaggaataatagatcagcttacccactcaaaacaatttgataacctcgagaatgacgacggtgggagagggcgtgacggggtgttgtggaacttggcacacagcaatggcgctgggactggcgtactgcaccagcgctcggcgagcactgatgttgatgaagtacttgacgacaaggacgaggagcctgatgagtgtctgagcgtgagcggaggcacgtcccggcgagtctggtcaacggcgagcagcgtgctggagtccgagcagggtggacgcatgactgggcgaggatgagcgatttggaagggagctcgacgagctcgtcagcgagacaagcaggaagggctccggcgcggaatacaaatgggtgcaacgtctggtttggatgccagatttggcatggtagagcagcgctaggcgtttccgaagttggaggacgacgttggctggaagagacacgaagcagtggcggat

SEQ ID NO: 167029 - DNA, 886 bp, Zea Mays
cctcgatgggcgatgagcatgacgttaccattgagctgctaacgggtgatccgagcaggggtccgagctcctttcgattggagtcagcttgaggttcagagacacgccccaaaggcacctgcgggtgattcgcctagtcccagacccattcgatggggtccgagggctcgatgcctccctacaatgggataccatcacgaatcgctcccgggggttctcggatgtgtcttaagataccttgggttgcaacccgagcaggggccatgtatgggtgtacctatagtcatccctgactctatgctctggggtggttttggagccctttcgagggccaaccttcgaacccgtgatcaatattgggctcggagccctaaagtcccgaggcggttcgtctgaaccctattgagggccgagccttcaaacctctgaatagtatctttccttgcctcttttcctcctgaagcgatatgccaaggtagaatatgacttttttcgatttgctgctctttttccgagggggtttcctgaggcagaagacacttctttccagttcgattgtcgagaggataaagggtagtgaagtcgagggggagggcataccttttgaggtggaatgtggaacaacactcggcgtgttattcctcggaagggacactgtcatttaatgcaacgagacatcctgtctgtcagccgaccgttcacgacacgcgtgcccacgggattcgaaacagccatcgtccagccgttttcgaatcacaccttggtggctccgtccgtcctataaagctgaccaagagggagggctttggaccattacctttgcagccttaatccttttccttcaaacaccgtttccaccttcttacaaaagatcccttcgccttct

SEQ ID NO: 167030 - DNA, 394 bp, Zea Mays
gttgatgtagtatgacttgggggttgtaacgtgttgcttaatgacgtggtcgtatcatcctcctccccttgaaaaggagtcgtcctcgactctgaagtgtcttcactcgtatatggtaagaggtcagcaacattgaacgtgttgctcacgccatagcttggaggaagatctatcttgtatgcattatcattgatcttggcaagaacacgaaatggaccatcccctcgtggcatcaatttggatttgtgctgatcagaaaaatgcttcttgcgtaagtgaatccaaaccaagtcccccggttcaaatatcactttcttcctatgcttgttcatgcttgcagccttgcgcactgctttgagctcaattgcttccttagtcttctcatgtatctttt

SEQ ID NO: 167031 - DNA, 627 bp, Zea Mays
aatttctcgtcgatgtggtgcacgaccgcaggattgtgctacgccgtggttgacctcgccccttgggccaccatcgttgaggttacatttacatgttcgctgagtgttccgtattaatttctgcctagaattgctgcgaatcgcgtgcccgaacaccgatcggagttgcgccgccgcgggcaccaccgtaggaaatcgcagcgccgccgtgcccctgggtctggggaagaagatgaccttcggaccgttggatcctaggtggatggcagcgattagatactatgcataccccccttgccgctttaaatcatgaccaccgatctgtagatcaagggcttaggttggatctaggcgtggggtgttgtggtccatagatctcggatccaagggtctgggttgcgtacatgtttagacgtggacagatctaatcatgaccataggtttttaatccaacggccagaatccatccataccctttcgtggatacattttgttaaagagcctcctggtgtttatgaaatcaacccgccatcctgcgggatagctctgagtcttgggacgttttgcgtcgtagcccctgctcttccctgtattagtgtgcacagtccagagacttataaattgaat

SEQ ID NO: 167032 - DNA, 569 bp, Zea Mays
ccgttccactgacacctagggcccctgcaccagtctgttgccctcttctgttgctcttacatgtgggccctgttggtcagtacccttgttcccgtcgttactacggaccgagtcttgcggcgggggatctccatggatctcgcatggtcggtgtacttggcccagccgcggactccgcgtcgtgggtgtacaagtatctcccatgcacccgtcttcccatctcttccacgtccactgcttggcaccccgaccacaattcaccactgtcgccgccagggtagtcttgcgccgccgcacgcagtcttctggtcaccgtcgactggcgcaccgaggtggtgaccttgggtttcctgggacttgcagtcgggtggtcgtgtccgcattgggcggatttcgccgtcgccattggctaaattggccgctgctgtgtcatccccgccgttgagccgccgggacgcgtgggcagagtcgtcgccgcatcaaaccaaggtaaaaagcccaccatcggattcaccttgacctcctctatgtgtagcgctagggaatcgagaacttagcgtctgggcgag

SEQ ID NO: 167033 - DNA, 554 bp, Zea Mays
cttatcattccctgcattgaattgcaaatatgggcaaccgatccggtatcaaatacccaagaatttatataagaatcagcaagaaaaatttctataatgtgaatagcaagtgtacctgctgtggctgtacccttaccgttgcgatccttaatagaggccaagtactgcttgcaattcctcttccagtgaccaagttctttgcaataaaagcactctgcatcagcagctggtccagccttgggcttttggtttttcttggatactatcctttgccttgcccttcttttgagatttacccatcttcttaaagttgggtttgttttggaccgccatcacatggctgctgctgccagcgcttttctttaggtcaccctgtgctgttttcagcatgccacatagttcattgagtcccttctctaccccatgcatatggtagttcgtaatgaagtttccatagctgggtggaagagatgccaaaatgaagtcagtggccaactcttggcctattggaaagcctagcttctccaacctctgactgtaaccaaccatcttga

SEQ ID NO: 167034 - DNA, 820 bp, Zea Mays
gacgtaccttgctaccttggatgggatacaaggaggccaccactcacattcagctatggcttcttggtgccttgatctcgcattcagagttcgatgtggttgatttccttatttgtgagatcgaggacacaatattggatggtcttcgtgctcgccgtcatctgccatatgcccattacctatgctatatctttgtgcagctgatcaggcctcctttgttctagggcaccctcgaggcctctcgcctctagtttggcttctattgtacagcccctgtggacccagttcccgtgccagatccagtgtcagatatcagggctgaggatgaggctctcagaccattcgagacctagggtgtcattgttgattcttcttccgatgatgatgaggacctggggatcctaccaccgcctcctatgccacctcgctcacatgatcacaaggttggtagttctagtgttgctcctgctaccccaccagctattgaccctgctctggccactatccttcagtctcttacgcagcagcatgctcatctggcagcagagcaggctcaacaggcagctatccagcagcagatgtccgaattcatgctctccatgtttcaaactatccaaaactgtcaggacacccttcaacagcagctcttggcagacaggcagagcaccgggcactcatgacgcatatccttcagcacaccggtgttcagctcccaccagtgcagtctactcctcctccagctcttcaggctgctgtcgttcccgcacttcaggcaggaccccccactccccttgtttggtcctactatcactccgctcag

SEQ ID NO: 167035 - DNA, 528 bp, Zea Mays
cagagttgggggaaactccgaattctcgagctacggtgattggtttgaggcgaggagtggtgctttgggcacgtaacaagaagacggagcagggagagccttcaattttatagtgatcacttgtgtgcttcgtgaatttgggatgagagcgttcacagcagcgccctgatttctttttcttcggtcgggcgtcatggtagacaatggcgtgatggcatggctagctatctacggccacgagagtacgacacaagagcatgggcaccatgtagtagagaggcatagtgagggagagcccggccgccggtgacacggcggcatgaagcactcaagggagtgccgcgcgccggtctgatcttttacccccccccccaactcaatctgcggagcagtgaatctgtccacagttatccactctccccaggtacgaatatcctaggtgagcgcgaatcgcattgtaggatcaccggcgttgggttcacggaaccggagatctttttcagttactgtaccattgctgatcccatt

SEQ ID NO: 167036 - DNA, 414 bp, Zea Mays
ggaacttgtgcttgtcattcttttgggagcggttgttgcgtcgatttcatgcttgagtcgccggtttgaaccgctgatgtgtactgaacgaatagtggaccaatcccattgtttgatttgtctacagttgtttggtttgtctatagtggcttttgggagtgggagagtagtatgaatgtatgacgcagatagggagagtcgcaggggccacatagcgttcgctattgttggtaagcctgaaacgtcagggaatcgattgttcttttgcccccaaagaaaaacaccaaccgatcgctttcaatatcagaaaagtagcgttttcggcaaaataaaccagttgcaaaggactgaattttcggactttgttgtccagtgtgtcactgtaaggtgggctcaaaggtgattatgtggtct

SEQ ID NO: 167037 - DNA, 492 bp, Zea Mays
aaaatccgtgccgccgccgtccgtgttcgtgcgcgataggaaatggatagagtcggagttaaacggcgcatacgtggcaccgttccctgagtccagccggagacttcaccggcggccaccgtgaccattgaatcttgccgtggtgtcgcccatgcctccatctcccgcactgtacctcctaccgacgtggtcggcatgcacttgtgatgctgtccgtggccgcgaagtgatcgtcggaccgccacggctataaatagccattgggtcctcggcgaggtgcttgctgttcttcaaacaagcttgggtacaaccagaaattcacacggccttctccacctcttcccaaattgatgttgcacggtgaaactacagtctcttacagccgtgtagcctcaatccccgcccccaatgtcacccagagctgccgtaacgccgatttcccccaaactggtctaccgcatcgcgaagaacagccgcccgtggctgggccac

SEQ ID NO: 167038 - DNA, 625 bp, Zea Mays
ctttggtttgacaaatgctccttcaacttttatgcgtttaatgaatcatgttttgagggaatttattggcaaatttgtggttgtatactttgatgatatcttgatctacagtaaatcttttgatgaacatattgatcacattcgccaagtacttactattttgagagctgaaaagttatatggtaatatttctaagtgcactttttgcacagatcgtgttgttttccttggttttgttgtgactgcagagggcatccaggttgatgaagacaaaatcaaagcaataaaggactggcctgtaccaaaaaatgtgagtcaagttcgaagtttccatgggctagcaggtttctatcggaggtttgtcaaagattttagcacaattgctacaccactaaagaacttgacaaagaaagtagttccattcttgtggggagatgaacaagagagagccatccaagagctaaaaaccaaactatgtgaggcaccactcctacaattaccagattttggtaagacttttgagattgagtgtgatgcaagtggtattggcataggaggtgtgctacttcaagaaggtaaacccattgcttacttttctaaaaaactaaatggtccacacctgaac

SEQ ID NO: 167039 - DNA, 733 bp, Zea Mays
atttctggagcatatgtgctaccctctgcggatggcagagagcagggagacgtggtgacaggtacgatctcagttgattcgtttgtggcccatgctctttttgactctggcgctagctattcgtttgtttcgaagaattttgtgtcgcgggctggtctttcggtgcagaggttgggtcacccaattatggttagttctgctaatggctccattagtagttgttcagtttgtcagggttgttccgccattcttgctgatgaggtcttttcagctaatcttattgtgatttccttgggggcatttgatgttatcttgggtatggattggttatctcagtatcgcgcagttatatcctgtttttggaagacaatgttattgcaggcgtcgtcgggtagggaggtggtatttttgggaagttctccaaagttcacgtgatccttgttgtcgcaattgctcccggatcatcggtccaggatgttgggaattttttctctatggtggtggtgagtgaggctgctttgcgggtgcaagacatccatgtggtgtgtgactttgccgatgtgtttccagcagagcttccaggcattccatcggagcacgatgcagctttgaaaatcaaactgattccgagtacgcaacctattcataaggccccatatcggatggctccaaagtagcaggttgaattgaagcggcaattggatgatctgctggctaagggtttcatttaggc

SEQ ID NO: 167040 - DNA, 590 bp, Zea Mays
tcatctttctagggaccttaggaatctgtgatggttcctaggcgaacacatccacatttgcctggaggaaagcgatgagagtgatttctatttttccctcaggttccttgtggtgtgggtggtctgggaggagcccgctctaacctaaatggtcttcacagagatgctgactgccccataaggatatactctagtcgtctttgcaggtgccatggtactcgaggtcgaggggtcgtttctcctatcgtccgggtgtgtagcgactgtcgagagagcatatagcttctcaatggctgcgcacagaggccaacgcctcgcgctgatgctgacggaaagacctcgaatgctgcccgaccacctcatgggtgtcgagcagcggacacgccctagtccataccgaactggaagcaatttgggctaggttgaggaggaggtcgacgtcatcacgtcactgcctcattgcctcgtgggagggtgcagagcatgggggattgcagagcaactccctagctgctgacaccgccccaccagggatgccccatgaggaagctctaggtgctgagtctagtgtgtgctacggcacaacgtgt

SEQ ID NO: 167041 - DNA, 276 bp, Zea Mays
cagaagtatggcgaatgtattttgatggctcgttgaagctgcagggagcaggtgcaaggattctctttatcgcacctggaggtgaacaactcaagtatgctcttcaactgttatttccggcatctaacaacgcggccgaatatgaagccctgattcatggactgaacattgctatatcactgggcatcaggagattgatggtatacggagattctctggtagtcataagtcagataaacaaagaatgggattgttcgagcgattcaatgggaaaat

SEQ ID NO: 167042 - DNA, 466 bp, Zea Mays
gttgaggccgcggaggaggctgaggacgagttgggcgtcttcgatggtttcgccgacgtctcgtagggcagcagccttgatcttgagtcgctggcagtactcatcgatcgttaagtcgccctgcttcaaagagtgaaactcctcaagcaggaagacagcgcggggtgctcgattggagcggaagaggccttcaatcgccacccaaagtttgtgggcggactggttctcgtcggtgatagcaagatcaagaaccgagtcagcgacgatgttcaagatccagccgcggacagtgcactcagtaatgtcccacgatggatcaccggctggaggaggaggcccgtcgatgtggggacgaagactgaatttcctacacagggccttgaagaaggacgcccacttggtgaaattgggattcttcatctccaaagttaccggaatgtgggtctttacgttgatggcggtgtag

SEQ ID NO: 167043 - DNA, 958 bp, Zea Mays
tttgacaggagtggccatggactgaaaccaacgcgctgcggcacccgtgaaatgcattgtcgcgacacgaatccacaccttaggatcaacaaagtagatgtcaaagtaatcatgggctctaccaagccatagacgagggtgttccccgtcaaactgtggaaatggaacctttggcaatggaccaaactgagatccatgaacaggccccggagagaactcgtaatctggatgattggataactcaggaggtttaatatacgagggaaaaccgaaatcgggcgtaccattgtgcgggaggtgagtttgggcgaatacacgcccaaagtcggcctccgggctttgagagtcgacgcggtgccccattgggccgtcagccgtaggtccggcaggagtacgcgcggcggctgacccgtacgcgccgaggattccaggttgaagatgtggaggatcccggggctctggacgcgacggggaagcgattctggcgacggcggcctgtacggaattgactccatgcttgatgtcgtcgatcgttgattcgatgacgggacgccatgaatcgaaggccaccgaggctgattcgagggccgcaacgcgtgtctcggtggcggcagccacccgatccgcccgatctgccgcagtcgtaaggtggaactccaactgagcagcaacatcagtgtgtatatccgccttgaggtcgtagaacttgtcggaggcggatactgcggcgtgctccaggtcaacgatacgagcttcccagttagcgtcatgggccgcgaacttcttatcaagctcggcgaggaacaacttggtttgtgcctccagagccagcttgaactgcggatccatggcaccgactgatttcgcgtggcgggtgaagtaatggaactctagaacgccgaggatcgacggaatctgataccaatctgttagcaccggttacacggagcagaactga

SEQ ID NO: 167044 - DNA, 332 bp, Zea Mays
tggaagcctactgcgacgaagttcggcgcctggaggacaagttctatgggctcgagctcaaccacatcgctcgacgatacaacgagactgcggacgagctagctaagatagccttggggcggacaatggttcctctggacgtcttctcccgagacctacatcaaccctcagtcaagaccgacgacacgcccgagcccgagaaggtcttggcccttcctgaggcgccctcggctcagcctgaggcaccctcggcccttgagggtgaggcactacgcgtcgaggaagagcggaatgggctcctgcctaatcgaaattggtaaaccccgtacctg

SEQ ID NO: 167045 - DNA, 282 bp, Zea Mays
gccaccagcgtcgcggcaaccagccgctgcgaggagcttgcggacggctgcgagttgtcaacgtgtgttagcgctagggatggaagagaaggagagtagacacaaagtggcggctgcaggaggaagataggttagcgacgaagtgtttctttctgtttgttctctgattttcgatgcccgtttacggttccagcgtatgtatatatcccatattacagatcggcccagccagccatcaattgatccattccggcccagttactcggacgctaccgtgcttga

SEQ ID NO: 167046 - DNA, 482 bp, Zea Mays
cagggaggtctagctcagtcaaaagggtctacgagcaacaggagacttaggggggctagaacatcgagccaagaagcttgaactcacccgcaaagagctagccacggcgaggtgttcacggtggcgcggaaacccgatttgggggaaagggaaattgggaggctatggtggacgatcagaggcgagagctggtgcactaggtgcgtaataacctagcggagctcactggggcatcaatttataaatttcatcagcggtggcgtccaatttggagaaggcgtgctggcggctggagagaggggaagttcactggcgcgggttaccgtggcattcactggagcaacgactcagtcgatatataggccgtctatagcgacctacgacgacgtggtaacaaggcagtagtgtggcgtgctcaggttgacagcgatcatcaccgcgacggccaccagccacgtcgcgacgtaagtggatgaggtgac

SEQ ID NO: 167047 - DNA, 510 bp, Zea Mays
aaagaaaattgtgagaagcttgcggatgctcaaaaatcatttattgtgcatgaagttatggtagtcactgaagatgttggagtcacttgtgacttacttgatagtcttacaagtgaaccactacctactaacactattgataaatgcaaaatttctctcatgaatgataatattgctcttgatgaatcaaagatcattgttgagaatgaagtgttagtagatagagtaaatgctctaactcatgacctagaaaaggcatatggtggaaaggctaaattggatttcatattggaaagtcaacggtgctcacttaaccgtgagggtcttgaatatgttcccaagaaaggaaagaatgcttttataaagcaaaaaacattgtttgtgaaagaatgtgacaaagtgtgtcacaagtgtcacaagaagggacatgttaagaaaaattgtcctaagctcaaaaatgtatcctacacttgttttgagcattgttatgttctctctcataatgcaaaa

SEQ ID NO: 167048 - DNA, 469 bp, Zea Mays
tgctctccctcgccggcgacctcccctcaccggcgaccaccgtgctccggcgtcctccagtgcttgtgcctgcccttcctctggtgagcagcccaagctcctcctgcctccctcttctctctctgttagtcagtgctgtgaactcctattccaccccttgagtgctaaattcaaattcctatcaaattctatgaatccaagtagttgtgaatgtgtctagtgctctattgaatatccctgcaggtttctagctccctttgggagggtttcaatcctcaaatggccatttctcgcaaaccctaaactctcgcacatcacgtgttcggtgaaatgcccaaaccagccaaaaatgctctgattgaacccaaacttttcaggcaccttcacaacacctccagtaacatattcgccaaatttcacgccaatccaatataccagacttcaatttcactcaattccccgtttcgag

SEQ ID NO: 167049 - DNA, 691 bp, Zea Mays
tcatgacctacgaacccctcggttcgcatagcactcatgacctacaaatctcccagactatggtgcatttatggtctgcgcacccctcggcctacgacgaactcatgacctatcggactaggcctgagtgcacagacctctagcagggcacaacatgacaggccacaccgagccccaggctacaaaggccaagggtcggtatagactaaatgatggtgcctgggaccatcgcagcccaacgccgtccgccacggtaaatacaagacagcctggcaacctcgaaccccacgagtacgcgtggctttaccatgggtagaatgttagtttcacccttgcctgatggatccttcccaaggaagccaccgctgcctgacccctctcccggactataaaatggaagggttggcctccaggcaagaggatgcttccaaaggtagccagacgacacctagatggagccgaacccacaaggacgaaccccggacgaacaagaggataaggagcgcccacgaggaccaagaggccggagccccaccgccaagccaaaacttagctaggactccactctgtagcttctaagctccacttcgacccccgaataagagacctgggagcctctcctccctctctcgcccacttgtaacccctactacgtgttttgaccatcaatggtgccggtagcggaagccgc

SEQ ID NO: 167050 - DNA, 715 bp, Zea Mays
atctgaacgagcatgagccgtccgatcccaatctgatggatccgttataacgacgaaggggtacacgcttccgaccaccagatctagatccgatggtgaggatcccaccaaccgaacctttatttggtgattaaatcccgagcgcccattaggaatccgatgaccgagggctccccccatagatttaatcccgaccgcccgagtccgaatccacggtcagcaccctccaatccaatcgtcacgccagtgcagataagagccatcgatcaggaactcaacggctggcacgatttcgacctctctcccctgactccggccggtggtgccctgtgtgcacggcggcgtacccgccggggcacaacgctaccccattttctcgcccaaagacccacgccaatggctgcaaaatatagagtaaggcattgcaagacacgagaaggacatctcaccacggctagacgcgtgggcggacccggccgcgggagcttgcggtccgcgacgggatttgatcgacgagcaattcagtcggtgctggcaatgaatttcaagcggcccggcttcatctaccttcccccaagccagaggaagcccaagggcaccacaccgaggacccggctaacgacgagtcggagttcacacacggcggctccctacgctctagaccctcatacgccctcacgatttgttggcaaccctgagctccaatgcttgattg

SEQ ID NO: 167051 - DNA, 630 bp, Zea Mays
tcagcaagaccatccttcgacaaaattgaaaggccatcttctagcttcgggaatcccatgcttttacctatctcccggcaaacggatatttctttgttgtctgggagacagtataagaaatcatctccattccttccgttaaaaactaaggctcctttcagatatttcagtttttgagcataatgccttgcttcaacgatttcattttcggacaatttttccccgaagcatgtcgaacgatgtagtcgatattttcaattggagcttcgggagcagcaatcttgatcttttcaggtgcaatctgccctgccatttcttcctcaagtgcggtaggtttcgtcgtagtgggcgccgaaggcccagcttcggtttcagcctgagtttttgtagcttcgacttctgcttgcttagtttcagtttcggtttgcactttggcagcttcagcaactttccttgtaggagcaaggctcaaggccttcgtagtctccagcacatcatccaacacgttggccatcctcctcctcttggaagtcgcggtagaagcctttggcaccttagtcagttttgcctctattggagggctcaaaatttctggcattttcattatttcttcattttttggctcttcag

SEQ ID NO: 167052 - DNA, 742 bp, Zea Mays
ccagcttgggtcagacggcggcgccgccccgtggccacagcagggagcacgctggcacgaccctgattgatgccacggtgccccaatacacaaattaacaggtgctacacgcacagcaaagcgaggcaacccggttgggaagaaccttatcgatcgatagtgccgcagagagacccgcccacgacatagtctggatccgcgacggcgaaacgagcacggcgagaaattggaatgactctggggctccattctaccgtcagatgcctcaggagcacgcggtgcattagggcgaatcccctgtgccatacaaagtggcccgagcggcggtgagcaggtggttcatcaatggcggccctcacagttggtggcggtcaaatgaatgtggggaaaagggaggtcgcggccatggatttatagccagagatggggacaaccatggccggcccgaccccgagatccgcgcgagattggggagggtctgttgcggcgaactgtgaggatttcggcggaagaacgacgctcggttctgttgcgttcggatgaagaggacgctcctgacgccatgggcccacgggcagaggcaccagagactgcgcgtgtgtgcgatggagtcccaagtccactgggacccgcgtgtcggttcttggagaggagtccgtgcggttggttaaatggctggggtgttagctgggccgaccgtgaggaggataagtgggccgcaagcagagaattcggcccaagc

SEQ ID NO: 167053 - DNA, 337 bp, Zea Mays
cggcgtttcagggcgactggatggctggaggagggtgatgagccctgtgccatcagatctagagtaaacgtctgtgattagctagtagatctggccgtcgattgtgttgaggatgtctcacatcagatcggggatagcattgattcttggtcattggatcaggatccggtggttaggaaggcgtggtcggctttgaaccatacgatagagatctgacgaaccatgtggcataccggtccagtataagggtaggtctaatcctaacccttgatccgcgatcatacggccctgagatcatgatacccctaagagctcgtgataaattagcgaattaacc

SEQ ID NO: 167054 - DNA, 407 bp, Zea Mays
cggcgtgcctgtgaggtgcataggggcggcgccgccggtcagagtttggtgacggggaacgggatcgtggtggccgttgatcaagggatgaacggcacggattagatctcgcataccctttcggctaggaaaggtctgggccgtagatcatcaatcggagggcccgtgctaaatctgttatgtggatgatttcgggccattgatctttgatcctagggcagtgaacgcatatcggattataaccttccccgatctaatcgtggctcttgatgcgggatcgggcggccagaattgatctataccccttcgcgactgcagttttacatatgagccccagcctttacgtaaatagaacccgccgtccatgggcgatgttcactgagtcttagaaaatttacgtgttagcc

SEQ ID NO: 167055 - DNA, 997 bp, Zea Mays
gctttggatgctcttctgatggaccgataccagctttaactgtcgtcacagcatgaattgtcatcggagctaagggcataacttcggcatgttcgacagtttctatattttcagtatcaaacattgcagttgccttctctaaaggacgtgactttggcctgcgagtcagaaccttgctcttttcggtgtagatgcggcggaagaggacgaagcagccacttttctctttaacccttgctttcgggcagggaaatagtaatcaggataaaaaatccaataacattaaaaactctattcaacctcctgttttcgcgagcaccaaaggcaatggtcatagcttcatcctccgccttcgtgtaggctcccagcagctcataactggtagcctccatagcctcaagccaatcatcattcggctcatccaactcacttctgaaacagtaggtgtaccttaagtaaaccaggccaccttcgctggagccggcagcagtttccttcggcatgtcccagtcattcaccagtggccacactttgtaagcaatatgctcttgtaccaaatccctggtaccaatatacgtgcacacagtgttaaaagccatcaaacacgcttgcactttgttcccaattgcaatggacgaccttctgatgccaaagcgtgaccgtatgggacgttggataatgccctccacatcttcccactcactcagatcattcttcacatagaaccattatttcattcaagagcccggccacttctttcgaaatgtcggcatggggtatctcgcatcagaacgggacacaaagttgtagcacccgaagttattgtgatactgttccttcccagttgcttttgtctggtagtataattcatgaatgttacacaaacatttagcatctggctccagcccttggcttctcatggcccaaataaaacacccactttaatcaaagcttcgggggtaagctgatgaaggtatatctcaaatgtcttcaatac

SEQ ID NO: 167056 - DNA, 630 bp, Zea Mays
gtattaacactccttggtatcgattgacttagaggactaccacatgcagcagaggaggtttgacaaaggaagggtatgagttgttccagacaatgaagtggaggtttgggattgaaccaagaattgagccttatgcttgtgtggtggacttgctttgccgtgcaggaatggaagagcgagcttatgagatcatacaggggatgccaatgagaccttccatttctgtctggggagcactacttgggggtgcaagatgcatgggaagacagagctaggaaggattgctgttgagaagttgtttgaacttgatcctcaggattcaggcaatcatgttttgctctcaaacatgcttgcatctgctggcaggtaaagtaacttaaatacccttcttttcaaacaagctgcactcactcataaattgtgcttcagatttaatgtaagtttttaattgtcccaggtgggcagaagcaaccgatgtgagaaaggagatgaagaatgttgggatcaagaaggacccagggcacagttggatcacttggaaaaatgttgtccatgttttccaggctaaggatacaacacatgatatgaatagggagatccaggcattgttggccaagctcaaagggcaaa

SEQ ID NO: 167057 - DNA, 909 bp, Zea Mays
tttattcaatgttttttcttttatttcactaggattaatcgtacaaagacataattaattttattttctcagtatctactcgaacccactagaacgagtgaggaccatcatctaacatcgtgccagagaagaaaaggcggatgaaaaaagaacagagtagtgctacgccggcttgagcatatcgtcgagcaccatctgcgtgtcatcctcggcatcgcctgcattgcctgctacacgagagctgattcaaacttcggctgccacacgagttcgaggatggagcaggggatggaaggtccagcatgacctcaatggcgagcggtggtgcctgcatggccttggccatccccggcggcgctgcgcctgcgagcagggaagagcagcatgacgagcgcgttccataccgccttgagctcgtgttcggcaactcggcgaagtgcacggtcgcagaggagacggccgacgaatgacagtcggtcgtctttcctcctccacgacacgcagccacgtgctccttctcccaggcatcggtcgtctttcctcctccatggcgcgagctgacttgctagatggctgtcgcgatgtgtgtgggcgccagatgacttgcgacgacgctggcctgcacggtgatgggggatagcatggtcgaggtgctctgtgctgccgcagtctccaacgaaagctccgaaggccatggcgtggtggtggctggctgtgcgtcacagtgtgttgcaactcctccttggacgatgcgaaggacagatagcggatgaacaacgattctccacctttagcggctgtcagggggctcctctaaattagcgaacctcttagcggacgttgttggagcggatagcgcatgtaccgaacgctaaatttagcgtacagatcggtttaccggatattgtt

SEQ ID NO: 167058 - DNA, 2997 bp, Zea Mays
caatagcatcaccttttttacgaggtacactagcaaaatatgcattcaaaataaatatatttcccatcatactttttattctagctgtcaactagaataacctaacttgacctgttaaagagatggtgactcacagcggccacaataaacacataacagaattgaaattaaattttctaatttttttcaatccttttagccatttagaacatcatgtgaacatggtgctctaaaaagaacttgcgccacctgcattaccaatctgacctctgacaatccttttattttaggaattttggggcaaacatgtatggtaataatggatgctgtttactagtattacatacctggtttctttgcttcccaccatgtcttgtgggcagcatgggaactgtcctcctagcattgctagatgaagctactccagtaggctgattatgctgtttttgccgtacatcaacaggggctatactcccattccgtagaccacatagcacaacttttcccttataggagtgagaaaatccagtgggcatagcagagacaggaatagtgtgtcacagtaaattccgaagtaatcataacatggatacagggtcaacaagaaagaataaaatccatattacgtaggtctgcagattatgacatatgctgcaataggaaaggtcacatcggtagcatattgctttcctttcaaaactttgagaatcatgtagtcatgcattagatgcacatgcaccaaatttaagcttaactggaaagtgggggcaaaaggttgaggcaagcaaaattttcaataactgtcatttgacaacaaaccataaaatgatatctcaaccagttaaaactacaaagtgggaagaagtttaggtagattaagattgttaccgagtgcacaaatttcagggaaagaatgtcgcttttagaacgacataaccatgatgatccccttgtttccaaatcgatcagaccagcaccaaggtccgaacctagaaataagatgaacaagtgaatcccaagcgaaaggatactatatgtgtctgtaacataagcaggctgcaaactgccaaaactgtaagaatgagtacagcttgctatgacaattaaattaattcctccaactatagcaatgactaacctttaaattgcaaaacggccatcacaataaccaaaactgagttattgtgaaaaaaatcacatatgtatacaagtaccaaaacaagcaggtcttgctatatgggttcaatattcaactgtcacgtttaaattatcaaagaatttcagaaatgctaattccgtagtgaaattcttagtgaatgcatccaacttgatagagttacgtaacacaaggttcaatcagaaacaagttgcaaaaatagtgtacctaagtgcaagggaaactttaattatctccaatatttaagctctgactcaacgaactcaccgaaagctgcatgtgtgccatcagaactacaatcagctgtccacattgttcgatcaagtgaatgaactctgtaggtagtccatggtccgattgccaagtcaacagcttcagaaagatccataatatataaagaggcacgagattctccagatccaagagtagccaccatgttttacaacgtcaagggacacaagctcacaacatatttccagttaataataaagaaaacataatgcaaacatgtgcaactatggcaacaccaaatgtccaaataaatagagagtacaataagtaacgagttcaggatacaatgctcgctgaactgatgaattggtgttcgatgcatcagggacatgacgtccgagcttctttatgcatgatatactggatgagaaagctatgaagcctgttccaggtgaccaaatgctggggagtggtcctggcttgtgctttcccacaagagtacaagcaggttggggcaaaaactctgcctcattctcaaagttactcagagcagtccctaatccgtataacctattaagagattataggaaaatgcaccgtgacatttgacattagtaaggccatgaacccatgctcttacacagaagtaagaacattgagagataaaacatatcgacggattgtgagaattgaagtatagataaatgcacactttctcttagaacaaccaacagttaagacaaaagacaatctgtgcgactgtgccagcagacaatacagcaagtgtgacatggtgataccaagatagtctcaacaaggcctgcatactacaatttcagtctcataatgccatgactctacataacttgaacaaaaaaaaacaaatgaatccaaatagtagatagatagtaaatagaaacagataccaacgaagactcttaccgaatcgaaccgttcatgctgccggagactagcagcctggactctttcaacccttgcggtgtctgaaccatggcgtccaattgttcgagcgccttatcagccacagaggtggtggcttggtacttccagacctgccaagccgcacgatgatgaaaaaaatagagtattacaatacagtaacgcacaagaaagcaaggagtaagtagcccgggcgatcaccatgggctgagacgcctgcgcgtagtggcactgctgcttgaacgtggacctggcggctttattggagaacatgactccgccgccgtacatctccctggcgttgagcagctccggccgcctagcccttttcctgctgcatcccgttgtgtccacggccggaggtggcgctggcgtgccgcggcgggcggcagcgcccgggatggggcccctgatggggaagtagcgattcttctctgggtcgtagtagaaccccggcagctctgcaggcaatcgtcgactctctacgtcagtggagcgcagggaggggtcttcctccgtacaaagcatagagataagagtagaacgcggacctttgggcggcatgtcgccggcgcggcggttggaacggaggctgacgagcggcggcggcggagcggtttgggaatctc

SEQ ID NO: 167059 - DNA, 503 bp, Zea Mays
gtttgtgggtggtaggagctgctgagacacaattgggttcctattaagcggaagagctcttgccacaacttactagtgaaaatggggtctcgatcagatatgatagcagcaggtagcccatgcaatctgtacacctctgacaaatacaccttagccactgttaaagctgtgaaaggatgtaatagaggtaggaaatgggcatacttcgagaacttgtctaccaccaccaaaatgcaattgcccttgctggaaggaggcagtccagaaatgaagtccatgctcacagtttgccaggcttgttctgggactggcaggggcagcagtaacccggggtatttgactctttctggtttagcttgttgacagatctggcacgaactcacaaattcatgtatatgtttcttcatgcccggccaagcgaaattagctttaactcttctatatgtgactggaaaaccggagtgtcctcctacgacactgtcgtgtagtgctgtcatcaccat

SEQ ID NO: 167060 - DNA, 414 bp, Zea Mays
tgcaatttcatgacgagtctggtgctgcttggtggtccacaggagtgtatgggcctcatcaggacaatatccttcctgcaggaattacgagatatcagggatgtttgtgttggaccatggctattatgtgattttaatatgatcttcaagccagaggataagaataactccaacatcaataggactttgatgggtaatttcaggagcctaattaactccatagagccgaaagaaactcctttgattggtagaaaatttacttggtcgaaccagacaggaacccaccctagtgaagcttgatcatgttttctgcactactagttgggaggagtttttccctgattgtttgttgtatagcaacgcccctgaatgctctgatcattgccctttaaccctcaaatttcgaaaggattg

SEQ ID NO: 167061 - DNA, 527 bp, Zea Mays
cacaattccagagttccccagggtcgaaactacaaagtccagggcctttgtggaattacttttacacagcagtgggtcgcgggttgttttctaattttcagaagggctctttagcaaaaaggcaacgacgaagaggtataaatagatttcagccgttggatcctagttcaagcgctcagatcagatcttacttaaaacgaaccgaatttcttttggagcccttggatctgtatccaacggtccatagcctatctgcgggttggatggcagggactgatccatccgtcggtccccagatcaacggttctaattcactgcaaccacacgacgccccagcttctaatcccaaacgtccagcagggatccaacggcccaggtaccttctcctacctccagcttcccaggcacagacaccgcgtcctccccagtgctctctctctcccccgttgatccaccggcgctggccaagacccgacaggggcaccccggcgactcgccggcccctaggaccgcctccttaccatgac

SEQ ID NO: 167062 - DNA, 503 bp, Zea Mays
ccggtcgctgtcggcgtctgggccgcggcggccgtcacatctgccgctgggttcgttctgctgttccgccagcagcagcgtcgccaatgaacgagtgatcggtggatgtgtgttccgtctgtaacttgtaagctccaagagcctcaaatagttacaggcatgggatgggatcgatgcctggcctggttgctagctgctgtacgtatcatctcaaactttctgatggtgatacgcaattcgatcaagtgcctgatcgacgagctttgttttattatttttggcaggttagattgcccgtgcaatgcatgcatgcacgatgatgatgttgtgcatatgttattgaaggttttccgtgtgctggtgctggtgctggcctggtgatacggaggaagaaatgctttcaatctactgtacccggccggtacgttcagatgaattgtgatggcctctgccacaaacctatgtgtacgtattgtatatatgtgcatgacactattttagcc

SEQ ID NO: 167063 - DNA, 552 bp, Zea Mays
gcacgacgaggctggtaatggggatccacccgttgccaagccgacagggagtccggcaggaggacacagttctgtcagcaggccgggggaacacccatccgtagcctcaccctggcccatacccgaaaacatgtccagcccaaccggcccatgctcagccacaccaactgggccaagatcaggggaccccgaagcaagcatcacaacaatagggtgctacatgggaacagacgtgccgcccccaatcaaagcattaggagcaacacatgcagatgccgccgccatctcttcagaagccgaaacagccgggcaacaattactaatcagggcacaaaccaaagcaccctcctaagctcccacgccccggaaggacgagcatgcgggcgcatcaaccaaagcgggaccacgttgaaccatcacaggaacgggagactccccggaacccgcgacctccgcctcgactccaccagacaacaacgccgagcacgccggcagggaagaggaaccagcccggcccgggcccggttcccgaagcgttccacccacgccgga

SEQ ID NO: 167064 - DNA, 468 bp, Zea Mays
gactccttgctcatctgtcctaagatccggaagttgctccttgcgagctctctccataagtctggctgtctctgcgtcgaggcgttgagccttgcgtatgagatcttctagaattggcttgacttccaggctaccgttgtctcccagacatgcatttagctgagctgattctttcttccaatcttctaagaagttggttcctttaatcccgaaaggttttcggctgagggcgtctgctaccacgttggccttcccggggtggtagtgcatttcgaggtcataatccttgatcaattcaagccatcttcgttgacggaggttgaggtccggttgcgtgaagatgtacttcagactcttgtgatcagtgaagatgtggcatttgttcccgatcagataatgcctccatattttcagggcgtgaactatggctaccaattccaagtcgtgggtagggtagttctgctcgtg

SEQ ID NO: 167065 - DNA, 712 bp, Zea Mays
caacttgggaaccgaattgtgcttgatcgagtggaggtatgagaaagaaccttataacaaaattgaagctggcatgacggacaacaactttgatgtagtcagataaacaagttgtcacataaaaaaattgagaaaagaacccctcaaatcattatatcaggcgtgctgaatgaacattgccatggtacagtgaactgaacaagattgagttccgtgtgcccgtcgccgacgcccctccaccgtgattcaagctcgcgccatgattggtgccactgagacgtggatcaatggaggggtaaaaggatctctggctcggattcgttgatcgagttaccgctctagccacggacaccaattgtcctcaccgtgtttcaatcactgtcgccgtagcaagccaccggacgctccggccatccacgcagctggttggaggcttccgtgttgcaccgtcataaagggtccgcggtaagcccgccatgttactggcttgaggacaccgtaagagctaacgttgagctcctcgggctatcgccgccgccgtgattcagcggtcaagttgaccaccgtcgtggtgactccctttaaattgagcttgctctcagtctcgtctctttgttacgcacccaagacaagctttatttcccccgttccaccatcggtagccaagaacacaagtttttccccatcagtggtcaccaatgccgacgagtgg

SEQ ID NO: 167066 - DNA, 437 bp, Zea Mays
ggttgatgctgaggtagtggtccctcttttgtcgcttcatgtcgaagtcgacgctggaccctccagtgatcatgtgaatgactccgcgatatggttgatcatcgaagtattcctgtttcggtgcttggggtgattttggtggtggatgtttggctgatgcgggtgcagaggcagaagtgggggtggtacgacttgtacctcctggtggtgttggtatgcgtggttgggtagatgctaggcggggccgtggttgtatggttgtgggaggtggtgttgatatgtgtgcgcgacaactctggggttgtcggcgggctgtgcccgagacatcctgtccctggtagccttcgtttccgggcaattcgttgggtgcgcgcagtcttcgccatgaaacagacagtaaaatctgcgcggctgctgcgcccgtcctcggccccgac

SEQ ID NO: 167067 - DNA, 645 bp, Zea Mays
gtccatttgagtgagactatatgatccaggccgagtgactttagctactatgaatggtccttcccatagtggtgacagtttgtgccgtctctcccccgtaagaattcgccggaggacgaggtctcccactgcgaaggatcgatgtcgtatggccttgtcgtgatagcgcctcagagtttgctaataccgggcagaatgaatcaccgtgttcaatcgttcttcttctagtatatcaacatcctccagtctgctagcctcatcttctgctatgttttcaaagatcaacctcggtgccccaaacttgagatcagtgggtagcactgcctccgaaccgtagaccatgaagaaatgagtatttccatgcagagctcggctaggttgagttcttaggctccaaacaacatacggcaactctctaatccactttcctgcgaacttctcattcttgttgaaaactttctttctgagtgcttccaatatcatctcgttggctctttctacctgcccgttggctcttgggtgcgccaccgaggcatatttgatctgaatgcttttttgttcgcggaaatcaaaaaactctgagcttgtgaaattggatcccaggtcggttatgatgctatttggtattccgaacctgaatattat

SEQ ID NO: 167068 - DNA, 1160 bp, Zea Mays
gacagcctccgcgatgtcggggatgaagttcctcatggtttgaaaactcctcaggaacaagcagagggtctcgttgctttggcgcttgatggacatgaggtcccaagtctgcgccggtttgtcataaagggattgaaagttcacgacaaaccgatgactgaagttgtccccatcgttgaagcagtggcaaggaagatgttggagccattgcagtgcatcttgcctgaggacgatggacaagtacgttgtcatgacatcctccattactccagcggcctgggcagcgattgtgtagatagccaaccagccgcccgaatcctgcttgggcttggacttatcgacgtttgagactttgaaattaggcaaccattaaattgctcggagtagggggaaagggtcgagacaccgcatgtcccccagtcttcctgatgatcttctagggcatggtcgcgatgacggtccctgagaagtgagtgacgtcgtgtgtcatgttgcctctcccgggttgaccggcctagagtcgagatgttcatagaggctgctgccgactcagctctagtggcacaactacgtgccggtgcaccatgatctcggtcgtactcttcctgctgcatcatctcctctttgtgtcggctatcatgcgaagcgttgatgttgctccacgcgtctcgtcgtcggttgatgtcgtggcacatttcgtttgtcgcatggacgaggggaagaagatggttcactgccttggtgaggatctgttggtagccttccgcatccggggtgcgcggcaagccgttggcgatctgagccagggctccaccaacttcactcggcgtgttcaatgctcgagtgaaatcgggtagcaggttctaagggagaagcgggttcttgtgtcggagcctggcgtcttgttctgcttgttcccgctcgtgctcctcagcgtggcgaatatcacggcgtcgggaattgcggcgctcacagagcactctgtcattaggggtttcaacgacttcagaggctttgtctcgggagtcgggttgagcaggatcccgttcctcggcctcgtggtgacgctggatgttacaccgcctattccgatgttgacgtgcctcacgctttgggggcacctccctccgtacagtgggctcatcatcggagacgggtgc

SEQ ID NO: 167069 - DNA, 610 bp, Zea Mays
ggcaagttcaacgggtcgtaggctcgacccgacccatatactgttaatcgtgctatgcttgggctagctgcttggctcatgggtgggcacaatccgacccgttatctaagatgtgtcgagcttaggtcgtgtcaatcatgctgtgcctaagtgggctgaggccaggttaacccggctcacccgtttgaatatatatacacgtaagtcatgttgtgcttaggtcgactcatgcgccgacttgacataaatattttttttatttttttgtctatagaaatatctatagtactaggtagtataatattaaatttataaaaatctttaaagtttgagtctctagagaaataacctactacccatgagcgtaatgtcgcatgttcaagtcttctctatgttatctttttggctatatttttagtatgacacgacatgatcaataatcaattttctatgttgtcttgttggctatatttgtaatgcgacataattaggtacggcaaaaagaacatcttaccctgcgggggggtgttgtggtgcggctttaggtcctgttgaaagtgtggaaatgattggttgtattccatgaatatgcatgagtacatacacaggc

SEQ ID NO: 167070 - DNA, 441 bp, Zea Mays
gttgtccgtcgacaagcaaatcctcctttgagctagaatttccaggaacaaaagatgatacatgtcaaaagctcgaggatgaaaatgagaggctaagaatgagcttgacacaactaaagggaagtgcactgctcaaccttctcaagataactgtgattacatggtgaagaagcttgagacgggaacaagcatggcatgcacaaaatcccgtgaagaaaatgtcaaggacttgaggattgccaaaaggaaggaacaaaagaagaaaatcaatacctctaccaaaagcctcaaccatgcctccatgcaaggtaacatccaaggtaatgatcaagccacacttcacactaagaaaagtaagaagtgtagtgaatgctttgaaaatgggcacttgattaggtcatgtccctatattaagaatggcttgattattaacaaggatga

SEQ ID NO: 167071 - DNA, 623 bp, Zea Mays
gaaaaactgaaactgaaccctaggttaaaagtgatcctagtaaggtgaggccaagtttgatgcgccatatctttgaaaccactcggtattagtccaagaatcctatagctagtttgtagactgatatatggtgaacaaatcttagtaagggagattgctctgttcttaacaagaaattggagattaagcagggagaagatggtcggttcagacgactgaagaacaatctccatggtacagtgccttgagtggatcaatacgccagatcagctcgccgtcgttgatcgccgtcccgattcgtgcgcggtactggatggataatgtcggagaaagggtaactcgtacgtggcaccatctcctaagctcagcgggagttattcaccggcggccaccgtgactcagtgagctctcgccgcgctgtcgcacatgcttcgatttgcctcattgtgcctcttccttacgtggttgtcatgcgttaacagcccacctcgtggccgcggatcgatcaccggatcgccgtgcctatatataggacaaggagacacggcgaggtgttcgcagttcttcaagcaagcttgagtaaaaccagaaatttgcattgtctcctcctcctctcctcaaat

SEQ ID NO: 167072 - DNA, 367 bp, Zea Mays
tgctggcatactaacattgacttcaattctttctccttgcggactggttaatgtaaccatcctcttagcacaagatattaccccatcatacttggttaagtagtctattccaagtatcacatcgattccactcgattccaagattataagctctactagaaagcttatttctctaatctcaagcttagtctgagggcatgagtgagtggctctaagttcacctcctggtgatctaattaatagtttcctcttcaaaggatagtttgatatattatgtttttccacaaacgactttgttatgaaagaatgagatgctccagaatcaaataaaactgatgcaggtatggagttaataagaaacataccc

SEQ ID NO: 167073 - DNA, 515 bp, Zea Mays
cttgtcccgagatttaaggtcctagggcaagtagtggaaaaggaaacacgtcacatttttatttccttgtttgtcgtacagagcagggggtggtatgggtctattccatctttacaaacaattgtacatatctcacaaattacatgaagctaaaaagccagggaaattcttttctaagaagccttgggtttcccatgtagcttcatcttcagtatgttggttccattgtatcttatagaatttaagagttcttctttgggtgaccctgtccttttgatctaggactcgaatgggatgctctgaatatgttaagtctggttccaaggtaacatccaccatatcaatggttcgattaggaacccgaaggcacttcttcaattgggatacatggaacacatcgtgcactgcagacaatgtcttgggtagttggagtcggtacgccactggtccacatctttcaagaataggaaacagaccaatgtaccggggtgcaagctttccttttacaccgaaac

SEQ ID NO: 167074 - DNA, 633 bp, Zea Mays
cggacacatattgaagacaagggtgttcaggttatcaaggaaatgattaagcagaaggcggagaaatacaagtgcttccgtcaggacagcaagggaattctatggtttggagatcgattggttgttgccaaggaccctgagctcagaaggaagatattggatgaagctcacctttcaaaattctccatgcacccgggcagcaacaagatgtaccatgatctcagatccctatactggtggaccagaatgaagagggaaattgccaagtacatatccgagtgtgacacctgccagaggatcaaagccagtcatttgaaggcagcaggccctttgcaaccccttcccataccatcttggaaatgggaggacatttgcatggactttatcgtgggactacccaatacctccaggcaccatgattcaatttgggttattgtggacagattgaccaagaccgctcatttcttgccagtgcataccacccacaggacggagaagtatgcagaaatctacattgaccagatagttcgtttgcatgggataccaaggactatagtatcagatagaggaacaccatttgtggcacgattttgggaacaattgcaggaatcacttgggaaccatgtagtacga

SEQ ID NO: 167075 - DNA, 596 bp, Zea Mays
tttgaactgcttgacttaatgggaacttgtgggggtgggatgtccgtgttcaatacccgagactttttctttggatgattagttactgaactagagggtgcagctgatttaaaagtgtgcttcaatgttggagcaggcataaaatcgtcgtcagacgatgcggctggtgttgtaggctgactttttttcacccgacaagctagcacctttctacggaaacgagtaactgagaatggcggctgaggatctagctgcagcttggtctgggtattatcagcatgttgggaggagctgctagatcttgtgcgtctataaatgtcaactgaaaacaactcttggcttgattcaatagttaatctttttggattcgatggaggacgatcaacagacttcgtgattcagcaagcaatgtaactgttgacaaatgactgaatttaaggaaaatgatgtatgaatacatatatgccatgaccattttgcatagtgtatataactgtatttaattaaactaccttttccggttacatgccataacagttaggaaccatgtataaatacaatcataaatattacctaactagttcatataagtgcaa

SEQ ID NO: 167076 - DNA, 686 bp, Zea Mays
aaatactcgacctcgtcaaggccggacgtaaagactcctgaacacattgtttttcgattgggccgactttggtcatagcttgttgggagaaaacagtatccattgatgtcatacctagaatatttcctgaccctataagcaaagccaatagctacttgtctcaactcggcacacatagatagatctctttggccctacaagtattcacaagttaaaagacgctaaattgagttcataaacagatctctttgacaaactaagcacgtaccttatgtttgaaccaggaaatgaaatcaggcaatccatttcccgcaccctttctaagaagtctatcatattcctgtggagttgggtcccttgatcgacactagaatttatgaagaaattgttccatgtatggcgtcacctcttcaaggttggtcaatacatatagcatgatatggcaccacttttcatgtctaagggtcttgctggtctaaccacttgcgcttccgagttggcctcgaaatatgatgaggttcgattcattgccgccatcattgtaattagggagtgaattatgcatgctcggcagtttgtcatcatagtaagttattgtgaagttagacacatcctctagaatgtaagcctctgtaatggaagcctcgattttgcatctatttctacatttctttcgaatagtcttt

SEQ ID NO: 167077 - DNA, 389 bp, Zea Mays
ttcccataagcatgttgtcaaatagatcatgaggtaccgtcatttcactctcaagtttggtttatggtactcctcatctttcgtccaccttttgtgtggttattcggatgctgattttgcgggatgttgcttggatcacaagtccacttctaggaattgtcagtttttagagtcttcattggtttcatggttttctcgcaaacaatctaccacctaggctaagtatgttgttgccgcttgctattgctcgcagttgctttggatgatggccactttgtgggattttggcttggatattcatcatgtgcccttgctttgtgatagcacgagtgcaataagtgttgccaaaaaagcctatgctgcattcaaataccaagcacattgatgtt

SEQ ID NO: 167078 - DNA, 845 bp, Zea Mays
gaaaaaaagagagaaaagaataaatgcgacattgggcccaaagaagcgatctcggcccaaaccgaccctgccatagccacttgcgcgtgctggctcatctattgcatcctcgtacagactagtggggctgggttgcccgccgctcgcctagtgccactggcgcgcgggccaaacttgtcagtctcctttccccaactgaccgccgtgctcggagggtcggtcgcgccattgtcgcggggcggttgctgcaccctggccaccctcgcgtccataaagaaagctgtgaactagggctcgttccttccttccccttctttttaccttctcggccatcaccatttggcggctcgacggcgagagggattgcgccgccaggtttgcgttgtcgcgctctggccaggctaccgccagcctctgcatgggattatcagcgaagtgttgcgggagtccgtcgaagcactgtgaaggtttaataccttgttgtgggggaaatcttggaccaagatgtcgtgaatttctcgtcgttgggcggtgccatttctttccgtggtcggagtgcgtcgcagctccaccgtgggtaagtaaccgtgtgacctgttcatttttgagcccccatggcatagaccgtactggtagaaggtttgcgggtgtagtagtcggcagggggttctccgatgggcggtgccgccgtgacttgtgggtgcaggattgaagataacttgcgagtcattaatctggcgatggacggtggagattgagaccatggacccccctcgttcccttttgctgcgtaagccggggtcggtcggatggggatcaaacgatccaggattggtgctggctcg

SEQ ID NO: 167079 - DNA, 875 bp, Zea Mays
ctcctattgtgagccttgtgtggttctatatgaataatggagtaaaactggttaaaaggtggaatgtcgggtttgcactgtctgaatttgggttcagtagctgaaagctgaaaggcagtatttggtgccaagtttggagcacttttgtgattaatccattcccttttggactaaactttccatagcaacgttggagaccacagtaaggtgaacaagtttatgcaaataattggtcttgttactgtgtgtaatttggagataatagtgttacaaaactccctgtcagactgggtgcagagctgtttcagacatctgaaagtggacatttcagtattttgcccaactttggggtaccacaacttgtgttctgtgtattaccagtcttggggtgctataccaaagtgaaagagctatggatggggaataaacttggtcaagatggatgggtctgttgtcgaggggatttgggtgatagaggggcttaaacagggaggtatgcagagggagcagcagggctgatggagtaaattcagagttagatttagtaaactaaagaggctttattcctctctattgtgcccatccgatgctatggatcgtgacatggatggagataaggatgtcgggtctaacttgggttctagagtttttcccattgaaatatccaattttggactgtctggtgtacataaaaaccttatctgctagttcttgaatgcaatgaactggacatcagaaactctagtggcttcaccctttgataagtatcaaattggtatcaattattctctatccgtaaagtagtgtttacctgcccttcttctgtctgtattcttggacagaagatatttgtgggcagcgagccttatctgtcc

SEQ ID NO: 167080 - DNA, 568 bp, Zea Mays
caggtattaccgtcaggcttaccctagtttagtttaggtttttcatcctataactccagataattgccatacaaaaaaatatattccgctgtcatataaccttgtttagccttgcaatttcgttttagattgctttgttgaatttgtgtctgtgttcgagtcttgttgctggtttaggtcgtgtcgtaatcgtagttcaaccactccatcgctgttatttgtttccgtcgctagcccatccaccttacccagattacaagtcgagacaccacattactcgatttgccctcgctagccgccttgtgtgaattctcgccacgctagctctagattaggttgcaagcagcattgcattgcagcccctccttgtttaatcatctagcgcttacctattgcttataccagggaggtttgtgcccctgtgctctatagccgccgctacagttcctaccaatttgtgccccggaaaaccataacttgaggtaccttccataaaacgagcataacttttcgctcggtgctccgtttgagctcaaatttttacagcagattcctgactccattctgg

SEQ ID NO: 167081 - DNA, 520 bp, Zea Mays
tcgggaatctccccaagcgaagcaaccaaagtactgacctcttcagcagaaggtcgcactctaaggcccaaattgccatcagtcacaggcggatttgacacaaaaagggtgaaagctttgggaggaggtaggttccaggccgagtatgccactggagcaccaacatttgaaaccttacccctgaggatcatttcaagtcggcttaccaagtctacagaaggaattctcttattggtaacccgagttgaatcggctagccctcgatacagatatgccggataggccctgtccttcagtggctgaatgttcttgaaaacaaagtcagtgaccacagcttcagcagttagacctctctctttcagcagtccaacttcagctagcaacacacctgcctcagccacttcctgatctgtgggagactcggtccagctcggagtgcgaacgtctggctgtcttcccgaccgagaggggagagaatttccataattatcaactatgaaccactctagacgccacccct

SEQ ID NO: 167082 - DNA, 387 bp, Zea Mays
acaaatgtgcagctaggattagaagtcatcataccctttcgtgttttgaagctgggtcgttgatccatggattaacgacgcagatcaaatcaaacgttccccattcactacactaaatcagaatcgtcgttataaaatcgtgcggtggtgattggataccagttcgcccatttatcaaggccctcggatccaaatacaaccgctcaaaatccccgctaccgcttcgaccgatcagtatttcacataagccctctagattgttaaaaatcaacccgccatccacatataggtaaggaatactgcgcatgtgccctgaaatttacacagagcaccctaggattccccaaaacatcatccacagtccaaataaaaccacaggttagtaaa

SEQ ID NO: 167083 - DNA, 1048 bp, Zea Mays
aaaagaaaagaatagaaacctagctgggctgcagaaacccatttcggcccactccctcgtttcccctctctctgcgcggcccagtaactcctcctcgcgctcgcacacgcgccgacaggtgggtcccgcggatcaggcgacgtctatgcgcgtgtatggttctgtggtgccgctgcgtgctgggcccgggttgtcagtcgcggctgcaacgaactcgcccgtccatggcggaatcgccccatgaaaatctcaccggccatccgttgactccagcgtggaggtacggccggaatcccggtactttataagtgctaacccccgcctcggttgcatcgtctacccctagccgccacctccagttacgcagaaaacctgcacctccattgtagaacagagccgccgcggctcggtgaagtggaaccgggcgctcactgctgccgcctcatctgcgctgtgtcttggggtttcgccggtgtgcggtgagggtgctggtggcctcggcgtgcgggattagtggacggggaccccataattgctcaccagaggaacaacaccaccgtggacagcacatcgccgtggttgcgcccctgtgctccattccctaggtaagaaatccgtccctcgtgttcgtcccgccctccgcatggtaaatctcgatttaatttgatgcttagcgcccggggaacgctgattggcgacctcaccggagctcggctgggtgagaaacggcggcgccgccgtctcggttagtcgaaggaagaagatagggtcgcgcccgttgatcatcgcgtggacggctacgattagaaataggataccccttcggctggggccgatctgggccgtgaatctctaatcgggcggtccagaaccctccttacctctttaaaacctctgccgtcgatctgtgatctcacggtcactgtcccgtaccacttcggttctaatctgggccgtcaacacttgatcggacgtccgtccgcgcaccgtaccccttcaccgagccataattgcaaaagagaccctggaaaatgtttgaatcaacccg

SEQ ID NO: 167084 - DNA, 759 bp, Zea Mays
cgatttcagaagtaatgaagcgatgaggtatggttgtggctgacgaaggtgcttctaatgccgaagctgaacagactgtggttgagggtgaagatgttgttgagagtgaagaagactacaacattttgatcccaacgaagcctagtcatctagattttgaaaaatctactgtgaatgaagatgacatgcctatgatgatgaaattgggcttttttggagaggctgagagtaagcttattcgatttgctggagaagaaactatccagagccgaagaaagatgaagctgtcattttcaagagcttcttcagagtagggctgcgattccctctaaatgagatgataggggtagttttgaagaactttgaaatacatcttcatcagctgactcccaacgctattgttaggctcagcgtctttatctgggccctccgaagccaagggatgatcctagatgccgaagctttctgccgagtacacaagctgcactatcagacgaaggccagggcagatttcacgaaaattttggctgctacaattttgcgtatcgaaaggatacaaaggcaccagtcctcagctaccgtacgaagtggccaaccggttggaaaaatgaatggttctatatgaaggctgacgagaaaaagagggagaagctgatgaccatggtcatgagtccactaagtttgagcttcggaatgacccggcctttatgcaatatgcaactggggtcaccctgtcagctggccgaagtagaatttaga

SEQ ID NO: 167085 - DNA, 497 bp, Zea Mays
cttagagacagtctgttgagcggcaggacttcatccgaaaggacgtccggaagctgctggacgccggcttcatcgaagaggttcatcacctagtgtggctggccaatccagtcatcgtcccaaacgcaaacgggaagcttcggatgtgcatcgactacaccagccttaataaagcttgtcccaaaaacccgtatccacttccacgtatagatcaaattgttgattctacctccgggtgcgatctcttgtccttcttagatgcttactctggtttccatcaaattcagatgtctagggaagataggaagcataccacttttgtaacattggatgggctttactgctatgtcgtaatgccatacggtctgaaaaatgccttgccgacatttgtgcgggcgatgagtaagactttcggggacctgattacggacaaggtggaggtatacatcgatgacatcgtggtcaagactaagagagggttgaccttagtggaagac

SEQ ID NO: 167086 - DNA, 627 bp, Zea Mays
cctgcactccccaacacctcatgtttgtgcccactccgggcccgatggtcacctcccgagggatcgccgccgccctccacccttcaccttcccctccactgcaggcgtctccgtcaacttccgcgtccatttcccttccatcaccttctgcttagcgtgcggttccggccatgtcgagagggaggtccaagtttgaacgttgacgaggtgacagccccgctggtggcagctcgcttggtcccgccggtggtgttacatccaggccctccttccgcgatgtggtgcagctgctaggccttaatcgccggacggtttggctatcactctatcaggtctaggactcagacgcggctgtccagtgtcatttcggcaagattccattcgtcgaccgtgggtcagagtctcgcgaaggctgatgttgatgctgatgggtggcggaaggtcgagtctcggtgctcgatgaggctacgtctgaaggcagccaggttccaacgtcaagcgtctggtgatttctctggcaggtgcttcaattgcctttccccgaatcactgggttcgacattgccaattgaagacaagttgcttctcattcctttggcttggacatagggcgtccctctgcccagaa

SEQ ID NO: 167087 - DNA, 574 bp, Zea Mays
gccgtgagggttagttcaattggtgggagaacccaaacggatagattttgccctagtgcaagatttcaaataagggggatagagttccccactgatttaatagttatgagtaaccaggatgcaactatagatgtcatcctagggatgaactggctaaccaagtgccaagccagtcttagctgtgacaagagaacggtgaagttagtgtccctatcaggagaagaagtgttagtggagttggtcttgtctggaccaaggaaaggaagctgtcaccaagtcaccgcccatattgaggagattaaaccatcaaaggctatcaatgtagtattagaattcccatatgtgtttcccgaggagttaccaggtgtgccacctgaaaggaaggttgaatttaccatagagcttatactaggcacttcccctatttccaagagagcatatcgagtgtctggaccagaattggtggaactcaagaagcagattgatgagttgttagagaaaggctacatcagaccaagtacctcgccttgggcagccccagtgctatttgtggagaagaaggacggaacaaaga

SEQ ID NO: 167088 - DNA, 776 bp, Zea Mays
acagaatctgctatattttaggctaatctatagtagagttatcccctgaatatttgcgtagttatcttatcagataagctacgtttacacagcagaggcctacggccagattacaagctattcaatctaacatcccccctcaatcataacttgcataagttgagattgtctctaaaggatgccaatttcttcatagttaaggccttagtaaaaccatctgcaatctgatcttcagtggagatgagtctcacttctaagagctttctagctactctttctctgacaaagtgaaaatcaatttcgatatgctttacctggccatggaacattggattcgttgtgagataagtagcccctatattatcacaccagattctagcagcaggtggacaggggacctttagctcatacagaagagattgtatccacattaattctgcagtagcattggcaatagccttgtattcagcttcggtacttgaccttgacaccgttggctgctttctagcactccagggcacaagattactgccaagataaactgcaaaaccccctgaagatcgcctgtcatctgggtcaccagcccaatctgcgtcagcaaaagcactaacaagtaaagacgacgaccttgcaatctttaatccatgaccaagagtgtatttcacatatctcaatattcttttcactgctgtccaatgctgcgaggttggagcatgaaggaactggcacactttattggctgcaaagctcaaatctggccgagttagggttaggta

SEQ ID NO: 167089 - DNA, 501 bp, Zea Mays
actgtgttcgcatctgtctaccacctgcaatccaatggagtaggtgaacgtgccaatggcaagatttttagcgccatcaagaaaaagctacttgaagacaagaaaggcaaatgggcaaaccagcttcccgaagtcatgtgggcactgaacacaacaaaatccatagctaccggatccacaccttttcgcttgatgtacggatccaaagcaatgacgccgcaagagctgaagcatggatctccacgagcaaactccacagctactcccgatgtcgatgagtcaacctccaaggaccttatcgagggagaccgtgttctggccctggaagcattgaacaaataccaagcgcaaacgaaggcatggcatgacaacactttcatccccaaagagttcgaggagggggacctagtcctcatcaaaaccaccagaatggagtccccgggcaaactcgagcccaaatgggagggccattcatcgtcaagacaaaaacatccaacaatg

SEQ ID NO: 167090 - DNA, 289 bp, Zea Mays
cagggaccaattcagtgtcgtcagcagaacccaaaaccttgtcgtcaggtacgctggcctctaaagcgaccccttgaccaaaggcttgggctgtcaccatgcaaccagagtgtggaggagaagaccctacatgaacatccatggaagtgcaagagggagaacccgctcggacaccctcgggggctggatcatagcttgcgctacccatccgagccggatcatctccggtagcaccctcgggggctgggtagtagcttgcactatccatccaagccggatcatctccggc

SEQ ID NO: 167091 - DNA, 418 bp, Zea Mays
ctgagtgaggtcgctgacagtggtaccggtcatggcaaagaccttagcatgagtgttgacaggagtactgcacggcttgcaatcggacatatcagcacgctcaagaatatagagagcatactgctgctgtgaaaggaaggggccctctgaatgttgttgaatagccacacctaagaaatgatggagagtaccgagatccttcatggagaatggcttctaaagagcagtgataatgcgacgcagaaggtcttggctggaagcagtgagaacaatgttgtccacataaagcagcaagtaagccatatcagtccgacgatgatatataaacagcgaagtatctgacttggcttcgacaaaccccagagtgagtgagtagcaaagcagctataccaagcacgaggcgcctgcttcagaccat

SEQ ID NO: 167092 - DNA, 297 bp, Zea Mays
tgacgtgtccctaaataatagtgaaccgactgaacttatcttcctatgatcctgccgacttatccctagtttgttccgaggtccaagggcgctccgtggggaagtcggatcgacgctgtggataacgcttaaacccaatgagccgcctgggcctaagtctgcttcttcctcacgtcggcccattccaccagcagttctcccctagcccacgaagggacggccttgcgaaataataggcccaaagcctttcgcgaggccttcttgccttctagtggatatgggggatatctgtccccc

SEQ ID NO: 167093 - DNA, 401 bp, Zea Mays
gcccattttattccccgggtgtccgggaattatcaacgacacgaatatattcttcctttgaaagcacacatcggggggagattgattggaataacaaacacggtccaacatgtgtacggggcaacactcattccatagggattgaacccatctgtggccagcgcaacacgtacattacgagcctcttcgactttctcacggtgaatggcatcaaagtgtttccatgcttcaccatcggatgcgtgcaccatcttgtcaggattgtatcgttttccatttttgtgccatgtcatctgtttcgcggattccttggtcatgtatagacgctggatccttggtatgaatggaaggtgtcgtaggattgtcaaggggatgtcgagctgcctcttctatccatcacc

SEQ ID NO: 167094 - DNA, 821 bp, Zea Mays
agttagagaaggctctatggagagattggaatgagcccagggaagtgagcgtagcgagtgtgcccctaggccttgtcccctaagtagcgagtgtgccctcccttttaaagccaagggaggggcacatacatgggtactaaggagccccgacttgtgggctttagctgtataataaatggagcatggagctattaatcctctggtccaaggtcttcgcttggtcatcgtgtggattccctgccttgtcttgccatcgtcttgtctcgtcagcgtgcgagcaaaggcaacggtgtaggctgcagcataggctagctcatcgtcttgcatagtggagcaggcggatggtgttgtcctatctcttttgcacatctcttcacctggtgttgtagtgggaacaacaagggtcatgatggaagttacccacgagcgttgcagtcggtcaacggtatttacctctataacacgcgggttactaatgagtcccaggccttgcagactgcacacgccgccttcttttaattcgaggcgtacgtcgcatgtcactggtgtgaacaggtgggcgtgctgcccatatttaatgcaggcggccccctatgtcagaggctcacaccaagcgacgcaggtagcttctgcaatacaccttgggccacgtggtagcaccacacctccgccaatgcgaagagcaatggttgggaacgcatgttgacgtggtggctctagacccctggttgggagtccgggagagacttagggaaactcgagtccctccagaatggcccagacatccggcagcaccagacctcccctgaccggaggtctgg

SEQ ID NO: 167095 - DNA, 336 bp, Zea Mays
gttccaatagcacggaggcagagctcctccccaaggactgtgtgatactacatattcggaattctctgagactcgacccccgctcttcatcaaagcagaagaacctttagaagctgatgagtggataagagttatggaacagaagtttggattaatccgctgcatagagacacaaaagccactgtttgttgcataaaacctgagagggcctgccagtacttggtgggcaaattttgtagcaattcaaccggctggacatcagatcacctgggaggaattcaagctagcgttctgggagcattatgttccagagggagtgctccatatgaagcaaga

SEQ ID NO: 167096 - DNA, 767 bp, Zea Mays
gcgctccgggtggccaacgcgacttgggaaaggctcggggtaaaactaggagaaaggtgagaacggtagagttctcaccgagagggtagaaggggcgagaacgataggcgatgatgaatggcaaacagcgagactccagtgaagcctgggtgacgcgatggggccgaccggtggtaaaagcaagctcggagaaggtcagagaagcagtgcgagcttcagagatcacgtccgtgacctcgggacgaacggggaagcttcggggatgcacaaccacggtggtgatggcacaacaacgatagcgagacgtgggcaaggcgcacgagagcaggtgctggcgggtgcgatcggtagtggggctcttggcggtacttaaagaccgagagaggggagaggaaagaaaggaatcagccggaattgatctgattggatcctctcggccatggcaaatacaacggcgacggtgctcacacagaaagagagataggagaaatggaagggaagctcgagtaaggaaggagatcacgcgtcaggtatccacacgcacgaggcagtaggacttgccaacggtggcatcggagcagaaaagaaaaggggaaagaacagggaaaggggaagaagggactgacactcaagctccacctgtcagagagatgagtcatggggtccgcctgtcagccaggacgaggggacgcaggcacaagccgagcgggccaaatttggttgtgggtcgagaaggggaaagacttttcccttttattttttcccgg

SEQ ID NO: 167097 - DNA, 455 bp, Zea Mays
gctgcctcaggttcgttggattagagcccaacggctcagatttaattaggggttttaataatcaccaagcgctcaggaccagaggatccacgatcgacgacttggatcacttagacgtctggatcgcacgcgaacacatcggaactgctcattcacagatctacggttaccatctttcttctcgatctaaaccctaggcgttggattgccatccaacggttaccaacattccccgctcccatctaatcgtggccgatcagccgccatccgatggctcccctcgtttcttccccaatcccgcgcccagacacagtggcgccggcgacccccatggagacgcatcgccggagcgcgacgaattggcgcccaagtgccccaccgcccgtgctattacgttctacgcaaagccgagataatggagaacacgaagggaagttccttaccagcgatggagt

SEQ ID NO: 167098 - DNA, 820 bp, Zea Mays
ctcgcgttagatccactcactgcgctgcatttcgttccataagccacttacgtgtgggaccaccacgtcaagggcatcccttccgaccctcgcacttgggcgtaacaacccaccgcgtgaagctcggccaggccggctacctcaaccaccttccatccacctagccaccaccatctccggcgcataatagtccgcgcaatccctggtgcgcaaacactaagcctgggatcgggtcacagccacggtgaggagaagagggcagaactattaggtgctcacatgggtttctcgcctggtaccgctctggccggtaacgtggtgtggggaacatccttggggtgtgtcggaagcatacacgacacctatgagggagtttgtatcatcgtaatctcggaattcctcgccggacttgggatctccgacatggagttgccccatcgtggccatcgacaaccggacttcgacccacggtagggtatacctccaccgattcgctaagtcctcctatttgtgttgcgctagttgaacactaggatcgagcctcgggtcacgaaatagctgtctccggcgaggcacacggcccctgcttggagcaccgtcgtgcatggtctgaaggtaggcgagggttcgtgcgccgtctaattcgctgtggacgactagattaataactaggcatactcccctgggcgatctgatcggggccttaagggtttgatcggacggttcgaggtgaatcgagcttcataaaattagaaccgttgatcccagatccaatgagcgtgatagcataccggttcattttaagtgtggttagatcccg

SEQ ID NO: 167099 - DNA, 645 bp, Zea Mays
tagtcatcgcttcctctatgtttttaagtcgagtcaaaatgcggggtactagtagtacgctagacaggcgatgttccaaatagataaatcgggtgatgtggtagtttgtcaagcgtgatagaggttgagtcacttatgttataaattgatgctcgacatttgaggtctcctaaaatatggtgttttaagtgactagtgcgttgtccagtttaagttgagaaaatggttaagaaaaactaattaacctgctcccacctatgtttttgagttgcgaaatctaaaatactttgctaagtgttatactggttaaccaacttgttagatgacttttgttaagctcgtggtcacgatgatttgcttgttgtagtctaaatacgtatggttgtggtcgcggatgaaaagtattagtgctcatgtgaggtctaagttaaaatacaaattattgtgtgaacaacacttcgatatcgattatcggggagaatgcgttgttaattaaatatagtacttctagtgctcataatgacacggataaaaattagtaagtccacttgttagttctcaattggttatttaactctaacaaatgttaaagtgttacaataattcaagtctctagaacgcggcaattcttgaattgcatagaag

SEQ ID NO: 167100 - DNA, 510 bp, Zea Mays
gcatgggcaaacgcccgaggccccgagtgtttctttccactattgtggtcattgccccccatcaaggcttgtgcctcgagctagcttggcatgctctttggtgaaatgacgcgcattgaggattactcgctcgtcgcggatcctacacaaacattaacgcactggggtgcatgacaacgagggttgttggtcatcgacgactcgatcctagggattggcatcaacaacctttgttcgctagatgactccctttgagggagaggcagcatgcctggaggtgtcgtgtgagtgcaaggtggttgcatgctcaatcagccctagagctcaaggtacatggctcgagcttagggtcatttggctttatgatcgctcgcaacacttttgctattgcgatagtgatattttggttagcacatggaaaaaaattgtggcccatcgcttccccttgctccgacttcactataggaggaatggcggtgccctcctgtcccattggtacgacgttgttga

SEQ ID NO: 167101 - DNA, 485 bp, Zea Mays
aatatgatatgtgatctgtacaattggcgcaacacttagcaaaattgcttcactgagctttgatgctttgtccacgcagcaactgcactggtcgtctcacagctaccttatatcacgatttatttctgcaggttcgctgatgatctgtgattgaccttgtctcgctgtttgaattttgatcaaattatttatatctttaatgcaagtttatactttaggttcatagtgtctggaccagttctacttctgaggggccaattcagattttgtcaatttattaggttttctgttcttgtcatgatctagttgtagtatgtctcatcatcttcctccttttggtctccctcctatgattcaggggaaacaagcagaagaggaaatcaagttacttttaaaattcttattattgacaaatctttctcatcactgctggatttgatttttgtcaactgtatgtcttataagttatatggacctatattcta

SEQ ID NO: 167102 - DNA, 1135 bp, Zea Mays
gcagctgctgggcgtgaggatcctgttgataaccgtccataatttctgaaagccactgggggctactgctagaaatatgataaagctctaaggattcatgggggtgacgtgacagggcgtccgccgcaccattttcaattcctttcttgtataatattttgtattggagacccaagagtttggtgaaaactttttgctgccacggcgtattaagcttttgctttgtcaagtgtgagagactatgctgatcagtgtaaattatgaactcatcgtgcaggaggtagggtctccagtggtcgacagccatcagaatagctaggtactccttttcataggtcgataatcctctattctttggacccagagctttactgacaaaagagagagggtggctgttctgactgagaaccgcaccaatgcctgatcccgacgcatcagtttcaatggcaaacggggacgagaagtcaggcagttgcaagactggggcagaggacagtgctgtcttgagtgtacgaaaagcatgatcatggtcttgagtccatacaaaatgtgtgttcttcttcagtaactgagttaggggtttagagatcaccgcgaagtgtcatacaaatttccggtaatatcccgcgaggccgagaaatccccgcaactctcgacagtttgcaggtactggccatgaggtaacggcgtccacttttgagggatctgttgccacccctcgcgctgaaatgacgtggcccaaatatgcaatttcttgttgtgcaaaggagcatttggacaacttaatctgccactgatcggctcgaagaagactgaatactaactccaaatgctgaatatgatcagaccatgtatggttgtagatcaatatgtcatcaaagaaaacaagggcacatttccggagcagtggggaaagagtcatgttcatcgctccctgaaatgttgcgggtgcgccagacaatccgaaggccatgactttaaacttgaaatgaccatggtgggtttgaaatgccgttttgtgttggtcctcggaagccattcggatctgatggaaccccgctcgcaggtcgagagtggagaaccaggctgcgctgtgaagctcatccaaaaactcgtcaataatgggtaccggaaa

SEQ ID NO: 167103 - DNA, 479 bp, Zea Mays
ccaaagccgaaagtgacgaagttgaaaccgctgaagatgtgaatctagatgccacgctctctaaaattgatacaatgcttctcgatgcgggcgcggaagaaactgctgcagctgctgaagagatcccgggcacagtggctggaaagggaaaggagaaaaccgaggatatttcggaagaagaggacttcaactttcaagatatacttgggaaagaattgacgaaggccgaaaaagaagaactgaaagagtatgctatatcttgcgggtacaaaccaggcgcgttactcttcgggggagtgaacgaagaaagctttgaatgccttcgggaccacactggggcgaaggttgtcggcactctatcaaagagtgttggcctcccgaaggttgaggcagacctcagcaggtaccggcagcaacatatcgccggtagcctattttatgctaactttaaggtaaaatacttaacttttcattgtttt

SEQ ID NO: 167104 - DNA, 376 bp, Zea Mays
gtatgacagttcgtgaatattgcaaaaacatcttgcatttggttctaacccctggctcctcatggcccaaataaaaatacccattatgataatagccttagggtgatttgatgaaggaatatttcaaaagtattcaaaacttcaactaacaatttatctaaagggaaccgaagtcccgctttcatgaaacttctgtaaacgactacttcgtcagcttcaggcaaaggggcactgctatctcccccagccctcacaatggaaatatcgcggaagtaccttcccttcattccatcaatttgactttgtttgatggttgatttccagaagatagtatgacttggtcgtcagggcccatctttggcaccttcattcccac

SEQ ID NO: 167105 - DNA, 471 bp, Zea Mays
cccaaatgatgaccagcacgatagatgactttgctttgaaggctcaagctcttactcatcccagaaggcgtataaaaagatggctggagaggagtagacccatcctgtatactcctggacgtggaagataaaatgtcaaccaaagcaaaaggttttcttttggttgctgctaagagatagattaaacactagatctctcctcaaacaatgtgacatgcctctggactcctacacatgcgaaaactgcataccgcaataggaagaaacggtatctcacctcttcttgaggtgaactttgctcgaagatgttggctcactattggtatcactctgcccgaacggtggatctgacgcttgcagtgctacagattagagcaagactgaaaatgtcatggagaatggaaaatattataaccatgtcttggtgcatctggaaatttcgaaataacttgatattcaacgacataccac

SEQ ID NO: 167106 - DNA, 517 bp, Zea Mays
tccttctggtaccttgtctcacatctccatcgagccaaccttgctagaccagattgttatggcccaactcagtgacaagggagtgcaaatcatcaaggagaatcttcatcagaaagtggagaagtataagtgctttcgtcaagaccgcaaggggatactgtggtttgaagacagattggtggttcctaaaaatagagacctcaagaagagaatcttggatgaggctcatctctccaaattctccatgcacccaggaagcaccaagatgtaccatgatctgaagcccctatattggtggaccagaatgaaatgggagatagccaatatgtatcagaatgcgacacgtgtcagaggataaaggcaagccacttaaaatcatatggtaccttgcaaccactatcgataccttcatggaaatgggatgacatcagcatggatttcattgtgggtctgtccaacacctctcgacatcatgattcaatctgggtcattgtggaccgattgacaaaagtggcgc

SEQ ID NO: 167107 - DNA, 737 bp, Zea Mays
ccatgctcaccgcctctgaagccactgcaatatataagtacaacggttcccctggctctggagctaccagtattggtagggacacaaggtgctgcttcaactcttgaaaggctcgttctgcctcttcagtccaagagaatgacctggacttccgcaatagcttgaagaaaggtagcgccctctcagccagtcttgagatgaagcagctaagggcggccagtgaccccgtaagcttctggacatccttgatgcgggccggaggcctcattgcctcaattgccttgatcttctctgggtttgcttcaatgccccggtgcaaaaccaggaatcccagcaacttccctgcggagacaccaaagacgcactagtccgggttcagcttcgtgcgtgttgcccgcagcttgtcaaagaccagggttaagtcttccactagggtcgaccctctcttagtcttgaccatgatgtcatcaacgtatacctctaccctacccctaatcaggtcaccaaaagtcttactcatcgcccgcacaaatgttggtaaggcgtttttcagaccgtaagacattacaacataatagtaaagcccatctactgttacaaaagcggtatgcttcctatcttgcctagacatctagatctgatggaaaccatagtaagcatctaggaaggacaaaaggtcgcacccggaagtagaatccacgatttgatatattcgtggcagtggatatgggtccttg

SEQ ID NO: 167108 - DNA, 469 bp, Zea Mays
aagcactgtacgggcgacgatgctgaacacctttaaattggtcagaacccagagaacggtggtttttaggcccgacttggttaaagaaacggaagaaaaagttcaacgaataagacacaagttgaaagaagctcaagctcggcagaaaaactatgcggacaaacgacgccgacctttggtctttcaagtcaaggattatgtatacctgaaagtatcatcgatgaagggtgttaatcggttcggggtaaaaggaaagttggcaccctgatatattggcccatttcccattcttgaacagtgcggactagtggcatacagacttttgcccgaatctttatctgtggtacataatgtgttccatgtatcccaattgaagaaatgccttcggattcctgatcgaaccatccatgtggtggatgttactttggaaccagacttaacttattcggaatatcccattcgagttctg

SEQ ID NO: 167109 - DNA, 903 bp, Zea Mays
ccacgtaaattttataagtggtagagtttcaacagttcaacaattatgggttgttcctctctttcgtacgtcatgcccctcatgtgtaacagtctgtcaaggtaatagacgacgacagagaggcaccaaagggtattcgggtgaagaagcaaagcaccagagtatttgggctagattggacccagcaatgggggtacactgttggcgagcgtatgtaactgaggccatgtgggagttggagacttagcttggggaaggagttggcgctggttgtgtctagacggtgacgtcatgtgtgagtgaatcccttctgttcgtcgagaattctagtaaaactctataacttcgtgagagaaggatagtttcaggggcggggctcgctatcatcaccatctatctctcacaattggtattagattcttgttgcgatcctagcggatccatctgagtatactcttcgcccttaaaatcaggcaagggggcaaaacaaatcgacaacatggagaagagtttagccgatctctctcagctgctgcaatctttacaagtccagaatgattccatcaagcaagccattgaggtaaacatagcatctaagccctagaccgaggacgatgtgggtcacctgcatgaaaatgtgggacacctgtcgaacaaagtgaagaggtgatggtctgcgcccaccacacattcatgcatcgaaggtgttcgaaggtgtgctattgaaggatcaagcgacgctggaagtctctacatcgacatcacggcatcagtctgtaccggacctctacgatcaccgccctgctacagcttaccggagtgatggttttggggttgtcaccaccctaacaccatctccggttgcaggtaacaaaacccttttgcatccggattccccttcat

SEQ ID NO: 167110 - DNA, 556 bp, Zea Mays
ccgcgccttggttttgtgcgctagaaacttctgggaaccgggagttggcgagcgcatccggttggagccgaagttggccgtcagttcggccaggatttctcaccggacaacaattgtcgccgcgcgcggtggactgcaagctacatcgcgttaaccagggtaatgatgcctctcctaccttcgtactattcgtcctcgcgtatgtctccagcgaatcgaagtttagggcgctgtggctctggcggatccacgcgcggcaatggcgccgccatggctggggtctgttcatcgtcgccggcaacgtcttgggttggggcatcctgcaccgtagatttttagggcaacggtgatgattagactacacatactggttcgctagagtgagggcagagccgtccgattttgatccatcgcgttaggatagatccaaccattttgaatcagaaccgtccatctggataccggcggtccgcgttgatcgctcgatcattgggttctagatctaatctggaccccatatttcagatcgggtggctcagatcgcttgatacctttc

SEQ ID NO: 167111 - DNA, 568 bp, Zea Mays
ttgtaacagtgccagggtatgggccaaaggctacttacgggcccgtctttgtcctggcgcgtgatgacgtcgagattctctgcagcacttatcgagattagagattagagccctcacttggttgatgcagaagtcttcctgaggtgccagtcgagccatctctttgacgtgcgctacagtcgagtggagtggttgtctatgtgattcatggcgtagtcggtggccgaggccgagctcgggcgaggcggggaatttgcctgaggggtgagcttgggtcgggcgcgacggagagattgcacccgaaggctcgtccgcttggcttgtcgtattaggtgtcccatcagagggtgtcaggcggcgtgcgcgcactgtttggcacatgcgtaatcataccactgcgcttagacgtgatcgctgtcttgtccaccatggtactccgttgccacagcgcgggttggcacatgcattaaatgtgcctatcccttacctgttttcgagcgcccttgtcctatctgcccgaggtcgcctcgggtgagacggaatgggctgaggcgactttgggcgaggc

SEQ ID NO: 167112 - DNA, 712 bp, Zea Mays
gccggtcggtgccaaggcgactcaccttcccttgagagcacggatcgagagccggtgcgtcgattgcggctgggattgtgatggagtgggattgcaatggagttcctcgcggccggtgcgtcgattgcggctgggattgctatggagttcctcgcgactgggattgcgggatgcggagagacgagatcgggatgaatggtagacaggctagggtgacttaccagcagtcaacagtcgaggacgacaggatgcagcctcatcggagtcagatgacgaatctgtggcctgacagcgacacaagagacacatcaagggcgcgatgcgaggctagagaagggcatggcgtggatggtagggacctttcagcgaatcggtgcaacagagcaggaggtggtggtggtgggcggtgcggatgctgccgtcgcggtcgcagagaaagtgggagaggaggacctggcagtgttggagtgggattagggaaggagacggatgatgaagggtgcgagtcagagggcttgctcctccttcttcggctcctccttggttgtgcctctggcgcctccaggcgtgctgagggagctgccaacaacctcccccgcctcgcagcaagagcttgctcgtggatggggcgggcgcgtgcacggagggggaggtgggggcacagtgctgcctgttgtcctcttgggaggtggccggcacggggagcagcgtg

SEQ ID NO: 167113 - DNA, 599 bp, Zea Mays
ttatttctaatctaacccacgatccaaacatctttatctttatatctcttccatactcttttaaagcacgagtttccaccgccatgcatcacgcccaaagcgcctaacaaccagataaaataatcaagcaacaatcatgggtgcttccttctcctctttcttaatactgtcatatattaatccctttctatccctttcctcgtctccgcctctttcaccaagattcttccggatcgccacagaggacctaaaggacatcgagcgaaccatcctactgggcctctgacttgtgagtcgccgtcgcatcgtaggtctatttttctccacacacgtctcacctaacaactagataagcaccacgagcgcttcctcctcctccttcttgttgttgtcgtatttaatccccaactttccatctctttcctcgtctccctacctctcacccaaaatcttccatatcgagtaggccatcctggtgacctccaactcatcagacgttgcgtcgtagcatagatctatttttttatccccatagcttgccaacaactagataagataaaccctatatcccgtatgagcaaccaaccatacaaccacca

SEQ ID NO: 167114 - DNA, 1252 bp, Zea Mays
cttcaaacggcgctcagataagtcgtcatatgacaagttgcagaacccgctccccagattctgaatcaccttggaggacagcaagggtgggccatcaaagttatgctggcacatgagacaattcctttttgggcaggccccattcctgaacccaccatgtgattccttcaagcgcttacttcttctgagttcagactccacaatgataggtgccggggcatcacaactgtccgattctttggagctctcagaaaggacatcatctagaagtttaacattcggacattccttagggatggcaaaaggtaaagatttcagtcccggttctagcagagttgagggaattgctgataacagaaaggacttctaccaactgaaggcttcaggttgaagcagcttcgaaagaaaaaagggtgcccagttctttgcgatatccaccgaggggtcagttgacccagcaggtgcaaagtacatggcccaaagtctggagaactgggcagctcttttcctctcctcaaacatctgaaacacagggtcaggttgccatccctgattgaccatgaaattcatctctaaattctggaaatggttattatttggatccccaacttgggcctaatgcggcaaatcagcaataccagggacagggtccacttgaagcgccgggccatcaacctcctgaggcccattgaatgcagcaatattgacagcaagcccatcccctggcaaaataggaccattctcaacaacatggccattctgtagaggtgcaacttgaccagcgccaaaggaactatccgacgacaagcctgagtgctgattactgagttgaagctcatccggttgaatgggttgcaaatcaggctgaaagggctgcagaatctgttgattgggttgaacattttcgatccactagtcccaatccccatgggcattgtcatcctgaagagccggcaaatcaccacccgcattccccgacgggaaatttaggtcaagcccaaccgggggcattggctgacccagaccgaagaaaaccaagggaagttgctgaccatcttccggggcaggaggaatagggtcctcatcctgagcctgcccgccaagcatgttttgctgaataatctcacactgaacagtccaagaatcaccaacgaagccctcagcctccaaaaaaacaatgaattgaggaacttcttcaaaggaagtgacacggacacgaagcaaggttctagaaacattactccgatcctcc

SEQ ID NO: 167115 - DNA, 323 bp, Zea Mays
gccggttcaatttgtgttagacgctcgggtacggttgattgggtgcctcgccggcgtgctccgccggatgaacagggcggcgccaccggtttgagagcctgaggaaggagattagcgtccaccgtcagatttggaatgaacagcccagattagaagttgggaggagatgggtttctggccgttgatccgatcacgtacgcgcgagattagatcgcgtgcccccccttcgcgggattagctttgaaccgttggatcacgatcgggcgaccacggttcgatactggttcataaacatgcgctttgatctgggccgcccacgcacg

SEQ ID NO: 167116 - DNA, 632 bp, Zea Mays
gatgtaatgattgctgcagcgccggtgcctgcgtgacaccatgccccatcatagtggatggtccagagagtctttgcctgaatttgttgtggctctaaaggccctgtccaatctactatgaaatcagccaaaacttgggatttgattgctgtcctgggttcgaaggtgatgttgcaaccagagagttcagcggcccatttagctatcctagctgacgcctccggatttctgaataactatccaagaccccgatctgaagtgactcgtaccttgtgtggctcaaaataatgtcttagcttgcgcgaagccatgatgacggtgtacgctcttgtttctaactctgtcattttgcactcggaggttgtaagtacttcggagacaaaatatactgggcattggtgggtcttgccctccctgctccgttcttggaccaaggctgtgctgactgcgttgggtgaagctgtgatgtagagtagtaggggtaagactgggtctgggctggttaatgttgctagatcagacatatattatttcaaagactcaaaggatgtggcttgttctgggcccgaggtgaagtcctttgcatcgcccaacgttttgaggaaaggaaggcttcgctcagtggattgtga

SEQ ID NO: 167117 - DNA, 728 bp, Zea Mays
actgaacaaaggctccgatccaccaatcctctaaattgtttggtatcgattctcgaacagctgttggagctgttctaggcttttggcggtgtctcaaacaatcactgagatgctgcttcgtgtatgaaacctcggattttcctagtcaccagagcggcaggtggacgagctaaggccgtctccaacagaccagtaaatagcctcgaatcgaatatacgggcacctaatggccttcaatggatccatataaattctacatatgtgggtgggggtctcggtaaggctcgaaaagtagcttgggactcgtgggctggcttgtatcggagtggttcgcctcggctggtgagccagtacgagtttaagcctggtttctagcttgcaaagttagcgagccaagctaaaccagctcaccatggctcatgagctcggcctagtaagcaccgttggctcaataagacctcaatcctagtatccaattttgttttccctccccattcttagtaacatgtcacttgttgtcatgcgccctttcgatctcttgttaacatgtgccatttgtgtccacctgggtcctcatcagtcggtactccttgccaactcgcttccttcagatggcatgagatgagacgacgctatctccccaatgaccccacctcgacctccttgggcctcgcccttgtaggttcgtcatcgtagcagtgcgatgtgtcccctgccccctatctcgt

SEQ ID NO: 167118 - DNA, 734 bp, Zea Mays
ggcttccagaacttcttcttcggacaactatttccccgaagcatgacgataaatataatcagcatccttgacagaggcttcgggggcaggagatttcgctttctctgccatgtcttgcccttctgccatgccagtatttgaagtttgttgatcggttttatcctcaggcgtggcagccttcgtatcaatgggcgctgcaggcccagcttcggcttcgggttggactttggcagcttcagtaattttcttcgtagggccagggctcaagcctttgttgtctccaggacaacatctagcacattggccatccttctcctcttgggagttgcggcaggaactttttgcacctttggcatttttgcctctgctggtggacttaaaatttcgggtattttcactatttttccgcctgtggctctttggccttatcatcttaagttttggttggcccgactgtaggcacctttgacactacaattggctcttcggcgatctgcacattcggcgtagcttgttttagttcggcagtagaagaagttccctcgccaaattcaggcaccacgaccggttcaatgtatcgacgctggtgggtcaggaccttcatcttcttacccttcggcacagcagtaatggcctaagcaatagctttccttttcttcccttgcctttgcagcgggtagtgataatcagggtatacgaagccgatggcattaaatactttgtttaatcttttc

SEQ ID NO: 167119 - DNA, 521 bp, Zea Mays
gagaaggaacggatacatgattcaggtgttcatatgcaaggtggaactggggactctagaaagtgaaaagaaagctctagggcaaccctacaggataaaatctgattgactaaacaaaaagtagcatacatattaatgggtacaaatcttacatcttgcaagtaatgaatacactcagcatatcggacactatcaagattgctgcgagggccatcttcaaggtaggaactagcagtcctgaattggctgtctacatgacctctggactgtcgggacctctcagatcgtggaaatgtcgatggcatgtacagaacattcagataagcatcagcagaaagggaatcatcaaagatggtcgccgcactctttgccaaatgctcatacctgcaatgcaagttcaatagcagaattacccaaaaagaaggaacaaaatgcaacaatggtgtgccaactgagattggaaatgcaaaaaaccatatgcagattaatctcagaaagtactgtagtattacaaatctcac

SEQ ID NO: 167120 - DNA, 701 bp, Zea Mays
gtttccagtacttcaagtggttgcaagttaattagtagactctctatgtgacgctagatgtctaggtagaattctgaaaattatggtgcccaaattgtcaagttagaggtgtaattcgatcaatgccgattaagtggctgaaaataactagtaaagacgttgtagatgtaaaactggaaactggtatgcatatgtcctcgtatgatgttgtggtaccttgatgacattaaaatgatcatgtgttgcgagaggtaaagagtttagaattaacttatcgtcacatgctaatttacattattaaagtgtctctttcatggtcaccaacttacataacataagcatgtgatagttgtgttcgataaccaactcattgcaatttggaaatgggaatttgtagtaactgtcgctgattgtgcttgatgattgagttaagtgttcttgcacccgtttgagatgttgtagccaaattacgcaaggttatggtcgtggatgaaaagtagtagtgctcatgtgatgaaaacgcaaattgttgggtgattatcgtggagaatgcgttgttaattgattgtagtaattttagtgcactaaatgatttggataaaatttgtaagtctacttgctagtcctcatttaattaatttaactctaagaaatgaaaaagtgctagaatgattcaagtctctagaatgctgcaattcttg

SEQ ID NO: 167121 - DNA, 698 bp, Zea Mays
cttcatcgttggtggattaggggggactcgccgcgagaaagtgaggccgtgggcaccaacgtcttgggccgtcgccgtgcggagtgagattgtgagtgccaccatcatcggtgacaggattcacccacggtcgggcctcaaaagttagcctagtttgatcgccggtgcctctggagcgtggtggcgtcgtccctgggtgtggatagtgctgcgcggcagcggaatcgctcgccgacgttcaccaccgccacagattccacctagtggtgtggtcagcactgctaccatccctaaccgccggtatgaacccttccattgtatccatcatagcctttgcatcgatttgagctcagtcgtcacctgcgccttggactccggtctgatcggtgatgctccgccgaggttcgccaccgtagcgtcatacgccgccgccgggggtgcatcttggcacccgaaaggagtgggggaaagcgcgtgccgtcgatctggccatcgacggtctagattagaccacgacataccgtttcgcgaggtttgatccgggtcattgattcgatgatgaacgactcggggcagtagcaattatcagctgttggatcgggatctgacggtcggtgtggggcacagattcgtggttgcctggatttaatcgggcgcgtcgagctctgatcgggcggccgagggccgcgggtacccct

SEQ ID NO: 167122 - DNA, 932 bp, Zea Mays
gcaaaggcatggatggggccatcatcccatatgcatcatgagatgggcattgtagagttcgtgagtttgcctggtttcacctctcttttttctaattctttgttgattttgcaccctctgacccctttctcctccttctagtgctcatcttcgatgttgtaggatgacccgctcccttgccgaagagcgaggcagagaaggagggggctcacgagtgggcggagcagcagcggaaggacaagaaagatagggtggagaagaaacaatggagggctgaacgccagatgcgtagggactacatcactgaggctgactcgatcaacgaggatgaagacgacgatgataatgcaagttccgagccttgggccattcctgatgccccctaaatgtgtcaacgactgattacactccaacttttactgtcgaggcggtgggtgtctttcctgttgtgaaggaggctgacttctcgaagctcacctccatgttctctgggcagatggctttggtggcactcatcccttcatctgccgagcccccagccgaacagttactgggggctgcttgcatgggaagctcttctgcctcagactcgttagtggtcaagccagcatattgtcatggtctccagtgctcaccctcgaagcgagaggcgtggccggtgctccacttgggtgccacggaggcgaggcgtaccttggagagcaaaggtctgtcgaggcgtgactagtcgggcgagggccttgctggtccccgccatctgattcccctccccctttttggtttttggtgtgccacaactcttgatcccttctcccttttcccaaacagctcccctcaacttgctgcttctatgcggcgtgtgaggaaaatggtttccaagaagaggagagtgatgtatgccatcagcgagggcggagaagtggccacactat

SEQ ID NO: 167123 - DNA, 870 bp, Zea Mays
gaagcgcccgaccaagaggtgggccttagcttccttgagtggctgcaggaggagctgggggtgctgccgacaatcgtgacaggcctcatgtcctttgcctccctcgtcacctgcgagggggccgtgaatgctttgtcccgcgaagggtgcaggcatttcgaggtcttcgaccagtcggacgaaggcttcgaacgtgaaatcttctaggtcgaggacccggtgcttaagcggtcggtgggggctctcttcgacgggatgtggggtcctcacggccgtaagacagtccgggagaggtccgaccgggcaatggatcaggtaaaggctcattttgtgtggttatatgtgtgggtatgtgtggttttgctgaatgaatgtgctattgctgcagatggcgcatgacgaggaggtggaggaccttggcgatctagacagcacgctgcccgacagcatgctgccggaggcctcgagggtggagctggcgccgccgcccgatgcgggcaagggcccctcggcgaaccccatgccgactggaggtggcgaagaccccacgccagcccctgcaccgacgggtgaagacacatcgaaggcagtggtcgaaccagctgctgaagacctcgcggcggccgccgggccttcgcaggtggcggaatagaggttagggattgtaagtgtaaacttttgtctgtgtgatactgaacctcggttgctgtgcaggttccgacgtttgggcctgcacaagcaaccgctactgacaatactaattttgtggcggagacttcaaccgtagtgcctgctgatgatagtttgtttggttctgtgtctgaatgttttgagtctgatggtgaatctgggaacttgtttccttggacg

SEQ ID NO: 167124 - DNA, 895 bp, Zea Mays
gcatcatttttggttctcaagttgattactctcagaccatctagagcttttggtctttggaccatcctccacaaagctaagggtgtcttgtttacattaattttagaccctctctagagacattgtcgtctgaacttatcaaattttttaatgacaccgattggcagcttgatggtacatatgtaatttgtgggcaataaagagaggaccaagtttaccaattgtagctttccccctagctcaggaactttgatgtattgtcaagcttgttttaaactcacttaatgagaggaagacaatcttgaatcttgggttatgaaaatcccaatggaaagttaatatatgggaatgggagggtactgatttgatagtttagagtaccagctaaaattctcattttgtcaggatcacattgatggggatgatactggatttggagtagttaacttttaatccagtttccctatcataaatatggagcaaagccttgaaaagagtagtttttctaactactccattaataacatcgtgtcatcaacatatgggagaatcaggaagtccattgaagaatgcacaacaattggtggtttcaacagcccactattcttcccactattctgtgctggattgacaattgattgtagcagatctaatgcaattacaataagaagatgcgataagggatcacattgcctaacctctcttatgatatccttagctcattacatttatctaggttaagctactagttcatcattagcttttgtattctatcctttcaaaactgagacaaaatcattaatcagggggtatcaacaccaaagattgcccaaccaatctacatcatctgacctaacttcaatattcctctgcaaaacacacattagtcacaatg

SEQ ID NO: 167125 - DNA, 503 bp, Zea Mays
gtttcatagcatctgttcttatttttaaaatctttttcttcttcttcttcttttatttttatatatttaattatttgaattatttattatcatttgttatgatttaacttttactttccatattccataaatatgcatttgatatttattatgttctaatagtactacagacttactccgtggcctagccataacgttaactccagtctccagtgccggcccgtgctaacagtgagcctgagccatttctttcttttcggatcactcagtcatgtttccattttgcaagtctgcctgtctccggtgtctcctcatattctcctgatgctcaattcaaggcaccacaaagcgaacaagaagtcgtagcgtacctattggctttgcaatgtactaagattgtatctcgaatctgtaaagagagctagagaaccggataggaacttaaaaagtgatttttattgttgttcattaagttaagaccaaaggctacttaatttgacctt

SEQ ID NO: 167126 - DNA, 530 bp, Zea Mays
tcgggtcggacggttcggcgaaatacgccggacggtccgcggtataaccagactgtctgagatgatgctcggacggtccggtcgtgtccagtacctaccgcgtgcctagtggttgcagttgtgatggtgacacaaaagcgtgcatcggcataccatatgatggctaggtcaagggtgacccgtttatagccgatgtgtttgacgcgggtggctctgtattagactctcgcgatggaaagctagaagcagctgatttctcgtatgcacgtaaatgcattttaatagattcatctacatattgctttaactgatctcctcgttgatccatgaaaatcgtaagagatagatctggagtacttacagcgaaaccctgaagtggaggtaggagagattccatatcgatctcccattgacggatgatcttctagtgacgatccaccgtgaagtgtgacaagcacttttctgccgcctccttgcgccgttcggagagtttatgcaacagttctgcctcttccttgtcgcgttgttcg

SEQ ID NO: 167127 - DNA, 399 bp, Zea Mays
ggattattttgcggcgttggatgtggctgcagcggagccttcgccgcgcgcggagggttccgaggaactcccgggcacgagtactgggtataggcggcgaagggcggtggtgaagcgaagagtgagtgaattgtcgtgaagtggtaggcgttatcgtggcgaggtggagagagaggtcgtcttcgcgtggacgggactggtaagcgagaattgttgtcctcgccgattggggtgagtgtaggtgagggggagctgcgaaatctgtttgagggtgaggaactgaggataatgctgttcaactatagggatatgggtatcatcccgaaggttgagctaatgtaatatatgatgcccttgctgtgtgtatgcaaccgctatttgtatgataaggctgtgtgc

SEQ ID NO: 167128 - DNA, 469 bp, Zea Mays
ctaaaacaatatagagaaaggaagatgaagctctctgaggacatgttcaagcttcagcagcaggagcgcgatgatcggattatgaatatggattttgacaaggtcgctccatacgcaagaaattactacttgtccatgcagaaggccattttgtctaggttgccaccacctgaggaatgatctggagatagacgtgttgctaaagagccgctggatgtaataagacttatttatttgcgttttagtgagtttaattcggcatagacttctttgtttgcttcagttgtgtgtgacattcagcggcgttgtcgaagtaataagacttatggagtttgcttcagttgtgtgtgacattcagtggcgttgtcaaagtaatatgacttatatgtttggtttagttgtgtgtgacagcctgcttcgttgtcgaagtaatatgacttatatgtttggttttgttgtgtgtgacagc

SEQ ID NO: 167129 - DNA, 538 bp, Zea Mays
gtccctggcgggtgttttaagttttccttacagactagtccctgggctactattcaattgagtcactgacatctcagaaaactccctggattcttctaatcctaacccgaggtccttcccctaaattaaacagtacccgcggcggaagaaagggcggaggggcttaccggcagcgagattgctctggtgaggtggccgagggtgtaggggaggtcctaagggtcacgacgatgtgcgggtcgccatcagggatggtcggagttggccggtccgcgtgcgcaggcgggggagctcgtcggcggcgaggagtctggcctatccagggcacaattgaccaatcaaacgggtcagagagcttcaccagggatcaaggaaggtgtgtgcgcgaggaattgaagaatggctcaccggagtgcccagtctacgtgcgcaggcgggcgaccgaagttcggtgacgtcgatcttcgccttccggtgaagttctgccaggtccgagggcttggaaagcttcacgggccaatggcggagctaaccgaag

SEQ ID NO: 167130 - DNA, 452 bp, Zea Mays
cagactttagccgaaggggaaaagtccaaagaaagtgagaaaaatcatccaaaatcaccaagtagtatttatatccagaaagactgagtacaagagaagtccagagatcacaataaactagatcgaaggcctactcagctctagaagaagtagtaaatgggagacgagtatgtcggcctagctgacaagcatgacagaggccctcaaaatgtcccctactacatgaaatatctaaactattggtgagcttggtcatgacgttgggtcctagatggccgagacgacgatgccaagtggtggaggaggtggtggagattaggacgggaggggaggatgcgccggtggagaaaggtcagagtgtgtagaggaaccccgagctatcacactgggcgagggggtcctggtggtcagatccttcatagagaaaccaaaagggtcaaactcaatggaac

SEQ ID NO: 167131 - DNA, 548 bp, Zea Mays
aaagatttcaagtgaaagggaagctagctctgcgattcgtcggcccctatcctatcattggcagattaggacccgcagcctaccgccttaaattgctagaatccatgtcagatatccacaatgtgtttcatgtatcctagctctgcaaatgcctgaaagtgccagaaagtcacatcgaagaagagacaattcagattcagaaggatctgcagtaccgagaaaagccagtgaagattctcgattcagccatccgaaagacccgaaactcagaagtaaggctttgtaaagtccagtggagcaaagaaggagaagaggaggctacatgggagagtgaggactcattgaggagggaatacccttaccttttctcgaacccagtctgaatctcgagggtgagattcttttaagtggggtaggtttgtaacatcccaattttaatcccaaggttagaaaccctaaactcctaaacccgcccataattatcccctaagacccccacctcatgagacatttcattcatcatatgcatacactatggttgttggtag

SEQ ID NO: 167132 - DNA, 929 bp, Zea Mays
tttgcttcgaatcagatgccgaccatatgagctggaaaggcaagccttcggtttttagcagctgatccagtttgcctctagtggagatggtcttcaccggtgctgcggtgacgatgattttccaccccagaatatgttctacgctgactcaacctacgggctgtgcatgaccgtcatgaagacgactgatgtgggagtccaaatattggagaatcgggcgactaggtccttcggaactaccttcgacattcaagacatgatatttggctttcgatattcaccatgctgatcacgtgcgctttcacgtgggtactcaactctcatctattttgtttgaatggttcttctagttccttttcttggtaacagagaatatcactagtcttagtttgttttatcacccgcaggtgaacagacttgactcgatgcgctagttttatagatcacatgttgaccatttctttttgtggtggttgtaggaggaggaggatgcctgccgatgggaggtcaagtatgctggcatgcatgcttagttgacgaagactgctatattatctcagatagtgagtgagctagtacgacgagactggtgcttgttattgttggtgtgtttaacttgtccgctttaatttattttcagatcatcagtaggctttggtagtttgttggggggtctatctatcagtaggaccttggtgttgtacgtttagcactattatatttctctttgatgggagaggctgcctgattgttgtgagcttaaacactgctttgtgtgtgtttgtcattcagtggctaacatacatgcaggcgagagctctagctattgcagtcatcgatgtcaaatgaatgtgtgtgagcagtgctatgatcacgaacgaagcacgcatttttatagtcagcattaaggggaacttgattatatttgt

SEQ ID NO: 167133 - DNA, 522 bp, Zea Mays
gcataataccctacgtcatgtgatggttttctatattgaggtgagtttacaagttgtggctatgagaatggtgggctgagtatgagatgaaaatggtaagggtgcctcctagccttatatatacacgatcagataaagcctccccgcacagatgttgatcgcaatctctttgcttatcacctgatttgtagcgaacaatcttcctttatcctgagaaaatcttgcgctctcacgcccgagttatcgccgacggtttagtctgtagggtggacgcaacaaaccctacccgacataccgcgctcctacaacagctaactcggacgtgggcctctttcgtatcagaactggcttgcctctgctggtttcctttatccggctcaccacaaaacgccccaggagggcgcctgctgggtggccccatacgtgttttcatactcatgtggacccggggatatccatcccccacaagcccccgatctttgaattgattttgagtaatcaatccaaaggtcttctctgctt

SEQ ID NO: 167134 - DNA, 749 bp, Zea Mays
atgatgacaatgaagtggtagtcgttgggacaattacatgcctaagagactacacaggagggaatcaagatagagaagtaaggatagatgatatgaagactaatgagaaacaagtaatagtgtatcaaagaaggcggtataaaaaccagggggagcaattcatgcagccagagccccaatcacctgcatctccagtcctagatctctcctcaggtctctctccatcaagctcctcgcctctacctaaaatgggtaatactactccttctcctgaacatgttgatttaccccttgcacaacgtagggatcatagaatcaatgccggcaaacctccatctcgctttggctttgagtacgatatagctaactacatgtcatactgtcatgtgtcgcctgcatatagaaccttcatcgcatccctgcagactgtgtccatcccgaaagattggagatgtgcaaaacagaatccaaggtggaagaaggctatggaagaagaattacatgccctcatgaggaacaaaacatgggaacttgctctgctcccagaagggaagaaggttgtgggttgtaagtggatcttcactgtaaaacagacccctgagggcaagatagacaggtacaaagcaagactggttgcaaaaggatacagtcaaacatatgggattgactatgatgagacttttgcacccgtggcgaagatgggcactgttagaactttgatctcatgtgcagttaattttggatggccc

SEQ ID NO: 167135 - DNA, 501 bp, Zea Mays
tctagaaggtaaaatgacttatctgtttaatagcaaaaccattaatggtagtcaaaggactaagggtttatttggtttgcttatgatgaaaatagcctcaacgattctagctaagcgttcgttttcgataggcgtgatcgcccctaagggtgtgatcgcgtccctggcagtcaagggctaaatgaccggccaaaatggcttgttcaaggcagttactgaggaagaagcaggaaagagatgtagctacgatcgagacgagttcacgtgacggaggacaggagtagagacgcatgtgcagccatgcatctagaaatagattaggagtagagattagatacctgcccgtccggccgcctacctgcaccgcaccgggccgcgtgtgccgtgcgcccgccgctccaacgccacatgcgatgcgattccatcgccatgcaagtgggctgcagtagtttctccgatccgtcgcagtctctgctaacccgtatctctattaagtaagca

SEQ ID NO: 167136 - DNA, 381 bp, Zea Mays
cgcgtgagtcctgccacgcttgatacagcaagctagaccgagtccaaacgagaaacccgaaaaagatctagagcccattcgcttcagccagctcgtcgggtacggaacaggctgttaggggactcgtaatgacagcgcttgtgcggtacagcggtaggtgtccgcacactcttcttctattgtttgtctactcactccactcccgtcctcgctccttccacgaaactacgttcactagctcgggatgaacagagtcgcctctctctctgctagtcaggtctactgatcgtccaccacacggatcagtttgtaattaccgtgacttcattgccacagctacacaattgcacgagtcaaagtcttttggctggctcctagcac

SEQ ID NO: 167137 - DNA, 659 bp, Zea Mays
gcgagaagtggtgttctggcttcgtaacaagctaatagagcaagtcggggcatcaatttatagtgatcaacatcggtggcgctcaatttggggaagacacgctggcggccggagcaaggtgagtcaccagagttatctattgtggcgcttacttaggcaaaggctcgggataatagtttgtcgttcatcatgacttactgcgacttggtacaacgacacatagcgtggcagactccggtaaactgcggtcacgtcggtggtggtcgcgcggccacgttgccgtgcaagttggtacggtgggtcctgaccccgctgatcttttcactcgcgcggtgatatccgcttctcactgagcacgatttgtggcaccggcgcgaatccaggcgcggggatcgccggctgcgaggtgcactgaacctggcattgggttagccactgtaccatcacgaacactctttagtgcgcctgacagagcaaattgcagggctaggttctcaaatctttatgtggcaactcaatcaaccatctatagaaaagttgatctcctacaaaccggctttgatttcattataaagaccttgatcgaattctcatcgaatcacacagaattcagcctccaaagtttatccgagctcactgtcagtccaaccctaacacct

SEQ ID NO: 167138 - DNA, 611 bp, Zea Mays
caccgagtcactgcttcaccggctcggtggctaggccatcgcctgcctcgccgagtcattacttcgtcgcctcgtgggctgcactgctgtgcgcctcgtcgactcattgcttcaccgacttgggggctaggccgctaccctgccttgccgactcattgcttctctggctagagggatgggttgtcgcccgcctcgccgagtcattacttcgtcgccttgggggctgtaccaccttgcacctcgctgactcgttgcttcaccggctcaggggctgggctgctgcccgcctcaccgagtgactacttcgacaactcaggggctaggccgctgctcacctcgccaagtcactacttcactgactcgggggctgggtcattgcccgcctcaccgagccattacttcatcacctcaggggttgcaccgttgcccacctcgtcttgtcattacttcgttgcctcaagggctgcatcgtcgtgtgccttgctgacttgctgcttcgcaagctcaggggatgggccattgcctgcctcaccaactcgctgcttcaccagctcaggggctaggctactgcctaggcctacctcgccatctcgctacttcaccagctcagg

SEQ ID NO: 167139 - DNA, 414 bp, Zea Mays
ggaggaaaggctccaagcgggtcgaggtaactccggtgagggattctggccgcggggaggaggtctgaggcacgctagggcctgggatagcttcagcagagtgaggggaacctcagggaccgacgcagggggcactggactggactaaatcagtcggtcaccacgcgagcgaggcggaccgccacggtcgaaatctggcaaagccgaaattggccggcgacaaagcataactggggaaattgagcatcggaatagatgtctcaccttggggcggagctcagggtcgcttggtgtggcctccggcaagctagatgaccggcacggcgggcgagggtttccggcgaggctaagcggcaagggcagagcgcgagagagagcgaggctgtgcgaaatgggacggagaagtgagtgctt

SEQ ID NO: 167140 - DNA, 832 bp, Zea Mays
ctcagaacactatacattggactgcgggttcatataacaaaagggcaggggctcttatgtaactattctcggccgaaggggtatggggtgatatcggccgtttgatccacaatctgtgcgccagattagacttcatgctagttattcatccgcgctcaaccatggccgtcggatccaggattcgcggttctggtttaatgaatcgaaggggtacgcccagattcgatctaggccattccctgcacgatcaacggtcgagggccaactccccctagatctaatcttagccctacagcgattgatcaatggtcttggggcttcttcctccccatgaccccggacgactgcgtcacgaactggggaaacgtctagctcgcgtgtaggttgactaaccacccacgggtatggatcggagcgcggatagaacctatgcagtgaggatggaatgttgaattacagggacgtcttcttaccaagttcgaagcgcaagtacagttgcccacggaggcttgcggcatgatgtcgattcctcaacaccgcccgtgaagctcccgatttccgaattggcgaatacatgaatgagtcttcgcgcagtacggggtgatatcgcagcttgacaccccacgcaagttgttggagaacccggctcccaccgcgcggcagagacgacgctcacaccctcacgacggcggtgaaacacggtggcgcccgcatgaatggcttatctgctggcaaccgggacagcgatttccaaggacgagggttttgtagggtgagggaaggcggggtttgcggcaagcgatttaagcccgcgtccatctctagagagaaa

SEQ ID NO: 167141 - DNA, 901 bp, Zea Mays
tgaaatgttgcatcatgttaattgaaacccaaatattctttgaattgttacacatggttgatttggtttgaattgaaacttgatttgaatttgaattaaaaaccctagagaaaataaatggaaaatcaattagaaattccctagaaaatggaaaacctaattcaccccaagttggcccactaagcccagcctgcgcgcgcacgcccgtgcccgcgcgcccttggtgcctcacaggcgggccccgccagtcggcgccaactccagcgcgccctctctcccccctctctctcgctgctccgtgggccaggcctgtcgatgctgtttctcttgcccacacgctcgcttccctctttgtcccgccgaccccacctgtaagtcgtccctaacctctcgcccacgatccctcgccttggacgcgccacgtccgcgcgttctctggccacgtccccgtgccccttttgagctccgtgccctgctcgcccacctcccctcgctcacttgcgccctcagccgaaccaccacgccctctctctcgctctgtgcgcgcaacaagagccctgccatcgcccaccgacgtcctccgcccgttccatggtcaccgtggaactccccgccgtgtctgttgccctggtaagctccgccctatcacccaccacctggaacacccctcggatcgcccctaatccctctagtctgcccggtccgcgctcaccggagttcttcctgtgcagccggagttccgccaccgtcgccccgtcacgtccttgcgccaccgtcgttgccccgtgacactagtgcttcccctcgaggtgagcaacctgcccgcgcccttaatttggcagttactaccctggttagcgcgcgattgttcacctgagttgccccgcaccgccattagccc

SEQ ID NO: 167142 - DNA, 314 bp, Zea Mays
ttcctagtggcatgtggtgccatctcacctcttaatggccttactagtgaggtgcccgtgcgttgctacggtttctttatactacataggtagaccttattaaaatggaatagttgttcaaacacattaaaaacccttgcaatgatatgtgctctatttgatcttgttgtgctcgatctcaacgcgtctaccatgtgaactgcataaatgcatttcatatgtcgagtgagaatacaattccaattttcatgtcgtctctcgttaggtggcccggacaacaccaaaccctagtcgctgctgccccttcctcctct

SEQ ID NO: 167143 - DNA, 487 bp, Zea Mays
ctttcatccctacccttgagtttggttaaccaatccattcctaagatcacatcaatcgcttgggatggcaagacggctaagtctgccaagaacactacccacttaaaagaattctaacttgggagcatttgagctggcatagaaggtctgaccctggggttcgggtgaccaagggaatttctaggtgtgtagagggaatgccatgtttttccacaaaactagtgctatgaacgaatgagatgctcctgaatcgaaaagtacagtagcgggagtaaattcaactaggaactcaccgagcactactcccggagcttgctgagcctcttgagcatcgacgtggtttactcgtgccctaccatgatactgggtcttactctgctggctgttggaggagggtgccttggaggcgggcgctggggcattcttggggccattcaccgagttagagtaagtaggtcctgatgccttcaactgggggcagttattc

SEQ ID NO: 167144 - DNA, 519 bp, Zea Mays
taagcacaagaaaagtgattggggataaccagatagggcgttaggccaccattgtttacctgcgctgcgcaccggagcaccacagtcgtccacgacacaccgacgagagagaaccgagggcagccgggcagggaggaataaggaagagagaccagatctggattagggttaggttttcgggccggaagagaccacgagagagagacccggaagagcatcgccggaagctaggaaccacaccggcggcgggggaagagagctagggaggaccggaggagaataccacgccggagtccggatgtaccgctgtgggatgggggaggcgggaggcccagaggtgaatcgtcgctgcgccgctgcagagggaggggaagaccaccggtcaccggagtccgtactcaccagtcaccggagtccgtactccgtaggcggtggaggcggcagcgggattcgccgaatcgggagtcgccgagtcgggacgggaacgagacacgggagagggagtggagactgaggaag

SEQ ID NO: 167145 - DNA, 962 bp, Zea Mays
cccccacctgccttcagtgccgttccccagtatgccggctttggtggcgtgcccagttcctatggcggcatctacgttcccccacctcctaagtacggcacgtactacgggggagctgcgtctctggcattccaggcgtcttcgccaggctcccagactctacccgcgacaacgccttggaaccccatccacggcgggtcttggcatcaggactcacttgcgcaatccttcaacaccatgactctgaacccaccggcatcttcttctgagtggtatgctgattccggtgccggttcacacatgacatcagacgctggtaaactttccaatatttccccaccttcttcctttactccttcctctattattgtgggcaatggtgccttactccccgtcactgccactggatcatccattttttctttaccacatcgtaatcttgttcttaacatgtcttggtgtctcccaacattattaagaatttaatttccattcgtcgcttcaccacggacaataattgctccattgagtttgatccttctggcctttctgtgaaggacttgcacaccaggaatgtgatcgccaggtgcaatagctccggtgacctctactcgttctatctaccatccaccagcacctccgcgttcgtcgctgcacctatttccctttggcatcgtcgtctcggacaccttggccatgaagctctgtccaagctccttagatccagtgctatttcgtgcaataaaaatgatgtcaagcatatatgtcatgcttgtcaacttggtcggcatacacgcttgcctttcagtttatctagctctcgagttgtttgcaattttgatttaatacactgtgatctttggacatctccccttgttagtgtgtcaggctacaaatattatcttgttattatttatgattgttcacactacatttggatgtttccgcttcgcaagaaatcc

SEQ ID NO: 167146 - DNA, 970 bp, Zea Mays
ataacttcaccacattttggtatgatcaaattaaacagtagcttgattacaaacttgccacaaagtttgaatttaaaattggattaaagtttgaatttgaaatagaaagagaaggaaaggaaaaatataaaaaaagagaaaaaacctaactgggccgccaagcggcaatttggctcaccaactgtttattccgcacagcccatccgcacccgcgcgctgacaggctggcccacctattcagtcacgtgcgcgcttccttcttccctttacaccaacatgtggggcccatttggcatcgcccacaatctctcgcgtgtttgagttagtgtcactggtaggcagtcccgcacgtcagccatccgcgcgctttcgtagtctctagcgggtgggccttgtctgcgcaaccatctgctcactggcgggtgggcccattgtcacggtggacttctaaccagctcgatcgcgggcagcgtaccgacctcaccgtgatcctcgctgggactagcgagctacgacactgtaccacctcgcccataaatagcgaacccctcggcctcgcccactcctgcttcccttttctcgcggtcgttcctccacgccatccactacgcagctgcaatccgcacggaagtacatcatcgccgccacgcgattcgtcgttcacaaggccgacaggcaactctgtgtgggtgcgggcagtgcgggatagaagtgggtagctcgtcgaggaagccgcgggcgcaggggtgccagattcgacgggactttcttaccggagatccacggaccacgcaaccacgtggatggggctgctatcgtctcaaatccaaggtaaaaccacctccctactctctgtcctactctcctctacgtgtagtgcccttcggattaggttttgggacactgaatcgcggtgaccgtgctcagcggcgaagcgtcgtcgtgaagtcctgtcccgccgtcgtgtttg

SEQ ID NO: 167147 - DNA, 401 bp, Zea Mays
atcaattcaagatttacatcagccattcaggaataaacattcaacaactcaaggtgatgagtcgaggacatgaggtggctactgcggtggatgagtggaggcatgaccgtgaggaattatagacattgggtggcgtggttggcatggacgcgcgatggtgggtttgaccgtattagagtagagttggctaattatagatcgatagtggtggctcaacaatggctaagctgagatattaatggtgggcgaggcgtgtctgagtgggacacacatggaatcggttgggtgggttggctcgcaggagtggtttggcagattttattgtgtgagctggttaaggtgatgaatagtgctcccttgtgtgtatgcaagttcacacaattattttttgaaactttgtt

SEQ ID NO: 167148 - DNA, 346 bp, Zea Mays
gtagatctataagccatccaaaatccacataccttgagttctttgatgcgtttgaaatcttcatcggatagaattttaccagtttcatcagatggaacttcagccttcttggcagttgctaacctcttcagaactcgaaggcttgcatcagcagaacttagctgtccaatataatcatttaacttcctcttctgcgctttagagccactgccttttgacttgtcttcctcttcgctgtcttcattctggtctaaagcttcatcctctgaaccatttatgctttctttcagttcatcgtcgtcaccttcgtcttcatcagatatatcagtatccacatccacatcag

SEQ ID NO: 167149 - DNA, 853 bp, Zea Mays
aaaccagaaaggaaacatagattaccaacgcagtgactggcacattagatccattggcgagtagcactcgcatccgccaccatgtgccatggctggcgtgcgtgtgtgccctgtcggtttctgtgttgcaacctaccactcaattggcagtaagcatgaaaaaaccctattcaacacatggaagcaaggaacaaagaaaatcaagcaacgagaagtcaagagttgcagaaatagagtagatcaagaatgggaaggggctgaagtagggacaacgaattcaagcaatgattagttaagagctacaaaaatggagtagattgagaatggggattggggcaacaaattcaaacaacgagaagttgagagctgtagaaatagagtagatcgagaatggggagcaggatgaggtcacgggtggccggcgggaacgacgccgcgggggtgtagggtcatccctggcggccgtgaactggggctagggctcatcgagcgcgtgtgccgtgtgtagtagaggcgatgagaggggtgaaggaagcctaggagagccgaggaacacgccaagaagcgccgacgatgagatttatgtctggtgaagtcgccgagccaccaaggacgggggcgacatgggggtggcggcgcagaatcgtggaggcggggaagaatgatgcatgttcgagcttggagagcgagtgtgggagcgaggattgcgcgagcgggggcatggtgcaggaatctggacgcccgctcttagctcttgcggacgcgcggtgggggaggcggcgaggtgaagcggcgatttcttcgtaaaaattgaccgcggagatccctggggaggcaccatggatggaagggc

SEQ ID NO: 167150 - DNA, 751 bp, Zea Mays
ggccatgtaggtgtatcaacgcgccaatccaaaagatctacacatcgatgatgattgtgataaaccctaatctaattgagtggtgcacatggtataccttcttgtctagcattgatgttggtgaagttgtagagggtgacaacacttgttgacattgacgctcctccctatggagctcttccttctgcagaggctctagcatggttgtcctatttagtattagtgagatcgagggggggctcctcgatccttcctcccatgggggttggtgacatcgtggaagccattagaagtggcgatcccgatcattggtgggtgtcgggtacccaggaaaggggtacccaaggcgaggctcgtaaacctctctctagcccatttaccaaccaagtccccgccgagtaagtctgtgatgtcaggcgaatgaccaagcccctgccaagcaagcctgcgaggcgagcgaccaagtccccaccgagtaggtctgcgaggggggtgagcaaccaagtccccgtcgagtaagtctgcgaggcgagcgatcaattccccgccgagcaagtctgtgaggtagggcgagagaccaagtccccgccgagcaaggtctgcgaggcaaagcaaacgaccaaacaaacctgcaaggagggagcctaggccgacgtcgttagtccatgacggtcataataggtcgcgtcgccaccaaaccatgtccacaccatgcgtacagtaacaagagggtcacgacaacaaagtgtcc

SEQ ID NO: 167151 - DNA, 509 bp, Zea Mays
gatttagctcgattatgtgcccccgctttggttggtagtactccccttaccctgtcgtagctagcccaagccttaacgcgccctagacctcctctccccgaccgtaattcctcaccggagttgcccgacccgctcgaagcacctacccttcgtcattctcccgtttccggtcccgttcttgtggccggtagtctgccaatgagtttgccagaccctcttgaccacgtgtgcctccccggcgaccctagactccccagtggccacgtgtgcctcatctccggcgacctcaccaccgtggaggaagcaacgccggtcacggagccgtaaagcccacgcgccccatcgcaaccgtccatccccgatccaacggctcggatctaggatatggttcacgcttgcgcgctctgctcctgggccccgccggtcagcgcctgcgccccctggcgctgggcccgaatggtcagcacgccttccccctctggtcgctgacaccccgcccccacttgtca

SEQ ID NO: 167152 - DNA, 493 bp, Zea Mays
cgccgcaaagggccaactgaagaaagcaagtggacctgcccctttgtggatgacaacaccgaatcctattcctgaggcgtcacattcgacgatgcacaacatgtcgaagtttgtagttggaggacaggcacggttgacagagtgcgtttgagtgcattgaacgcctctgttgcttcgagcgaccaggtgaatccatccttgcgtagtagccatgtaagcggggctacgagaaggccaaaatccttgatgaatttgcagtaatagcccgctaggccaaggaagccttgtaagccccaggtcgagcgtgacgtaggccatgttgtcatggcctccaccttgttatccatgattgccccatccacggagatgatgtgccccaagtactctatcgacgatgcgccgaacttgcacttggagtgcttgatgtagaggtggttgtcgaggactgtggtcagcactgccttgatgtgctacagatgaagcaaacaagggg

SEQ ID NO: 167153 - DNA, 406 bp, Zea Mays
ggcgatctcccgtgcttgtgcctgctcttcactcctctaggtgagcagccccttctccctctgtcttcctctctgttctgttgtgcagaggttctccttcccacctcttgtgccaatttcaaattcttgtgtaaatcttgtgaatccctatgcatggttgtgtgtcctagtgctccattaaatatcctgcaggttcttagctccttcaggagggtttcaccacctcaaataaccgtttcaccgaaaccctatatcctcgcacatcacgtgtttggtgaaatgcccaaaccagccaaaaacgctccgattgaacccaaatttttcaggcaccttcacaacacctccagtaacatattcgccaaatttcacgcccatccgatataccaggcttcattttcaccaaatt

SEQ ID NO: 167154 - DNA, 613 bp, Zea Mays
taggaccagtgtcatgacatgatggagtagatggaagacttagcgctacactggatggtcctagtaataaaagaggtcttccatcttttcctggtccaccttctccacttggcgttgcaccttgtgtttctaaaacagtgaccctccaccttctccacttggcgctgcaccttgtgtttctaaaacagtggatggtccaccttctccacttggcgcacttgaagattggatgccactaacagacacaagtacaaggctagtacaaaatataattttaattagtcattatatgacgacatttgaagcaagagagttataagtgaaatgtagctatcatatgtagacttcggagactgaatgtcggtctgtgaaggttcatttgcaccagcatatttgcgactcctctgtttcctatttctttttttggtaccgtttagtgggcacttataacttatttgtctgtgaccaagctctccacattttttgcatcgtatagggccttttttcatttgcctaccactttctttattggttgtcttaggtttactcccaccttacagacaacctttcattcgtaatttcctttgcctaccaacacctcgttttgctaaag

SEQ ID NO: 167155 - DNA, 887 bp, Zea Mays
aacttcgtgttgctaaggtactagccatttatctcaaagttcgcttcatgccgttcagcgacaaatagcaatgtgccaacatctggtcgagcaatgtatgtctgagatttataacctttattcatttggtaaggtcttttgcttactaatagaatcccaatgtgtgatatcttttatgccaaaatggctttcatgcattatattatatatcttcgggttacttcgggtaaaactttatgcacgaggagagagcagaaaattaacttatctgtgtttaattgtatttcaatttaatttcccagatttccaagcactatagagcttgatatagttgttatggccacttggcgatatataaatatgatgccacacaacacagtcaaataaaatataaagccaaataaaattgtttacgaaggttgcgcataatgtgacttaaggggcttgaacaacccaccacaatccacgcgagtataagctctagcgtatatggcttcaacgcgtgtgcggccatcagggctacaacaacacaacaatcattcgtaataagcgcaacaaacacaattatggctcggtaatcagggttacacgataagtccacgcaacgtgcgcaacaggcgcaattatgacttgatgatcacggcatacggacagtgcctacagggcatgcgaaatatacgtgactcggcgatggaggtccaactcaacaggagtggtccgattaagcgagagtgcaacatagcaatcacatgacgcaaccaagttcgtacgatacaaatactatgtcgtgttgccagagcgcagccaatgcttagccaatgtcaaaactcatccgattaataatttagtctgatcgacacatctgtgtacccactatacaatttaat

SEQ ID NO: 167156 - DNA, 356 bp, Zea Mays
acatgaaaggacgggacaatattgccatatcgggtgtatgcgtacgcatgctggaagtgacatgggaaccatgacagaaaacaaagctgcaccaagcacgaccttgagctccaccataagtctaccctatgggacccaccagatgccactacatcaacatcgaacttgctacaaggacccgtatgccaagtggacaaggcggtatggcataccataagtacgacagtgtatgacccaacagacaacgttaggaggactacgccatccaagggcaaccgtccggacacccctcgtagaatacaagcctccagtgtaaagtcatacccttgacgtataaaagggcaagaccactttct

SEQ ID NO: 167157 - DNA, 925 bp, Zea Mays
cgccgagtcgtagggccgttgggaccgattccgtgctttcctgcgcataaagcctctactgtggccctaaccttcgccgccatagcttagaaaccatcacggcagccgccgagggatagagagaacaaacgcctgggcgctcccatcgcgtggaggaccttcggaccgtgagcgtcagtcccgtcttcaccccctccgtgacggtatgtttcgtgcccccctctgtagcgtgataggaagcgcgagacgacttagcctaggcactggcgtggatgcggcggggcaatgctccaggcgctgtcgaggggatgacttgccactggatggcacgtagtctcgagcagtctgtagatgagggcttggcgccgagctagacgggtagtgggaggcgaagaacattccgcgccgtataacggggactcgaacggcggactcgggtcgtcgctgccagatccttggcgcacggccgcggcgaagtggactggagagagaaaagagagaagggagagaaccggtgttaaagaagacgcccgacatcacttgatcatgcgttggacggtaaggattaaagggatagggaggaagaaaccgtgaccgtaggatggtgagtggagggggtagatttatctcgcgtacccgccgttcatcactaatcgcatggctttgattagaagcaggaaataccccttcatcccaaccgttatccaccgtagaccggcaatctgacgactaaagcgaaatagtggggatcgtgcgctgtgaatcgtcgatctcagatccgacgatgactcgggaatcaggatttatacccatcgccggtctaatctgggcgctcggggttggatcggacggtccaaacatcgatgtacctcttcggccaggcactttttcataagagaccctctgtttatttgaaaacaacccg

SEQ ID NO: 167158 - DNA, 662 bp, Zea Mays
ttttgaattgtttctcaaatttgaagcggtaagcaagtcgaacgagttcatgcttcttccccgcttccttcttcttcggcattccccagccacttgatgtaggataggttctgttagccaaatattcttgcaccaagtctctggtactgatttgctcagccatcactctaaattccacttcgcccaactgacagggtgaccccagttgcatgttgcataagggtcgggtcattacgaagctcaaactcagtggactcatgaccatggtcatcaacttctccctgtttttctcatcagccttcatataaaaccattcattttccagccagttggccactttgtgcggtagctgaggactggtgccttcgtatcctttcgatacgcaaaattataacaaccaaaattttcgtgaagaccatctgccctggcctttgtctgatagtgcaactcatgcacgtggcagaaagcttcggcatctgggctcatcccttggcttcgaagggcccagataaagatgctgagcctaacaatagcgttaggagtcaactaatgaagatatatttcgaagttctttaggacttcccctatcatctcattcaggggaaatcgcagccccgctctgaagaagctcttgaaaaccacaacttcatccttcttcggct

SEQ ID NO: 167159 - DNA, 616 bp, Zea Mays
tggcaatgcagtgtcagttggtcttctgctgaaatctcgaggtcctcgccttcttctaggtctttcatcctcatgtgttatggggtgtcccatgggtgcgaactcgggtggtgggacatcacttggtagctgtctttcgaagctgctagtgtcaatgctaccttgtggcgtgggcgggtgttcggtgtgagggtgcttgatgctttctgcttcagttctattgttctcacctgcggggacaaggtgttgtcgacgaaggtaattttgcatttcttggcagtgagggctgccttcacgatcttgcccgtgggggagttggccctagtggttgctttcttaggagccatctcgagagttggtctttggagcacagacggtggacgccaaatgttaggcttcgacaggtggaaccaagcactcagagacaaaaggggagctccgcgcatgataaaatgttaggtggggaactgtagcgtcttgttatgcgtgtcctgtttagctacatgatgggggtgtatatggggttgtccgggggtacttcgtctcttgatttgagaaataatactcaagctcgatctaagtgattgcttgagagagtgaaagggttgaaagagac

SEQ ID NO: 167160 - DNA, 1041 bp, Zea Mays
taccacctccaccaccacaacatccaaaccaacacctaccacccctcccaccaccaccaaagcaagaagactttgcagacccacccttcaggggagtgattcacatgatcacaaagggtccagctctgacttcgagaacaaacgacaaaaaagggatcactactaagggtcaatcaagtcgcagtcacaggacccatcgtttagaagaaagtggtctcacgtaccattaaccttcgacgcaagagacaccaaccttcgcagcttgccccacacagacgcactcgtcatcagttgtaatgtggcaggatgggagctgcacatggtcctcattgacaacggaagccaagccgacatcattttcctacatgccttcaaccaaatggttttggagggaaggggacatttccacttggcaagatagagctccctctttccgtcggcaccaaccacaatattaggtcagagcgggtaacatttgacatagttaacatggtctaccaatacaacgccataatggggagagggtccatcaacaaacttgaagcagcaattcacggtcttcacatgtgcatgaaaatcctagaacctctcggcacaataacaatttacggagaccaacatactgctcgcaacattgaaagggacctcgtcctaggacaatgcaacatccagtaccttatttctgagaacgaaagccacgttgtcccacaccctgagaaagcagtgccaaccaaagcctagattcaaagcaccgaccaggccaaaaaagtccctctagaagccacagtaccaaatcagacagtgttaatcagcgaagacctcacccaagatagagaggccaagctgttgtcctgcctacatcgcaacaaggacgtcttcgcctggtcagccctagaccttgtctgcgtcatccgctctgtcatcaagcacggtctaagcatatgtaaaactcaatattgtaggccaaataaaaggagaaattgttttcctttatagtatgtatgagtatctctatttatcatcacatgtgactactcatga

SEQ ID NO: 167161 - DNA, 1742 bp, Zea Mays
ctccagaagaaccactgggagagagtgtgttagctatctctgttgctgcagtaagtgggggagaagggaacaaaaccgttcgattgtgggcgtctattcactgtcaacaagttttggttcttgtcgattcaggtagctctgccagttttctgggaagccatctcatgggagtgatgcctggaatacatctgttgtcaacaccagttcaggtgaaagtagcagatgggagaactatgtggagtagatatggggtaactgattgtaaatggctttgtgagggtgtgaccttctctagtagcttcaagatccttcccctaggaagctacgacatgattcttggcatggattggttggaatgccattgtcctatggctgtacattgggcacagaaatggcttgaatttgattatggtcaaaagagggtgcggctgcaaggcattttacccaaaacacaaacctgcactagtattactggtttacagttggattcactaatcagacatgaagctgtggaacaacttttggagctgcagcaagtggacaccatcaatggaggagaggttcccgacattattaagcagctgttggctaagtatcaacacttattcgttaaaccccatggccttccaccgaagagatctgtggatcacgtaatcgagctgataccaggggcactgccattccgactccgaccttaccgttatacaccccaacaaaaagatgaaatcgaaaaacaagtgcaggaaatgctggacagtggaatagttcaacaaagctcaagtccattcgcatcgccagttttactagtaaaaaagaaagacggagaatggcgtctgtgtgtggactacaggaagttaaatgcttatacagtgaagaatcgatatcccatgcccatatttgatgagattattgatgagctggcgggtgcatcggtgttctctaaactcgatcaccgctcaggttaccaccaaatccgattgcgcgagggggatgaacataagacagcatttcagactcatcacgggcacttcgaatatcgtgtaatgccattcggtctgaccggagccctggctacatttcaagattttatgaatcagctgctggcaccactactccgaaagtgcgtagtcgtgtttctcgacgatgtcctggtatacagcgccacaatggaagaacatgtgaaccatttggaacaagttctgaacctgataagccaacaacaattgtatttgaaacagtccaagtgtacgtttggtcagacgaaactggaatttttgggtcatattgtcagtgctgcaggcattaatacagacccaaagaagataaaagttatccgtgattggcctattccaacttgtgtgaaggatgtgcgcagtttcctgggcatggctggctattataggaaatttgtgtctaattttgggatcatcagtaaaccgctgaccaaccttttaaaaaaggacactttattcgtatggactgaaacagcaaaccaagcatttgtggctctaaaaacggcacttgtgcaagcaccagtgttggcaatcccaaacttttccaaacctttcacgattgagaccgacgctagtagaggaggtattggagcagttctgcaacaagatgggcatcctatagcttacatcagtcgggcattgggaccaaggaatttggggctgtcaacatatgaaaaagagtgtatggctattctctttgctgtggaacagtggcgtccgtatctgcag

SEQ ID NO: 167162 - DNA, 675 bp, Zea Mays
ataaatgaatagggctagcgtgcgcctgggcctgattccgcctccggcccactctaccaatctagcctccgcgcggcccatccacctccgctggagcgcgctggcacgtggggcgggcccacttgtcatttgctccgcctcgtgccctcctacgtcgtttcgttctgccatgtgggaccgaagggcgacgactccctccagctgagtccatggcggccgccgcatcttctgggcagcgcaacagattcttcgcaattggtgcgctccaactgaattcgcagatgggcgggcacgatctgactgcggggtgataaaaccggtcgccctcatctttcttgcgccctctgctccgttgaatttgctctagcctggccaccagagaccaccatctctgccgtgcgaagtgagtttatgagtgtcgccgcatatcaccttgccgctggtaccacctgtgcccgacccgaagggactcagtggtccgccagggtccgttgaaggggcaggggccattggcgagcttggaacccgtctgtggtgcgcgtaattcgttatcgtcgccaggcgtggccgcggtgccgcaacgtcgcgcgggcagcgctggtaccgcaccacaccaaggtaattcgagccccatcatgttcgttgtaccctcctccacgttatgctttactgaat

SEQ ID NO: 167163 - DNA, 319 bp, Zea Mays
aggtttccatgaactgagcaccgagttctttatgtcttctctaattaagctgacaggataaaaaactcatttttcatttggtggtctcaaatgtctaatgcagtaggtgatctgaaactaagtttctttttgtcctgtagtttgactatggcaatggtctttgttagtccataggatcgttagctgtggcctacggatatgttagctactttctttctttataaacatcaggtactatttgtgattgagtttgccatgcaattaagccttctaggcttctagcaacaccattgttaaccttttttcccctttagagtac

SEQ ID NO: 167164 - DNA, 549 bp, Zea Mays
cctgggtacggcgaccccactatgccggcgacgaacaccgacgaaccgcggcccagcgctttaagaccctatccctgagcccgatagcattgacacaatgcggaactaatggtgaacacgtggatgggtgatttacctgcagtggcgtagaagaaatctctagccacgaaaccgagctaactgcggtggaggagatagcggagcgaagaattctgaacgccagacctagccgctcgagtggacactcacaccaacactatccccggcttctggtgaactccgcgtgaacacgaattgaggcccgagcggcgaaatctgtggcaatcgcagaggcagcggcgaggtcgccgcgattcgcactctctctccggttctacggcgctggtggctgggtaaggtggacgcagggttgtgagatggggccgaggacggcggcactgccccgcgattatatagggtcaacaaaatcggtagcgggatgcgttgctcccggaagaatcgcggagttagttgagctcgggtcatccggcaatggcattgagagggaag

SEQ ID NO: 167165 - DNA, 458 bp, Zea Mays
gagattcaataaagcaattgcacttgaagttgatcgagttaacacagaaaaggcacttatcgaggtgaggaaagaggagattgaattacagaagcgaagagatgaagagaggataataaatatggatcttagtgggttgacagaagagcaacagagttactacacgaagttgcgagctaagattttggaccaactttctgatgcttaggtagccttgattcgcaattacttattacttgtggttgcaattataacttacacaaattcctatctacttgtatgttgcaggtgctcaccaatctacttgtaggttgtatggtgctcgagggttagtgctaccagtttactagtctcatatagtggagtccatgtcagtgttttagttgatgtttactagtctcgaatagttttgtcattgcttccagtttatttactgttttcagtggatactagttatt

SEQ ID NO: 167166 - DNA, 1063 bp, Zea Mays
atttccaattcaatttctcttatttacaaactctctggactgggcgcatgaaaaccagagagtgcaggggcctcggtgtaagaattcctaagacacagagtgactggcgccaggactgcgggttaaatctctaaaaactgaggggctcaatcgctaaacctaccggccgaagcggtatcagttgatatggaccgttcgatcaaatgcgagcggccaagattaaatcagcgcccctcgcaaaccggtatgcttctacagccgttggatccaggatcgaggatccagatttaattatcccaagttctagtctccactgtacgatgcgagattgacggttcagatcgtgttgaacgaaacggtatgctatgttctaatcttttccgcccatgtacgatccgatggccatgatttctccctcacattgcttcaacaggacatcggagccagcaccaggcacaccggcggcgccaccgaccgtggcgatccccctgcccaattttggtgaccaagtccaatcgcgactctcccctgggcgcaacctgttgcctaacacatggcgaacctgaccctaagctcaattccgtggatggggccctgcacacactagttcttcacaataacgcggtccgactacgctggagcaattacgtcggcaagaatccaaccctcgatagccccaacacggtcatatgtgggcgcaaatcggtactacgaaccaaatgaacatggcggggaaagaatttttaccgcagagggagtggtagatcgaccccgacggtgaagcccgtgtccacgaccttcttcttcgattccgtttggcaatttgcccatcacagccgtcttccgatgctagatctcactcgtgtgcgttcccgcttgctggcactacccgcgaccaccgcacgcacacctcagcagcaacggcgcggcgacgctacccgatttatccccttttgagctctccctggtaatggtggctgactctttttagttctagagaacggaaggtggtcaagggtttcgggtgatgggaacatggccttaagacgtgtaggtgcgcgac

SEQ ID NO: 167167 - DNA, 302 bp, Zea Mays
cccagataaaaacgctgagcctaacgatagcgttaggagtcagctgatgaagataaatttcgaaatcttccaaaacatccccaatcatttcatgcaaaggaaacagcaatcctgctttgaagaaacttctgaaaactaccacctcatcattttctggcttcgaagtggtttcttccccgccaaaacgaatcagcttcttctcggcttccccgaagtagcctagctttatcatcatgggcatatcagcctcagagacagtagactttccaaaatccaagtggctgggcttggatggcataacg

SEQ ID NO: 167168 - DNA, 528 bp, Zea Mays
atcatggatagaggcgcataatctcccaataaccaccatgacaacaccaattcaaattgactcagccggtggaaaagtctgaaccgatagtgtatgcttgaatgtaagtgtggaaataaggggatagagtttcccgctaacttgttgatagtgatgggtactcacggaatagatgttatcctagggataaattggttagataagtaccaagcagttatcagctgtgataaaaggatggcgaagttggtgtccccattaggagaagaattggtgactaagctagtctcaccggagccaaggaaaggaggttgccaccagatggctattgatagcaaagaggccgatccactcgatgctatctatgttgtgtcagaatttccggatgtgttccctaaagatttaccaggtatgccacgtgagcgtaaagttgagtttgccatagagcttattcccagcaccgcccctatttctaaaacagcctacatggtatctggaccagaattggttgagctcaagaaacaaatagat

SEQ ID NO: 167169 - DNA, 702 bp, Zea Mays
gcaccatgtgccccaaggacttgtacagcttaaggaggacgagttccgagaactgactcaagacggaagatctgtcagcgaatatgtgcacaagttcacagagttagcccgctacgctccagatgatgtcagtaccgagggcaagaagatggcccgtttcctgaagggactcaggccagaactcaagacaattctggctagccaagacttcctcaatttctctcacatttccaacaaggccatgcaagttgaaagggcaaaggaggaagaaaaagggcatctcaaaagaaagttccaggttctctgggcacagcagcaggacaggcaccagaagactcgatcatttggattcccacccaaggggccaaacttcagtagaccagttggacccacctcgtcacggttcagccagcagagtcagagttctttccataccccctcagtggcaagcaaccaacccccggcaaatgcatgttggcactgcggtgatcccagtcacttcaagaacaaatgtccgcagctgaagccaccaggacccgcctactccaactcggtgaatggccccaagaataccttggcatccgcccccaaggcgccctccttcgtcagccagcagaacaagaccccgtaccaaggaagggcacgagtgaatcacgtcgatgcccaggaggctcagcaagctccgggagtagtgctcggtga

SEQ ID NO: 167170 - DNA, 717 bp, Zea Mays
actgcttgaaaaagctggatgtgaacatgctaagactcattctcggctaagcaaaatttcattcgtcgtgatcttgagggtgtgatcaaattgattgagagcgaagttgaagcatttgacgaagttctaactggtaggggagatttttgtgcatgcgtagggtctcggtgggctgtatcactgcttgaaaaagctggatgtgaacatgctaagactgtaatttagccagacttctcagtttcagcgaatgacattaaagagccttcagccgaagctacaacctttggtggaaaattttattctgaagtatggatgaatagaggccgagagatagcaaacgaagctatcaggcaatgtgaagaagagtctcgtcttgccttaaaagaagcatgaaaagctgaagaggctgctgagcgttgaagacgtataggtacgcttgtcatattttagcttcgtatctgacaaaaacttatattttggtgcagctgaactctctcctcctctagagccatacaactctgacaccgatctagccctgaaggttactctcgatgaaatcagaatagcgaatacaacaattgatgaagctgtagaaagacttctaaacgaagctgctgagagagtcctgaaggaggacgattgaacaatgtgtaaaaaaacattcacagaatttgtatgctgcttttatgtaaaaaaacaactgcaaactatgtgatt

SEQ ID NO: 167171 - DNA, 732 bp, Zea Mays
gtccaacaatggcggacgttcgccgtcgaatccggggaggtcgttgcccaccttggccacctcgcatctatacggactccccagaaccctggccgacctgttcatcccatttttggagactcggcctcgccgaatagagcgctgccgcagcctaccgtcggctacgttgtcgttggggtcttagggaagagtattggagcttcgccgcgtcaccaggaagacgtccctggaagtatctggcggaattgatcctcagggcggccccaattcctcgccacacttcaaccccgccgtggacccgcattgctgcgtgggcagagaagtcaccgccccaattcgaggtaaaaccactcctatcgtgttcgcctatgcctcctctacgcgtagggttatttgggaggggtgttggacaccggtggtcctcgctgcggggctcgccggcgcatttccacagggcgcaggggcggcaccgccatcgctcgtgaccagacgaagaagacgagcgtgggccattcagatttaatcctagggccagtcgcggatcatgctacgtgaaaccccacccgttgatttgggatctaagggattcgggccgatcgcgggtactttagatctgagtcgttgatcgtgcagcgagcgaccaatattaagtagcgattcgtttattcagtcaatctaatcggcgccgttcgtttctaatcggacggccgtaatcagccgataccccttcac

SEQ ID NO: 167172 - DNA, 842 bp, Zea Mays
ctgctgctgaagagtgtcctgacggtcctagatagtctgaaacatggagagcatccgttcggaaatctgctgctagatggctgcctgtcgatcatgctctgctgccagatgagcctactgctgcataagtgactgaagaatagtggccagagcagggtcaatagctggtggggcagcaggagcagcgctggaactacccgcctcgtgatcatgtgagcgaggaggcacgggaggcggtggcgggatcccaggccctcatcatcatctgaagaagtgtcagcaacgacaccttaggtatcgaactgtctgaaggtctcatcctctgcctagatatctgacactggatctggcactaggactaggtcctcaggggctggacgataggaaccgaactaaaggcgagaggcctcgagggtgccttggaactgaggaggatcagctgcgcaaagatgtgacagaggtaatgagcatatggtagctgacggcgagcatggagaccatccaatattgtgtcctggatctcacaaattaggaagtcaaccacgtcgaactctaaatgtgagaccaaggcaccaagtagccattgctgaatgtgagtggtggcctctctgtatcccatcctgggtagtagtgtacgtctcatcagctcatattggaacttcgttgcagtagtgaagtcagcaggagatcgtcgcgacccatctgtgaaaggaggtctgaacagggctgcgacgtgagctgtagcgggtgcaactctgccgtgagggcgacgaggaggatccgaagtgccgtagcacagactgtgaagcctagtcgacgactctggaaatccaaaaagctaa

SEQ ID NO: 167173 - DNA, 594 bp, Zea Mays
tcctggcgtgcgcatcgggagcttcaacgacaccaatggggaaaaccaatcagtgctgctctctggtgcggaggtgttggcggtacgacggggtttccccatcggcatcctccatggtgggagtccaccgcggaagggaccctttgagctacatgcttcggtgagctactcatgtttctcctccctatggtttctattttccttctatacgtagccacacagaggttgggtaatcctgggtcgctggtagggatttagcaagtgctccggtgagctctgtctgtgcgctaatggcgcggcggcattgcgtggacgtctgcgcgccaggggaggaagacggctcccggaccgttgatttgaacggaacgactccgattaaattgcgtgtaccggttcgatcagtttgcgtgacgaccatccgatcgagatcggatgatggtcataactctaggattcatgaaaccgtgaccgcccgatcaagatccaatggccctgtgaaaccctagcgctgtgtgtgagcaatttgcaaggaagcccctcggtttagttaaaaccaacccgccatccactcgtactgtgctctgtgtcttagaa

SEQ ID NO: 167174 - DNA, 754 bp, Zea Mays
cacactaccactactgccaaccaaccacacatgttcatggagaatcgtggtgcgcgtggtggtggtagcagaagcggcgctagttaagttaagttggcctttttctttttgcccctttttgttcgtacttaaacatgggagtaatcaaaccctccgttctcttcttcccctgaaacatcaattaaaccaaaccctccgttccgagcttttctgccggtctatttacttgtctgttctctttcggctgtagccatgcattatcgataggcagaagcttattaggtcagatcgccgtaatggtgcccgtggagatattgttgtttacacctgaacaagattaacaatcaccggcttggcttgccgggttcgcaagggtgagtatagcttgctcctgtcgcatcgcatcacccagctcggcaccaacgtggtgcgaaccgtcggtgctcggctcggctgggctgtgtggtccaggcaataagaaaggccccgttcaacaccgtacggaagttcataagatgtcagactcgaaccgcatttgcacggattggactttttttagtggcctccggtcgctgttgcagtgttgcttacctagcttcttgcgttaacttggtagggaaaaaaaaggaaccccatagaaaatattcgtgattgtcaactctagctcacctgtccatgcgatcttgatagaggacgagtacatgttcccaacttataattgacagatatatatgtatatcaggatgcagcttac

SEQ ID NO: 167175 - DNA, 653 bp, Zea Mays
cagacttgttgaccgtaccaagatgatgcactccaaaggtgtttccacgcctatgcttcccaaggaaaaattgtcactccatggtggtacacctctctcacctgatgacgccactcgctatcgcagtgtggtaggttcgcttcagtatctctcgcatacaagacctgatatttcattcccggtgaaccgtgtgtgtcaatttctctcgaacccgacaactgaacactggtcggtggttaaaaggatattgcggtatcttcatgacacgattgatatgggtctatgcttcacaaaatctggtgctccgttactcagtgccttctcggatgcggattgggctggtgatgcagatgatcgacgtagtactagaggctttgctgtcttttttggtggtaatcttatttcgtggagttcacgcaagcagtcaaccgtctctcgctccagtactgaggccgagtataaggccattgcagacgccactgccgaagtcatatggcttcaagttcttctgaaggaactgggcattcatctttcacgtccaccggttctttggtgtgataatattggtgcaacacacttgactgctaatccaatttttcatcgtcgatcgaagcacattgaggtggattatcatttcgttcgtgagagagtca

SEQ ID NO: 167176 - DNA, 450 bp, Zea Mays
cgaagtgccatttgatacccaaaatatgatatgcgagtgaggtaggcctcgtttttggaattcaattgtgtagagcactgcatggaaagggtgttagaattcatgttagattatgtaatacgtggggaataattgtctggttttttatgtacggtcgtatgtgtgttgtgggatgagaacagccatacctgcagtgcacgatccaaaaatagatccatttcttatgtcatgcatcaaatcatttaatttcatatgataaactcgaactataacatcagatctatcgggagggttctgtccattttcaaacatgctttccaaaatttcaggccagtttgcatttcatgtaaaggtgacaaaaaaatcaggtggaccatgaactcgacagatagctatgctgtcatggtaattttggatcatatatcttcttcctcctgtatgtgacgcagg

SEQ ID NO: 167177 - DNA, 1434 bp, Zea Mays
aaagaaaaagggaaaaagaacataactgggccaagaacaccctattcggcccaacaccggattacctccactgcggcccaatttcacccccctgcgcgcgctcactggtcgaccgggccctcgactcagtccctctcacgtacggcgtctagtcactggatggtgggacctacctgtcatctctatctcttcccccttcttcgttgtttctgttcctatccgcgtcaacaactcagactccgcgcggagctcacgcagtcggcgaacggagtccgcgacccgacctccaaccccgccgagatcttcgatgggcgacctataaggtccggccacctccgctcgtccagagacatcatgctgtgccagatatcctaacagacaaagaagttcgtcgtcttctccgcaattccgccctcaaattccactgcgtcgacgacaagcttgccccgtgctccttgtgtagatccccgccaacttcccccatgcacccgttgttgtgccactccctgtccatggggtcgcgacaacctcatcgccgccgccctgtgattcgccgtgaatcgcactgctcgtgtggacagccctgtcggcctcttcattctcggtaagaaatccactacctgcttcgtcctcatccaggaatcgcgtggcacatgcccctttcaaattagaacaccgtagcgccgggcgtggtgctcgccgaagtacagaggtggagccgtcgtcgtcgatacctgcatatccagaccacatagggcaggcatggggccggggtgattcactgtgccctcggaattgcactcgtatgcttctcagatggggagctgggcggcgttccgtgcgtggtgggcggtcaacagaccggttgccggactagcgccgctgggggatggccctgtgccgctgtgtcggtcgcctggggaggaagatgggctccttgtcgttcgatcgtgatcggacggtggtgatcaagctagaacgtactccttcaggcggtgaatcccaaccgttggcgcgtgatcggacgggagatagtgcatcatcggcatggatgattgttaaccgtggatctcggatccagtggtccgtattcaatatcggttcacaagtgaagtaaatctaatccgaacgctcgaattatgatccaacggcctgaattcacagataccccttcgcgggtatgttttataaaagaaaccctgggttttctcggattcaacccgccgtccttaccgggggcgctctgagtcttgagaatacttacccgttggcccctgaacttaccagaaaatgaggcgcggtccacagattaggaaaagcaggaaaaatatttagaaaatagtttttagtacaaacttaattgcagaaacttgtttaaattgtagaaaattcatatgaactccaatttggtccattccagttcctaaattttta

SEQ ID NO: 167178 - DNA, 799 bp, Zea Mays
ttctaatcgcagccgttcctggtggatccgacggcgcatggttatcgccccaactgggcagatgcgcacggcggcgccgcccaccaggccacggcgaagctcaccggagagacccgaaaccggctaacgaatgccctattctccaatccgctcacttctacgcgataagggaatcactgcgaacttgatcgagccatcataccaggaggatttgacgcgcagaacgctggtcgtggggacatggcggagccacggtggagtttagtcgcggcgaggaattccggacgccggtctcaacctccgatcttgattcttcgcacacgcactccacacggagtgccgaacacctacgaccccacaccggcctccaaacgacggtgaaggtagagacacggctccgacagcggacggaccacacgtattggttttctcggtcacgggggatgacggctgggttcgtgcggttttaggatctagggttctcgggcgagcacgtatttaacgtcccgaaccgacggaatcggagtcgaccagcagctccagaagaaggggaaggagaccgcccgccatgcgcgggatctagttgacgaagaagctgatgacgcttgccgttgcgctcggtttgttacggacgcgagcagggtgacaggtgggcctcggctccagtgatacgaacgcgcggtcaaaggaggtatccgcgcccgggtgaggatgactgacgagcgggccccaaatgagcagaggacgagcttgcagtgtgtgttgacgtgagactgacgtgtcgggcccacaggtcagt

SEQ ID NO: 167179 - DNA, 501 bp, Zea Mays
cctgaatcctcacccgtcccagcaacacttcccaacacactatgctatgcatcagcccattaattcaaaatccagagcccaggaaagctttttggtcccacctagaaggccggaaaggaacgatcaatcctatgagccatatagggcaaatgcaatgcaccgcatatctcaaacccatggggggaaagacaacatactaatatccagccaaccccacttatgtttaaccagagagccggtggtctcgcgtcggctgccattgacatagtgagagaggaaatagctggggcgttccgagataagcttggagtaagcatggttcctgaggggcaatcatatcgaaaaccttatgacagccgatttgatcaccacccatacccacagggaaccaggataaccgaattcgcaaaattttcgggtgaccaaggaaaaaacacgcgcgaacacataggccagtttttagcacaattaggagaattggccgacacagaagcatttcgc

SEQ ID NO: 167180 - DNA, 467 bp, Zea Mays
cgccgtccgggttcgtgggcggtagggaacagataacgccggagttagatggcgcatacgtggcaccctaccccgagtccagccggagacctcaccggcggccaccgagtcaatcgttttccgccgcggtgtcctctgcaccgtggttctacctcactgtacttctcctctacgtggtatacatgcgctagcaaggttatccacggccgctgatcacttgtcggtctgccgtggctttaaatagcggcatgaaccacagtgaggcactcaccgcctcaaccgcaagcttgagaagaacccaaaattcgcactgccttctccacctcctcccaaattgatggtgcacggtgaaactacagtctcttacggccgtatagccccaatcccatcccccaatttcacccagagtcgacgcgacgtcattttccccttttctctgtcaccggtgagcacaagactccgcgctc

SEQ ID NO: 167181 - DNA, 658 bp, Zea Mays
tggcggttgggccttagagtgcgaccctctgccgaagaagttagtgcgttggttgcttcgcttgaagaaattcctgatgatgaactgcaggttcattttgaggtgcctttggatcccagtgatgcagagataagggccatgcttgatatgttagccgaagattcttctgatgccgctcctgctgggacatcagtggtggcgcctctcctggaagctggtaaaaccttggatattcagaggcctgtcagtgttcgcccgaagcgcccttgccgagtcaatcaacttgattctcctgctgatgagcagaaaaagaaaagagacgtcttcggcgagtatctagcttggatcgggatgctggtccttcggttcctgctattgaggaagtgcctgtgactgagtttaccaacgctgaccccaatgtgtgtgatccatccatcgctgatcccaatgggtgtgctccatctgtcgctgatccccatgggtgtgctgtctgtgttgctgatggaaacgaggaggaggaagaagatgagatccctctgactcggaagaacaatcggcgatacgtagccagtggggaaagtagtggatctcctgctctgtctgccctcattggtctacaagaattgtctctggcgaactttgatcagactcttaagga

SEQ ID NO: 167182 - DNA, 675 bp, Zea Mays
actgttgagcatgaaatgattcttcaaattttgacccacaaaggctttggtcctaaatggattaactgggttcggagcatccttctttctggcacttcttcggtgttgctcaatggcgtccctcgtaaatccttccattgcaagcgaggtgttaggcaaggagaccctcttttgccactgttgttcgtcttggcggctgaccttctttagagcattattaataaggccaagcttttgaatcttttgaagcttcctttacctaatattgctgaccaggatttcccgattattcggtatgcagatgatactctcttgattctggaggcttgcccaaagcaacttttcttccttaaggcaattctcaactcatttgaaaactctactggcctgaaggtaaactataacaaatccaatatgtatccaataaatgtgccttcagagaagatggagatcctctctcgaactctcaactgctagattggagaaatgccattcacctatcttggattgcctctgggccttgcgaaacctagaaagcaacactttctgcctcttatccaaaggattgaaaagagattgtcctgctcttcaaattttttatcccaagttgggcgcttggtgttggtaaattcagtcttttcagctctgccaaccttctttatgtgtacgctcaag

SEQ ID NO: 167183 - DNA, 414 bp, Zea Mays
ttttttaccctaaaaatcattttctcataattattttacttaattcgagtactgtggactggggacactatttcagaagagttcagggtttaatttgtaaataacaggactgtcttgcgatactttctatatggctctggacggcgggttgaattctatattctctaagggctctttacaaaatatgccacgcgaaggggtatcagcccaagagcaccgttgaatgcgagatcaatggcgtagattagaatcgaatcgctaggtgatattagccatcggatctctgatcaatggctatgcttttaagttaatgtgatctgccctagatcactggatccaaatctaacggtctgatttcaatacaggtgaaggggtacacggttctaatcttgaccgctaaaaacagaatcaacg

SEQ ID NO: 167184 - DNA, 644 bp, Zea Mays
tagatctggaccacaccgaaccggtatgcagcgcgatccgtccactccgcgatcaacggcgcggatttaattctctccgatctcactggtgccgcccgatcacgatctaacggcacccaaccaatgtggcgaaagggtacaccaagttctaatcctggccgttcgtcatccgatcaacgatagtcaacaaccgtggccgaagcgctacgctcgacttaatctccatcgcccattcccgatctaacggtgtatgagcgccaccaccctcccccaagctaacgcagcggcgccgccctagagctatggcggaagctcgccgacgtgcccacgattctcctcccaagcgttgcgaacactgaaatcgattgatactacatgactaggaggacgaggcgagtcgattggatgggtttcttaccaaggatgcgcagtacaggggtgtggccacggcgatgggcggaagtacgacgatggcggaatcacggtgaggaattgccttcaattcaccgctgcccgcgcccgcttattgaccggacaatctccccccgatggcgcacaccaccacggcctggtttcggtcaccagacgatgccgcagccgagatcccgaccacggcggcaatggcgcagccgcttctctctctc

SEQ ID NO: 167185 - DNA, 655 bp, Zea Mays
ggaataactttgttataggtgtttgggtttggtaccacatggaattgggagaaaatggagctccaaagtgctctatcagccgctctgaatgagctctcccatggtacagtgctgaaccagattagactgccagcgtggagttctcaccgccgatgactccctccgccgcgattcgtgtcaccggcgtcgggattcgtgcctggtggatggatagcgtcgtgggtaaaagatcttcgccgccggtgagctggacgccactccggctagccgcaatccctctccccttgctcaccgcccttgaataaaggttctcaccgccgtcaaaccttcgccgttgtccgccgcgtgtctcagactgtctaccgcatcacgtgactcacccttgctctccgtcgatcaccggaatagccgccatgacgattgacacgagttcacttgcaccagtaacctttccctctctggccgccaccgcgccatcttcaattcaagcgccaccgcccctgggatctataaattgagcccgcagcgagctttgcaacatcatcacccacccagccaccacgtctcgctaagcaatcatttgcctgagctcgtgaattttgaattcgccccaaatcagttctccgccacccgaaaaccaacctcatcgcggcca

SEQ ID NO: 167186 - DNA, 663 bp, Zea Mays
ctgagccagcaccttaattctttgcttgtaaactatgaacctcttttgttgcccatggtatacttgagttctgtttgcctgaagtgaatgttattagctgcttgtctactgtgatatttggagagtttgcagatcggaacgggttgctctggtccaaatcatgacactgactgtgttgtggtgatagagataataatcacttttttggatgagatatcactattacctatctttattctttgcacgaaaagtatgaccttttctgttgttcatgtcttatttgagttttgtttagctcagttttgcttttttattaaattttggtgacaataatctccaaaattatgctgctggttacttgtctgttgtgatttttggcgagttctaaagttcgatagatatttgtgcactgcttcatcagtcttttgcattctcagatgtaatcatagctgttctggatgatgatgtcagagcggccacggatccttttcttgcatcgaattgtcatacatgaacttggattctttgtggccatcatattgtcgtatacatgaacctgggttcttttgtggccacctggctgctctttctatccaggccatgttccaattataatacatgaattgcatatatcattgaccagaaactatgtttggaaccctg

SEQ ID NO: 167187 - DNA, 276 bp, Zea Mays
gcaagatcagcatacctccatataggcctagacccgaacctctattttctcttgcaagatttgacggtgatgcaacctcaaagagattcatcagaagcataaggcaatacaattgcttatttgctttcacatcaatgggtgcacaaatagataattcagtcaatgatggtcgtggtccaccactatttaaaatatgtggacaagtgcatcatcggattggatctctattacctccagatggatcatcaccaaagttcattcagttgtacatttacg

SEQ ID NO: 167188 - DNA, 359 bp, Zea Mays
tgaattgatctgttataagcaaactcaatatgtggcaaacattcctcccacaacctcaaattatccttcaaaacagcacgcaacatggtagataaagtgagattaacaacctctatttccccgtcagtttggggatgtcaagtagtagaaaacaacaactttgttcccaatttaaaccacaaggttctccaaaaatggcttaaaaacttagcatccctatcagaaacaatagtatttgacacaccatgcaaacgcacaatctcagtgaagaacaaatcaacaacatgtgaagcattatcagttttgcgacaggtataaaatgtgccatctttgaaaaacgatcgacaacgacaaaaact

SEQ ID NO: 167189 - DNA, 452 bp, Zea Mays
cgagtatcagttccagtctacactgaaaattttaccactgaccacgtacgatatggtggtcgacatggattggttggagttgcatagtcctatgtctgttcactggttggataagtggcttactattccctaccgagggtccatcatcaagctcttgggacttcaagcaagttcatcacagtgtgctgtcatggagctttgccacattgccactctgccagacaaagacaatcagctcgttcaagatttacctgaagcgttgcaacaccttattgctcgtttctcccatgtgtttgctctgccgcaaggacttccacccgcaagagactgtgatcaccacattcctcttttgccaggcgtcagagctgtacaaatccgaccataccgatacgccccagccctcaaaactgaaataggaaaacaggtagctgagatgctccaatctggtatta

SEQ ID NO: 167190 - DNA, 754 bp, Zea Mays
aaggcacacatgagtatgtctacagcatgctgttgggtttagattcttgatcagttcaaacatgggggatcctgtgtttattcttgtttttttatatcagttcaaacagagagccacgaacatgtttaaatgccttcatttgacagatgaaccaatattctaatattggttgctgaacatgggggacatgatttaggctggtggcgccttgtcatgccctgatgtttgttgtattgcccatgagtcacacacaaatcatcctttcttattaccctttggaggtttcagctcagtgattttaggtcagcaaagcgactgtcagcctcaagtcccacccaaccgtgcaagtgacagatgagaatgtcttgcactacatccatgtagtgttcattatctgttgtaacatatataaaagcttttagctgaacctaaaataggataaaaacaaattattgcttaactgcacatgtagtgttcatgctgccttcccctatgcaccaatgcttttatcgatttgattcataaacgtcttttatgtgtcgacaaacaaatggttgctcctaaatgctgcacttatattgtctttgatactaaatgtggtactaccatgagctaatttcgcctgtactcacagaaaaaaaagctttatctccttgtgcttgtgtgtttcctctgcttcgcaaccacttaaattagctgtttgtttatgtcagttcaagggaatcaacattgggttctaggtttataccagcgc

SEQ ID NO: 167191 - DNA, 784 bp, Zea Mays
caacgatcgagccttcgattatgcagccgttacatgcaactgtagggatttaattgatgagtagcttgcagaatttggtcgctcggctggttggactatgggtccagttgtctgtagggacttcgcctttgataggcatacttttagtcctgcatttgttgtggatcttggtgaccgttctcgggacacctttattgtggagatagaaaaagaggcggaagagcttgtcggtccggtgactgaactagaggtagagaagggtgtatagctgctcagtggccatgtgcgcctgaaatgtgtattcagccagatggggcttgtttttgaagagcacaaagcacactagaagagggggaggagaacgttgactaggggctccactcaatcgcaaacatcgatagagacttcctccgccttcttaggggaatttgatgtgggggccactgaagcttttgtcactgagctagcggagatgtgtgggccaaccgtctcgacgcacgatgcggaggctaaatccgcgatggacttcgtcgagcgggtcaccgggggtaagttggggagagatttgattcccatgcatgttggttcggggagtgcaaaacagtgggttgtgagagagatgactgcggtgtgtggctgcaaggatgttgtactagcttgtgcggcgagggagtttcttatattccggtatttgcataacatctcggatataattgctgcaacaatggacccaaaggggaagctgcctgctacgatttacagagcgttcaatatggcaggccag

SEQ ID NO: 167192 - DNA, 711 bp, Zea Mays
gagcgcggcagcgccatgttccgcggtggcgccatataccccggcgagcaatcgacagcgcaccagtgcccgaaacaccgaatagatttgtgctacctacagcgggtgctaagacgaatcaatggggaaacgtattaccgacggtgacagcacaacgatggcacatgtagagggggcatggcggcgggttctagcttccccgtcacagcacagcggcgaactctctgtgcggccggctcatatggacaaaacgatggataggcttcaaattttatagcccccaggctaaaagatctcaactgaaaacggttacacccggcggtgcgatcctaggtggattttgtgtgaatttgttgcgaggtgctcgcggttagttacgaagaagacagtgctgacatcccgggcccacgacacagcgaggcagctgaagatgtgggcccacatggcggcgagtgtccgtggcgcggcgtgagtgtgaggccggtgcaggacccacatgctagggagccacccatggctggtgtgcgtgtggtggggggccgttcaggtgaaggtgtgggtaaatgggtcaaggaagattcaccccacgcgcaaggagaaccttttttgtttttttattttctattcccaaatcaattcaaattcaaatgcagttttaaatttcaaattcatttagaatgcatagttcaaaaactccggcatgaatataat

SEQ ID NO: 167193 - DNA, 451 bp, Zea Mays
cttggtgaggacgcggtcggcaccaacgatgacaaagacatcggcgacgacactacttttgaggtactaccttccgtcgatgatctcgccactgagatagaagagttgaacgctgctttggctagtcaggataagttgcttaggcaggctgctcatgagaggagagagtttagatccaagtacgagagcatgcttagggaacttgaggctgctagagcttcagttgaggtgtccgacaagactgaatgtgatgagtgcgttctacacatgtcgaacatcaccactttgcagaccaagtgctccaccttgctagatgagcgcgacgagttgagatctagttttatcctgttgggtgcgtgtactgtttgtcctggcttgcagtctgagctagcagagagagatgctaggatagctttgcttgagaaggctagcttagtgagcgcccctgcac

SEQ ID NO: 167194 - DNA, 985 bp, Zea Mays
gtttcctaaggttctagattcatttccacactaaattcattttctagagttttattaagtaaatataaattccctgggtcgtggattatatttcgtaaaatatcagggtcgagtttataagattttggactaagttgcgatgatctttcctcttacgtggatggcggattgatttacaggttcccgatgggctctttagtgaaaatgccaccacgaacggggtatcggttgatctaagctatctgatctataatcaatggtccagaatagatcctaacccccgggaaccgttaccaaatcttgcccatccactacacgatcaacgacctggatttaacttatccacgatcggatgatgaggtatgggagcataggagcagttagattgcaaacgtgcggtccagattaggatcccatccgaaacggtacgcagcacgcaatctcggccgcccaatctagatcaacggccacggacacaacttcaatcctcccgatagccagggatggtggagcagaggtccatgacggcgctctcgtcggtgtgacgcgattgggcgacccggagcccgattgaaggcgcaactaaatgctcaatgacctagagtatgcaatgaaccgaatgaattgggttttaccctaaacagcgacgactgagatgccgcccacggcgatctgtggcccactggggaggagggagatcttgagcaatcccggcgactccgagcgcacactgaccacggtgaagcttcgaacaccttccacgccacactgcgaagctcctagtaccgcactcgagattggagctccgatgcggacccgatttccccacggcggcccatgctcaccgacctgatggtaaactcgacgacgatttggttcggggggtaggcaggtctagttgaggggatagggacgtcgtaggggcctggctttatggctgaggcatggaggtcggttggggcagctggtgcgacagggggaagat

SEQ ID NO: 167195 - DNA, 393 bp, Zea Mays
attatagtgctatttatagccacggcgacccggctagcgattttcggccacggataacttcgctagcgcatgcttaccacgtagggaagagacacgtgagggagatcgaggcaagggtgacaccgcaaaagttaactgagtcacgatggccgctggtgactaacttcggccacgctcgactgggttcgcgggattgcgccacgttcgaagttatccatccccagatcgattctcattactagatcacgcgagcccatccgattcaacagtggccctgatcttattgcgttcatcagatatttgtcacgattcgatcttcagcgttcttctgaaccgaccaccttctaccctctttatctctggatttttgttaagaacagagcaacttccctt

SEQ ID NO: 167196 - DNA, 296 bp, Zea Mays
caagagaagggcccggacttccgcagcagcttgaagaagggcagcgctctctcagccagcctcgaaatgaagcggctaagggcggctaatgatcccgtaagcttctggacgtccttgactcgggtcgagggcctcattgcctcgatcgctctgatcttctccgggttcgcttcaatgccccggtatgaaaccaggaattctagcaacttcccagtggaaatgccaaaaacgcatttgtccgggttcagctttgtgcgggttgcccgcagcttgtcgaagaccaggcttaagtcctc

SEQ ID NO: 167197 - DNA, 860 bp, Zea Mays
gccattccggtctcgaggcccaagcatgacaacctttcatcggaggcccaagcccaacacaactagcttcagttcggtacacttggtagctcgacagcccgggaacaattagcaacaacgacatacacgtagaagtggtagttgagtttaataagtgcaaaaacaacccagccccagtagtgtgtagctggcggcaagtctcccgagcagtgcaatggattttttattgcctctcacttacaagtacagtggtcgcgctcgcccacaacgtgtcacctcacagcaaaacgcgtacgacatgtcccagccagcctacaggctctcgagttttgcgctgtttggctctcacaacgaacttcctccgccagcaaaccatgacctccacgccagtcgccagtcttcacgccatctgcaacctccatgccatgtcagtcgccgcgtcccactcgcccactccacaacagactcccgcccgcttctccacccgcaagaaggagggcacccgcctagataaggttgcaccggcttctcctgtagctgccactaccgaatggcgattggttccaataattggtgggagctttcctcactaacctaaccggccaacaactcacggtcgagtattcgagtgtcatcccaccacacgctcttccacaagctcgatgacgcctagatgaagatgacgctgaggttccgcttcgccgccaccccgcaacgccggcatcggcctcaggtccagatttggactcgcaacagtagcagcagccaccgtcgttcccgaccatgaggcaccatcactggcgatggcgtcgccgaccagcggcgagtctccccgtgacgtccaaatgagggtgacgccg

SEQ ID NO: 167198 - DNA, 721 bp, Zea Mays
gggagagcctggagcaggcgagcggtcagactcgaaggaggcctcctccaagtactccgagtccccgaagtcctctgaggggggactcaaagtgcgcttgtgcttgccatcagcgcgatgaggccaaccatgacccctcctgcctctacccatggttggttggaggagagagtgaagaagaagaaaacaacagatgatcgaaggatgagtgaagagaacaacggggcaacaggctatttatagatgccgggggtgaccgtccactgcctaccatgctcgccgaatagtcacaagtattcattaagcaattcaagccgcctgaaaatgagtcaagcaacaggcgccgcttcgcgtaacacgacaccgtttggaccaaggtcaactgctcaggcaatatgattacaccccatggtcgcatcaagttactactccaggacggtgtggtaaacactatgtgtaccaagacaccccttgggcacacccattgggtgtgttgccaagaattttcaaaagattttctgaagaagtcgtatccacacaatatacgcaatgaatgtactacgacaaaaggaagagatcggctgagatgggaggaagtccaaatatagctactggactgcaagtccaatcagccgaggcattgaagcaaagagcagggtgatgtccacctgagagctatttgcctcaaccagccagacgtccaatctgtcaccgatcaaat

SEQ ID NO: 167199 - DNA, 860 bp, Zea Mays
gtataattcatgtagacttttgttcgatatttgaaatctggagtgcaaaacaaaattttgaattgagttgaataattggaatggaaaaataggaaagaaaaggctggaaaagaaaaaaaatgaattatctcttttgggccaatatgccagaatttggcccatcccgctacactaacgcagcccaattgagcctcggcgccgacatgtggacccaagtcgtcatccctccctcgcgtcttagtcgctcactgacatcatggggtcaccttgtcaaccactctggactcgtgccgctacaatctcctcacactggtccgtggacccgctctggcggggacaaacccccaacaccggtgcgctcgcgcgttcaactgaaccgttggcccacgctcaagaacacaaactactctaagctatctctgtcgtgtggaccccgttgtcagaaccatccccttcgtcgtcgcgccttccgcctgggttgttcaatgccgcggaaatcacaccggctcgcacccgcgaatctcgccagctgttggcatctaccacctagaccactacacctgtgtcacctacgtgtagggcctctctgtcaggcgggctcgcatgcggatcgaactggtcggcgcccgggggccaacaaccctgaccgatttttgtgctgccttggctctggtccttcccccataaatagtccgctcgagcgttctggacgatcatctaaccaagagagaaagagagaaaggggggcagcaaatctgggcgagagccgccatcacctcatgttcggaccgccgccgtggatacccattgtcggtatggttcgggctccggtgtggtcaccagtggggcggacagaccgc

SEQ ID NO: 167200 - DNA, 590 bp, Zea Mays
tggccgttggatctcaaccccacggctaggattagatcggctaaaggctgaaccggtacacaataactgcccttggatgcgagatccacggcgcatatttaaaatagccaaatcgttttctatgcgcccgatctagatcgaacgacacagatgaatcctacgaatcggtatgcaacagtctgatctcagccacacagttgaaatcaacgtcaatcgggtcctctcccacctccagcgcgcaggccagcggcgcggcattcccacgtggcggcgcgacccgccgcagttggccgatctgcacgcactgatgtcccaatcccacaccaaccagctacatgatcaaggtatgaaggtaaactgcttgagggaccccttaccgtgaaccttgcagcacgtttgccagaccacagtgagggcgattccatgacgatgttggtgccacggcgagaaatcaccagagcctcaatcatccgtttcccgaattggtggaagggatagcctccttgtatccccgtgatccttggaaacatctgccgaggccccatcgatgctctcatatcacgaatgacggcggtggcgcaatttttgtc

SEQ ID NO: 167201 - DNA, 517 bp, Zea Mays
tgacgacacacaatcatatttgatgcttactagcagcgatgggaaagagcctaattaactagtgtagtggacctctaaaaaaacctaaaaaaataaatttaaagccaaagtgaacatatataccagataataaacaaataagaacaagcattacactttatcttagccaaaaggccgagaaagaaataagttgaaaaggagaccgacccttttttttatagctcgttcgatcgtttgttctctatcaactagcggggtggtattgtatagaagcgctatattgtgtgcggcttcctgtcgtgttaggcttggatggtttctcacggcccatctgtaagataacaaaccactagtagacgagaagcaggggagaggaacaaccatacgccctgttgtgttgggcttgagttaatgacccactagtaggcaagaagcgggagagaggagaacagatgtgcgcttagcgtgtgacgcaagatgaccatcaaaactactgctttaaaaagtattaaaaagt

SEQ ID NO: 167202 - DNA, 901 bp, Zea Mays
gcacgtattagtcacatagtcataagtatatgaaatgtgaataaatacatacacagagaaatatgacacagaaaacaagagatgagacgatcgagaggtcaaacgacgtgaaaacggcgtttgaacgataaaaagtgccataggaggtttggaattcgaattgaggcacgaaatgacatggaattgagccgatacttcacgaataggtttatataggtgagtatgagtgaagtgtgtgcttggtttgattttaggcgaagaaaaagagatttgggcactcggctcggaaacgatcgctcaaaacggggaattgagtgaaagtgaagcctggaatatcagattggcgtgaaatttggcaaatatgttaatggaggtgttgtgaaggtgcctgaaaaatttgggttcaatcggggcatttttggctggtttgggcatttaaccgaacacgtgtcgtgcggtgaattaggttttcggggaaatagccatttgaggtgtgaaaaccctcccgaaggagctaagaacctgcaggaatgttcaagggccacaaaggaacacattgtacaacatggattcactgggattcacaagatttggaattgggcacaaagtgtggaaatgggtgcttcactggtggcatgaacagagagtaaaggaggaaagagagagaggtggattctcaccagagagagatgatgcacttggacgaggtcgccggagagcagatcaccggagaggagaggtggtcgccggcgaggggtggagatcgccagagaccgagagagaggggcagagaacagagaagtggagagcgcaggcctcgggcgcgagaggggaaaggtttttttaaaaaccggatatgggcgcaccggacagtctaaagtgcctgtccggtgcacaccgg

SEQ ID NO: 167203 - DNA, 651 bp, Zea Mays
ctggggtctcgtattatcgcgctctggccatgcttttgttgcgctggctctgagagagaagagcaaggtaggtgagaaagagagagaattgggggaatctggtcgctgttctttttggtcgggggcaagaagaagcctggtggaccgttgagagtgagatgggtgatccagattcggttaggcatgagagatgaggggagttgagcagccgccgttggatcttatgctagtgcgccagattagaaactgaggatacctcttcgtgcggattgatctggaccgttgatcgcggagcgtgcggccacggatgcgtaccggttcgtttatggggggggattgaatccggaccactggattgtaatcggatggctcagggcctttgttaccccttcgacagtcctaatttataaaagagaccttgtgttttggtttaatcaaccctccgtccagtgcgtgtgtagcctgagtcttgggaaattttgcgagttaaaccctgaccttctctgtattagcgcgcctagtccaggaattgaagaaaataggaaatagagatttagaaattgattttgagtatagaaatacttgtaaaacttgtataatccatagaaaattcatgtgaagtccaaattaatctattccaatttctataat

SEQ ID NO: 167204 - DNA, 540 bp, Zea Mays
ttatcatcggaaacgggatcgggtctgaaatagtcgggaacggaaacgggagcgggataaacggaattgcgaaaacgaatgaaaacggaaatactaacggaaactcataatttaatacaaatagaaatgttattgatgtttgactagtgattgattggcagaacaataacataaaacgaatagatatagagagacaacattctattgttgtttggttgctaaatgtgtacatttagctacatccgatgttgtttaagactttagatcacttgtcatttgaaaagagccggtggttacaatggtcaattgtgctataatttgtcacctaaatacacgaggatttagtttatatactaatgcatattaggctcgtcccatatttgtcaaatacggaataaatacgggttcaatccggaaaaaaacgggatctcgtaaaaacggacggaataagtcatctctcatttccgtcccgttttcatatttttccataaatacggaaacggtcgagtcaaatgtagaaaacggtacgggtcgggacgg

SEQ ID NO: 167205 - DNA, 532 bp, Zea Mays
tgctttgtctactgttgcaggatggtgatgtccacgggccgtggcgaaggcaagttttgcgggtgaagcgtatacaattaggcgcacgaacctggttgcccccacttcaaattggcgtacgatgagtcgatgacagtggcatgagggatcacactggcagcgacaagggctgccgccacctgcggtagtttcaccacctgcattagtttatctaattgaccaaaagtaccgacagcactctcagtccgctaaaagcaaaagggttaaaaacaaacatcacagtcgcaagctttctggacaaatggggagcacgcttaaacaacggccgcgcgcaacttggcagctctcaaggccggcagatattccaaccagcaaccaaccggtcaggtccgggtccaggattagcgagcgattaagaaactgcagaaaaagggggggcttggtagtacaatactgctcaaagaagattcatacatagtgcagccctgctcagctgcagtatgaagaacatcatggcagtagcaggcaagac

SEQ ID NO: 167206 - DNA, 736 bp, Zea Mays
gcaaccttcgggggtcggggcaagaaaagattgaacatgatatttgatgcgattggctttgtataccctgattatcactacccgctacgagggcaaggaaaaagagaaagactgccgcttcggcaaccacagctgtgccaaaagggcaaaaaagtgaaggttctgacccaccggccgtgatatattgaaccggccatagtgcctgaatttggcgaagggacctcttcaactgccaaagcaaaacaagctgctccgattgtgtagagcgttgaagagccgattgtagtgccgaaggtgcctatagtcgggccagccgaagctaaggatgataaggccgaagagccacaggtggaaaaaacagtgaaaatgccagaaattctgatcccaccagtagaggcaaaattgccgaaggtgcaaagggctcctaccacaactcccaagaggaggaggatggccagcatgctggacgctgttttggagaccacaaaggccttgagccctgctcctactaagaaaattgctgaagttgccaaagtccaagccgaagccgaagctgggccttcagcgcccattgagacgaaggctgtcgcgcctgaagataaagctgatcaacaaacttcagataccggcatggaagcagggcaagacatggcagaaaaagcaaaatctcctgtccccaaagccctagttgaagatattgattacattgttcgacatgcttcggggaaaaattatc

SEQ ID NO: 167207 - DNA, 781 bp, Zea Mays
gtggggctccatagaatccgaagcggtacgggggctcgagccccgcccaccccaccgctagatccgtccctgacgagaagatgtggaatccacgtatattctttgacaaggcggagtcatggacgaagcttgtggcgacgctgggtggggccagggtcaaggtcactagcgtgatacctcgacgtcatggcttataattgcagaatcgtgtgacctcagtgttaagagagatgacgcaaaacctatagggtatgaagatagaataactttctgccatatctaaacgcggtatctgtaagggaaaaaagagtcaaaataaaaaaataaagatttgggcgctcagccgcctacgtgcacgggctttggtactatatgtactggtatgcaccaactttaattcgtgcatgcatgcgtgacacatgatgaagaggtcggacggacggacgagctagggatgggagggatcggagggacctcgatcggtcactcacacctctactactcctatagctatatcaatagcacgcgtgactctcaccctgacaccctggccaattgacctgaccaactggcatgcacgtcgtcttttgttttgtcagcaggtggtgatgtgtgtaagagtaccggccggtgccaatttgattgatcattcgacgacaaaggcaggtctctctctagctagggctacctggaacggatgggatcacaggtgctgtagctagccgcgactcgcgagcaataccccgttcccgtaatgataagcttgtagctctagctaggc

SEQ ID NO: 167208 - DNA, 284 bp, Zea Mays
ctgtcagcacagccctatctgttgaagcaaaatatgcaggatccagaaagaacaagggatttggtggtgagaagactaatcagggccaggcaaaaaggcaacgatttattctccggccttctaatcagactcctccacgtgcaccaaccttccctttcaagcagccgataattattcgtcccaacaaagcccccactgccccaagtcagccgggtgccccaggcactcgattccctgccttgcctagctcttcaaccggatgttttaattgtggcaagtctgga

SEQ ID NO: 167209 - DNA, 654 bp, Zea Mays
ccactctccccgtctgtcctccaggtgggcccaactcgtcaggagcatcttcaagtttgagcctctgctctgtgtgcgctggccgttcctgcgtgcgccgccaacccagctcccacgccgtcgtccacatcctgctcctgcagtcgtctgcttcttggccccacgccgccagccgaagcgccgcgtcctctcctgtccccttctttactgttcgaatcactaccccattagagccgaccgttttctccattagtgacatttaaatcctccgtttctcatcttcaatcggcatcagttcaaccggcgacctcccggctccctcctccacctataaatggaaccgctcctagagccctttctctccttttctgctccagttcgttggccatatcccgcagccaagcccctgtacagcgccgagaaccccgcgctaccctcggttctcactgctgcgcaccacgccaagctagcaccttctgcgcagccgctcgccatcgtgttgcggcgtcacgccgcatcattgccatcgctcaccagacttcacctgcttcgtcgacacgcggcctgctcatcatttcaacgctaacttctgtaccgcgacgccgcgaagttcgccctgctgctgtgcctcgccggtgccgaagtcgttcttcc

SEQ ID NO: 167210 - DNA, 785 bp, Zea Mays
tgatgtcttcacggtttccataatagcgtctagcacgctggccattcttcttttccttgaagttgttgcaaggatccttgatggcttcggcagttctattgtgcatggtggactcagtgctttcaactgccctgccgccttctccagtttcggctcttcagccagttccatcctagcttcgactgacacaaagcgacttggctctgcaataggagcgaccctctcaattagcttcagcacgtcggccgtttcaatgcgcctgggccgacgtgtcaaaactttaaccttttttgtcttcgacgtgctagaagtcaccgaggtagcagctttcctcttcttacttgcttccacaaaggataacaatagtctagatacacaaagtcgatgacatcaaataccctgttcagcctctttttgccacgagccccgaaggtagttgtcatggcgtcatcttcggcctttgaatatgctccaagcagttcatcactagtcgcttcaatgccatctagccagtcatcattcagctcatcaaattggctcctgcacttgaaggtatacttcagttagactaaaccaccttggctagagccagcagcagcctccttcggcatttcccacccatttgcaagtggccacactctgtaagcaatgtgctcttggactaagtctcttgtgcctatgtaagtacacaccatattgaaaaccgcttgacatgtttgtatatcattcccaagggcagtggctggcctcctaatgccaaagcaagaccatatagggccttcaac

SEQ ID NO: 167211 - DNA, 816 bp, Zea Mays
gcgaacatctagatattatcatcatcattatccaacaaaccatggcaatagatctgagaaagtcatggaagtgtaaacatgaagggaaccaccatgtctaactgtcatatgactgtaccgctaattttcgcatgcgtaaacagtaacagcgaaaaggcatacacatgtatgcagctctttacatgtgcttttatgtaatgtgagagtcgtgttctgaatagactgttgtaatgttctttggcaataaaggcatggtatttttgtcgaactattctccttaatacagaccaaacatttttttggaacaactactgtccttaatccaaacatcagcaagactacaccacagaaaacctcttgtgaacaatagcagaaccgatatgtgtcattcgattgaccaggaaaaaaacaatagcaaactacagaagctatctatgcgcacacggcacccaagcctggaaccaaaatgcaccaaccaaatatccaacatgcatagataacacgtccctaacaaatgcacagatctgtaagttaaccaaggccaagcacacatagacaacatgccctcatgaatgcacggatctggaaccgattccaacagcgacacatggacatgaaccaaaaagatatagcagagcaaacctaggcctacggaggcggcgacaatggctagggcacgacaggcagcaggaacacaccaaacgctcccatgaggacggcggtttgcaaaacaaaagagcgaaacaatgaggacgacggattcgagaatcaatagatataaggactaaataatgcgagcgggctccaaggagaggg

SEQ ID NO: 167212 - DNA, 472 bp, Zea Mays
ctttcggccttcgctctgccccaacaccaaccatcgcttcggccacccgacactttagcctctagaagaccctaacgaccgcccaccacctcaagcctctgctcttccatgacctccggccacctatgcctctgcttgacccataaagctcgccacgtctaaccatatctcccaccaccagtagcattcgaacctatgtctactagtacaccccaacccaccacaacaccactcttgccactagtagccaccatctagccctctcctccgttcactagtgactcagtgagacatcagataaaccactaaatatgagcgatattatattgaagaagagctactgcaatagagatggtcaaacacatatgtatgtatcgcatgttacaccagacagggcattggatatagcacttggagaaaaatacaacatttttggggagatcgacaaggcaccggtcgcatccaatatagc

SEQ ID NO: 167213 - DNA, 564 bp, Zea Mays
atcgagcgcgttgcttctgtacgggccgcgcgcagccttcttgtgaactgggctctcgctcgcgcttgcacggccagccttccggtcccagaacgatcatgacgaccgaactggcttggagaaacggagccgactgcagttcaaatccctcggtactgtctgtacgccttctgaagttctgatcgacattggatttataccgacaaccatcgtcgtcttttagccggtggaaattgggaggaaggaatgttcgagtgcggctgctgaaccaaccagacggttcctagtacaacgcatgctccgtcttttgacgcatggagaagagatgtgggtagtagtcacgtagtacgatcgcgagccgttctgtctgttgccggccccaaaggcctcctcctactcggctgagatgagctgagctgagcgagcacaggtcagaatcagatgactgggatcctaattccgaagggcgttggatactgtgccaggatgccactagcactactaccagcagtagagtagtagcagctgctttcgttgcccatctcgccatgcacggaaacggcc

SEQ ID NO: 167214 - DNA, 620 bp, Zea Mays
gaacaatgtgaaggactgttctttgatgaggaattgcttttctgactctttaattggttatagtacactatctttccacctccgaactgagtcatgtttgtatatttgtgtctgtgattactggtctttctaattcagtacctctttgcttatatgcaggctagatataggattatagagaggcacacatgcatagatgctttttttctgttatcagtggtcttagatgtatcttcagatcattcatgtggcaggtaatatgaaacttttttctgttatcagtggtcttagatgtatcttcagatcatccctgtgtcaggtaatatgattttttttgtctgttatcagtggtcttagatgtatattcagatcattcatgtggcaggcaatatgaaacatgcattaaatcttcgaatattgttaacattttcctaagcattcctaatccaccaatgccaattacaagcgcaggtcataatacttccctacctatctaatatatactgctacgtgcagcctaaagtactgctgcttattttggatgtttgctgcaaagcatattgcctgcactctacctccgttggtttacatagcgatcaagtagtaatgaactgtatctg

SEQ ID NO: 167215 - DNA, 476 bp, Zea Mays
gtcgtttgctattttgctgagtctacatgtgcttgaaatctggcgctgagtttcagtttggtgatatcatttgcaacttcgtgaggtgtttttatgtattgatgttttctgattacacatggtccaaaagtttcggcatgaacgatgatttcacctcacaatgatttgaatgtgcacatctcgaacaaggaacctagattgctagcatgtagatagaggggcataggaatgaaacttatgatgtgcaggtgtgtaaaatatgttgatttctttttactataacaactttgtgaactcgactgaaatggcaaagcacactgcacagttttacaagcgcaacccattgcacaacacacccagacacgaagcaatcgagccccgcgcctcatctaaaatgtagccagcacaagagcagcaggacaccagaagacaacgtaggaggccaagtctagaatgccaagtcgagctcaattccc

SEQ ID NO: 167216 - DNA, 351 bp, Zea Mays
gtgtggtcggaagactcttcggatgaggacttacattattttgcggccttggatgtggctgcgccggaggcttctccgcgtgtgatgggtgctgaagttcttcctggtccgagtgctgggcgtaggcggcgaagggcggtggcgaaacggagggtgagtgaggtggagggtggtcgtcttcgtgtggatggggctagcaaacgggaattgttgtcctcgccggctggggcgagtgtaggtgagggggagttgcgaaatctttttgagggtgaggagctgaggataatgttgttcaactacagggagatgggtatcatcccgaaagttgaaccaatgtaaattacgatgccc

SEQ ID NO: 167217 - DNA, 372 bp, Zea Mays
ggaatgattcccatctccctatagttaaatagcattatcctcagctcctcaccctcaaaaagacttcacaacttcccctcacctatactcgccccaacctgcgaggacaacaattcccgtttgccagccccgcccacacgaagtcgaccaccatccacctcactcactctacgctttgccaccgcccttcgctgcctacgtccagcactcggaccaggcaaaacttcagcacccgtaacacgcggagaagcctccgtcgcagccacatccaaggccgcaaagtaatccaagtcctcatccgaagactcttccgtccacacaaccaaactcccagagtcatcaaactcagaaaacttaaacgtagactcattt

SEQ ID NO: 167218 - DNA, 646 bp, Zea Mays
gcggcgtgtctgagccccgtagtggcatggccggccggaggcgcgtccgagccctacagcggcatggtcgatgggatggccttcttctttgagtcgtcctttgattaggtaaagagccgaggctagctcgggagcatgggcgcctacccgagcctgttttgtacagaggtgtggacggaacgtattcgagggtgtcgagtcggagtagttgaaacagcgctcggtatggcaaaaaagcgtgtggtaatctggtccggtcgtcatcttggacggtgacaccggtcttgtcgtttctgtaggccccataccttcagcggggtttgcagtagagcaggtgagcttccctattggggcagttggctgaggccgtgctcgggcgaggcggagatttctcccgaggccgaggccggggtagggcgttgcctgtagccacgctctgggtggttgaaatagtggtcggaatggaggaatactgccctgtattcatgctctgatcatcgccatgggcggtaaaagtagattagaccgtagtcatgtcatcctttgttgactttagcacctgcagtggggtaggtggccgtacagactgcattaaatgcgcatgttctggggtcggagcggttggccgaggtgggcatgccctgga

SEQ ID NO: 167219 - DNA, 752 bp, Zea Mays
gcccaaaacatatgagtcatggaatgttgcatcatattgagcctaaatattctttgaaatgttgcacatatttgatttggttttaatttgaagcttgatttgaattttaattgaataccctagagaaaataaatagaaaaggcaatagaaattccaggaaaataggaaaagccaattcggcccaaggcagcccattaagcccagcccccgcgcgcgcttgtgcacgcgcgtccctgagcctgacaggcggaccccgcctgtcgacgcaaacccgagcgccctctctccctcgctgctccgtgggaccaacctgtcggcgccattgttctcgcccacgcctgctttccctctctctgccccactgaccccacctgtcagtgcgtccctaacctcccgcccacgatctccccgccgtggacgcgcccacgaccgtgcgttctccggccacgaccgagcccccgcgacctgctcgcccacctcccctcttctatttgcgccccctacccagctctctcgccctctctctcgctctgcccacgcgaaccgagaacctccgccaccgcgcgctgaagtccaccgcctgttccgttgccgcgattgcgcccatgccccgtccagagccacggtaagctttgccttgccttcagcttctcgggacacccttcggtgtgccctccccatctctggtttgtctggtccacgctcatcggagtggttcttgcgcagccggagctccgccaccgtcgccccgt

SEQ ID NO: 167220 - DNA, 661 bp, Zea Mays
cgaaagggtacgcgcaaattctggccgttggatctgttttcaagggacatgattagatcggcgtattatgcgaaccagtattcaatccgggccgcaggatcaatcacagacgcctcagattttataacccgagatctatttccgagcgcccgatcaacgaccgacggccagattcaatccacgccacgatccaatccggaccacacgctgctcgatcaacggcacagattcactactgaaccgatgcctacccattctaatcctagccatccctccaagatctgacggttcgcgagcgccacacccatccacggcggcgcacagggaaagcacggcggcgccatggttgtacctccccaaactccggcacaacgcgccaagctcggattcgaagagtactacacgatgctttatactatatgaacgcgatgaaccggtacataccctttgatgtaacgccaaaggccccggccacgatgagtggcggtcaccaagctccggcgagcgattccttcaacaccagaccgcaccgagtccggagatgtcgcgcgcgagcttcaccgatcttcgctgacgcccctcaatgccgcggctcgagtactagagtgctcaatcgggacctactcgacgacgacgctcaggtctttcttcttctctctcc

SEQ ID NO: 167221 - DNA, 311 bp, Zea Mays
cctaatgcatgcgccatcctctctatatccttcgtgatacttttaatccgattatcaaaagaaattttaatagatggaatatcatcggctgacctggcatcacctatcgtggggagctgttgcagcacggctaacatatactcggcgtttatctccctctcttggacggtcttctagtggcaatctaccctgaagtacgagaggaaccacttatccgccaccttgagcacctgatctttttgttggtggacctcctcgtctattttcttcatgtcatcttctaattttttatgttgtgcagccgataaatt

SEQ ID NO: 167222 - DNA, 436 bp, Zea Mays
atttgcaataaaattcatgcatttgtcaacaattatattgcttgctacaacatgaggtatgttgatcgtcctccctcgaatccaaagagaataactattgagtcaagccaagaggttttttcggttgacatttctagatgcacaagatctagcaactgctccaaacatgctgatgaagttaaatcaagtccattgcaacaatctcaagttcttccagatacccagaccaagaagcagctagatccacagtcattaccagttcttcatatccgtaggaaggcgctagcataccatgtgaaaaaagtcgcctataacaccagctgcatcgtctgacgacgattttatgactgctccaacaatgaagcgctctttcaaatctgttgaaccttccagtttagcaactaaccaccccaagaaaaagtctcgagtatcgttc

SEQ ID NO: 167223 - DNA, 2045 bp, Zea Mays
catgaatgaggtcacctgaatccccatggtgttctcgcattcgctttcctcgatgcggtactcatgcatcacccagctggtcctcagcccctgaggagctcgacccttgtagtagaccagtgtcttcttcatgccgattgatctgttctggtagctgatttgccgatctttgcctgttgacttccagtatcctgcctgggttgcgcggtttgtgcggcatccatttggatacttcctatcccttggcccaaagaagtaccactcggagtctctaccaggcaggaatgatttctcttccaaaacaaacatatctcaaaaattcagttcggagtgatgaaatctcaggatgaacaactgaatgaacttggatttcaggttacctgctagctcccaaggctcacatttgtagaggtctacttcagggattatgtcaagctcgatgctgagcccatggaccttcctcttgaggtaatagttcacaagctcctcatcagttggatggaacctaaagcctggtgggagatcagccggcgccatggcctcccagctcgctgcctcctttcttgctgatctttctctttgtctttaccctttgtctttcccttctgttgccggccaccgtgctctttagctcctccgtgaaatgattcaaagcctgccctacaagtagccatgtgtttcactttacaagattctcacacaagctctggacgtcttacagcaccgctggatcttcttttcttatcttttaacagaacaaacttttatttttattttctggataacacgcctttatcatattcatgctagtagattgcatagggctgtccggctgtgttgggatgtgaaagttgtcacggcattgccctcttgcgccgtgggggtatgttctttttttcactgaacttgtttttgtgtctcagaagcttggtctctttgaagtgtcatagatcagaacgggaccaaaggtgagggtacggtgttctagtaacatgtctctatgtatcgggatcaacattgcaaaacagaaagtttatggaaggtaaaaagaaaactaaaggtccatgcagccatgaggccttccagcgtcaatgagcttgcattgctatctatttagccatctagatcagacaaaacttttgactttggattctgataaaggagcactcgagtacaaaggatcgtcattcacggttttagtctagcatatatgtctgtggatgcataaacttgattgtcttcccccgtaatagatatggtctagttcctttctttctttaaatgaaagattttataaacagtgatcacagtctcaaccaatataacagagattttatttgatttcaaccttggttggggaacaatgcgttctatccatcctgagctaacttgctgttttcttcttcttaacttccccaaccctacaatgacaacatgcatttaaagaggtctgcaactgtagccttacccaattctacagaaaagacatgcacccctttgagcagcatgtggtcgaaagcaaattttgcagctaaatgtggatttgcaaattgcttttgcagttgatatgccggttgaaatggcggaacagttcaaaggtggtgacgtggtgtgttgacatcaaggaggcgctctgaacattacagaggctacattcttgtgacgaagtgtcaccatgaagatgcttgtaatgtagacttctgaactttagttttgcttgatacctagaaacatgatagaatacaacagtactactttgctaaaatctacagaattcttcagcatattgattatcttaagtctgctatcatgtcacttctcggaggtaatttgctgtgacatgttgaaaaatgaatcccaagaatgtcaaggtaggaggtgcaaagcatttctatatagccaaactggtcatagttattgacctggaaggggttctgattgacattccagaaagggctgctgcaacatcatgtgtttaaccactgacattacttatggaatagtatttcttcaatcctttcatcctttgtgaacccaagtgtttt

SEQ ID NO: 167224 - DNA, 796 bp, Zea Mays
gcgtgacctatgacatctcagtgagggtgtacttatagtgctgaaagatatgggtaagcgactttttaaatcaacacattctcccaagtccaaacacagccctctggatgcctttgatgaataactgactatttgttgggcctctgtatctcaaggcttcgatgaatcttcttgtacattgatgtattctaaaacttgtcttggtattgggtgaaccacaaagggtttaaatgactttaaatgcatacttagcagtagccaggaacaaattttggttaccatcatcagtggccttttaagcaataaattcttctgcaaggaactccgatatcctgctcacaatatacattgcagttgtggccctgcagtggcaactcatgcacagagctcagtttacctgaattctcacagaagttatatatacatatttgtgccttatacttgcaaactgcgtgcttttttggcaccagaagtttgctgctgataataatgtacaacatgaatgaaactatgcatattcactttagtcagagatgcaggtaacggtttgacatcttttctctgacaactttttagttaattaatctttaaaatgaggtctaatttgattgaatgctggccacaatagcattccctctgcatgagctccattcttgtcacctttccttctgtgggtttgtgtagtttaacatacttcccaattgtacaggtgattgttatttctattactatgtaaaagaggagtgccatgaatgaccataagaactgatgatgctcagaagatccagcctagatc

SEQ ID NO: 167225 - DNA, 1197 bp, Zea Mays
gtgcaatttcgttgcctgattcgtggcctataatctatttcaaaagaaggaactggagatcgagctgtactgcccaaaaataagaagcaccaaattaaccctctgtggcaagccacgtttcgaggtgtctaaatgtggttagcagcaaaataaactgcccgtccaatctctttcatctgcttgcttgcttgctctcctgcattagtttccatcctcggttgcaggtagttagtcggttccggattcgcgccggcctttttgcacgacgtggatgttgcagccggagttcttgacgacggtgcccaacgaggaatagaaagggggaaaaaaagaaacgcgtatctgaattccacacggccggcgaagacacttgaacagtcttgctggcaatgggaaacaagggaccagtgccaacacaggaatcgacgaatggttctgttctgtctccctcactctctgatctctcttgtcatcccatccctgtttacgcccctggcgcatacttgagacgcaatccataatccaccgcagatgacgccgaggcaccgtcgtctacgtctgctgcgagcaatactaagagcaagacaggtacgggcaacaacaggttccagcatgtgcgtgagctcccatttctaatctaaaaatcaatgggatagtgataatagtgtccgctgctacccgctagacgtggagcgagagcagctgttcgaaggatcaagcgacgacgacgccgcccacacgccacggaagagaagcacccaggagatcctcaccaaatacaagttcaaaggggtcgcttttcttcttctttctttctttctttctttctgcatcagtctcgccgccaacacactgatccatgtttcgaaaccgcgctcatctttgtgacgatgatgatttacatacaatcgcaggacgccgcggctgccgcggctcacgcgaagcagaagctcatggagcggcaggagaaactcgcggtagattagatagacacatagacccaccggttcatgcatgaatgactccttctgttatacataaatgaccgaccgatcgatggccatccgcgcgcctccctgtgctgtgctgtgcccagagaatcacggagcagtccgcggagctggagagcgaggccgagaacttcgccgcgctcgcgcagcagatcaggaagaacacggagacctggtggtggaagcg

SEQ ID NO: 167226 - DNA, 671 bp, Zea Mays
cacaaattcacataactagctcactacgcgcctgacgacgtcagcacagaagccaagaagatggcccgctttttgaaagggctaagaccagaactcaagactatccttgccagccaagatttcctcaacttctcgcacctctcaaacaaggccatacaagtggaaagggcaagggaagaagaaaaaggtcacctcaagagaaaattccaagtcctctgagctcaacagcaagacaggcactagagaattcgatcatttgggtttccacccaagggaccaagcttcaataagccagctggacccactctgtcacgtatcagtcagcagggtcaaagctcctttcaggctccctccattgcaagcaaccaaccaccagctaatgcctgttggcactacggagaccccagtcactacaagaataactgcccccagttgaaggcatcaggacctacttactccaactcggtgaatggcccaaagaatgccccaacgcccgcctccaaggcaccctcctccagcagctagcagagcaagacccagtatcatggcagggcacgagtaaaccacgtcgatgctcaagaggctcagcaagctccgggagtagtgctcagtgagttcctagttgaatttactcccactactgtacttttcgattcaggagcatctcattc

SEQ ID NO: 167227 - DNA, 495 bp, Zea Mays
ataactctcttccatagcttcatagtgtggcttatgagcttaatccttccatagttggtacaactttgaatatctcccttattcttgaagattggtactaatatactcctcctccactcatcgggcatcctgtttgatcgaaaaatatggttgaacaacttggttagccaaacggtagcaatatccccaaggcatttccgcacctctattgggataccatctgatcccctcgccttgccccctttcatcctctttaaagcttctttgacctctgattcttagatcctgcgtacaaagcatctatttaaatcatcgaaggagtcatccaattggatgtccatagtctcattctcaccattgaaaagattgccaaaatacctctgccacctctgtttgatgtcctgtcctttcaccaagagttgatccatctcatccttaatgcatttaacttggttgaggtccctcatcttcctttcccgaatcctagctatctta

SEQ ID NO: 167228 - DNA, 361 bp, Zea Mays
tcaggcccatccgattttagcttggattgctctctgtcccctcctctctggcttacgtctgaagcctagccctaatcccaacagaaagacggcggcaacgcgaccacaaggatcggggaagggagcggctgcacgtggcctacgacaacctgcagctagcgctggacgacgtcgcgacctgcaactagccagctagtgccacgacccacggcgagtcgacaacatgcaagttgtagccaacgtcttaacaacaaccatggatccataccaagattgttgatccccgctgcagcctacaggtcataagaattcaggtgtatgtgtatcagtgtctactattagcatttgtttacatttagat

SEQ ID NO: 167229 - DNA, 369 bp, Zea Mays
cacaagcacaacagaaagtagcaaagtggatataatggcaaaccaaaaaacatgttgaattccttgacttataaaacgggatctccacagagggaaaggtacctgcacattagattagagaatttttaaagaggagagcaatataccaagcacagcagatcgtagcatcaggaagcaaaagaagacatataccatgcacagcagatcgtagcaagcatatggaagcaatataccaagctcaagaagtgaagtatgaataacccaacctatcaaacagaacaattagaaatagatcaatattattttataaagctccttaatatctcctcgtcctgtaactttttcgtattacatttgagtgttagtctt

SEQ ID NO: 167230 - DNA, 656 bp, Zea Mays
ctcatctcatcgacgcattgccacacctttcacaagggtttccccaagggaagcaccatcctgccctgacttgatgtcgagcaggtcgtgttagggcgatacgatgttgtcaccttaccccggtaaatcttgtactaagcgttgttgttggcaagatctactagttatcttttgtagtttcaatctatttctaccattaagcttcatgttgttagattgtttttttacaccattagatgcatatttcttgatcggatgctactccatgacatgcaagctgcaacatttgcatgtggcaactcaagagaccaataaacaactagcaccctagctaccttacatgtttagtggcattgtttattctagatggacttctttggaggttctggtttatgttcatgtgcataatcattggcttagggtcatcagcataatacaagttgtagtttagatctaggatgttcctatagatggtttatcgtttatgtggccctagatttggttgacaacacgggtaattaatgtttgatctattgtagtgcatttgtatagagattccctgaaagtagcacaccctctctagatataggtcaagccaggtggcatgcctagagcccccacaaccgaagtcataattaggaggacaatcgcagcaa

SEQ ID NO: 167231 - DNA, 815 bp, Zea Mays
catatcatctgtagctgccttctactgtatacaatttaacctacaatactgaaaattcaaatcagttcaatattacttacatgtctctgcagaatcactggtgtgtcctgttcatgatcaccaatagtacgcatagtattaaggtgctgtcctccttgatttactgtcatcctcgatgcctcaaatatggtctgatcatcaacccctggggccctcaaagctgctggtggagtaattgcatttacaacagtagctgattctgtatgcgtaattccatctgacgctaactggttccctccttgttgttcttcctgcaccattgttacgatatccaagcattgatttggttgatgaacagacatcggcgtcgtatactcacttatggacttgttaccccatggcgccgccatcttccagagcaaatacgcccttcacccagccgccgactatcaaatgatgcagactctccacttttttttggaagattatgattttttccatgtaccatgcgtatatccaatatcgtggacgcgaaattcacggcgcatatccattacccactgaattttaggatcgtggccgctctgatcgtgggagtaacagacatttatgcaattttgtacatagatttacggtgtcgtaactgtttgtttaaatgcgcttccccaatttacgggttacacgtcaccgacccacgttcgaacaagtggcccacgccggtttacgcatatttgtccaagctattatacttgcataactgtcgtgcattaaagcgggccgcctggatcggtccattcggttcgaccacgctcggc

SEQ ID NO: 167232 - DNA, 762 bp, Zea Mays
ccactctacgttctttccttttctttttcttgtgtggagcttacatgtgggtccgcttcatctatcgttctcttcctccgctcggacttgctgccggcaacagtgcccgcggaaaccgcgcagggttgttggccgaggattcccttgtcacgcgcatataaatggagccctaccactccccttcaaatcgaggccataaccaggccgatgggtgactcgccaaacgccaggggggtttgggtgctcgtgtggccgccatggattcaacccggctgcgcggtcgttcggatcgcgtatggtggtcggagtgcataattgaagaacgctggagcatgtggtgctctcgacgggcgcgattggtgggctcggggtgatcaatttctcaccggagccacgaagaccgcggcggaccacgcattgtcgtgggcagcgtccctggcgccattaacccaagtatgaaggacctcctccgcctcactttggtctctgttgtgctccgcgacaaactaatttcgggattggggcgtgtgggcgacaatcgcatgggcgccggtgagcctccaccgtgggcgcaccatctccgccgctctcgtggtcgtgaggtggaaggcctcccatggtcgttagattcagatagacggtggagattagacatgggaatacctatttggaggataaacccgagtcgtagatctagatccaacggctgtgggcctatgtcggttccaagtcgtcccgatgtgatctgggccctccatctct

SEQ ID NO: 167233 - DNA, 353 bp, Zea Mays
ccattgggttcaacttcaagacggtcacacccattgggatcaacttcagcatgtacacacccattgggatcaacttcagcatgggcgcaaccattgggatcaacctcaggaaggacttctgctggcacttcatcacaaaccggcgccgaaggacccgcaccatgatccaagctcgacaatcgccgaagccgcctcttcttccttttctcttcaactggtgcagtaggccggctcactcgacgtggacgctttggacggacctctttgggtttccggatcctctccattccaacaagttcttgcccgtctgtgatagccattggctcggcatgtgccgagtcagatgattcccc

SEQ ID NO: 167234 - DNA, 961 bp, Zea Mays
gttgtttgcgctgtgtttgccattctagccttcttctcttttgcgagcttgattgacttttgagcttcggcatctgccgcaaccatcacccaaatggctgaggagaacaccacagaccctgaaatgtctgagttttacgaagctatggtgaagaccaacacagaaaagatcacaatgagatgttggctgggttgtttgaggattccagcgatagcaacagttttgacgtggagagtgggaatgaagatgtcgaagatcggtcgtggaggccgagccatgttgtttttgggaagtcaaatgtcaaacaaggacaaattgaagcgatgaaaggcaaatattttcatgatatttccatagtgagggctgggggagaaagcgccatttcccttcctgaagctgatgaggtggtggtcttcaagagcttcacgaaagttgggcttcacttttcgctccacaagatgttggttgaggttctgaagacattcgagatataccttcatcaacttacccccaaagctcttatcaaagtgggagtttttatatgggccatgaggagtcagggactggagctggatgctaggtgcttctgcaacattcacaagttatcttaccagacgaaggcgaccgaaaaagaacaataccataacaactttggctgttatagctttgtgccccgctctgagacaaattaccctatgcctacatttcggaagaagtggccgggctcttggatgaagcattggttttacgtgaagaatgatctgaatcagagggaggatgtgaggggcatcattcaacgtcccatatggtcacgttttggcattaggaggccatcaatcgcaattgggaatgaagtgcaagcgtgcctaatgaccttcaacaccatatgtacctacattggtaccagagatttagttcaacagcacatcgctttcaaagtatggcctcttgcaaatgaatg

SEQ ID NO: 167235 - DNA, 360 bp, Zea Mays
gtcaggtttcctcttctcctcttctctcctaggtgccatgaccaacactcctctccacctccaattagcttccctcctctccaccgctctccactaccacagggcctcctcctctacctgtcgttgccgcacctcctcagacctagctaccaccgctggggtctacccaccaccaccacttgcgcttgcccaatcgttgttgcctaatgcaatgcttgggtagcctagcatagtagtcgctggcgcctcctcccacatgtgacagtcacaaggtcctataggccgccaccattgttagcccatctgttgtcatcctagtggccttggcctaggcatggctagcttggttgtgggcaatgc

SEQ ID NO: 167236 - DNA, 365 bp, Zea Mays
gctgcggaagcttgtcagaaggcatttggtactgtctgcttcttcattggtacaagagatttatttcaagagcatatagcattcagagtatggccgcttgtagagaactgggaaatgccaaatgagactgtcaccaagtctagcgaaggtgacctggtccggttgaagtatacattcagatatggggataagtttgaagaaccaaacgacgactggctgaaatgtatcgaagctacaagtgatgaattgcttggatcatattccaaggcagaagataatgcattatccacagccttcggaggctggggaaagaagagattgaacagagtttttgatgccattggctttgcctaccccgactaccg

SEQ ID NO: 167237 - DNA, 625 bp, Zea Mays
gttctgcataaatgccaggactaaacggtaatggtcttataatggcacgggatggcgggttgattcacagaagagcaggggctcttttgcaatacgggcgagcgaaggggtacgggtagagctgagccgcccgatccaaacccgacgcaccggattagatcgcgcatcataaaacgtagacatcctttttaccgttagatccaacatccacggatgagagtgatcccgacccgactcacccatcaccgtccgatatcgcgccaacgttccagattgcatccgaccgaaggggtaagccgctttctaatcctggccgttttcgcaagatccgacggtcgcgacgctatcttcctctaccacggcggagaagggcgcaccggatgaatcacagccgttggtcccctaatcaacggacggtgagtcatcttcttcgtcctgttcgtcagccacgacgccgaccgtgcgcaacccggtgctgcgcaaacccaaacccagcgcgatcctctccaatctaccctcggtatccaattcttgcgctcgtactccacctcgccgaggggtattgatagccgaaatacccaagtaacggggcgagatactcaccgaggttaatgccgcacccagc

SEQ ID NO: 167238 - DNA, 287 bp, Zea Mays
gagttaaggttcagatccacatcgagcgaagtagaacgtggagggttgtaggattgtgagctcgaagcatggccacgcccacgtccacgaactgaacgaatagatccctgtgaatcctatgatgctcactttccatagccacaccctatccccaatggtggtagtccatctacaggaacacctagcatatgaaaataaaacagaacagtcacaaacaatagtcacaatatagaacaatttaagtaatctatgggagataaacaaacatagaaggtaatttaatttct

SEQ ID NO: 167239 - DNA, 393 bp, Zea Mays
ataatatagtgagtgtatagggaaattcatcgcccaagcactaacaacacttagcctcttaggtcctccactggccctatggccactaaaaagtctgagatctattactccaagggcagtcgagacccatgccctctagtgcctaaggcccccaaaggagttaagaacttatgacatttaagtgtaatcctatcacaagataggaggatgtgtcgatcccaccaagaatagtataggaccgaaaaatgggttccacatctaagcacccgaggataacttcacagcgatatattaatgaatgagtctcgtgtacaaaacaataatgtgcattgccaatattataagtctggcaaacatgttgctgaaaggatcacgatgcccaagaggatggat

SEQ ID NO: 167240 - DNA, 1071 bp, Zea Mays
tgccttgtttatcctcatcagatgaatcatcagttttgtcatcaaccaggtccttcctgtcaaccctccacggcccaataggtcccacagtcgatttcttttgcttcaacctctgctcagaaagatcatcctcagacagattacaacgcctggtgcctagattccacagcaccttggaggatagtgggggtgggccatcgaagttatgtttgcacatgaggcagttcctttttgggcaggccccatgcctgaacccagcacgtgattccttcaatcgtttgcttcttctgagccctgactccacaatgattggagacggcccaccacaaccatcggaatccttggagatcccagaagtgacatcccccagggaggaatcaactggacattccttaggaaccacaaaagggatggaattcattccctgctcctacaaatttggggggatatctgacagcagaaaagtctttgaccaattgaaagcatccggctgaagaagattcgaaagaaaaaaaggtgcccacttcttagggatgtccaccgagtggtcagtcgacccagacggagcaaagtatttggcccagagccaagtgaactggacagctcttctcctctcttcaaacatctggaagacggggtcaggctgccattcctgatggagcatgaagttcatctccaaattctgagggttattattgttaggctcatcaacatgggcctgagggggcacgacctccaaatcatggacatgatccacctgaggcaccagtccatcgacctcctgaggcccaataaatggggcaacattgatgtcaattccatccccaagcagcgcatgaccattcaccgcaagatgaccattcggaaggggtgcaagctgaccagcaccaatggagctatctgacgacaagccagagtgttggttactgagttgtagttcttcctgctgaatgtgctgctcctctggcaaaaagggctgcggggcctgctgaatgggctgttcattcacaatccactggtcccactctccctggccaaagtcatcctgctgagccggcagcactccacccg

SEQ ID NO: 167241 - DNA, 966 bp, Zea Mays
tctgagggccacgattagatccacttaagtccgaaccggtatgctctatcaatcgttggatcaaaaaccgttggcccagattttaatgtactgcgatcagtttaatacgtgcgatctcgatcctacggtcagggtttaacgaatcaccgatctaatccgggccgagggatcagagatccacggctcagatctatcatacgcagtaacactcccacgaccgcattccggccgccagatgcggatcgaacggcgccgagcctattacgcgaatcggtatgcacatgatctaatcacagccgttgctggtcatccaacggcgcacaaccgacgccccaacagcgcccacacgcacggcggcgccgccccctgctccacgcccagccgaactccggcgaggtcgccaatcggtgctccccgcgcgctaagcactaaatcgactcgagatataccatgcggaaggtaagatggacacgagggacggatttcttaccgaggggtttgagcacatgagcgcagccacggcgaggtgcggtccacggtggtgttgttcctccggtgaggaatttgtcgcgctccccaaggtccgccctccaattgaggttgcggacggccacgctagacgatggcgacccagcctaggccaaccccgaggacagagtcccagcgacgacgagcttcacttgcggcggaactacgcagccctctccgatgtccagtgagcaattgccgaggcacaggtcaccgcgccaatttataccccgaagtagtgcgcggaattcggtatccgttgcgcaagagacgggctcggtccctgcgcggaattcgcggcgtcaggtgcgcgcccgcccggttcgatggagacgatgaacagggtagcggattgtgtcgagcgcgagctactggaaagtgggcccaagccgtcagtgaggggggagaacgaacggtgcgcgcgttgggtaagcgcga

SEQ ID NO: 167242 - DNA, 861 bp, Zea Mays
tgagcccaaagtcgggctgtcagactgccctaagtctgaattcagactaacagtgagattggatgaacttagggctcaattttaagtaagattctttgactttttgtgggtgcacaatgtaacaaagttagagctggtttatcaggcttcgtctttgatgtagagtaatggttgagtaatcacataaaatatagagcaaagttgatcccaagcatgctctgtcaggccaactgatgaagcttcgcgagggtacagtaaccggattggatcactagctcagagacctcgccgccggcgaccacgcgcacggattcgtgctatcaccatgattcacgctgaattaaacacggataacgatcacggggtgaaagatcttgccgcggataggctggaatgtactatgtgcttgatggttcatcagtacacacaggcgacgtggtcgtgcggcaatcaccggcgtgttcgccgttcaccgtgaggacgccacaccttaggaagtttatcgcatcggtatgagccatagtgaccacccaatgaccgccgtagttcagtcgctctgcgattgccacggtagatcgccgccgtgactcattcccctctcgcccgctagtgcaattcgtccaaattaagcaccaccgctcaagcaaactataaattgagcacacagacgggttcgtagggtagtcaagcaccaagccaccaagtcgtgcctccaattgttcaccagagctcaccaattccatatttcccccaaatctgctttccgccatcgtgaaagaggtctcgccgtggctagctcatctcaggtccgctcataccctctactccttcgtttcagtgtacttgtgtgtccctgatgct

SEQ ID NO: 167243 - DNA, 352 bp, Zea Mays
cagagatggagaggcgcactatctcgggcggcggttcgctcttcgtgtggtggttcaccttcttcgcactcagaagccagcacgccagttgtatgacttgtgggcccgggcccccgtgtcataggctggggctgctttggtgcgcgtcgggtgagattttctgctgcatctcggggtgcgagtgggagagtcttccttgaaaagggattcaccccgcgtgcaacaattacgctttcgcattctctccaactgctacgccctttcgccttcgagctccccacgccccattgcattcgcgttcctctgctttccaccaccgtattcgccatggcctcgctagttcatcccgagc

SEQ ID NO: 167244 - DNA, 337 bp, Zea Mays
cggcccacgactgtgaccggcggggagctgagctccggtgagctattactggctggattacactaagactagtgctaatctttggtttaaacctaattctagccctgaggagtgtttcccctcaactaatttctggattggagccctacagtgctctgcccacggtgacagcggcaacaacggaccactaagcgcgttcccgatgatctaaggcagctcggttcaattgggcaggttgatgagcatcacggttacataaggacactcaaacgagggagcagaaggtttgaactgacctcaattgcactggccacggcgagggtgttcttgcggtggg

SEQ ID NO: 167245 - DNA, 672 bp, Zea Mays
gggatccgatggacgaaagggtatgtggtggcatgatctcgtccaaatcctgaccagtcctttgacatctgacggccgttgtacatcttcctccccatgccaactcgaggcagcgtcgccgcaggccttgacggagccctgccagcgacccgccaagcgtgaccgcctggggatcctacctcgcccacgacacgcccaaatgcagagatgactttggtgaactcaatggcgggctccttacattcaatcgatgatcgcgtgacacgggccacgcggcgatgcggacgccagcgctgggctaattaccggcgagcaaaccactggccttcgattgatcctcgcccgaagtaagcgtgcgcctaccccccgtggttcgcgatgctccaagtctcccacacgaggggtgtggttccgcccatcatgatcccgaccgcggaggtgacttctcaccactgatggccatgacggtggtgttcggttttatacaaagagaaaacaaggatgaggccagaaaccacgcatagcccgcggagtcgggtttggctttcgtaccgggaagcacgaagtttgtttcctatctggtagctacaatcccgcgtgcggagaacggcagatccgttcgcccaggcctacgatgcggagtccgccaccatcggtttggggaagaagctt

SEQ ID NO: 167246 - DNA, 1091 bp, Zea Mays
tagtgttaattttggttttgatgcagggggatgaagaggtggtggaactgcttatccatgacaaagtctccatagccagcctacagcatgagccgaagccaaggttgagtcgaagttgaaaatagccactgaaggaatgccttagaaagggaagaggatgactaacattttgaaggtcatccttaaacccacaaagaagggcccattaatacaaaggttactctaccttctccgtcaaaagatatcgtgcccaaagatctaaccgaaaaaatgatctgacgaagaaaacagatgatgtgccgaagagcgatgctgctccaaaaaaatatgctacttcgaggtcctacaacatttaagatgcattcaagaaaaaatcaagagaggaggctaagaaggctaaagattgtgaaggggaaacaactgtagtagttgaagaggaaccagctgggccacacgaatacatcatttgtcatgcttccggagggcatctgaccgccgagcaaattgccgaggtgcatgattttgctgaagatataaaatacccatcggggtcactagtgtaccgaggaaatgacaaggatgagtatctctactgtctcctagacactagagaacttgaagtgtgccacgagatgatggataaaatgggctatcctaaactggagtgtgggctatctgctatgccgaaggaccagctcgaggcacaaataaaggagcaagccaaagagcacaaagttgaaatggctctattgaaggataagcttgaagagacaaagtacaattttgaattgcaagagtgagattgccgaagatgagcgaaacctcttgcaaaaaattatcaacgagcttcggcaaactaaagaggaatgctcttctactgctgcccagtgctattaaaaattaaaaaacaacttcgttctcatatgggccttttctagtgaaaatgaatttgtgcgaggtgatccgtccggggtagtgaagtggattgaaggggaagttgaggcttttgatgaagtcctatctacccacagtgactattgcacaagtgtaggggctcgaggggtagctttgatcctagagaaggctgggtg

SEQ ID NO: 167247 - DNA, 838 bp, Zea Mays
cgccggcgatccgccagcggctatcgcggccttaccagcatcggcgttaagcacaccattggtagtggccgaagaggttcctgctgcgactacccccaccgtacagggtgacgtgggtgctgaggtggcgccgtcgggcccccgggacccgcctgcctccgtcgagggaacaccattgggctcccaagttctggctgggggtccagaggcggcagcgccgccgacagctactgcagatccaatggcggcgatatcgtcgaatacaccatcggcggaaggcgcggggggcgcgtccagcttcatcccaccgccaactccagaggaaccggaggttattcttgggcgaccgctccggtccggcatcgagccagaagcaacgccgactcctctccctcgggtgctgtcccgcgctcattaggctctccaggaaaccgaggcggcgatcctgcgggagtgggaggcgctcaagaccgagcaccagcgccttggcgactggtgcacccaactggaggagcgcactaaggctgcgtcctgccaattcgcctttgagcgggccaagcttgagcgggagcgcgaggacttcaagggggacctccgaaaggtgtctgaccgggagcaggaggtgacccggaaggagaaagggctggccaagaagaaggagcacttggaccagagggaggaggtcatcacggcgttccatgaaaagctgaaatcctataatgcgatgctggagaaacagcggggcgagcaggccgcgactgaggcgaagctgcaaaagctgcatcgggagctcgacgacaaggctagcaacattgctcgcgccgaggagaacctcaag

SEQ ID NO: 167248 - DNA, 853 bp, Zea Mays
tgaactgcttgggccgtactccaaagcgaaagataatgcgttatctgcggccttcgaaagccggaagaagaaaatgctaaatagagtttttgatgctattgggttcatgtaccctgactaccgctacccgtcacgggggcagaaaagaaaaagtgcaacttccgggaaggatgatgcttcagctgctcaaagcgagcccgcgccgaagaggaaaaaggtgaaggttcttactcaccgaccgcgatatattgaaccggtcgtagtgcccgaatttggcggtgcgacctcttcggctattgaagccaaagaacctgcacctacgcagaagattgaagagccggctgcaatgccgaagacatcctcagctaaattagctgagccgaagggcgataatattgaagagatagtagtcaaaggaacaaggatattagaagttacaagcccttcggcagaagtgacagtgtcgaaggcacaaaaagatcttagagcgacccctaagagaaaacggatggtcaacgtgctagatgcgctggagacaataaagacaagctctactccaaggaaaactgccgaaactccaaagacgcggtctgagacaagattgtccgaaaccgaagctacaaagagccaggcggagaccgaagctgggccttcagagcccgccaaggagaaatccttggaaatcagagaaaaagaaacggaaaaagaagccacagaacaaattttgcctgaaaaaacatcttccgaagctcttgattattttgtacaacatgctttaggaaaaaggttatctgaagaagaaaagcgagaagctcaatactatgcccggaaactgaaatatccaaagggggca

SEQ ID NO: 167249 - DNA, 928 bp, Zea Mays
gcacaacaagtgcgttaatcgaagtcttttatttaaaaggcactccacgcaaaagtcgcctaagggtgcagccggaatagcacaacaagtgtgttaatcgaagtcttttatttaaaagacacttcgtgcaaaagtcgcctaggggtgcagccggaatagcacaacaagtgcgttaatcgaagtctctcattaaaaagacactccgcgcaaagtcaaccacgggcgcagccgaatcaacacaggcgtacgaatacggcgaacaggccacattaccatacaaattacagttacatacacacgacgagggcatcacatattacatcagctcaaccttcgggatgatacccatctccctgtaattgaacagcattatcctcaattcctcaccctcaaaaagattccgaagatccccctcgcctttgctcgccccaatcggcgaggacaacaattctcgtttaccaacccggtctactcggagatgaccacgatccatccccatacaacggtgcctaccacttcgcaaaattcacccacactacgttttcccaccacccttcaccgcctatacctagtactcgcactagcaagatccccggcaccctccatactcggcgaagtctccgccgcagccacatccaacacaacaaaataatccaaaccttcatccgaggactcctccgtccaaggaaacgaactcccatattcaccatcagactcaaaacactcagacacagagccaaacaaactatcatcggcaggcactacggttgaggccgccacaaaatcaatattgccagcagcggttgcttgagaaggcccaaacgtcggaacctgcgcagcaaccgaggttcagtatcacagaaacaaaagtttacacttaaatccctaacccctagtccaccacctgcgaaggcccagccgccgctgc

SEQ ID NO: 167250 - DNA, 1441 bp, Zea Mays
cgggcaagtaggagagcctccaaataagtaccaaaagtacttccttggaaggctcaggggctactgttgggtgcgataattaggaacacccaaattaccccctaacaaacgcactcagagagataaggactaaaccccaaggggcgacatccgggccacctataaaagccgagacaccccccgagcatctcccacctcaagcggagctccacctcacccgaagacgacatcactcacttcgtctcgcccgaggtcgcctcagcctagtccgtctcgcctgagccagccttgtgcagataggacaaggacgctcgaaaataggtaggggactggtgcatttaatgtgtgtgccaaactgcaccgtggcagtggagcacaatggtggataagatagcgatcacgtctaagcgtagcggcatgattacgcctatgccaaatagtgtgcgcacgccacttggcaccctccgatgggacgcctaaatacgacaagccgagaagacgagtcttcgagcgctccgcctcgctcaacccaagctcagcccttagacaagctctccgcctcgcccgagctcggcctcggccagtgactacgccacgaatcccacagacaaccactctgccctactgtagcgcacgtcgagagatggctcggctagcgccttgggaagacttctgcatcaactaaacaaaggctcttatcttaatgaaagttgaatagaatctcgacacatcacgtgccaggacgatgacgtaccccgtaaacgacccttggcccatatcccggcgctgttacaaccactacggcgtgggcggcctctccctcgggaactcgggcgtacggacgaccccttagcttcggctctctacgggaagtcagcacacacgaatctactgcacggtccgccgtcacgtcaggtgtcagggcatctctccttcaaaatacaagacccggcctcaccaagggcgctcctctgggcgtataaatagggtaggggaccctccacgaaagaaggaggatcaacatctacgcaaagggacacacgtagtcgagttcttgttttctcactttgtcttagatattggcacttgcctcaatcatctctagggacttggggacttcccctctctcactgtgcttgtaaacacctactataggcaccaaggtgccagtaatataagcctcatcccctctgctggaagtagggccacgagttgcccgaaccaggataatcgcttgtgtcatgtcgcacaccatctagagccggccacgcggcacatttactggttggttaaggacccacagtccaaacaccgacacccgggtaggagatgcagtcatgactcacgtggcgggagatgcagtcacgactcccgaggccaaccccaggcaggagatacaatcacgacttgcccgaggctaaccttgggtgggagatctagt

SEQ ID NO: 167251 - DNA, 711 bp, Zea Mays
ttctgggaatggagaccacgctatgatggagaaagtatttgggtgacagcagtggtgaagccttaggcagaggatccagctatgggtggctggcactttagatctttaggccgcacacccagggaaggggcaggcagagcagcttacaagatactttaggacttgttggatcgttttcctggagagattccaaccgtcatgcctgggatctttcctaggggtgatcctttcaaccctaagtgggaccagcatgagggtagagctctgacatgaggtgacagcgagtagcagcacagtgacaccacagcttccagcgctatgtttgcagttatgcaactgtataacagctcggagcacaatttgggaatggtcaacagttctcttgtcgtggctaagaacaagttgtaccaggctcaaaaggcgcatgatgcagagttagctcaagtacaagcagagttggcccaggtcactatagagaaggatgaattcatctaggtcagggatgttgtcgtgcttgacaacgtgctatggattggcgaatgctagaactaccacactttgctggtagaggtcatcagatagaggaatgcagcctggtctgagatagcccagcttagggcaacgcaaatcaacttgatgcagcagatgaacaacgcagaggcctggaatgctaatctgcacgaggaggttcaccagttgcatgcctagctg

SEQ ID NO: 167252 - DNA, 409 bp, Zea Mays
tattttccccagcccttacgactttaccagatccacacttgtagtttaagctgtcaacttgttacattgttcatcctcccatttagctacctggtgcaacaaactttgtaaccttgtttcggtttaggatttgtagtcgatgcagacgccccctccaatatttgagttcacccttagttgccaatgcaagcaaggtttgcaacctcgtatcctaacattagccatgccggtgtactgcatttgcccagtgaagttgaatccactgaagcagatatttattaagtgaacaacttgtatttgtggcgtttatgtccaatgttaccatatcatagcattgtagtcttgaccaataaatgtcattggactgacaacccgattagttcacgaatacacgtattttcatgaattg

SEQ ID NO: 167253 - DNA, 470 bp, Zea Mays
ccgcgcgcgctagctgctgccgaccgggacccactagtcagtctccctccacgcgtgccttggcgcgacgccgacactgcgggcccgcatgtcagctggtctagctcgcgcatctgtcttctggacattgcgtcgctggcgtgtgggccacccctgctagtttatccctcaacagatttcaccgcgcatggcgggggcacggagaccgcgcgtagttcattgtgcgcttgaccacgaccgcgaccttatagggagcacggccgggctcgcctccccctccttatcctcctaccttcgcgacccagctacccctctgccagttcgccgtagccaccatcacagagggagagagaccttcgccgccgcacgcaagcttcgggtctccgtcgtctggcgcaccgaggaggtgacattgggcttcctggggctcgcggacgggtgttggtggccgcatttgggggagctcgccg

SEQ ID NO: 167254 - DNA, 918 bp, Zea Mays
tgacgccagtcttttttcaattttctggataagagggagaaaagcacccaagttgggtctttgaaggcccaagggaagccctaagtaagtaaagggcattgatccaattttgcaattaaatatatttgcaaggatctccattttctggtccgtgacattgatgggataaatgttagatttgtggtaattcacatgaagcccagtggaatcagcaaaagaattgagcattgcttttaaaaagaaaagttgtctagggcaggcttccattatgagaatagtatcgtcagcatattggatgatagggaaatccggaccacaattgtttggtaaggggagacgaagaaatgccacaatcgcaagccttgttaacaatagactgcagaagatcagttgcaagaacaaaaagaagtggggacaaagggtctccttgtctgactccgtgtctgcagtgaaatcttttcccagggactccattcaaaagaacttctgaagaaccggaaccaagaatcatagaaacccagtggatccatttatcaccgaaccccttgtgcctcaaaatctccataagagttgcatgttccatttgtcaaatgccttctcaaaaacaagctttaaaatgaccatttcctttctggatttgtggcaaagggtgttcaagctctgacaaattatcaatcggctgaatcaaagcagataagttgaaaaccatggaagtttgttgagaggtccccaaacggttcttgaaatcattggaaagcacagattctttgtcagtatgagagagagccatatttccattgtcatctttaagagaagaaatgaggttatgtctgtgcttgacagtggcattggcgtgaaagaatttagtgccagcatctcctagggtggcccatttgatttgacctctttgtttccaat

SEQ ID NO: 167255 - DNA, 619 bp, Zea Mays
cgagctcatgcttgaccagcaactcgcctcaccgggtgagcatttcttccctgaaggcgagatctgtctctcgcctggcgaggtccgtctcccgcctgtctaaggacagctccttctccttaaggtattcctcggtgagggtggcgtcgttggccttgccttcgagctcttgctgccatttctgcagcctttccaccgccttcacctgctgggcccgctgggcttccaaagtctggtccagggcgcttagcttggcctggtactccgccgtgagggcctccctctgggttacggcttcctccctcctcgccaccttctccctccgggtcgcctctagctccctggcacacaccctctagaggtctctcttgtactccttgcggtcccgctcgagttgggaccgcttggaggtgaactgtcgggacaccgtcttagtgcgctcctccagttgggtgcgccagtcactgaggcgctggtgctcagcttcaagcgcctcccactcccgcgagattgctgcctcagttttactgagaacctggtgggcgcgggacagcatgcgggggagggggactggcgccgcttcttgctcgacacccgaccggagtcgccgcccaaacac

SEQ ID NO: 167256 - DNA, 566 bp, Zea Mays
atcagggccgattcgcccttgtaattcgcaaaaacaattttattctggcccgcactcttttcctcctagggggtgaggtttttaacgaggcggagccatgtaatatacaagcgaaaaatcccccgcaaaaacatgcgtcgaaaaaagaccgcgacgacggtcttcgacattcgaccaatacaaagtcaccgcgaggctcagcgatagctagcctcgcgtgcgacaaatccgcgcagaagtcgcctaagggtgcagccggactagcacaacaagtgcgaaaaccgaagtctaccgcgaagactatccgcgcagaagtcgcctaagggtgcagccggactagcacaacaagtgcgaaaaaccaaagtctatcgtgaagactatccgcgcagaagtcgcctaagggtgcagccggactagcccaacaagtgcgaaaaaccgaagtctaccacggggactatccgtccaacagctgcccgagggcacagccggacgaagcgtaacaaaagcaaaaacgaccacaccaactgtgcgcgcagagaccgactacatgcgcaccagtccagcat

SEQ ID NO: 167257 - DNA, 343 bp, Zea Mays
ggttaattcagttggtgggaggacccaaacagataagtttttcccaagtgcaagagttcaaataagggggatcgagttccccgttgatctgatagtaatgggtactcgggatgtagacatagatgtcatccttgggatgaattggttgactaagtaccaagcaggccttagttatgataagaggactgtgaagttggtgtccttgtcaggagaagtgttggtggagttggtcttgtctggaccaaagaaaggaagctatcaccagatcgctacccatagtgaggcagtcaatccgctcgaagtcatcaaagtagtatcagaatttccagatgtgttccccgag

SEQ ID NO: 167258 - DNA, 537 bp, Zea Mays
aatggagttctgatggtacagtgacttgaagaacaatctaggttcagtgaactcaccgccgataaccccgtgcccggattcgcgccggtcgccgcgattcgtgctcggcacaaagtggacaaccaaggggagtaaaagatcttgtcgcccggataggttcgaacccggtcactagatggttcaccgtacccacttattctgcggccgaccgagatgatcctcgccggcgttgaccgcttgccgcccatgcgccacattcctaggagcatttccacgtcatagtgaaccgcaatagggagtccgtccttcaccaggagccttgcctcaataaaagccacgttagcgcttcccggtgatttcccctctctccggtcgccagcgcaccttctccaaattagacgccaccgccaagggattctataaattgatgccccagtgagttccgctaggtaattatgcatctaatgcaccatccatcgcctctgatcatccaccatagcctcccaatttcgcatttcccccaaatcgagttttccg

SEQ ID NO: 167259 - DNA, 1062 bp, Zea Mays
ccagtcagttgggggcaaaatggatcaacttcttgaattttgattcgaaggtcacacactctttgcgaagttgcttcgcctcgatgcaacctttgtgatgatgccacgtgccgcccttaattcccactggaaccttaccaccaagttttgaggttcaaacccaacaaaaccatcgactgtagcattatttgttattgaggctcaaccaccgaaaactctataggtagctgttggagcgaaggtcgtccgccccctcgatcggtctacttaaaacataaactaagcaggttatgtcagtcacaggaagcgaagtctacctcaacccgcaccgaaggcagcgcctcagttggagaactagcgaaggcatgggagcgaagggaccagtcaacctctcgggggctcttcaagacttcgcttgccatgactccaagcaccgaccatagaaagactcaaagacccggtgcctcgagcgaagaccgcaatttttgcccacgtgggttggcgtaatgggcccacattgcgccccattggcttactcgggccccatgtgtaagcaccaccccggggtagggttgatggtgtgtttgtttaggttgtacttaattccactataatgacctgtaatggcccccaaggggaaaattctaggtataacgtaggtaaccagaggcatgattgtacttatcaaggcatgtacactcaactgttacctataaatacccccgcattgtacattaacgagacacacttaacaacaccgttgtcctagctcgttgttttgctgagcatcagagcattcctaccttccattgcttggggccacttgaccacgtgttactcgggttccaaaagtagcgtacaacatatgtgtcccctacatcttggacatgtgtccggtcggtctgcaaccacgtcggtgacacgatccagtcctacacgtcctcacgctcattagtgcccctaggtgtcagccaccatggctggacatccatcttctctagtcccttagttaagactcaacgctcgtccttgacagcacccagtcaattggtacgaacccgc

SEQ ID NO: 167260 - DNA, 448 bp, Zea Mays
gaaaatggaaaaatctcacaattgtcaagaaatggctacatgatgacacgaagggtaaatgccccgaccaactgctcgaaatcatatgggacctaaatataacagaaactaggtgcacaggattcacatccttcaagctaatgtacagtgttgaagcaatgacgccacaagagttaaaattcaaatctctaagagtataaaacaactcaatgtcggggacagacgagcctgcgaccaaatatttgctcaaggactataggaccgaagctggaccacaactggagtgtgaaaaatctacacaagttttatgtttaaaaggacttcgatcgtaagggccttaactgcccatgcagtatttaaaacactaaacatttgggtctatacacttttcctcataaagggggtgaggtttttaatgaggcggagccttgtaataaaacaacgaaaa

SEQ ID NO: 167261 - DNA, 441 bp, Zea Mays
tttgaacccgactggggtaacattggggggcgtgtgggcgataggcccaaatacttgcctctttgaaagcgagagcaattccgtctctattgcttctttccatttgacccaatctgagcgcttctggcactctgccatagactttggttcaggatcctcagcaatcacaacaacgatcatagagacgaaatcagtgtcgacaattgtagtctttcggttatataactctcccatctcaacatagtttatggcaatttcttcaacttaataatccggtttattgtgatttcccaagttatttgaaaccagttgttccgaagtccttgcgcttttatttgtgcgcacatttgcactaggacgttcaccttcaaggtgtgttactgctggaacatctgaaaggaagcgtgttgcattctcttcagtaacttgctggtgcaggcg

SEQ ID NO: 167262 - DNA, 493 bp, Zea Mays
aagatgtgggatgttgtcggggtggtcgcgacggtcgaagacgattggaaattccaaccaccaaaggtatcatgggattgtcggctccgctgcgtggacttctcgatgagcagcctttatgcgatgcttgtcgtcgtaggctcggccccgccgaagatcatgaggcaccctattgactcggggaaatctttggtggggacttcttgctttgctagctttgtcggctcctctggccttgccttttttgtgagaggtatggagataaagcgcttcaggagctcgcactcctagagcttgtgttggatggggaagccatgattttgacacgacgagtccatcagcttctggaaatggtcgccaccgttcttggccaacgacctagttggtcgatttgctgtgacgatttcttcaccgcgccgaggatggtggttccttcgacacttgttagggtgctcacgacgttccctcatttctccgctaggctcgccagcgt

SEQ ID NO: 167263 - DNA, 839 bp, Zea Mays
ctcaagtttttgctgaagctgaccccaatgggtgtgacccgactaatgctgaccccaaagggtgtaacccgactgatgctgaccccaatgggtgtgatccggccaaagctgaccccaatgggtgtaccgtccgcattgttgatgaaaatgaggaagaggaggatgaaacccctttagttcggaagaacagccgacgctacatagccagcggggaaagtagtggtgttccttctccagctttgtctaccctcattggtctgcaagaattgtctctagcaaactttgatcagactcttgaagacatggtcccataagatctgttgtcagagcctgcagatggtggaatgatggatatttgtgctgatgtgcctgatgccgggctagagttatctcgagcagcgtcccgtgcctcgtcgaccttagagtgcggtcttaagggtcaggaggctggtctggattgtcctgctctcatggaagtgggtgaaggtccttcagccttagaggtagctgttatagagagctcggccctcaaggatggcgctagcgcttacccagccccgagggtgtcaccggggatgatccggctcggatgggtagcgcgagctatgacccagcccccgagggtgtccgagttggttctccatctcatacttccatggatgtttcacgtagggtcttctcctccgcattctggttgcatggcagcagctcaagcttcgggtcaggaagtcgccttagaggctgacgctcctgatgacagagttttgatttctgctgatgacactgacttggtcgccactgatgcattgcgggttgctccgggtgttgatccttcatcg

SEQ ID NO: 167264 - DNA, 574 bp, Zea Mays
atgcaccaacatattttatgtatatgatgaattctgttttcatgcctgaattagacaaattcgtagtggttttcatcgatgatatcttggtgtactcaatgaatgaagaagaacatgtcgggcgtttgcatgtagtgcttcaacgtctacgagagcaccacctttatgccaagttgtcaaaatgtgacttttggctaaaggagatcaaattcttgggtcacactatctctcaggcaggtatagctgttgatcctgacaaagtgcaagaggtgatgaactggaagccacccatgacggtccgtcagattcggagttttctgggattagccggttattatcgaagattcattccggatttctctcgaattgcgaagcccataactgagatgttgaagaaagaagccaagtttgtttggggtcagaaatgtgaagatgcctttcacgcattgaggcaacatctgaccacagcaccagtgttagcgcaacccgacaacagcaagccattcgatgtgtactgtgatgcctcgggcactggactgggttgtgtcttgatgcaagactaccgagtcattgc

SEQ ID NO: 167265 - DNA, 423 bp, Zea Mays
ggaatcctttcttacatgcatcaaagcacacatagaacctttcaaatacttgatcttcaaactctggattcagatacaccacaactgtactgctagggttacttctcaagagctccaactggtagtcatacaccttgctgtactctcctttcatggagtccagagcaaccttcaggaccaatgcctttgccctcttgcacttggacagtgacacatctgcaagaaggtcttttagaacaactttctttatcaactcaactttccatgttggattgtccttaatctcactgaaataatgcttcgcaattatgttggaggttactaacctattgtctctcctaggtgggcaagaatgctcatctataaaagtgacaaccttaaaccaatctgatctggtagtcttggaaccatagattaaccatt

SEQ ID NO: 167266 - DNA, 1293 bp, Zea Mays
cagtctttttcctggcaattaataaagcggaaaggatgggcaagaaagcaaaccagcagcagcagattagattagcgccgtgccggaaaaacagctcctcgcctctctcccccattccccggtacctgaataaacagtgtgctggtgcagtgtgactgcgagcgcgtgggtttagtcagagcttcgcggatttcgcgggtgcttcggtcgttggactctgatggccgcggcgcggcggcaggccgcggtgctggtgctggtgctggcgttggtgatgggcgcggggttggcgccgggtccccgcggatgcgctgcgcagggggaggctgtggtggtgtccagctacgggcagggccgcctctcgctcaagccctacgactggacctacctgcgcggtgagacagtttcagggttctataatctcggttttggctttcttacgttctccttcttcggcaaagtttcgtccatgttataccttttgtttggtgtaggtggatgttagttttttccggggggtttgcacgatttttttatttcgttttttgtgataggatcataggaatcgtggtgatgaaactagctgttgtggaatttcaccgaaaacgcgacacacgtgtcgcggaattctatttgcttaacagttcggtaggttctgtttagtttcggcctttcagatgctactttcccgcagctgtggaattttggtttagttttggtgttccgttctgacacgtctttgctacaactgaatactactgtactgatttgtctcatccgtggaaattctatttcattcattccttttttctggatcgatcttttaatactctacttcctgtacgaacagttgagctcccgccgtcgttctcttctgtcaccatggatttcgctgctgacatagaccttgtaagtgaaagattctgtcatctcggccgagcattattgaattattaagtaagagttattttcgctgctatcaggtttattaagtgggtatatgttcgtatttaatactcttagtggtagtaccggggtcatgcttggtatcaagcactgattagtggagtggctaaactgctcttagatcatgcgtgtctgcctatcagttcacatgccagtgtctaaattggaggggaggaattgtggtgttccaaatcaatgatgggtaaaccacttgtatttttggcattttcctttcacattttatgggcagttttgagctcagtgccttgtatatataatgggggtcggagggatatgaaacactagcgtaagttgtgttgtgatgca

SEQ ID NO: 167267 - DNA, 1041 bp, Zea Mays
aggatacttctttttagagggtcccagaacttcactgatgaaatagacgggatgctgtactggatatgcatgcccttcctctgcccgcttgactactaacgcggtgctcaccacgtgagttgtgcaggagatgtacaacaatagatcttctgccggctggtccggcatggctcggcgtggcggctttagcactgccggtgtggtcaagaacttcttcagtgcatcaagaccttcctgagcttcagaggtccactagaacttgtccaccttcttgagcaatttgtagaatggtaagcctttttctcctaaccttgatatgaatctgtttaaagctaccatgcatccagtaagcctttgtactttcttttgtgatcgtggtgcttccatcctcatgatagcctcgattttctctgggttagcttcaatccctcggtggctgacaatgaatccgagcaacttccctgctggcactccaaagacacatttttctggattgagcttccatcggtactgcctcaggttgttgaagaccagctgtagatcctcaatgaagtttcggagtttcctgtcttaatcaccacatcatcaacataagcttctacccgcttgccccagtggtcggctaagcatgtttgaatagctctctggtaagtcgctccagcgttcttgaggccaaacgacatggaggtataacagaaagctccaaacggggtaatgaatgcagttttttccttgtcttcttttgccaagctgatttgatggtatctagagtagcagtccaggaataacagcatagagcatccggcggttgaatctaccacctgatctattctaggaagttcgaagggatcctacggacagtgtttgttgagatctatatagtcgacgcacatgcgtcaatccactttattcttttttagtacaagaatagaatttgctaaccactcgggatgcagtacttctctaatgaatcctgctgcgactaatcgagctagcttggcacgaatagcttctctcttgtcgggcatgaaacgacgcaac

SEQ ID NO: 167268 - DNA, 461 bp, Zea Mays
gttggggaaggcgcggggaacttactggcgggggctaggtcatgataggggcaccggaggggggcggcccacggcggaatggctcggcggtggcgccaaccgactccggcgaggaattaagcgcagcagggagcaagggaggggaagggagagggcaggggaggttccttacctcaaggcgaaccccagggacctcccggtggcggcgaaggcacgtcgacggctcgggtcgatggtggcggacaacgacggctacgcggaggacggcgggtgagcgcgggcagaggaaatcagggagggagaggagaaattggggcgtgtcccgagttgcggacgtcgaggcaaagctcaccatggcagagggcacgacggggatccgatgtcgacggggaaacaagctcagcatggcggcggcgctctggtgtgcgcgcagcgtgggggaggttgaaaaggggttctgc

SEQ ID NO: 167269 - DNA, 539 bp, Zea Mays
gcagaatgcatcggcgagcagctctaccccttgacttaggagagcccagatgtacacgctgagcctaacaatggcgttgggggtcagctgatgaagataaatcccgaatttttccatgacttctgcaatcattccatgcagaggaaatctcaaccctgctttgaagaagctcttaaaaaactacaacttcatcatccttcagcttcgggatagtctcttccccgccaaagcgaatcaaccccttatcggctaccttgaagtagcctagcttcgtcatcatagtcatgtcagcttcagacacagttgattcccgaaaatccagatggctgggcttcgatggcataataacatcataatcaatctctccttcattagcatcaccctcttcaatatctgcttgctcgatttcagcagcgggtgattcttcgtcagcaacgcctgcagtcacaatcaatcctgaccgcctcataacttcggaaatcggagcagtttcagcagcttcggcttcgtctctgtcacgagtaactctagctgtcgag

SEQ ID NO: 167270 - DNA, 747 bp, Zea Mays
aatacaatgccgacgacttggtaaaaaaactgcaaccttttcatctactcgcttctctgctgcttcgtatacttccacaccgacctttcttccatagcagcttctccatctatctcattgatctagatcccaatcccagagttccatcctgctcatatatcctttcactgttcctcgttcctcttccaatcctccttgttgataagatcattgctggtggcaggtgccatatacatcgcgttggattcatagttcaatgccatggtatctgtggcaacaatatatagtggcgtcactcacatggcagcctgtcacatgcgattggtcggtctacacgtcaactctaaatacatcctatatgtctcgactccgagacgaaggtcggcgacaatgatggcccgcttgtctgggacttgttcttggggacccgattagaacttcggcctctatgttggattgagccccttccaccatcattgggactcagcctcctctacgctactaatggcgtccgctcctattgatgcctgctgctgcccctccacctaggggtcgcaggtggccaccaacgggggagttagcacttccgcggtctccattgatagtgcaccgttgctagtggggctcgaaggcaccaccatctggaggcgctggctgctcctctacttgggggcaggcgtggctaggagcctgcttctcacatctcctactattgctaccattgctgtagtggtagggctagagaac

SEQ ID NO: 167271 - DNA, 311 bp, Zea Mays
gagaaaggtccacaagtagtgagagaaatcatccaggatggccagatagtaccagtaatcgaagatgcttggaacaaggaatgtccaaggtcacagtggatgaggtcgaaggggcgagtagcgtggcacaaggaagaagaaaagggtaagcgagtgtgatgcccaagctgacaggcatgacaaagcgagatagtgttgccgcgaaggcaagggattgctgaggtggcatagtctggagagacgtagtggctagggtggccgagacgacgatgccaagtggaggcagaggcagtggagatgagggcgtaggg

SEQ ID NO: 167272 - DNA, 803 bp, Zea Mays
taaatttgtttgaggaaaaaaatttacaaggctgagttttagccagatatcgacggatcaaaccaaacgatatcagattcgatattttaatagacattcgatttagtcgaacaaaaacgaatttcgccgctattatgtgttaaagtccgcactcgtgggcgagcagacgataaacacctggggtgttacagacgacgtaggatttagcgctcttttatgttgtgaattgctcgtcggtgcatccggccaccaccctggtcatgcgcctccgtgagccataggctctgctggaccatcgcatatgaaacctcaccgaatcgaatcacggtgttgcgggccacgtttagcagcttttaattcgagtttggcgcggtggtgtgacgtattggccgtacgtcggcgatgctccgcgcagggcgcaagcgcgccgccgctaggttggttgatgaacaccggtcgtcagatctagatctaacggcgtggtttagatctgcataccccttcggcttgggcaccgctcgaccgttgatctcttgtgctgcggttgggattagattggcgatagcgtttatgatgtgatggtgtggaccgttggatccaccttaggcggtcaggattagattgttggggtgttgttcggttatattggatccaggccatcggatctcgatctaagggtgggcactatgtataggttcggggaaggactcgatataacgtgccgaccgcttttgatcgggcggccgtgatcaaactgtacccattcagtcgtcacttttccacatgaacccctatcctttgag

SEQ ID NO: 167273 - DNA, 397 bp, Zea Mays
gcttgtgttgctgccatgcaaccagaatgcggaggagaagatcctacatgaacatccgtggaagtatgagagggagaacccactcggacaccctcgggggctgggtcatagctcatgctacccatccgagccggatcatctccggcaacaccctcgggggctaggcaaacgctagcaccatccttgaggaccgagctctctgtggcagccacctctaaggctgaaggaccttcaacaacttccatgggaacggagcaatccggatcagcctcttgactcttaagaccgcgctccaaggtcgacgaggcacgagatgctgctcaggataactctaacccggcatcaggcacatcagcgcaaacttccatcattccaccatctgtcggctctgacaaca

SEQ ID NO: 167274 - DNA, 1002 bp, Zea Mays
ctagggggcatcgcacagctgggggtcgagggcagggaggatggggcggcgggagcatggcctcgcctgtggatgccccctgccccttaataggtagtagagaaattacagttttctttaccagttcaattcctgtgctaaggtactggtggaagaatggtcgtagacatggtctaaatattatttaacatgctcaacatgttctctgtgtttgctcgcctgccagctacttattctaatgcctgcctccttccttggcatgtgactattggaggattctacaagaggacactcatcccttgctcctttcgacaattttgttagttgacatgcttgcacgcttgtacctcgtgaatttttagtttgtgtgattggttcagttctacgctatgcccataatctgattatggcctatgtacatccatgaggtgctgttattcactgtgtttctcctgctcactatgtgctggcctgctggcgacctgttttaatgcccgtctccttccttgacaggtgactgttggaggattctacaagaggacactcatcccttgctcctttcgacgattcagttagttgacatgcttgtatctcgtgattttttagtttgtgtgattggttcggttctatgttattcccataaattgattctggaccatgtagcttcgtgaggtcctataatcctgttagtcaccatgtttatcctgttcactgtccgtgatgtcctgccagctacttgctgtaatgcctgcccgcttccttgatatgtgactgttgggggtttatgaaagaggacattcaacgcttactgctctcaacgattcggttagttgccacatgcttgcacacttctacctcatggattttagtgtgtgtgattagttcagttcgacgttatgtccattttccgaatctagaatttttattgtgtgtgattagttcagttcgttatgtccattttctgaatctagactgtatgtagatcagtaataaggattgtta

SEQ ID NO: 167275 - DNA, 401 bp, Zea Mays
tactttgtcataagcagccttcagtaccttgtggtcgcattctaagaccccaacattatgcttcagaacatccaactctttagattgtgtctttgatgaggcacacaaactcttgaggagagaacctttggaggccagtgatttctccagcttcttcaccacatgcagcttgagattcctccagctcattccttttcttttgaagattatccatggtaagcttatgacttatctcaagagtggtgagggaatctacaacactcttgtgcagcccatccaagttgttacgagagatggttagggacgggatctgttcctttaattgatcgatctctgccctcagtttttgtactttgtcccgcagattggaatattctgtgtggtgggtcgacaacatggag

SEQ ID NO: 167276 - DNA, 676 bp, Zea Mays
gagttaagtaagaatgcaagtcaatcgtgaacaagccgagtatctttgaaatctttctttattgatgacatatttccactttacagaatacattgtcgccccagcagttttgaaatacagcctagggataaaactttctgaggtgctttatgttccaggagttcccaacttctgtgccatccatctgagtgaggcgatatgatccgggccgagtgacttctgctactatgaagggaccttcccataagggtgataatttgtgccgtccctcccccgttagaattcggcggaggacgaggtctcctattgaaaagaaccgctgccgcacagctttgtcgtgatagcgccttagagtctgctggtaccgtgctgattggattactgcattcagtcgctcttcctcaagtatatcaacgtcctccagcctggtggcctcagcttctgctatgctttcgaagatcaatcttggcgccccaaacttgaggtcagcaggtagtactgcctccgatccgtagaccatgaagaaaggagtgtttccatgcagggctcggctaggttgggttcttaagctccaaacgacataaggcagttctcttatccattttcctgctaatttttcattcttatcgaagactcttttccggagtgcctccaatatcattccgttggctcgctc

SEQ ID NO: 167277 - DNA, 313 bp, Zea Mays
ggcgtggggtaaggttactaggcctaaagatctaggcgggctcgggatcactgatcttcggcttttgagcgtgtcgcttcgagctaggtggccttggctcaaagaaccgatcactctaagccttggtcggtcctccctgttcaggcctgtggagcggtggaagccttgatcaatgtggcagttgtgtctcaattgggtgatgggcatgacatccttttttggaaggatcggtggctgaatggtagatgcatcggcgagatggcacctgaggtccttgagcatgtccctaagcgtgtcgcttccaaaaggctgg

SEQ ID NO: 167278 - DNA, 470 bp, Zea Mays
cagggcggggcttcagttccctctgcatgagatgataggagaagttttaaagaattttgaaatataccttcatcagttgacacccaatgcaatcattagacttagtgtctacatatgggctctccaaagctagggtatgagtcataatgctaaagctttctgccgagtgcatgagctgcactaccaaacgaaggccagagtggatggtctgcataagaactttggctgctacaacttcgcatatcggaaagatacaaaggccccggtaattggctatcctaccatttggccgaccggttggacaagcgaatggttttacataaacgcggatgagaaggaaagggagaagctaatgaccatggtcatgagtccattgaaattaagcttcaggatgacaaggcccttgtggcacatgcaacttggctccccatgtcagctagccgaagtggaattcagagtggtagctgccg

SEQ ID NO: 167279 - DNA, 695 bp, Zea Mays
tgttgtaagcaagactgtccgcaagctgatccttcgacatcgcagataagacgagttcaagcttcggatagcttatatggtccgccatttctcggcagacatttatctctttattgtctggcagacaataaaggaaatcatcttcgtcatcggtatcatacactaaggaccctcgggggtacttcagatccttggcataatgttgtgcttcgacaacttgctcttctgataattgcttccctgaagcatgtcgcacaatgaattctagctctttggcaggtgctccaggagcaggagatttgggtttctcagaggcaccctctttctccaggattatcggtgcacttttccgaaggtctcgcttcgacaggaacttctgagggtccagcttcagaaatagtctgcgccattccggcctcgtcagatttctttggaactttagcctccgttttaagtgcttcgacaaaagcaggagttgatgttttcatagaatccataacagcatctagcacactggccattctccttttccttggagttgctgcagggatgttcgatggcttcgacagttccgttgcacatggtggactcagtgccttcaactgtcatgctgttttctctagttctggctcttcagtcacatttgtcctagcttcgactggcacataacgacttggctctatgataggagcggt

SEQ ID NO: 167280 - DNA, 1090 bp, Zea Mays
ttttttaaaagaaatcaatggcacatagattagtatactattaaccatagcgtctagaaggtagcaagcgaataaaatacatgtcatcttctacctctcgatttcgacgagcaggggagcagagaacagtggccacaggacttcgggtgcagagaaggaacactaggatgcgctttggcgtcggcatcgcggcacagcacaggaatccatggcatagaacctggcgaggcggtggtgcgatgatgaagaacggcgacgacgagggcgacagctccagcgagctgaacgaacatgagcaatatcaacgacgtgggcgtagggactcatggtcggcgtgtgggcgaagcttcgacgcggtgctgcacagcatggtgtaaggcgcaggtagcgacgagcagcacagcagctcagcgcagcactgacagcgagcgacgcggcagcagcacatggcgtggaggcgagcagaggcttcacaggggagggggacttcagcgtaggctcggtgagaggtctcggcagccatgcttagcgcggcgcacagtagaacaatagagcacatcgcggcattctccgatgaacagcggcgcggcaactaacagcaaggcacgcatgtggccagcaatcagagaagagcaggggcgaggagaaggtggtgagcgcacctcggcttttatagcaggagaggggagagagaaatgcagccggtttgaaggagattgaatgtcaataatggtggtaacgcttgccatgattatgaggaatcactgcagaacgggctttaatgtgggggaggagaagaaccgttgcgcataggcgagggaggagagtggcttgcggccagattcaatactccattgatgcggattgaagaacagcgttacccacacgaagaaacagtcgcggcggccattaatggagatggagcacggtggaagaaacggtcggcacaagtgggagagagaaggcaagtcacagcgcagcgcggatgcgaggggagaagtcgcggcggtgtggttctgcgcgggatccccggcaggcgacgccggcttctgttcgtagagtcaacaggagaagaaagagccacaaggaa

SEQ ID NO: 167281 - DNA, 622 bp, Zea Mays
aggagcaacatcagaagaatcttcggccagcatatcaagcatagcacttatttctacatcattaggatccaaaggcacctcaaagtggacttgtcgttcatcatcgggaatttctccaattgaaacaaccaaagcactaacttcttcagcagagggtcgcactctaaggcccaaactgccatcagcgacaggtggattcgacacaaaatgagtaaaagccttggaaggaggcaagttccaggccgagtatgcgactggggcaccaacatttgataccttgcctctaagaatcatctgaagtcggttcaccaagtctacagagggaatccttctgtcggtaacccgagtcgggtcagctaggcctctgtacagataagccgggtaagccctgtccttcaacggttgaatgttcttgaaaacaaaatcagcaaccacagcctctgcagtcagacccctctccttcaacagtccaactttagctagcaaagccccagcctcagccacctcctgatctgtgggggactcggtccaactcggggtacgaatgtccggctgtctccccgaccatgggggagagaatttccgtggttctcaatgataaaccactccaaacgccatccct

SEQ ID NO: 167282 - DNA, 416 bp, Zea Mays
gctccttctaagggaagcccaaagccataagaggaaagccattagcccaacaccacaggaagaagagttggaccaagaaatcagggatctagaagctattcatcaacaagtagagagaagaagggagaagatgcttcggctggctgagctctagaaaaagattgatgaagcagccaaagagatgtgtcacatcactcaagacaacgaacaagggcataagccacaatagagagagcttcgtcaagaaagccctagccatgatgacatatggtatgatgactttcatcatgataccattgcttttgatgatgccccctagctacagaattgcaggctacccgatgaccaccttcatacaaaccaccccagcttcccatgtatgatggtgtcgggtaccgtaattaggggtaccccca

SEQ ID NO: 167283 - DNA, 540 bp, Zea Mays
acggatgtaaaccattgcaaaagggtcagatccagcacgtaatcattgttgtcgaatgacatcaatgaaccgtcgctaatactattaagcgttttatttaaatagcaagtagaacttgtagtatttagctggctttcctgtttaatatgagcgacatcagttgcaactggcaacatcttgttgtccccaaatgatttgcagtttattttgtgcaaaatggtttatatttttccaaagtctatcaaccagttttatgttaattgctggcaggaatttgatgcggtagtaggtgacataacaattttggccaaccgttctctatatgtggactacactcttccttatactgagtcaggggtacgcatgctggttccagttcgggaccagagacagaagactgcatggacattcctagaacctttaacagctgatctatggtttggaactggatccttcgttgtcttcacaggttttatagtttggtttatcgagcacagaacgaatcaggaattcagaggaccgccagccagtcaaattgga

SEQ ID NO: 167284 - DNA, 311 bp, Zea Mays
ccacctctgtagctgctgcaatgtataagtacaacggctcccctggctctggatctaccagtattggtagggacacaaggtgctgcttcaactcttgaaaggcttgttctacctcctcggtccaagagaatgggccggacttccgtaatagcttgaagaagggtagtgccctctcggcccagtcttgatatgaagcggctaagggcggccagtgacccgtaagcttctggacgtccttgattcgggccggaggcctcattgtctcaattgctttgatcttctctgggtttgcttcaatgccccggtgcgaa

SEQ ID NO: 167285 - DNA, 614 bp, Zea Mays
caaagtcgtggcttagctcgctctccaccaccgcgacgttgatgaacatccttgaagccaagcaccagtggaagagcgccgctcccataaggccgcgcacctccagtagaggaaagacaagaccggtagcaccggcccgctagggaggacaaaaggcacgaactctctagcagcaagttcatcggggtggatgacgccggcgcaaacccttccgccgagcaccgtcgcattccatccaagcaggcggtataccatttcgagcactcactcagtctgggcgcgctcaggatgaagtcacaaggccatggcaaactacggcaacgcgaagtagagaccttgaaggcaaaagggcgcagagagctcggaggcgcaaggacgccgtgagtgggagagaagcaaggcatggctgctactcgagggatgaacccctctttaaaggcagactcccatgctctcgcctcgaagcgccgcgagaagcctcccccgatgcacactggggtatccatcccatgacacgggggcccggtcccacaggtcatacagctggtgcactggccttcgagtacaaaggaggcgaaccgccgcacaggaagcgtgctactgccccatggtag

SEQ ID NO: 167286 - DNA, 424 bp, Zea Mays
caagccggtgacgacgagtagagtcagggggtgcgagcagtggacgagcggaacgggtgggtgcagatagattgaactgggactaggagaattggcacgccttgttatatagagcttagctagccattgtcagttgccatgcacgcgaatagatagagaccgatagatactagcatcgatctagacacggggacatgcatatgctagctccacgagccctatgcatgcatgagtattgagtagtatagtctctttcggacccaggagtgaaacttaaaaagttatacatggattcattagtctaattaagtttaacgggccaaagcccaaataaaacaccatgcacgatacgtaacagaacggaaatcttgtcgcacgatgccattcttcaagtaggcaattgtagtgatgaaataaataatta

SEQ ID NO: 167287 - DNA, 732 bp, Zea Mays
ggatgaccagggccgacctggctcagttgtttgcagccaagcccaacgcattttaggagcccaactcagttcagtgatgctcactttgaaagtttctggactaagattgctgatttcttagatgtggtggctgattcttggatgcagccagttcagacctcctgccctctaaagcgtgtatccttgaagcttcgaagattggccaggtccttgtagtcctgggggcacaagaatgcaggcaatgtgaagtcccaattggctttagcaaaggaaatccttcacagactcgaaatggctcaggatagcaggctgctgtcttctgaggaactatggctcatgaggaggcataagcaacattgtttggccctcgcttctttagataggacagtggctcgtctcagatcccgtgttagatatctgaaggagggggatgcaaacacttctttttttcacttgcaggcttgctaccgcaagaaaagaaacttcatctctagtttgacagtcggagatcgggcggtcacctctcatgagcagaagcatgaagctttgaatgatttctataccaacctgttgggggtggctaaacatagagaattcacactaaacttgggatcttgccacagggacatgggcgatctaggtgtattggacctccccatctcagaggatgaggtccggtctgcagttttctgcctaccttcagatagagctccgggtccggatggttttacc

SEQ ID NO: 167288 - DNA, 498 bp, Zea Mays
ggacaagtgaccaacatcttccaacacttagtttgctctttcagtttgcccatctgtttgaggatgataaggtgaactaaagtttagcttggtatccatggactcatgtagtcttttccaaaagcgtgaggtaaattgggttcctcgatctgatacgatattctttggtactccatgcagacaaacaatcctttacatgtataactctgctaactgggttcctaagtaagttgtcttcacaggtataaagtgtgccactttagtcaacctgtccactataacccacattgaatcatagccatctcgcgtatggggtagtccaactatgaaatccatattgatttcttcctatttctattccggtaccttgagaggttgtagcaattctgctggtctttggtgctcggttttaactgacccgagccgtacatcaacagatccacgatctggattaaatcatgaagggttatcccgggtttcaatcgcaaccgtctgtgc

SEQ ID NO: 167289 - DNA, 540 bp, Zea Mays
aaaacgcctcttacccctaagaaaaaccttctctcctttcctcgatattaacagacccttcttttctcctaccagatggaaggctcttgggtcattaggacatcctactgctcagaggaggaaggatttcctcaccttacggagttgcgcgctacacatggggatccgcaagaagcccgaatatgtctggaaggaataccgcgaaaatggagtggaaaaatgctctatggcggtctacctgggagaaagccaaagttacccaaaccaccctcccttccaagtcaccttcatcgggcaccgctttccagacacttgccaaagtgttgcccgaaaagcccttaaacagctatgccaaaactacagcagagagatctttgaaaccccccttcgttacttcccacctagcaacaaaaatacccccacctggaggaaaagacttcaggccctatcagggagagaccctaccgaggatgaccccaccatcgtctacatggctggatacctccacaccctcgataaccactatgatgaccttttctc

SEQ ID NO: 167290 - DNA, 345 bp, Zea Mays
caacatgatgcccccaattttatcagctcacatcgacatgcagtgcctaaactcaatcagagtttggattcactctgtgtgcatcaaacgcatacttctagccccatgtccccatgttaaatccatagaatgcaaaatgttcatttttatgacaattcaacaatttttcaattaacttctggaagcggacgctaaaccaaaaattagcaatgatatgattactgcataacctataatccgaaacaaatggagcaaatgatattgtgggcttcacgtgcagatgtaacatggggactggtatgctatagcctcctatgtttttgcacacaatggatgaaagaggtg

SEQ ID NO: 167291 - DNA, 500 bp, Zea Mays
gctcgcgcgtgttttttccctggtcacccgaaaattttaagaattcgggtatcctggttccctgtgggtatgggtggtgatcaaatcggctgtcataaggtttccgatatgattgtcccctagggatcatgcttactccgagcttatctcggaacgccccagctatttcctctctcactatatcaatggcagctgatgtgagaccaccggctctctggtcaaacataggtggggttggctggatattggcatgttgtcttcccccattggtttgagctatgtggtgcattgccgtttgccctatatagctcataggattgatcgttcctttccggccttctaggtggggccggaaagctttcctgggctctgaattttgtattattgggctgatgcatcgcatagtgtgatgggaagtgttgctgggatgggtgaggattcgggcaacaatcctcctcaaaaaggtcatgcgcagactgtccggacattggcccggaccg

SEQ ID NO: 167292 - DNA, 996 bp, Zea Mays
gttcgaccaccaagaccctgacacatgaagagtggtgccatatcatgctatatgtattgaccaaccttgaagaggtgacaccatacatggaacaattttttcatgaattctagcgttgatcaagggacccaactctacaggaatatgatacctttcttagaaagggtgcgggaaatggattgctcgattttatttcctagttcaaacataaggtacgtgcttagtttgtcaaatagatctgcctatgaactcaattgagcgtctttgaacttctgaatacttgcagggacaaaaagatccgtctatgagtgtcgagttgagacaagtaaccaacagctttgcttatagggtcaagaaatattctaggtatgatgtcaatggatactgttttcgcacaacaagctacgaccaaagtcggcccaatcgaaaaacatgttctagagtctttacgcccggccttgacgaggtcggttattttggacgaatcggagaaatatatgaactcaattttcatggttccaaacctcttactccagtgatattcaaatgtcattggtttgacccttaagtgacgagacgaacacattataatcttgggatagtcgaaattcgacaagattccaccttaccaggagacgatgtctttatcgtggcccaacaggccacacaagtgtataatctcccatatgtgtgccaaacaaaagaacattttaagggttgggatgttgtgtataaggtactgctgcatggtaaattacctgttcctaacgatgaagattataacttagacccggacacatatgacggagagttcttccaagaagatgggctagaagggtgatttgagatagacttaaccgaagccatcagaatggaagtagatattgagatggttgtcgatgagaaggatgatgaggtgcaaaatgagaatgacttagtaatacttgaaggcaatgacattaatgtagaacttgcgccttcagatggtgttgacta

SEQ ID NO: 167293 - DNA, 640 bp, Zea Mays
aggtcgccagagctgcgagcgagctcgggagagttaggcgtggtacagaggaggcaacgaggaagatggacgtgcactagggtgggctttatagccgtggcatgggtgtgggcacggggcggccgagggcgcgtgggggttcgcgtgcggcatgctctggacgcgcccccgagtgtcagccccacgtcgaacacgtgggggtttacttctgccagggttcaacggccgatttggttgacttagcgtgctgatcttagcaaaacccccgtgtacagtctcttctctgcaccaaatcctaccttttttatgttagttccaagcaaagatatggtcagggtagagagatatgggggtgagaagtcggctctgtccgagctgtccacaccgagacaaaagccatgccaagtcgtgtcaaatggcttagggttgggttcaaacttttccagggtgttctaggggtctttgggcgccattttgtcaattgggccataaggttttgaggttgggaacaaggtgaacatgtttgatctttgaaagagggtcggttttgaacttgagaaaaacctgatttttcttttatgttcttctctttggtgacctttttggggtttttctgaatcctttttggggtcactctctg

SEQ ID NO: 167294 - DNA, 373 bp, Zea Mays
cgcaaacccatggaccaagcgagcacccatccctcggccacgacctcgaccacgagcacgtggcatgggagatccgcgaccaggagagggacgcgaggcagcagcggggtgagaggaagatggatgatggggaggctggggaggtggctcagtggaggaggcagggcctccagaccgtgagggagcccgcttcgtacgagcagctgggttggaggaatcaacccagtagggtacgtagcgagagtgtttgacgggtttttcgaagtgggtctgagtgaccacttcgatcatcttcatgataaagggtgcatgaagacaccctctgagaggagaccaggaagcacagacgatctctttccagatcatgtcaaac

SEQ ID NO: 167295 - DNA, 457 bp, Zea Mays
gggggcgatggcgtagtggtcgaaggtgaaggctgggcccgtcatctctaggtttggtgtatcacataacgctgccagatccactcttgccttcacgttatcctttgacttatcaggaatgtccataattgttgcccatagtgcctcagcaacattcttttcagtgtgcatcacgtcaatgttgtgtggaaggagcaggtcgtcataataggggagccgagtcaagccagacttatgtgtccacatatgttgctcaccatatcccacaaaaccaccttctgtattggccactaggccatctatctgttgacgaatttcggcaccagtcatcgttgcaggtgggcggtctgtcactacgacacctttcgtaaagttcttgatgtctatgcggaatggatggtcagcagggagaaattgtcgatgtttatcgaaggacgaatatttgccaccctttttc

SEQ ID NO: 167296 - DNA, 399 bp, Zea Mays
ctgagcttgaaagccgccagatatgcttatcctcttgatccgggtctaaggcccagtctgcagtgaggtcccaaaccttgaggaagtcagacaaaacattaacaggatagctcctctaatgtcatgtacccagttccttgaattgagggcatcatggacattcctcattttagctctagaagagaccagcttgaccaaatgaggggccagctgacttagactctggccatcgatccatttacctgtccaaaacaaggtgtttttaccgttgcccaccaccgaagagaccgctgccgagaagaaggccttaaccgtaggatgatcatttattttaaaggatgcccaaggcttgccagtatcagtttttttcagccagagccaacgtaatctaagagccca

SEQ ID NO: 167297 - DNA, 637 bp, Zea Mays
cgaaggggtatgatataatctaatctcagtcgtccgagaaccgatcgacggcgccaggtccatcttctacccccagcgcgacagagcggtggcgcggcatagaccgcgatggccgtcatgggcgagcccgactaattcgcgcggacggaccccgacgaccatcccgaagacctctaaacatgacattggatcaacacgaatattacggtgcattattacctgtcggtgtgcagaggagagctccaatcgcggcgaggggtggagaggggaggtcgagaccgcgtcggcgagaaattcgcagtgcactattgtacttcgcaccaatctactcgcccagccacggcgcatagcgcaaaccgacccaccggacaccagataggagcccaagcgaggaggaagaacaaggtcgacggtggcggcgaatctcccacggggcaaccctctcttcaatctgtggcctccgctggaactagcagtagcagtgcacgcgagatttcaggtcagctaaatcggggacgacaaggggagtttgtgatggcataacctatatggtcacggtttagcgccatgatttgagccacgaagcccgagtccgtggagcgattccgccattgtcgggcgaatcggttgagcgcct

SEQ ID NO: 167298 - DNA, 716 bp, Zea Mays
agcaccttttgatcggtaaaaacaaaaacatattgttatgcctttgccttgagcattcaactacatctcctcaaatgatgaacaatggacatccataagtgtagccaaccatgataccttttaccatttgtccatagcatgaagttcctccaccatcatcatcaagccactgaatcaatagcccatatcaacacatggcttggtaattctataatgatatgatccactccatgttatcacatgtccttcttggttcatcaatctcaacatagcttgctcttcaccattgctttatgtccatcgatgctaagtccttgctcttgcttcaccgccacacggtccctcacacatgaacctttggcttgcccttcacactagccactcggtccattgaagccaagccatatctcttgatcttctccatatagacacatgacaccatgtcatgtcttcatatgcgatgagatcctttatcacactagttgagcgtctcaatatcaccaagccacatcaccaccatggcttaaataactcacactagtgtacctatggactaatcacctgtgtatctcaacataagcacttattagttcatataagttgtcaatcaattaccaaaaccaaacaaagtctcacattagcccaattaagcccgtatggcgagcccaaagttatggcccactaaaccagcagcccaacacccccattcatttgcc

SEQ ID NO: 167299 - DNA, 450 bp, Zea Mays
tctctagtaagcaagtaggtaccattattacttcgatgattagagtaacttccatttagtcgacttcttgaaccaccccattttccatcagatctcctattttcgttgtactcatccttgtcatcctgcaagatgatgatcaatgaacacatagtgaaattcaaagagaataatatgtttccaaaaataaggattggttattaaggagaaactttaaaccagtaaggatacaacatcacctttgctaacatttcacatacagaactaaacattgtaacatttcacatacagaaaaagaaattgctaaaaaaaggtcacctgctgtaagagtatagatttcgtcgaggatccatttcttaaaaaatacttctccagcaagcatgatccattcctgatattaagttttcaaaattataactaaagcaataagccttgtaaacctcactaaac

SEQ ID NO: 167300 - DNA, 556 bp, Zea Mays
gccgaggggtgctggcggccggagaggggaaagaactctggcgccgtgggtgcgtgtccacagtcgtggcaagctcaccggcgttgatttaacggttgtaaagaggcacggtgacgcgacagaagtgctcggatatgtggcacacaaccgagcgacggcggttcaccggcgagctaactgcctccagccgtaaagcagaaggggagccacggtgagtcaccggagtgacccccaactcaccgtcggcgaggatccttatccccgcggcgttatcaatccaccccgagcgcgaatcctggcgccagtgacacgaatcacggcgaggcttcatcggcggtgagatgactgagctggcgttctgatccccccgatagcactgtaccatggaggagttcagttaaatgaacctgacagccaaatttgaagccaagttttctctcgatttctgatgataactcataccaagctctgcagcaaagttgtagagcaatatgccatctacaatattgccatatgatgttgccccaaaaagccactgcatctagtttgaaattgg

SEQ ID NO: 167301 - DNA, 747 bp, Zea Mays
cgctcgacagaaggcaaccacacatgcccggagaaacctaaggacttggaggtcggagtcaaggcttagcgtaggactccaggtccgtagtctttaggaccactcccacataagagacctagaagccttcccaccctctctcgcctgcttgtaacccgcttgtaacccctactacgagcatcgagcaacagaggtgtcggtagtgcgagccaccgaagactggatgtagtggcgttatgcccaaaccactataaacattgcgccaaccgaacacaccatccggagccctaaacgcgcacatagaaatttacttctcggagcggaggttcgaaacatcaacagttggcacgctaggtagggggcttgcgcattctcgacgaacattcaatgctccaaatggccagtcgcgatgccgtttggatccctgcgcgacgattcgcttcgagaaccttaactttgtccttgacggtgatgaggagagggttggggccccaaaagcccgaccccttcctcccatgactctcgacgctaccatgagggcccatggcggcccctgtgtcattctcactcctgaaacgatcgcccgttttgggagtctcaacttcatcttcaacgacgaaggaggggcgctacgggtgccacctacctgtccttctccacccgagaattcggacgccattgtagaagcactcgttggcctcagcctcaccccgcctaggcaacttgctgggcaaagatcgtccttgc

SEQ ID NO: 167302 - DNA, 840 bp, Zea Mays
cttttgttctttctaggattctcacttttggtcccttaatcaaagtatgcacaactgaaagtccttctaggttctgactttaatactcaacttgatcttatgaccatgaccattacttgagctaggatatcttgagccttctggcttgagccatctaaatctatatgaattactccaatggcatcaagtcatgtctttaaatgttgtggtcttcaatatcacataacccttcacaacttgatgaacttgactcttgcaagcattctcttattcaccttcacttttggtacttcagtcctcttgaccttctcccttgattagtacctcgaggttcttccttgccttagtcctcggtctaccaaactatctacaagtcgtgttcattgattatgaacctattcaatgttcgctcttcttatttaccatcttcaacttaggatcactctcctcagcatgacttctcttgagctttattggttcttcgagtcaatgcaagtacttgcttcttctccctagctttggtacctcagttatcctagccttctccttttgctttagttctttgaagccccatttccttattgtcttcactttgtcaagccttccttaagtcatgacatcctgagtgtacattgaatattcttcttgtgatacccataatccatattttaactcagcttatatggaatatcacttttacctcatgtgttgaaccttacatgcttttcaccaaattcttgttccacacccttgttagtcctttaattgtgttggcattcaaacaccaaaacctagaagggactctcaaatttaaaataaataaaataaagcttatttaaa

SEQ ID NO: 167303 - DNA, 373 bp, Zea Mays
ctttcacctgcttctgctaccccagcccccatctctgcaactttgggtggtacatttggatgtagctcatcatataacacatgcacctcctcgtgcaagatgttattatacacttgcaggttttcaaaggctaggctcagctcatccacctgggctcgggcagtcgcctcacaatcccaggctatggatcacgaactcatagcctagtcaatagcctgatcacgctctacaatatcccgctgcacacgttctacttctcctgacaactcagcgatgcggcgactagcacgcacacgctccctacctccatggcgcaactcctcaaacacacactcgactctagcctccaagtctcctatgggatcattgctcc

SEQ ID NO: 167304 - DNA, 390 bp, Zea Mays
gtttttttaccgtgcacgtaaatatagtgtatgcctccctctctttggtgcgcgcgtgccggaggagagccagagcagaggtcggagcatgcagtgttgataggtaggctggccgtaggtggcataggtggcgaccgccgcaatatcgatggccagagcggtgcaggccagcccgcccatccgacgatccagtgctcaaccgagatgcagcagcaagatatggttgggtatagctagagcgcagttggccaaccagaacaatgctaggtgagagagggaagtggtggtgataggaatgtggcagggattcttttccatctcgtgtcctctggttgacagatatatatgtctgctgctctcgctatatagagggtcggcctgccctactag

SEQ ID NO: 167305 - DNA, 454 bp, Zea Mays
ccggccaccctctagcgtcttgagccgctgctacattccttcccgatacgtcgtgcgctccgctaggatcggccatggggtttgggtccgtacgtacggctcgggcgcattttttttccctttttccatttcagccaaatttctggaacctgttcgggtttcgttgtgggggcgtgcgcgaggttttagcccgttccggtttgttgatacgtgtgtactcgatgtggggtcgcagcttggaatgcgatgggttgggtggcctggcctcggtgattgtggtttgggtggctcattagtgtttagcgttgttgatcactgggggttagggtttaaagcccaaggttttgcggccttgcgggtgccgattgcggggattgctagttcgttgcgttgtctacctgttaatcgcagtaaatcgccctggttttggtgggtttttggttggttgtttgag

SEQ ID NO: 167306 - DNA, 970 bp, Zea Mays
gtccagatggctttaatatggactttgttaaaaaatgctggccggtgattgcccctgatttctatgatcttttcaataaattttttgaaggatctctctgcatgcatagcattaatgggtcatatgtgactctcactcccaaaaacagctctccggactcagttggtgattatagacccatctccctccttaacacgagtgttaaagtactgacaaaaatcttagccaatcgtttgcaactggtgatcacaaagctagtccatcagaatcaatatagttttatcaaggatagatcgatccaggattgcttagcctgggcttttgaatacatttatctttgccacaaatccagaaaggaaatggtcattttaaagcttgattttgagaaggcatttgacaaattagaacatgcagctcttatggagattttgaggcacaaggggttcggtgataaatggatccactgggtttctatgattcttggttctggttcttcagaagttcttttgaatggagtccctgggaaagatttcactgcagacgcggagtcagacaaggagaccctttgtcccccacttctttttgttcttgcagctgatcttctgcagtctattgtcaacaaggcttgcgattgtggcattcttcgtcttcccttaccaaacaattgtggtccggatttccctatcatccaatatgctgacgatactattctcataatggaagcttgccctagacaacttttctttttaaaagcaatgctcaattcttttgctgattccactgggcttcatgtgaattaccacaaatctaacatttatcccatcagtgtcacggatcagaaaatggagatccttgcaaatacatttcattgcaaaattggatcaatgccctttacttacttagggcttcccttgggccttcaaagacccaacttgggtgcttttctcccccttatccagaaaattgaaaa

SEQ ID NO: 167307 - DNA, 553 bp, Zea Mays
gtggaaccatgcccacgcccccgtcctcccagcggcagacccctcgtaccattcgcgctctgctcgaccgttcgtgtgtcaccctccccacacctgactgtcatccccgtcacacccttcccttgctcgtgtgtgggggtgcatcttcgtgctccatggcctccatccaccgccaccctctcccgcatcgcctccatgctcaccgaccatctcaagcctcgccatcgtcggccttgctattgtgtgcccccacccatgccgacccctacatcgtcttcccgcatccgtaatctgcatctccatgtcccagcatcaccagccttgcttgcgcgtgggctcgcatctctgtgctccatccaccgccagtcgtgcccgcatctcctgcatgctcaccgacccctgctcacaggtaataaacactgcctatgccaggaacccctcgagcagcccctccacaacaaacgacatgcttccatggctgagcgcctcgccgcatccgtgcacgatatgcgcccaccacacgcgtgcctcgcaacagacgccatgcttccat

SEQ ID NO: 167308 - DNA, 397 bp, Zea Mays
gcgggagggcgagagcgctggagaaaaggcagagtagagagggaggagggcgattccattttatagaccatcagggagaacgatgagacacggagggtgatgaccatgaatggccatgaacggaggaaataaaggacgatagctcagtacagagaaactgccagcgcataatgggaggggagagaaagcaggcgtgactcttcactgcaggaggcgaagaggcgatgcggcgcggtgctggacaagcggcatgatgcggtcgacggccattaatggcaagataatgtgagagggagaaacggacgtgttaaagtttcataacgacgaagacaaacggtcgtggacggctcgacttcatggcacggtcgtcgcgcgggtggtgcaggggctcggcgcg

SEQ ID NO: 167309 - DNA, 735 bp, Zea Mays
gtcgtgatttgacaggaactacagtttcatatagggaaaccatgaattatgaggtcaggtagatatacttttagacaaaactctggatagcatactgcatatcatattaacgttttgtgaagagaggtgtggtgttcagatttgagtgaatgatgttttaaaaaataaaaaatctgaaaagtgctaaaatagctcatgtggtacaatcaatatacaaaataccgcacatgccacattgcccacaaatattgattcaactacaactaaaactctatttatttacggaaagggtgcacagatgataaagctacagtcaattggagaaaaggaaacatatataaaacttagaaacacaaacctaaaattgtcagatgaacagccacacgagtagttctctattttgtaaaccaagtctgtttgtgtttcagagaggtgtggtgttcagatttgagcgctcagagaggtgtcttccatctcatactcgagcatcgcaagatctgggcggggctggcgcgtagaatgagaagtactcgagcatcggaagatccgggcggggctggcgcgtagaatgggaagaatgagatggcgaggtggtcctgcacttgcgatgggatgcgggccgatggccatggcagcgaggcgtggattgcgtttagggcgcggaggatatgggcggggcatccgcggtgcatgggaagaaagcgatgggtggtcctgcgcgtcgttggcactaag

SEQ ID NO: 167310 - DNA, 449 bp, Zea Mays
ccaggcaaagcaaatgtagtggcagatgcactcagtcgcaaggcctcctgccattgtttaaccatgaggacttctgacattacattgtgccaggagatgaaaaacctgaacctgggaatgattcagcaggggacttcaaatcacttgaagctggagtcagtcatcctacaaaggataattgacgcacaaaaggatgatgagggtatgaaacatgtacgtgagaagataagggctggaaaggcaaattgtttcagagaaaacgaccaaggtgttgtatggttcaacaaccgtatagtggtgccaaagaatgaagaagtccgccagcaaattctagatgaagcacatcttagtcgctattctattcatcccggaagcactaagatgtatcaagatctgaaacagcattattggtggacgaagatgaagattgaaatcacatgctatgtggc

SEQ ID NO: 167311 - DNA, 1751 bp, Zea Mays
tattactccatattgcaagtaggtcctcttacattaagctatttacaccaacactccccctcaagatgggctaaatatattcaacattcccatcttgttacatgccaattcactatccttaggtcctagaccctttgtaagactatcagctaactgattacgagacttgacatattcaacttcaaagccccgctgtcaatcttttccttgatgaagaatctatcaatctccacatgtttcatacggtcaaactggactggattatttgctatattgagcgcagcaacattatcacaatgaagtaacattgtctcatctttcaacacccgaagcactttcaaaagacctttcaaccacatcatctcacatatagctaaagccattgctctatgttcggcctcaacagtagaccgagaaaccacaccttgtttcttgcttctccacgaaacaaggttacctcccacaaacacacaatatccagatgtggatctccgatcgtctctactgctttcccaatcagcgtcacaatagccctctagattcagatgttgatttgatctaaaccacaaccctttgcaaggggttcccttcaggtacctcatgatttgattgaccaactccatatgtcttgttctcggatcatgcatatacctactcaccacactcactgcataagcaatatccggtcttgtatgacaaagatatatcaaccgacccactattctctgatatctttctcgattcaccgggtcacctgactcggcacaagtttggtgattcttatcaatgggtgagccacttggacgacacccaagcattcttgtatctgtcaacagatcaagaacatactttctttgagagaggatgattcctctagatgatctagcgatctcaatcccaagaaagtaacgaagtggtcctagatcctttacctcaaagactctacttagctttttcttcaatttcttaatctcctccacatcatctccagtgatcactatgtcatcaacataaacagccaggatggtgatataaggaccctgatgtttgtagaagaccgtgtgatctccattgcactgataatagcccatatcacataccgcccgcctgaatctgtcaaaccatgcacgtggtgactgcttcaggccatagagtgacttcttaagtctgcacactttcccaacagtctgttcatttgcaaacccagggggaatctccatatagacctcttcctgaaggtcaccatgaaggaaagcattcttcacatccagctgatgaagtggccaaccaaaattggctgcacatgagaataaggtcctcactgtgcccattttggccacaggggcaaaggtctcatcatagtcaatcccatatgtctgactatatccctttgccaccagtcttgctttgtacctgtcaacctttccttcaggagtctgctttaccgtgaagacccacttgcatcccactgctttctttccttctggaagatgaacaagttcccatgtcttgttcttttgaagagcaaacaactcttctttcatggcatccttccactttggatcatgtttagcacacctccaatccttcgggatagacacattttgtaaagatgcaatgaaggctccatatgctaaagaaacactagagtatgagacatacttagcaatgtcatgttcataacaataacgagaagggggttttccagcatttattctaggttctcttctttgtgcaaggggtaagtttac

SEQ ID NO: 167312 - DNA, 785 bp, Zea Mays
tgccttggcgtgcccgttcatcgccggtgactttgccgcggtgaaagccacgcacctcttgctccagtgctctcccctctctccggtcgccagcgctccatgcccaaattaggagccaccgccctcgggccctataaattgagcgtgccatcagctccgctaggtaattacacacccagcgcaccaacccgtgcctcaaattatccaccagagcgcttcaatttgggatttcccccaaatcagtcaagaacaccgcgtgtgtgagctcgccgtggccagctctccacatgtccgatcatgtcttcctcactctcgtttcaacatccctgtgtgctgtagatgcttagcagcccggccaattgaactagatcacgctagatcactgggaacacttcggatcgtcctcggtttgcgccagcaccgtggacagagtgattgagagccataaccttgcaattaagtgagggaaagggtcattaggagtagaattgggtgtcagccacaccagaaccctagtcattacattttccggtcggtcttggctcgccggagccactgctccaccatccacggtcgaggatcgcgggttgtgaagaattagaaagtgatgggacttggtgtaaatgtcagtgacacattgaaatagtgtgcgggactattaacgggtttttcaaatcaccagggttcccagtgcaaatccggcaatgcgggcgcacgcgcgggcgcattctagctaacttggcccggctcgggctaaattgagtctgatactgtatatgcttttc

SEQ ID NO: 167313 - DNA, 339 bp, Zea Mays
cgtttctatgatatttagggcattgtattcacatgagacggtattagagtacaactagtggatgaagacgttattgggctagcaaatgaccttttgtgaaagcaggattcctataatcccctctatttaacgcatacctagatggtatttgtgtccactcaagtaaaacaccgcacatcattatgccacatcgtttctcaaaataaaataaagaccatgggaaatttagccaaattgtgtgagagaactttccaaacatagattaaggttgtaaggcactttttcccaccatacgattgctaaaaagcaggaatataaaaaattcaaaacaatagatca

SEQ ID NO: 167314 - DNA, 520 bp, Zea Mays
tcgattgctccgttagtagggcatagtggtcaccccgagttaagtaagaatgcaagtcaatcgtaaatgaactgagtatctttgaaacctcttttttattgatgacatatttccactttacagaatacatcgtcgtcccagcagttttgaaatacagctagggataaaactttctgaggtgttctatgttccaggagttcccaactttggtgccatccatctgagtgaggcgatacgatccgggccgagtgatttctgctaccatgaagggtccttcccataagggtgataacttgtgtcgtccctcccccgttagaatttggcggaggacgagatctcctactgagaagaatcgttgtcgcacaaccttgtcgtgatagcgccttaaagtctgctgataccgtgctgattggattaccgcgtttagccgttcttcttcaagtacatcaatgtcctccagcctggtggcctcagcttctgttatgctttcgaagatcaaccttggcgccccgaacttgag

SEQ ID NO: 167315 - DNA, 560 bp, Zea Mays
gtttggcgcctgtgacggtataagtgcgcgtgcgtggcttggttggcgccataagcatatcgggctgggggattttaaggatccgccgccgccaccggcgttactcgccacgtcaccgctgggtacccgattggggagccagagaccttcgcaaacacacaccgcgcataacctggtgctcatcgtgcaggattagtgcgcgaggctcgggtaatcgctcaccgtcgctgtatattgttgccgagccgcacgcttccgtggctaggcacctccgcccttctatccactggtaatttcccctcccttgtgcttgtcctactcctccgatcgtgtttcataggtccatgtggggatttgtgcgcaggctttacgctccggcgagcttggtcgccgctgggcaggccagcgccgccgtggtcggccagctgcttggggaagaaggccgttcggccatctgatcttaacggacgggtgcgattagatggagagaggagctagcgtcagccgtaggatcactggcttgtggtcctgatctgatccagtgtaccccttcaccccgc

SEQ ID NO: 167316 - DNA, 388 bp, Zea Mays
cttgaatatgtcttgagtaagaatttctcccaatacttcggttggagaggtagtggtcaactcacccttactaacatggtcacaatagtgtcatattttttcggaagagatctaaggaacttgtgagtgaaatccacatctggtacattaaaaccaagtcccttgagctcgttccctatctcatttaagcgattaaacatgtcggacacactttcatcttccttcatgagaaattgttcaaactttcctttgcatacatacaacattgcacttttcacaattgtggttccttcatgaatttccattagctttgtccaaatctcatgagcggttgtgagatttttgatgcagttgaactcatttatgtctaatgcatcatagaatacat

SEQ ID NO: 167317 - DNA, 599 bp, Zea Mays
cttcgccaaagttccaggcgcacgagtcatgtccgggagctttgcggggtgcctggttaaggttttgtggccgtccggggaggtggcgaccgcggtggtgtccgaaattcgtcgccggatttcgagttccgctgtgcgccgtgggtggccggttcacctctgcgaatcccggtgagtagcatcctgcgcgatcccatactgttaccgcttcgtgctactgctttcggattaaagtttaggaccggtaatcgggtcggtgcgatcgccggtcatggcgcaccgccgtgggagcttcgctccgccaccggtgtccgcccagttggggcggagatcgtgcgccgtcggatcggtgcggacggctgtgattagtccgcgcataccggttcgcctgtttcgatccggtccgttcatttctgatctggcgcctagagttcattgagagaaacataaaatctggacggttgaactaggatctaaaggctaggattgcttaccgtttcgcaggagctcaggcctaatctaggtcgtcggctttagatctgacggcagagactctcccgtaccccttcaactagcgcaattgctaaaagaaccctaag

SEQ ID NO: 167318 - DNA, 1684 bp, Zea Mays
cctggaagctccgctggaaacacgtcggcataatcacacaccacacggatctcctgcacccgcaaggcagtcccactctccaccatggagaagaaaattcccgacttcctggatcgacggtccgaaagtaattgggtcaacagggagagagtgaactttggagaactccccaagaataccacctccctacccgacagcgcctgcaatgacattgtcttccaaaaacaggatataactgcgtgatactgagttaaccaatccatacccaagataacatcaaacgaccccaaggaaatcaccacgagattagctgaaaagacctcatcagcaagaatgacggaacaaccctggcagactaaatagctacaaatggatccattagcagaactaaccacgattggatgacccatcctttgcaccgaaagaccagcacgcgacacaaaatcctccaaaacaaacgaatagctagcgccagagtcaaaaagagcatgggcaacaaacgaatcaactgagaccgtacctgtcaccatgtctccctgctctctgccatccgcagagggtagcacataagctccagaaacactcgcggaagaggaagctcccagagtgaaattaacagaagaaccccacgaagtcgaaggatgaggcagtcgtggagctccgagctgggatggtacatgagcagttggtgcaggagtaggcgtggccaggtactgagggaaacctggcataggcacaaactgaggagtcccaggcatatagaactgctgctgaggggtggtacagaaaattgctgctcaacgattgacatcacgttgacagtgccctatgaagaggaagaagtcactggctcccaattgagcttcccattgggattcctcctacacaccacatccttgtgatcctggctgcagatagagcacctgccactctactgacactcggcacgacgatgcgcttcaccacaacggaaacacaccaaccctagcctgggcttaggaccaacccgatacctctgagtactccctcctgaagtaccctgattcagaggattttccacgataggggtggtggcactggtgttacgactttcccctcttgtgggctgaaccctcagtgttggccctcctcgcgtcctggccacgagactgatcaacacccgaagacttctgagattccatggtgtactgatgctgcatctccacgcccaatgcctgctccaccgtagtacgaaaatccaccaacagaaaggtgcccagagcatgcctgatagaaggttttaggccctgacggaactggctcgccttctccaattcattgtaagccacatgagaaacaaagcggaccatcttgttaaattccacttcatactctgtgatggacttcttctcctgcttgaaagacaaaaaatcaatcttcattttctccaggaaggtgaccgggtagaacctcctctcaaactgcctaatgaaaacgtcctaggtaaggactcctggtgaggaggagtgagctgcctgcacgcctctccatcaaatttgagcctcccccttcaacatttgcgtgccaaaacaaacacgatctccatacacaatctcgaaaacatccatcttatcctccacataagtcagccaatccgctgcctcaaccagagtaccactgccatcaaaggtgtcgagcttcatgc

SEQ ID NO: 167319 - DNA, 326 bp, Zea Mays
gatatctaatcaacggctcggatttaacctaacgaaaggcattcaacacttaatcagggtcgttcattctgatcggatggccaggattctacagcgctgaagggggagactctgattaaatcagagccacacattctccgatcaaaggttagcaaactctcttccctcccgagctctggtcatggcggcgctgcccaccgcggcgtacgctacatcgccgattggtgattccgcccaacgatgggactgccccgagtttgacaagctctacacgaagctcagcatatggtggactcaattcaaaaccctgaacaacctgatgggat

SEQ ID NO: 167320 - DNA, 742 bp, Zea Mays
cgagaccagagagtccaccatcacacaaagatcatctgattcctctgtgggggacatgatagaggaattcagagatctcgataaactaggacaggggtttacatcggccgatcctttggaggagatcgacataggagatggtaaaactccaaggccgacttttgtaaacaagaccctagagaccaatcctagaaataaaatgattggtctattgaaggaatattcagattgctttgcttggaattacactgagatgccgggattaagccgagagatcgtagagcatcggctgcctattaagtccggtttcagacctttcaagtagaaagctagaacatttcgtccagaccttctcccacgaatcaaggacgaaatccactggctgctagaagctgattttattagaccttgcagataagtagagtgggtcttcaatattgtgccggtggagaaggagtcaggtaagcttagaatatgcattgattttcacaatttaaatagaacaactcctaaagatgagtatcccatgcccatagccgacacattaattaatactgcatcagtgaatagaagtattagctttcttgatggtaatgccggatataatcagattttcatggctgaagaagatgcatctaaaatagcctttatatgtccaggcttcattggtttatttgaatgggttgtcatgacatttggtctgaaaaatgctggtgctacttatcagagggctatgaatttg

SEQ ID NO: 167321 - DNA, 1367 bp, Zea Mays
ggggatgccatgtttttccacaaacttagcgaatataaaagaatgggatgcccctgaatcaaaaagcacagtagctggagtaaactcaacaagaaactcaccaagcactactcctggggcttgctgggcttcttgagcgtcgatgtggttgactcgggctctgccctggtactgagtccggctcagctggttgttggaaggaggtgccttggaggtaggtgccgatggaatcttggggccattcaccgagttggagtaggtcggcccgggagccttcaactgagggcagttattcttgaagtgactggggtctccgcagtgccaacaggcattagctggcggttgattgcttgcaacggagggtgcctgaagggagctctgactctgctgactatagcgtgatggagtgggtccaggtgatttattgaagcttggtcccctgggtggaagcccaaagggtcgagctctctggtgacgttcttgttgttgagctcggagaacttggatttttctcttgagatgccctttttcttcctctttcgccctttccacttggatagccttgttggagaggtgagagaaggtgaggaagtcttggctggcgaggatggtcttaagttcgggtcttagtccttttcagaaaacgtgccatcttcctagactcggtgctgatatcttcaggcgcgtaacaggccagctctgtgaacttgtgcacatactcactgactgtcctcccgccttgagttagctcctggaattcatcttccttgagttgaactattccctggggtacatggtgctcacggaaagctatttcgaattctgcccaggtagcatctctgacggcctcactgaaagtgtcccaccatgctaaagccattcctgaaagttgatgagctgccagttggatacgctgattttcggggcatccttccagcttcctcttgatcgtgcgaagccagtcatctgcatcgaggggattgctggaccccgcgaacgtgggaggcttgagtctcaaaaattctcccatcctgtcttgcggccttccaccacctgggcgctggttttccagacttcgagtgaggacttcaatgagtcgggtttgattggctagaacttgggccagatctagtggtaattccggaggtgcggggaggtgggtcccatccccttctccgccagcctctcctgctgctcctaggggaaaacttgctccaatcccggaggcggtaggcgtggttttatccgaagccatctgccagggaaaagagttactaccatgcatatgccattttttttactagttactttattcattacatcaagccattacatcacccagcacacggctaccataggttcgttac

SEQ ID NO: 167322 - DNA, 659 bp, Zea Mays
ccactacttcatcactcttcggtgctggggtggtctcttttccggcaaatcggacaagtttgctttcagcttcccccaaagtagcctagcttcatcatcatgggcatgtcagcttcagacatagtagatttctcaaaatctagatggttgggttttgttgggatcaaaatactataatcttcctcatctccatcaatattttcttcttcagcaacggtctgttcagcttcggcaataggagtatctttgtcagtagttccatctgtcacaactagacctgattgtttcatgagttcagaaattggtgttgtctcagtgacctcggtttcttctccctcacgagacacccttgcagtcgaacgcactctggccatttgatggatttttcgcggttttgacgaagttgatggttgtttcgcaattttgacaaagctcactcttctgacgaagttaactctaaatgatgaagtgctcacttgagagcacagtgaaaaaagcttcggctatggttaaattttttaacagcacaacaatgcaatgacaatgaatgttgtggtaactctgcacaaacctgtctgtttatatagtgctgcaggtggaaggtgaaccgccaaatcgcccgcacccgctgaacggtggaccacttggcgcttggaagg

SEQ ID NO: 167323 - DNA, 687 bp, Zea Mays
gaacaatatgactatcaagaatcgatttctgatgccgatcgttgaagagatactggatgaattgtctgacaccacattcttttccaatcttgacatgactttcgggcatcatcagatctgcatgggatagtatgaggagtacaaaaccacgttcaaaacgcaccacgggcactaccaattctgggtaatgccgtttgggatcactaatgccctgaccacgttttagtgtgccatgaacttgatcttagctccatttttatggaactttgtgatggtgtttattgacgacatacttgtgtacaatcctagttggcaaactcatttggagcacttgaagctagtatttgaagctcttcgatattatcactcttaccttatataagttgaagaaatgtgcttttggtcgacgagagttgatttacttgggtcatatcatttcaactgagggtttttccatagatcctcagaagacaacagccatgaaaaactagcctcaaccaactaatgtaactgagctccgagggtttcttggcctcatagggtataaccgacactttgtgctcggttatggtagtatagctcgatcgctgactaagttgcttcagaaaggggagtttcactggaccgagcaaccaacactagcatttaaccgactcaaacatgctatgcttagcacaccaattttgg

SEQ ID NO: 167324 - DNA, 600 bp, Zea Mays
cgggagcgggcatggtggtcttggtcgggggcgactctaggggccagcgaaccgccgcggtgcctctactggatcaaggatgagtgccgggtggccggtacttggcgggagaaatggatatagcagtcggctgaaccggtgttgagaggttgaagacgacaagatagccatggatcgtaggatggacggttagggtattgtttggtgcatctgttcggcggtgtcgtgttctggtccgggctgtgtgcacgctggtggaccatcaggagagagagagttctggggagagcgcggcgtctagtataggcggagtgtatggggaggggtctcaagtagaagatgatcccggtccgttggttctcagatgtgtggatgagagttagttaggttgtagcatctccatgatagatctgggttgtcgattggcgatcggatggttgccctagaaccctagcgcccaccgtcgatcctggaaccagcgatcgttgagagaaaggccttgtatggttgggccggtttaatctggaccacagatctcgtatccgacggccgaaaggcaacgatacctcttcagctgtgtcggtttacaattgagcccct

SEQ ID NO: 167325 - DNA, 403 bp, Zea Mays
catccatgcaaggcatcggtgcttttgttatgaaggccaaagcaccgggagaacaagccttaataagttaatgagaaccccattagaaccaattgaactcacccaagaggaggggagtccaaatagggtttagggttagactgcacatgcagatacaacatgtgcagatggtacatggaaaccactccaatgacacttcaccctctggtcgttacttatacctctcagctcagcaatataagccagtgaatatggctgcttgccagcggtatggcactacaaaagattttcactgcgccagaaaaactgcactgcactgcgggtgggagtagaaatgggcctgcacgttgggccacctgcattgcctacatctgcagaacacatgattcacgctcgagcacag

SEQ ID NO: 167326 - DNA, 620 bp, Zea Mays
cttgagcacatgtccctcgctttctctttcgaccactagtgcagcgctaaccacctgggtggtggctgcaacatagaggagaagggtttcaccttgtttgggcgcaactaaaaccagcaacgaggctaggaaacttttatccgatcgagggcctcctgggccacggtcgtccaagtgaaattgtcgcttttcctttagagtttgtagaggaccattccttttcccccgagtctagataggaaccggctgagcgcagtgacgcacccaaccagtcgttgtacccccttgaggttctggacgggacccatgcatcagatggcttctatcttttcctggtttgcctcgacccctcgatccgacaccgtgaacccgaggagttttcccttggggaccccgaaaacgtatttctcgagtttagtttgattcgaaacttctggaggttggcaaacgcctcttccaggtccattatgaggtcattggactttttggatattacgacgatgttgtccacgtagacctctaggtttttctctacttgatctgagaaacagtgaagtatgcatctccggtacgtagctcctgcgttcttcagactgaacaacatcgagaggtaacaaaat

SEQ ID NO: 167327 - DNA, 439 bp, Zea Mays
tcataatagctcttttgtctggcctgagcagcttctaagttctttttaatgactctgactttctcttctgctttaagaaccaggtcaggtccaaatatttccctctacccagcttgtgaccaatttagcggtgttctacaccttctcccgtacaaggcttcgaaaggtgccatctttaaactggactggtagctgttattgtaagaaaattctgccaaggaaagacacttgtcccaatccttcccatagtgtagcacacaagccctcaacatgtctttcaaaatctgatttaccctttctgtctgaccatctgtttgagggtggtatgctgagcttcgtattacgtgggtcccaagtgattcatgcaattgctcccagaaatgggctacaaatggtgctcctctgtcagacacaatagttcttggtattccatgcagac

SEQ ID NO: 167328 - DNA, 1319 bp, Zea Mays
gataattcaaaaaaataaaatggttctaacagacacaaacagtcttgaactcgtgacctgtagttagtcccaagcaaccgtagaccaccatggcacaagcacgttttgttagtagtgggatcaaaatacatatatgtactgaacaatcgcgaacacatcaaaacacctcttcatcttctttctgcagatgtgccgccgccagtgctctattgtctctgtagatccgcccatcgccccgtcgccgtatgaagctgctgtggccttcctcctactctgaccctacgctagctctcgtcggccgtctgatattgtggatctcgcctccctaatctgctacagtgttctctttggttgttcatccttagattcagcaatcagcagggactgggagggcttcaggctttcacacattttctacagcaggttactcttatctcagcctctcactcttcccttctattcagatttgtaagtgcaattgaggattagccgctgcagtatgataattagttgatttgtataagcactttcatatatgagcagcagcggagctgaccaatgctatcaatttattatttaatgggtactatctatctcataatcacctcttagcactgttttatatataattcgcctaaaattatggctgtccacggacagcaccaaaatgacctggctccgcccctgtatatgagtttgttctgtatttcattgttagattggtattctcttaatttacttgttactgcattacttaacaactaacagacctatgtgtgatatggtacactaagtgtttactacaatagtgatatttgtatgtccctgtacttatttcagcatctgtgatggacaagagttgggtgagcaaaccaagaacaagtgatgactataagattggtgtgacccaattccttactttcgcatttcataatgttcgaccgggtggcaaggttaattgtccatgtgttcagtgtaaaaacaagtcaacaaaatgttatgaagaaattagaacccatttgagatgcaacggcattctgcaaggatatactatatggaatcgacatggagaggaacacggttcaacaccagctccatttgctcacatatcatcaagcacacacaaccatgctccatttgaacgtccttgtacttctcctgcacaaactggaagcaagagaaatgatgacatgcaagggctcctaaatgcagcatttcctatggctgataagtatgatatagtgtccagttcagatgaagaaatggatggtattaataattactatacaatgtccagttcatcagatgaaccaatagat

SEQ ID NO: 167329 - DNA, 696 bp, Zea Mays
tccaatatcattccattagccctttctacctgaccgttggctcttgggtgtgctactgacgcatatttgatctggatgcttctttgttcgcagagatcaaagaattcagagctagtgaaattggatcccaagtcagttataatgctattcggtattccaaacctgaatattatatcttgtatgaattccactgccttagctgaagtcagagaagcaatgggtttgtactctatccatttagtgaatttgtcaatgacaaccaacacgtgagtgtgtcctccctgagctttcttgaagggtccaatcatgtctagtccccagcacgcaaatggccatgttacgagtatggtctgcagttgctgtgctggtaaatgttgctgctttgataagaattggcaagcttcacacctctggactaactcggctgcatcactctttgttgtcggccagtagaaaccagacctgaagaccttcccaaccagagtcctggatgctgcgtgtatcccgcactgtccggcgtggatctcatctagcagttgcttcccagtaaccgaaggaatgcacttcatgaggactcctgctgcgcctcttctgtacagtgtatccccaatgagggtgtagtgggctgactgtcttgcgatgcgttctgttgcagctttatcatccggttcttcttcgttctttatgtatctgatg

SEQ ID NO: 167330 - DNA, 571 bp, Zea Mays
tcgttgaggctgaccaggatttcgggatcccgatggcctccaggggtatttacaagagcgcaagcctcatcctcatccacacgattgggtcatcagctgcctaatcatagaccaccgtgccaagtgaagcaaccaaacaagccgggggagagaaccgatgccgctggggtcgacctgcgcgcacaccggcgatgaggcctcaacgaccgacttgagctcctccttgggatgcctggagtttgcccgtgacctcaaagggtggcgcttgtgtcgggatggcgcagaatttgtccccgaaggccaacctccgccacgagtcactgtagggcgtatgcgacattatcggtgccctcatcgtgggtaagatcactcccatggagttcgccttggtctcctatgtgcgcagcatcatcagaatcataggttaccgacctatagcgtgggtcgggaaatccgaccatgccgccaccgttgacttgtgggcggcggcgttggtgctgtcagaggaagaaggtgaacctagggccgtttgatccactggtggcgataggattagatctgggggtgtgtc

SEQ ID NO: 167331 - DNA, 1142 bp, Zea Mays
gccgcacgattagaaaccgagcaccaggattaaaccccaaactgcgtgaatcggtatgcaatcagggtccctggatctcgatccgacggtccgcgtttaatgagttcaagatcggatctccaccaccggataccgcatcaacggtcactgtttgtttcggctgaatcggtatcaggatctaatcctactcgttgccactggaatcaacggttatgaacccgtcatcaacacccggccgccagcccacggcggagcgcgcgacccgcacggcggtgcctcgccggagtaatccaaacgcgctctcgggttgtccatttcccatcctaactagtgcaaaacgaagccaatagaacaacaagggtatagacggtgattttaccggcgattaggctccgaggaagatcatcctcgctgcgcggcggataggcgggtccggttgagcaccggcgtgaaattagccacttgcccgaccacgctagcgcccggggtgaccacacgcggacaccggcgaatgcgacgaagccaccggccaccttgccaagagcagacaacccccggtggtgagtttcaccggcggcggaccgcaccacaccctcgctcacacggaatggtggccgactggagcaacacgcacgagggcaggaggaggggaagtcgtgggtgcactcggcttttatccaccgagccctcggagttaggaccgtggcctaactcgcgcgaagcaaggaagggatccgcgcatggcgctcgggttgttgacgcgggcagcgagatgacaagtgggccccgcattccagtgagatagtgagcgtgagcgcgagaggagaggttgagcagtgggccccaggtgtcgatgcgcgagagcgagagggagaaagcagtgcgcgcgggtggtttaagtgtgactggcgcgtgggccccacggcgcagtggccgaccgagttgggctgcgcgggtgaggaaagctggggtgggctgaatgggttggctgccgacccaaccgagttttggtcctttttcctttttatttcatttctatttttctttattcccaacttcaatttgaattcaagttttaaattcaaaccttgtgcatactttgtctcgtattatattgtgaactttaagaaataccactttgg

SEQ ID NO: 167332 - DNA, 584 bp, Zea Mays
cttcactttgacgccatgcacaagctcaataagcggggcatagtgcatggactggcccacatcgagcacatccactagccctacgccaattgtgtaaccacaaagcggaagaggagttcattcccatcataagcaaagcgatagatgaaggggctactagacttgttttttggcgacatgtgcggttccttcatgtcggcgacacacgatggtaagcagtacttccttctattagttgatgatcggaacaggtacatgtaggtggtattgctcactgccaagagtgacacactcattgctgccaaaaaattccaagcaaaagtgaaggtatagactgtttgtgtgttcgtatgctacacactaacaacgtggttgaatttagctctgttgagttcaagacaaggagtactataccgaatacggcgtcaaacaacaacacgtcgtcatacagaccatagcagaacgacatcgtcgagcagcggaacctgactaatgtcatagtggtgcgtagcctactgaagagttgaaacatgcctacgatgttctagggtggggcggtcaccaccatcgtcttcctgttgaac

SEQ ID NO: 167333 - DNA, 560 bp, Zea Mays
ggtcccaagtgatttctgcaattgctcccaaaatcgggccacaaaaggtgctcctctgtccgatactatagtccttggtattccatgcaaacgaactatctggtcgatgtagatttctgcatacttctccgtcctgtgggtggtgtgtaccggcatgaaatgagctgacttggtcaatctgtccacaatgacccaaatggaatcatggtgcctggaggtattgggcaatcccacgataaagtccatgcaaatgtcctaccatttccaagatggtatgggaaggggttgcaaagggtctgctgccttcaaatgactggccttgattctctggcaggtgtcacattcggatatgtacttagcaatttccctcttcattctagtccaccagtataaggatctgagatcatgatacattttgttgctgccggggtgcatggagaattttgaaaggtgagcttcatgcaatatcttctttctgagctcagggaccttgggaacaaccaatcgatctccaaaccagagaattcctttgcagtcctgacggaagcatttgtattttt

SEQ ID NO: 167334 - DNA, 738 bp, Zea Mays
tgcctcattttgcgcaagctcacctctctcgcgctctactcttgcctctcacgctcgctagagttctgcggccacgctgccagccgtccagcccgctagaagtcatgccaagccgtcccgagcaccgtctcgaggagagacactcattcccgtgctcggtttctctcagttcctctttgtcttagccaatttggcctcaccggtgttaggccacgcccgtgcggtgactggccgatttagccctgccctgtgcccctccttcggtccgtaatgttcctcttaccctgccggagctagtctaggccttagcacgtcctcaaccccctcccccccgtgcggaattcctcgccagagttgcccgacccgcctggagcacctcccttcgtcgttctccccatttctggtcccgttcttgcggccgaaatcctgccagtgagttcgccggaccttcttcacccattccagccctcacctgcgaccgcgtctatctcgcctccagcgacctcgccgctgcggagggagcaacgccggtcatcgagctgtaaaacccccgcgcgccccatcgcatccgtccgtacctgatccaacggttcagatctgtggacatcggttcgcgtccgcgcactctgcccctgggcccggctggtcagcccgcctccctccccagtcgctgacacccctggcccccttgtcagtgcttgcctgcatgctcccgttatgctcgcgctcagatctaat

SEQ ID NO: 167335 - DNA, 434 bp, Zea Mays
gtgatacgtgcttattcagctccttcccttagtccagatgttgcgattttgggatggatacgccacctcctcgctggatctttgccgacagtcttcaaatccgccctgagtttcccaccaggcaaggaattgctacggaaacgcatctgtggaatgtaggagttagtggccgtatggggatggcatgaaccgggagacggagcgagcagatgaggatggaatgggggcggctccgtatccctagtagggaatctctggtagatgcccacagacgtgtcgaacggctcggagatgactcagacagacaacctcatactctatcgtatacacatcagtattgttgcacgtatacacatactcaatactctctcgttcccatcgtttaatttttctaaacaaatgccatatagtatttgaacatataccatgaacaa

SEQ ID NO: 167336 - DNA, 651 bp, Zea Mays
gtctaggaaaatttgttatatacatttcagttcttgctacagctggtgtggaaattgaagaggcaggcaatctatttgtgccactaaaggagcaaaacagtaagaagagtagcactgtcatgatagtaaaaatctcaaaacaagctagagttcaatattgaaaaatgtcagttcatgtatggccaaggcaattgcttgcaaggaaaacggaactcttcaagaaaggttcacacaagaatggtccacaataacacaatatgcagattgctgagtagtttgacagaacttaaacaggtcagcgttgacacgtcactctgtatcctggctgaatgaaaacaagcaaccaatcaaactactattgcatgtacatatgttggctatttgggcctggttcactgatatgagtgactatgctgaagcaggaaaccaatcatgtgctttgtgatccaatgaaacatacagtggtagcacatccttgttgatcaagttccaagtaagggaactgagaaaataacagaacagcagggggaaaacaatcgtctttctcttccctcccccttttctttgtcttcctctccctttcccacaagtgacatcatctctaagtgcagacaagtcaccctgattagtaaatcccacaaaacattttgc

SEQ ID NO: 167337 - DNA, 811 bp, Zea Mays
ctagggtggttctggggtcgccgggattgggtagagagggagaggatgccacggcaaacttagtggcggggaaaaggccacgaatccgaggacagagaggggagaacggcggggagaaggcctcgggcggaccggaggagctccggtgagggattccggccacggggagggggcttgaggcgcgctaaggcctgggaaggcttcagcagatgcaggggtgacacagggacctacaccggggcactggaccgggctaaactggccggccaccgcgtggtcacggcagaccgccacgggcgagcaccgacgatgccaaaattggccgagcacagagcgaaattggggaaattaagcacaggcaaaggtgtttcacctcggggcggagctcggggtggcatggtgtggtctcccgcgagctagatggctggggaagcaggcgcgggtctccaacggcgtctggcggcgtgggcagagcgcgatagagggcagagctgtgcgaaatgaggcggggaagtgagtgtgggcgctggcggggctctaagagggagctaggacatgtgggtgggcgtcgtggccgagaattccggcgatgtgcgcaagtgcgcacgagccggtccacggcgggtgcgaggagggcggaactgacagggtgggtccacggcacacagagagagaaaaggggcacacgggtgcaacggcttagtgcctggcagcgtgggcccatgaggcagagagggaagagcggtgcggagggggaaacaacgggcgccgacaggtcggccccagcgggcagcgagcgagagagagagag

SEQ ID NO: 167338 - DNA, 1197 bp, Zea Mays
tttgggccttagagtgcgaccctctcccgaagaggttagtgctttggttgcctcacttgaagaaattcctgacgacgagaggcaggttcattttgaggtgcctttaaatccaagtgatgcagaaataagtgccatgctggatatgctagctgaagattcttctgatgcagtccctgctgaaacactggcggtagcgcccatcccagaggctagcgaagctttagacattcagaagtatgacaatgttcgtccgaagcgttctcgccgagccaatcagcctgcttctcctgctgacggaaaaaaaacagaagaagagacgtcttcgttgagtgtctagtttggatcaggatgctggtcctttcgttcctgctgctgaagaagtgccagtgcctgcatttgctgaaactgatcccaatgggtgtaacccgcctgttattaaccccaatgggtgtgacctggatgacgctgaccccaatgggtgtgacctagatgacgctgaccccaatgggtgtactgtccgtgttgttgatgagggtgaggaggaggaggatgaaatccctctaactcggaagaacagccgacgctatattgccagtggcgaaagtagtggtgttccttctccagccctgtccgctcttgttggtctacaagaattgtctctagccaactttgatcagactcttgaggatatggtcccagaagacctgttgtctgagccagcagatggtggcatgatggacgtttgcgctgatgtgcctgatgctgggttggagttgtcccgggcggtgtcccgcacctcatcgaccttggagcgcagtcttaagggtcaggaggttggcctggcttgcactgttcctatggaagtggttgaaggtccttcagccttagaggtggctgcctcggagggctcgaccctcaaagatagcattggtgcttacccagcccccgagggtgttgccggggatgatccggctcggatgggtagcgcgagcgatgacccagcccccgagggtgtccgagttggttctccctctaacacttccatggatgttcacgtgggatcttctcctctgcactctgattgtgtggcagcagcacgtgtttcatgtcgagaggtcgctttagaggtcagcattcctgatgacagagttctgacttctgctggtgacactgacttggttcccaatgatgcattgc

SEQ ID NO: 167339 - DNA, 855 bp, Zea Mays
gcaaaggtgctgcagggtgggaaaaacctggagaatcagacgtttcgtcagggatgggcagctgggttgctggttgttgtgcgggcacaggatgggctgtgcgggcgcgtggtggttgaggtggcagcgcgcgcggatagcaagggaggagggcacctggaggaaaatcagtagacgaaagctgctgggaaggtgccgaagaagggcacacaattgcctctttgaacggaaaggagtgttcatcgaagagaacatggcgtgaagtgatgacgcgcccggatgcgagatcgtagcagcgatagccacgatggtccgccggatatccgatgaaagcacagacggcggatcgagcactgagtttgtgtgcagcagtcgctgtagtgttggggtagcagcggcacccgaagacgcgcaggtcgtcgtaggatggcggcgtgccgaaaaggagctggtggggagttgtggaggcagtagcgcggcatggacgccgattgaggagaaacgtggcagtggagagtgcctcggcccaaaacgctaaaggagctgcacaatgaagaaggagggtacgcaggcaattgttgatagtgtgtagtatgcgttcggctttcccattctgttgggatgtgtagggacaggacagacgaagttgtgtgccatgagcggcaaagaaggtgcgcatagcataggagtcgaactctttgccgttgtcagtctggacagcgagaataggcaagcggaattgggtatgaacgtaggcaaagaacgtacggaggacgtaggggacgtcagatttttgacgcagcgggaaggtccacacatagtgagaaaaatcatcaagaagaacgacataatatt

SEQ ID NO: 167340 - DNA, 756 bp, Zea Mays
tgcttcaccaattatcctagcacgaaaaaagactggtgattggaggctctgtgttgactatcgtcgtttaaatgctctcaccataaaaaataagtaccctttaccagtgatagatgaacttttggatgagttacaaggtgctgtatggttcactagtctcgaccttagctccggttaccatcaaatccaaatggatcccaaagatatacctaaaacagctttccagactcacaatggacattttgagtatagagtgatgccatatggagttactggaggtccagccacttttcagctcacgatgaattcagtgttgtctccccttcttcgtaaatgtgttgtcgtctttatcgatgacattttaatcttcagcaaatcttgggaccttcacctacagcatgttcgaacagtcttttcccttttgcagcaacatcaatttaaagtcaagctttcgaagtgtacctttgctcaaacaaagttatattaccttggacatgttattagtcaagagggagtggcgacagatccggaaaaagttgctgcagttcagtcttggccgaccccaaccaatgtcaaagagctccgcagttttttgggtttagctggttactacagaaaatttgtaaaaaattttggcatcatatcccgccctcttacgaatttgttgaaaaagggagaactttacatctggcattccgatcatgaccaagcttttcagctgctcaaacaagctctggtgaccgccccagtccttgc

SEQ ID NO: 167341 - DNA, 859 bp, Zea Mays
ttgactcaaaacggtacgcgcctcctgaccactggatccgtgatccacggccccaaatcccccttaacgaaccgataggctcattctaattagggctgatcacttgagatcccacacccactacttcgtcttctacccccaacaatagagcgcggcgagccccaattgcccgcggcggcgcaaacgccggtgaggtactcactggtccgctggtgctccaacactcaatcccgatggtgctacgcatagaggaggtcaaggtgaacctatgggtggcttccttaccctcgattacgtcgcgatgatcccttcccgcggagtagtgcggatcataacgacgccacggaccctggcaagcgattggccatcacccggtgtcgttcacgcgcttgattggaacatgcactagactccacaacctccagtgaaccttccctattcctctttgatggttgaattccagcgagacgcggaagagttcgtgaaggatctctctcccctttctctctctcaggtgcgtggtgaagcctggcgatggcgatggtgtgctcggtggtcatcaaggaggcagggttcggtttatatggatacgaggagagcggcccagggcgtattcggtggggcaaaaatccagacgaacttcaaaggatttgttacagcgagcgcgaaagattccgccaatatctcgttctgttgggatgaactcatggcgaggatgaagggctaagcacgcgggtccacgcgttggtgtaagctatagcacgacggctggtgcgactggtctgtggggtccacccgccagcggatccaagcgcgtgcgtgagcagtagtggctagcagacgggacccacgcgcaacc

SEQ ID NO: 167342 - DNA, 575 bp, Zea Mays
gagggcccgagccggacgtcgcgtactacaccaccatcaccatcgctgggcacgtgttcaggggagtcctgtatgacgtcggcccccacagtggcagtggcagcacggctgcctcggatacggacgggagcggtgaagaagtagggtcgtcgctcaccacggccggcggcagctgcctggatctaacgctgggaatgtgaggcacgcaaaaagccacgccattttgtcatgctagctactaggctactaccatccgctttgcatgctcaatcactatcttgctttccatcgattgatggtacaacctgagagctgagataggattaggctgtttgttccctgaccgtttgtggagaacactctgcattgacggttccactgtcatcttactagtagtttttctgatttccgcctgtaagaaagtccgaatcgagatcttattcactggcgacagctggataagtacttacacaccggtggaagcggctttaatagcataaacctatttttgaaattttaattttttctgtcatattacaaataaacattatataatcctaatcaactataacaac

SEQ ID NO: 167343 - DNA, 529 bp, Zea Mays
cacaacatgttaaacttgctaactatggttactttgaatccgtctagggacgtcacttacagtgaggagctgcttcagcaaggctgatagagaatcatagtttatttccctctcctgacgactttctggtggcaatctatcctgaagtgtgagaggtaccacttctctatcgccttgtatatgtgagcctcttatcgctggagctcctttcccacctcttcatgtagtcttctaatgtctcatcattagcggtcgacgagttagtcagtgttgtgttgttgtttggggcatcgttgttgtgatctgtcatggtggtcgatctaataggtctaacttaacatatctaatttactagatcatatatgatagattcgatctttttgtcccaagcagaatcacgaaaaagtgtatttgcgccaatttggtcaccaaacactagtattaatcgcctagcggtacttgacacattttaatgatgtagggtcgaatagagttgaagatctttagagcactgagtcacctctatgat

SEQ ID NO: 167344 - DNA, 549 bp, Zea Mays
cccaacagagtcgcctcagccaaaagatccttcgtgttctccacagtgaagatagcatccgtctgggttgcagctttaacatgttcacagccagatttttccaaaattgctacaacccctctagcaccagcaaaagcgcaaaaatcaccacggtcgctgaggatctcttcaaaagcttcagcttcttcaccgatccattcgataatcccttcgggatcacctctaataattttttgctcggatgagtaagcacccaccatcgcaaaactatctttcagcttcttggcacaatccaaggatttttcgtaatatctttctttcgattcccgaagctcgtctacgttcttttgcaatcttgcgctagtccactcgcttatctcctgctttgccttagccacatcgaaatcttcattcttctcggaaagctttttctttaaatcttcaatttcggctctatgagtttcggactccgcgacaagattggcttcactagccttgactctgtccactaaggaaagcagaattttgtccttctctgcagcttcatta

SEQ ID NO: 167345 - DNA, 797 bp, Zea Mays
aacaaaatggttcaaattcatgagatggaaaaaacttttactttttggtttctagcgtcgtggggctttcgaaccccttccctctgttatcctacatgggctcgagcgggtacctctcctctttaagagcatacacgagagagagggagagggagagggagagagagagagagaaggaaaagtgttcccctccacgaatctcttgctagctcatgatttcctttgcccatggatctaggtggctcctgaaaaagccgtccccaaggggatggtgcgcccgtcccatctttcctcctgggttccctttcatccctctaccaactaacccttagcttactatctagggtgctggtcgcctctcttgaggtgcgaaggcgccttggcttcgtgcctcggttagtcaccttaccgacccccctggagaggaccgatgatgctcctttaagggatttaagcgtgatacgtttggccttagaggcggctaatgttgaggtgtagtgtgtacaatcgtgactagcagctcttaacgacctcggggcaggtaatctatcgtggtgcgacctttgggctctcaaggttttctagattcctgactaccttattgttcatcgtaggtccaaggcctgaagcgctaggcttttccctatgtgtagatcgagctacaagattcgtttgtgcatgggggagaaaacatatgtcgcatctccttaacatcccggagtgtgttcgcaaggctgtggagtttgggatcactgtggtgcattgacggcctttgacattgcgcagcttcactgtgg

SEQ ID NO: 167346 - DNA, 671 bp, Zea Mays
ctgtccggtgcgcccatatcgcgtttttaaaaggcctccagcccgcagagccgagccagaggctctgttatttctcccagccacccgttactctctgtctgtggcgttttcccccccgccggcgatctccaccggcgtccaccgtctccggccgtgctccggcgatctcctgcggcttgggctcgtcctctccctctctctcggtcagcttctctccctctgtcatctctatctctcttttctctgacagtgaggctgtgcaccacccctgtgtaccaatttcaaatttctgtgaaatcccatgcatccaattggtgaaatgtgttccttggtccctattacatatccctgcaggtctttggctccttcgggagggtttttccaccccaaatacgcttttccctaaaaccctaattcctcgcccttcacgtgttcggtgaaatgcccaaaccagccaaacttgctccaattgaacccaaatttttcaggcaccttcacctcacttccagtaacctacttgccaaatttcacaccaatccgagatcccaagcttaaattttaccaaatttcccgatttgagcgatcgtttccaagccgagtgcccaaattactttttcttcgcctaaattcaaaccaagcacacacttcaccaatattcacctatataaacc

SEQ ID NO: 167347 - DNA, 651 bp, Zea Mays
gattacatcgttcgtgcatggttaccacataaagaagagacacagtgagggaggagcgaggcatgagtgacacagtggcggaaatgaccgagccatggtgaccgccggtgaattatctccggctaggctgtggctaggtccgcggaatcgcgacacgtccgaagctatctccccgcggtcgatccttaccccatatcactcaaacacatctgattctacagtccccctaatctttgtcctcgcttttcagatacttcagtgttctgatcttcagcgctttactaaaccgaccccctttcaccctccttttctcttgatttgtgttaagaacaaggtgatctccattaataaagattgtttactgaacaacagtcttcaaacttaatataggatccttggaccaaaaccgaatggaatcaaagatatggtgcttccaattcggcccctttccactgtgaccattcctgttcttgaattcagttttcagtaattcttcaatagctcgacagggttctgacagagcaacctcgggctgttgtttctttaatttttgtacaacaaccagagaaggtgtctgtaccaaagttactcccctataatccaactttaatcttgctacaaaggtcttagctaattacccattaaatcgag

SEQ ID NO: 167348 - DNA, 449 bp, Zea Mays
gccgattgctctgttagtagggtatagtggtcaccctatgccgagtaagcgtgctgattgataataaacagtttgagtgtccttgagaatgaaatatttttattgatgatgtattttccaattatagaatacaatgctgccccgatagctttttgaaatcttgctaagggtaaaacttcctgagatgctctatattccatgaattccctatttccgtgccatccatttgagtaagccgatatgatcctggtcgagtgacctccgctactacaaatggtccttcccatagtggtgacaatttgtgtcgtccttcccccgttagaattcggcgaaggaccaagtctcccactacaaaggatcgatgtcgtatggccttgtcatgatagcgcctcagggtttgctagtatctagctgactgaattactgtattcaatcgcccttcctccaat

SEQ ID NO: 167349 - DNA, 520 bp, Zea Mays
gccgtccctcccccgttagaattcggcggaggacgagatctcccactgaaaaggatcgtcgtcgcacgaccttgtcatgatagcgtctcagagtctgctggtatcgtgccgattgaattactgcgttcagccgttcttcttcgagtatatcaatatcctccagcctagtagctttggcttctgctatgccttcaaagaccaaccttggtgccccaaacttgagatcagcgggtaatactgcctctgacccatagaccatgaagaaaggagtgtttccatgcagagctcggctaggttgagttcttaggctccaaacgacgtagggcaattcccttatccattttcctgcgaacttttcatttttatcgaagacctttttcctgagtgcctctaatatcatcccgttagctcgttctacctgcccgttggctcttgggtgtgccaccgaagcgtacttgatctgaatgttcttttgctcgcagaaatcgaagaactctaaacttgtgaagttggatcccag

SEQ ID NO: 167350 - DNA, 449 bp, Zea Mays
gaaattcctaagtatatatcggaatgcgacacttgccaaagagtcaaggccagtcatttgaaggtggcaggcaccttacagccccttcccataccctcgtggaaatgggaggatatttgcatggatttcattgtggggttgcccaatacctcccgtcaccatgattccatttgggtcattgtggataggttgaccaaaacagcgcatttcttgccagtacatgccacccaccgggcagaaaagtatgcataaatttatattgaccagatagttcatctgcatggaataccaaggactattgtgtctgacagaggagcaccatttgtagcccgtttctgggagcaattgcaagaatcactcgggacccacgtaatacgaagctcagcataccaccctcaaacggatggtcagacagaaagggtaaatcagattttggaagacatgttgag

SEQ ID NO: 167351 - DNA, 1560 bp, Zea Mays
cgctcgcagtcgcaacacgtttccacgccgtccctccgcttacccggccggccatccccattcccatccttttctcctcctcctcctcagccggccaagctcgctaccgcctcggcgctcctcctccggctcggaatgcgcgatgcgagggctccgcagctccagcagcgagcccatggcggcgtcggcgtcgtcgtcgtcctcctcgtcctcctcgcaggcgccgccagcggccagcagcaggcgcagccgccgccggtagtacctccggcggacctgccggacgtggagaggcagctcaacaacctgaccaacgacatcgcagtcaccatctccgacaagttcagcttctgcgttgccgacctgtaagctgctcgatcgccgtcgtcgcccgtcagtacagaataacccgtgtagctgatcctgattcgtggcggcgtgctcagggaggaggactggaacgaggccttcaactacacgtccgacctcagcttcgtggatcggtgcctcacggagacccaaggtaagctcatgcatggcctgatcccggatgtggccttcatcgctgtttgactggtcaatccacatctcaggattttgggtctgatttccagttgatttttaatcaattcttctgtttgcttccgagtgaagtggttttgaatccgagaatctcgtctcggcacggcaaagattgttgggccgggtgaagaaattattaattatcaattattctgtttgataggtgcctgcttgcctagggtagtagtagtaggtttcgtcaacttatgaacgcgtggaccacaccttgtgtcgttcttgtagcccctcgatttttctctcgttccagccaggcaagtggctgactgagacgttgtcagtttgaaacgttctctcctacgcatttcgcttcgcacgtgaaatcattcatcttagaacaaccatttgtttatctgacacagttgggtttgacaagctcaactccaactaataatagtatgatcgtccatcgcagttcgcagtcctagtgacgttggcaatcttttcacaaactaggcattttgactcagtataaaaaatgaacctgtcttcattattttattctataaatatctaacgaacatacatactgggttccatccaggcgacctggtccagcgtctatgcacgccggacgaagtgaagttctacctggcaagcctgtacgaccgcgacggcgacaagaacatcaacctcaagacgaacataaactgcaacatctcgtcctgggggagggggtgcgacgccggatgggcctgcgccgccgacccggtggtcgtcgttcgggatcccaggaacggcgtcccgctcagagcgaggggctgccaggcatgctgcgagggcttcttctgcccgcgcggcctcacttgcatgctccgtgagttgcatttatcagctagcttgccccgcgtggggccacgctctctcgtgcttgcttgcttctgacttggtgtccctccctttcctcttgccgtcgtcagcttgtccgctaggctcctactgcccacgcgccacggcgaa

SEQ ID NO: 167352 - DNA, 624 bp, Zea Mays
tgatggaaacgaaacaatgggcatgaaaatgaggacatgatgttgtaagcctcgaaccgactagcatggatatctggtttcaagtacaaactatcactgaccacttatgagcgacgagaactttccgatgaactccagttttttaatagaaagtatatgtcgtggtttcggaaaccggggagacaatagatttgagtttggtggggaatacaggcacggactcacaccgaatggtgaatcacgagcatccaggctaaggagctgagacatagggagttatactggttcacgctagggccctagtccaatatagtgttgatcgatgtattgcttaggagcgtgttacaacaagtgtgcttgtgtggagaaagaatgttgtccagcacttttatagctaaagggtggactttacagttgggacatatattctactcggaggtacttggcttgttgcccctaggttgctctagccctccttgtgtcgtttataggggggctgtcgtactcctgatatggcgttctgtcccgtccgttgtccatatggatccctgtagcttgtttggtgtcaacgtttcggtaccttgtgggtcccgcaaagtgggcctatggtgtgatttagggtcg

SEQ ID NO: 167353 - DNA, 311 bp, Zea Mays
caaaaaagaggaccagctgatgacagcagccttcggcactcggccgaagcgaaggctgaacagggtgcttgacgctataggatttgaatatgctgattatggtcgactgggcggagatgctggaggcccgaagcgaaaaaggattgccagcactgctgacgaagaggtcgccaaggtaaccaaaaagaaaagggaagattctgacaaacttagccctgaagagttgaaccctgagccgaaggtggccactgcaagaaagaggaaaactgcatctccagaaccaacagcgttggttcgagaagaaggtactc

SEQ ID NO: 167354 - DNA, 866 bp, Zea Mays
tagaggtaaatccatatacaaacaaatgttaaaatagacatccgtttggcacattctattagtgttctcttagtcatatcaagttaatcaaccctaaaactaccgtgtcagactcagatccatttgccacaaataccagctcctcaagattagcattcccatgaaattaaattgtaacagaagtgcaaagaggtatcttacctgaagatttaggagcagaaggatctcttggtttaggcctcaagcttgatgcttggccgactttgggtactgttagcttctggactcgacttactgctttggctctgcatgagaaagaacgaagaagttacagacaacagccaaggccagaaaccattccgcagaatttgcaagagctaaatgtcaaatgagagaaaatattattagctctaagatcatggagaactggtaatactcacaaccgctcttttccagtagcggatgttttgtcttgttcttggtccacaacgttgttcgctgaactgtcagtttctgcacccgcgggtataccgccatctgatatatcacttagccttccatctgaatcaccaccaggatcagccgagttctggctcagctgtcgggcctcgtcagtagagagcatggacccagcttcggaatgcctatcactggtgtcagagcagttgtcaagatcagaagctgccccgctaccaaagcttgccacttttcctaaggatgtcattcctggagaagaggccgaatgcttcaacaaggagtcaccatgtttcgtggacttcagtagggaattgctactgttggctagttggagctgatcaatttcatcatccttctttgcaatggtatctttgagcagtgaaagctgc

SEQ ID NO: 167355 - DNA, 468 bp, Zea Mays
ctcacggcccaaacaaaaatacccatcctcattatagcttcgggagtaatctgatgaagaaagatctcaaatgtcttcaatacttcaaccaaaaatttgctcaatgggaaccaaagacctgccttcatgaagctcctgtaaacaacaacttcatcttcctcgggtgcaggggcggcgctgtcccccccaactctcacaatagacatgtcacgaaaatatcttcccttcatggcatcaatctgactctgtttgatggatgactttccgaagatagtatgacttggccgccagggccgatcttcggcatctttgttcccactgtctacatcaaagttctcgctatcatcagaatcctcagacaacccagctaatatttcattcgtaatcttttccgtatttgttttttccatagcttcataaaacctagctagagcagggtccacaatcttcttctcctcagacatcttc

SEQ ID NO: 167356 - DNA, 552 bp, Zea Mays
gccatgaggagccaagggctggagccaaatgccaagtgtttctgcaacattcatgaattatcctaccagacaaaagcaattgggaaggagtagtatcacaacaacttcgggtgctacagctttgaaccccgcttggatgcgaggtatcccgtgccaatgttccgaaagaaatggctgggttcttggatgaaacaatcgttttatgtcaaaaatgatttgagcaatagggaagatgggaggggtataatctagcaccctgtacggtcacgcttcggcatcaggaggcagtcaactgcaagggggaatgaagtgcaagcgtgtttgatggctttcaacactgtgtgtacttacatcagtaccaaggatttggttcaggagcatattgcttacaaggtgtggccgctcattaatgactaggagatgctgaaggagactgctgccggttctagcataggtggtttggtttacctaagatacacttatcgttacagaagtcagtttgataagtcgaatgaagactggcttgaggctgtcgaagctaccagtgacgag

SEQ ID NO: 167357 - DNA, 377 bp, Zea Mays
gaaaatgatcccccaaacagctgaacacaacactctatctaaatacatcatgacaccagtggtaacaggctagctacttcaccctagtaaaccattagaaaggtggtctggtgtaacgtttgtcctgtccgaagcgtcaggggttccagttacttgacacctacatgtttctccattacattatcggataatcatatccctccacttacccttaacgtccacctacaatacatcatacatacaacccatcagtaccttgattggcaaccacagcaagttcactataataaccaaatacaaaccggtgttctgccgataaaaaacgtcaggattgttatctaaaatatcctttcaattgccactaccatacctacaca

SEQ ID NO: 167358 - DNA, 383 bp, Zea Mays
taaccattctgcttttgagtcaatacaatggaaattcctttttcaatttaaactttagaattcatgcctgcaggcggcaggcaaacaagtacactagaggtcagcaagtacatgctcctcactactatgccaagtcagtagtcagcacaccaccaggtaaagcttggaagcacaccagcaagcattgccctaactgaaaaattccaggacactgattggactagttcttccctaatctacgattacctctctagtcaagccactaacatgagaccaggtctggtttgctccatagcccgccacatggcagcattagggagagcaagtgacgatgtcgattaggatacaaagtagaaacggttgaacatcagcttttcatcaac

SEQ ID NO: 167359 - DNA, 529 bp, Zea Mays
ttttgtggatatacatcttagtcgcctctgcagatgaacatctttatcgcttctgtgggtagattgttcggctggcttttgtggatggaatggctctgcacttgtagttatgtaatgtttatgtacctagctgcctggattgtgtcggccaagagaccgctaccagtacattatatatacatcttgtttagttgtctgccccccgctgtgtcgggtagacatagacttggactatgtagtcttcttctggatcagtttccagctagaacaagcctcaacgtcgtgctatggtgcgtgttttagtgtggtgctgcaactttaatgtggattattttcaggctatctatgttctgttaagtaccttctttcttgcttgccaaactaaaaaaatttgttggagatttagtcatccttcacttgatttgagtatatcaggtattgttcatatttttccagtgccggatagggcgcccgcaagggcgccgtctgatctagtttgatataaatgctcaaaattccaatgatgggg

SEQ ID NO: 167360 - DNA, 509 bp, Zea Mays
actaaagtgagttcaccatggcgcgtactgggaaaagtcttatggcaatcaccagttactctccatgattcgcgacgacgtggtaatacggcctatggcgtggtgcgactgagatcgccggcgtccccgtcgacaccggtcgtgaggtcacgtcgcctgccaatcgagtgcggctgataagctcacatccgggaccaaatccacatcccttccgatatttttatctctcgcagttatcctcgtgccatagagtacgaatcgcaacaccggcgtggatcacggcgcgaggatcaccagcgacgggttcacgacactgaagatcttttcagctactgtaccatcatgatcttcttgagtcattctgacagagcaacttcaggacacttgttctttgattatcatgtgggaagctaccaatccgactatatcaaagttgtggctctacatactagctttgattttgtcataaacatcttgatcgaatactcattggattaggtgtaattcgg

SEQ ID NO: 167361 - DNA, 1012 bp, Zea Mays
caggcctgtgtgcagaccttgctcggctttcaggtgcaaatattttggaaggtgtgatcttcatgacattataaatatataaatattttccttttgcattcccgagtgaatagtatggcatgtttgtaactatgaattcatgaccttctaggagatcacaatttaaagcttctgcgccaggactgctacataagtcatcagaagaaggtgccttatgagtttgacaattgcttgtagcaacccatctttttacctgataagtggtcacgtagacactctttatatcttgcagttcatcaaccatcttgtcaatcaacttgctgctcacctatttctaaagatagcctgccagctcgaagaacagataaaaatatcgagtgcctactcatttctgaaagctgtagaattggaattgcagggctacttctcagcttttgatggccgcctggtattgtagccgagttcatccgttaagacagcatattatttagcctcttatcatttccacttgtgttcttacaaattagagtgtctactacatggatatatagggccggtacaatttaattgatcaagcagcatctgaaatgtttgaagagggatcagttgacgacagtgattcttatcttcatgctgtgagggatatccttagcagtcactcgagtaagctggctccacctacaattcctatatccacatgtacttgggatgttcttttgactatcaagctggagtaatccattcagcttttcaaaaaaattttttgtaggttcccaagcaacgtcaccagaatatgtgtcatcatatggtttgatcgggcagataacagagctgcaggatgagctccagtaccttcagcatgagaccgaaaatgtccttccacgtgagcgaggaagatgcaccgacgaactgtgagttgtcctagctcattgtgccttgcaattcccccccaacgattatgtcacagctgaacttgacattaacaaacccctactgctagaataatatgcta

SEQ ID NO: 167362 - DNA, 478 bp, Zea Mays
ctgcatttaatccaacagcgacaatctaaatcaaaaacattcatggctaaaaaggaaaggtcaaggtaaagcagcttgaaatgtgatatagattatttaattccaattcatcagatccttgttcagcttcttacatacctgcagctcagaggtatcaacaacataaatggtttcattggacaaccaatatggcaaaaatgtcaacaactgtttctttaactcttctgaatatttttcccacatagcaacagctaatgcaaaatcattccactggacaatctcctcagtattatatgatccaaatatagtttgtgcaagtgcgtgattgcatggtaatggtaattctgttccttttgaatgatgtgtaactggacagcagactgttcctgaactaacaacactttgttccctccttgctgccagctcatgttttttccagtagtagaattgcaccacctatttaagagatagatagatg

SEQ ID NO: 167363 - DNA, 1000 bp, Zea Mays
gcagtattgatcctataagtttacagcaaagttgaagaccaatattttgtgagtaagtgtgatgtggggaggtagctctgtttgtgtggagaaatttgagaaatagagggatggtctgtcaggccctcggagttacagatactgaaaactgatcagatctgaatttgcagcgcaagactcaacattggagcactataacccttgatccacgagtttttagtcttgggcttctatagcaaacttgtaaagatttgtttggtaagcaaatattattaactaaggttggcatgtattacttggaatctggtggatcgagggggttaaagttgggatgtccaggtggttgccaggtgcagtttcagaacctaaaatgtgatgctattgtgctgaattttcagaaaaactgtgtaatcctcttgaccttggaaccattcaattcttcattcttgggcttttgggggataatcattatataaaacttgaagatccattgtaggaggacatttcttctgaagaaggatatcccagtctctattttaaattcaaagaaaaggttaccccaagtcgcttggttaaatagaggtgtgctgaatttaatttagattagatgcagtggatagtttggattgggtctgtgcatatctgaagaagttcttttttccattttccctacctacgtgtttttaggctgtagtggataagaagggcagatgtttggagatggggttgctggagaaaaatgtgctgcccaggaaaaatggacgcactgcatctgaagccaggtggagtccaggaagccggtagaaacctgtgactcagctgtgggtgcgctcccctgtccaaacaccagcaaacctttaccctttgcctcactgtagactggtcttatgtggacataggagtcgaggccgcgtgctagctcatgcaaacctcagctgaaacacatcggcgcccagataagtgcaagtccggccgagtgctctttgttttactgtaactg

SEQ ID NO: 167364 - DNA, 516 bp, Zea Mays
aaagaaaaagggaaaatgagagcaaaggggaaagtaactcgtggactcatcggcagccacgaaggaagacgaatgacactaggatgaaggaggcagacgggaagaatacgaggacaccacatacgaatgaggatgaaaatgaacttgtgagagagttatccatccaattataatggacgactaaggacaatatctaatgagaatatccttcttgggaacaacctaatttaagtaatcgctctgtcttgtcgtatcccgacccacaaccaaatacatccttagccatctctaacatatcttctattcaataccctatttcatccactatttcgaacttcactccacaaacaatactaaacaatgtcatctatagtgctaggaattaggctcggtcggcccgaacccatcatgcttcaggccaaacaggttcgtgccaagaaggataaaaaaacttttgggtgtgtcgtaccagcccaaagagtagaaacagtggcctagtctaaccttaaagtacgc

SEQ ID NO: 167365 - DNA, 316 bp, Zea Mays
agtttcgcagtctgcgctgtcagactgccagaaatttcgcgcagtcaacacctttttctgcgcgcttttactgcgcagtttgaccaaaaaccggttgaaccggttttagaaccagttgaaccggttttctgtgttctgaccggccgactccccccttatttctctccctctcccctcttatcttcttctcagtttcactttccagccgccgccgcccactcttcttcctctctctccttcacaccttctccactccaaaactcacttgtgccctctcatctttggaagatttgttggagatccgttcatcccggtg

SEQ ID NO: 167366 - DNA, 711 bp, Zea Mays
ggggagatgaggcctaaggcgcgctaaggcctgggctagctacgacagggtaaggggaacactacgggctaacacaggggtacgggatcgggctaaatcaactggtcaccgcgcgggcgcggcaaaccgacacggccatcaccggtgaagccaaattggccaagaacaggacggaatagggagaaattgagtgtgggaacggacatctcacctcgggacggggctcgtggtgacttggcatggcgcggggaggctccggttggccagacgtcgaagaatcatggcggtggcgaactcccaccgaggcaagggggcgatgggggctcaacggcgaccgcagaacgggcggcagatgagcgagcagcggcggagctcccagggtgcgcgcaaagcgagagagggggcgagggtgtctggctgagggcgcaaatgagcaggggaaagtgggtgagcggggtgcgggctcaaaaagggggtcggggcgtgcagaggtgaccgaaaaacgtgcgacgtgggcacatccacggtgggagtgagggcaagaggttagggaagcggagaggactaacgggtggggtccgcgggccagctgttggggcgaaggcgaacatgctatcctttgctcgatgacttcgcctgcccattgtgcagatggtcacatccacaacgcgtccgaacatgctgaaggcgccgaccagatggaggcctgcg

SEQ ID NO: 167367 - DNA, 454 bp, Zea Mays
gtctctgtcgatgagatccttggaagttggttcgtctacgtcggggacggctgaagtgcttgtccgtggtgacccatgtttgatttcctgcggggtcatggcctccgatccatatagcaggcggaaaggagtgaacccagtcgcccggcactcggtcgtgttcagcgcccagactgctttaggtagcaggtcggcccatttacccttcttgtcgtcgagaagcattttcttgatggccgtgaaaattttgccgttggcgcgctccacgatgccgttggattgtgggtgatatactgaggcgaaggcaagcttggtgccgattgagaagcagaagtctttgaagtcctggctgtcaaattgtatgtcgttgtcaactgtgagctcggacgggactccgaatcggcaaacaatgttttgccagaagaatttctgggcagtcttcgatgttatcgtg

SEQ ID NO: 167368 - DNA, 803 bp, Zea Mays
gtcacactcgacgacgaagtcgcgacggacgacgacgtcaaataagacgacatcatgtaccatctacagtgacaagcagcctgcttcacatgggccaactcacaggcggtgtgtgattccttggcgcgagtggcgctgaaagatgtgcagcgatgtttgcaattagtgctcaggaacgtttgcaaataggggaatattccgggaatgtaggaggtaaccacagtatgatagtacttggggagccactacccctcctagttaactataaatacctcaacactatacacggatggggcacacataacaagacgccacgattccctacctactgtctcgttgtgcacctgaactctttatctctcgagtgttgggcccacccacccatgtgttagaaggatccaacaattagataaccccatgttgctgtggaagaagagtgggaaatggaggatatgcgtcgactcaccaaccagaacaaggtgtgcccgaaggatctgtttcccctcccatgcatagaccaggtggtcggctccacctcaagccacgagttattgaacttcctcgacgcttacttaggctatcaccagatcatgatgaaggaatccgaccaaccaaccacctccatcatcacccccttcggctcatacaattacatgacgatgccttttggtctgaagaatgcaggggcaacataccaacgatgcatgatcaaatgctttggcgacctcgttagaggggtcgtagaagcatacattgatgacatcgtggtcaataccaggtggtccgagggcctcgtatccgat

SEQ ID NO: 167369 - DNA, 644 bp, Zea Mays
gtaaagtctaagcatgggggttgacggcaggtcattgcgggaaacttcttggggtcgccttggtagccgacacactagaggagccgagagttgtgcttgttactatggttgtccctactgactatgactctgagtatgatggtttatggcatgctacctagcttgacctgtaatcaggaagggggtgttgacatcggtgtactgctcagcatacatacaacaatcagttaaacgttaaattctgcctagatcacgaggatcggtctgtacggtttgtcatgatcgactaattgagccaattgtcatttgtttttagggtcgactattaatgtaataataaatgtgatcatgcacttaaagtgaccgacgacggaagtgaaatctgcctaaagcatgcttgagttggttacttactctagagcggtctaggctacgtgcatggccaataagggagtgtcgggctagaagagcaccattattacccatgtcgttaaccaaatctagggctagacagtcaataagccatctataggaatatatatctcagatccaatctactacatgtatcgcaccgataaacctaggaacatcagccactaagaactactgaccacacaaacaaacatggatcagggcctccaaag

SEQ ID NO: 167370 - DNA, 721 bp, Zea Mays
caaactatgcaaatcaatgcctctatgggttattcctcgatattcttctaaattataggctaagcttgtctttcaccgtggtaaattcttgaaaacgtataatgcccacccacactagacagagggagcccacaaccacctatggcaaaacacatgcgtaaataaatcgtaagcctgcctctagccgccttggcatttgtgcgtcctggcaagccccacctacaccctctgccctgagacagccttgtcatgcatgccgaactgctatattaaagtgtaggttgcagaccttgaagtgatacctcagtgcagaaagtcactccggcaagacctcgtgcacccgtctgagcacacgccagtcacttgtcacaatcacaactaaatgaatgccccaccatgagccaagtaaccctgccaaccttgggatgttgcaactgcactgtggcaatgtcgccaatcacagtacgccggtcaagactccctccattataaatcgtcgttcctctacctataaatattgttgcccttgccacagaatctcatagtccagccaccatctcattgtcacccccacatccgaacaacacgtgccttactcttcaaaccagagaacaagccctcaccgtcgatttgagccataggtgagcatgccatgatcttcgacctcttcctcccccgaagtcattcttaaactatagaagttatgaccatagcatcaatt

SEQ ID NO: 167371 - DNA, 730 bp, Zea Mays
cacatgcatgccatctttaacaaccaaattaaggatgtgattggcacatctcacatgaaaaaacagcccatcacaaatcaaaggactatgtttttttagttctatgattagaactttaacagcaacttcatttgcagaaacattatccaaagtcaaagaaaacatctttttctcaacataccattttagaagacaagaactcacggtataagacaacttctcaccagtatggcgcccttcaacatggaagaaattaataattctcttttgaattttccaatcctcatcaacccaatgaagagtgatacacatgtaggccttgttttggttggatgtccacatatccatggttgcactaaaacgacattgaatggttttcaagtattcatataacttattctttttatccaaataatattccattatctcctttctaaccgtgacacgagacttcattgggtaatttggacgcaaggattttacccaatcttgaaataattcatgttccaccatattgaaaggatactcatgaacaatcattgcttcatggaacttctccacgctagcttcttgatcatacttgtatggttgaacaatggcaattcccgcctcatttttttgggttgtgagatgctgctgccctttctttatgatgtggtaattagcaagatgagtccaaaaacctgaagtaccaaattttccctcagccctatgtttgcttgtcttggta

SEQ ID NO: 167372 - DNA, 450 bp, Zea Mays
atttggattttgggaagtcgactgtgtctgaagctgatatggccatgatgacgaagctaggctacttcagagaagccgagatggggttgattcgctttggcggggaagagactatcccggaaccaaaaaatgatgaagtggtagtttttaagagcttattcaaagcagggttgagatttcctctgcacgggatgattgcagatgttttggaaaattttgagatttatcttcattagctgacccctaacgccattgttaggctcagcgtgtatatctgggctctccgaagccaaggggtggagccgctcgccgaagccttctaccgagtacatgaacttcactatcagacgaaggctagagaggacggactgcatgagaacttcggctgctataatttcgcttattgcaaagacatgaagacaccggtggttagctatcacactaaatggt

SEQ ID NO: 167373 - DNA, 923 bp, Zea Mays
caagctcagctccgcgaagaccgacaacagccaccacctccaccaccgccagctccacctagggataagcatcgtgaattcatgagccacaaacctcccacattttatagctctccggacccactacaagctgacaattggctgaagtcagtagaaaagatgctcaacatagcacagtgcaccgatagggagaaagtactctatgcatcgggtcgcctcaccggccctgctgcggattggtgggatgcatattgcgctgctcacgccactgctgacaccatttcatgtgcaggattctccaccaacttcaagaactaccacattcctgctggtcttatgaagatttagaaggagttcctatccctcaagcagggaggcttcttccagttatcctggtatgctcctggggaagttgatgatgacgagaaaaagtaggaactatttctggagggattaatcgggccactccaataccaactaatgtctcaatcattcttgtccttctgtcggacaaggctatagctctagagcacaagcgagttgaactaggagagatgaaaagaaaggctactaaccagggacatgctagaagtagtacgcgtccccgttatgctacaccccaaggcacaccggcttgtagcagtcccagacaatagactcaacaagtccaatctgctactccccaagcaagcaccccgatcggacctgtttctcctaatgcatcaacaaacaggtcatgcttcaaatgtggtcaggctagacattatgccaactactgtcccaacagggctgcttacaccacaccagctccaatgaagcaaggtcaagtatcaggggtaaaattcaggccttatctgtcaatcgaggacaagttaaccacatgggagtagaagctgaacccgaaaacctagaggaggtaccaa

SEQ ID NO: 167374 - DNA, 728 bp, Zea Mays
acgcccttttgcacttgtggatgtttctaattgtcaccccacaccactgtccgtctacccccgcgtttatctcgctgtgaagtgtagaggaatcctgtcctgtgcctgtgccacggacctagctagcttgccggacggcatatcctcggtttatccccgccgcggcgccggacgaaccgtaccacgcacccaggcgctccgctttgttccgtcctgtcccggtcccgagctttgcttggtttgcaagcgatccggcagcagtggtataagccggaggagattcccggcctcttcggatctcggaagcttcatcgctccgctcgccacgcgaatctcactggccactggctgcagcctgcagcgcctttatttgctacgtttttgtttgttgcttcatcggttgtgctaccgtttataaaaagacctgatacgatctcctccttattggcttctcttttctgggcaattgagtgcgcatgcattacaagtggggagaatgtgatacctgtgcacgtttatatataggcaccgatacgctatcgcggtttctttgtgttaacacagatcagccaaatctacaattttagtgtagcaaaataaataataattatcgtccatgcgtgacagatgagcgagccggagctatgtgtaatccccaaaacttgttcagcaacactactgaagaaaatgacagtcttacccttagcttactcattactttaaatgta

SEQ ID NO: 167375 - DNA, 645 bp, Zea Mays
ccgctcctctccgcggcggtgaggtcgccggagttgaggctggcgcgagctagggtggctccggggtcgccggagttgcgcagagagggagagggcgccacgacgaactcgatggcagggaagaggccatgaatccacaggcagagaggggagaacggcggtgagaaagcctcgggcgggccggagtaactctggtgagccatttcggccacggggaggggacttaaggcgtgctaaggcctgggctagcttcagcagaggcaggggtgacacagggacctactccggggactagaccgagctaaatcggctggcctccgcgtgagcacggcgggccgccgcggccgagcaccggggaaggtgacattggctgaacatagggcgcaataggggaaattgggcacggagacgggtgtctcacctcgaggcggatctcagggaggcttggagcggtctccggcgagctggatggccgggaacgcgggcgcaggtctccggcggctggcggcgtgggtagaaagcgagagagggtgaagctgtgcgaaataaggcgaggggtgtgcgcggggcactggcagagctctaagaagggagctgggcgcgtgggcgggcgtcatggtcgagaaatccggtgacgtgcgcgag

SEQ ID NO: 167376 - DNA, 582 bp, Zea Mays
cttcaaaacaacctttttgacaaagctggtaagaacttgccagcaaaattatctgccaaccttaattgggggagattttaatatgatgaggagcaggaaggaaaaaaacaaaaataattttaatatgagatggccattcctttttaacgcgataatagataactttgatttatgagagattgagttaaatggaagacaatttacttgggccaattctttacccaatccaacatataagaaattagatagagtgcttatgttgaccgaatgggaagttaaatacccattagtctctgtccaggcgttagacagaggcgtttcagatcatacgcctctttacattgacacaggatcaccagttttcctagggggctccaagccgtttaggtttgaacttagctggttcgctcgtgaggacttcttcgaaaaggtggttgatatgtggaataaaccagtaaaaggcaacaactctgtacaacgttggaaccgtaagcttggcgcccttcgaagctttcttcgagggtggtcacgacatgacagaggtatatacaagcaccataaaaatgagctccagataacgat

SEQ ID NO: 167377 - DNA, 461 bp, Zea Mays
tcaacacacaactaaggccaatacgagaagcatctgtataaactgtgaaacacttaccactctcaggcaaggctaagataggagcattcaccaacttgttcttcaatgcctgataactgacctcgcaatcattggtccagactaaaggaacacccttctctaagagtttagtcaatggcttagtaatgctggaaaagtttggcacgaaacaccgataatatccagcaagccccaagaaacttcggatttctgagacgctaggtctcttccactccaccacaacagcgacattcatggggtcatgggtatgataatttccctcatgtttcttcaactgcctagagccataagaaatcaccctgccttcctacatcaacacacaactaaggccaatacgagaagcatctgtataaactgtgaaatgcttaccactcttaggcaaggctaagataggagcattt

SEQ ID NO: 167378 - DNA, 522 bp, Zea Mays
tagttagtagtatagagtagtgaagtgtaatgtagtagtagggaggtcatcaactcataatgagttgatttgtaaattatgtagcttcccttttatgaagaatgattttcgtctcctcatgtgttaattactttgcctcccggtcagttgacgattccatggatgttggtgcctcggaggtagtggtcgagtcattcgggatcaccttgtcgctttttggggtaacggccgagttattattgacaacattggcgcttctgaagtagtgtccaaatgatggcagggccacatcggtgtttttagaattaacaaccgagcggttactggctctatcagcgttatagaggtaaccaccgagtgactgatggcaacgtcggcgttttagaggtaacggccgaatgattgattatgacgtcggcgttttagaggttacagccgagtgactgacggcaacgtcggtgttttagaggtaacagccgagtgactggtgatgatgtcggcgttttagaggtaacaaccgag

SEQ ID NO: 167379 - DNA, 372 bp, Zea Mays
cataggtcagagttgaggttaccattggagacatcccaggcccataacacttgaaagtggcatagtagtaccccctataaaaaaagaatgcaacccaacaacacctttcatcagtatacataatcaacaacacctttaatctcacaatcatatacaaacaaaggagaggatgtaatggacgtaggagtggtacctctcgcagtctggacgtcctgacctttagatattatgcctataatctccttacctatattggtgtaggagtagatcacaggcttgcccaccctacccaagtaaattttttctccttccccctcgattgtgccagtcttgaatgccaacccgctcttccctcgggcgattttgatggta

SEQ ID NO: 167380 - DNA, 533 bp, Zea Mays
attgattccccgtacccatagccgttgtcaggttcgctggtagctgcgtcgtagggctgggggcggtagttcgtcgccatcgccgccgcgggtaccaggcacgccaccaccgcgggagagttggggaggctgacacagtgtgaccgtcggatcattatcgacggacacgattaaactttggacgttagcttccagggcaatcgtggaccattgattttggatctgtccgccttgggcgctcggggggtatgatgaatgtggggcgttgatctcagatcgaacatctcacgctgtgtaccggttcgagttaatagagatctaatctgggcgcctcgtttcagatcggacggccgtagtgtccccataccctttcggccagatcaattttgtataagagaccctctattttcacataataaacccgccatccactgcatagcattctgagtcttagaaaattatgcgcagaagcccctgggttttcgggaaaatgaggcctactctagagatcgtttaaattgaataaatgaaat

SEQ ID NO: 167381 - DNA, 740 bp, Zea Mays
ctcggcagaaagcttcagcatttgggtccatcccttggcttcgaagggcctagatgaagatgctgagcctaacgatagcgttaggagtcagctgatgaagaaaaatttcaaaattatcaaaaacttctccaatcatctcgttcaagggaaaccgtaatcctgccctgaaaaagcttttgaaaaccactacttcatcattcttcggcgttggagtggtttcttctccggcaaaacaaataagcttcttttcagcttctccgaagtagcccagtttcatcatcatgggcatgtcggcttcagacacagtagatttttcaaaatccaagtgactgggttttgatgggattagaatgctagtcttcctgttcttcatcagcatttacttcctctatatcagcctgctcagcttcggcagcagaagtaccttcgtcaatgactccctctgtcacaactaagcccgattgtctcatgactttgaagattggagctgtctcggtagcctcagtctcctctccttcatgagtcaccctcgcagtcgagcgtactctggccatctgatagatcttttgtggtttttacgaagctgatgttttttacagtttttgacgaagctctctcttttgacgaagctaattcaaaatgatggttcactcgagaatacagagaaaaagcttcgggtatggttaaatttttcgacagcacaacagtgcaatgtcaatgaatgctgtggtaacttcacg

SEQ ID NO: 167382 - DNA, 656 bp, Zea Mays
tcttcgcacattcggctatgtttacaaaggcgttacgcacttggtctggtgtattggttaggttggtctggtgcgcatgtagtcggtctttgcgcggacagtttggcgtagtctagtccacgcttgttgagctagtccggctgcacccttaggcgacttctgcacggataattttcgcggaagacttcgatttctcgcacttgttgtgctagtccggctgcacccttaggcgacttctgcgcggatagtcttcgcggaagacttcgatttttcgcacttgttgtgctagtccggctgcacccttaggcgacttctgcgcggatagtcgtcgcggaagacttcgatttttcgcacttgttgtgctagtccggctgcacccttaggcgacttctgcgcggagttgtcgcacgcgagggtggctgacgctgggcctcgcggtgactatgtattggtcgaatgtcgaagaccgtcggcgcggtcttttttcgacgtagattttgcgggggatttttcacttgtatattacatgactccgcctcgttaaaaacctcaccctccaggaggaaaagagtgtgggccagaataaaaattgtctttgcgaattacaagggcgagctggccctgatgagtcaaacaaaaaatttgcggagattatc

SEQ ID NO: 167383 - DNA, 422 bp, Zea Mays
cttcatcatctggacttgccggcactgaaaagtgaacttgcctctcatcattgggaagatcacaaagagaagcaaccagagccccaatgtcttcaggagagggtcgcactctaagacccagaccactatcaccagcaggagggttggacatgaaattgaaaaaggacttaggaggtggtagattccaagcagagtaggcaactggagcaccaacatttgatactttgccccttaagatcatgtctagatggctcaccagatcctcagtaggaattttcttgttggtaacccgagtcaagtcagtaatgccactgtacaagtaagctaggtatgccctgtcctttaaaggttgaatgttcttaaaaataaagtcagcaaccactgcctcgatagtcagacctctctccttcagcagatctcag

SEQ ID NO: 167384 - DNA, 355 bp, Zea Mays
gacgtgttgattttgtgaactttcagggactctttagagaacatactcggctgaaggggtatctcctaatatgtaccgtgcgatctggacctgacggccccgatttttatggaagcccgatctatcctcaaccctcagatcgaatctcaatggcccgggttaaatctaagcaaaggggttatacccgatcgaattcaaggcgcacatctgagaaccaacggacggaggcacacttcttcagtggccctacccatggtggcgaccgcgctccccacggtggtgactagccggtgaacagctaactcccaatcccgcgcacgcagcactattccgacaggtgctaaacgtaggatac

SEQ ID NO: 167385 - DNA, 428 bp, Zea Mays
caaaacattattttacactataaattgtactgtttatagaatggagattgagataggaatgtttatagaatggagattgagataggaagactgtcggagacaactaagtcaaagctgacagggaaagaagaagaagaagctgacgtcagcataacatgcgtatgctcataattcatacaacagcgggccagcattatggaaggtaacctcataacaacttaccagcagatcagaattgcattatccatctcgaggaaatagacccactcattagattgatcatatcatacccatctccctccgaacaatagatcacctcacaactccaagagactagaacaatagatcacctcacaactccaagagactaggtatatggttttctaaaggtaaatttagctaatattagaagaaaagtgtatccaata

SEQ ID NO: 167386 - DNA, 771 bp, Zea Mays
cctccttcatctccttggaaaacttgaaggtgttagtgctagccttggggcattaagggtgtcctggggcatgtccttctataggtttgtcgactcctcggtcgtcgccaatgatgctgcaagctcgtagttagtgcgctcgcacttgtaggccaccttgatggaggcactcgtagtgatgactctgtttgggtcgggcatcttcagttttaggtaggtgtagctcaggatggccatgaacttgtcatatcatggcctttcaaggatggcgttgtaggacttgaggaagtctaccacctcgaaatacagtggctctatgtggaagttcgaggggtcgctaaaattgatggagcagagtgatatgctcgagggggtatgcttgctggtcagatatgatgccaagcaatggtgtctactgggttgcaactcggtgcgtgcaattcctagggaatcgaaggtctcaacgtacatgatgttgagcttgcttcctccattcatgtgcaccttggagaggcgcttcgtgcccataatgggctcaacgacaggagggtaggtcctatggtgtgggacatactttgggtggccgcagtggtagaaggtgattggtgtctccaaccaccagaagtatttgggacaacggggttcatggcgtgtacctcccggcacgccatcttgaggcaacacttgtcggcgtatgcctcggggctgccaaagatcatgaagcacctcattggctcgaggaaattcacagcggtggtgttctgctctacc

SEQ ID NO: 167387 - DNA, 563 bp, Zea Mays
cgcataacatagggaatagggaggggtggttctcaccgacaacagacgtctggtcgatgctgtccacgaaggatggcgggcccgcggcggcgtagagactccgacgagcaattatcgcgtgtaccgaaggctcttcgagctgattggccttcagaaacctccccggtgacgaaccccgaccaccagcacgggtgagagcaaaagcacactcgtgaatctatggcggcgcgcaacggtgcctcttgcggcgcggttctcgcagtgaaggaggggaacgactggtccgaggagggtatggagtttcaaggttcgcggtctggaagtgctgaggggttttatccgcggctctcgcccgttggcgcaacgatcaccgcgaatgcggcggaatcgcgtggccagtccgcacacttccgccatggccggtgcggtcagttgacaggtgggcccaagcaccccgtgcgacgaacgcatgatgagaggtcaacgcccgggtgttcccatgcccacagattccgcggccgcctatccactcatccgcggaggacagagcttctgacatcgcg

SEQ ID NO: 167388 - DNA, 1405 bp, Zea Mays
tagccatgttgttcataggcagttggctgtgacccggtgaattatccgaacccggttctgacatcttagatttccttttccttggaaggcccctgtttccctctgaactcttcttgaacataacatggcgagcattcagggggtttgaagcctgccctttcccaactcttgaatcatcaaactgtggccctgggacctccctattctcctcttgattcaccttatccttatgagcatctgaactcccagatcccccagagtcccccatagcctgctctcgctttgaatgagaggaagactccctcccaaaggattcagccgctgcttccgagaaactctgcatcttcctccttctaggctcgaaaacccgaagattaacatcataaggcagcttcccctctgcattccgaactaggggtttatcacaattcagttgagaatgaccgatgataccacacgccaggcaatagaacgaaagcttctcatattgaacctcaaaccactcaggcgaaccatctttttttgttttcagtttcactcctctacgcaccggctttgacacctcgatagccactcgagcacgaagaaatggaccactggcctttcccccaccgtcgacatccatttttttcacctcaccaatcagacccatagcccgttcacccttcagcttattcatccagcctagtggaagatcaagaattctgacccaaatgtccaacgtgtcaaaactgatctccgagggcttcagtcgctcatcatactcatgcagaatcactgcatgcttccccaccacccatggagaaccacccaacgcccgctccatgtcttgcttaaaacaaaactccgccacaaaaagattctcttccttcgcgccaaccatgcgaatattcagaccagccgggttgccccacgccggctccatcgctccctgaatcgacgtggcatgaacaatcgtcggagacaaaactttaccgaccagagcccaactcgcatcagggactccctcgtcctcctcgtcgctaaaatccgcaacctcttcctcctctgctgtcagaattaggcccttcaacaaatccgcaacttcatcttccctgtgatccaaaaatccatcttccctgttagccatatctgccaaaacggggagacaaaacacgaggatgtgatatgtgcacgaagctgtagcactcacaccagataatcccaaaaaaactagggtcctaagcggcactgcccctagtgggaaaattttgtggtcaacggcgccagagcggctaaccgtcgatatgcgttggccgccggggacaggcacgtctctggcgtggcgtggacaccgtggccgcagtggccggcggcgaagcaggtctcaagccgcgtcggagaagaccgcagatagacaatcgtc

SEQ ID NO: 167389 - DNA, 626 bp, Zea Mays
acgagcagtgacacgacggaggggcaaggcaatggatggcagaaatctgtagactgtgcctctctctgatctgaaaatcggcgagatgtacgcggtacctgaggtacaagccggcaagccggtggtgcgcgcgatcgtacgaaggatcgatccggacggcctccttgcagtcggcgacggcctcgatgaggcgtccgagcgcggcgagcgcggccgccttgttgctccagtacgccgggcggctggcgtccatgatgatggcctggtcgtagagcgccaccgcctccgcgtagtgcccctggcggtactcctcgttgcccatctccttgagcttctcggggtccgtgcggtgcgacagcgcccggcacagctggccccccgctgcaggtgccggccggggctccctgacgatgttccccatgccggaggacgcgtacccgtggggcgccttccgctcgttcgccgccctgccgcccgcgttcaggttgccgaggttgcggtgcagcatcatgttgcccgaggtggcgcgcaccagctgcgcggtgcccttgaccctctggtggtcgaggatcatcctgtccagctccgcggccatgccgctgtactccgccgccggctccgcggcg

SEQ ID NO: 167390 - DNA, 650 bp, Zea Mays
caagggtttaatcactcgatccatgttcattgttatatcatcctcctcccctactgtcgtctcaactgttgtgtcgtccatcatgtccaccacactgtcaccatcaagctcaacaaaaacaacttcttgcaatggcgtgtgcaactgcttccatacctatggagctccaagctgatcggataccttgacggtaccctcgtcgcaccggcgtcacaaatcgtggcatccacacagactggcgctgagttggttccgaatcctgtctataagcaatggtacaataccgatcaacatctcctgagcgggctcctctcgtcgatgactgaagagatgcttcgcggcgtcctgtatgccaagacgtcaaaggaagtctgagattctattcggacagaattttcctcctcgacccgtgctcgcacagtgcagctacgcgtcgagcttgccaccgtcaagaaaggtgatatgtcggcggtagattactttcgcaaagtcaagaaccttgccttggagttggtagttgcagatgccgctcttcgtgatgaggatgtgttggcatatattctagtcgtgcttccctcggactacgaccccttcgttacatctataacgaccaaggactctatctctctcgacgacgtctacgcccacct

SEQ ID NO: 167391 - DNA, 640 bp, Zea Mays
ataagcgcggaggaaacccccaggaggccttcgcgaacttatcgggaaaagagacaaccggtcgattgcacttctgacccgatataccaaatatttgagaattatttccagagagagaaagatcccggaaaaaccggtcacccgacgccgcagggacagaagagccattaatgccgggggcagaatcctgtccaaaattctccgggcactgttccaaaatcttcttgggcctccaaaccaacatccgcggggcccatggggagacgtgaggggtcctcagagaagaccgaaatcctgagcgaaccatgcggccaactctgcgatttgaataattttgaaaatgcggacgaacaacagcaaacatgattacggacagagcggcgggagaaggaaatccgatcaaaaaccgaacgccgctgcatctgcatcaatccttcgggggcacgaacagacctctgtcgatgacctaaaggaaccaaatttgcacctgacagagctggataacgagacattcgcattcggggccggggaagaacggcgatgagaaaccagtttccaggaattggattcctccgcagaataacgctgccactcaatgaaccaattagggccgccagaattccacaggtgcaggtacgcc

SEQ ID NO: 167392 - DNA, 537 bp, Zea Mays
gccatggaatccggcagtagcaagcgataagccaggctgcccactcgggccaagatagtgaatggtccaatgtatctcgggccgagcttcccagagacaccgaaccgcacaactcctttagtagttgataccctgagaaggacttggtcacccacagcaaattccagatcccgcctcctcacatcagcataactcttctaacggctctgagctgccaaaatattctgacgtatttcccgaaccttttcagaagtctgctgaacccaatcaggaccaaccagagatctctctcccaaagtctcccagcacagaggggagatacaccgcctgccatacaaagcctcaaatggtgccatcttgatgctagcctggtagctgttgttataagcaaactctgccagtgcaagatgatcctcccagctacccttccatgacagaacacaagcgcacaacatatcttccaaggtttggattgttcgctctgactgaccatcagtctgagggtgaaaagtgacactaagtgaaagcttggtgccc

SEQ ID NO: 167393 - DNA, 764 bp, Zea Mays
tgttcttggcagaattagtccgtcttggtagtcaagaaagcttgccgctggtcataggtggagattttaatattctaaggtgtccaagcgaaaaaaataaagataattttgatcaacggtggccttttcttttcaatgcggttatagatggtcttagtttaaaagagctggagatgtctagccgacgattcacctgggcaaacaatttggccaatccgacttatgagaaacttgatagagtgctggttaccacagattgggatcaaaaatacccattatctacggtcctagcattaaatcgagatatcttagaccatacacctttattattaaatacggggactcctgctcgagcaattcccaacatgcttttaagtttgaactaggctggttgcttcgggatgggttctacgatttagtacaggagttatggtcgaatgagtctggcggacagacacctttagagaaatggcaaagtaaaataagaagactaagacaatacttgaggggttgggcaaagcatactagtggtttatataaaaaggaaaagaaagccatccttaataagctggattggcttgataaaaaagctgaagtaagttgcctatcagctcaagagcttgatttaaagcattacttacagaatagactagccgagcttctcagggaggaggagttaaagtggtatcagcgagctaaagcaaaagatttgctccaaggtgattcgaatacgagatatttccatttagtagctagtggaaaac

SEQ ID NO: 167394 - DNA, 1885 bp, Zea Mays
tttcgagggaaatgaagagacggtgtaagttttatagttgtttcaaccaaaaaacaaaaaacttacaatcttttgccaacacatagctcacaacaactttttttatagctcacaaacagacctttagaatctgtaatgttttagttaagcttccttttcccttaaaattccctatagcggattgataaaactgaattccatgttataggggagggcttctatagcaattgagaaaatccatcccctttacgttcatgagacccacatgtcattgcaactctcttcttttatcttcctgttctctctttcctctccctcccatctctttcagtgcttgcccaaggtgacaatgtggcgacccaagtgctcgtctgcctagcgcggtctgggcccgcgtgcccagtgtggcagtggtgtggcggtgtggccaacccacacacttgactgcccgaagtggtgtcggcggcatggggcctgcgtgcttcgtgcttggtgcactggtgttgcggtggtgctccagtcctatcctatggacccacaaggccacaatcttagtgacatgaggaggaagaaaggagattttgagaggttgagaaaaaaattaggaaaggggatgtgttggagcttgttttttttgcttcaatccttttcattgctggttacagggagaggggattgttttggtaaagattctcttaggatttaggaagtttctagcattgaaccctccaaagttgttcattgtgtataatagtaggcctaaaattcttcggacataaaaatagatgttttgtgcaattttaaatgagaacttcgcctacgtaggaaggtcagatgccatgttagcttggaataaattttgagatggaagggacagatgacaagaaaggttcaattgttttcagtttgcagtagtctcctctacctttgggatactagataaggtccatttacattttgatgcactaccagttatatacaaaggactaaaggagtaacaaggtagaattcaatagtatgtgcagaatgctcatttggtagtttcttttcccatcaggaggactgttgaatttcttgctatggttccaatgtgtatgtatgtttcccaacagaatttttataatgttcagacctattatacaaacgggtccggtgttatgtacctacataagtttttcttggtcttgcgggttgttgatctagctctatgtttttttttgcttataacccactagaaatttaggtatctgtcatgtaatatattcagaaaaggagaacatacctcagaatattagcaaaaggaatttgcatcgtcactatatttgtataattccatgctagaatggttcaagcggtaaaatttaaaatgtcattgtcacaaccatgcgggggggggggggggtgcttgctgctgttatgtggggtgggagaggaggggatgggagggagcaatggctctatgcttgcttaggctaactccaacagagtacctatcgtgacacctaaatctattatagatatctaaatgacactatagcatctcgaacaggtaatttaaactcgatacccattttagatgtgatgtgggagagtacctatatattgatggccattttctcaaacgtgtatttgggcacaaaaatatttgggtctcgtctttcggctgactgcataacacgaacgtgtatttggattcccatttttgcatattattgttagagttagccttagattgaaaccgttacattacctatatatttatagcccctattggacttgtattaaaaacaaactagagcagtagtctttatagatttggacactcctttcctaacaaaccaatattctttcctaaataaactttattttatttactccaaactta

SEQ ID NO: 167395 - DNA, 597 bp, Zea Mays
gcgcactactgcaggcagcggcatgcaccctacgctgcggttcaccctctccgtacatggaggccgacgtccgaagagtatgacctgtgggcccgggccccttgcaagaggctgggctgctgctttcggcggaggcgaagaggcacagcgattcgctccttgcgtggtggctcgccttctccgcactcggagaccagcgcaccagctgtatgacttgtggggctggggccccgcgtcattggttgggtacgccggtgtgcatcgagggagacttttcgtggtgtttcaaggcacgagcgggggagtctgcctttaagaagggtttcatccctcgagtagcagccatgccttcgcttctctcccacttgctgtgtccttttgcctctgagctctgtgcgcccctttgcctccaaggtctctgctttgctccgcttgatggagcgtgctagcgttcgatggaagggtccgtgccagcgcattccccctcggcgatgtcaccaccggggagctcgcgctcttcgcttcttgcgcgatggcgctgccgatctcgccttcttcttgctgttgccagaggagcacgaccttggcggggttggc

SEQ ID NO: 167396 - DNA, 851 bp, Zea Mays
gggagagtgccgagatgagagagagaaagaggaagttgcgtcgccgcattgctagctgggtcgttgcgatcccatctttggtgattgagttcggccgttgaggcgttgagcatcccggaagattcggctccaggaatcgcaggtggaagagggctgcgccgcacgggtgcttttacgaaggcggcattatcggatcttgtgctgatggcaagggagacttccttgggcgcgtggatctgctcgatgcttggttggcgcggcgaatcccatggcacaacgtggacagtttctccaatgcctcccccgctggtgagaattcttccaagtagttcgattttgcctccacatccgtataagccgtggtctctcatctgccagccgcttcccgccgctcctttccgaagccgtcaccaggaaaatccaatacgctatggagggctcgccgtagtacagaggtggaggccgccaccatgaagcagtgaagggaagagagacaaactcgtcgcccgcctcgcgtttgttgggagtgggtctggcgtgatggccgggtcgcgttgatcgtgcgcatggtcggcagtgggggaaattttgggccgctggtcaaatttctcgccgccatcctgccgggcaccgtcgaggccatgctgagatccgccgccgccatatacttgtgctgtgcccgctgctctggggacgtcgtcgttccgccagggtcgaagcttcgggcgaaatcgggtggcgtcgtgggtcacggtcacagtgggcgttccatgccgattgctcgcgaggggaggataaagatgactcttgggccgtcgatcaagaaatgcgcggctcagatcatatggccg

SEQ ID NO: 167397 - DNA, 369 bp, Zea Mays
caagaatcttgatgggatactcagcataagtcaggtcatgttgaacactaaggccctccattggtagctgctcttcaggtaccctgagacacttcttcagttgtgacacatgaaagacatcatgtacatccgcaagatgattaggtaattccagttgatatgcaacctctcccactcgctttaggattaagaagggtccaatgaagcgaggagacaactttcctttgactttaaatcttcgcataccccaaagtggtgacaccttcaaatagacatgatcaccctccttaaactctagcagtcttctccgggtatcagcatagcttttctgccttgactgtgcagttctcaaattctcccttatttgat

SEQ ID NO: 167398 - DNA, 647 bp, Zea Mays
tgaagtggtagttttcaaaagctttttcaaagctagattgcggtttccgcttcatgagatgattggggaagttttgaataattatgaaatttatcttcatcagctgactcctaacgctatcgttaggctcagcatcttcatttgggcctttcgaagccagggaatggatccaaatgctgaagccttctgccgagtacatgagctacattatcagacgaaggccagagaagatgggcttcatgagaattttggctgttacaacttcgcttaccgcaaggatatgaaggccctggtgctaagctaccgcaccaagtggccaactggctggaaaagtgagtggttctatgttaaagctgatgagaagaaaagggagaagctaaagacgttagtactgagcctgctgagtttgagctacgggttgactaggcccttgtgtcgtatgtcgtcggggtcaccatgccaacaggctgtggcagaattcagagttgtgtctgagcagatcggtactagagatctagtgcaagaatacttagccaatggggtatttccgacattgggtgaatggaaaatgctgaagctgaagggagaaaagaaaaggatgaacttgttcgattgccctatcacttcaaattcaagaaacaatagaa

SEQ ID NO: 167399 - DNA, 473 bp, Zea Mays
ttggactgtcaggctatttaagtctgaaaattcagactgacagtggactgatagcaacttcaagaccaagttcatgcatgatctgctgcctttttgtgacaataccatatagcaaagatgtagctggtttatagcactacaatattgctgcagagatttggacctgttgccatgaagatttgagagaaaggttgctctaaagttgctctgtcaggaggtttttgggtgggattcagaatgaacagtaacctgcataagatcccggttcagggaaccttgacgtcggtgatctctacgccggtgatctcctcaccgtgattcacgccggtgttaagatatgcgcctggataagagtggatagctgtccacggtgaaaatatcggggagggggatggatgtggtctctggcgcgagcttatccgcttcagccagttgctcccgtggtcggccgggacgccatcaccggagtttga

SEQ ID NO: 167400 - DNA, 457 bp, Zea Mays
gtcggcgccgtttgatccgatgcgaacggctgtgattagaacttggagataccccttcacatgatggatatgatttgttggatctggatcgaatgggcttcgttcgatccgcgctatttaaaacggtggccatcagatctagatccgaggatcagcgttgcgtacccgtttgattcgatggggatctaatctcgtccgtccagactcgatcgggtggcccgtgttggtcgataccccttcgtgggacgtattagcaaaagagcccttccagtattgataaatcaacccgcagtctgtggaaatcttacgctagaccccctgacctttctgggaaatgaggcccagtccagaaaactcgaaaaacagagtaaataaatcagaaatgcatttttaatacaaaaataattactagaacttgtttaatttgtagaaaatccatatgaactccaaattggac

SEQ ID NO: 167401 - DNA, 577 bp, Zea Mays
tacctcatcttattccttttcgggtctatatgggtctttatccctttattggggttatcaaactttggtgttgaacacatactttgtttcctcttggaaggttccagttgggaactataatctcaactaggagatattctctctacactaaagagtggtcattcatcaggaatgtattatccggtatgagatttatgtgttgcatatttataaatcaaagatatgaatcctcataggatctcatgatggatcttcagaatcctattaacttcatattataattcatgccatttgctagatatattacataacggaactgtatttattcaacacatatgtgggatgggtctctcacaagaccacttgaaccatcgcattcaccacacattatttcaatagtgcccataaatgtccgaatttcaagctcgcgactttcactttgcgattcttggttcagcctcgattgcatttatcaatgacccgataagagagcttaaagcactcatgcctaggactttgttttggatccgtttgcaatctagagaggcaatataggtatcgacatatttgtctctca

SEQ ID NO: 167402 - DNA, 805 bp, Zea Mays
caaaactcacaagggacctttcagttacagagccctttagggtttatttttggagagagccttattacaaaccgcctcatgagtatcctctattgggacagtaactccacgccagatccgctaggaacatagttcctttggtggtagaacaccaaactcaacaagatgcagaaggtcagcctcagaaacgacacaaacatggttaccagcaaaataagggagttggctgttgggatcgatccgagggatgtctgggatggtagcactctgttttcttttcctgggagccatcatgatttttcaaacgacgcaaacggattcgggaactcagaaagctagagagcggcgaagaaaaaaacaagaactagggttcatagctcaagaggacgtcaacagaagtttgggttggcatactaagtcgggcgcaaaggggcaggccgatagctcgggagagttttggttgcagcaaaacaacatcactcgggcattacctctaaaatgctagtgaaccgtcagacacaagagcggagtatgcaacaacagattggcacgaaagcaggtgttcattcaccagtgggggagtcattataaaattgagaccgactcattatgagtcggcctccagcccttcaatcttacattacattacattactacttagactacattacactactagttaaactacattattctactactaactactactactatgctatactaatatttaagccggtagcattatgccaccggccttgccatcatcgccgttgccgtcgctaacaccgcctttgccatcgtc

SEQ ID NO: 167403 - DNA, 953 bp, Zea Mays
gcagcaggagcagtgacatcccaatgtaggatttatcaggacttgttagcctctaggggttgataatgtctgccattgaccatgcattagaagaaattatccctaaggaccttttatcagagcctcctgaggttgaaagttctatcgtccgtccagaggtcccagatggcgttcctttggctggtgatcctgtagggcaagagataacccggacattttctcacgcttcgtcgacattggaagacggtctagttcacgaggacacaatgtcccttgacgttgccagttagagtcacccagctcctttgggcatgatcgagggtgctttagcttccgagggtggtgctaaggatgacctagcccccaagggtggtgctgaggatgacccagcccccaaggatgccaggccaggctcctcttcggctgtctccatggatgttcacgttggatcaccactggttcaatctgaggaacccgtggtgatcgaatttatctactgctctcgtcgatctggtcaccttagagaccagtgacccggatgctgggaatctgccgcctgctgatggagctgaggtttccccgagtgatgctctcaacattgtccctgtcaatgccccatcaataggcagtgcatcaatgcttctagctctaggacttcctttatttttctccaatctccaggtggaccgaccgttgtttcttattattcatgttgacaaacgagttctcttgctaatttttgaaattgcagaatgtcttcgacactgtatctgctcagctaaaatcttgtggcgcccctgtccccgaccaagtttcgtctttgatgcagtggaaccctctactgctccagaggaaaatagatcatctgaaggcctcaaaccttggttattgagtctgtggtttccttttttgttgtttattgcttttcttatctcacatcttgtgttcttttc

SEQ ID NO: 167404 - DNA, 364 bp, Zea Mays
caaaaatgagaaatgatcgtattgtgtgtctgtgtccggaagaaaatcgataatcgaccgcacagaagaaaacgacatactgcggaccttgttcgggaaaaaacacggaataagcggggtgagttgggctgaaaggcagtgaatgattgggccagactgtgcgttgcaatcgaaccccgtacggatcagactatgtattatcattagatgtacatcgttttaattcgtatgaatgcaacctcaatatatctcacattcgaactccgcacctattattattgttatatatgagttgttctaacatgtataagcatacaccgtgtaagtttgggtgatatataaagtgtaaaaagcacaaattgga

SEQ ID NO: 167405 - DNA, 345 bp, Zea Mays
aatacattatgtgaataattaatgctgacagcacacaaagatctttgttgtatgctgtgttgcttctccgactggctactgccacgtcttgccgtgtccgcaggtgggtgatggcttgttgtagtagaatacggagtagcctgggacgcctattgtgcgtagaggcatataggcggagccgttcagattccctccgccttagtaacgcatgagcaatcagcgggagtcatgatgactgcagtccatgcagcattgataggcagtaacccttttcttggaaacgcgcgagtaatggtaagtcattgtccttgctatggtaacatgtgagtaacagcactgcccacg

SEQ ID NO: 167406 - DNA, 1485 bp, Zea Mays
agtctagcatgtgccgcctaaggccttgctactagcctagtatgtaaatctgcaggacacatgtaggtggtcgtagcctgctcttgcttgcatgtgtgttatcctgtgcttgcgaagcttgcactgtgccggatggatatatatatatatatatatataactatgactcagtgaagccagagaccagaccagcagaggccagagggcaaagctcttctaaaaaaatttggacctgcgccccgggccgtggcccaggcggccatagggctgggtccgcccctgaatagagcattttcgcatccacacagtcatcgtaacggcctgacacaacgactcagcgacatccccgcggcctctcccctcgcctgggctctctccgcctggcttttgcagaagcagaaaccagcagcgattccgccctcgctagtatcgccgccctcgttcaccgcttactgccggcgggatgatcccgttcaaccctgcggtcgccgcggaggtgcgcgccctgatacagggcgtggaggactccaccttcgaccccatataccgcgagctctcccaggtaatattccagcatcagcttcctaccccaactgtagacaatctgtctgtgcttcgttaaggtcgagtgcgcattgcacgaccgattctcaatttccttgtcaggatcagcaaacgatctgccaatggttgatcccatgctgatttaccattgttgatcgcgtttagaaacgcgatcaatgttttgggtaataggtggtttttgaggatttagctgccataatctactttttgacaagcacgtgtatacttgtttgctctagctatgaagacactcttagcatgtttcttactaattactattgtttcagattgtggattgtagccctggtgggtgcgttttttgcttcaagtttgtgtggatgaaattctcttaaacatcggtggcgcaaataaccaccgattgaaacatgatcttgtagccatcatcttcagatattgtgtggataaaccctacttcagcaccaatttctgtgaagcactgagggcaatgcctgacagcgatgggctccttgaaacattgtccaatgaacttgagttatctacaactgagagggttgtagttggacttgctctctcagactctgagaatccagacttgaacctggaaggtaaatagttaggtttcgaaaaacttttttattagaaatagatttgttttgggaactattagttcacttcattgatatgcttatctaattcttgttgtgtagggagaaaatttacaatcgctcaaattaaggaataaggagttatgctcaaaccatgctcattctgtatcaaatgaatggatacaggagattgttgtgttttttctccagaccgaaggcctctcaaaaaatatggattcctttactaacatttttccctattaaatgtaaaagagggtccattctatgttcctgtcccacttcagcaacccaa

SEQ ID NO: 167407 - DNA, 773 bp, Zea Mays
ctgatctagtcataaagcacctcttatataactgtatgagccaaacataagaatgccaggctaaacaaaatccaatcttttattctgctgcaacctcataaacagatgacaattagctatctgggtctaaacaaatccttggtactggcagaaaatttaaagaacttcccaagtggaaaaaacgtgtttgatcttgaaaatctatgtatctgacgtggatagctttagcttatatctggaagtctcatgcttcatgactacactacaactggtattttcttgtagctggcaaaatgaacttacatcacgaatacaaagaattagcatcccctacaactctgaacttgttgttgtcagaagctctctcaactccctgaggatctagtagtagccagctaacaattagctatctaggtctaaacagatctgctactggcagaaaatttaaacaacttcccaagtggaaaaaacgtgtttgatcttgaaaacagatgaaggggcaaggagttaaactattccacgagctaatctcctaactggatcttttggatagaatgtggcacaaaactaatcataaacgtcaatgtactatcagttttctgtttagagctgacgcgccgaaactctattaccacattaacattggtctgaactccctgaggataaactactcagcaagtcaacaacagcttacactgaaaaaaggcatgattcttgtagtcctttttgcaaagggcacaaggctaaaaactgtaccggactgcaattgtatt

SEQ ID NO: 167408 - DNA, 560 bp, Zea Mays
gaaaagagcatggtctatttcgcgtgtgcgcaaccgtggcgtgtcatttgagtggcttcgttaatttgtttttttactgtccgttgagattttaatatagattttactgccattaacttagttaattagcctgttgtcaatttatgggtgtattatggaaaaacggttccttgagagcagccacgtctattttaagacactgaatgcgttcgggttgtgatatacgaaaatcctattccatttcttcttcttcttcgtgcttggaaagttgtgctgtggcgattgagttgttgtatctcaccaaccctttttcttggcgtgcagtaaggaggagagcgagtgatatctttgaacccttgtcgttatgaagcttgcacgaggggcggcaataaagtttttgggcagcgcaactgtgcgaccgctcgaaaccatttgacgatgatcttcgctgcctaacggacgaatcgacgcgtctatattatcgacctgcttcgtctacttttgtgcttgatcaacctaagcaccgacaaactcgacgtgagtaaatatgttaattcagt

SEQ ID NO: 167409 - DNA, 511 bp, Zea Mays
cgtggatatagaaggtggtgttatggggatgagaacatccggtgtggatgtggaagatgatggttcagatggaaaatcaggaatggaaggaagacacatgaaagaagtggattctatgggataatatgagtgagtggacttgttgtgaaagaagggacgattttcattgaaactcgcatctctagaaattcgaatacgacgagtagatagatcataacaacggtagcctttgtgttcaggactgtatccaagaaagacacactcgacagattgagcagtcaatttagtccgttcacgtggtggtaacaggacataacatagacatccgaacacacgaagatgatcatatcgtggagatgtcccaaaaagaactttacctggtgttttgccagaaagtttagatgatggttgtctattaatgagatacacggcagtggaaacagcttcactccaaaagtgtgaaggaacaaaagaagatatcaaaagagtacgagcactcccaataatatga

SEQ ID NO: 167410 - DNA, 1288 bp, Zea Mays
ttcaattccttgcacagctggactcccaggcggtgttgcatggtttgatgctccatctgagccagcgtcgatagcccaatcatcttggagaggcgattgttgatctagagttgcaggatcgactagctatgctgctgcattttctgaattttttggagttacaggctcggctggtactgttcctcttccagcaaccgagtaaaactcaatatcaaacactggtgttgcagatcctgctcgagtttcttgtttccagtcccaagctttactctcttgaaagatcacatcacgcgatatgtgaagtttcttggccacaggatcatagactcggtacccctttgtgcttgcctcatacccaataaacaccattggtgttgatctgtctgacagcttcaaaacaccagggcctattttcttgacatgagctacacacccaaatgtgcgtagatgatgtactttgggttttatgttatgccatgcttcataaggtgtcctcccttgtaggcttttcgttggagctcgattcagcagatacacagcagttgtgactgcttcgccccaaaactcccctggaacattcttgcttttcagtaaacacctcgccatttccaccacagtgcggtttcttctctcgacaacgccgttctgctgtggcgtatatggcgtggtagtgaaatgcttaatgccatgctcatcacagtactccttgaagtcaatagaattaaactcaccacctctgtcactgcgaaatgccctgagtctgccacctgactcagtttcagctagcgccttcaccttcttgaaacaactgaaagcttcatcttttgttgccagaagttgtatccacatatatctactatgatcatccactataagcatgaaataactcttacctcctggtgtcttgggcctaatctgtccacagagatctgtgtgaaacaggtccaaattcttgtctgctctgtaatttgccacttgaggaaacagctgtcgttgttgcttgccaagagcacatccatcacagaactcttccaccctatcaatcaatggcatgccttctaccattttcttgacactaagatctctgagggcctgaaaattaagatggccatatctcccatgccacatccaagccacatcatcaacctttgctactagacagacaggtgctgcaagactagtttttagcaaatacagtctattcttgactcgaggtgctttggccagcagtgagcgctcgacatcaaacacattgcaaaaaccatcttcgatcacaactttgcatcca

SEQ ID NO: 167411 - DNA, 318 bp, Zea Mays
ctcatataacaacaaccatcaggccagtatcaagatgtcaccgttcgaagcattgtatggacgaaaatgccagacccctctcatgtggtccaatgtaggggaaaagacactggaagggcctgcctttgttaaagaggctgaagagaaagttgccctgatccgcaaaagattacttgaagctcagagtcggcagaaaagttatgcggacaacaggcggagagaactcagatttgaggaaggagacttcatctacctcaaggtctccccgatgcgtggtgtcaaaggttccaagtgaaaggaaagctagcaccgcaatcc

SEQ ID NO: 167412 - DNA, 429 bp, Zea Mays
ggacacgttcgtatgaaaaatctactacacctagttttccctcacctaaacctaatgtggagccaaccgcacctaacatattggttgcaaatgggtcatcttatacccagccattttatggtatgccgataaatatgtttatagcaccaccacaaccatcgttgcctagcacgtgaccggatattgacacagtcagaccgtccgagcgtcaactcagactgtctgactacatcatggaacgtccagcatattttgtcggatcgtccgaccctacataggcctgcacacagatcacttaggtaacaccatatacagatgaactgtccaggtataacctcggaccatccgacctcttacgccagaccatgcaggtacgtgtacgcagaacaccagatgcacaatatgcaccgtttttgcacccatcacagc

SEQ ID NO: 167413 - DNA, 560 bp, Zea Mays
tatgaaacaatctcaattgagcaaactagaaccataaatgtcctcttcaccttggctttaggtaccccagtcctcttcaccttctcccttgctcttggcccctcgaagtccttcttgcctttgtcctcagttcaaccagctgtctccaagtaatgtacattgatttctcacttggcaatgtccatccttcactttggcttgtgatgtccacaatccatagtcaacttgtaacaccccattgctcccacacaatgagtgttaccaaagaccctccccacaaactcaaacaacaaaagaaaagaaatggagacagaaaacaaagaaaaatccggcaacacctcccttgaaagtagcataacgagaggcacatagagtttatacatgatgtaaaaaaggtaatccacagtgtataatcaggatgcaaaggtagtaatgaagattcatgaccaaaataaaatgaattcagccaaccaaaagaaagtcgaccaccaagaagactaaaacttattaattccctggcacacactatttcataacaatcaacccccttgtcttgaaac

SEQ ID NO: 167414 - DNA, 626 bp, Zea Mays
gaaatatagcatcaaggatgaacttaggccactgttctgccccggccgccgtgtccgcctgactcacggccgattcagataaactcaccggagttagccgcctatcggccgtgcaccacgtgcttaggttctctaccacgttgcagtaactcatcttaggcgtgtccatttgccgtaggtgaccttgccacgatgaacgccacgaatccttttcgccagtgctcttccctctctccggccgccaacgcgctatgtcaaattcatgagccaccgccctcgggccctataaattgacagtgccattagctccactaggtagttaagcatccagcgcacccactcgtgtctcgaatcatccacagagagctctaatttgggatttcccccaaatcggtcaaaaatgccgcgtgtgtgagctcgccgtggccagcgctccacaggtctgatcatgccctcctaactcttgtttcagtactcttgtgtactcttgatactcctcgacccattaaattgatctagatcacgctagatcaccgggaacacttcagattgtcctcggtttgcgccatcaccgtggacagaatgattgtgagccagaaccttgcaattgagtgaggggaaatgat

SEQ ID NO: 167415 - DNA, 1020 bp, Zea Mays
gcgagagggaaggaggactcgtcgaaggtgacatgtcgagagattatgatgcggttggtggcaaggtcaaggcaacggtaacctttgtggttgttggagtatccaagaaacacacagagagaagaccggggagcaagtttatgaggcgtggtggcagagagattgggataacatcgacagccaaagacacggaggtgggtgtgtcgggaggagtaccgtgcaaggcctggtaaggggtggaaaaggagagggttttagtggggtgatggttgaaaagataggtggaggtatgaagagcctcaaccaagaagacaggggggagatgtgcatgaaaaaggagggaacgaataatggtgtttacagtccggaggacacgctcagccttgccattctgctgggacgtgtatggacaggacatgcgaaggataacactatgggagagaaagaaggcgcgtgaagatgaattgtcaaattcatgaccattgtcacattgcacactcttaatggtagtacgaaattgcgtggcaacgtaggagaaaaagtgagcaatagtggagaacgtgtcggatttgagacaaagaggaaatgtccacaggtggtgcgagcagtcatcgaggattgcaagataatacttaaaaccagacatactgggaaccggagaggtccagagatcacaatgaataagatcaaaagggtaccaagcacgagactgggaagaggaaaagggaagacggacatggcgacctaactgacatgcatggcagaggtcagcattattgatatttttattacaagtaatggaagcagtgctggctaagcgggagagggcttcagaaccaggatgaccaaggcgttggtgccattgctttggagacgcagtggtgaggaagccagtggcagctgttgaggggcgaagcgggtagagggggccagagctattgcacctggtgatcacgtgttgggtcctgaggtccttcacagaaaaaccaaaggggtcaaattcaacagagcaagaattat

SEQ ID NO: 167416 - DNA, 677 bp, Zea Mays
atccttagatctcgcctcctcctcaacatcaagagtagcaattagactttcaacagtcattgcctccttcttgtgtttgagagtcatggcaaaattcctccaagtaggaggtaatttggcaatgatgccaccaaccacgaacttgttaggcaagacacagtcaaagtgtgcaagttcccccaccaaaagctagatttcatgagcctgttccatgagagaacggtcatcgaacatcttgtattcatggtattgcttattaacataaagttctcgtccagcatctaattcagtatacatctggtccaagatctcccataaatcacgagccacatcatggggcatgtgtatgccatatagttgatatgacaacagcgtcaagatacaaccaacataggtagagttatccgactcgaagttacggtcctggttctcattgagaggaagtactagggaaatcacccaccatatcctcgacgacatgagccagaatttaaccctagtctaccatctcttaaagttttgaccatcggcaaaacgctcaggttttagtgcatccgaaggtccagccatgttaattctatcaggtttctagatttttggaaaattaacagggcctaagattaacttgataatgcagcataaaatgaaaaacccagatctactggaagatactatcc

SEQ ID NO: 167417 - DNA, 686 bp, Zea Mays
aaggccttcagcgattcaaaactagcttcggctcattgaccttcggcaccatcaccctaaaaatgacaaaagcaagggtaatgaggaatatggtaagggaaaatataaaataaaagcctaatggtaaagagagtttctatactttgttgagcaggtttcgagcttcgtctccagccagcccttcgcccagatttgggtgataaatttgttccctatgctctaggcttcggccggagtatcaactaaaaatcagatgatgacaggccgaagtttggcctattgacggctctcacataattgcattcggccttcatgaaagctgcagtcgttccacgagaagccaccagtgtatagaaatcttcatgcctagttatgacttcgtcgagggcttcaacttctttttcaatatgttcaagggctccggaaatatcttcggaagaaggggtaacttcttgatatgcggctccgacagaattgaatatccccttcaaccgagcaatacattaagtagcaaagccgaagcatctatcccaaagatttgtgattgtctcgctcagtttaacgttcttttcaatttctgcttcaactcttgcatttaatgccttggactcgcgatcgaagcgatctgagttcttttccaaagttattcgagcttcgtccagctctctgctcaatttttcattctg

SEQ ID NO: 167418 - DNA, 651 bp, Zea Mays
atcaaattagggccagattgagcatcaggcacagttggcacgtcatccacagcacgatcatagtcttcagggggacgatctactacaaccgaccgcatcataacctccatgagttgcaactaggtcttcatagccgaagtaacgtaattatcccaatccagttgagaatcaattgggatgactcgtcttatgacatttggtggatgaccaatgttaagcactccatcaaccgcaatgtcatcatcttcatggtaacctagcttttgtttagcctttgtaaacacatcgctcaaggagggtctaccaacaaatagtacagacatgtgtcgcatgtcaatgaacttggcattttcatagggatcttcttccacattgcctccatgatataagctcataaaattgtccatctatttgaaacacgaattaaacattcaatatccactatggatggttattgcctaaccacaacccactaataactagctacataactataactataaccacaacccactaaaatactaaccaccttataactaactacttaataactaagtataaattttgacagcacctcccctgcacggggaggatactaaaacctgcacattcaactcacattcatcatattcgatcaaattcgcatttatc

SEQ ID NO: 167419 - DNA, 507 bp, Zea Mays
accaacattagcgcccacctccggtgaactcatcaacgaccaccttcatcatgtcgtcgaagaagacaacggcgccagggctattcttgctcctctagatacctatcacgacggaatccttctaagagaggcccgaagctagaagaggaatgccactagcccaaccccacaagatgaggagctagatcaaaagatcagcaacctggaagccatacatcaacaagtggagaagagaagggagaagatgcttcagttgtctgagctacaaaagaagatcgacgaagcagccgaggaaatgcgacacatcacacaagatactgagcaagggcatcgaccacaataaagatacctttgtcaggagggccctagccacgacgatatgtggtatgacgattttcaccatgataatattgcttttgatgatgcttctcccctagctacagagctgcaggctgtgccatggacaccttcgtacaagccaccccaactacccatgtacgatggcca

SEQ ID NO: 167420 - DNA, 558 bp, Zea Mays
gcaggtgcgaacgctttgctcaggggtggagtcgactggctctttatggtgagggggaaggtgtcttcgagttgcaggtttagtagcggcggcgtggatgaccttctttaatcgtctggtattggttggtaaaggtgactttggacctcttatggtttttgtggagactgtctccatcagctcagctagggtggtattggatcgcgtgttctttttgggagccatcatgtgattagtcttcatagcaagcacaatagcgccaaatgttgggttcggactcgatgggcccaagcacttgcgccatatgttgggtttggactcgagggggccaagcaattaggagtaggtcagacaaacagtacacgacaaaacaaatgacatgggatcccaaatgtcttatccatcgtatcccatctagccctaagacaaggtatttataggataaccaggagaccggggatctaagtacgttcgtacccctagttacctgctacattcttggactatactatacaatagggtaattactgaacaatgttaccctatgcctaattacgc

SEQ ID NO: 167421 - DNA, 541 bp, Zea Mays
cgaagaattgagattgatgctatttaatttctgtgaagccagtcttatttcgaaacaagagccaatgtaataatgcatgttgccatcatcgctctttggtgactataagcgaaaacactgccctcgccccccttcaccaaaggacggctgtggggacatgtatgtggacaattttcttgcacgtagtgcgcatcttgtacttggaatatgacatgcctttcattgcggtgccttttgaaatgtatatgcactaagttgcagttgtggatgtcttcgcgcgcttaggtgttgttaatacgtttatattgttccgattgcaacgttaggcgattggtggtagggtattatattctgtctaggcgatgacttcgcctttttgtgatgcgcctattgtgtgaatccagctgcacccttaggcgacttttgcgtggatagaactatgcgtctcgaggacgacttcgcacccttgggtgttgttacacacttgttgtactgatctagctgcacccttggatgacttttgcttggataaaaatatgcg

SEQ ID NO: 167422 - DNA, 410 bp, Zea Mays
tgcagcaacaggagcgcgggagcagcggtccaaccgcaaatcagactctggtcccacctgcaggctcgcatcctcccctgaattaggggtaccctcttctacagcatgaagacgccgcacccatacgacgtctcctagccacgcgggggacggcacctgaccccaccgcatgggcaggccaaagggcgccacgtggcaaggaaagacaacacatcccagtaagtccggacccccacagaaggacaccggacccctatacatataagtccggagcccccgggtaggtccgaacctcagcagggtcccgaaacgaggaggaccctggtatgagcaggggtccgatgctgacacgtgtccgggccttgccctccacttccagctcaggcggagacccgctgcttgtggcccat

SEQ ID NO: 167423 - DNA, 342 bp, Zea Mays
gaccaaaaatctcacatgaacaaccttgtaacatattacatgaaaatatctctaaggaacagcagagatataaattgtcaagtaaatattgcatagaagcatttttgagattagtggcatgtcgcttggattgaaggctaaacacagtcacacattaatccttgaagcagaaagggtcaaaggtccaagaatcattgtataaattatttacctaccaaactcataattcgtattccaaaatagacctatcaagctcgtaaatattgtgttcagagaatagcgtgtaggcaaagataattgtgaattcttgcctcctacaactctcaataccattgcaatagc

SEQ ID NO: 167424 - DNA, 902 bp, Zea Mays
tcggtaatgggtcgactcatgtctgtcacctcagcaggtgacatagtcctttctggtcctttatacctcaacaacatccttgttgcccccaacatcatctagaaccttttctcggcccgtcacttcaccattaacaattgttgttttatggagtttgatccctaggggctcactatatgggatcttattgctgtggttgctcgatacgacaactctagcccctatatcctattcgcttccccaccgatgttgtccaactttgaagctgcaaggagcaggggcaggggtcctcttcatcgcccctggaggagatcaactcaagtatgcactatagcttttattcccagcctccaacaatgcagcagagtatgaagccttgatacatgggctcaacattgttgtgtcactcgacatcaagagaccgatggtatacggagactccctagttgtcatcagccaagtctacaaggactgagactgctcaaccgattcaatgggcaattactgcgcgacggtcaggaagatcgaagataaattcgaaggcttggaattccaccacatagaaagagatcacaacgcaatagcatatactctatcgaaggtgggatcaagccggcatatttgtccaggaaatacaacagccaagcatcatgacgagccagcagaggaatgcaaggcagtggagcaggcagagccagacccgagtgactagagggagccaatcatcagacacataaaaaacgaggaggagccggatgacaaggccgccgccgagcgcattgtgaggcagtcggctcactatgttgtcatagaggaaggggccattggagtttccgtgaaatgcatggactcaggtgtcaggaagagtctactggaagaaattcatgtagggcagtgtggag

SEQ ID NO: 167425 - DNA, 721 bp, Zea Mays
gtccgggtcaattaaaggggtcggggagcatcaccatcatgtaaggatgctagaacagggacaagaagggaatgagcagacctggggaaggctggccgcggtgatgtgtggttcacggcatcagagaatcgatttgggggaaaacccgaattgcggggctacgatgaacgagtggagatgagagtgggtgctatagcttgacgattacatggcgcaaccgactaggccctcaatttatagaagggtaaagcggtggccagcaaatttggggaggacgcgcggcggccggaatgaaagggtgagtcaccggcgcgacttacagtggcacttactggttgaggagctacggcggtcatcgtcgagctggtgcggctagtggcgacgtgtttaacggatggaagcgtggcacaatcatggcgcagaacggcaactccggcgatggccaagaagccacgtcgccggcgtaaaaggtgagggacagcgaggccacaatagttcatacccatctgcaatgagatcttttcaaggccagcgaaatccattcacccacgacacgaatctcgtctcccaacccaactccggtcgcgcggatcaccggcgatgagctgtccaagctggcatcctgatccatatactgtaccatggggaagttcagttaaatacgcctgacagccatggtttagggccaaattgctcctaaatttcaatggtaacacaccta

SEQ ID NO: 167426 - DNA, 826 bp, Zea Mays
accctatcttggacgatcggcaatggttagctggcatggatgcataggatatgtttattgagtatatcagacatgtttgataagtgtagagaaattatgtcgccttttacgactagttttggatttgagagctatatataccactcgatccatccatttgagatgtgtagaacctaagaacacatctgttagaattatgtttagtgttttctcttgagtcctcctgtaattatctggctgcccttgtgtaatgtgcttgacccaactcttggtctatttaatacactcccaaccttgcttagggttatggtttcccatatggtaatagccaagttactttccagttttctcttccatccctcccttccccatagccgtcggcgactccccaccactttcgcaacgcctcctcccccaggacgccgaccatggtcttctctcgcgctggcgacgtctctctccccatctccagcgtcgatgacgcttccagcacggaccaccatgccaccgcccctacacgtgggcccgctccatctccaacgtggttgtgggagccataggcacgcacgtgcgtggataccaccgccgtgggtgcgactgacctcctcgagcccagcgtggacaccgacgcgggtgcgactgacctcctctctcccgacctcctttcccgctactctacctagtgacttcgagcttttccgacaccggggtcctctacatgtccagcagtatccttccccatgccccgctgccctcctcacgctcgactacagtggcctcggtcaccccagctatccgacgtgcacatgcaactcctccatcgttg

SEQ ID NO: 167427 - DNA, 544 bp, Zea Mays
agatacgtgattcataaatgaaagcatagatacatgattcatcatcccacttttgtgatgtggttcatgcattctgtgcattatatccctacaatatactactctttaaatatctctcactatttcattacagcattcactccaccgaaatactcttatatgcatgatattatatatatggtagttcatgtttttccccacccactggaatacttagtctgcaccgaaatactcttatatgcaatgtcaatccatattgcaaccaccagttttatagtttgataagatattggaggcaaacaaatcatgttgtcgtaaaaaataggatgttaatcaattgttcatatgtaagaaacgacaagatgtcattcctattatgatcgtttgtaacccggggtcaccccatgtgagaagtaagttaacctccatatcatcacgatagtgtattgtaacccactggggattccacctctgcttctctaacttcgacgtcgatcgtaatcaccaattagttaagtctgaatttcctcagggtcgcacacgc

SEQ ID NO: 167428 - DNA, 535 bp, Zea Mays
gaagtagagagacaaaggtagtgagagaagtagagagacaaagggttcaatatatcaaggtagatattgtccaaggatgacaatacaatggcaagaaagcaagggttatatagcaatattatgagttagaaaacaaccacaatataatgtcgtctttaccgatctagtcgaaaactcagcactatagagctatcctatcaacctaaccaagaagaatggcaatagatccaagagatctataacgaaaacttcttgcggggtggggataagacagagaatgggcatcctcaatagcttctaaagggttccttccggtagacttcacttcaagttccaaaatcctaacttgatcatcttgtagtgcttttgggtagagtcttctgatagaacaaaatcagactagaagagttgaaaataaaagagacgagttttgatataaagtaagtttttatggaggacaatatatcaagcttttgaaagactgactgggctttccatttctaactaatctagcgacctacggtcacattgcttt

SEQ ID NO: 167429 - DNA, 282 bp, Zea Mays
gactaggactgctataacaaagatgaagatgatctataggtctacaactttggtgcagaaggatgatgatgttgccatggaaaatttggagaaaacctgccctaaacctcggctgtcaagctaactaaaaaagcttccaatggtacagtaccaaaatatcaacataagcagatcccccttgccgctggcgacctcgtgcgtagattcgctccgatgaggtgattcgtgcccacttaagcccggataataacgcagggtaaaaagatcgtcaccgctgttggg

SEQ ID NO: 167430 - DNA, 886 bp, Zea Mays
ggacttcgcttatgaagtagacgaggtgccgaagcgggcacacaccttcctcttcctatctttcaacgacgagcaccaaactgaccccctgggtagtccatgcgatgtagagtaagagtggctccttgtccttcagtgggaccaggataggggcccgagtctggaggctcttgaggctgtcgaatgcgtcctatgcctctgccaatcctttgaagcgatcatctttcctcagcaacttgtagagtggtaacccacgctccctgaggcatgacatgaagcggctgagggaggccaagcacccccatgactcgctagatgcccttgagatcctgtatgcatcccatattcatgatggcagaggccttctcttgactggcctcgattccctgctcggagaccatatgaagacgaacaacatgcctcctagaacgccgaagacatacttttctggattcaatttaatatcattggtctttagcttgtcaaacgtttctctatggttatggacgaggccctcggatcgctgggtcttgaccacaatgttattgacataggcctctgctattcttccaatcaggccaccgaaacatttaatcatgcatcgctggtacatgacccccgcattctttagtctttacaccaaacaacatcgtcacatagcagtatgagtcaaaaggggtgatgaaggaagttgtgggttggtcggatttcttcatcgtgacctggtgatagcccgagtaggcatcaaggaagcttagaacctcacagctggaggtagaatcgaccacctgatcgatgcaagggagggggaatggatcctttgggcatgccttattcaggtcggtgtaatcgacgcacatcctccatatcatgttttcttttagac

SEQ ID NO: 167431 - DNA, 632 bp, Zea Mays
ggtaattctctcttatccttgtagcagataagctggtttagtgaaataaactgatttctatagtcatatttagtttttttggcccaaggctcggtgccaatactgcaataaattgttctaccccaacaagatgaaggtgcacttgatgtatcactgtgggcctaatgctaaacgcacagaagctcaggctaagcagcagagcaagaggaagtgggacagcagcaaggaaaaggtgaaggagaagaggagggttcataagaagggtgatgaggcgaataaggattttcaggaattggctgatgaactgggcagacagttaaggggccaatctcctctgcattctatgcggtgggagcgtgttatcctggatgaggtgatttatgtgcctttcatgtttcattttgatgtttttaattgatatcattgcaattggaaaactacccatggaaggatcaaataatcaaacgaaattctggaacaattgttgcaactgtttctttgatttattcattgaaataaaggttgttgattagttgatttaatatcagtaatccatccatatgtagaattttaagctagctttatactatttataccaaggaaaactgaaatggtagcctccataaaaattt

SEQ ID NO: 167432 - DNA, 281 bp, Zea Mays
atccgcgtccagtggatcaggtgagctagcgaatgtaggtggcttatgactcatgaactctctatgcttgtctcggggtggaactggtggtggtggtggaggcaatggcacttgttgctgctgttgctgttgttgtgccctcctttcctggcgtatctcatcccgctcctggcacaactcctgccgtatatcttctctttcctgacgcatctcctggcgttcttgctgcatctgggcacgcatatcagccatagtgtccgccatttgctgcatcaccgcca

SEQ ID NO: 167433 - DNA, 554 bp, Zea Mays
accaagctcaggcgtggttaggcctcaggcgtccgctgaccgaatctagtagatgcctgatggtcgggctgtgggcaaagaggccagatggaaggatggtagtgagctcgtctaacggcaaggaggtggaggtgaggcatggcgtgtcctatggaagtggaggcaaggcactaagacatgcaaaggtggaggatacgagggagaggtgcgtggagccgcagcccaagatgtggaggcgacgcagctactgcagaggccagaggccttgggtttatctcttggtttacttgggttgagccaccgaagcctagacacatgctcaggcaatccaagcctaggctccacctctagttaggattatcattcggaagatgagcatccattaaaggtcgataaggataaggacacgttggaggagtatatgagtatggaaatataagttaataaagtctgtgcagtgaggaaacaagaataagtataaacatcctcctaacgacgatgtacgaaagaaaggacattgaagaagccctccatatcggcagaggtgttaggaa

SEQ ID NO: 167434 - DNA, 409 bp, Zea Mays
cccgtaggcgtagctttccttctccaccttctccttcttcttcttcggctgcctatatataagtgctacatgcgtatgcagtgttcctcgcccggtttatttgccgatggactcttggtggtgagcagcgagcgagagatagagagggtgaaactacatatgcatatacaaatacatgtagctagcggcgtagtactggatactgtgccatacggagtatagtatatatactcgctgtattagcagtagaggcggccgtgcagcgatcggtcgacgatggttgttgccgccatgagagacgagggagaggagggacgacgacgggcggtggtggcgatacgggactacgatcccaagacggaccgcgacggcacggaggccgtcgagcgggagtgcgaggtcggcccgg

SEQ ID NO: 167435 - DNA, 475 bp, Zea Mays
gatgaacccacttcgaaggatcttatcgatggagaccgtgtcttcgctctacaggctctaaacaaataccaagcccagacaaaagcatggcgcgaccacatagtcatcccaagggaattcagcgaaggggacctcgtacttgtccgaacagcccggacagagtccaggggcaagctggagcccaggtgggagggccctttcattgtcaagacgaaggcatcccccagcgcatacaggctcgcaacgccaaacggcgaagacttggagcattcctggaacatcgataatctccgcaaattttttgtctgactcatcagggccagctcgcccttgtaattcgcaaaaacaattccattctggcctgcactcttttcctcccggggggtgaggtttttaacgaggcggggtcatgtaatatacaagtgaaaaatcccccgcaaaaatctacgtcgaaaaaagaccgcgccgacggtct

SEQ ID NO: 167436 - DNA, 806 bp, Zea Mays
cgatcctagaaatgagatgatcggtctattgaaggaatattcggattgctttgcttggaattacactgagatgtcgggattaagccgagagatcgtagagcatcggctgcccatcaagtccagtttcagacctttcaagcagagagctagaacatttcatctagatcttctcccatgaatcaaggaagaaatccaccggctgctagaagctgattttattagaccttgcagatacgcagaatgagtctccaatattgtgccgatggagaaggagtcaggtaagcttagagtatgcatcgattttcgcaatttaaatagagaaactcctaaagatgagtatcccatgctcatagccgacacattaatcaataatgcatcaggaaatagaattattagctttcttgatggtaatgccggatataatcagattttcatggccgaagaagatgcatctaaaacgacctttatatgtccaggcttcgttggtttatttgagtgggttgtcatgacatttggtctgaaaaatgtcggtgctacttattagagggctatgaatttgatcgttcacgagctgttgggaaacactgtggaagtctacattgatgatattatagtaaaatcagctgagtttagttctcatttagctgatttgcgcaaagcctttgataagatgtgtcggtatggtttgaaaatgaacccacgtaaatgtgcttttggagtgtcggctggtaagtttttaggatttgtcatccatgaacatggtatagagatagaccctgaccgaatcaagtctatttggaatgtgg

SEQ ID NO: 167437 - DNA, 698 bp, Zea Mays
gcgaaggcttctaagtaggagttgttccttagtgttaatgctgatgctcatatcatcttgagggtcttcgtctaggatgggcattcctagcgaaggggctggcaagttgctgttgttttgaagcctcagggaattgtcatgttttttgctagattgggccatattctggcttggtagggatgactttatgtgttaaggggtgggtcgtttgggtgtcagaattagaggtgtggacacttggctcatgggatagcactcgtttttgtttcgaggtgttgccttcaccctctggctcggtggtggcttttggatcattggacaacgacgagatttcatcaacgaaggcgacctttccctttttggtgctagggtgagggctgcatttgctgcctcgaattcgggtggggagctagcacgggtgctctttttgggagacatcgtgggattggtcttcgtcgcatgaacattggtcgtcaaatgttaggcctcgacatgtgaacctagacactcaggaacaggtgagaggcacgatgcacgacaagacttttggtggggaactgtagtgccttgttatgtgtgtctcatccagctacaggacgggggtatttatagagcaagctgtgagaaggtggccccgaagtatatttgtacccttagttaccaactacattcctagaatattctatgtaacggggtga

SEQ ID NO: 167438 - DNA, 503 bp, Zea Mays
acattaatttgtactacaatcaacaaattatttagtatgcaattttattcttttaatcaacacaatatgtacaaacttgtatgttcccactgtttgcactcgcatgtatactccccagcttctatgtccgctgttatcttgaattgatgttgtccccacacaattttattagatctttttgtatgttgtacgatccaatctttatcacaactgtctgtgtccttcaaaattctgtatgcagtggtgtatttcattgattcctcaaatctattcataacagctctagtgtatgccctagagactctcacttcgaacctatacaatgtatctgttgtccttggtccctataagacgttaatatcataattaaacaatgtatttacataaacaagtatgccatacattattgataacaaacatgacataccttgctcatcaatgcctcctttgattctttcattttcctgctatgcagcattttcatcatttgtttagcgaactca

SEQ ID NO: 167439 - DNA, 470 bp, Zea Mays
gctagaatgaacagtgtcatgacacacacatatgtgcaaccagcatgtgccttgcatccatatgtgaactatgtcatggggaccacgaacaatctcatgacaaatcttcataagggtgtcgaaaggatgtttgatttgaatactggtgcaatggcattctaagagtatgactttttcaagaggatgattggagacttctcgagtgagcttgcaaggagaatggccgttgaccgcagtacatctctgtcgagttggtggtccgtgtttggattgaatacaccgacactgcaacgttttgctaagcagctgctatcacagtgtgcctcgtcgagtgggtgttagcgcaacaggagtacttatgcattcatccacacgaagctccgcaacaaacttggctatttgaaattgcatgagcttgtgttcattaactacaaccttcatcttcgcatccaacaagcaactagtaccca

SEQ ID NO: 167440 - DNA, 532 bp, Zea Mays
tcatgctgtagaagagggtacccctgatttaggataccgacaatagtgtttcctgccatgccaacacgcatgggtgggaaaatttggtggccaaatcgacggccaatgcagcgaccaaatctgggcacaaaaatgtaattggcgtgggagtactggcaggcaaatcctagacttgactgaaataagtggcatatgctcgatcaaagcccaaactctggcatagccgacagcaaccacgtcataaagttgtcccaaaaagcaagattaacaagcgtgtctgcccaaataactctaccacctacaactaaagtctaatgagatttcaacatatgtataaccaaaccaaaaccagtggcaagttataagatttgctgtcgtggatcggcaacatatttcgaacaggccaaaccaatgaacctaccaaaaggcaactcaccagcaccttttatgtcatctagagtgcaagtaatgtaaaactactgttgctagcttcaaccttaaacacaggtcaaaccaaacctactaacttcag

SEQ ID NO: 167441 - DNA, 332 bp, Zea Mays
ttaatcagcttcttagaaatggtctctaaaagacgaggagcaatatctactatccgctgcccacccagccatcgatcactccagaagagggtagaggcaccatttccaatctcagaatacatggccatttgtaaactctcggattttcctcgggatgtgaaggggcagggatgactagggcctggctcagttttttgcagccaagcccaacgcattataagagcccaactcagctcagtaatgctgaaaatacccagcgcaccaagctcgcgaggtctgcacactcttccccaggccactgcacaatgtccgcccattacatttttacgacc

SEQ ID NO: 167442 - DNA, 666 bp, Zea Mays
caccgttgtgggctctgagcaaccgcccttggttgggctgaggcacgccttagtcacagatacagccctactaccacgtggctaagaggtagtcgcatgggaactgcgccttgacacagtagtagggggtacccttgatccatggtaccgacagtggccctcaggcccttctcaggggaggatacgagcctataggtggggccaaagcttgtatcttgcgtcaacttggtatgactagcgaccggggcgcctcttctgcgcgcgtcgcattaactcggcgtgctcacgctaccagcccaccattggtcatatcaaccagcgcgcctaatcctgcggttgactgccctgtgattttcgcgctcgatatcttttactgggccatgcgcggggcgcctcgataccgccgcatatggctttgaaagtccatcttccctgacttccgtggtggccctaagaaggcacggtactggtgcaagtggcggttcgtcttccctgcacctaggaaccagcgcccatggagggtgaccggtgggcccaggccctcgcaacagagcttgggctgttggtttcggtggagatgaaagggcacacttccacaggtggcgtgctccttacgcggcggttcgccttctcctcacacgttggccaacatccgaggagtatgac

SEQ ID NO: 167443 - DNA, 997 bp, Zea Mays
gccgcttcttgcggccttcctgctgctccaaataaacagtctttcccttgacctgcctgaaggggcgaggaggatcctcgtcatctcctcccctggcaccgacacattcttcgtgcgcggcatcctgacctaacgactgtaaatgagagagagaagctaagcacaagtcgataacaaccgatagaatatcaaaagagtggatgtctacctgtaaagctcacacgagaggtgaaaatccaggcaggacaggagacggctcacgggcaggcaaggtcactaaaatgacagaagaggtgagcatgtattagtcacatagtcataagtatatgaaatgtgaataaatacatacacagagaattatggcacataaaacgagagatatggcgatcgagaggtcaaacgacgcgaaaacggcgtttgaacgagaaatagtgccataggaggtttggaattcgaattgaggcatgaaatgatggggaattgagtcgatacttcacgaataggtttatataggtaaatatgagtgaagtgcgcgcttggtttgatttcaggcgaagaaaatggaatttgggcactcggctcggaaacgatcgctcgaaacagggaaatgtgtgaaattgaagcctggtatatcggattggcgtgaaattgcgcgaatatgttactgaaggtgttgtgaaggtgcctgaaaatttgggatcgattggagcatttttggctggtttgggcatttcatcgaacatgtgatgtgcggggatttaggttttgaatgaaatggctattggaggtagggaaaccctcccgaaggagctaggaacctgcaggggattcaatgggacacaaaagaaccacatccaacacttcgattcatagaaaattcacagatttgatatagggaatcaaaggtggggaagaggtgtgctcactaggctttgaacagagagagaagagagaagaggggagaggggtgctcactgaggcttcttaccagagagga

SEQ ID NO: 167444 - DNA, 654 bp, Zea Mays
aaccattcttgacatggccttttgaactgtttatcgaatttgaacttataaggtagtcgcacaagttctttcttctcctttgtcccctttagcttcggcatgttccattcactcaacgtagggaacaccttataggccagatattcttggactagatctcttgtgctgatctgctcggctaccacccggaattctgccacagcttgttggcatggtgaccccggctccatacggcacaacagcctagtcagcccaaagcttaagcttagagggctcagtactagcgtcttgagcttctccctcttcttctcatcggccttcacataaaaccactcattttttcaaccagttggccacttggtgcgatagctaaccaccggagtcttcatatctttgtggtaagcgaagttgtagcaaccaaaattctcatgaagaccatcttctctagccttcatctgataatgaagctcgtgcactcggcaaaaggcttcggcattcaggtctattccttggcttcgcagagcccagatgaagacgttgagtctaacgatatcgttaggagtcagctgatgaagatagattttgtaattttccaaaacttcaccaatcatttcgttcaaaggaaacctcaaccccggtctgaagaaactcctg

SEQ ID NO: 167445 - DNA, 715 bp, Zea Mays
ggggtacccctaatccagggtaccgacagtggccctcaggctcgccttaggggagggtgcgagcctgcaggtggggccagagtttgactggtgatcggctcgctgctcctgcgcacccattgatgtagttactgccggcccgcctatggtcacgccgactgccacgcctgcccccgcgactgactggcccgtgacctccgtacttaatgtctttgttgggccatgcgcggggtgcctcgagtcgctgcatcggttttgaaaatttatctccttagccttctgcgacggcctcgagaaggcacggtattggcacgagcggtggtgcgactttcctgcacccaggaaccggcgcgccgaatgtatgatatatgggcctgggcccccatgccagaggttggaccaccggttgcagcgaagctgagggggcgcgcaaccgcagggcggttgcatgctccttgtgcggcggttcgcctccttgatcgctggttgtggtgaagatggaagggcgaataaccgcaggacggttgcacactccttgtgtggcagttcaccttcttgaccgctggttgcggcgaaggtggaagggcgtgtaaccgcagggcggtttgcacgctccctgtgcgactatttgccttcttcgcgcttcaggccagcttgtacgatgtgtgaggcctggcccccatgtcatagaatgggaaccctggtgcgcatcggg

SEQ ID NO: 167446 - DNA, 835 bp, Zea Mays
ggtgaccactataccctactaacggagcaatcggcttaagtcggcgacgacttaagacggtgcaacatgctcgcgcttacttgacttagggtgaccactataccctactaacggagcaatcggcttaagtcgacgacgacttaagacggtgcaacatgctcacgcttacttgacttagggtgaccactgtaccctactaacagagcaatcggcttaagtcgacgacgacttaagacggtgcaacatgctcgcgcttacttgacttagggtgaccactatgacctactaacagagcagtcgcctttggtcggcaatgacctaagacgatgctacatgttcacactgactcggcttaggggaaccactataccctactagcaggacaatcaactcaaaaggcagcaatgatttaaaagtcagcacgatacatctacctatcctaaggcgaccactatgcctaaccagccaagcgattggcataagccagggaaagttccaaaaccagcacgctacatttactttcataattgttcaggatgactgttataccctgacaacaaaaacagtcagtacttcaggagaacaggatgttataattgtcagcatcaaggacccgttctagtgccctatccacaaaatattcaaatacaaccatcacaaacacatagaattcatagtacattcagtatttcgcaggatgtcactacatcaaaacaacttagttggcaatgttttccacaggagccagtgaagaacaaggtctactcgaaggatcaggggcagccttaacgtcggcaacaatgtcatcaggaaccactacgccgggcctcctcat

SEQ ID NO: 167447 - DNA, 274 bp, Zea Mays
caagaagcaaagatggcagtgttgagaggccgcttaacactagtgctcatcctcagtctcaactgctgcttctccttccccacagtactatcctcagttacttccgatggcttcctccaatgcctgtccgacaacatacctgtcgggctcatctacactcagggctcgagcaacttcaccgacgtgctggtgtcctccgtccggaacccccggctgttcaccagcgccacggtgaggccgctctgcatcgtcacgcccgtcgacgcatcccacg

SEQ ID NO: 167448 - DNA, 657 bp, Zea Mays
gtggctgtgggtgctagaaagacgttagtttggggctggtaggagggttgttggtagtaatttgcattctgttctacatatcctgccatggacgatccggtgtgatattcggatagtccggtgatgtattcggacggtctgcgcgtatagccggactattcgaacatctctgttgtcccgggtgtggtctttggtgtcttgtcgcggaggacagagtcgaccgctgctaggtcggatcgttcggcctcaggcccggactgtctagccgcgcgtaggggcgttggatgctctcatataggtggtggaggatgtggttgtccattataggagttcatcgacatcccataaagtggttaggtttggacatacccatttgcatccgatgggttctataggttttccttagtttgggcatcgtgtgatggaaaactagtaaagacagatttatcaaacgcacatgctagttccctataattctcttgcacgccacctaagattttgttgcatatgttcatgttgttcctctacgtaagattgaagagcttggatatcgtcggatttacttacaaccggtctgattgcagtaggacaaatattttcctggttgtattccctttgttgaacgagcttctggtttcggtcaaccttgaaatcaac

SEQ ID NO: 167449 - DNA, 506 bp, Zea Mays
cgggaatctaacactctttgacagggtgcctatgatttttgcaccagcacgatcccggatgcatcctaggatttcttcgtcaaccccgccaaagagtactgatccaggctggtagccgcatgagatagcaaattccttcaattatgccttatcctcttcggaaagccgttggccacccaggtgccgtaggtcgaagtctgcttcttccggagagatttctttagccttcttccctttgtctgaaacttctatggccacttccttctccacagccacgcctgatacaattttgtcaatttcggacatggtagctgtgagatcttcgccttcagttgcaacgacagcttcgacatcagtagatttgacagtcttgtctgccgaagctagaggcgaggtttgctcaatcgcctgcagtatgttcatcatacgtcactttttctgactcccgtctcttccattggtaaccgaagggttttcctttttctgtaaaaggtttgtcagttcca

SEQ ID NO: 167450 - DNA, 362 bp, Zea Mays
tggacctcaagaccttttgttgtccatcccaatatagttcagtttgtgcacatggatggagaacagcagggagaggagatcttttctgcacccaaatctgatccaaggttgtgttaaatgaattactctcaccactatccccaaaacagtccaacccctagatattttcagtggagaatgagacctttagaaccttagttgttcatcccatccctatttcctactttatccacaagtgcaaccacagggagagaagattcttcttcagcttcccaactcaaaccaacactgattacttgaaccatctgaatcagcactcactgaactttgcatacctctatgtttaacacctcacatctcac

SEQ ID NO: 167451 - DNA, 417 bp, Zea Mays
ctatgacgtgcacactagttataagatatggtattaacaataatcacacgaagaaagtaggaacaggcgttgcgatcctaggacacaagttttatggaagcgacattccagatgattattgcagggtagaagtgacgacagtcgtccaaggatccgaggacgacatgctagacatccctgggcccgaaggaatcgagacacttggacaagccatcaaaaatttcatcctttggcctcgaagggatgtcgaattggctaatccaccaacggcgtcaccatctcatccctaaccatctccgcctcctcaaactttagtacctattgtacatccatcatcacctcctcaatcttcacatgctgctcctcatcctctttctaacccaccatctccgccacaaacatcaacatttaggacac

SEQ ID NO: 167452 - DNA, 360 bp, Zea Mays
gctaagtttgcctgtttgagcaactattgctagacttcctccatctcttccatcttcctagtcaacttctcgaacactgacatcaccttctcccacctcgcctcactctgtttagattccattgctaaaaaagcgtccagtgcctagcgggactgcatagagggtttgattggtggtgtcgccgtgtccctcctcctcaactcaccttctagatggatggagtttgtgcctagttgcttctttctctgtcttcacacaactgaccttccccaccagccgagaatggcgatggctttgataccaattgagaggcctcccctagctgacgatgcctccacctcgatgtgaggacttccctcg

SEQ ID NO: 167453 - DNA, 608 bp, Zea Mays
ctgagagtatttgtgacgcctatcccagtaatggcctgaagagaaattcccaagtcgactggtgatggaggttctgtggttgtatcctcttcttccagttcaagcaagaatataccatgacctgaacacttgtgctctggtgaatatttttccttacaatggtagcattctccaatggcgcgtttggcggctaattcatccggagacaggcgcctaaaacgtggtcgattggctgtagttgctgtcggtcgtgccattgttggtgctgcaggtttggagggtacttctagagctgctgttgactgtccagtggagcttcccgtgagcatcaaacaccgttcatacaccctggccagatgcatagcacactgcagcgtctttagagtttgtaattccacatcaattcggagaggttcgcctaagcctgctgtgtacatgttggactgttgccgatgagacatgtcgtcacaacggcacaatagggtcaagaattggcgcgaatactcttccacggtacatgtgcgcttcagttcttttaaatcagccatgccattgaacctgagtggtggcccgaagcgcatctggatgaactcaatgaagcgtgtcca

SEQ ID NO: 167454 - DNA, 481 bp, Zea Mays
attacatctgaccactaggcgcagaccgtccggctcgtctatagaagccctagcctctgtgccaggttgcagaccatccgatcttctgtcatgggccgtccgcgctgccgtagagagcaccaccaccggtactcatcgcagtgattagcgtccagatcggcaacatcacgtcctctatgattggaaccacattgtaggttttatacataaacatgtagctagtgtcgatttgttcttattgattccaccatgtactagacatgcaactaattcatgaaaaccaaaggccatggccatggttataccttaagtccatgtacccatttttccctactactaattaagaacgcagtgtgggcgcccggcgtggccatgcccccgcctcgcctcacctccccctctgagttgtcactgccatactggtcccgcctgacgctcccctcgcgttgcccacacggccacacacccccgtccggttact

SEQ ID NO: 167455 - DNA, 447 bp, Zea Mays
aacggtcaggattacgaggccgaaagggtatgctagggatctaatctcgagcttccattttctgatgtgcggccaccgattatcttctcccccaaccgagctggacgacagcgccttgtcccccaaccgcggcggcccacaccgacgagatccccacacgacgcacagacgatcctatgcggcatagaacactactggaactaattgaagtcacgatgaatgtaagggagggcttattacctttgtttgggatggtggctgccctaccacgtggtttcacggttctgcgtcagctcctcaactcctgtgagcaattcacaatgctccgatgatccctgcgcccgctcgctagcacaaacacggtccaagagtgtctgcaacctcgatcgaaccctggtcaagcctttggcgatggcgcatccgaaggttgatggtggcgacgcttcc

SEQ ID NO: 167456 - DNA, 288 bp, Zea Mays
atgtttctacacgaagactccggttaggtagaatagaaagaaagtgtatcgcaagtgtgaaggaagttgaatgaggaagtagaacaatacctgaccttgagcttagaaaaacacatcgattcacacatgctgagaaaggaatcaaaatattattgtcgtcaacttggataaagctggaacgacgacatgagacgacgacctaatcaccagcaggcatcactcgcaacaacactgattaccaccatcatgttccttctgtttcaaggcagtatataacaaccagtagca

SEQ ID NO: 167457 - DNA, 555 bp, Zea Mays
atcagacagagatagtttttttgggcatgtactcgtataccagcaggttgcagtccacactggagtagcagtagtagatctagagcttcacgatgttcttgtgccggatgctgaccagcgtatccacctccatgtggacctcacgatcgtcgagccaccgccaccgatgtcactgtctctgctgctgctactgttggtggtggtggtcaccgcggcagccgccgtctagtcaatctgcctgttgctcgtcccacacagcagccacttcgacgacgacacccacaacttcttcaccgctaccagctcgccgctgctagctcgatcttgaacatggtcccagagccgccgggccccatggttttcttgtcgatcagcgcatccaggatctcgtgttgctctgcctagaagctcatcttgtggaagctcgtcacgtcgtatgacgcactggatgccgacgacgacgccagtgtaccctcctgctcagccaccattaggaactttagcattcgataaatccgatggtgcagttagtagaataaagaggcggtcaaataa

SEQ ID NO: 167458 - DNA, 454 bp, Zea Mays
gaggaagagcttcgggaatcagaaaagtcaacaacaaaaatttcaagaaagacataaacaaatggccagaattcgctccactgctagggttgatcgtgagggagatgagaccgaagctactgagactgagactattccgatttcggaagcaatgaagtgctctgggctggtaacaccggaggacatccctgccgctgaagcagagcaagctgacgttgaagagaccgattctgaagatgattatagcagcgcggtgccgagcaaacccagctatctggattttggaaaatccacgatctccgaaggtgacctacctaagatgttgaaattgggctattttaatgaagaaaagaaagagctggttcgctttggtggagaggaaactactctgaagccaggaaaagatgaagtagtagtttttaagagtttcttcaaagctggtttgagattccct

SEQ ID NO: 167459 - DNA, 318 bp, Zea Mays
cagcgtgcagctctggaacatggcctgggcattgccaaacacaaattaagtccacagtgccccagatcaaggtctgcaggtagaactggatcccgttctccacgtacaaggtgtcctcatgaccttccatgctgcaccggtagacgaccgacttggtcgaatttgaccttagcgccacgtcctatctcctttccggccctgccatgtttctgattattaggttctatgctatgaagccgtgacccaaggcatctgcagtagtagcaataaattaatagttctgatttatagtatgcaagcatgacaactcaactgcag

SEQ ID NO: 167460 - DNA, 289 bp, Zea Mays
aaggacatgagcattggacttaaaacacaaaagtgtaccgtcaccagggagccgcatgttgaccttgctattgaagtaaccaagcttcttcatagtttgcaaatcttttcccttcaggatggatcgacctatctcaatatagcttggcttcaatgggctatccctcgggagctccttcgcaggtctcaatgatgacaaagctctcatagcttcgaaaatgggcacaatatcctaaagtgcctctgaagaagtaggagtgatcaacttagcagtcgatcggatcctcgcc

SEQ ID NO: 167461 - DNA, 525 bp, Zea Mays
ccccatgcaccccaccaatccatgctcgcgtgccattaagcgcgaccgtggagtgaagctgcgggctgtggctttgcttgccctaccatacctgccatgccatgtccttgcatgcttcatgttgccattggcgcgtagctagatacgtacatggcaggcaggagcagagcaggaccggcgtccgggcgggacttggactgttcctgctgcaatcacacacagatcaagcactagagatgtccccaacacggggagcaagggaaacgagagagatcagggacggggggactcgtccagactccagagaccgttgccatccctagcccacgcctgacgccccacggcccgctccgatttcttatctttctgactgcaactaccgttcgttgagaatgagaaaggggtgaaatgagtgaacaccttttccttagactagactcgcatcccctggccgtaaccatggcagttacccactggaggctggagctgtacgtagaaatccttcgcgccttttgctgagacaca

SEQ ID NO: 167462 - DNA, 527 bp, Zea Mays
cccgctcatcggaaaatgaacggctgggattcgttggcgcatacccattcaatgcattaaatccttgacgtcaaccagcgatcggacggttttggagtcacgtgatgctctgaccgtggatcccagatccaagggctgatagcgcataccggttcaatgaaagtagcatctaatctgggccaccagattttgatcaggcggccaggaattgaggatacctcttcgtgctcggccttttgcataagatcccctcgctaacttcaaaataaactcgcagtcctgtctatgggaatcctgagtctcatgagtttttgcgtaataacccctatgtctctctgttatttgcgcccagtccgaaagcttaggaaattcaggaaaataatttagaaaagggtttttgtgtataaaaatatatccagaacttatttaattcatagaaattatattttaacttctttttagtccgtttcggttgcaataattttgttttaatattgtatatcacctagtacctttgtttaatcatg

SEQ ID NO: 167463 - DNA, 308 bp, Zea Mays
ggcccaacgatttatttttcaagaaacgaagaagctccaactctagcggaataagctgtctgaattcttgtgccttctctaaacacaataaggcaacttgaacaatggttagtcgcagttgcagattaccacaatgttgggacttccaaattttgatggctactgcaagacgtcgcattttaacatgcattctcaaaatagcatcactggtgtgaaccagctgattccagttgtgctccaccagatcaaggaaccccgacattgttgtccaaaacgcctcaaacctaaaaccccgatagaaatcaaaa

SEQ ID NO: 167464 - DNA, 384 bp, Zea Mays
ggccggtgggtaagaaccttcacctttttgcccttcagcacaggctcaactggggtggtcgaagcagcagttttcctctttttcccctgtccccgcagtgggtagcggtaatcggggtatacgaagccgatggcatcaaaaactttgttcagtcttttcttccctcgaccttcgaaggctgtagataaagtgttatcttccgccttggaatatgctccaagcagttcatcacttgtagcttcgatacacttcagccagtcgtcgtttggctcatcaaatttctccctgaatctgaaggtatacttcagccggaccagaccaccttcgctagagtcggtgatggtctccttcggcatttcccagctgtctacaagcggccatacc

SEQ ID NO: 167465 - DNA, 614 bp, Zea Mays
taaagacctcagccggtacctcttcaacaacaaaagcagaagggccagcaccctggtccaagcatgaaaatcgccgaagccgtctctttttcttcttcttttcttcagcaggcgcagccggacgactaacctggcgatgacgctttgggcgagtaccctcaggctttcgggcgtccgttgctttgtcaagctctggtataactgcaacagccattgtttcagtagggcccgagtcagatgattctccagcaaacatgtcaagcatagcattcatttctgcatcatctggactcgctggcatctcaaaatgaacttgcctctcatcattgggaagatcacaaagagaagcaacaaagacctaaatatcttcgggagagggtcgcactctaagacccaatccactatcaccagcaggaggatcagacacaaaattgaaaaaggacttaggaggtggtagattccaagcagagaaggcaacaggagcaccaacatttgatactttgcccctcaagatcatgtctagccggctcaccaaatccttagcaggaattctcctattagtaacctgagtggagtcggtaataccactgtacaagtaagctgggtatgctcta

SEQ ID NO: 167466 - DNA, 352 bp, Zea Mays
ctcaagaacaccagatcaactttatcccgcctcaccaaaaaaaatccttgaagactagatgggccgcaatgttttcacgtatattgatgacatagtcgttgcaagcataaagaaagatgaccacctatcagacctcgcaaaaacactcgcaaacatgcgtgaagcccgactctgtctgaatccgaaaaatgcatttttggtgtctgccaaggcaagatacttggctatctcgtatcacatagaggaatcaaagccaaccccagcaaaattcaggctatcatggacatggcaccaccacaatcaacaaaagacatacaacgactgataggcagattggctgcactaaacaaat

SEQ ID NO: 167467 - DNA, 524 bp, Zea Mays
atttatctggcactaagcttgacaataaaaacatacagtatgttaagaacaattttaaaaagcactatgctctagcatctgtgctacaagttacaacaactgttttgaacacatcaagtatccacgtgtcgctaaagtgtaacatactttagatgagacctactaataaaccctccaagtaaaatacatgagcctaccattcctatagcgacctaagagtacaaaccctattttagcacttccacaagtaaaacagaaggaagtgtagcactatgcaaaatatcccttgagagaggatatataacgccacctactacatagatgattaggaacccagtaaactttacagcaaaatgcaatctacatggtcagccaaccacaagagtcagcgaatcttttttttttcttcttagattgagcaaatctataacttgataatgcatagattatcgcttttcttttccgtttattccttttttccatgagtaagtgcaacaaagcttctaagatgaacaaatctgcaa

SEQ ID NO: 167468 - DNA, 797 bp, Zea Mays
caataaaatttcccgagacacagagggtaacccgagtggactacaggttctaattaggaaaacgcaggggctctttagtgaattggccatcgcgaaggggtatgctcaaatcctagccgtccgatcaaaaacaactggccccgattagatctggcgcatgccaaacctgcgagtaatccaaaccgtctgatcaaagatccgcgacccggataaaatcttaccatggtccctttgcgtccatccgatcaggatccagtggcgcagggacatctgaccgaaacactactggtgttacgatcctaaccgtcggtcgctcatcccacggccaaaagcccttcttcctctacctaccgagctgaccacggcggcgctgctcccccgcggtagagggcacgccggtgaaccccccactggtgattccacgcgcgcaactccgattatccaggtgttaagcgaaggaaatgaccgcgtgaatacggaggaagggttccttaccggggtcactcagtgacgagagccagccacagcaagaagcggacccgcaacggcggtgcgatatcgacgacgaattcccgtggccacaccctgggcttctcggtctgatacaccgtagcacgattcaccggccccaagcgaaactccacggccaacagaagggcaccaaagtacaccagggccaaatcctcacggcggcggcacaattcgttgcgctcagcactaacacaacgcaactctgtactggcagacgagaaattggggagaggaacgacttaggatcatggcgcattatatactcg

SEQ ID NO: 167469 - DNA, 832 bp, Zea Mays
ttgtgatgcaggccaaataaggtaacacatggccagtgtatttatcaaaaattcagaaccaacaggtcaatccaccaaacacagtacataccaattaataatggccccgcaccaccccactcaagagacaacacacatcactacatcagtaactatgaatgaaaaatataatccgtgtttgtgaaattaagtttacagtcggtggtgatttagtagaaagcttcagttaaattatgtgtgtgctggttacagatcatgacacaaaaagcaatcacaacaacactggagaagcatcgtctactctagtaaatctatcccagtgccagaaaaggtccggtacatgtgaaacaagaattaaaattataccatggagagtaccaaaacagaggttacacttaaagtggataaggttatatatacatatacctaccttggctagagtctccgtccattcgaacaagcttcgatagaagacacaactcgcaactctccatagtgtcttacagttttgccttccttccctcctcctttgtaccgtgctatatgcacactatccaccagccatctttatggctctattaaccatcttcatggctctattaaccatctccatgtccaagactccaaaccatgatctccaacccagctcgcaaaggattttcaccggtcccatcatcgacctgttgacacgtaccagaagtaacgaatgcacaaaatatatagcaagcggatctaaatgagcaaaactaatccatgaaaaaaaatgccaggccaaagttgtcgtaggatcaagtgcctctctatcgatcacaccagcaagcattattgtcgc

SEQ ID NO: 167470 - DNA, 294 bp, Zea Mays
ctaaaagtaaaaggtatgtatgaattatgatgtctctatgccgtataggtgatgtaacaacgacaacacgcagcacatatttgtgataatgacgagaatcagtacgtacacatccatgtgtggctgtggcatgtgggcatagtgcataccgtgcggatgcagttaagcttaggtcaagtgatgtgaaccgtgcagttctaagtctatcactgacactgacagtaatagcggacccagaaatgataagctgattttctggtgaactatggcaggcagcataacttggtagatgac

SEQ ID NO: 167471 - DNA, 659 bp, Zea Mays
gagaaacgaagccacggaaaaagacaaaattctactttcattggtggataaagtaaaagaagatgaagctagcttcaaaaaccaatccgaagcccaaaaaattgagattgaagaccttcggaagcaactagctgaagctaaagagaaatacgtagtcgcagaagctaaacgaggaattagcgaatactggacaaatcatttagagaaaaacattgaagaacttcgcacatccaaggaaagatgctttgaaaaatctgactgtgtgaagaaaataaaaaccagttttgccaacgtgggcgcctattcttccaaagaaaacttcatacaaggcgaccccgaaggcgttattgaatggttaagtggggaggccgaagcctttgaagaaattctaagtgaccgcggggacgtatgcacgttctctggtgtgcgagggatttcagctatcttggagaaggcgggatgcgaccatatcaaaaccatggcccaagacgaagtggccttctccgtaaatgatacgaaggacccctcagctgaagcaagtttaataggtgggaaattttataatgacatatggccaaatggtggccgagaaatggctcacgaaattatgaaaaagagtgaaaaggacatccatgagacccgggccaaagcaagacaag

SEQ ID NO: 167472 - DNA, 451 bp, Zea Mays
cgggggaaggacggcacaagttgtcgcccttatgggaaggaccattcatagtagcagaagtcactcggccggggtcatatcgtctcactcagatggacggcacagaaatcgggaactcctggaatatagaacacctcaggaagttttacccctagctgaatttcaaaagctaccgggacgacaatgtactctgtaaaatgggaaatatgtcatcaataaaaaaggcttcaagaatactcagtttgctcatgatggacgtgcattcttacttaactcagggtgaccactatgcccttctaacggagcaatcggcttaagtcggcgacgacttaagacggtgcaacatgctcgcgcttactcaactcagggtgaccactatgaccttctaacggagtaatcggcttaagtcggcgacgacttaagacggtgcaacatgctcgcgcttacttaa

SEQ ID NO: 167473 - DNA, 455 bp, Zea Mays
tagctcaaccgaaggtaccttcggcattatagctggctcttccgttctctgcatgggaggaacagtttctcttgattcagtagctgaagaggcctccccaccaaactcaggcaccacagccggttcaatataacgcggtcggtgggtaagtaccttcatctttttgcccgcagccttcgacacaggctcagctggggcggccaaagcagcaacttttctcttcttcccctgccccacagcgggtagtggtagtcggggtagacgaagccgatggcgtcaaaaactctgttcattctcttttttccccgacctccgaaggctgtagatagcgcattatcttctgccttggaatatgatccaagcagttcattacttgtagcctcgatgcattttagccagtcatcgtttggctcatcgaacttgtccccatacctgaatgtatacttcagccggac

SEQ ID NO: 167474 - DNA, 549 bp, Zea Mays
ctcggacgctgagtgaaaccccgacatacccaccgcgccttgtagcgctcaagagtaccatctgcatgaaacttgtgacggaagtgccacttgccagtgatgatatgagtaccaagaggatgaggaacaagataccatgtgttgttggagaccaaggcctaaaattcctcttccatggcacgacgccagagaggatcaggaagcccctgatgaactgaagtcggctcagggaagacggctgcagtggagaaaatagctggcacccgaaaactagccttggccctggtggtcatgggatggtcattgaccaccacaggcatagggacagtgccagaaggtagagttggagccgaggaagttggtgcaggttccgctgtagtcgtcgcagaggtaccaaaggggcccgctgtgaggcccgacatagaaggagcccaatgtcaacggcgagtgtacacgcgcatgggctcaggtggagctggtaaagggtcatgtacctcctatacaggtgacagataaggaggtataggagacgcaaggtcctgtacctcc

SEQ ID NO: 167475 - DNA, 438 bp, Zea Mays
cccgcgccgcctctgcaactgctcggcgatggcagggttgagcgtcttcaacaacgacctcaccggcgcagtccccgactgcatcggtgacctgaccaacctcaacgagctggtactctcgctcaacagtctcgacggcgagctgccgccgtccttcgcgaggctcacgcggctcgagacgttggacctcagcggcaaccagttctccggcccgatcccgccggggatcggcaacttctcgcgtctcaatatcgtccacatgttcgagaaccggttctccggcgccatcccgccggagattggccgctgcaagaacctgaccacgctcaacgtgtacagcaaccgcctcaccggcgcgattccaagcgagctcggggagctcgccagcctcaaggtgctgctcctgtacggcaacgcgctctcgtcggagattccccg

SEQ ID NO: 167476 - DNA, 336 bp, Zea Mays
atacaaagcatcaaaggagtcatccaactgggtgtggtagttctcaccattgaaaagattgtcaaaatacctctacgacctctttttgatgtcttgttctttcaccaagggttgatacatctcatccttaatgcatttaacttggttgaggtccctcatcttcctttcctgaatcctagccatcttatagacatccttctccccttcctttgtacttagtcttcggcaaagatcatcataggctcgaccctttgcctcactcacagctcgctttgcagtcttctttgccaccttatacctctctatgttgaccgcactcctgtcatagaacaagct

SEQ ID NO: 167477 - DNA, 453 bp, Zea Mays
cgcttgttgacagcttcgtcaacagcttcattgacaattttgatggtctcgagcgcctcttttaggaacgggtcgtcttctagattgtatggctccagaggcaaagatagttcagctacactgcagtatatgtttgttagttccgaagctaaaacacattacgaagctaaaacacaatagatgtacctacaagcctagcccgctcggtagcctcttcggcccttttcgccgcttctaaagcatcatgtgattcctttttgttctttttaatggcttcatcagcgacttcttgtcacccttcagccatatctcgaagtagaatttcccaccaagggtagcagcttcggctgaaggattcttgatatcatcaactgagaaggtgaaatttgactgagccacaaccttaatttgttcgcaaccagccttttccaagatggacgtggccccccacgc

SEQ ID NO: 167478 - DNA, 603 bp, Zea Mays
tgagaagcgccaagagcgtttcttggaaggattgattggaccactgaactatcaattgagagtcatacattccccaactttcagactctgctgaacaaggcaattgaccttgagagcaaaagaagggaactgtctgaccacaaaaggaagtttcaaggtcaatctattagaaacacacgcccgaacaactcgcaaggttctcagtttcgctctaaaaatcagggtggaaacaattatcagatgcaacgctctggacaacaaggccagaggagcaatcaaagtcagaaccagcagaggaacaactctcagaccaaccaaaggtctggtgggaattcacagactcgtcaaggtggcgtcgtgaacacgcaggccaaaagcaacaacgcaccagtccaacccaatggctgtttcaagtgcggtgagcttggtcattatgctaacaattgccctaggcgcaaccaacagacacctcagaagagcaacaaccagaggaatgaccagagcacccctgctcgtggatctgcacagaacaagactccgcagaaccagagtagagtaagggtcaatcacgtcacagctgaatcagtgcctgaggatgccgac

SEQ ID NO: 167479 - DNA, 542 bp, Zea Mays
ggccacgacgagacgcggctccgccgcagacgcgaaactccgacgaggaatttcaccgaccaccactgctcctcccgcctaaatcctccacagtcacgacacacgtagccaggagagtcgtccagaccacacgtagaccccggaatggcggtgtaggcgcgcggcaacggtggtggctcccggtggtgtcggcggcgatatttttggtggccgaggtaagcagagaaggaaggaaaggagggaggagggggtcgtcctgccctttatggccacaaacgggtggactcggtgataggaacgtcacccgccacgccgagcattgcgcagaggttacggcgatctccgccatgtgcgcgaggccgccctcctacgagtaagtgggcccagggtggtcagcggatggccgccagatccggtcggtgcgggtcgtggcacgattgctcgagtggccccagacgccgtagcgcagtcaagatcccggcgtggattccggcttcagttgagcagagccgactatcgcgggaggtggaagactgtactgg

SEQ ID NO: 167480 - DNA, 595 bp, Zea Mays
caaccaaaatcagtttggtctcttgcaagcaaaccagatgacaggtagttgtggcaattgtctcacgaacggtttcacgtcgtgcaacattatttagaccccggacgttccaacagagaatttctaagttgacccctgccattagaaaaagaaggaatcccacctgacaacaaaacagcagttgtatgaagaaggaaatgccttcacattacccttaatttggggtcttagcaacacacgacaggaattcagcaaagcaacaacagcgaacattccccagactgtagcaaacgcagcaaaataacagtaggcgtatgaagaaggaagtgcgttcacattacccataaattggagtcttagcagtacacaaaagtaactaggaaggacacacaacccatcagcatcacaccatccacaatctgtagcaaacgcagacagacagcagctacaggaagaagggagtgacatatagcacccataattcagagtctaagccatacataacaggaattaagaaggccgctattggtgacatggactgagttgcggagcgcagcccacagttctacaataggcaacttaaacatagttgcaa

SEQ ID NO: 167481 - DNA, 758 bp, Zea Mays
aggggaggcgaaagggggtcggttgaataaagcgctgaagatcagaacactaaaatatctaaaaagcaaggacaaagatcaagggcactgtagaatcggatgtgttcgagtgatttggggtaaggatcgaccgcgaggagatagcttcggacgtgtcacgattccatggacctagccagagcctagccgtagataattcaccggcggtcgtcgtggctcggtcatttacgccgccttgtcactcatgcctcgctcttccctcactgtgtctcttctttacgtggtaaccatgcacaaatgatgtaatccgaggccatggatcgctagctggaccaccgggcctataaatagccccgccacccacgacgaggtattcaccagttcaccagtgagctgggttgaagcataaattcatagaatcctctccacctctccccaaattagtggtgcacagtgaaaaagcagtcctttgcgaccgtgtagccccaaccgcacctcctaattccactagaacccgtcgcggcaccattttcccccttctcagtcaccgacgagcgaaaatcctccgcgctccgtggccagccgctcccagttctgctcctgctcttcttaatcgtgttttagcacccatacatgctcgtgatactcatcggctcaaccctctatgctcgaccacactcaattaaccgaaacacatggaattgtattcggtattccccgccaccgtggtcaggctaagccaggaccataatcaccca

SEQ ID NO: 167482 - DNA, 745 bp, Zea Mays
gtcctcatatcctacatcgaaacatgaatgtgacaatttaatccatgtttgtgtggttctgtcttaagatattttgttttccattgtagctctatttcattcatagattttgttttacattgaatcctttaccagtaccgcagtggcaattttttgtgttagctgtagcagctgagaatgttcttttggctggatgctaatttttttgttgttctttctaaagacaaaattaaaagtcattgcccaccttgtttgatgtaatgtcttgttcaaatctaggcaaatagataaaatgaacaagaaccgtctatggaaaccgttttggtacccttgctgcatagttgcagttgattatgaatggacacagttcctaaagcctgcaacaaggtttatgatattctggtcgttaatcatgaatggacatagttctcttactagagttattaacatgtactaatagtatccagcagtagtgtttaagtgcaaagatatgcaggggctgggaatgctattgttaccatcggtgatgctacaaaataatcatgtttggtagctttctgtatttgtggccggtcttccatagtttgatggaggaaatgagcaaaaaaggaaggggaaggcaatatcaaggaccttgggttgcacctgaatgaagatgatgattttttgtaatttggatgcatgaatggagatagttttttatgatttgcagaattaaattatggtgctttcagttatctatctt

SEQ ID NO: 167483 - DNA, 435 bp, Zea Mays
tccctctccattaaacgtctgttgttcttccagccattaatggtcgcggctatttcttcgagtaggtaacgctgttcttcaatctgcatcaattgagtattaaatctggccacaaaccactctcctccattgcctataaagctcgagccgtgcttgcttcctacttcctgctcccttcagcttcctccagccgatccatttcttctctgcttcgttgcctgtgcgcgcacctgctgttagttgtgtgtgccgccgtttgccgaatccccaaccccatgtggagctcgcgtagtaaccccaccatcgacgatttacggctctacttgtggaacgctatcgcggcgccatatttatttctttgctcgtgccatctctgctcctcgggtgttctactcgctgttgttgctcacacagcggctcgccattgtcacgccg

SEQ ID NO: 167484 - DNA, 380 bp, Zea Mays
cccagatctcccttccccctcccttaaatatgaatatagcgtggattgaatctaatctgtttattgctccaacttaatatggtgttattttattttggttgtcaaggtcgatttgctatccaacaattttgcattatttctggctacctattggtcttgctgccacaccggagttgccatcttagcttttgtcgtcctgtccccttcctatcagggcaatatgacttgctccccttcctgtcaagctacatgcttcgaccagctgaggcactgaaatgaaactaaattattgttgcaaacctctctgccatcttgtgcgtgcactatgcaaaatcacaaggcgggcttagtttctctaacactgataatgcttatttgat

SEQ ID NO: 167485 - DNA, 1298 bp, Zea Mays
agaagccttgtgcacgtgcctggtcagacaggctgcgcctgaagccatttgctgcacgcctcgctagagccacggcgccccacacctggtcggggaggttgtgcctgcagctccacgtcctagttgggaagtgtatgcttcactgctcggttaagttctagcttttgtattagctattacctgagtaaatccagaatgcattctagcgtggggatgtggatgtggtcgagcggcatgtgcgccccatccaccggccactagcagcccagcagcgctttcgagggaggcggcgcatagcaccgccttggtgcgcgtgcggctggctagaaattagcagccaggtgagtccctgtggcagttacagatccacaaatggtgtggttgcccttatgaccgggtcgtcgtatgtaatttcatctccctctgttcacgtctccctctgttcatggtgccctccctggtcgcgaggacagaggccacgtgaacgtgattacgtgaattcatgagtggctgaaaaaaaagcttgcatgatggattgctgcatgcatttttattttattttatgttatattatttatattgtcgcacgagcgtttaagtgtccacattctaatatttttttatctaacatgctcatgcaataatttcaccattatttttctgctttatctccaatgtaaatacttagcagaaaaatattaaagatgcatgtgaatgttactgtgtatatttaaattgctctaaatatttgtgttgcgttgagctccgtactcacgtcgagcgattaaaatgtatagtggatactcggacgcaccgatgaggctttgttattaattggctgagtttggcattggctaagcattagctgcgccctggcaacacgacgcagtatttgtgtcgtacgaacttggctgcgtcatgtgattgctatgtcgcactctcgtttaattaggccgctcccgttgagtcggactaccatcgccgaatcgcgtattttttgtatgccctgtaggcactgtctgtctgccgcgagccacaattgcgcctggtgcgcacgttgcgtggatttatcgtgtatcccaattaccgagcaataattttgcctgttgcacttattacgaaggcgtgttgtgttgtcgtagccctgatggtcgcacacgcgttgacgccagatacactagagcttgtactcgcgtagattgtggtgggttattcaagcccctgaagtcacatcataacgcaaccttcgtaaataattttgtttagctctatattttatttgattgtgttgtgtggca

SEQ ID NO: 167486 - DNA, 650 bp, Zea Mays
ggaagattaggcaatcagcctgaaagtttcagacatatgcttgtcatgtttctcagtaaccataggtccattaatatgaacagaacaggcagtacacagtttcgaatgtgtaacgacaatttggaagttacaacaaaacatgtttttaaggggaaagcatagaagagacatcaacagagaacatctcaacaaccaggaacaccaaagggaataatcgtgtcccaacatttcataataacatgtactacatgaaaaaacaattccctgtcggtatgtagctgaaatcactgtcagttattgaagtaggagcaacaaaccagcaaaccaaccagtagggatacttggtgcattttacctgttcgtgttatgaactgggatgataatcatgcatcatagccacttgataacaggaacaggcaccatggccagaaaaacacatcaaaatcaaaatcaatacaaagtacacaatgcaaatatacaattccatgtaattggcatcaaataccagtctctctggcatcccgatttgttataatttctagacaaacaacacaaaatgctgaaatcttcacaggaaaattcagacatatgcttgtcaattgtaactatataattgttggccaacaaactcaaaacaaaaaaggaaggca

SEQ ID NO: 167487 - DNA, 1366 bp, Zea Mays
ccaataactgttagaagtcaaagttattattggggtggaggcctaacatgacctcgatcaacgacgcgaaggctcgacccctcatttttaactaaccatacttgcataggaccacgaacaattagggccttcgctatgtagcaacttctatgggaccttcgactcattagctaatgaccgatcacgtcgaaggcaagcatccgggcgaaggcccaagcgtgggacaagcaccaagacaaaggacttcactagccacgaatcaagggccctcggcacaaactatcctactagggagagcgaagggcactaggacatgaaggatccataggcgacaactagggctatatgaagcatgactagcctgggtcatcagtccaccagggtgctccccaagggcccacctatcagtgtaactagtgggtgtaattgtaagtgcacgatgctagaggacgttgcagtgttgtaattactccattatatggaatattccaaggatgtagttggtaaccgggggtatgaatgtactttgggccacctacccctagacaaccctataaatatgatatccctcgtcctgtagctggacaggaaactcataacgagatgctacaattccacaccaaacattttgttgtgcactgtgctccctttttgtctctgagtgtcttggtccacctaacggtacccaacatttggcgcccaccatttgtgcgatgaatactaatcccatgatgcctcccaagaagacaaccgagccagctcaccagccgtcgttgacatagcgagggcgaccctcatctctaaaaaggccaaagttgccttcgcttacaatgtctcaccaaccgatccaaaaaccaccatcgagccacaaggcgagggtcatgccacgaaacaaaagcagttaccaaccaccaccgagccagaagaaaaagtccatacctctagcttagacaccccaagtgacacccacccaatccaaaaagccatccctacgaagccataatctggccagacctaaccaagaacatgtcattagtccccctaggcttcctgctaggaatgcccctcctacataacggtcagtggctccctctaggaatgcccctctagacgacgactacgaagacctacataacggtctagaccttgacatcaacaccaaaaaacaacttttagtcaggagccttcgcatgcacaacagtaatctacagaagcaaagagatgtcctcatagccaagagacaattcaacgaagtctaggccaggatacataaccttatccaacaaaagaaagagcgcctccaggctctcgagcaagaaatctcataactacaggcccaacaataaccaacccacccttcgcacag

SEQ ID NO: 167488 - DNA, 665 bp, Zea Mays
cccgctcgccctccccttccctcattcgcgcactcgcagccctcagaactcgcctcgcaccgtgcgcacgccgcggggagttccaccaccgttcactgtgaccgtgcgcccgttctgccgccaccgttgggaggtcgccgcgtctgttgcctcggtatgctccgccatgtcacccgcagctcgggacgccctttgattcacccttgccccctctagttcgccttgtccacgctcactggttcactgccgtagctccgccgccgttgacctgtgtcctcatcgtgcccaggccgctgttcgtgtgttcctgagacttccctcaaggtaacagtcctagccctgcccttattttcccctgtcttgcatttactcgcccgtaattgcttgccggagtgttctccagtccgccgaggactcccctccgccgtccggtcgcctcattcccattcacacaaacccgaccccgccatagtgctcgccaagttctccccaatctctctagctatccggaccgacctctcgcgtcctaggagtcccagtctacctcgcctccggcgacggcgccgccgtgtccgcatggattgtcgcccctggctacccgacgaagttgaagtcccttggcgcacatcctatccgcccaactctaatcggatgacccgatttca

SEQ ID NO: 167489 - DNA, 596 bp, Zea Mays
tgatctgtgtgcagtgtgggtgtgggcgagcgagcaaagcaaatggtccatggatccgccatgcacgcgtgcgtagtacgtacggtacatacgtcgccctgctccaagacctgctggatgtgtggcggcgtcgatagagagatgcatatccacgggccatggacgacgacgacgacagcaccagcggcggacgacggtccccagtcagtctagctagctggccggcgttggcaactactgagcgcatgcatgcacatcatatcacagcaatcatccgatggatccattatgcggaattgcggatcaggaggacgaggatcagaaccatgcatgcatactgtaactgtaacaaactgcgcatatcggagatcctccacctgcctgcccattaacagccctgctttgatctgaaccaatcacaactaatacaatgcttactagtagtggaacttttggcactggcaggcagcaacatctcacatctgggccggtgagaaggacgcgaacatgcatggtgatacggcggcaatgtcgacacgtttggctttgacagcaacgttgggtcgttaacagcacagctagctagcaccaacagc

SEQ ID NO: 167490 - DNA, 460 bp, Zea Mays
acccgcaagctacgtcactactttgatgaccacaaagtcatagtagtcaccggttttccaataggggatattcttcacaacaaggaggccattggccggatagccaaatgggcttgtgaattgggatctcatgacatcgagttccgacctcgcactgccatcaaaactcaagcactggttgattttgtatcagagtggactgaacaacaagtaccagataacccagagactgcagaagtgtggcgaatgtattttgatggctcgctgaagttgcagggagcaggagcaggaattctcttcaccgcacctggaggcgagcacctcaaatatgccctccagctgctatttccggcctccaacaatgcagccgagtatgaagctctgatccatggattgaacatcgccatctcattgggcgtcaagagattgatggtatatggagactctctggtggtcatca

SEQ ID NO: 167491 - DNA, 728 bp, Zea Mays
tttacctactctcgaaccaacatagaaaattaggccttccaaattttgtcccgacacatctaattcgattgcttcggtgttcgttcacggtcagtcatccaattttgcaaatcaaactcactattacaacaaggaaatgaattagtaagacatgtaaaaaatgggctatagatgatggctatgtagattccaagagcaacacatcttcttggggttgtccacaaatttggagactcctaagcaacttcacaccgtcaaggaacacgaaggttccaagagcaacaaatccacacaagatttaagtttgcaacaagctcaaaagtctgagaggggagagagtgaggaaattgttaacgagttcaccaacttcacctcacaccaaggattctccaatcgattgaagaggatgagatttggggtgtgagagagggagtgaatgcacttgtttgagagtaggtcaccagtaaattcgtgagagagtgtagaagtgaatgaggagagagagtccaaatgttatataaaggaccccaaaaagttgccgaccatttagactttctgctcaaatctcggttgaaccaggtttaaattcggttgaactaagatctacttgagaagaactcggttgagtgccttgttgagtacctgagtcagtagggtcaaacccggttgaaccgggaataatatcggttgagctaggatcgtccagagagcttctcgattgaatcccc

SEQ ID NO: 167492 - DNA, 458 bp, Zea Mays
agaacattaccaaatagaaacactgaatgttttgtatacgtggttagtgtgctcggatattccgtcagaaaacatttttcagtactgaatgccgttattgtttttccgttgttggaatacaaccgtatttataaccgcagaagtaaatgcagtatgatggttttgaaatttcttcgtgtttcgcggggcatagaggtcgccctaagatgagtgattgcaaacatgtttgcgttggatcgagtaggcgtgagtgtactgtgccaatttaagtcattgccaacttaaatcgactgctctgttggtagggtataatagtcaccctgggttacgtaagcgtgagcatgtcgcactgccttaagccattgccgacttaagccaattgctccgttagtagggtatagtggtcaccccgagttaagtaagcgtgagcatgtcgcaccgtcttaagccattgccga

SEQ ID NO: 167493 - DNA, 410 bp, Zea Mays
gaccaatcaaaatgttgtttatagtcctaagtaggtttttagtagaccaatatcggcaatgaccagccactgtgccatattggacatgtctggctcccacccttggtagtgtgaaaactagaaggtaccaaatcagaaacactcggatgctgagcagtagcactcgttggatctggttgccttatgtaacacagcctttggcatccgcgcacgccatggcactccaccaggcagagtccatgaacaagttgtactcctccatggtgtccatttcctcccaccttatcaagctcgtgcacggacaccttgacacctacccctaacaaccttgcattgtattgctggtaagtctgggaggtcatggattcatagtttttaaggcgataaagtgaatcaaggcgaccgacccc

SEQ ID NO: 167494 - DNA, 739 bp, Zea Mays
ctgaaaatacaaatttaggtactgatatgttggatcaagcagcactaatcattaagaagtgtcatggacttccccttgcaatatctgcaataggtggattcctagctaataagcccaaaactgctactgaatggaggaaggtcaatgatcgcatcagggctgaattggacatgaatccggaacttaggagtataaagacagttcttatgaggagctatgacggtttaccataccatctcaagtccgctttcttatacatgtccatatttccagaagattacaaaattaagcggaaacgtttgataaggagatggattgctgagggttactgtagaggaatgcatggcatgagtgcagaagaagttggtgacagatattttgaggagcttttggataggagcatgatcctgctgttggaagaggacactaagtatggtggggccattgattcttgtcagcttcatgatatcatccgtgaaatatgcatactaaaggctagggaggaaaaccttgcttttactctggaggaagggtgttgtttgagcgacgcacaaggtacaatacgtcatcttgctataggcagcaactggaaaagagataaagatgtactggtggagagcatgctggacttgtcgcatgtgcggtcattgaccgtgtttggagaatggaaaccattttttatttctgataagatgaggtttctcagagtgctcgatttgggtgatacatttgggttaag

SEQ ID NO: 167495 - DNA, 377 bp, Zea Mays
ggcgatgggtcggtcctcgtcagctcagttggtgatgcagtccttctcgaccccttccgcctaaaaaacattcttgttgcctctaccattattcagagtcttctctctgttcatcaatttatcaatgacaactcttgttctatagagtttgatccctttggcttgtatgtgaaggatcttgctaccaggacccttctttcacgctgtgacagcaccgggccactctacacccttcgcctgcctgcctcccctttctcaacctccacccctcatgcgctgaccgctgctacatcgtccatcacttggcactgtcgccttggccatcccgggcgtgatgtgatgtcgaagctatctagcagttctgtcatcccttgtag

SEQ ID NO: 167496 - DNA, 574 bp, Zea Mays
cgaaaagaagagaaatagaaaaaggagaaaacaaataaaaaaggaacgatcgttcctaaaccagcgctctcatctcccatcccacgtccgatctgcatgtagaaaaaatggaaaacaaccttatgggtcccactcgcgtgcgatctccagctccccatgtttttctccctgccgtgcgtttgaaaagagaccacctggctgggccccacacgccatttctatctcctctctccagtaactgcttcgctccatttcttccgccgctagatgcatccacaacttcagcaactaacgctccttcaagccccgtagcaactcccccactacacgcagtccactccgcgcacaccatgctgaccctcctcgtcggagctccggcgtagatgtgcctcaccggaacaccttgcgcatcatgcttgccgatgttgtcttgactggtaaggtccgcgtcccctccctgctgagtctttgtgcgtgtagccttcgcgtcgtcgtctgctgcgcacgcgtgctgtcgctccaccctgcttgctcgccccgaccagcgccatggctgagcccgcgtctgcccggt

SEQ ID NO: 167497 - DNA, 665 bp, Zea Mays
agtagagtaagaatttctagttttaaagtgataattattatccgcctattcacccccctctaagcgacatccagatcatgttcccgggcatagggaactttcactaatttcccttgggaaaatgaggttatcaaactagccctaaaagatcttcccacgaggcccgatccaccatcaacttagttgttagcatctttaggtatgaactcgagcgaaccatgacatagacccatgacgtctactagggttcccacctcctcgaaaaaatggtggacacatggagatcgacaccgggggcctgtttcaaaattggaagtaaaccttcttgaagagatctaagtcgtttgatgcctaaaaacaaagaagtctcagaacagttctacacactgtctcacctcaatgaatgcttcacacacatatccgaaggtcgatagggaaaatagtatttaggcatgagatgcccaacctagaggccatattagtcaaggatgcaaagtaagaaacattaaaaggcaaagtttaggttcatcattacattggaatagaaaaccatgttgctggacagacatgattggaaatcggtggggagacccatactaggatttctcaaaccttctacaaaccctcctcattcaacactccccctcgaggaagctaatcaaggg

SEQ ID NO: 167498 - DNA, 699 bp, Zea Mays
cattcaccgagttggagtaagcaggtcctgatgccttcaactgggggcagttgttcttgaagtgactggggtctccgtagtgccaacacgcattcactggtggttggttgcttgcaaccgagggggcatgaaaggagctctgactctgctgactgaaccgtgacggagtgggtccagctggtctaatgaagcttggtcccttgggtggaaacccaaaggaacgagttttctggtgccggtcttgctgctgagctcggaggacttagaatttcctcttgagatggcctttttcttcttcccttgccctttccacttgcatggctttgtttgagaggtgcgagaagctgaggaaatcttggctggctaggatggtcttgagttctagtctgagccccttcaaaaagcgggccatcttcttgacttcggtgctgacgtcatccggcgcgtagcgggccaagtctgtgaatttgtgcatgtattcactgaccgatcttccatcttgagttagttcctggaattcatcttccttgagctgaacgatcccttggggcacatggtgttctcggaaagcagtttcaaactctatccaggtagcatctctgatggctgcgttgaaggtatcccaccaagctaaggccattccggaaagttgatgagcagccagttgaacacgctgattctccgggcatccgatggctt

SEQ ID NO: 167499 - DNA, 914 bp, Zea Mays
agcaacgtacgggtacctcactaggtccaatagaaaaatgacttctaataataccgatccctcgtgtcgcgtagcaaaacacatgaatttatatgatctccattgcaacgcacggacacctaactagtatattaagaagaggaaaaaaggggggccaagaaaggctagtacaaaacagcctccttatggaggccagtaagaagcatacataaaagaatccattagactctcctatctccttagctctcagctaaaggtacaactagatggcagagccccttggcaccagcaatctcccactgcatcctttcctcattagcagctctaagactcatggtaacactggggttgcagccatcaaaaatgcatttgtttctatgtttccacaaggtccgggctcccagaatgataagggaatcaagcccttttctagtgagcctagtagcaatattccgcaccgattcccaccagcttagatatgagccaacatcaggttgaggagccaaagaatgcagaccgaaattccttaacaacaggtaccaaaattccctggagaaggaacaggtaacgaggagatgatcaatagtttcatcctcttgatcacaaaaggggcacttctcaggatgactcaaccctcttttagcaagtccattcgcagtccagaaatgattttgtgcaaccagctagatgaagaaacaacattttggcaaggcccaagttttccaaattttcttgtgacgagggaaaattacagaccccaaaaagaagccctcgtaagcagtctttgctgaatagatgccattagaagcaatactgaaaacatgtttatcctcaacctcaggctgcagctgccaaactgaagtcatatcccacaactgaagataatctgttaagactcccactgtcagtggacc

SEQ ID NO: 167500 - DNA, 692 bp, Zea Mays
gtttttattccccctggactgggcgccaaaattcgagaacagtaggggcccaggcgtaaaagtaacggagcatcaggtgacccctgaggtggactacgggttctaaatcctaaaaacataaggtttcttttgtaaaacgtacccgtgaaggggtacagtgcattatgggctgctggatcaaaactctacggtaccgattagattctcgctaccctgaaccggtactccatcgtggctcttagatccgaaatcaacggtgcggccaattctcaaccgaaaccctgtaagcaccgcccgatcccgggccatgactgatcgcagcgaaggggtatgcagccgatagttcccagtcctccgattacatttctacggaccagatcgcccctgcaagtgattagtcttcggaacaatgtggaccatcccctcatgaatcaatgccccacagtgtttcttcccaagtgtgacgcgcgggtgtccgagccgctagccgaaggtgagctcgccgccgtgacggtgaacaacccgagccctcacccagcttacgcctaactaaaccccccacgcttcctatcacacattcagagagggaaactgatcatacctcctatcgagacgaaggcgaagctggcgcgcagatccctagcccgcaccgcgatggaaactctagggtttcccgacgccgagtcgctaag

SEQ ID NO: 167501 - DNA, 865 bp, Zea Mays
cctttgccgacttgctcaacgagcgatctccacaatgtctaccctatcggtgagggagatgacttcttcaacagcttttctttcgtataccattgtcagtaagatgtctatgctcatcctagtttcctaaatccgtaacctctattttcatacacatatcctcctcctttgtatccctactgaccatatgtggatgctacacctaccagtgaaaatcctaccaccaatgctcatcctccttccactaaagctcttacgataaatgctccttctactccaacctttcacttatccataccctcctctatatggatcatgtggtgctcctccttatatggtgttcattcgctcgctcccccattgatgctcctccctcatatgatgttcgtccttcattttgtccacctacatgtgcgatagtgcccttgaccagcgatagtgatgccgcttcaaaccattccggtactttggtgctccttaattccaataacgaaaggattggacgaaaatgaaggataaaagggtagtaagcacacatattcttttatgaattccacatggtttttgggtcgataaaacttttttgagttcataaatttataggttcacgcttggctattatactccatggacccaattgatggtaacctcaagaagggatcgatcttctagggccaaatagtcagcaccaacaactccatcatggaagatgctcaccacgacacactaagaaaatgaaggatcagtggtcgacaagcaaccataagaccaccctcttcaatggcatctataaccgcttatacgcgacctaaatgagtggaactgacgatgctatgctacttgaagcgactaaggagacttccat

SEQ ID NO: 167502 - DNA, 623 bp, Zea Mays
gcatgggtggaggtgggcgaacacgggagagggtccattttggccagtggtggtttggagcaggctggccacatcggggtggtaggtcaccgcagtggtaaggtcgccgacgacgtgttggtgggtaatcaagggtggggtggggtgttttgtgcccatgagggagtagtgaagcttaagagctcacttaattgctctggtgcctagatagggaaaaggggaggctcatcggagtgaagggaggcggcagcgccggctccgatcgagctcgagggagggcagaagagaggccgacggccggtgcaggtttgagaggagctccgggcgctccttttataggtgcccggggtggggagcgatggccagctggcctcctacgggcggtgcacatcaacgggtacaacggtgtgcacaacagcggtgatggaacatcatggcgaggggagaggggcggtgacatgcaggtacatgcccacaacacgacggggacaaaacggtgtctaactccactggtgtgatcatcagcgaagaaggggaaaggggacggtgtccggcggggaagccatcgtcgttgtacgcccatgagggatggggagaggctgacaagcggggctaggccgtca

SEQ ID NO: 167503 - DNA, 885 bp, Zea Mays
ccatggaagaggtagataggagcaagcttccctttcaaaacaacacccgagagggactgagcaataacaccatgcctcacaagctcggagaaagatatgggccggtactgcataaataaattcctggagctctcctggaacgtgctggccttcctccggccaagctcctccccatcacccaacaagccaaaggccctgtcctttgcactcctcgacatcccggaagtggccgagcaacaactctgattgtggagcgcggccttggccatggcattggccttgatgatgttggtccggccgtctacacatgtgtgtcgtagtttgctgccaaacgtcaccacgcttccgctgcgcaccacgacacctggatcccacaagaatcgttgtagaacattcacagttgctctgtaggatatagcagtaacacgctccgtgtagtaacccttgccaatgatgcgatcgaagagcttcccttgtgcgcaggtctccattaccatcacaaccatcacatagtgactgcaagcagctagagtaactggcaatgaaccccagacatctccttgacccccaatctggctgggacatttggtcgaacacccaaggggcgagttgctgctgctatccgtcttggacttgaagatggtgaaggagcagccgagctggcggtagttgggagcagagaagaaggggacgaacgggcggtcggggaagtactcgtatccgtcctccaccacctggtgcgccctgcacatgatgtccagctcctgcgcgcggaggaattccgtcgtgacgtcggcgtcgaaggtgctggacacatcgcggtcctggccggaccagagcaggtggatggaaaccctatcctcgatctccagctcgacccaggtc

SEQ ID NO: 167504 - DNA, 493 bp, Zea Mays
caaaaaattatccgtgcaaaaaccgactataggtgcaaccggaccgacataataaacgtgctagatcaagtgcacaagtcccccacgggcacggccggatcagcgaaggcacacagcctcatcatacaaattatagttacacacatacagcgagggcatcacaccttacattggttcaaccttcgggatgatacccatctccctgtagttaaacagcattatcctcagctcctcaccctcaaaaagacttcgcaactccccctcacctacactcgccccaaccggcgaggacaacaattcccacttgccagccctgtccgcacgaagatgaccaccctccgcctcactcactctacgcttcgccaccgcccttcgccgcctacgcccagcactcggactaggaagaacagcatccatcacacgcggagaagcctccgccgcagccacatccaatgccgcaaaataatctaaatcctcatccgaagactcttcc

SEQ ID NO: 167505 - DNA, 508 bp, Zea Mays
cttggacctgagctgtgagctgaattgttggctgctgctgcttgagtgcaggctggtagcgtggtggtggactgttgtctggtggagtggtggactatggtggttgctgctgcttgagtgcaggctggtggactagtggtctggtgttgctgccttgctgctctgagccttgagtgctggcgtactagcgtgctactgctgttgtgtcgcttagagcctaggaggctggatcgctgctagagccctagactgctgctgcgttttgcatcatgcatattttcagtttgtcttgtctagtgtctctgtatgagtgtgggcttgtggcattgttctgttatagacttctggtgtctctagtggtgttttgcatcatgcatacttctgtactcatgtgtctgcctgctaagtgcttttgtggatttgtggcattgttatgcaaccttggtgcctttgtggatttattttgtttaattatttaattgtgcatttgagcagacttggtgaagca

SEQ ID NO: 167506 - DNA, 374 bp, Zea Mays
tttatcagacaacccatgttcggaagaagaagtttgggataccatcaagcagatgccctctgacatagcgtcggggccaaatggcttcacgagaagattttataaggtgtgttggccaatcattaagaaggacatcatggcagctgttgcagcagtttggaggaaggactttcggaattttcgggctcttaattcagcctttgttatcctccttcccaaggttgagaacccgtctaatgccaaggagtttaggcctataagcctcattcatagttttgctaaactgattacgaagatccttgcaaaccggttgggaggacaacttgatagtatggtgtccaagaaccaaagtgctttcatcaagggaagatttg

SEQ ID NO: 167507 - DNA, 476 bp, Zea Mays
ccgaccacgtgcattgatgtcaggtcgcccgtggccaagaccttgatcctgtccaatatgggcaggaactctggcgagagggagggcttgctcctccattgcttgcggtcgagtgatggcccgttggacggcaggacaaggcggtcgttggcctcggtgctggcaatcacccagtcgctgcgccagttttcccacctcgctccaccaaaggtggggatgtagactacagccggatctagcctcgtctggaagtagtaggccccgatgtggtccctggtcttcctggacttgactagcacgaagaagtagcgaaagagggaagtgcagggggccacacctacgaacatctcacggaggtggacgaagatggctgcctggaggacggagtggggcgtgaggtgttgaagctgaagcccgaactcctccagcagcagcagaaagaagggcgaaatcggtagcgccaacccgcaagagat

SEQ ID NO: 167508 - DNA, 439 bp, Zea Mays
ggcccggtgagggctacatggtttaccctttggtagtgatctttcttttgtcgttttgtttcgaactcagagctagacccttcagagatcatgtggattactcccctgaagggttgagaagcgaattcttcttgctttggtagtggtgggggaggtggtaggggttggtttggatgttgaggtgatggaggcggtagcgctaggatttcttggtgttgaaggcgctgttgttgcggatataggttgtggttttgctgctatgggtaatagtggtgttcgttttggaattgatgatgtttgtattgatggagatggtaggtgtgggcgacgactctttggttgtcagctagtagggtcctggctattgggggtctctttccgccgaaggtcctcaaaacaaactaactatttcaatttgtataacaaagggttctgtagg

SEQ ID NO: 167509 - DNA, 1108 bp, Zea Mays
cattcattgggtgggagcaattgggtgttatagttggtatcagaggaataggttgtaggtcctagcaagtgaaataatgataaattgacacactgcacatataggatgggtttcctgttttactattgatatattatgttattgttagtgctggtttgacatcatttgatgaggtgttatgccaaccttatttacttatttacttactgttgtggctgcagttatgccgcctcgtaggctcatggcagcctgcaagttcctagtggggattctatgagtccggcggcaatgttagccgcaatgcaggccatgcagcaggagttggccattctgaggcaagctattcatgttgcccctgtggatggtgctcagggtgctggaggtggaggagtcccggaggcgctgtccctgggggtgctgctccgggtggcggggctgaggcgccccttcccgttagtggtctttctctggtgcagtggatgggcatgaagctggacacctttgatggcagtggtactccggtcgaggcggcagattggctgacttatgtggaggataagatggacgtctttgagattgtgtatggtgatcgtgttcgctttggcacacagctgctgaagggagaggctcaaatttggtggagaggcgtgcagacagctcactcctcttcaccaggagtcctgtcctgggatgttttcatcaggcagtttgagaggaggttctacccggtcacttttctggagaaaattaagattgatttgcagtctttcaagcaagagaagaagtccgtcactgagtatgaagtgagcttcaacaagatggtctgctttgttcctcatgtggcttacaatgagatggagaaggcgagccagttctgtcagggcctgaaaccttctatcaggcatgctttgggcgcctttccgttggtggattttcgtactacagtggagcaggcatttggtgtggacatgcaacaccagtacaccatggagtcacagaattcttcgggttttgatcagcctcatggccaggacgcgaggaggggaaacattgggggtccagcccacaagaggggcaagtctcagcaccagcgccaccaccccttgag

SEQ ID NO: 167510 - DNA, 400 bp, Zea Mays
tccaaattttatagtgcaacacatttccattgaattgccatcaagcgaccacaacatcctaacggttcgagcaccacaattcacataaatctatctagacatctaacatcacatagagagcctactacttcacattgcaattcatacagaaccgcgacgtgacagtaataacacacaggtaatcgacctttctccacgaccttcagctaggtcaccaacagacgacatgatgactacgaaggcatgtcaccacttcatcacacccattcattgcctatatgcgcactaattcatttcttgcaacatatgcactcaaaatcaatccacactacacaaagtacacttatctcttatttatgcgcagacttaacatctttcgggataaaacgtcactataaac

SEQ ID NO: 167511 - DNA, 634 bp, Zea Mays
tgttttacaggcattacctattcacctccctctaggtgactctcatctggtcatacaccaaggaagtgtgcaagtggcttgctaccacgtactagatgggggttattcggtcttccgaggatggaggaatgaagtcacatctcgtgggaaatgtataacctctatagggcattaaattatcatgacaatcatgctcacggttaaaagtggtacggaccctcacacgatttagttgagatgcggttgagttgggttgggttggttaatattgttgctcggctgaaattataatattggatatcgataattgttataactattgaagttgttgtatgagtgagcaaaatgtattagtaggtttttacccttcgaaccggatgtgaccgtggacaagatgagtagccgccgggcccgtacaacgcgattgttgccgtctacatcatattggaccacgacctgcgcacgtcgtctggcgagttcgaacatcacggtagagcggggttactttcgtatagaaatcgcaacatacagacgcggggtgggtgtacagacggacagacccgctctagcacgtacgtacgtaccctatgctcgagcggtcacgtgccgcggggattccgtggaccagcacccc

SEQ ID NO: 167512 - DNA, 392 bp, Zea Mays
caatcaattcatacaactgaaagatcacaccaaaaacatggaagaaacaccctttatgagacatgtgcattgtgaaatatatgcagtccaaatcattcttccgtaattgacaagcaaatgcactataaggttttacgctgaatcattcacatcccttgacaggtaaacagctggtaaatagacaacagaatacagaccttagcacttgaaagtgtccttatcacccacaatgatagtacaagatacaaactgacaaaggaaattatctaaactcagctacatggaaccttacagcgaaaatgatccatgataatgtcaagtagaatttcaaatatagcataaaggccccaaaaactagaaaattaacatttttttataaacaggcactctat

SEQ ID NO: 167513 - DNA, 480 bp, Zea Mays
tactgggtcttgttctactagctgatggaggagggcgccttgggggcgggtgctgaggtattcttggggccattcaccgagttggagtaagcaggtcctgatgccttcaactaggggcagttgttcttgaagtgactggggtctccgcaatgccaacaggcatttgctggtggttggttgcttgcaaccgagggggcctgaaaggagctctgactctactgactaaaacgtgacggagtgggtcccgctggtctattgaagcttggtcccttgggtggaaacccaaaagatcgagttctctgctgccgatcctgttgctgagctcggaggacttggaatttcctcttgaggtgacccttttattcttcctttgccctttccacttgtatggctttgtttgagaggtgcgagaagctgagaaaatcttggctggctaggatggtcttgagttctggtctgagccctttcaagaagtgggcc

SEQ ID NO: 167514 - DNA, 779 bp, Zea Mays
ttcctgttctccttcctccgctcgctcgcaccagcgccggacctcgccgtgttgtgcttcccgcgccaagccactgtcggtcgattccttgcccgaagtggagcatgccaagacccccttccttttctctgcaattgccctcgatcctttcctccacccgatgcgaatttctttccccattcacgagcgctgtctatggtaggtggctggatcttcaatcatcggagatatccgttgttctagagtcgattcgccccagctttgtccctataagaaccacccaatcccccatcgtcgatcacacgcattgacaccctctcccgtgctctcctgccctctgctcatgctcaccatcgccgccgcaccgccattgctcgtggccaagtgcctttgaagcttctctacccacgctaaggctactgtggtggagcccaaagattgttgctgcttctccgcatcttccccgactcggtccagccctacagcatcgcttcgacctcactggagccccaccggccgtcgttcctcattgtcagccgtccccaccgcctcagccccccttggtaaggcctcagtcgcatttgcctttaccccttgctgctacctaagccatccccagtcaatctagcctcccggagctccgtatcgaccaactctagcgagtcgttggccgtgtgccaccgtgcgccatgcctcctctccctcccccgctcgttggcttgtggatctgttcgcgcgagctgagtcatgcattctggcctgtcggatctggattgtgc

SEQ ID NO: 167515 - DNA, 722 bp, Zea Mays
aaccttgatacacaatctataatcgactcaaacatgtaattgtcctctctccttagactataaaggagggtcaagatgccctagaagagcagatcattatatcataagcaatatccaccaacacatagggcgaagggtattaccttgtaacgagagctgaacatgtctaaattctcatgcctccttacacatttacctttagttctcggtcttgcgccctacccagtaagttcactactaaaataatcatcgacagttggtggttggtgcgccaggtaggggtcattgcattgatcatagtagatctgatggcaaccatgtgttctacgccaggatatgcatcaaatgtagctttcgtcaccgatccatgagatgatgttggacccacccttgatctttttatgtcatcaacgctccatagtgaacatagccatgacttagaagacttaatctatgttatggtgaatctatattagcctagacacgcaatactgactcaaacatgaacttcatttcgacgtcgactccaacttggtacaagggcgatctagaccacatatttaacttggactatgactccaactctaatccagactcgggcgatgatgacaattacgtggaagaattgggtgagccagatagagcgattaacaacccaacccaaatagtggatggctattacctgcaatcatcacttcaacttagcctttacatcaaaatcg

SEQ ID NO: 167516 - DNA, 756 bp, Zea Mays
cgaacgcgatagagctccggcgagcgcgtagaccggccgaacagggcaacgactggcgctgccgagtggctgtcacccaattgaaccctccccagtcattttccccaaccaaatttcatggttggcgatctgccaagcactgcccgcgaggacagcgattgccatggacctttgttcgtgttcccggtgattggtgagctctcagtccaattcggtggtttggcaagcatcacggagttatgagaatgctcaaacgagggagcagaaggcgggggctgacctagattacgctagccgcggtgagactggtttcacggtggcggaaacccgaattggggagactccaaaattcgtgagctctggcgaatgatcgaggctaattcgtggtagctggatacttcactgtcttacggagctcacggcgggcttaatttataggcttagcgagcggtggctgtgaatttggacgagacacacgacggccagaggaagggaagtttcactggcgcaggggattcgtggcctctaccgtggcggtcatttcggcgatcaacagagagtcactaaggcttacggcgatgcgttggcgaggcttggacacgcggcggacaacggcgacggcttaacggcggtgagaaccttatctgaaggatcagtgcgcaagggggaggcacgacggctagccggagtggcgtccagcgcacggggtgatgatcttttaccccgcgatgctatccatcaactccaggcatgaat

SEQ ID NO: 167517 - DNA, 782 bp, Zea Mays
atcaccctgtgccgccggtgatccgccgtcgcaattcgcgctcgcctgggagattcgtgccacaggaagagtggataacatcgggcttggtgagaatatccagtgtggggtgaatccggtcgctggccggaccgatcgccgtgttccgccgtggttaatcgcgctggcatcaccggagttcaccgttatctgaccaggctacattcctcgatgccttaccacgtcgcaataatccgctctaggtagctcgttcatcgcctaagccactgccccagtaaaagccacgaatcacggcgccagtgactcagtccctctctctgggcgccgcgcgtcttctcaaaattagccgccaccgccgatggcacctataaattgtcgccccagtgagctccgctaagtaatcacacacccaacgcacccgcccgtgcctcagattgtccaccagagcgctctaattttgaagttcccccaaatcagttagaactctgtcgtgtgtgagctcgtcgtggccagctctccacaggtccgatcacgcgctcccagctcttgttttagcactcttgtgtgctcttgatgcttctcgacctggccaattgaactagaccacgctagatcatcgggaacgcctcgattcatccgtagttcgtgctatcaccgtggacagagagattaggagctagaactttgcaattgattgaggggtaatgatcattaagggttgaattaggtgttagccacaccaaagcgtcggtcgttgcgttttccggccagtactggctcgc

SEQ ID NO: 167518 - DNA, 685 bp, Zea Mays
gaatcatggcaagtccctgccccctcggtcagggagaaaaccggatgttcatgctccaagttggactgaatcccccacagacttggagatagctgaggccagggttctgcttgccgaagttggtttgttgaaggagagaggtctgactgctgaagctgtagttgcagactttgtttttaagaacattcagccactgaaggacagagcatacctggcttatttgtatagtggtgtcactgactcaacccgggttgccaacaggaggattcctgctatggatttggtaagccgactagagatgatccttagaggcaaagtgtcaaatattggtgctccttcctggaatctgccaccttccaagacttttttctgttttgtgtccaatcctcctgctagcgatagtggcctgggtcttagagtgcgaccctctcccgaagaagtcgaggctctggttgcttcacttggtgatctccccaacgatgaaaggcaagttcactttgaaatgcttataaactcgagtgatgcagagataagtgctatgctggacatgatggctgaggattcatctgactccgtccctgctaaaaccatagctattgcaactgtccccgagcctgaaaagaccttgactactcaaaaatctgatggtgctcgcccaaagcgccttcgcccggccagtcatcca

SEQ ID NO: 167519 - DNA, 599 bp, Zea Mays
gtgaaaatcacccccaagccttctgttgtctcggtaaattgcgtacacgtagtttcgaaggggtcagcggggattggggttggcaatttctcgccgccgtgcggccgccaccgcggggccgctccgtaccgtaggtgagctccacgtgcacccatgacaccagaaaaatgtccttagatgattcgctaggtcctctgttccatgtatcttgcaccaggagtaggaaatcagggctccggtctgtaatcggtatttccccgaccatgctccgccgtggggaggagattacaccgccgttgggtgaaccgtggagagcgatgacccttcagccgtggatctccgtgtagacggttgtgatggggcgcgagagtgttccccttcgcacttagaatctgatccgttggcagttcatccgagggcttgcgagcggtgaaaacgtggttggatccggggcgtagatcttagatcctggggttagggttgcataccggttcggtataagttaaaactaatctgagcgctccgtttgagatcggacggtctggggcgcacgataccccttcgcgacgcatttttattaaagagcccttatgtttccc

SEQ ID NO: 167520 - DNA, 783 bp, Zea Mays
gtcggcccacgtccaggcaaaacgcgctcgtgttggcggctttacacagaagaccttggctttttgaacaaatagtaaagaaccctgggcactatttccttgtctcactaacgtttgcacttagacccttcctctttcttatcttcggaaactccagtccccgacggtgatcggcgacgagcacatctccggcgaactcgtactggccggaaaacacaacggctaggcctctcctttgttcgacacctaattccaccctcggcgacactaatccctcaaccaattgcactaaatcggcccggagttcgtctgtccatggtggcaacgactaccggagacaattcgtgttgttctaggcgattcaaggcggtctagttcaatcgaatgggtctgtgagcaacagaagacatgagggaggctagaacatcacacagaagggcatgaactaacccgtagatgtctggccacgacgagctgtctcacggcggcgttctgaccgatttaagggaaatggaaaattgggaggctctggtggatgatcggaggcaagagctggtgctttggatgtgtaataacctagaggagctcactggggcagcaatttatagcctccatcggtggtggcgtccaatttgaaggaagtgtgctggcggccggagagaggagaggttcactggcatgagttaccgtggcaatcactggctgaggagctacggcgatcactggtgagctattttggcgagtaacgacgtggtgaaagggtcacggcgtggcgcaatcgcg

SEQ ID NO: 167521 - DNA, 1581 bp, Zea Mays
gatcaacgccagcgagggcattggagggggccctggtgatgagggtagggtcaaaaaagtcgaggttcaagacgaaccaacttaggacgctagtggccaggcggaggcccagaggatgcacataatttgaccaggggcaatagggcagtccaaaggtggtagggaggcaccgaggccatatgcaagagtggcatgggtgaacctacaggcaaaaaacaagatgtggctaactaaagagagctacatggtcaggaagaaagtccaactcgagaaggaagtcgatggtggagatggaagagggagaaagaaaagtcatctcagcgaaaacaatgtgacaggagatcaagagacgatgagtgataagattaaggcaccattaccccttgtgattagggaagtaaccaagaaagacacaacgggagaagtggggcaagattatgggagtaatggtagaaaggttgtggtagcatgcaaacccaaagatatgaagatggtcgtaggagagtggtgccaaacatagtgaagtagagtataggatcacgaaacgccttagtacaaagatgatcaaggatggaggtgatgtggaggatcttagccggtagccaacatgaacgaaggcctgaaagaccaaggaacacatgatgttgttagtaatgcaaatcatacgatcatcctcgccattctagaaagaagtgtaggggcagaacatccgaagttgaacaccataggagaagaatgactgagctgagttatcaaactcacagtcgttatcacgctgaatgaccttaatggtgcgaacaaactaagtggaaaccaagcaaagaagtgcaggagagtcacaaatgtatcgaacttcaaacacaagggaaaatccataaataatgagagtgatcatcaagaacgagtagataatagtataatacttatcactaaaaacagaagaggtccacaaatcatagtgtataagaacaaaattgtgcactgtctaggaggagctagagaatggaagtctaacatgacaacctagctaacaagtgtggcatagatactcaaagaatcccctaatacaagagatgattgaactactacacaacttggataacatgctaggactaggatgaccaagctgacgatgtcgaatgttggatatggtggaagtaatcaatgtgtgtggttgtagcaaggacaagggcgatgatggagcgaaaacggtaggtggagaagtaaatgaaggcagacgtaggatgtacatgggcctagagctatcacaacgggcgaacaggaggatgttcatgttgtccacaatgtcagaggtgaacgtgaggatggtcatgttgtccataacgacagacgaaggatgagacatgagatggattggatgaggatagtataccagcatccgaagtgatatggtagaaggcaccaaaattagcaacctagtcaatgacgataagagtcaggtcatcattctaaacgagctagcaagtgactgttggtcccactcactgtgccacatgttccaggacagcaccgagtggggtgggcgactggggcccgtcggtcagcgagcacgtccggaga

SEQ ID NO: 167522 - DNA, 753 bp, Zea Mays
gggctctattgcaaaataaacacaggggtatcagttgatcacagccgtcggatcaaccatcaacagatctgattagatccgaactcccaaccctgctatgcccgttgatcacgagatcgacggcaactaccccgtcagtcttggcaccatccgatctggatcagacgggtgacattcactatggcgaaccattatccgacttctaatctcgcatgtccacgcataggtccatggctagaaatcaccaccctgatccgtgttttgggtacggcggcgggattgcccccatggcggtgccattgctgaccatggggatttccaaatttaacgtcctacgaccctaaccaatcgcgaaacacgtagtgcggatcaattgaagataggagagccaatactcaccgaggatggcatgcgcaggagtttggcccgcggcggactttgggttggcgccggtgcgagagctctgaagagaaattcccaggtgactttccaccatcgatgcctgcaacctccacacacgtgttcgggatgctccggcgatggcccccgacctcttctacaactccgagcggtggcgcgatgacgagatgccgacgtcgactcggttccccccctctctcccacggctcacgacactggcgcaatcttcgagttactcgtgaaggtggtgcggtcaggatgttcatttataaagtccaaggccgcagaacacaagggagaaggaggatagctgtcgtggtcggctgttacaag

SEQ ID NO: 167523 - DNA, 398 bp, Zea Mays
gaaggaacatgacagagagcagaaatgcttaaaatgtgggaagtcgaggtacgtggagcttgtaaatgaagaaggggagaaagtggtgacaaaagttgcacataaacagcttcggtacatgcctctcactcctagagtgaaacgtttgtttctctcgaggaagaccgctatgcacatgaggtggcataaagattttactgacagacaagatgggttaatggtgcacctgtcagatggtgatgcatggaaggctcttgacaactttgatccagattttgccagcgatgcaagaaatgttcgtatcggcttggcaactgatggtttcacacctttcaatatgaccgctgcgtcgtattcatgttggcctgtcattgccataccgtacaaccttccacctg

SEQ ID NO: 167524 - DNA, 694 bp, Zea Mays
ccgcggtgttcgctttgcgcagaggaccctgctcttttaaataactcgtaaagactcatgcgcactattcctatgtgtcactgacatttgcagatagccccttcccttttctatttcttcacacgtcgagacccccgaccatggacggcggagtagcggctccggcgagcccgtaccggccggaaaacgcaacggctatgcttctccgttgctcaacacctaattctacccttaacgaccatttcccctccatcaattgcagagttctaactctaaatcgtgttgtccatggtgatggcacaaatagaggataacccaaggcgttcctgacgatctaacgtggtctaattcaattggccaggtcgagaagcatcaagagcatataagagggctggaacaagagtgaggatggcatgattggacctatggagagctggccacggtgagctcacacactgcggtgttcttgacagatttgggggaaattcaaaattggagcgctctggtggataatctgaggcgcgggctggtgcattgggtgagtgattacctagcggagctgatggcactctcaatttatagggcccgagggtggtggctcttgaatttggaatggcgcgctggcgaccggagagaggggagagcactggcagaaaggattcgtggctttcaccgtggcaaggtcaccggtgat

SEQ ID NO: 167525 - DNA, 569 bp, Zea Mays
gcataaacattgtcgtcatcgtcgtcgtcgtccacaggagagtgagctggggctagagttggtggtgggggacgagcctccagtacgtccatgcgtgtaacaagttcagcaactcgtcgatcaagctgctcataggatgtcgaggcagagtcctggtattttttaaaagcttcagtcatcgcgcgcatcatctccttcaattccatttgagagacacagtcatcgtcgttaagtttaggccccttgtccttgtccatttgattctttggtcctgtcattgttagcacaaaacagagacaaaaaggcaacaaacaatgtaaaccctacaactatctctcagggtggtggtggaggtggtggaatacaaattatgaagcgtcttaccccactcttacaacgttcttaccagcattgcaggtgacaaacggtgaccggtgtgactgtccaacgagcgtgggtgtgattgcaaaagagtacctgttctgctcgagagaaaattggagctatgggaaggctaactaaatatatatatgtggcacacaagtcagtaacagatagcaatgctgaat

SEQ ID NO: 167526 - DNA, 395 bp, Zea Mays
gcaggaagcagtgttgcatgtggaaataagtttgaatgctgtcatgttcgctagacaaaatgatctaactgctactgattattatgattcaatgatggataatattgatgaggtgaccgacaaaaggatgatagctttgggagcaatagaaaaggacaaaatcatggtagccagggcctacaacaagaaggtcaaagcaaaatcatttcaagtaggggacctggtgtggaagaccattctgcctctaaggaatagagaccgaaagttcgggaaatggtcaccaagctgggaaggtccttataaggtaaaacaggtgatgtctggcaacgcctatttgctacaaacattgcaaggcaagggcttgcctaaggctttgaatgagcgtttcctcaaac

SEQ ID NO: 167527 - DNA, 1176 bp, Zea Mays
ttaaaaacctgatttgaaattaggatttaaatatgaaatcaggaaaataaaagaaaaagaaatgtggttgtactcgttgctgggccaacattccccactggccagcccgcccacatttcttctgccaggccgcccccactctccagccgaagcccgcacgctcatgggcaagcttgtgacgctgtcacccgggtcccacttgtcatcttcctcgtccatgcccgcatgcttgaacagactcgcgagaactgcgcgctgttacaaccgatcgcgccagccggcttccctgggtcacctcctacctcgcgatcggactcactactggcaatgagatccgcggaaaccgcgcgcgcggttggcctgggatcgatccggccgactcaacctcgtctctgggctataaaaggggacccttagatccttctcgcccaacaaactaagaaccgggccctagtgtcatcaccgtggggaaggaagctgacgaccgccgctgttggcccacgttctcgtctcggtgccgacctggggagctgcaggcgggcaaggatgtatgtcagcgcccagggaactcgtaccatggaggttgggcctctggtgatcgcgcatgggtggcaatttcccgccgtcgctgctgggtcaccatccgccgtggccagggggctccatgcgatgatttctggtgaggcttcctctcccaggatcgatttcttctcctctacattgaccatagttgaatcgagctcttgtgcctgggagtcgaggcaaggcagtgcgacaatggcgccatggcggtgcacgctcgccgtcgtggcgtgggatactggatgaaagggagtaacggcttgtccgttggattcgagacatagggatgtgattggatctgggaaatgatggctccgggtcgttggatctttgtatctgtggctccgattgggtgaaggatgctccctccgcgtaattaaatcatgaccgttggtctcttgatggacagatctgagtagttatcgagtgttgggggcactgaggtctaattacgaccgtatgattcagatcgggcggctcatagtgaacgataccccttcggctgtgtggattcgcataagaacccctgctctttttgtaaattaacccaccgtcctagaactatagcagagagtttaatataggtccctggta

SEQ ID NO: 167528 - DNA, 388 bp, Zea Mays
ttcaagtcaaggcatgtgcctagcatccagtcaaaatgaaacatttaccagtcaagcctaacttactggttgatgaaccttttcccactggcccaacttatgtctgctgcatttatgcatgtcaaatgcacagggatgctattgaccaaagttttaaaacgtgtctggggagaactaatatgcccaaggcttctggactaaagagaagcggaaggcgcctaagaaaatggacgaagggagtaattattaaggacaaagccaactggtaatatcaacaaacatggattttaatgaactagaacttgcttttcacattgtacatagaaaattgtttatctaaccttaatcggccatagctgtaattggtgaagcctgatttttgcacact

SEQ ID NO: 167529 - DNA, 978 bp, Zea Mays
ccgacgagtatccaacgaccagaaccccccttctccatcctcaggtcggagtagggcaacgacggcgagctctgcggtggagttcttcaccgacgaactacggaccatgtccctagcgctctaaaatcgaagcagatggatcctacgcagggcggaggtgagcgcaaaactagtgaaggatccttacatgctaggttggtgagggtggtgctaccagcaatgacgcctacggcggtggttctcctggccaaccgacgaggaatactccgcgccttgaagacccccaaccccgtctggttcggattaacgcttatagaacgaagggtgagagtcgtgcagagttctcaccgagatcgaaggagtggaagatcctgcccacggtgagacacggtccgaccgccgcccgtgagctccagtgaggaattggcggcgctcaggtgctcccccatacctccaactgccaccagagggtttgcgacgggttggtgatgctccatagtcatcatctccgcctcggttggtcccgccagcaacaatccccagtggcggggtggatcttctaatttcccgtgagatttccccatggcggctggattccgggcgcacagcggaggggaggagaggtctctggaggcagacgcatggatgcgcacaaggaggaaggaacggctgtcgctatatatctagggaatacccggtcgccggctccgatcttcgcgcgcgccagctgcgggatgcgttcggccaggttagggatggtgctgacgaggccggcccacccgtcagtgaggaggtgaggcgagcgtgcgtgagagaccgcccggtgggtcagtgtgctggtgaacaaacagatgtgagtgcgcgtgaaactgagagtctgaccggtagggcccactgtcattaaaagggccggccaggcgcgcgcgatgggctggtttgagggcgagctgggccgagaagcgctggattcggcccatc

SEQ ID NO: 167530 - DNA, 452 bp, Zea Mays
gcctagtgtcatgtgtgagctaccactcagacccataatgtcggtcggggcattacatgactaagaaggcaagcactattaagcctagctcccactaccatttatctagtcatcccattcacatccgtcaatcatcaccactcatccaccctcattttggtagcctgccccctagccctagatctagttcactctccttgccttcttgtagtctctgtatcgcctaagctcctctacttggcaacatcgcgccttgacgtctctccgctgttagctcccttgcctcgctaactttcgcattcctcatcctctctctctctaatcttcatcgctctaacaacatgtagaccataagattttctaagggccccgctgtattctccttcattggcgtgctgatcaagactctagattcttccttcgtctcagttggtcaactgtttcacgcccag

SEQ ID NO: 167531 - DNA, 894 bp, Zea Mays
ctaaggcccctccctttctatttcttcgcaaggtgagtccccgatcatggacagcgaagcaacggcttcggcgagcctgtactggctggataacgcaactatcggtgctttggtgtggctgacacctaattccacccctaaggaccatttcccctccattaattccaagattccagctcacaatcgttctgtccatggtggcgatggaaaccaaagataacttaacgtgttctaggtgattcaaggcggtctaattcaatcggatggtgctgtgagcaacagggaacatgagggaggctagaacatcccacagaagaacacaagctaacatgtagatgtctggccacggtgaggtgttcacggtgcggaaaactggtttggggagaatgaagaattagatagctatggtggctaatcggaggcaggagcgggtgctctggcttcgtgataacccaacggagctagcggtatgctcaatttataggacccgagggtggtggctcttgaatttggaatggcacgctggcggacggagaggaggaagagcactggcgcaagagatgcgtggctttcaccgtggtaggcttaccagcgacgaaccagctatctagagcggcttactgcgacgtggtgaagcttcaaggcacgtggcgccccatcggtaggcggccaactccggcgaacttatctggaccggtcgtaaggcaagggggtacggcggccaaccccgagtctcatccgcggcgaagatcttttcaccttgtagcattatctgggcaccaatgagcacgaatcacctaggcggcgcgaatccaggcgtgaggttcaccggcagtaaggtgcactgcacctgggatcttcttcagttactataccattggaatccctattcaa

SEQ ID NO: 167532 - DNA, 541 bp, Zea Mays
tttctggccattggacacaagttatgtttgacgacagtcgttggacataaggctatttccaacctattagggccgaggggcaactgccatcgaaaataagccaaaagtcgtcggaaatagcttatttcgacgatataggccttatttctgatggttttggcccttggaaaatttcttttttactgttgtgcaggacaccattcttctccaagtctagtcctgcgccaagcaccttaccattcttctccaagtcatgctagagtacgtcgactcctcacccattgagccacttgcttcctacaatgcgtcgatgcttccttgccctgcttccttggcatgcagtcctcgccgagctcatccacgacgccaccgtggagtctttaaccatcgcagcccctccgccgtggctgctcctgacttcgttagtgccatcggctccccgtccattctccacgccaggttgtgcgccctcaccttgaagccccgatgtcgtcttcagttgcgttcttctccagcttgagctcccttctcgtcgtgacgt

SEQ ID NO: 167533 - DNA, 658 bp, Zea Mays
tatgcgatgagatgcctcccagcaagcgtcgtcggctgctgcatggtagcttattctggtaggaaaagtagtagtttgtactaggatgaaacaatcctttttaatgaataaagtctagttcttgttaactaatacttttgtgatgaaatctgataactagtcaaagtgatttagcacccaaaaatacattccactagcgtttctcttaaagaaccaccaatgaaaaaaataacattgcggctggcttaaggaaccgccagtgaaaacgctcaattaacattggcggctggcttaaggaaccgcctatggaaatcatttctatgggcggttctttgtaagaaccgccagtagaaatcgttttagtatatacgcctcaatcgtctcctcgtagtctgccgctccagacgccctattgcccctactctcccttctcgcttcagtcgccgatgtaccacctcgcgcctccccttcgtggtagttgccggatccggcctccctctgtcatcctagctaaagtgaagtaggcggcgggcttggccgtcgactgcacaccacgcgccacacaccaagacgtggatctaggtcaactgcttagttcctccattttagtgttgctatctgccgtcgtgcctccattttaatatgttgatctatttac

SEQ ID NO: 167534 - DNA, 570 bp, Zea Mays
cgagtacgaggtcccctttgttgaattcccttgggatgactgcgttgtcgcgccaggccttggtttgaacctgatatttgtcgagggcctgcagggcgaagacgcggtctccgtcgatgaggtccttggaagttggttcgtcgacatcgaggatggctgatttgtttgttctgggggacccgtgttttaattcttgcggtgtcatggcctcagatccatacaaaaggcggaaaagtgtgaatccggttgcctggcactctgtcgtgtttagggcccataccacttcaggcaattggtcggcccatttgccctttttgtcgtcaagaagccttttcttgatggcagtaaaaattttgccattggcacgctcgacaacaccgttggactgtgggtggtacaccgaggcgaagataggcttggtgccgatggaaaagcaaaaatctctgaagtcttggctgtcgaactgtttgccgttgtcgactgtgagttcggacgggactctgaagcagcaaacaatattttgccagaagaatttttgtgcggtcttcgatgttatggtggatactgccc

SEQ ID NO: 167535 - DNA, 420 bp, Zea Mays
attcaatagtggtggctatgggagaaaccgatgcaaccttatctgggcgggcaccctccttacgggtggagtaccacgagtccacgacgtgagaagcggacgggagtctgttgtggagtgggcgggtgggacgcaacaactgacatggcatggaggttgcggatggcgtgaagacgcggagggtgcgggaggcgacgcgggtgttggtgagcgtgtgcgagcctggggaggatggagtcatggtctgcttgtgtacggtaggggtgagttggtgtgcgttttggtgtgagtgtgtgcatacatgaacagatactacaactgtacttgtaagttagaggcaataaaagccattgcgctgcttgggagacttgtcgccaactatacactgctggggctggggttgtttctgcgcttaaactc

SEQ ID NO: 167536 - DNA, 501 bp, Zea Mays
cggtgggggtaccttcgccttggcgcatgcatcgaggaggctgtagcaccaggttgccgccaatgccgctgttcccagactgtcgccaccgtgttcagggtgagcagcaggcctatgcccggcggttgccgacactgaagacgtcacccgggaggtcgtacaagatgccgtggagatggcggccacgcgcttccagcgcgaccctgctgatgtcaagtagttcatacctgtagaaatgaggctagggccccgcttgaaggcggatgtaataactttttgtttttgtaagatgcttttgggaactatcaattaaatagctcttatctgtgcagtatttgttcttgctgtgtgtggctttaccaactcctctcctggtgcttgcccccctgggaagtaggctcgacgtgtcgaggctggataccagcaaacctaaaaagagttggtgccccggccccccggaggtagtctcgactaggacctggacctgttcatagcttcagc

SEQ ID NO: 167537 - DNA, 423 bp, Zea Mays
tcctcctccgccaccgcagatggctcctgtcctctcgcgatttcccatcacccccaaacccgaccccgacggtccaagcccttcgcaatcccccatccccgtcgcagaacggtcgtcgctgatgctcgcgctcaccccggagctttgcgagattcaccaccgggagcttgctccttcccccgacgacgatccctccttcgctcactgccttcgccaataccaactccacctcgaagccctcgccgcccgtctccgcccgccctcttcctcctcacccgccgccacacctgttgcacgagtccctcctccgcctccatctcttccccctcagcaggggcagcaacaacaagcaggcgcaggcggaggatccaactccagctctaagaagcgcgcgcgcgccgccactgaggtggtgcgcgccac

SEQ ID NO: 167538 - DNA, 838 bp, Zea Mays
taacaccccagtgttacttagggtttctcccagtaccccaacttgtgaccatcatcacatgtggctctaatgatgcaagaaacaccaaacttaaaggattaaaagcctaagcaaagtctctttcagctcaagaatcatacactaagcacatcatgcaccttaagagagaaaaacatccaaaaccctaacaccattcaaattggccatttgagcacaaaagggaaattgagaaaagccttgggaaaagtacaaatggaccaattaacaaagttatagtgcataaaataaactacaaagtgtagtaagaaagattggtcatctgaattttccaaaatccccaaaacagcccatgaagtgaagcctctaggaaaaattcagaaattcagaaatctgaatttcagaccatttccaaagttcagatgtgttccctgtttcccaaaactcgaatccttaagtccaaatatcaaagtggcgccaaaataccctaggaacactctggcgaggtttgaaaccaaaccaaaatcgtttgacatgatttgacataggttttgtcttggtttgaacagtgccgacagagctatcttcacgccacaatatcttctcacccaggccatatcttcactcgggactcacacacgacagaaagaccttggcacggtgaagagatgctacacaggatccttggcaagatatgcacgtttaggtcggccaacaggtgtttgaactcgggcagaatcacacctccacgtgttcgatcgtgtgctcaagcgctcggctgcgcactagctgccctctacgcgcgtgtcgtgcatggtcgatgcctgtcccccgcgcctgt

SEQ ID NO: 167539 - DNA, 598 bp, Zea Mays
gtcattttcgatagactgatttaggcttgttaaatttgcaggtggatattgtggttctggaagggtacaacatcgcggagctactggtgagatatgaggcggagtccggcgtccgtagcctcgtgctcggatccacctccctcttatactcattgtttttaacctgtacaacttaagtgcctcaatcaagaaatggtaaaaatttggccatttgttaatgaggtgctaacttttacaaggtcttttagtatttcacacttctcattttagccccgctctcttagattactcttgtgtgtggttggttatcaacagccaaagtaatacgagggtcaaatgtggtgtttgtaggccgcataggagctaatagagaaacactacaacaagctgattgtgatattcaggttaattccatttctttttctttccattctccttgaaccattgggtttgtgcactagtcaatggcatggcctttaagacagttatccatgcccctgaaagatgtttaatagtcaacagtaaagcatctgacaacaaacaagaaacctcaccaaataacttagcaccttacttcttaagaataggtataactaac

SEQ ID NO: 167540 - DNA, 489 bp, Zea Mays
tggtgtgttcctgctacctgccgtgccctagccattgtcgccgcctccgtagacctaggtttgctctgctatatctttttggttcatgtccatgtgtcgctgttggaatcggttccagatccgtgcattcatgagggcatgttgtctatgcgtgcttgaccttggttaacttacagatctgtgcatttgttagggacgtgttatctatgcatgttggatatttggttggtgcattttggttccaggcttgggtgtcgtgtgcgcatagatagcttctgtagtttgctattgtttttttcctggtcaatcgaatgacacataccggttctgctattgttcacaagaggttttctgcggtgtagtcttgctgatgtttggattaaggacagtagttgttccaaaaaaaatgtttggtctgtattaaggagaatagttcgacaaaaataccatgcctttattgccaaagaacattacaacagtctattcaga

SEQ ID NO: 167541 - DNA, 512 bp, Zea Mays
cggaggcttgcttcaccatgatgtcagccatgttaaatcgtaactcaatgatgtgtgggccgcaggcatgggtaacaaatatctccgtgatctcagaccatcgtcaactgcatctacctcagtctctgttgtgtggggctttctcgtcctccaaacgtcataacgaacgcgaataaagcaaacaatctctccaatttagtcgggattcgctggccagtagttccttcatcaacccggacttgtctccatggccctataaaacctggtcgccaatatccctagatccatcaactcggtagatgccctgttgcagtttgggctgagagcacctcttcgccattgatgagggagagagatcgcagggagtcgccgtagagggaggtcacggtaaattggtgtcgaggctctgtgggacctgagggagttcgtcggggtgcgcggacgtcgacttgcgtccattgctcgctcggccaacgacaagccatcgaggagatagagaagaaagaagagga

SEQ ID NO: 167542 - DNA, 1028 bp, Zea Mays
atcatatttaacacttgaactcttcgcccaccagctcgtgtaggtttataaaacccctcttaacaaaccccaattatatctatggttggatcgtaatctaacggatcaagatgatcacttgcacgcttgcatctaagacctaattgcatagcactcgttgtctcagatagaacaacttcaatttggcatagtacaaacactactcacactacataaacacaactagagagctgcaagcctacaactatttaactatacatatacacaagctagctaataagagaggaactactttactatacgaataaacgaggaacaaacagtcactaacacaagtatatgaacatgtaaaataaactagtgcgagaaatttgtcctaaggttcgatggtttgacaaccacttaatcctcttgctagtagtaatcacacaagattactctctccaacaaagttagtgctcacacaagagctttagcactttgatccatctagaccacttggcgctcttcacacctcgttcaactagagtttcttttcgtgatctactgcagggcgagcacaacactcctcacttattcttcttcagagccacacaaaaccttcacgcgggctttacaatggagataaggcaccaaatagactaggaggtggcaacctctaaaaataacaatcggcttacaatactttacctaatgccactcaatcaaattactcaatgcaatatgttggcaacggtcacccactatagagcatgaacagtattgatcactagtgagttcgagggcactaagtcactcaaaaatgtacaaccccattggctcagcccaacgatcctctctacataaagagagagaaaaactgatcgttgaaggctttttagcctctaacttggattttttcggctcattgcccttggaaatttcggagcaattcaaatcaactccaatgatgggtcaacatggtcatcatccacgcatgctctcgcatcagaatttttggcctactcgcctcacaaataccagggcaa

SEQ ID NO: 167543 - DNA, 895 bp, Zea Mays
ctgtcttggctcaccggacagtccagtgtacaccggacactgcactgtgcactgtccggtgcaccggccgcgcgcgcgtggatttctttttcctgtgcgctgtccggtggttcaccggacagctattgtgcgttgtccgatgtacaccggacagacactgtagactgtctggtgtgcccatagtcggtttttaaaaaagctttccctgcccgagcttgaggccaggcacatctctctgcctctctcagttctctgccaccctctctggcgatgactctctgctcaccggcgaccagactccgaccgtactccggcgatctttggtgcctttgctcgacctcctccatctgggtgagatcctcctcccttctgttttctctctttttcactcttggtgctgcctccactctctcccacccctctgtgcacttcttcaaattcttgtcaaatccagtgaatgaagtgaatccaagtggttagatgtgttctatgtgtctcttgaatacccctgcaggttcctagttcccttggggagggtttcacaacctaaattgaccatttctccaaaaccctaaaacactgcatgccacgtgctcggtgaaatgcccaaaccagccaaaattgctccgattgcacccaaatttttcaggcaccttcacaatacctccagtaacatattcgccaaatttcacgccaatctgatatcccagacttcaattttacacaatttcctatttcgagcgatcaattccgagccgagtgcccaaattccattttcttcgcctcaaatcaaaccaagcgcacacttcactcatatttacccatataaacctattcatgaagtatcggctcaattccaaatcatttcatgcctcattttcaatttcaaacctcc

SEQ ID NO: 167544 - DNA, 328 bp, Zea Mays
gccaatggaaaaattttcacagctgtcaagaagatgctcctcgacgaaaaaagggcaggtgggccgatttgttacctgaagcggtctgggcgctaaacacgtttgagtgcagggcgattgggttcacccctttccgccttctatatggatcggaggccatgaccccacaagaaataaaacatgggtccctgcgaacagtttcgtcagctgtccccgacgtggacgaacccacttcgaaggatcttatcgatggagaccgcatcttcgctctacaggctctaaataaataccaagcccagacaaaagcatggcgcgaccacgcagtcat

SEQ ID NO: 167545 - DNA, 677 bp, Zea Mays
cttagaactcagcattatatcatcagcttatgctttagagatcagcatgttgtcttcatttcatgctttagaaaccagtagcgtgatctacccatgtcctgttaggtttgaaatttatttgatcggcgacagattggacgtctggtagatggctcttggctggtcttcatttcgctttgtgcttcaatgcttctgttgattagacttgtacttcagcagctatatttggctttcctctaatctccatcgatatcttgcttctgtcttgatacattcattgcgtatactgtttggatgtgactgcttgggaaaatctattgaaaattcttggacgtccccccaatgggtgtgaccgagggacgttttggtacgccgagtgtttagtaaactgtccttgagtagtaacttgatatgaccgcggggtgtaatcatatcgtccaagcagttgaccttagtccaaatggtgtcgtgttacgtgaagcggcatctgctgcctgacttgcttctagatgatttgaattgcttattgaatacttgcgactgttcggtgaccgtggtaggaaatgagcggttgcttccggcctctataaatagactgcttgcctcgttggtgtcttcacacatgttctgatcgtctgttgcttattttcccacttttctcttctcttccaaccgac

SEQ ID NO: 167546 - DNA, 634 bp, Zea Mays
ggcaagagggcttctgttgatagacaaggatttggtgacctctcttttgagaaatctgttaaaaaagccaaaagtggtgatgaagaatctggcatggttgataagggaaaatcccccttaaaggtttcttcagttcatgttaatgtagctgggtctcagtctgaacattctgatagtatgaagattgggaaaagttctgaaggagccaaaggataccttgacagtcagggtaatgaagatgatgattacaatgaaagtgaggatgatttgttggattcccaagatctgaaggaattcatcaaggatgaagaacttattccttctcctcctcaagagaaaagaaaaatgaatacaaatgtttctgtttctgaagatgttggtaagaatgttggagttaagaaaggaggatccatggaaggggaacttgcagaaggagttaggaggagcagcaggttggagtctaatgatgaaaggaagattgcagataaggcagcagcaagagtaatggctaaagatgcattcattaacaaaggtacgtcgtacaatccattttttgttcttaatactgataatgctgttcttatggatgttgcgcataaaataggggttgaattaggttcttcttttaatgatg

SEQ ID NO: 167547 - DNA, 1205 bp, Zea Mays
tcggagtccgactccaagctgtatataaccgtaccctcatccagccattagcagccccaagttagccacgcaagaagaaagagagagagagagggggaaagaagcccatcgctggttttgcccaggtcgcgtggtgctctgcggtgcgatctgaatggtcggccaagcgctgtgaacaaatcgaacggagggctggggtgttggctgggcgcggccaccttcggtgctcgtgccgccatgggcagcattgtgggctgggggtctccgtcaactatccagccttcacttgagctcgtacctcattgcagactatgcgatgatggctctccagtgcgggcgtaacaccatggggtcgctgggtacctacgcttgggaccttcgcttcacgattggaggtaatcctggatcatgtacttctccgctacgagtagggcaatctagatcgatggttgggggcgggggtcgcagagtcaggggaacgacgatggcgccgccgtgttgacagccaggggaggaagaagatggtcctgtagccgttagatgggggtggacggctgagattagaagctggatacctcttcgtcgtattaaatccatgccgcagaactttgatcgggcggataggattaagacaaacacgtggacttattacgtccgtggatctctgatcctgcggccatcattgaataccgattcacttaattgttagatctaatcctagcccttgatttccaatccagcggcctcgattcaccgataccccttccttggcttatttgcttaagaatccctggttaatgcctgaactaacccgcggtccagtccaggattcgctgtgtcttgcgaagttttgcaccgagacccctagctttctctgtaatagtgcgcccactccagagacccaggaaactcaataattaaatgtagaaattgatttttatgtataaataattgctagaaacttgatttaatcatagaagatccattctagctccaaattagtatattccagttcctaaaattttgtaataatgttgtttattacatagcacctctgttttaacatgaaaatggtattaaaatttatttcttaactaatctcgtatcaaatacataaaaccttaggaaattcgtatctccttcgttttaaatccgatttgactcgttccagttgcgttagtctcgtagcaacgcgtagattatta

SEQ ID NO: 167548 - DNA, 587 bp, Zea Mays
ctggtggacaatctgaggcacgggttggtgcgttgggtgtgtgattacttagcggagctcactagggcagcaatttataggttccatcggtggtatcggctaattttgagaagtcgcgcggcggccgaaaaagagagtgagtcatcgtagcggtctgccgtggtggtcactgggcaatgagctatggcggttactaagcagtcactacggctcacgacgacgtggtaaatagcctaaggcgtggcgcaaccacggtgaatggtgcatattccggtgacggtcactcagccacgtcgccgccgcaagtgggcacggcaacagggcggaacaatggcccgagttcatccttaacgcgatatttcttaccccgagcagttatctgcacttcactgagcacgaatcgcaacggcggcgacgatcacgacatgggatcacctgcggcgatacactgaatctggcaatcttcttcaggtcactatactatgggaacttgattcaggcgcctgatagagcaggtttcagggtcttgatctcaaatttttaagtgataacttgttaaccttcctgtaacaaagttgttgatctat

SEQ ID NO: 167549 - DNA, 375 bp, Zea Mays
atcatatgatgttgtaccttcatgagaacgacgacgatctaccggttgtggcattcagggtgtgaagagcttgattgatatttttgaagtgtgctagttttgatcctgtatgtgctctatgatgttagaaaggactgatatatagtttatttgaaaaggaagctatttgctattgttgttgcatttcctgtcattttgtgcgctacatactttttaggtggcgatggtaggtcttctttgttaagctagtctcaaagatgttcatcaccctacaagtgcataagaactatcaaatattgtgtctgttatgcaacagaacttcatatgtggatttaagcatgttaaataatgatccttaagagcatgctccattgt

SEQ ID NO: 167550 - DNA, 517 bp, Zea Mays
acgggctttactgatatgttgttatgccttacggtctgaaaaatgccttgccgacattcgtgcgggcgatgagtaagactttcagggacctaattagggacaaagtggaagtctacgtcgatgacatcgtggtcaagactaagagagggtcgaccctagtggaagacttaaccctggtcttcgacaagctacgggcaacccgcacaaaactgaacccagataaatgcgtctttggtgtctccgctgggaagttgctggggttcctggtttcatacagaggcattgaagcaaacccggagaagatcaaagcgattgaggcaatgaggcctccggcccgtatcaaggacgtccagaagcttacggggtcattagccgcccttagccgcttcatttcgaggctggctgagagggcgctgcctttcttcaagctgttgcggaagtccgggcccttctcttggaatgaagaggcagaacaagccttccaggagttgaagcagcacctggtgtccctaccaat

SEQ ID NO: 167551 - DNA, 443 bp, Zea Mays
tttctgaggacctagcgcctagaccaacagcatctatagtatcttcttgcggagggacgtaagacctgctttcaggcatacacggttggtgaaaaataaaaatacctgatgaaacaaagaacagttacaactttaatgaaaatacttgatgaaacaaagaacaattacaactttaatgtaaattatgtttagtctctctgtgtttcacctgatcattgctttaatgctcttctgttttctggaagattcattccttgaagtagtaattgtgctaaatgatttaatcaaatcctctgctaaattttaatacaacatgaacaattgttcgctccttttacctcgcactggatagggcgtccgaaggggcgccgcctgttctagtggacatttattcgtttgtacatcagtgagcgggggatgcaaaggcagatagagagaatcat

SEQ ID NO: 167552 - DNA, 482 bp, Zea Mays
cgaccctttgggctcccacccaggggtccaagcttccataaacaatctggaccctctccatcgcgctacagtcagcagagtcagagctcccctcaggcaccctccgttgcaagcaaccagccgccagcaaacgcctgttggcagtgcggggaccccagtcacttcaagaacaactgccctcagctgaaggcaccaggaccaacctactccaactcggtgaatggccccaagattccatcagcacctacccccaaggcgtttccttccagcagccagcagagcagggctcagtaccatggcagggcccgggtcaaccacgtcgacgctcaggaagcccaacaagccccgggagtagtgctcggtgagttcctcgttgaatttactctcgcttctgtgctttttgattcaggagcatcccattcatttatagccgctaagtttgtggagaagcatggcataccctctacacctctagctatccc

SEQ ID NO: 167553 - DNA, 498 bp, Zea Mays
gcacactttagcataaaaaatgcacacggcggaaacaagcaatcaaaagcttacagcctgctcagcttgtctttacaacaactgtggctattgggttccatagtaaaacctttttattttttgtcattaatcctatggcattctttatagattacgtgccttactgcccttaaccaaccaactaactaagatactagcttatctctatttgctcaaatcaaatgcaaatagcttatttggctaatcctccattctaactaatcatcttgccatatgtgagtgttcttttacttcatccacatcacccaagagtttgaggcacaatttacctgggaagccacatcagagtgctcttttactacatttatgtcggtctctagccgtgtagtgttatacaatgcgtgttgatgtctcaatccaaccgtccggttttgtttgctgtgttacctagtctgggtttcttctttataatataatcgacaagctttgcctggttcg

SEQ ID NO: 167554 - DNA, 521 bp, Zea Mays
tatattttcttcatggtcgagatttgcaggtaatgaccgattctcttaagcgttggctaaaattgtgttttgtcattgtaatttctgaagaaaatagtatccgtaaatgtaaatccaagattctcattcaaacctaatagtaccaagcaaaatagttaacaacctaatgtttagaatactagggaaacatagtatagaaatctggactaaatggctgaattgggctatgttgctgcagtgcttggttttgctagaacattgacatcagattaacccagggtgggggcactgatgcaccttcaacaacattctctgttgtatgcatgtggtttcggttgttggggatctccaagtggccttgaaattgttgtaccatctctgatgcttgtggatgtggtggtggtgcttgcgccatagtattagtgtcttttttatccttttcctgtttcgtgatgatttctctaagccaccaataggtcttgctgatccacgaatttcctttgccttgaccttgacacccc

SEQ ID NO: 167555 - DNA, 801 bp, Zea Mays
aggattcttggacgtcaaaagttaccttattcacgcctaaaagaatcccccctgaccgccccttcggcgggcaccattgccaatgatactctcttccaccacaataggaattaagatctgcatcagtaaaattcctcttgtgtgtttcgagtaaagcaataaagtctaggtcatagtcattagagagatcacagagaaaattcggtttagccaagtcccgaagacctctgctattccagaaaaccccattcatattgaagattttttatatcccttaacttttctgtttttgttttttcctttttgctttctcctaggaaccactttttcaaaaggggtgtcctcactgtctacacccactatatccctttctgctaaggatccagcaaaatccctaagcgtgtcaagaatcaaactttcatcttctgatactccacaatcaatatcgacatggctatcatgacaaggtttagaactatgctctatgaatctatttctttctaaggacatgattgattttatagataattgaacttcactttttgtatgccctaaagagattcctagactagcacagttatcagaaacataatcatccgataaagacaaaattgaattaataggaaagttacctgtactatcaagattcctgattgttgttaacctttttgccctctcaagagagtcctcatttactgaatcttcacgcctcttgctcctcttgctcggagtattaacagcgtctttcggaattataacaggaccactacctgagaaaaggcctgcccccattcccagctg

SEQ ID NO: 167556 - DNA, 933 bp, Zea Mays
aacctagatcatgaatcaggaaatggacgaagactacagactcatgggtatcctctgtgggtatggtgatcccttgccaaacccgccaagaacacaattccttcgaggtcaaaacacaaatttcgactaaatgaagcaagtcagacttggaaacaacagaagcgtaataaccacagaaaggaagttgactattaggattgatggaggaatgacaggcgcaacgctcccctgcttcttcttctggggcaccatgagacttctctaaggagcggaatcaagcatgagcccacagatgagcaagaattttagaaaaaaaaatgtttgcggtgaaaaatgcagagttagggtttgttcgctagcaaactgccagtgggtgtgtatatgcacgcgttgtagacctactaagtcgcacgcgttaagtcggacgatgtaagtcgagcaggctctcagccgattagattaagtcgggcagagtacatatcagtcggattcattcagtcgaatttgtcaatcgaaatagaagttgaacagagcaagagactcggtaccagcaagcatggcctaaaaaacattgtatgcgtcaagagggactcaagatttgatgcagcaaccatattttattcattggaaggagatcattacaaaagaaaaagggtcggctcagtatgaaccgaccctagcagagcatgtcctccacttccatttccattttttctactactacttctaccactaccactaccactactactacaactacctaatgctacactatattatactaatacttacatcagtggttccttgccaccgacgttgccactaccgcccttgctgttgctgccctcatcgccgccatcgtagccactatcgtcgctaccgtcgtcgcccttatcgctgccgctgccaccctcatcatcaccgtcgtagccg

SEQ ID NO: 167557 - DNA, 573 bp, Zea Mays
acagaacgggactggacaaagcgacgaaactgtcaggcagcattatggtaggtctcaacacttttagcatggcacagtatgctctcggcgtttcaacataatcaatgacgactccgcccagctcagcgggcgaaaggcccagagaacaaaagctgttcgctgaagttgggtctctcaacagccagttccgtgactacacaaagctcatgctcatgtcgtgccaagataagcattagctaggagttacattcgcatcttgatgaattgcgtgtgggcagacctgcacgttctttttttcacaaggcatgggaacatgggaacctagttcaaaagcaagcccccccaacccaacccccaaaagtccgtacaaatctgacatacctggtcgaacaggcaaagggagcctctcctttagagacttgactggtttttcatctcgcaagaatggtcggttttttaccctgacacccacgcaacgacactgcccagggatttctcggatcatgttccttgtctgatttctttcaagtataaagtccccaggcctaaaatctttaggttcgagaacttctg

SEQ ID NO: 167558 - DNA, 313 bp, Zea Mays
cgaggctaacctagaaaacattgaagctatattgaggatggaaccatcacgatcacagaaaaggcgtagaggctcactgggtgcatggcagcattaagccgtttcatttcaaggctcggtgaaatgggaatgtcaccctataagctactcaagaaggtaaacaaattccactggactgtagaagcccaagaagatttggaagcactcaagaaatttctgaccacaccgctcgtactcaagccaccacgcagggccacagctaaccagtcagctgaagacctgttgttatatatctcctacatgactcacgtag

SEQ ID NO: 167559 - DNA, 750 bp, Zea Mays
ggaagatttcgggagaagcacaggggggctgctgctcggcgccatggccatggttgaccgaagctcacggatggctctagaaggtggaagaagggctcaatcaagtctgaagggaggtgattggcgttgaggaggtgctcacctgccactcgaatcgacggtcacggtcttcgttggggagatcgaaggtagctggttcttcggctagggagaagaagaccggctcagctcgggttgtggtgcacgacagcgagctgaggaggtgcgaggcatcacggtgcggcgtcgggctcgctttatagacggggaaaggcggttcgcctgagaaaaatctcggccgacgactgtgcgcggcgacccgacacagtgtggtggtgtcttcccgaggctggtcggcaacttgcacggagctgggcacgacttcggtggtgattgaggtgagtggctggtcttcgattaggctgagcgtgcaggggcttgccgggctactgctttcactgcttgatgcgtcgtttcaggtcttctcagctcgacaacgtggtctcaactcccagaccagcatcatggcgtgtgcgtgtattggttctggtcaggggaggtagaagacagcttgcagttcccacacgaaagcttcttgccattgatgcgtgtcctcgtcgtctgggtgtcagtaatggtgagtaggtgctactaccagttgactgtgagttattgtgaggtacgactggctcgagaggcttccgaggcaag

SEQ ID NO: 167560 - DNA, 436 bp, Zea Mays
gcattttttccaaatccaaatcaaaagcattttctggatctgctcggtttgacattgacttatcggctgatatgaccgataaatcagttctagaaccgataaaccgacaacacatcaggtaaaaccgaatctctttttttggcaaataaaaacatgtttatgtctcaacaattaaacaaaaaatgtcccaaatgttatcacaagttcaataacaacatttagctatggtaatttaaaaaagatttcaagtgaaaagagaaaaaaatccccctaaccctagctcctatttgacggtcgactaatcagttctacacatcgatttattagtgccacacttcgattatttttagtttgaaatggcgtattttgaaatttggtttcagtaaaaagtcttcaaatagttatcacaagtccaataacacagttaataagtggt

SEQ ID NO: 167561 - DNA, 721 bp, Zea Mays
ttctgcttgcaacccaaaatcaattgctgagtttgtttcagatattcgacaccaagagctctgcacgctacttaacatacatggacgtcgtagctgaaggaatcgaatactttgtcgtacgtgcttgtaaaaaaacaatgttgaagatcatgcacagctcgagttaaagaatatgcgccctttcatgatgaatgttgattgatcgatgatttcgtaaccgattggtgcaactcgagttgaagattatgcgcactagtgctgctcctgatgcccgttttcaatttccatgcgtccctttgtgtcatctaaggctgtctccaacagagccggtaaaatgtcctctaccctaaatatagcgtatatatgtatcctgtaagcgtccagcaacaaacgttaaatcatccgctataatatagcggctctctctctccctctatttctggcggacacacgacgctggctatgcactattcaatcacgaacgccaactccttccattctctcctgcgcttgctcgtcgtcgtcgtcgtcgaagtcgtttgagctctcgactgctgagctggacggcctcgccgccttccctgtccctgcccccggccatggagcagaagatgtcgaaccatcaccaagctatgcgtccgagagggagtagacgagagacggcggaggcgggaggtcgacggctggggaagacattggcaaggtgaacctcatgatgctc

SEQ ID NO: 167562 - DNA, 490 bp, Zea Mays
tagctggatcttagagctaaaactttgctaaagggtgatgatcatgttactgcacaaaatcgggagtaaacagccctgcaaatcgctctgtcaggtgactgaatgggctttcccatggtaaagtaacctgaaacagatcagatcaagcgctcagctcactgccgatgatctccgccgcgattcgtgtcgccggcgtctcgattcgtgctcggggtaagtggataacgtcttggggtagaaagatcatcgccgttgttgagctggacaccaatccggctagccgccgtacctcccccttgttcaccgattgctcgggtaggatctcaccgccgttgatccctcactgccgtccgccgcatgtccaaacactttaccatgtcgcagctaactgtgctacgcacgtccgatgatcgccggaggagcagccacgttaatagccacgttgcgcggccaccagtgactcacccagttcatacctatcgcaatccac

SEQ ID NO: 167563 - DNA, 524 bp, Zea Mays
ggaatatcgagcacctcagaaaattctacccctagcaataccccaaaactcttgagggcaagttgtactctgtaaccagaagatttcttcatcaataaagctttcatattccaaggcattcaagttcttgattgacaactgacttagaatgggctcaactcggaatcagcataacacaacttagggtgatcactatgccctactaatggagcaatcggcttaagtcggaaatgccttaagtcggtgcgacatgctcacgcttacatgacttagggtgatcactatgccctactaacagagcaatcggcttaagtcggaaacgccttaagtcggtgcgacatgctcacgcttacatgacttagggtgatcactatgcccaactaacggagcaatcagcttaagtcggaaacgccttaagtcggtgcgacatgctcacacttacatgacttagggtgatcgctataccctactaacagagcaattgacttaagtcggaaacgccttaagtcggtgcgacatgctca

SEQ ID NO: 167564 - DNA, 633 bp, Zea Mays
gttctagtaattattttcatattaaaaatccatttataaattattttctctggttttataaggttctggactgggcctcaatttcagttaagcacaggggggctcggggtaagaatccagagacccagcgcatagtgtcagaggatggcgggttgattatctgtttaccaggggctctttagcaatttgcacgcgcgaaggggtatcgatgtttctccgccgtccgatcaaaaaccggccgccaggattagcccacgcattataagaaccggtaagcaatgctatgcgctggattagaaatcaacggtgccgatttaaagtgccccagacccatcctcgaccgcccgatcgcgatctgatggacaagatcgaatcccacgaaggggattctctaacctaatctcagccgctcaacttagatcgaaccgcgcagacgtatccggccgacctccatccctgccgacgatggaaacaccccgcacggcggtgcgctcgctggagaccggccaactggcgctacggaggtccatttcctaccccgactagtgctacgcgaacaggagtacataacgaactgattgaggtacatcataccggcgttgaagtaggcggtgaccactggccacggtacgg

SEQ ID NO: 167565 - DNA, 458 bp, Zea Mays
gaatccttccccacacgctcggcctgggtccaggcggactgctacgtgctgacatggatttacggcaccgtctccggcgacttacaacagtccctgatgatgcgcccaggtccagcgcgccatgcatggtgctacctcgaggatgaattcctcggccagaaggagtctcgcactcttctcctcgagacgcagttccgcacctttcgtcaggaatctctgaacatcaacgactattgccgccgcctcgagtccatggcagcgtccctcgccgagttcggcgaccccattggtgatcgccagatggtgctcacgctcctccgcggcctcagcggcaagttccgccacatggtgtccatactaaagatgcaccagccgttctcgacgttcgcggaagcccggacacacctcctgctggaggaactggagatcgacgcacgccctccatccccgcctgctgc

SEQ ID NO: 167566 - DNA, 704 bp, Zea Mays
tcctggccatgaggctgatcaacacctgaagacttctaagattccatggtgtactgatgctgcatctccacacccaattcctgctccaccgtagtacaaaaatccaccagcggaaaggcacccagagcatgcctgatagagggtttcaggccctgacggaactggctcaccttttccatttcattgtaagccacatgaggaacaaagcggacaatcttgttaaagcccacttcatattctgtgactgacttcttctcctgcttgaaagactacaaatctatcttcatcttctctaggaaggtgactgggtagaatctcctttcgaactgcctgataaaaacatcccaggtcaggactcccggtgaagaggagtgagctgcatgcacgcctctccaccaaatttgagcctcccccttcagcagctgtgtgccaaaacgaacacgatcctcatacacaatctcaaaaacatccatcttatcttccacataagtcagccaatccaccgccttaaccggagtaccactgccattaaaggtgtccaacttcatgcccatccactgcatcagagagagaccactgacgggaaggggcacctcagccccacaacctggagcagcacctgcagggacagcgctcccaggaactcctccacaaccggcaccctgagcagcaccagcaggagaaacaggaatggccaactcctg

SEQ ID NO: 167567 - DNA, 410 bp, Zea Mays
aatatgctgtgatctgtgtagtagtaacttgtttacctgatttatgcatgagtggacaatggtgcttgacagcttgagtttaactgaatagagtaactgatttgtgtagtagtaacagctttggaaccggtgctcaataatttgtttaactgatttgtaacctttcttaataacttgtttaactgaatagagtaatctatgatatgtgatctgtgtatagagtaatttgtttaactgaatagagtaatctgtgatctgtgatttgtgtatagagtactggacaatggtgcttgctgtagaatagagtaactgatctgtgatctgtgatctgtgtatagagtactggacaatggtgcttgctatagaatagagtaactgatttgtaacctttcttaataacttcttaatag

SEQ ID NO: 167568 - DNA, 816 bp, Zea Mays
ctttggcagaaaccaaattcaagagccgccgatcatttcccctcactcaatttcacgactacgactctaaatcatcctgtccacggagacatcgcagacaaaggatgaacacgggtgttcacggtaatccagggtggtttagttcaatcaaaggggtcgaacaacattaggggggtcttaaggagactagaacaaatgtccagggagcttgaactaacctggagcaagctgaccacggtgaggtctctttcgcggtggctgaaacacggattggggaaactgagcaattcacaggcgttagtggacaattgaagacaagacttggcggcttagatgcgtgattaccctacggagctcacgacggcctcaatttatagcaggcaagagcggtggccggtgaatttggattgagacgcgcggtggtcggaggaatgggaggtcactggcacagtggattcgtggagaataccgtggcgggctcctcggcgatgatcggatggcttaagcgagtcacggcgatgtggtaaatgtgcccaggcacgtggcgcaaggccgtgaagcggctgtttccggcgaacacatccgaagcatccgtgactagctcggtacgatggtcggagtaatttagtggccggagtatatccacgacgatgatatttactcaaccccaagcgctatccaaccgatcagagcacgaatcacggcggcgaaagcacgaatccgcgcgcggctcgtcggtggcgagggacagagctggcgacctgatcgggacactgtaccatcggaactgcgattcagagctcctgacagcccaac

SEQ ID NO: 167569 - DNA, 540 bp, Zea Mays
cttggataagtagcaaaagcagggcccaaactgctttcaaaattgtactatagagaagctgcttttttcaaagtagctgcataaaaattgaacctctttggttcagcttgcgcttttttcaaagtagaagcagtttaaaaaaactgaactaaacgcaccctgtatgtcccattaaattcaatggttattgaaatttggttggataacatttgaaaccagtctaggatacaatattcgggagtatttagtccaaataatatacctctgcaacagctgaaccatcactaaagaaagcatcaagcaacctttcatctcagtttagcactcatgttctaaatatgagaaaaatttatcctcgatgagaacatacataaggaccataatcatggttaatagacaccgttcatgtttaaaataagcaacttcctatgaattctccgcaatgttttcaagtcgtctagtcggacctagtcgtatagttaatcgaccctaatcgagctgatcgtccgtttcgtcgtccatatgtttctagacatatat

SEQ ID NO: 167570 - DNA, 581 bp, Zea Mays
ctttctgtctgaccatctgactgggggtgataggcggtgctgaagtctagcttggtgcccatggcttgctgaaggctcatccaaaattttgaggtgaactgtgtccccctgtctgacactatcttccgtggaataccatggagtctgactacctctttaagatatatccgggcaagggtggctcctccgaaggtagtgttcactgggatgaaatgggctaccttggtaagacggtcgattatcacccagatagaatcgttccctttttgggtctgaggcagtccgattacaaaatccatgcctatttcttcccacttccattcgggtactggaaggggttgcagtagacttgcaggcttctgatgctctgccttagttcgctggcaaatgtcgcaccgggccacatactgtgctatctctttcttcattcctttccaccagtatctggttttgaggtctaggtacatcttggtggtccctgggtggatagagtaggctgagttgtgagcttcgtcaagcagaacttctcgtgtctctccttttggtacacacagacggtttctaaaccaaaggactccttc

SEQ ID NO: 167571 - DNA, 535 bp, Zea Mays
gcgttgagcttttgaactcacgtcgagtgattaaattgtatagtgggtactcggacatgccgattaggttgcgttggtaatcggctgagttatgacattagctgaatattgactgcaccttggcaacacgacgtagtatttgtgtcgttcgaacttcgctgcgtcatgtgattgctatgtcgcactctcgctaaatcggatcgcttccgttgagtcggaccgccatcgccgagtcacacatttttcgtgggccctgaaggcattgcatgtatgtcgtaactattgtgtcacagttgcacttgttgcgcctgttgtgcctattgtgcgtacttatcgtgtaccccaactaccaagccacaactgtgtctgttgcgctggttacgaaggtttgatgtgttgtcgttgccctgatggccgcacacgcgttgacgccagatacgctagagcttgtactcgcgtggattgtggtgggttgttcaagcccctgaagtcacattatacacaatatttgtaaacaattttatttggcttttta

SEQ ID NO: 167572 - DNA, 504 bp, Zea Mays
gggagagacttacaccaaacatggattgccttgcgtgcccttttaaacttggccatgagccttttagcagggtctggttgaaagatgggctgattccaagaatcttggaaaattgagtggaagtcttcaagctggagccaataactttcaaatctgaagatgagcggtttgggaacattaatttgaacattgaccatccaaggaatgtgatccgaggttcccctaggaagcgagagtgcagaagtgattggaaaggtgaccgaccaagcctgtgatacaaagcaccaatccaatttttcaagtagagggtgacactgcatatttgaccaagtgtatgcttgtcctttgagaggaatttcctgaagccccaactgactgattgcgaagttaaaactcatcattctgagatgatcccctcccgacttattgcggttatcaggagatctgatcatattaaaatcaccaaggaagatccatattttgtcatcatcaatctcaagactg

SEQ ID NO: 167573 - DNA, 924 bp, Zea Mays
gatagattaacaagttgccacataaaaattagagatcaaggccctgcaaagtgctctgttaggtactctgaatggggcttcccattgtacagtagaatgaaaagatgaccggttcgctgcacttcgccgtcggtgacccccgcgctcagattcacggcggtgccgcgattcgtgccctctgtggtgtggatcacgatcggcaataaaaagatcttcgctagggatgaacttggggcactgtttcgccctgtcgccgtacccacttgcaccagcgacgtggctgcgcgaccgtcgccattgtgccgccatctggctcggttgtgacacgccttaagtcatctcaccactcgtcgcaagccgtgaagacttggcagtgaccgccgtagaccgtcaactagtgaacgccacattagcaaactccggtgactcttcccccttctcatcgcgagcgcttctccattcaaattcacccttctcacagccgtccactataaattgatgcctcgacctgttccgctagattgttacgaagctagagcacccaccctcgccctcgattagccaccatagtcggagaatttttcttcccccaaatctgttgtctgcgccaccgtgagatgttgcgccatggccagccacctccaggtccgccctcgctctccttgtccgtgtttcagctcccacgcatgcttgtgatgctcatcggctcaactcattgagctagaccatgctcaatcgaccgaaacaccttgatttgtatacggtgttcgccgtcgccgtgggtgggagaatctagggccggattggttcaattggggcatggtttaggtttgcctcgggtcagggacgctagcccaacatttagtttaggcagtcgacgccggtcatggcaggtcttagcaacgagatggccgacggtgagcg

SEQ ID NO: 167574 - DNA, 624 bp, Zea Mays
tttggtcgttcctgctctattgctcacacgattgctcgccagagctatcccacgccgccgttagcccgcctcgccgtggtctgcgccctctggttcctctgcgccatcgtgagggccatggccgagtccgctagacagccctgattgagcctgggctagcccccaagcctctggagccccgccatggccagcctcctcgactccggtgagctctcacagcgggaccgagcggcgccaccgcgcccatgtccgcccctagccgttagatctctggcgtccgtccgagatcgagcggtttagacttaacccgtgcggatctaatcctagccctctaatctagatctgaccatctgtctctcttcctcgtcccccgcgtctctgcctctggcccctgctggtcagcccgccctgacccactgacgccctggccccgcttgtcagccgagtccacgcccgcgcgcgcgcctgcacgatctaatttgggctgctgatctctgattcgatgaccaaggttaccacgtaccccttcgcgtgtgattttttcttaagagcccccttgttttaggaaatcaacccgccgacctctattttagcgcgcaggcccctaggttattttgaatatcc

SEQ ID NO: 167575 - DNA, 695 bp, Zea Mays
cagtgcattggatgcatggattagatgcctgacggacggagtgttgcatttgcatcaggcgcagaagaagggcaagaaggcgcacaaaggcgcgtgcagccgaggcaaccaggaggagagcaacggcggcgacgacggcaataataatgttgcacagccgcagcagtgctccgacaactactacctgtctgacgacgactcgctggagatgaccgccgcgtgcagcaacgtgagctcggcgtccaagaagtcgtcgtcgtcggcagcaggtgggaaggccagggctgggcgtggggctgccactgatccgcaaagcctctacgccagggtaacgagattattgaaattctcgcgacgacaatcgcgatgaagaagttgcatgtagttacacgcacttgcctactgctgtcggagactaggttctgaagttgccttgctttcgttgacgcagaaaaggagagagcggatcaatgagcgtctgaaagtactgcagactcttgttcccaatggaaccaaggcaagctaacaagcagtgcttgagagatcgacaacagaaataactcgcagtagttttttttaagcagaaaggcttaggataacgactagtcgttctaacgtttgtgcatacggccgtgttttttcaggtagatatcagcacgatgcttgaagaggcagctcaatacgtcaagttcttg

SEQ ID NO: 167576 - DNA, 680 bp, Zea Mays
ccccgctcgtcagcccctcttcctctcgcccgtgattggccattgacgcgttcgtcgctggccactgcccgccccgtctcctcgccattaactcactcaccagcccgaatttggcgccttgtgtccccgcgcactgtgaccgagccatcccatcgccaccgcctgccccgagccatcccatcgccaccactgtgcgccatcatcgccgccgcagcaagcctcgccgatgctcgccacctcttcctccccctccccggccacctataaaaggaccaccccgagccccttatttccccacaccgacctcgcccactccatcttcctccccagacccaatcgagctcgacgccgtcgtccctcccctctccgtagcttctccctcccctctccggtggcctagagtcaaattaattcagttcagaagtttcaagacctccccacgagcacaaggcaccacctccacccctctcggactacccgacggcctcacaagcgaccacaccgctgcgagagccagccacctcgccatggaccggccatcccaagtgcctatcgatcaaattgacccctccaccatgaccccgtacccctacccgtgctacgccacatctccaaccacccggaattagatcacaggcagagaaccgtcgtcgagctccggcgaccggttttccctcccg

SEQ ID NO: 167577 - DNA, 502 bp, Zea Mays
ttgcataggcgtgagcatgttgcaccggcttaagttgctgctgactttagccgattgctccgttagcagggtatagtggtcaccccgagttaagtaagcgtgagcatgttgcaccgccttaagtcattgccgacttaagccaattgctccgttagcagggcatagtggtcaccccgagttaagtaagcgtgagcatgttgcaccgccttaagtcgttaccgacttaagtcgattgctccgttagcagggcatagtggtcaccccgagttaagtaagcgtgagcatgttgcaccgccttaagtcgttgccaacttaagccgattgctccgttagcagggcatagtggtcaccccgagttaagtaagcgtgagcatgttgcaccgccttaagtcgttgccgacttaagccgattgctccgttagcagggcatagtggtcaccccgagttaagtgagaatgcaagtcaatcgtgaacaaactgagtatctttgaagcctttttta

SEQ ID NO: 167578 - DNA, 438 bp, Zea Mays
ccaactctgaggtcccaaatatacaaccctgtacaagcggtcctatatcctttctcaaccacccgacgtttgcgcgaaacttcatctcctcgccttgtctcgatctagtagacgtcgttgcccctccaatctcgattggaaacctgtcggtgcttgctactcacacgccagtgtggcacctaagtcccacatgccacgctgccaccacctcactcgcaggcatgccccgcaccatagtcgtccccatcatcacccgattgtgtcccactccccggtcgctagtgcgcgcgcctgggtcctcacccttccacacaaccatccactgttgtgtgcccatcccacctcctcattgtcccgtggattctaggaaacagtggtaggctcagatgaagggtcgtcgtaagtcctcgttaagcaccgtcatagatgcaattcgac

SEQ ID NO: 167579 - DNA, 493 bp, Zea Mays
cgaagacgaaagctgcacaatagctctcagtaaccttcgctcagaggtaattgagctgagaaacaaaggtttggagaaagacaaaattttaatttcattggtgagtaaaatgaaagaagatgaagctaattacaatgctcaggccgaagcccaaaaaactgaggttgaagaccttcaaaaacaagtggtcgaagccaaagaaaattgtgaagatgcaaaggccaaccaagaaataagtgaatggtggaaggccaggctagagaaaaatattgaggagcttcgcgaatccaaggaaagatgcttcgaaaaatccttggattgcgtgaaaaatttgaaaaacagctttgcaaaggtaggcgcctattcctctgaggataactttgtttgaggtgaccctgaaggcgtcattgaatggataagcggggaagccgaagctttcaaggaaattctgaacgatcgctgagatatttgtgccttctctggcgctcgggga

SEQ ID NO: 167580 - DNA, 403 bp, Zea Mays
cacaacctctaactttggaaacccaacgttgtccatcatgtagtggaaaacgtcggtttctaggctatccgggcagtagtagaggtagtcatccagccctcctccaaaaatcgtcacccccgaagggtaccctaccttctctgcaaaggaccgagtctcgcaaacatattcaccagtcattgttttgtcagttgaataatggtgaaccacatatcgcccaaccctagtatgtctttgctctgaagagccttctctcgtagagactttttccgttggctcgacctttggctcctcgacttctattgcactcttgcccttgttgtatgcagatgtggtctcttcagtacggtctttagcttcaaccactcttattggcataagtgttgttgtagcctcggcttcc

SEQ ID NO: 167581 - DNA, 1137 bp, Zea Mays
gaataaagcctgcttgaacacaggctgtcagagtgtgtgaggtgtctgattttgttcagactaaggtaaccctgacagtgagtttttgtaaaatttgttgccctgttgtgcttgatccatgcgattttgagccatagtgtttatgccaagtccgtagaccataggaaggggaacaaacttcttgtggtatgtgaggtttggtgctatacaactagagagtaaaatgccctcaaaggtaccctgtcaaactgagtaacacatattcagtttcagctaactgaatttggtttcagtgaattgaggtcgactttggggcattctaacttgtgattcttgtgtaattagccctagaagactatagtaaagttgaagacctatagttggtgcaccaattttcttaagtaaggtaggcctgttcttatggaaagaggggaggaacttggctcagtagtgaactgaagaagttcagaacagtccaaatccctgaaaatatctccatccactaactactccaggctcggtttgaactaaaggaactcgttgcctggaaggggggtcacttgctacaactccaccatgcctgggataaacatggagatataaaaatcatcccctagctgactcagctgcttggatgcctctttgctgtcccacatgcagaaaaaggagttggccacagctgctgtcttccctgtgctttctccatacgtggtgctcatgcagaaggattgggagacatattagtgtcgttggactcttgttaaactctagtaaagaccccagcagctccagctctctaaactatttaccttggtgagttatggcaccaaactgaacaccctgtgtttccatcggtttcccgcctctctcaccgtgccataccatgacaggagggtacaactccctcattctttgtcttcctcctttttatatccatttatttgatgcccttcaatatccatttacatgtcataagagtatattggaacttgaagacactatacagcatgttacatgtcccagctctatctccagttgttatctatgacaaggggaaggcgaagaaattgaaggtcgtcaagtccaagaataaattatgaccttgtaatgtttgatttagtagtatgcttgatagcc

SEQ ID NO: 167582 - DNA, 574 bp, Zea Mays
cgccatcttcagtgatattcaggaaaccaaatgcatccttacaccatcttattatgcttgcttataattcacggttttaaagttgctgacatcgcctataatatttgtttgcgccactcaggtcaaaacaaatagaaaagtctagattgcttttgtgtatatgttcatccatatagtcctgttatcttgtgcgccagatatttccaccttttaattcaaaaagatttaaaatcccttatgcggactaacattaaaatcaatggggactgccttaaatcataaacgtacggtactgtccacagtgtagacctcgtagaccaggttattaggcattcatcccatctcgtcgatcatatgaactggaaggaaccaaacatacaagctgtactcaggatgactgtagttgtcgagcgtgtccgagagtttttgtcttccttccatgtaccatggcctctcctttagcagctgcaaataattgtagggcctctgtcttattgctttcagattggaatccaggtgcttccaatttgtttggtactcgcactctttgtttctggttgcgagcttgaataga

SEQ ID NO: 167583 - DNA, 455 bp, Zea Mays
tagaagcggtacgctttggagccgtcctggtagccgatgaagacggccttgattccacgatcatcaagcttgctgagatgtgggcgcactttcttgacgtaggccacacacccgaacaccttcaggaagtgcacgggtggcttctttgcatgccaggcttcaaacggcgttatgccatcaagagcactggtgggcgccctgttcaacaggaagacagcagtgtgtactgcttctccccagaagtgaccaggcatgttgcgggcacgcaggatgcttcgcgctgtccccacgaccatctggtttcgccgttccacaacgccattctgttgtggcgtgcctggcgccgagaagtgtcgctggatgccttcccctgcacaatgttcaccaaactgcacagaagtgaattcacctccattatcagttcgaagcaccttcagcttcttcccggtttcccg

SEQ ID NO: 167584 - DNA, 780 bp, Zea Mays
tggacgagtacataagagctgataattatttccatcaaaggagggaagagttccacatgtacaccgaagtcgccagtggcttcggaggaagatttcatccgaggcatgtccgaagcatccataacccagaacagggtgaggaaagaatggcccagtcacaggctcaattaggacaataggcaagctctcagcaccagtcttcgcaaagcacattccgaccacttgctcctagaggaaggggaggataaagctctggtggcagatttggtgcgcctccaaggaagccattctatttgttttgtggagaggacaaaggccacactacaaggacatgtcatcacaccattaacaagcagaaatagcttgcttcgacagctgctcaaccttcacagatgaaagagatgttcaatacatcttcgtactattcaccctacatcccaaagtatgttcaaactcagccacaagagcaaaggccaagtctacctttggcttcaaacgcctcaagtgatccgatgatgagtgcatggtcaccagctgcctccttcgtcccaggaccgcctccctatgatcaagtccctgctaatcaacccaaattcccaaggcaagacctacaacaaagggacagaagggagggatccaaaacatgtatcgtcaatagcatggtcccatagacgaagcatatatactgagtaccccaaagggctaggtaagtgacctcgaagttatcaacaactcattattgtatatatacatttactttcacaagtactttcatcattt

SEQ ID NO: 167585 - DNA, 561 bp, Zea Mays
atttcacatatttggatcacttttgccaccacttggtttattttcacaaaacaaattctttttcctatctctatatcaaaccacttgttttggcaaatcaagagatctttcaagagtaaatttgatcaaatgccatgaactccccctttttcccataacgaaacttctcccccataagagaacaattttgcaataagagggttttgatcaaacacaaagattctaactctacaatttttgaaattcacaagtggttggctgatccatttgctttggctttaatttctccccctttggcatgaagcaccaaaacaggagacctttttggccctttaaccccattgcctctccaaaatgtcaaataagatcaaaaggcaatgagaacataagtacgaacttgggacaagatacatttataccggaatgcagtggaagccctttctttgtccaatttcacttttccctttcaatacacttttgagactatttcaagagtactcaacaaacaagttagtctcaagggagtcaagttgtagcacatcctccccctaaacatgtgca

SEQ ID NO: 167586 - DNA, 360 bp, Zea Mays
atcaccaatccatgggaacgtgctcatcagtccgccatgttcacggtcgccatggctagaacaaaccgtgtgaccattagtgaaattatgttgggggaaatggtcggggtggatccaatttcgtgtccgccgctcggtagcgccggtcatggccccgttcggccggtctgctagctcaccggagctcggcctcattcaccgtcgtcgtggacttcaccctgcgaaggaatagaaatcggagggctcttctgcaaatcgtcagtgacacagtgaaacagtgaaagaacctgtctccagttagccaagaacccgaggcccttttcgcaaaactgccatcgagtgcgcgggtgcgttttcccc

SEQ ID NO: 167587 - DNA, 442 bp, Zea Mays
ttgcgacgaaatatgatgttaatgaattatttgcttccacttctgttgcctacgcctaggtatgcaaggatgctttgatttcaattcaagatatgcaacattctttgcctcctgttgttgctaacattttgcaggagtattctgatgtatttccaagtgagatactagaggggctgccacctatacgagggattgagcaccaaattgatcttatgtttggtgcatctttgccaaatcgtgcgccatataggacaaatccggaggaaacaaaagaaattcagcgacaagtgcaagaactactcaacaaaggttacgtgcgtgattctcttagtccgtgtgctgttccgcttattttagtgcctaaaaaagatggaacatggcgtatgtgtgttgattgtagggctattaataatatcatgacacggtatcgacaccctattcc

SEQ ID NO: 167588 - DNA, 1297 bp, Zea Mays
tctaagactcagcacgccactggactggaccgcgggttctaatctctaaacttataagggctcatctgcaaaccgcgcattccgaaggggtatggatcacttcaagccgtccgattagaattcggccgctaggattagacttatccccggccgaatcggtaccgatcgatcaccgcacgatctaaaactggcgctccagatttaaaacactagaagtccaccccgagccatccgatcaacatctaacggaccagatcgagccgcggcgaaagagtacactacttctaatctccaccgtccactaacggatctacggctcatcgatcatcctcctcccccggcggcaccctcacggcggcgcgcacccaatccacggcggcgccatcaccagagagtcccaaacccgtaactcgcgccttgaacttcgatcacgacagtgctacacgtagcggaggcttaggtgcgtccatggagcaggttcataccggagttagtgatgcgcagaatctcgcccacaacatcgcgtggcttggcggaagagaagcggctccggcacgacacctggcagtccccgaaggccgtaccccgtactggtgtcccggtgaccctccacgcgtcatggaggtccaccccgaccaccgacagggacccgtcttggtacgataggtagctaggcgcagcggcggcgatgttctggtcggatggtggcgatttggtctcggggatcgcgcaaggaggatgggtgagggaaggagggagcagggggtttatatgcacgcgtccaagggttccccaacgacttcacccgagatcggcggcggaattccatgccgtgcgcgccagagtccgatcttaggaggaggtgctgacatcgggaccccacatggcattcaccggatggtttctacgcgagcgcttcctacgaccgactggtgaagcggtcctactaacagagacgccagcgcgcatgcgaggtgtgggtggtggctatgtcaaggtgtggcccacatgtcatccgcaggcacgcgacggtgggctggggctggtgcagcaaacggaaatggagctgggccgtgagggtcaatacggcccatagcacaggtgagtctttcccctttttcattttattttctgctccttatttcttttctaatctctatttttagtttcctagattcaaattaaatctaaactttcagttttgaataaattccaacctcaaacacaatgcaccatcaagtaaagctcaacatgtaatgcaaagtcatccatatgtatgttagttattttattcatt

SEQ ID NO: 167589 - DNA, 1125 bp, Zea Mays
gcagcatggtgtggaggctcatctccatgcagtgaggcaggaacccggggagactctccaggctttcatctcccgcttcaccaaggtacgagggactatacctcgcatctctgatgcctccattatcactgctttccgacagggagtgcgtgatgagaagatgttggagaaattagcgacgcatgacgtagaaaccgtcactacactctttgctctggctgacaaatgtgccagagctaccgagggtcatgcatggcacacgacaccgcagaccggagttacccagacgggcggctcaggtgccggcacccaggtcggtggcaagaagaagaagaagaagaagaaccacggtcacgataggccacagtctagtgcttcggtcgctgtagctgcggctgggggtcgggacgagcgtggcaagtgcccacggcaacagggaagtaacagtggatcatgccctgtccatctcaacagtcgccacagcgcctcgaaataccgagagatcctcaagctcgcgaagcacattagcgagcagcgtgagcaggcctccaaggatggctcgccgcctcgtcaccggcctggcaaggagaaggtcgacgaaggcgacctggccgcgggagaacgggacctcgggtatgagtcccccgagcaagtcctcaaggacatcctcactggagactccgactccggtgatgacaacgaccgccgcaagaagttgtacgtgatgtatggcggaagctcgaagcttacctcccgtaggaacgtgaaatccctgcgccgtgaggtccttttggcgaccccaggggtcccgaaggcagccccacatcagcgatggcggagcaccactatctccttcggggcatccgactgccccaaaaacatggcaggggccggcatactaccactcatcaccacccctgtcatcgccaacatgaggctacatcatgtcctgattgatggtggagctgggctcaacgtcatcagccatgctgcgttcaagcagctgcagatcccaggatcccgactgggaccctctcgcccattctccagagtgggccctcaaccgatgtatccccttgggagcattgcactcccggttacattcgggactgaggagaacttccg

SEQ ID NO: 167590 - DNA, 649 bp, Zea Mays
tgctgatggtgggttgcacgggtgtcatgacccatgctagagctctcttagtagtgacaatgaaatcgaaggccccaaagcgcatgccagcgctcgagacccatttgacggtgtttttggccatccacaaccatgtggtgaaaaaagtgtcatgacacgccaattgtcgttgttctaaaaacattggctagtaatctatatgatttgcacgaccagtgcggatggtgtgcaagggagacacaatgattttatactagtttgggacttgctgagagtccctacgtccagtcgagtaacttgtgtaccctgcactatgtctgtaatagggatggattacaaactcgatccaagaagagctcgatgttcacgcctctagtgtggagtgcaagtggagcgaagtactcggtgtagttatatgtgttggctacttgtgctcgctagttgcccacattcttcgatcgtggtccaccccttccttttatagaccaaggagaagggaagccgtattacataaatctagaggtcggacgagacggatgagagcctagccttgttgtattgtttcttatcccccgagatacttgctgatcaaaaggcccctttggctaacaccgttccctctcatgatattagtgcagccacacatgcc

SEQ ID NO: 167591 - DNA, 666 bp, Zea Mays
ccggatcgcgccgagcgaggggagttcggggtcatctggcgcggacatggccgcccgccacaccgcgccaaccgccgcggcacatgattggccattactgccgccgtcatcctcacagtacggtagttccctgaagaaggcggagagactggctcgacggagccgggcgtccggctctttgatggcgcaaaggaagcacccgcagccgcttgagctgaagaagtcgtcgtcatcttccgcttcctcttcctcctcctcctcctccaggatcttggccatggttttggccttgcccttgctgcttctagtgttcagctccattatctgcgatgcttgtgtaaactaagggatgtggaaggaagaaaagagaggaaggaggaccgagagactagggttttgtagaactaatgaagttgtggatggtaatatatgcaaccagtcaatttaggcaactatttttttaagtcattgttaacttcttttcatgaaagatggatgccttctttatgtacatgttcatgatcagcctaaaacagcgaactttcttgagcagataccggcgcggcgtgtcagaaaaactggacacaccagtagtacctgccgctgcagtaaccttcattgcgctcgccacctgcacagttttgtgcactcgacggtacgaggttg

SEQ ID NO: 167592 - DNA, 418 bp, Zea Mays
ggcaacgtctaaattcacgacatcaagcagaaaagacattaaccaaaaggagccagagaacatcatcaggctgcgacacagcgcacaaaccataaggtagtctagacaggactgacaataaaaaaggggacccaagccacaaatcagccatccagcatccagataccgacggttactccaaatccatcttctggacgtcatcatcagcttgcccttgaagttctctcccaggattcctcgtatttgcagcttttagcagaagcttggccccgtcctgaagtaaatcttgcagctctttcttgctcaaacctgcccagttaaaaatcaatgcacaagcatgacacacaatttcaacaggagagctgaccacaatgttttgaaagcacacattattcctggctttccaaattgcccaaca

SEQ ID NO: 167593 - DNA, 607 bp, Zea Mays
aagcgtgccctgaaactgtggaggccgaatcagcggcgcaaagatgtggcacaagtagtgagcatatggcaactgtcgacgagcacgaatgccatccaaaacggtgtcctcgatctcacaaataacgaaatccacgacgtcaaactcagagtgggagaccagggcaccaaggagccagagctgaatatgtgtggtagcctccctgtatcccatcctcggcagaagagtccgtctgataagctcaaataagtacttggctgctgtagtaaaatctgccggtgaacgtcgctacccatctgagaagggcaggtggaacagagccgcgacgtgagctgtacccggagccacaccaccatgagggcgacgaggagggtcagaggtaccgtagcagaggctgtgaagttgagtcgtcgactcgggaaatccaaagagctggcgaatctgactggcagtaatggtgacatcctctcgctcaaaacgaaacctcatccagtgatgatccgggtctatccatacagacgcgtagaagactcggacccactcctcaacatacatgtcgctggtagtcaaaagggtcagaaggccacacagatatgtgaggtgcgcc

SEQ ID NO: 167594 - DNA, 441 bp, Zea Mays
gttgatgggtttcagtaaacatgacaaatccctaattatgacgggggtggcggcaatgctttgggctttatggcttagcaggaatgaggtggtttttgatcgtgataacccgaaaacttacatgcaggtaatctacaggggaacctactggtgtcgttcctgggcgctgcttcaaaggcatgaagttgcaaatgagaagctagtccatgcttgcagacatctggagaaagtggcgatgatggtgtttgcgcattatggatggcgtttctccaatcgcattactctgtagttttttgatgtctttgaagccctgcgtggttttctctttttacagtttcctgtgtgtttgactctgtggtcgcgtggatgctgtttatgtagatgttggctcggaccctctacggaggagaaggccggaactcgttttccattatctaaaaa

SEQ ID NO: 167595 - DNA, 594 bp, Zea Mays
gcgttatgggataagcactcttgggtgatgtgatggagatacagataaccagacctgccgagccattgagcgcacctgcatgactgtctgaggtccttgggacaaggacatctataggtgggcctaatatcttgggaggttcggtgatagattgtgacaccccactgtgcctccttctaaacctttagggaaggactaagccatccggagacgtactagtcgctcggaaggaccctagtgcctagggacgaaagatccttcgatgtctggtctagaggcccagatagggtcttcaggagaggcacccctcgctagagataagcgccagtaatgcctgtctataacacctttctctcggaggatacacaacctcaccatatttctttggatttgaactttctcttcaggcgtaacatcgtgactccagttgaatggagcatcagacggaacgctccaatcgacgccaagaagctgtggtcctggcaagggccctttactagtgtctcgcaggtagaaccatcacctgtgccaacccttattagacaaggaaaggggaattgagatatacttgtgcgacctcccgctgcgaaggcg

SEQ ID NO: 167596 - DNA, 394 bp, Zea Mays
acttattcttaacagtaacttcattcaaggatctatagtcaatgcacatcctctttgttccatccttcttctccacaaacagcactggggctgcccaaggcaaggtactcggtctgatgtagcctttctctaacaactcatcaatctgcttcttgagttccaccaactctgggccggacactcgataggctctcttggaaataggggcggtgcctgggataagttctatggcgaattcaaccttcctttcaggtggcatacctggtaactcctcgggaaacacatctgggaaatctgatactacattgatagcctttgatggtttaatctcctcaatacaggcggtgacttggtgacaactccctttcctcggtcctaacaagaccaactctac

SEQ ID NO: 167597 - DNA, 440 bp, Zea Mays
gaagaagggctgtagctaatccgaaaccagaaatgaatcctccaccgaatcccccgcctattgatgatgtgactactgctcaaatgcgattactacaacaaatggccaacactatgacagaaatgcaagcacaaatccgtcaagaacgacaggaaatgcggcaagaacgccaagaaatgcgccaagaacggcaggaacgacaacaactaccacctccaccaccagcagctccacctagagataagcaccaggagtttatgagtcacaagccacctacattctctaactcctcagatccactacaagctgacgactagttaaaatccatggacaagatgctcaatatagctcagtgcactgacaggaagaaagtgctatatgcatcgggttgcctcactggccccgctgtggattggtgggatgcatactgtgtagcacat

SEQ ID NO: 167598 - DNA, 1073 bp, Zea Mays
ctaacgtttgcacttagaaccttcctctttcttatcttcgcaaactccagtccccgatggtgatcgccggtgagcacgccttccagcgaacctgtaccggccaagacactcaacgagtagggctctagcttggcagatacttaattccaccctcggcgacactaattccccaactaattgcactaatccggactggagcacgcctgctcacgacgacgacgaaaaccgagaagaaactatagtgtttagggcaatccagcgcggtctagttcaatcaatcgagcctacaagcaacaggagacctaagagatgctagaacatccaacagagaggcattaaccaacctgaggggggctatccacgatgagacactctcggcggcgcggaaaacagatttgggggaaaagagaaattaagaggctatggtgaacgattggaggcaaggactggttcactgggttcgtaacaagtagtcggaacaggacgaggcatcaattgatagaggacgaccgtgaggagggcgaatttggacggggaagtgcgcacggtgaaaagggggaggagtcaccggagtttgctaacgtgacgttcactggtttacggtctacggtggtcactgccgagtcttcacgacttgcgacgagtggtgagattacttaaggcaggtcacaaccaagctagacggcggcacaacggcgacggtcgcgcagccacatcgccagtgcaagtgggtacgacgacagggcgaaatagtgccacaagttcatctcctgtgcgatatttttcaccctgtgtagttatctgcactccattgggcacgaatcgcaacggcggcgaggatcacagcacgggatcaccgacggcggtgcactgaacctggcgatcttcgtctggttactgtaccatcgcgaactctcatcagggcgcttgacagagcaagtttgagagcattttacttcaaaaatcgttcagcgccaggtcaagcttgtataacaaagttgtttactaatgttagagattcaactttgccatagtgacccataccttatctccattgaattaaccatgaactg

SEQ ID NO: 167599 - DNA, 518 bp, Zea Mays
atgaaaaccaacatgaagaaacatgttgacacaattaattttcttgtgtggttcggtgatttgctgatcaagtactcccaattgaggcatgcccaaggttttcatcgatactattgctagtggtgatccacaagtcacactctcgagtgttgacactcaactctagtacttgatccagccagacgacttgacacacttttgacctcgctctattagtgtggctcttcgcttctcctattgggtgagcatggtacccctcataaagtcttctttgaagccacacatgacttcacacaggcttccacgtagtcacaacttccaagtcatataggaggtggcaaccaccaagagtaacaagcactatcggcttgcaactcgatcacctagtgccactttatgcaatctctctacagaacgcactaggaacactcactgactattgggcacgaacactatcgatcacaagtgagttggagggcactgagctacataaaacacaaacataaagtcctacttgc

SEQ ID NO: 167600 - DNA, 844 bp, Zea Mays
aaatagggaaattaattaattaataagatattgtcacattcatattggagttttgactttaaatttattttgaattctaaacctaaaatctgagttgaatttggaaatagaaatagaaatttgaaataagaaagcaggaaaagaataaaggaaaaacactaacctgggccgctcctgcacaattcggcccacctgaccacttcttctcttttccccgtcggcccatctcgccagcgttgggcgcgcgctgcgtcatgtaaccgacaggtggggcccgcgtgcagccaattccacgcgcgctccttccttctcgtttcgctgactggtgggcccctctgatcagcgtcacggtttcatgtcgcgcccgccttagtctcttactggtgggtcagggaggccagaatcgtcctccacctcgtgcggcaacgatagaaccaaccaccgcgagttccgtggaggtcggtgtaacaaacgcgcggacttcgctcccaccttcgactatttaaggccgggtcgcggaccatcgcattgaaccctgaccctcgcgcttgaaactcacccatcggcaaaagaagagtttagtgaaaagcgaattgaggttgccgccgccactgaccatctcgggtgtgggttgtttctggccttggcaactgctcggagatcaccgcgtgaactgctggggcttgcttgtgggcaggggcgggcgcataacctcttctgagtttgtgaatcgctcgctggagcagtaactccgccgcagatccgccttctctgtggccgaggaattccgtgccgccaagcttggtaagaactgcttccatcgtttcgtctttgtctcgaatac

SEQ ID NO: 167601 - DNA, 342 bp, Zea Mays
gctgtcggtaaggcgggtggcgacgcggacaagcataggaagtatgcccaggcgtatggcagaggaggcaacggatgatggaacggcagagggcaacccggtggtgaggtgagaggcacttgaagcaccgtcctttaaaggtctccagagcttgaataccaaacagcctctccaggcggcgcctctgcttctgtgtgtggtgactctccacgagtgtgaaaccttcacgatccaccaagggcttctggcgcatgggctgaaccaaagagtgcagtggggaagaccgacggacgaaccgtccaccaacaccagaggaattctgcacggaggcctgcaaggtcc

SEQ ID NO: 167602 - DNA, 621 bp, Zea Mays
taatatattgttgcctaaattaaaccatgagaactactagatcgctgatggatcatagatagaatggaaaaaagcatacattcaggacgatggggagagagacattggtgagtggtgagtgagcagtagtaagtaggtggggagcccctgtttaatctttgacacaacaacagcgctaattaagatggggcgttaaaatcaggcggtgactttttaaggtggccggtccaaggaacggatggatgattcaagcagatctcttgcttacagctcaagcatggaggggagatctggcgagaggaggatgacgaggggtggatgacttggcgttgaatcatgcatcaattctccaccgcgcttaccagttgcagcagtagctagtgcctgcgtgcatgccggacctgacctgttggcgtggcaacgggcaatggcgtccacctaccggaccagccctgccgagctcagttaaagtgcgcttttattatggggcgcacggccgcgccgcgccggttccttcttcccttcttctttgggagggtagatgggcgcacggccgttcgtttaacactcagactcagagaatgctcgtgtccgccgtacgttcccaccgcaaacttttcc

SEQ ID NO: 167603 - DNA, 599 bp, Zea Mays
tgcatcacaactatgattagtgactcacagtatggtttcattaaaaacagatacataatggacggggtcgtctctcttaatgaaattcttcatgaggttaagaggaaaaatcaaagtggtgtggtccttaaaattgattttaaaaaagcttatgacatagttaattggcatttcctttatgtcatgatggaaaaaaggttttgggagtacttggtgtgattgggtgatgagaactgtgcgaggtggcaaagtagccataaaaactaatgatatgttggggccttacttcactactcataaaggggttagacaaggggatcctttctctccccttttgtttaatttggttgctgatggcttggcgtgtatgattcataaagcccaagatgagggtctgattgagggtcttattccccatatcatccaaaacggatgcagttgtctccaatatgttgatgatactattttcctcatccaagattgtttagaaggtgccagaaatcttaaattcattttgtgtttgtttgaaagtatgtcggggttgaaaataaacttccacaaaagtgaaatcttttgctttggaaaagctaaggaaattg

SEQ ID NO: 167604 - DNA, 565 bp, Zea Mays
ggggaatatggttaagatagatatgggtgagatagactacatgatgtagatcaaaatcttgtttgatggtaggtggggatagacagattatgcagttcatcataattctattggttgggtcagctcttttgctcacggttgagttggtttgatgtactaatttaggtttaagtgcatgaggggagaacaaggtttataggagtatgatccagtttattttactggtgttaacttgttaagtgactcacattaggttgaataagatctaaattagtataagttgagtgtgttatgtcaaattctagttgggtggctttgttttaggtcggacttggaaaaaataatgatatatatcattggaaatatgtagatcaagctggtagattagaatctctttttatagatagattgggcaatatcaagaatgtgtaggtcgacagtatatggccgagtttggttgagttgatctaagtcactaatttaggcttaagtgaactaggagtatggccttatcttttgtaccagcaccaagtaactcacactagattagatcataatagattgg

SEQ ID NO: 167605 - DNA, 373 bp, Zea Mays
cgcgacatggtttccagcatctacgacgtgtcgctcggtaagaacctgtcccactaatttgtctggagctctagagcatttagcacttaatcgcatgatgaatcgagcaccagaacgccgccgtgcggacagagcgccgcctcaggtcggagcaaaaaggtaggagaagatctcagcgccgttggatttagtgaacggtcccgattagagatggggagggaaatagctttagttcgttggatcctttttgggtgatcgtgatcaaaacgctgataccgattcggctcggggatgtttgggtcgttgatcttgaatcggagggccgcgggttgattccggattcggatgatgcccgatctaatcctgcccatcg

SEQ ID NO: 167606 - DNA, 493 bp, Zea Mays
gagccatctttgtgggtagcttggaggcttagctcagccaccactccccaacccaaaggaatataggccaagaaggtgcacccatagacccaccattcctagcttgtcccgagcttccactttgaaaaatgctaagaatatcgaatgaaaaatttttggttcccaaatcttaattgatagatgcatagaatagtagagaaacaagcactctccaccactatgacacggtgttacctactcatggaatagagtcacgcctaggactaacacaccatgagaaggatctccacatgattgtgtagacacagatcctaggcccacatgatacatctgtcatgagctgttggattcttgttgtatcaaggaggccacaagaagtgcacctaaggaaggtgtggtggtagtagacatcacctaataactagcaccacgcagtgacagtagccatcatggagaagttgtgatattgttgacccctatctacatgaaaaaa

SEQ ID NO: 167607 - DNA, 683 bp, Zea Mays
ggaatcttggggccattcaccgagttggagtaagttggtccgggtgccttcaactgagggcagttgttcttgaagtgactggggtctccgcagtgccaacaggcgtttgctggcggctggttgcttgcaacggagggtgcctgatgggagctctgactctgctgactgtagcgcgatggagagggtccagattgcttattgaagtttggacccctgggtggaagcccaaagggtcgagctctctggtgacgttcttgctgttgcgctcggaggacttggaatttcctcttgatgtgccctttttcttcttcctttgccctttccacttgaatagctttgttggagaggtgagagaagctgtggaagtcttggctggcgaggatggtcttaagctcgggtcttaaccctctcagaaaacgggccatttttctggcctcggtgctgacatcctcaggcgcgtagcgggccagctctgtgaacttgtgcacatactcactgactgttctcccgccttgagttagctcccggaactcatcctccttgagttgaactatcccctggcgtacgtggtgctcacagaaggctgcttcgaaatctgcccaggtagcatctctgacggcttcactgaaagtgtcccaccaagctaaggccattcctgaaagctgatgagctgccagctgaac

SEQ ID NO: 167608 - DNA, 687 bp, Zea Mays
cagaacaaaaccccactccctcgcgctccctatccgcacatgaatcgtcctccctcccgtctcccgaaacctcgtccgccggttcccgtcgccatggtggtggtagtgtccacctccctatgctccttcctgcccgcgcacccgttcagcctcgcgcgccctcgccgtccccacccaacgaacccgaccgccaaacccctctcccgtaccctctccatccgctgcatcgccacaaccgcggcgggacccccgccgctcccaccgccgaagctggtccgctgcccagctctcgaccgccaggcggcgcgcgcaagccgactccgctttgcgcgcaagctcctcaccctcctcctctccaagccgcgccatttcctcccgctccgcgtgctcaaccgctgccgccgcttcctcggcctcccgcgccgcggccgcccgctcatccccatggtcctccgctacccgaccctcttccgcctcttccaggcccacacctccctcccgctctccccgtccctctccaccctcgcggtcgcgctcactcccgccgccgaggcgctcgccgccgatcttgcggcgctccgcgccaccggcacaggcgcaggcgcgctcgccgccaagatccaccgccttctcctcatgaccccgcgccgaaacattccggtgaacaggctcgtccacctcgccccc

SEQ ID NO: 167609 - DNA, 496 bp, Zea Mays
cacggtcttagccgccgaagctgaaggcggtgttcgttcaatggcttgcatcacatttactattcgtcgtttcttttgctcttttattttctcctctgcaaccgaaggctgtcctttcttctgtaaaaattgtgtcagttctgatcccagtggacttagcagcttgaagggtggggagtcagtcattaccttcagaatctctgcttcttcggcagcagagggcatcgaaggagcttcttctcccgctttcggctcagaataaggcactatgctaagctttcgcttcttagaaattgccatatttggctcttgtgttgttcttggtttcttcaaaactttttcatcttcctttatcaatcgggcagcttgcctactcagaatgctgactattctttttctttttatcccttcggcccctttgtcgagcttctcatagtcaagataatcgaagtttaaggcatccataacacggtttagccttcgttttggccgggtg

SEQ ID NO: 167610 - DNA, 1475 bp, Zea Mays
ggcaattgcaagcgataagccaagctgcccacccgggccaagatagtgaacgatccaatatatctcgggctaagcttttcagagacaccgaaccgaacaactcctttagtgggtgataccctgagaaggacttggtcacccactgcaaattccaaatcctgtctcctcacatcagcataactcttctgacggctctgagcggccaaaatattctgacgaatttcccaaaccttttcagaagtctgttgtacccaatcaggaccaaccagggatctctctcccaaggtctcccatcatagaggggagacacaccgcctgccatacaaagcctcaaatggtgccatcttgatgctagcctggtagctgttgttataagcaaactttgccaatgcaagatgatcttcccagctacccttccaagacagaacacaagcgcgcaacatatcttccaaggtttggatcgttcgctccgactgaccatcagtctgaggatgaaaagcgacactaagagaaagcttggtgcccaatgcactgtgaagactctcccagaatttggatacaaatttggagtcttgatcagaaacaatggagttaggtaccccatgaagcctgattacttccttcatatacaagtgaagctgaatttgtggtcttcatgggaataaaatgcgcagacttagtcaagcgatccaataccacccatatagcatctttgccccgaggagaacggggtaaacccaccacaaaatccatggtgatatgctcccatttccactccggaatttccaatggcttcagtaaacctgcaggccgcttatgctcggccttcacacgctgacatacttcacatgcggccacatacttagaaacgtctaccttcatccgcttccaccagaagttttgcttcagatctcggtacatcttggtttcgccagggtgaacggtgtaaggcgttttatgagcttctctcaatatatccatcttcacctctgatttctgaggcacacaaaggcaacccctaaaacgaaccaaatcattctcatcaatggagaactctcggggtttaccatcgccaaccctctttcgagcttcctgcaataaatgatcctgctgctgagccgcacgcactctctccatgagggaagattgaataaacatacgagtctcctcactagcggtgccgacatagcacaaggcgatccccaaacggtctagatcagtaatcaactgcaaggccacttttggaaccccaaacctgctaagggcatcagccaccacatttgccttccccgggtgataatgaataacaaatcataatctttaatcaattcgagccaccgacgctgcctcaaattcagccccttctgagtaaaaatatacttgagacttttatgataggtgtaaatgtcacaagcctcgccataaagataatgcctccacgactttagagcaaaaaccaccgcgaccaattcaag

SEQ ID NO: 167611 - DNA, 464 bp, Zea Mays
ggcaagatcatctgaagtccgccgggggacagccgcattcaatgtgcatacctaccccactcaggcttgtgggtgtatagggacaataaaatcgcattaatgtcaaagattcaccaactgtgattatgtgtgtgggcactgtacatgcacgtcgtctgccaactcctgacgggacgtgtaatacgacatgggcgcaagccagcccttgggcgcaaacttcgtctctcccgaagcagaactcgccctcaggacaacactctaccttgcccgaacctagtctcggctgcctactcccccgcaaatctcgcaggaggccactacttcaactatagcgcacgtcttcaaatctcagaacgagttcggtcgcgacctcaggcggacttccgcctcgctcgagcccggctctaacctcgatatctggaaaggggaacgccccaacatcattagatactgcagagctgacg

SEQ ID NO: 167612 - DNA, 1116 bp, Zea Mays
ggcagttagtcatcattgaagactgaattttgaccaacagtggaatcaggtgaactttgcgatcgaattgcggggggatttagtggatgtttgcgtaggatatttgtaacaaagatgtagttggtacattggacaacaactttgatataggcgggtgagtgagttgccacacaaaaattgaagaacaagaccctacaagttgctcgggcagagggactgacgaagatagccatggtacagtgatcagaaagatctccggtgccgtgagcctgacgccggtcatcttccaccgcaattcgcgctagcctaggagattcgtgccgcgggagtgatagataacgccgggtcaaggtgaaaatatcgggggaggggtgaactcagtcattggctagaccagccatcgtgtcccgccgcagtcagtcagtcacgttggcatcatcggagctcaccatttctccgaccgtgacacgcaacgatctctactccacatcgtaatggtcgtggaaagcgaccggttatcatccctggaccaattccctcctgcgcgccacgttgagtcggccaccgtaaaatatcctcgccacggtaaccttgatctcaatccaaaattcgtgttaagcttggccagagactataaattggaagcaccccctgttccgcctactcgttacaaactcagtgaaccactcctcacccccaatcatccaccgtagcgccctaatttggaattttcctcaaatccattctccgcgccgccgtgagcaccccctccgtcgacccactgtcctgtccctccacccgtcttcctagcttccgttcttgagtcctggtatgttgctaaagcatatcgcgcccccaatttgtatgttactacattgtgtcgtcgagaacacgtcgggaaagtcgctagctccacggttgtgcgtggactgagctctagaactgcgttcaggttaaattagggatttccagtggatcgcgagcggtgaaattaggcatagaccgacttagggcatggattgctaggtgttgtggccggtacaagtttgccggagcacgcacgtcgatgtccaccattggggacttggtcttgcgaaggaaagaaaggagaggggc

SEQ ID NO: 167613 - DNA, 460 bp, Zea Mays
atcaattgcgtgtttttttgatgttgttgtctcattccaatgaggagcgttacttccaaccttgttcctagatccaggaggtcgtcctctcttacgtccagcaaggctagccaaccttactctattctcctccaatgacaaacatgtcctactgttgtgaccatcggcaataccacacttctggcatttcctgttcattttctttgtaccttttgtgcccaatgtaataaccttttgttcactccccttgattgttcttcccttgggttttgagttatttggtcttgccaagcttatcccatcgactgcaaaatccagtttctgcaattcaaaagtatagttttttcagcacataatattttgcagtcccacattcactctaataccattattacctttatggcatgatcattttattcatggccaccactctcattcatatccgtgtgatcctgcaaat

SEQ ID NO: 167614 - DNA, 337 bp, Zea Mays
gcccttcgatagaggtgacagtgccgaaggcgcaaaaggatcttacaacgactcctaagaggaagaggatggtcaacatactagatgtgctagaaacgataaaaacttcaagctctactccgaagaagactgccgaagcttcaaaaacacaaattgaggcaaaactatccgaagccgaagctgccaggagcccggccgagaccgaagctgggccttcagagcccgccaaggagaaatccttggaaatcggagaagaagaaacgggaaaagaagctgcagaacaaattctgtctgaaaaaaactgccattcctattcccgaagcatcttccgaagctc

SEQ ID NO: 167615 - DNA, 419 bp, Zea Mays
cggtggcggctccaagtcctctcaagatccctctgttcatatcgcagatagcaaggggagccagcatttatagtcccaggggcacgcatggtggtgtcgtggatggattaggtggttgcaacaatcatccgaggtcttggggaaggatttgttaagatcccatggatctcgcgtggattgattcacggacgagttcaccgcggagaagaagtgcctgacgatgcgggcccaatcgtcagtcagcgattagagtactagcgcacgcggtgaggagccggccagtggggcatcgtcgtcagtgacagggcgagtggcgggctggcgaggggagagtgggccgagagatgggccgaggctagcaaatgttggcccaagcggagggtattttcttttcttttcttctattttcttacttcttt

SEQ ID NO: 167616 - DNA, 511 bp, Zea Mays
atggtctgacctaccagacgaacttgctacttgggaagatcacgacgccctttgccagtactaccccttcgctccggcttagggacaagccggctttcaaggggccgggaatgtcaacagcaaagaattggaggaaggatatctggttcaggagatggccagcaatagagactcggacaatgccgctgatgatggagcccagaatcgtccctgtcgcgcactacgcccaaaccccttcgtgagtggacctgagtgggtctaggctgtcagagtcggtgtgcgtgggtattaaatattcggttgtgtaaggacaacagatttatgcattatcaaaacagaactctacttgctctagttttccctgttcatctcctacctcgcttccccctcctatccaatatctaacagagcggcgacacaggcgagatcccacggtgcgaagcgacccgcattggcggcccgtgtccatcgaccaaatccaccactttgtccctcctttccacaaattgaa

SEQ ID NO: 167617 - DNA, 783 bp, Zea Mays
gttgctctgtgtactccttgaattcatgttgttcttcggccgacagtgcctccatagtcagctcaatgatattgctgggggaaatatcggagtgatccttgggaccgtccattaggggccgcttcaatggatccaactgtccccagcggagtcgtcaaaaagtgtgttggcacggatccgggcatgaaacacttggagttgttccactcaacgggctctctgcgacggcgcggatggcccgtggcctagggctagacagtctgcgacctggaaacaggagcggggttccctgcgctgcgccggacgatccatgtgtgtgcagggttgcggcgttcgtaaacgacacctggatctcaccccttgggacggaccccatcaaggaggagagatcctagtatttgtcttggaatcaacaggtcacccaagacgccttcagacgacatagagtcgaagagaggtgaagaaggctatgttactgtacactcctaggacaaaaagtaaaggaactgaagatatattgttttgattcgattgttgcgcgcaattggctatacctcttcatatataaggaggggaggtgtggacccgttcataagcgttccccaacagaatccaagagattagacggataaacacgcgtggaaaagggagttaattacgcctgttctgatctgatcgtggaccgtccggccgtgctcagtgccacaaaatgatgctcaacaattactaaattaggtctagactacatgaccgacatatcatttagcttagcatgaaactaac

SEQ ID NO: 167618 - DNA, 2217 bp, Zea Mays
tgccgcatcagctcctcaagttcccaagtagcctcgcgctcagactgattagtccacaagaccttaacatacttaattgatctcttcctcataacacgctccgaggactccaagatacgcaccggacgacactccagagtcagatcctgctgcacagcaattggttccatctcgatctgatggtctggatcccacaagaacttcctcaacatagagacatgaaataccgggtgtactcctgccatggaatccggcaattgtaagcgataagccaagctgcccacccgggccaagatagtgaacggtccaatgtatctcgggctaagctttccggagacaccgaaccgaacaactcctttagtaggttataccctgagaaagacttggtcacccactgcaaattccaagtcccgcctcctcacatcagcataactcttctgacggctttgagcggccaaaatattctgacgaatttcccgaaccttctcagaagtctgctgaacccaatcaggaccaaccagagatctctctcccaaagtctcccagcacagaggggagatacaccgcctgccatataaggcctcaaatggtgccatcttgatgctagcctggtagctgttgttataagcgaactcggccaaggcaagatgatcctcctagctacccttccaagacagaacacaagcacgcagcatatcttccaggatttggatagttcactccgactgaccatccgtctgagggtgaaaagcgacactaagtgagagcttggtacccaatgcactgtgaagactctcccagaatttggatacgaatttggagtctcgatcagaaacaatggacttaggcaccccgtgaagcctgattactttccctcatatacaagggaaccaactctgaagctgaatttgtggtcttcatgggaataaagtgcacagacttggtcaagcgatccactaccacccatatagcatccctgcctcgtggagaacgaggtaaagcccaccacaaaatccatggtgatatgctcccacttccactccggaaatttccaatggcttcagtaaacctgcaggcctcttatgctcggccttcatgcgctgacatacttcacaggcggccacatacttagaaacgtcaaccttcatccgcttccaccagaagttttgcttcaaatctctgtacattttggtttcgccagggtgaacggtgtaaggcattttatgagcttctctcaagatatccatcttcacctctgatctctgaggcacacaaaggcggcccctgaaacgaaccaaatcattctcatcaatggtgaactcccggggtttaccatcgccaaccctctttcgagcttcctgcaataaacgatcctgctgctgagctgcacacactctctccatgagggaggattgaataagcatccgagtctcctcactagcggtgccgacatagcacaaagcgatccccaaacggtccagatctgcgatcaaaggcaaggccacttttggaaccccggacctgctaagggcatcagccaccacatttgccttccccgggtgataatgaatggacaaatcataatctttaatcaattcgagccaccgacgctgcctcaaattctgctccttctgagtgaaaatatacttgagacttttatgattggtgtaaatgtcacaagactcgccataaagataatgcctccacgattttagagcaaagaccaccgcggccaattcgagatcatgcgttggataattctcctcgtgcttcctcaactgccttgagccataagcaatcactctgccttcctgcatcaacacacggccaagaccaattcgagaagcatccgtataaactgtgaaacgcttaccactctcaggcaaagctaggataggggcgttcaccaacttgttcttcaatgtctgataactaacctcgcaatcgctgaaccagacgaaaagaacacccttctccaagagtctagtcaaaggcttagcaatgctggaaaaatatggtacgaagcgtcgataatatccggcaagccccaagaaacttcggatttcagagacactagaaggtctcttccactccaccacagccgcgacattcttgggatcaaccacaatgccctgctgattaatcacatgacccaggaaagccacttcgtacagccaaaaggcacacttcttcaatttgccataaaactgattcttc

SEQ ID NO: 167619 - DNA, 781 bp, Zea Mays
gagcttcaccggcgaaccatgcgccccatgctctagtgctcggtttctcaatcttttaggtgctaaacgatgtgcgaggtgaaaccaatcgacgaggcagggtctaaccgagggtggcgacgcagagaaccccccaacgcgaccgactacggatccgcggcggcgctaaggttcccgcgagcgattcacgtagctagggcgagcatctacctatgattctcggtgttgtgtaacaaggggtaacgagcgggaggtaggacagtttcttaccggcaatggcgcggcacagagctccaattgcggaacaatggcgttagtggcggaatcgcacggcgacggatgagatccacacagaattccgcccagttctcactacaacgaacgctcccgcaccgcgcacaacctccacccacgcaaattgaaccgcgaccgagagttccgtggcccaaatcgaagtctcctcgccgatcgacggtggcggcagaatcgtccctccccacgagcgcccggagcgatggcggatgaggctaagcggtgaggtgaaagagagggagacgactcaggatcgcagcgcattatatacttgtgggtgcgcgaggtcgagcaacggatcccgagacccgcggaacgctccgccatggccggactccgttcatgccgcacgacccggacggaggagggggaaagaacactgactcgtgggccctgggttgtcagagagagtgcgcagtagagaaggggagcctgactcgcgggcccgcgcagcagggagcgtccgcgc

SEQ ID NO: 167620 - DNA, 851 bp, Zea Mays
ggtggtggcacctccccagaaactgatataaccttggatattcagaagcctgtcagtactcgcccaagacgcccttctcgggccaatcaacttgatcctcctgctgacgagcagaaaaagaaaaagagacgtctccggcgggtatctagtttggatcgggatgctggtccttcggctcctgctgctgaggaagttcccgtgcctgagcttactgacgctaaccttaatgagggtgctccacccgctgctgaccccaatgggggtgctccacctgctgctgaccccaatgggtgtgctccaccggctgctgaccccaatgggtgtgttgtctgtgttgctaatgaggacgatggggaggaagaggatgaggtccctctgactcggaagaacagtcggcagtacgtcgcagtggtgaaagtagtggagttcctactcctgctttgtttgcccttattggtctgcaagagttgtccctggcaaactttgatcagactcttgaagatatggttccggaaaacctgctgtcagagctagcagaagatggtgtgatggaggtttgtactgatgtgcttgacgctgggttggggtcatcccgcgcctcatcgaccttagagcgcggtcatgagggtcaggagactgacttggatcgtcttgctcccatggaagtatttgagagaccctcagccttagaggcggctactgcagagaacttggtcctcaaggatggtgctgacacttgcccagcccccgaggatgttgccggggatgactcggctcgggtgggaaacgcaagccactgcccagcccccgagggtactgccggagatgatccggctcaagtgggtagcgcg

SEQ ID NO: 167621 - DNA, 570 bp, Zea Mays
gaagagatggtcataggaagcaagcctcgacgtggcacatatgctaacgctaggatgagacaaccgaggtagaaggggcgaatgacattgcaccatggaactcgcttaacactggcctatcagggggctcacagacaaacccattgtgtcctgttgttcaatgccctaggttcaatgtctccataacttgaatggtgtgggttgatgtttggaacgatagctgcgatgacatcttaaatgttgccatgacagagctaggttcatactctagatcccaattaggtggacaactttgattatgttggagcgcttgcatgtctctaggtggcacatggttgggggtggcacgctcgttggaagaagggttggcaataatggcatgatatcctcttatctatatgtgggtgtgagatctcggttcttagtgctgacatcacacatcaatgattagttagtgctgagcccaataaatcaagtgttgcttggatgtcttgtctgttggacatgcaaaggctagattgcaagttttttgttgaaaagcaaaggagatgaaagagtgtttattgcggt

SEQ ID NO: 167622 - DNA, 452 bp, Zea Mays
cagtgatcctcccaacttggtcgggatgcatggcccacacgtccttcacatggctcactcggttgcaccacatggggtcatccctcttctcagcggagaagagtcctagtgggtgcattaccatctccaagggatggtatctgtagaatgtcgtcagggtcttcatagctgcagcctcagtggtgtcgctcgccctgaacccagtagtctcggagtcaagggaatgccaacccggatgcagtgggtgagcctccagagtcagccagactcagcaatagggcacccgatgctcctcgtacaactgcatcgtgtacagagggggtgtagggtaaccggcggagctgagcacctcccacaagatggaagggaaaccctcgtgggaaaggtaatctgaactgaaacgagtgtctcctccgttggtgggggtgggtgaagtcatttgtgaaagagga

SEQ ID NO: 167623 - DNA, 537 bp, Zea Mays
acgcctactaccattggatcccagatccgtggtccatgtcaagcccttgctctatcaaatctgggtcctacgcagcatgatcaacgccctagaattccacctgccgcctagacacctaccatctaatcctggccgccgttttacgatcggacgaaccacatgccatcttcttcctttagccgtgaacttggaggagcaaacgccccagcggtggtgccccgcaagtaggccacacatcgtctgattcctaggtgttttgcgcgatgatcgagcgacccactacaatctatatcccgacgataccttgtgcgaaattcatagcggcaaagatagcggaaagattcaccacacaaagacgaggaagaggatgggcgaaggtggcgcttcaccacgcgacgcgagctccacgaaagatcactgccgaggaccccccccccccccgcacagatggtttcgtcccgcccgaaggtcaccaccagcagtctcccaatccacaagcaatccctcttccctctcggctcctcaactatctagcga

SEQ ID NO: 167624 - DNA, 1783 bp, Zea Mays
gttcttggtaagttggttgaattgctgtcagcaagaagggacgaagctccatcttcaagtaaggaaaatattgtccatatagaaccagttcagaagctagagctgatgccaaatgaggttaaactggagggggtaaagaattatttggcttggtctaggagagccttgcgattgttgaaagcaaaaagactcgagggctatgttgatggaactgtcgttgagcccaaagacaagccaagtgctgaatggaaggattgggatgctataaactctttggtagcagcatggatgttaagttctatgatcccagcaattgctagcactattgatacaattataagtgctgcagaaatgtggaaagcgcttgaagaaatgtattcgggagctggaaatgttatgttgatggtggagactgaagatcgcctccataatatcaaacagggggagcgaactgtggcggagtatgttcaggaattgcagtgtttgtgggctgatgttgaccattatgatcctattgagctaccacactcagagtgtgttgtttgggcaaagaaatgggtggaaaaaagacgtgtgcttcaatttttaaggggtctaaacccagagtttgagggaagacgagcctccatgtttcatcaatccactcttcctagcctacaagaggcaatagctgctatatcccaggaggagtcacgactcaaagtgatgagggaaagtcctccagtgtcatctcaccctgtgttttcagctatgagaactaaagacgctagagagtgttacaattgtggtgatattggacacattgctcgtaattgtactaaacctttcaagtttaaccgcgggagaggaagaggggctgctagaggtggtagaggttgtggaggtagaagttgggcaagagctaatgcaacaactacaaaagaagaccttgagatctttatggagaatgaagctgaaacaaagtcgactgagcaacataaaattcctggaaataaaaatcaggagtcctacactggggattttgtcaactgcgcctacacagatgaaggtaattatgtccatgctcttgtacccacacaaatcacacgattaaattggattttagactcgggagcatcaaagcatgtcacaggcacgtcaagtgagtttacatcatatatgagatatccccccacacgtaaagaaatgattcaaactgctgatggtactccacgacctatcaagggtgttggcacagtacaatgcacttcatctattaagttgtcatcagttttgtatgtgccaacttttcctgttaatttgatatcactaagtgctttggttgatcaattggactatcagattatacttgaccgagataattgtttaattcaggagaggagaacagggaaaagacttgggacagctaccaggcgtagtggattatggtatatgtaccatgaggagacaaatgatacaagatgcactatgttggcaacgaagttggaagagaaggaagttgtagtgatgcttttgcattgtagattcgggcatctctcttttgataagatatgcaaagtttttcccgatgtaatgtgtggggtggataaaagcaagctattgtgtgatgcctgtgagtttgcaaaacacacgaggacatcttatataagtcgaggtatcaggagtatatctcctttcgtgctagttcattctgatgtttggatgtgtcctgtgacttctattaatggaatgaagtactttgttacttttattgacagtttttctcggatgacatgggtctatg

SEQ ID NO: 167625 - DNA, 406 bp, Zea Mays
atatagcgagggcatcacacattacattggctcaaccttcgggatgatacccatctccctatagttgaacaacattatcctcaattcctcaccctcaaacagacttcgtagcctcgagccttcactgaatagggtcttcaccggccacattaagcacgggtacagccgaggagccttcactggcatccacgggtggcaccggattgacctccgtagcctcgagcggcgcgccggccagacctccaaggtcctcgacgtcctcggcacgcgccatctgcagcaccagcacactcactcagcaaaaccacacatacccacacacataaccacacaaaaacaaaaataacctttacctactctatcgcccggtcggatcgctccctgaccgcctcccgaccgtgcggac

SEQ ID NO: 167626 - DNA, 818 bp, Zea Mays
gcgaaaacaaacgataataattttcttatggaatttcaatactgttcccacccacaaaagtaggcacataagttatctttacgtcaaaagatctgaacaaacaactacaagataacttacgaagcggaccatagctaaacactaggcatactagaccataaattatggtgtgttgacacagttctattccatgccactgaaactacacctattagctagtcgacgaagctagacatgttgtcaatgtcatactccactccctagaatgactcgatgtgttcacttataggcatgccgttagctaggaggacttctagagagggctccatccatgtccaattcgacatcgcgatgtcatccacgataggttccttgctggtgtcgttcaaggcctccgagcatagcagggaatcctagtcgagaccctctataatggttttgagtacatcaaaatctatttcacttccattgcattgagggctttgtctggttgtagtttgtccctgtagacagcgaggatctggttggaggccccctacatgatgctaaggtcctggtcagtgattgcattcgtaggagccatctacagtgccaactaagagaaggtataggctaagtaggttccctatcacctaaagtgaatagtctacatctaaaacaacatatcagtgtagtagcaaaataacaaagttggttaggaaaggacagtgattatagatcagttgaggagaaggatggattgaacaaactcttaaggagcatgcataaaccaaccggttaggctaattggttgagatcccacaacccccacatccatc

SEQ ID NO: 167627 - DNA, 655 bp, Zea Mays
tctagaccgaacatcatgctttcagtttgtatgtgcgttagatttcaatctgactctaagtaatgccatcttagggccgtgaagcgaattttaagatatttggttcataccctcactttgggctttggtatccaaagggatttgcctttgatcttattggatatttcgatgcgattatgtcgggtgcaaggtagataggaagagtacataagggatatgttagtttttaaggaggtccctcgtgtcctagagctctaaaaagcaaaaatttgttgccctatccaccgtcaaggtggttgtagaatcccaaaaccctactttaccatgtgtaagtgttttgacctgtggatcctacccactagtgaattagtgatgcatgcctaggcccagatgggtgatgcaaagagacacaagtctttatcctggttcgggcaaaagaagaccctacttccagcagaggggaatgagacttatattacttgcacctaagtgcttgtagtagggaatacaagctagttgggtgagggagatgttaccaagtccttggggatgattgaggcaagtgccaatatcagtgtggaggtgaaacccgtgaagtgttctcttcccgcaatgaagccctgagctcctctatttatagcctcaaggagggcta

SEQ ID NO: 167628 - DNA, 891 bp, Zea Mays
ctttaaaatagaaaggtaaccaaaaggaacttgttgatttacaaagttaggcatttagccgcagacaggattacgccatagatagtattagcattttcttaattaccccttctctactttgtgaactgcatgttgctattttaggcagtgccttaataacaaagcactctttcctttctaaagattgcaatgtgctcctaaaaatattgtcttgcctgccctaaatcaattagaataagttactagagtgcgtatttgtgttttttctgttggccaaaaagcacaggaataaatcctctatactgctactgctctacccctatgtttccctatttctctactcatggccataaatacaacatccaatgtcttcatggtttgttagaatctgccatactcagatatgtatgttttctcgtaagttccatcactcgctgcttgactggcttctatgttctattactcgctgcttaactggcttctttgttccagcatttcttttttaccttttgtagtgggaaacaccatcattagtactttatggatgtagagcgtaggttgaactacaatagaagccattcgtacacaattgagtttaggcaaagttcattcaggggttgtcttagggtgattagactatgggtatgatcactagggcaggcacttgttttatgtcacctaactatctcttaaaaacaacaacaaagccttttaggcttttagtcccaagcaagttgggtaggctaactatctccctaaaggcagttattaacacaattaaaaatgtgtggttctagcgctgttattatacacctgttcggtaaaccaattccgaccattttacacgatgtcagtacattcaattagtaaaagtttcaatagttgacagac

SEQ ID NO: 167629 - DNA, 272 bp, Zea Mays
ggccgaagcaacaagtttggccgaagcagcagccttcctcttctttccccgtcctcgcagcgggtagcagtagtcggggtaaacaaaaccaatggcatcaaaaaatctgtttaatctcttttttccccggcccccgaaggatgtggataaggcattatcttccgctttggaatacggcccaagcagttcatcacttgtagcttcgatacatttcagctagtcatcattcggttcatcaaatttatctccgtatctgaaggtgtatttcagtt

SEQ ID NO: 167630 - DNA, 516 bp, Zea Mays
cgaccgcgctacattgaaccggccacagtgcctgaatttggcggtgagacttcttcagctattgaagccaaaggacctactcttacgcagaggattgaagagctggctgcaatgccgaagactgacaaaattgaagaaccgagaatcgaagggacgaaaacattagaagttctaagcccttcggcagaagtggaggtaccgaagacacaaaaaggtctagcagcgacccccaagagaaaaaggatggctagtgtactagatgtgctggagacaataaaagcttcaagctctactccagggaaagttgccaaggcttcgaaagcgcagattgaaaccgagacaaagctgaccgaagccgaagctacaatgagccgggctgacgccgaagctgggccttcagagcccgccaaggagaaatcctcagaaattggagaaaaggcagcggaggaagaagctatagaacagattttgcctgaaaaagctgccgctcctactcccgaagcgccttccgaagtc

SEQ ID NO: 167631 - DNA, 716 bp, Zea Mays
tcacatggtactgttgttttggtctgtagatgccttgacgttgcagtatgatttgacctacttaagcataaaaaagccaataaacatctcatttagtttggatatccatccaaaaccgcatgtaccggtgaggcatggtctgaactttttggaggaatgtgtctgttccctaggaatagccaacggggggtctctacgtagaacaactccatgaaagactgattgattccgcagcttaaaccaaactgcagcacacgccatggaatggttttgtgatgcaaaccaaacacgctgtgagcgaccagagcttgctcacgcaacttgcagtagacaagtggattgaacatctgctgatctacacactgcaccctaaatcatttaacaccaagactgcatgtgtgaatctacgagtaggttttaggggcatcctagatatatgagtgggttttaggggcatcctagatctacgagggggttttaagggcatcctaaatctgacaaaacccgaggtgacacatcagtggtattgaagcgatcgtgatacatcgtgcaaaactgcaaataaccatttttggatccggtcccgcggctccgtggcaacgaattcaagacagagggctgatgtttccctatcccctgcttccgggacagattgagcacaggcgtttccctatcacctcgagtcctcgacgcatcagccagcgcccacatccccg

SEQ ID NO: 167632 - DNA, 535 bp, Zea Mays
cacccctcttagatctcccttctcgccatccattgtccctcactgactcattgtcttcctctctttttatatccccttcatcgtgtaccgcaaggccccactctcgtcctctcatttcccttcatctcctcttctataggcatggtcacatgagatagacgttgaggatgacgactatgttatgcaccatgccactcactatcaagctctgtagacttcatggctctataactacttgatatctgaggcttaaagccgaagacatgctccatccgtccaacgccatccctctctaagatccaaactgctaaagctacgagccacatagatctagtcctcacctccgcaactctatgcagatttagtctactgttactacaacggtgaaccattgacgtcctccacactttaggtttggtgcttcttcaccaagatgttaggtaaattcctaatgatggaagccactctaccatgcccgacactagccaactaggcaaaattcaacatggaaaactgaccaacattctcgtgcttg

SEQ ID NO: 167633 - DNA, 861 bp, Zea Mays
gcaaaaaatcccccgcaaaaattacaacgtcgaaaaagaccgcatcgacggtcttcggcattcgaccacaacgaagtcatcgcgagggggcagcgctggctaccctcgcgtgcgacactccgcgcaaaagtcgcctaagggtgcaaccggactagcacaagaagtgcgcaaaatcgaagtcttccccaaaagactatccgtgtaaaagtcgcccaagggtgcagccggactagcacaacaagtgcgcaaaatcgaagtcttccccaaaagactatccatgcaaaagtcgcccaagggtgcagccggactagcacaactagtgcgcaaaatcgaagtcttctccaaaagactatccatgcaaaagtcgcctaagggtgcagccggactagcacaacaagtgcgcaaaatcgaagtctccctcaaaagactatccgtgcaaaaaccgactacaggtgcagccggaccaacataataaacgtgctagatcaagtgcacaagtcccccacgggcacggccggatcagcgaatgcacacagcctcatcatacaaatcatcataccaattaaatttacacacatacagcgagggcatcacaccttacattggttcaaccttcgggatgatacccatctccctgtagttaaacaacattatcctcagctcctcaccctcaaagagacttcacaattccccctcatctacactcgccccaactggcgaggacaacaattcccgcttgccagccctatccacacgaagacgcccacactccacctcactcactctacgcttcgccaccgcccttcgccgcctgcgcccagcactcggaccaggaaaaacttcagcatccatcacacgcgg

SEQ ID NO: 167634 - DNA, 317 bp, Zea Mays
ggccgctatgcagcactgtgatgtgggtagggctccactcgctgccatacacagtaagaagacctccgttgagtttgcttttgtctctactataagtagtgctagggaatcaaagtctgaatatttgtgcgcaaggatgatgaactccggcgatgtctccaccgtggctagggtcgctccgtcgaccgagtgggcggctgattaggtgtgggggaaacaattggcatcggtcgtcgatcccgttacgtgcgggcgggattagaagtagggtaacgattcacccagttaaaatcccagccgtccgatctagatcgaac

SEQ ID NO: 167635 - DNA, 548 bp, Zea Mays
aaggggacttggatctccagcccggggtcccagctcggaccgccgccggcgaagccgcggcggctgctgccctccggctcctccttcagcgccatcaccaccgtggcgctctgcctcggccgcctcgcgacgaggccacccgccgccgctagcgctggcctccggctgcggcgccagcagggctctactgccgcgtagcaggcgccatggccatagccgcctggaacaggaaccgggagcaccaccgagtggacgccgacgacgatcttcagccggagcagcatggataaacagcacccttcctggccctgggtgtctgtcacgccgcgtatctgctgcccgcctcctccctctgtacttctttgcctcctatgctagggtgtgcggtgcgtcgagcgggcgaccgagacgtgtgcatctttttacgtggtgcgggtgcatcgggcgacggctcgtgtggctggcgcaggaggggggtgtggcgccctagcctacacgtggtgggtgcccggtggcacgttgcctgctcgtttcggcgcgcgccgcct

SEQ ID NO: 167636 - DNA, 378 bp, Zea Mays
gtgaggcccagacactggtggcgcaagagtgttgaaaatcttaggagatccccgacgcggcagcagatggatgtgaaaggacccaacacattcaagatgaagcttcagggtaaatgctacaactgcctctcaccaaatcacctagctttttgttgctcggcgcctactcgttgctggcgatgtctacaatctggacatagggctaggacatgcccagggacgtactacaggagcaggcacaattcaacttcctctctgcctgaaccagtgaagcattcaatgcagaataccaacaatatcagctccagacaccagcaacaggcccagttacgacacagccctcttcataaggagcaagaacaaatccctcaacctgca

SEQ ID NO: 167637 - DNA, 2178 bp, Zea Mays
aggaataaggaagttgattataaccgtttttcaattttcttaattaggggtaagaatgagtccagctttggtttagtggttcccataggcaggcctaggtacgtaaaaggaaaacttccaatgttgcagctaaatgctctggcaaggatgtccatcttctcatctgagacatcaatgaggtatgtgttagattttttatagttgacgtgcagaccaattgatgtagcaaaagagttcagcatcaccttgaggaagatggtgtcatatgtttactgtatgatgggaaaatcttgaccacacctatgcattagcggcaatttgagaagaccaagattcttagccttattaacaatagcttgaagaagatctacaaccagcacaaagaggaggggagaagggggtctccttggcgaactcctctcttgcagtgaaagatttaccaggtaccccattcaataggacagaggaagttcttgactccatgatcaccatagtccatttcaaccatttaggactgaaacccttgtgtctcaatatgtcagtaataacattgtgctctagtttgtcaaaagctttctcgaaatccaacatgagaatcaccatttgttttttactgtttgaataggtatatgaattcaaaggaccacagaagacaatcttgtatggtgtgttccttgatgaagccatattgattgttgtgaattagtctggtgatcaatttttgcagtctatttgccatcaatttggttagcagcttgacacttgtgtttaacaagtatatggggcaatagtcactaactatgattgggacaacttctttgggagcaatatgacatggggcccatctatactccgcgtgtagatattttcatcatagaaatcacaacatagataaaaaagtcctgagagattgttggccaacacttcctcatgaagtctgtgttaaaactatccgggacaggtgctttactagaagggagatttgccaccacagaggtgatcccatcctcggtgaaaggggactccagattagttagatctatggaagcatccatagggttctgcaaatcgaagatcgtgttgttatgctccgtcgtaccgagtctatctttgtaagctttatacaacattgttgcttcattgtcatgatcagtaaccacttgacccaaaccatcctagagagttgcaatagtgttatacttgagcttaattgtggcattggtgtggaagaattttgtgtcgacatcaccacaagttgtcaacttaatgttcacccattgtttccaatatgttttctgttgttcaagcatgcttaagttttttgataagatatctcgaaagttccattattgcatggtatattccctagcttcctcaatgagatccatgaactgcatagtcagcttaatattctcaatcgtggtggctagttttgacagttttatttatgctagctcattagagcctttctagattttttgaacttctccatattcctcttggctagatctagttggtgaatatgttgggaccaaatttcttggaatattggatagaagttatcatgttgaagccataaatttttgaatctaaagatgtttggtctaggcacattagttgcaatctctacaagccaagggacatggtctaaaatatatctggccagagtgtgagctctagttcctaagaattactgaaccacttatgtgaaatgaagcaccactccaatttttccaatagtggatgctgctgcatatttgactaggtaaaagcttgaccatgaagggggatttcttgcaaacctagctgattgatggaggcattgaattgaagcatgaactgaatattacctcccactttattgtgattctcagggctgcgaataagattgaaatcacctaaaaagatccatggttgatctggcaaaattataatattagagaaccattctaggaaatcctttttgccatttgacgtgcttgggccataggtataaataaggagccatgactgatttattaatttggtgcgaaaacaaattgtttgggcatacacattttagaatatttgttccctagagaatttagagctttgtgagaaggttatcatgccaccagacgaacccatagtgggatgaaaacaaaactcatcaaagcttctaggactgaaattccgaag

SEQ ID NO: 167638 - DNA, 516 bp, Zea Mays
acatcgacccgcccatgcggtccgctggttccccgaactccgaccaaacgcaccagcgacaaaccgaaggtcaccggcgagctcgatcctttctctctctcggtttcgttctgctgggacggtggtgtggatgcaaggacttggcaccatggagcggagataggggtgctcggtatatatggccagggtacggtcaacggtgggtgggtgcgccatgcacagaggccgttggagggtttaccggggcgagctggcagcggcgagcgagatctccgtggagaggatagatctgtcggcaaggacccacgcgttagtgtgcgcgacgggagacagacacgcgggcccagcgtaccagagagttcccccagcacgcgcggtatcctgttggctgacaaaccggccccagaggttagtgaagggagcgaggggcagcgcgggaaggcggtgcggtcgcgcggtgaggtagcgggccggcgcatggtaaggttaagtgggccgaattcaattgctcaggcc

SEQ ID NO: 167639 - DNA, 425 bp, Zea Mays
ccacccttctgcacttagcatgcctgcaatcacttgttgtttttgtacagacttattcccaagctgctatacagttgccagttgccaccgattcacttgcatctgttcgaatcactaacctagaattgcctctatgatctccttcccgcagaggttacaagacctgcaggaaatggacttttccaaatatgcgtgcttgacggcgatagtcaccgaggaaatggagcaagggacagctaagaagaccaagagctgcaccagagttatcatctggctgtctaggtcgataaattgctcaaaatacttactggagaggctgctggagactcctgagtcgagcctaaaagagatcgtggaagaagcctacgcaaatactctgaagccatggcatggctgaatctcgttagctgcttacagggtaaatc

SEQ ID NO: 167640 - DNA, 742 bp, Zea Mays
ccaaaagtgtcccccgggcccacctcaagggaggatgcgagcctgcaggtggggccaaagctttgtactttgcttcaacatgacctgatcggtgattggctcgctgttttagcgcgtctgctgacgcgcccgctgtcaatccgccttctgtcacgtcaactgccatatctgtctccgtggctgactgacccacggcaccacgcctggtggtttcgtcgggccacgcgcgggacgcctcgttgccgctgcataaccttttgtcttctgcagcggccccgaggaggtgcgctatcgcgcgctgcggttcgcacggtggtttgctctttccgcaccagaaatccggcacacagcatgtatgacttgtggacccgggcctccatgtcatagagtgggttgcctgggtcctaggtgcgcgtcgggcgggatttcctgcggcgattctgggacgcgcggaagggtttccctgaaccgggactcaggtttccttgaaaaaggattcaccccgcgtgcagcagttacctttttgtattctctcccaatcgcctgcgccctttgccttcgtgctcctctgctccgcgcccgcgccgccgcacacgccatggcttcgtttggtcatcctcaccgctttcagtctaaggaggcgctcaacctggtgcgcggcctgcttgggtggagcgcgccagggcttgccggaagaatccgcgccagcgccgtcctccttggcgatgtcgccgtcggggag

SEQ ID NO: 167641 - DNA, 720 bp, Zea Mays
cttaactaatgcccctgctgcttttatggaagcaatgaataggatgttgcatgaattcctggacgacttcatggtcatgttcctggatgatattctgatttattccaagtctgaggaagagcatgagtagcatctccgtctcgttctgggtgctctaaggaagaatcagttctatggcaagttgaagaagagtgccttttggctgtccgaagtggctttcctggggcacgtgattaatcaacaaggcattgcggttgatcccaagaatgttgcggctgtggtggagtggaagagaccctctagtgtctctgaaatctgaagtttcttggggctcgctggatattatcggcgctttgtaccaaatttctccagcattgctaagcctttgactagactcttggagaagggtgttctcttcgactggtccggcgattgcgaggtcaattatcagacattgaagagcaagttggtggacgcccctatcctagctttgcctgagagcggtaagcgtttcacagtttatacggatgcttcgcgtattggtcttggttgtgtgttgatgcaggaaggcagagtgattgcttatggctcaaggcagttgaggaagcatgaggggaattacccaactcatgatcttgaattggccgcggtggtttttgctctaaagtcgtggaggcattatctttatggcgaggcttgtgacatttacaccgatcataa

SEQ ID NO: 167642 - DNA, 570 bp, Zea Mays
ggagctgggaactcacctctcgcaggaacgttaagtccctacgctatgaggtcctgtcggcaactccaggggtcccgaaggctgccccacatcaatgatagaggagcaccaccatctccttcagggcatccgactgccccgacaacatggcaggggccggcatactgccactcatcaccgcccctgtcatcgccaacatgcggttgcaccatgtgttgattgacggcggggcaggcctcaacctcatcagccatgctgcattcaggcagctgcaaatcccatggtcccgtctgggaccctcacgcccatcctccggagtgggcccacagccggtgtatccccttgggagcatcgcactcccggttacatttgggacagaggagaacttccgcacggagaacgtcgtgttcgacgttgtggaagtcaacctcccctttaacgccatcattggcaggccggccctataccggttcatggccattgcccattacgggtattttgtcctcaagatgccatccccaattggggtcctcaccgtgcagggtgaccgtgccgccgcacttgcggccg

SEQ ID NO: 167643 - DNA, 608 bp, Zea Mays
aaggatatttagtgcactgtaccatcagattgttctttagttagcatgacagaccaaatttggcattgattttctcctaaatttacatggcaagttgttgatcggccagtagcaaatttgttgtctaatgatccagctataaaccgactgtggtaaccatgctcaaacgtccacgggatcatcttcaaaatggcacccaaagttcatcccatgccactgaataccataattcaggttttagacagactgacagcccaactttgggcacatttatatcaaaatacttcatggtaccaggacttgatctctatagcaaaattgttccccttttatagctctacaaacttgatgtggtgacctagggcaaaaactttataatttggaagatatagggtcccaaagttgagccaattacactgaacttcagacttaacccaatagagttcaaataggactttttgcaaataggtccaaatctcaaggtttaacttgcaaatccacatacatgtgattcacatgagttaaggtaccctaatttcatggtttttgcacttaggtccaaaaatgcactagttttgcacttagccccctagggttttagtccaggg

SEQ ID NO: 167644 - DNA, 433 bp, Zea Mays
gtggacacaggcccggcggaggagccctcaacggtttccaggcgcagggccgggtcgacctcagcctcgggcagcaccgggttgacctcggccatgggccgcacgccgttcagatccccaaggtcttcgacatcctcggcacacgccatctgcagcaacaacacactcattcagcaaacccacacgtacccacattcaaccacaccaaacaaaaaacaagccttacctgctccctcgcccgatcagaccgctccctaaccgcctcccggccatgaggaccccacatccgatcgaagagtgcccccgcggaatcctttatcacagggtcttcaaccttaaaaatttcgcgctcaaagttttcatcggaccggtcgaagacctcatagtatttgcacccctcgtgggacagcgcattcatggccccttcgcaggt

SEQ ID NO: 167645 - DNA, 536 bp, Zea Mays
ccggatgaaaggtttctcatccaaatggatatcttggattaagacttttatatcaggagggagtgtagcggtgagtgtcaatgatgacattgggcattattttcaaacaaaaaaggccttcgacaaggagatccattgtcacctcttttgtttaatatcatggttgacatgctaaaagtattcattagcagagtaaaattggatgggcaatttgaagcttcttctttttactttcgatcaagtatcaagtctaaagattaatttccacaagagtgagttgttctgcttcacgacagttcaagacaacctggacctatatacgaagctctttgggtgcaaagctgggaacttcccgataaactaccttggtatcccaattcactttagaagattaagaaattgtgattgggttaaggtcgatgagcgttttgagaagagacttagcagatggaaggggaagcacctctcaattagaggacatctgactttgattaattcaatgtttagcagccttccgatgtacatgaaatcattat

SEQ ID NO: 167646 - DNA, 639 bp, Zea Mays
aggcacaccagtgtaccagtaagtattatcaagtacaaaatgttacactgattaccaactatgttgtacccaacggtgtggactttggtgtctgatacaacatgatatacctatccctatgacacatgtgtatgccactatggcatgtcatccttgatggtgtagttcgaccaaaggcataacattgcatacaacttcacaactaggatatgattggggttgttgggccacagctggctgggacccacaatccaaccaatctgtaatcctctctcctcatttggtaaggaaaagtagagcgatgtgaaaatgggtttggctctagagaaaagcaatctttagccaattcggtcaaggttgagtaatacaacctttgaagggtaggcataaaggtgaactatgaaatgttaaggtaggactctcattagaaccaaatggtaagagggagctaggaggtcatggtgctcagttggtacacctttatgctcattaatctatcacacacaagaggacatacagtattacatgtactacggtctgaacctctctaaattgtcttgtgctggtatccagctctacctaggtgcaacgcatatacagcccatgccttcgttgtatacgttaagcttttcaactttt

SEQ ID NO: 167647 - DNA, 1524 bp, Zea Mays
gcacgttcctgcttctagctttacagatctatggggtaagattctcatgtcatcataaaatatacatgttattaatatagtttgtcaccacctaagtttgataaatgtcatatgcaatttcatttatctaaaaaaactacataagatacttttaggagaaaatatgtgtgtgtgtgtctatatacaattcattccatttcacttgtagaaaggagaagtaatactttctgttatggaggccaaataatgagggtacaaatctcaaaagaattatgtagcacagaaaaattgatgcctagacaataagatatatagtgcttcaactttggttagcatataactgacatgtgaaccattctttgtttttcttgaaggttaggaaaatagagctcataggagttatttttatgctccttatcgccatttccttctttgttgaactgagtactgtcaatcctcctatgggtgaggtaattcaaggtctatttatcccgagattgcgaggggtttatgctgtgtcagatgcaattgcactatttagcgtcctcgttgtgccgtaagtatatgtaattttcaattaggatcttgatgtgaaataatccatcttttccaaaaatatgtcacaataagatttaaaatttgtcccacaatcttgtcattgtaggttatggatgactaatttggctatcaatattcattccaacccttttgcatgtgtctaatctgacgatcactgtctctcataccgagtagctcatatgcatacacgaaatggggaagattaaacctttcttatttcttagtgctagaaacaatatactatcactacaatagctaaggcacctagataaattacctttagtgctaacctatcttaatattgttgtactgatgtattttgggatgaggggatatcaaatatgcatctctcactactttttatcattaggcataatctcttcctgcattcatcactggtggtatcaagaaaaatatcaccttctccaaaaggatttaaggtaagtgatcattatcataaaaaatcactttcaatgattagcacattgcaactcaagttaaatttggaatctaagaaggtcacgcagtatgtcaacaaatccatacacaattttgaggttgatgttttatgcactaagaataataaaacgaaaatcatgcaataattagcaatatacaataatggaagtactacatggtgcattaaagtttacgtcattgcgcacgatgcctcacaaagaattgtatagtacaaatgacaaggatatattgttgtacagttaaatagcgctagtttgagtttcttctacagaatatttatattttgaaatttcaattacagttcaaattgtcccttgtttacccaggacacttcaacgttcttcttgattgagaacgcatttgctatgcttcttgtgctacttgtaaatgtagcaattgtgtcaactacagggactatatgtgccaataatactcagctggttgacaacaacaatgcatgtagtg

SEQ ID NO: 167648 - DNA, 542 bp, Zea Mays
cacagtaacacgggtgtcattgtttctaggtctgcaatcatggtccgagataactcttttgcacaaagctagcggaagaaatagctcagctctacaagcgctagccatacatgctcaggggcatagcctcgaactatcgctggaagaattcgttcaatccatatgtggaagtcatgactcttcatccttaagattcgcagagtagataagttcaccccctactcatgttagctgcatacgcattagggaacaacaacatcttgatccactgtagtagttccttcttctgagccctactcacgacgaaatcagccttaggccttctccatgtcttgcatacgcatcagggaacatcaacatcttgatccactatagtagttccttcttctgagcccttaggccttcttcgtgtctttccaccacattgggaaaaaatttaaagaaaagaaacgctcttcagccaacagaaggctatacatgtttgtgtgcagagaaaatgccaaccgtccaatggatatctcacgtctgacattcaatgggcg

SEQ ID NO: 167649 - DNA, 282 bp, Zea Mays
tgaaaaacaaaatatgagagccatgttgagaaccggcttgctctgcaacaaccaccaagctttccaaagtgaaaaaacttgtttcacgtgatcaacaatggaaactcatctcaacacacaaaaacataataacctacaggacatgttaaacatgtggcactaaactgtgcagttcaaacatttgatgttgagctcccattcatcagctgaaacctatacacattgcatcaagatgatagcttccttaagaaccgtctaaataaaacctaaatctcatccaag

SEQ ID NO: 167650 - DNA, 617 bp, Zea Mays
aatgatcttaatactataatggatggagggttcatttcttaaaagtagaggggctttactagaaagtggctcggccgaagggatatgggtgtgccacagccacacgattaggattcaatggctcatattagatctagcccattaatgaatcggtatgggcagaggaccgttggatcgagatccgaaggcccggatcccatataaccaaacagctctaccgcggtctaatcttgacggttgattccaatccctacggctcagattcaacagaacgaagaggtaagatcgatctaatcctgaccattgcttcacagatctacggtcgaccatgtgggatctgcccgcctaatcctgatcgtttatctcaagactgatggcacctagttctgtcactttcgtatcccaatcactgactaccccggcagccgcactttcctccccacgacagcgccatagctaggactgccccacccatcaacccagcgaccaagcttcaatctatatggttcaataggccgcggagcatcgcatgggaccatacctgcacttgaagtagagcagcagcaaacgatgttgggcggcaacgcaccgacgaggtcttgcgagcggccgagcgg

SEQ ID NO: 167651 - DNA, 305 bp, Zea Mays
acatagcatgtgaagtgttagaagaagagccacctatagacactagggccatggtaggtgcactaggggtctcaatcatgccccgggtctagtagtcaatctgtgtggacttgagcttgctgaaaagctcatccatagtgtgagtctcatagttgggcgactcgaggatcgttgataccttcacctcccaaaccctccgatttagagcatgtagtaacttgagtgctctctcatgattgtcatagggcaattgcgccttgtttcatgcatcttcttcaccattgactagaagcaagaaaacaaag

SEQ ID NO: 167652 - DNA, 1667 bp, Zea Mays
cagcttcttagtacatagggatgtggttttttagtcttggtccttatagatagttttgtgtatgcctgcttctggcctccataaggagtgcgttgtatctaggtcctttctgaccccctccccccttatttcctctactttaatatatggtggcgcagttctcctgcactcttttcgggaaaaaaaattggagtagctgcacataatttaagtttgactgaagaagaataagctcccccccgccccatgttctcatgctatcatatgcccatacggtttgaggtacgtgagtaacctgaaattaagtagattagattgtgtttcttaaccatcagcggcaactgtatattactgtaaggctgatttgcatatatcaaacccagctagcataatgccacttcagtgcatcaccattcggtaatagtgtctgtatatattgatattttctcttttgaattttagacaaatgatatgaacttggcattcgatgcaactcgaaaagcagaatctgtgattgcatctgctactgggtgtccggaaagaggtgttgttggtgatggccttgcttcggtaaaagcagtcttggatcttaacttcaacaatgtgaatgaactactaaggcttgttcgggtttcaatggaatcaataagcagctgatgatgtgttcaaaaatcggaattgcacagaatgtcacacagtgaactgctgatattggattaacatgcaatctgtgctccgtgatgctggttgcagctatgtcagtatatttttacagtgcaaaacaaattaacttgaaatcaagcattccctttcctaaattggaaattatgtgaaccaaggttctggaattcgggagcggtactgctgcatcttgtggtagtgtaaccatgcattgatgtgtgtttgtttcaatgggtatgtttcatcataacagaagaaactctaaatattcattttttttatccatttttgttttctttgcctgatgctttgtggaatcttgaacaggtcagaggagatcgattgcgattacctgcactacctgtcatgtacgggcgctcgtacgccaggcagcgtcgcgcccgtgacaggcgccgcgcacaggagcgcgatctgggagatcagcaggaacctatggaaagcagtggccaggaaggaaattagaagaatggaaagttgagggaaggaaaggagagattgattagtgattgattaagtgattgattagtgattgattagtgttaccatgtttaggcttgcctaaaataaaggctctaggacagcaggccgatggctatatatgcggcacaaggagacaggaataaagggcagcaaacaagttatctcctctccacctctctctaccatctaagcctacggctgtgggggataaccacgccggagaagacgaaccgcggctacaaccccatgctctaaacgcccaggcccttgacaacctggtatcacaagtcaggcgatcttcgtcctctcgatcccacacctccgatcagtccctcgacgtcacccaaccaccacccagccctccaccgtctccgccgtcggcctcctccattatgaccaccaaaaccaacgacgatctggctgcgatgatcgagaagctcacgggcacggtcgctgccctccaaaatgacgtcgagtcgttgaag

SEQ ID NO: 167653 - DNA, 516 bp, Zea Mays
cggccgcgcgccccctgacctaaaccaccgctcccctaccccttccctgccttagccaccgcccctctgttctccctcccctgctgcgcagccgcaaggagctcttccccgtgctctgtacaccgcgtgccctgcccgaccgacggccgcagccgactacgccattgccaagaccgtgccaagcacgcaaaagccgtccactaacgcacgacaccagaagcccgacgttccaggacatcgaccgccctgaccccacacccctgcacgccccgacgaccgaccggcgaccgcgcccctgtgccacgcgcacccgaagccgagcagcccacgtccgttcttctccccgcgttaatggaccttcattggagccgtttctcctctccattactccctcccgccattgatgaccgtcttgaagaccttggccaccgttcttctcaccctgaccgacccttcctctccctctctctcctctataaaacccctgccgagcccttgctcctccctacacgagct

SEQ ID NO: 167654 - DNA, 657 bp, Zea Mays
gccatgtttttccacaaaactagtggctatgaacgaatgagatgctcctgaatcaaaaagtacagtagcaggagtaaattcaaccaggaactcaccgagtactactcccggggcttgttgagcctcttgagcatcgacgtggtttactcgtgccctgccatgatattgggtcttgttctgctggctgatggaggagggtgccttggaggcgggtgctggggcattcttggggccattcaccgagttggagtaagtaggtcccgatgccttcaactgggggcagttattcttgaagtgactggggtctccgcagtgccaataggcattagctggtggttggttgcttgcaactgagggggcctgaaaggagctttgaccctgctgactgaaatgtgacggagtgggtccagctggcttattgaagcttggtcccttgggtggaaacccaaaggatcaaattctctggtgcatgtcttgctgttgagcttggaggacttggaatttcctcttgaggtgacctttttcttcttccctcgccctttccacttgtatggctttgtttgagaggtgcgagaagctgaggaaatcctggctggcgaggatagtattgagttctggtcttagccctttcaaaaagcgggccatcttcttggcttc

SEQ ID NO: 167655 - DNA, 970 bp, Zea Mays
caacaatccaaggtccaacgcaattagctctaataagacacaattcttgcatgaacatgagcttcctatcgttaccctgaggcccgtacacacaggtcaaccaccactcatcaccaatagttggacagaatttgacagaaacacttaagacatcaaccctggagtagacaatagctcccaatttagacctccaggccagcagtacaccaccactagcaccaacagaattaagagtcacgaaattgttgtcgaagtcaggacccaataacgagagaacaaggcgatgactacaactctgcatcttggtttcttgtaaacaaattatgtctgcacgaaccgactctactagactccttatagaatcttgtctcgcgatggagtttaagccgcgaacattccagaacataattatggaaggatccattagtaaacacttagaggacaacacacatccaccaaattagcagaccatggtggccgctccacccaagtcatctgggactgcccaaccgaaaagtgttgcaagggcttaaacctgtggataggaaagaggatggcagaaaagcttggcataagtctctagatccccacagttgagctgattcgtgtctgaagtattatgaatagccttcatcaccaatatcttggccctagggatatgtggaatgtgctcaacgcctagaccagccactcgtcgactacgacggagttcctgcaaagggatgccaggttttctcctcttcgtagcttttggagtaggaagtaaactaccaattttcttggacaccatcccaaagaactgttgtttggaaggagattcttcctctggtgcatcaacctgtccaactgaatcatgttgtcttcttctactgtagactttaagtgatgtcccgtaaagatttggatgcattctgcagctctggactatgggcgagtttaagttagctgattctagcggctcacttaactc

SEQ ID NO: 167656 - DNA, 1198 bp, Zea Mays
ctagtatgccacttcttggcagcttggcagaaatcattgaatattatctggcaccagtcaatctcgtggaaacgatccatttcctcagttaaaagaacctcatggttagttattccccatcttgcagtagggaacaacaacctattgaacagtatcaggaagaagtatctgatgcttagatcatcgtcaaaccctttccccaaacgatcttgaagagctgcaacaccaaattcttctttggataaaccaagttcagcccttaaattgtttgcagcaacagcttcatcaatgcctaatgcctttcctccaccagcatttggtaaccccaaaataaggtgcaccgtctcctttgtaattttgagctccttccctgggccggctcgaattgtcatatcattatggtcaagcttttccatcagccaagctaaatgagatctactgccaagcgcgtcaactctcatatcaagtatactggagaaccccctccgtgcaatagcttgacgttgtctgtcatttaaaatctgaatgcttactataacattttggggattgcatctcacattaagcctctgctgaaataatgtatacaacgaataacgtaaacatttacatctgcataatcgcaactcaatgtttaaatcaaatctcaatacaacataatttcacgcagaaaatgatatattggcattgaccatcaattctaacctgtcgggggggatccactgctttcctctgctttgtaactatcttcttcaagacttttgtaggactgtcatcaaagttacgcttcttcgataatggcataaagtcatcgtcctcgtcaccagcctgcattggtttgtgtctgacacttttcgccggaacacggggtatgtcgacactaaagcactcttgagtagactgaattataattcgctttggattatacggaggtcggtctacgttcttcatgtgtgatgttcctgccaaatcaaacaacacatatacatataaaacgtaatggggcaataacaattctgctcatatgcaacaaccaattaatgtataagctgcctattttgtgcgtactggccctaaatgacttacctgcttaacaatgaatgtacgacgagatgtttatggcataacacgttgacgtatataacataattttgtcaacaaaacagcataacatggtgttgtttagtgcataaacttg

SEQ ID NO: 167657 - DNA, 287 bp, Zea Mays
ttaacatacttgtgtgtaatgtgcaaacatttatgtgcttgtacatgttcatgttggggcgttgggtggctcactatgctactttctgaaataaacaaaaaatctatttatatgcataaaaaccagcagtaacccaacacggtacacggcaggggtaagtcagctgccaacactgggcatgtgagactgtcagttcctaatttgtgagaatattttggccaaagtttaatacccgcacttgatggcacattttacactactaaaattctgcttgaatgccctatctg

SEQ ID NO: 167658 - DNA, 463 bp, Zea Mays
aaaaaaaccccaaaaaggtcaccaaagagaagggcataaaagaaaaatcagatttttctcactttcaaaaccagccctctttcaaagatcaagcatgttcacatttttccaaacctcaaaaccatagggcccaaataacaaaatggcgcctaaagacccctagaacaccctggaaaaatttgaacccaaccctaagtcgtttgacatgacttgacacggtttttgtctcggtctggacaactcagacagagccaacttcacaccacaatatctctcaaccccgaccatatctttgcttggaactcacatggaaaagataggatatggtgcagagaagagaccgtacatgggatttttgctgagatctacacgctaaggcgaccaaacaggctgttgaacaccgcagaagtaaaccaccacgtgttcgacatgggcaggcactcgggaatgcgcctagagcacg

SEQ ID NO: 167659 - DNA, 447 bp, Zea Mays
gcatgagagaaccaaggacagcaacggaatccattgaacccaatggatacaccatttagagataaaattgataaaacgacgtcatgatcctcaaagaagggggtatgagaatgatcaggaatgagagatttaggcaaatcaacatccgatacttgagagcaggttatagcagataaccacggggcagaatccatgagggatccagagattcggatgataaagccacaacatgattcttattaaaaaaagattaccagatccaggtgaaaggagaggtagtcacatgagatcgattaggatgagcagcagaaaggttacgaagattcaggacaagatctatggaaagaaacatggccttgatagggtttgtgcaactagacaccaaataacaattttattttttgacataaacaagtgcacaaggaagctttaggttgaactagaggt

SEQ ID NO: 167660 - DNA, 1168 bp, Zea Mays
aaagaaaacagaaatttgaaaaagaaaagagaaggaaaagctaaacaggccggtaaccctgttttcggcccatttaacttcgtgtccgcgcggccctgggcgggagagggcgctgacatgggtggacccaccgggcggtcttttcctcgtgctcgccctcgccttctcactgacgtgtgggccgctactcctttctccgctgggctcgcgctcgttggatgactagtggacctgggttggcagtgctaccctctccaacgaacgccgaggatggcggaacgtagcggaggacgcgcggtcatgcggccgtgggatggtgcgcctgcccaccgagatccgcgggggcgtgagcttataagtcccgtggactccgccataggcgctagagcttgaccgcggaacccacagagagagacagagagaagggagtgcggggaagactcgccgccgcagacaaacgacggtgctcgtcgtcggcgttgctccgcgagccaattctggtcaccagtggaaccttggcgaactgcgtggagcgaattcatcgccgtgggtcgctgcacgatcctctccgacctccgtaagagctggggaccgccgtcgctgtggccgaccacctccgcggtcctcttcgattcaggtaagtggcccaagtcacctagtacacccacgggatggaatatgttcgagtagatcggggaaattcggggcgggatttggccgattgctgtagccggccatgtcctcgccgccgcacgggccaagggcgctgccgtgtgtgtgggggccgccgcacggctgatttgggggaagaagaaagtactcgcaccgttggatctccgaccgatggaggagatttgatcccaaggtatctcttcgccaaatgaatatgggccgttgatcactggatggtggagatctagctgaagcataacttttcgctctgacgaatgtgaaccatgggatgggaatcggatggacctggtctcgtaccggttcacttagaagaaaacctaatcggtgccattgagttatgatccaacggccggtagagagtgtgagaacatgtaagaatgatctaatctgggtgcttgatggacgatcggacggcccataatgcaccataccccttcgtcgtttgattttgtaaaagagcccctgtagaatctag

SEQ ID NO: 167661 - DNA, 298 bp, Zea Mays
catcaggcagtggtctaggttgtgttctaatgcaagagggccgagttatagcgtatgcctcaagacagttgcgccggcatgaggaacattatccaactcatgacctagaattaactgttgtggttcatgccctgaaaatatggcgtcattatctgctggggaatatctgtcatatatacacggatcataaaagcttgaagtacatttttacccagtcagaactaaacatgaggcagaggagatggcttgagctaattaaagattatgaattggaaaataaatatcacccaggcaaggc

SEQ ID NO: 167662 - DNA, 513 bp, Zea Mays
cgggcatgcttatgggtgtacatgggtgtaattgcaatcttgtgcagcaatgggagatccttgaggctaagagggtgaaggtcccttaattgactcgttgggagaaagggccacaacaccaagcatcaaagaatcattcccacccctaaagtcaccttagaaagaagaataccctccatcctgctcatctttcttttgtttcttactcacatgctcggggcttttatcatccggcccagattccttgtctgctccaccctcaccatcattgcaagggtcatccttaaaaatcaccgggggtgcaggaatgaagttctcctcttccacagtaaaagcaatctcatacccccttttgccaaaaacgataccagtggtaaggggggagagggtctctgctcatcattccaacaagcagccggataactcccgtctttctgtacatgtacatatccacatccagagtcactccaatgaccgatcctagtgcccagaagcctaggtaatgcctctagg

SEQ ID NO: 167663 - DNA, 789 bp, Zea Mays
caaacacaactggataaactgaaatagcaaaacatcaattgttaggaaagtagagtgattactagcatacttagcagtcgttggatcatcttgccctggagagcaagttccaagaattgttgtcttcgccgaatggggcgggcataggcgaaggggatcttcgggagctctttgagggtgaggagttgaggataatgctgtttaattacagggagatgggtatcattccgaaggttgagccgatgtgttaggcgatgccctcgccgtgtgtatgtaattgtaatggtggtgtggcctgttggtcgtattcgtacgcttgtattgttccggctacgtatatgggcggctttgtgcagagtgtctttgtaatgatagactttgattaacgttattctggctgcgcccttaggtaattgttgcgctgtcttttgaataaaagactttgtttgacgcttctgttgtgctgttccggctgcacccttaggcgacttttgctcggaatgtcttgtaaagaaaagacttcgaataacgctcttgttgagctattccggctgcacccttaggcgacttttgagcggaatgtcttctgaagaaaagacttcaaataacgctcttgttgagctattccgactgcacctttaggcgacttttgcacggagtgtcttctgaaaaatactttgaataacgctcttgttgagctattccggctgcacccttaggcgacttttgcgcggagtgtcttttgaatacaagactgattatcgcacttgttgtgctattccggctgca

SEQ ID NO: 167664 - DNA, 461 bp, Zea Mays
ctctgaatcgataaccaaccccggccactcgatcataatcccacgaccacgacttaacgcccccacactctatctttgtatgcccgattaggaaccgacgaatatgatttgatacgaccaagcgttatttaggttccgatctggaccatccaccgccgatccgatggccagcccagcttcttcccaccccggccaatagggtacggcggggcacaggctctgtcatggcggcgcccatggacggacttccccactaccagctccggcgcccatttctagttcggacagatgctacacgttgcgaagagagaggcaaactcaatggaggcgtccttaccaaggattagcatgccgacgaggctatccacgcaccgtggcggatccgcggcggagtttgcacgacggcgagcaattccccgccacccagtcggtcattgcacccggagttgtaacaaacatga

SEQ ID NO: 167665 - DNA, 771 bp, Zea Mays
cataactatatatgtggatgtgatagaaataaatgaatggattgcttccaataatttagaagtacgactgtagtagcaaaggtgatggaccgagtccgatccgaaagggtggacagcggacaggtggttggtgatcagcggaggaggaacgacaggaatcatcaataaagctccgcacctaataagcctgtctcccagatgcgtgatgatcacgtggtcgacaccccccctatcaatttctctcttgagactgtgacagtgtgattgcgattggcattgccatggataaacacctgtacgtgcatgctctggatcagatcgttgcacgcgttttgcatgtgttgtgtacagctacatacctagcgctagatgtcctctcatcctctttccatatataaattctgtccatctatccagatttagcttgcagtactgcagcatggagaacaagaacatgcttgatgcttgtacaagcggtcaacggtggccggctggcaatggcatgcatgattggaacaccgggctgggatgcatgattggagcggcggacagccacgcacggtcgacatgggacacgggagtatgggacacatacacacttgacgttgaccagtaattgattccatcgtcattaatccgttactccctggggctttcttacattatcctaaaccggacattaatatatctgaccatctatttttaaacctcattttaattttgtactcactccatccaaaaatatagttttttagccctacttttttttca

SEQ ID NO: 167666 - DNA, 517 bp, Zea Mays
gctgcccacgaaggggtccttcacggtagcgctaagaacggtgaggatgagacaatggcttaacggagtccctcggcgaaattgggtggtttgcgcaagcactcgggtgcgtgatgcagtgaggaagcagcgctcgagctcaatttatagagggatggccggtggtggacgggattcaaaacatctcccaatgcgctggcgagctcacctgcgcgggcagggccacggcgagcgtccgctgaactccttttagccagattgtgccacctcacggttacatgcgccacatcacggaggatttttaccacggccgcaagtctgagcctcagccgcggtggcgttcttatccccgatgaggtttactgaaccacggtgaacagtgtgcctgctagcccgaattcaaatgaatattgctccccattttttgtggttgctcgcaaacgaatctgtatcaaagttgtaccttgatcaatgttctttcattttgatataatgaccatgtcgaaaatcctcacgg

SEQ ID NO: 167667 - DNA, 494 bp, Zea Mays
atcacagtttacccctagattttggaaaagtttttatgagaatatggatacaaagttgaattttagtttggcttaccatcctcaaactgatggataaactgaaaggactaatcaagtattggaggacatgttgagagcttgtgcccttcagcattgtagtagttgggacaagagtctaccttatgctgaattctcatataataatagttaccaggccagtctgaagatgttaccgttcgaggctccatatggcaggaagtgcaggactcctctatttttggaccagactactagaggaagacagttctttggacctaaacttattcaagaagcagaagaataagtccgtataattcgagagaatttaagggtggctcaaaccaggcaaaagagctacgctgataatagaaggaggccactggaaatttgaggaaggtgattatgtgtacctcaaggtgtcaccacttcgtggaatgaggagatttaaagttaag

SEQ ID NO: 167668 - DNA, 482 bp, Zea Mays
acaacacaacattggtaaagcgagatcatgggggtgaaaacatgactccggcctaaaccttcttcgtaatgcttgtcaccttcatcgaatcatgtgcacaccggccaacaacaacccattgttgatgtaaaacatttgaattcagcactgagcaggtaaaaaggaggaccactacaaaatgttttaataccaaactcagttgaagcttcaaactccacacgaaaatactttttttattaccctaccaacccaacaacaaaactcaaattgtagcctatataagcataaccacgcccatgcacaatgcaaaaaccaagcgagatctgccaacatggcaccagcaagaagagcttccacgcgtgcggaagcactcatcacgatgtcatgcgtggtggcactgaccatcgtgctgctcgcgcaatgctgcgtggcatcctccaggtcactgcagctggtctcctcatcagtcgctaatgcaccgg

SEQ ID NO: 167669 - DNA, 681 bp, Zea Mays
ctcgggctcgttttggctcgcgagccggctcgagccaagccgagcccgagccaaatttccacccctaaggacaactataggtattgctacaaaaagacgggaaaattgattaagatgttagccatagaattaaagcggatggatgaagtggcatcaagcatctaacgttctatatgacgagggtactacagaacctaaaaggcaatcgggtcatggcagcgacaacacttccctaccctactcccccaaaatctcccactgcatcaaagggcttcgccgcaccaatggcgtcccaatcgtcgccagaacccgcaccgaccaagacggggctggaaagcatggagggccttcatcatcgacaaagtcatctctagggtcgacacatgccccataatggcactcgtctgcgccagcacgcacctccacaccgtcgtcaccaacgactccctctggcactaaggatctggggatcgatgtgcccgtcaatccagagggtcggcctattccctcctaggttcacaatgttagacctcagtcacctttgtctctcttatagcaatagaggaacgagttgatcatttcatggagtccactatcgattcttcatctgtgatgttgctcgttgattgcttctgtttggccatctttcttaagacggtaagacgagacaaggcgctgaac

SEQ ID NO: 167670 - DNA, 604 bp, Zea Mays
gaccaattcagcatcaccagcagaaaccaaaactctgtcatcaggcacgccggcctctaaggcgacctcctgactcgaagctcgtgctgctgccatgcaaccagaatgtggaggagaagacccaacgtgaacatccatggaagtatgagaaggagaacccgctcggacaccctcgggggctgggtcatagctcgcgctacccactcgagccggatcatcaccggcaacaccctcgggggctaggtaaacgcaagcaccatccttggggaccgagttctctgtagcagccacctctaaggctgaaggattttcagccacttccatggggacggagcaatccagatcagcctcttgactcctaaaaccgcactccaaggtcgaggaggcacgagacgctgctcgggataattctaacttgacagcaggcacatcagcacaaatttccatcatcccaccatctaccggctccgacaacaaatcttcagggaccatatcttcgagagtctaatcaaaatttgccagagacaattcttgcagaccaacgagagcagacaaagctggagaaggaacaccactactctccccgctggctatgtagcgctga

SEQ ID NO: 167671 - DNA, 1382 bp, Zea Mays
ggatttttctaccattttctagaatttatttggttctggaagaaaaagaaaaagacaaacttgcaacagttctgggccgaattcaaactaggaggcccaacagcacatgaaaccggggcgcgtgcctgcgcgcgcccgcacgctctggctattttgcacaaagggcctcggtttatcagctaattcggagtaggttcatctactattgcacttagtcgctgacaaatcacaggaaagaccctaaggttctatttctctaccccgacaggtccacgacggcgctcagcacggagagcttgactccgacgagcaagaccggccggaaggggccaagaccggtgctccacgttggtctaaaccaaattcagggccgagtgaaggttttccccaagttaatttcataaacaactacaccaatgtctcaggccacggtgagcgcggacatcacggcaatacagttgtgttccgagcgattggcgggttcctagttcaaattggcgacaccataagcatcacaaagttatgagagtgctccaacgaagaagcaaggagcgtggactgaccggaaaaagggctggccgcagtgaggtgttcttcgcggcggaaaaccaatttgggggaaacgagaaatttgcgagctctagggggtgattcgaagcacgagttgcttcactggttgcgtaactacctaaaggagcgaatggtggcagcaatttatagcctctaacggcggtggcgcccaattttaccgggatgtgctggcggtcggagagaacaatggtactggcgcgtggaagatatggctttcacggtggcggctcctccggcgatcaccggccaggtataggatggttagctgtgacgtggtaaggcgtttggacacgcggcggacggtagggatgactcaacagcggtgaaacctcatccgcgtgatcggtgaacaaggagaggagtaccacggctggccgaggtggtacccagctcaccggcggcaatgatccatttccccgcggcgttatccacttacccgggcgtgaatcttgacgccggtcggcacggatcatgacggaggtcatcggcggtgagccgagctgtcgatctgatccccacaggtctactgtaccatgggacatcttcgtcagtcacctgaaacgacctccttccatcgactagttctcataattcttgtgaataaccgggcaagattccttaataaagttcgttcttgattcaacagtcttcaattcttatacatgacatttgggtcaagaccgagggaatccaaagatatggcgcatcaaacttgcactcatctaactgaaaccttattttatccttaggttcagtttgagttttgtaatccagtctgaccgagcgacttt

SEQ ID NO: 167672 - DNA, 460 bp, Zea Mays
tgccatcattattgagggtgatcaacctatgcgtcatgaagatgatgtcacttgtgaaaagaggcagaagaagttcacatctaatgtatggtagtactttaccaagaagtggttggttattgaggacaatgggaagacatgtttagttgtgggctcattacaattggccaagatgcaagcacaagggtcgatgtgagagtaattatggaacaactggattttggacccatctaagggtggcataagggtcaatatagtagctcaaagctaaaaatgggggaaagacatcactgctatggtaccatacaaatacggtgaagaggctagctggagagagttttacttagcaatatcatgcatgagtacccatttaacatatctgagcatgagtattttgtttactacatcaaatccatgtgtcctagctttccaatcaaatcttgggtcaccattaggaagg

SEQ ID NO: 167673 - DNA, 478 bp, Zea Mays
aaaagacagagtgcggtacgctgatggtggtcatataggactgggagaaatgattgcctacatatgagttggaccaatggtctgtttgtaaggattctattcatttgtgtacaaaaaacaccatctaactaccaaatttctgcatcaataaaattcacctagaacatatatgtgttcagtggactgatgatccagacgtcatcatgaagttagaaaattaccattctaccttgtttggtttatttggaatggctgaaaactcaccactatattaggtctgttcttttcaactgccagtaaggttttaggcattgtgtcatcaaaggtatttagtatgagatgcagacgccgtacttgagcaccaactgggcaatacaaatccgtcatacgctatcatgcatgccatccacctctgcatgaactgcatactcgtgaactacaagccttaatcacagtcacacctacagtccaaaataag

SEQ ID NO: 167674 - DNA, 850 bp, Zea Mays
tttaattatgttgacatctaaaacaccaaaacccataagggacctttcagtcaagcgtgtcccatctggtggtccgagcgggagtatttataggctaacaaggggaccaggggctaaatacgtttgtacccttggttagccactacattccaagaatatattgtacaactgaataactttagaacaatgccaatcctagcttgattacactaggagttagacccacgagggaggctgaagagtaggctagcttgactaatggaggtaggcccaccttgccttattgtcttgtacttggtcttctagttccaaatcttgagaggccttcgttttggggcccttgccttggagccaccatcttgaagtcttcatgctcgatgccacaaggcacctcctaggcacccaacaaagatgatgtccttagtgtagcccaagggctccgctctggctcatgcgacctccttcttgtgggacattaacgaaatcctttggggggcattcacctttgggaaagttgagccctcgcttgtggcccacctttagagacttcttgacttcgctgacacctaccagagtttgcgtcatcttattaggccaccacggagtctctaccttcaaaattggaattcagctctgatatccatagataagattagtgaagggttcactggtcacttaattggatgatcgaggtctagttcggactttgtcccaagaagtactattatagcagtgatgccccatcctcccaatatcttttacacatcatttgtatcaaaatctaatttgttctattttatatgtttttataggaatcattctcatattgatcacggtgaaatgggaaata

SEQ ID NO: 167675 - DNA, 686 bp, Zea Mays
ccccgaccatggacggcggagtggttgctccggcaaacttgtaccgaccactataccctataatcctagctcgaatttgctctacacctaattctacccttggcgctccactgggaatcaccaattaaccctgaacgccatcctagagcttggtctacgggcacccgcagatttgaagctttcccgactcgttcccaatgatctagcgcggtatagttcaatcggccgagccgatgagcatcacaagcgtacgagagtgttgagacacggacaagaaggatgaggatggacctgagggtggctggccacggagcggcgtcacacggcgtcgcagactaccgatttgggggaaaccctaaattcttcggctatggtggctaatcgggggtgagggttggtgctctggcttcgtaacaatctaacggagcaggcctcacactcaatttatagcatccgtaagcggtggctccgaatttgggaagggtaagctgacggccggagaggaggtgagtcaccggagtcgcttatcgtggcatttactgggcaacgatttacggcggccagtgtctagtctttacggaccgcgacgacatggtgaaatggcttaaggcgtgtcagaaccgaggaaaacggcgacacgacggtggtggtcgcgtggccacgtcgccggtgcaagtgggtacggc

SEQ ID NO: 167676 - DNA, 790 bp, Zea Mays
gtcggcgtccctgtatgtgtctgtttgcgcacgcgaagacgacaacgaggaaggaggggacagctcatgccttaacacctcctcgcctgccctgcccacctaccgaggagaggagaggaggcgagcattgcatggatggatggaccagtggttggtcatggccgctgccccgtcgtcgtatccttgctttcatttgatcgctagcggtggccgtggcaacggatcggctagatggtttaagtttaaccaacacgattacacgacccgatctctgcaaattaacccacgcctatcacactacactggggggttcgtacctgcggtccatgtgtgaatgtatgggcttcctgagcctgtgcgttctttcatttcaaaacataattccgtacgtcccaactcatcaaatctggtaactttcggccaaacttgtgtcgcgtctctcacgaaacaagttggcaatctcgatttcgcgagtccccagtacgatgccagccttgggtaacatgtagtgcatcggatcgacaacagagagtacgagtagatgtattaccggcgtctctagcaagcaacaacttgcacgcggcaaagtgctcaaatgcagcgcgcacacagacgcctaccataccagctggctcgatctatcaaaagagacaggccacacccccaactccccaaggccccacggtttttttgacgaggtgaggatgggaaggtggcccacctggcccttggcaccaagactaagtcaactatccaatggatcaacccggccgattttgacccatttcca

SEQ ID NO: 167677 - DNA, 900 bp, Zea Mays
gcggctagggttagagaggagacaggcctcccatccatcggatgcgaaatcaacgacccaaaactcactctctcatctgggctcccgacccgtgcgaaagaatgccaaaaaagatctactgtttctttgaggtatgtgcctcctaaaactccaaaccacaatggcacagagcacgataaaaagaggaaaaagaaatttaacttcttttcagaaaattgggtatcacactctaccccccttaaaaagaattcgacctcgaattccaaccttctatcagaacaacaaaagagagatcagcgaagacaaaaactcacccataacgaaaagtttggggtacttctgccgtatcagctcctcaagttcccaagtagcctcgcgctcatactgaataatccacaagatcttaacatacttaattgttgtccttctcatgacatgctccgaggattccaagatacataccgggcgacactccagagtcagatcttgctgcaccgcaatcggttccaactcgatttgatggtctggatcccgcaaaaacttcctcaacatagagacatggaacaccgggtgtaaccctgccatggattccggcaactgcaaacgataagccaagctgccaacctgggccaagatagagaatggtccaatgtacctcgggctaagcttcccggagacaccgaaccgaacgactcctctagtaggtgataccctaagaaggacttgatcacccacagcaaattccaagtcccgcctcctcacatcaggataactcttctgacggctctaagcagccaaaatattctgatgaatctcctgaactttctcagatgtctgctgaacccaattaggaccgaccaaagatctctatcccaaagtctcccagcacaaaggggagat

SEQ ID NO: 167678 - DNA, 620 bp, Zea Mays
atttgtcaatggcaaccagcacgtgagtgtatcctccctgagctttcttgaagggtccaatcatgtccagtccccagcatgcaaatggccatgttacgggtatggtctgcagttgctgtgctggtaaatgctgctgctttgataagtattggcaagcttcacacctctggactaactcggctgcatcactctttgctgtcggccagtagaaaccagacctgaagaccttcccaaccagagtcctggatgctgcatgtatcccgcactgtccggcatggatctcatctaacagttgcttcccagtaaccgaaggtatgcacttcatgaggactcctgttgcgcctcttctgtacaatgtatccccaatgagggtgtagtgggctgattgtcttgcgatgcgttctgctgcggccttatcatctagctcttcttcgtttttatatacttaataataggctccctctagtcattagagtctgactctggctggctcaaaacattgcactcttctgtccgatctaaagaaatactcgagcgtggtacttcttggacgaaaactccaggtgggacctgggtccgactggatccttgtttcgacaacgcgtctgctgccgcattgc

SEQ ID NO: 167679 - DNA, 333 bp, Zea Mays
cgcggtgctcaccacgtgagtcgtgcaagagatgtataataacagatcttcagccggttgactcggcgtggctcggtgcggcggctttagcactggcggtgttgtcaggaatttcttcagtgcatctagagcttcttgagcctctgaagtccactggaatttgtctaccttcttgagcaacttatagaacgataagcctttttctcccagccttgatatgaatctgcttagagctgccatgcatccggtaagtctttgtactttcttctgtgatcgtggtgcttccattctcatgatagcctcgatcttttctggattggcctcaattccctg

SEQ ID NO: 167680 - DNA, 539 bp, Zea Mays
ctcacctatggacaatgttcacataactccctaaagtatttttagttcattttaccccttcgctcctttgagttggtttagtttacctcttaacaaaatttgtgtttttcatttgtttaagtacaatttgagttcagttcaaattttgttgcttagtagctaatatcataatttagtctagaaaaatatattatgatttgctgcacccagatcaaggacaacatctagatacatctcatatgtgtgctaggattaagttttatacatgacaacttaggatatagaaaccagtgtcacaaaatttattatataagtatggtgtctttacaaaaataactaaataatagaaaccaaatgacaatgacgacaacgacgggggctacgacgttctcgctaacaagccacacgctggttgaccggagcaacgacaaccttgacgtcatcaaagtctacatagtagtctttctcttgttgacctgattctaaacaaatcttgcaaggttgagctcacctacggtgggggctcagcaagtgtggag

SEQ ID NO: 167681 - DNA, 341 bp, Zea Mays
gtttaggagagctttttttgtaatgatatttgacttgacatctatatcaaactttgaactgcttttcacactcggaacttatggggaagggacttttatcttctttgcactgtttttttctgaaggggaaggtgatgctgatctgaattggcgcttcaaagatggagtatccatgaaatcatcatcggacagtgtggatggagctgaaggaggatttctttttacacgacgagcttgtgcctttctgcgaaaacgatgaactggtgctggttgtggctcagtctgctgctggttatgtggattatcatcttgatgtgctgagctgctagatcaagttcgtc

SEQ ID NO: 167682 - DNA, 282 bp, Zea Mays
ctcgcttgtatatgtgtaaaggcttgtattatgaggttgtgtgcccccgcacacttggctatgcctgcgaaggcgttgtgtacttggtctggtgtgttttgttatgctatgctggtgcgcatatagtcggtcttggcgcggacagtttggtgttgtcgtttttgcttttgttgtgctagtccggctgcacccttaggcggcttctgcacggatagtctacgcggtagactttggtttctttgcacttgttgtgctagtccggctgcacccttaggcgacttc

SEQ ID NO: 167683 - DNA, 742 bp, Zea Mays
ctccccgtgtggcctagccactagcacaaccccgacccctataggtgatgttggtcataacatctttccctgcctctttaaacatctcgtactcgagttggatgtcgaggtaaaggtccttgaattgttgaagcgactcccaaatggtgccgttgcagggcaggtcacaccactaaacgcagacgttcaagcgccaaggcgtagttgggcgtgcaacacacgctttggcgcatacaatagtcgatcgttttgtacgggcgacatgtgcggtggattcatctgaggttccctgcggaatggcttgagcagcccacatgtaacgtgttgtggagacaagcaccctctagaagctaaaggtgataggttacccactcaacacgctccagcacctggaaggggctgacatagcgtggcacgagcttgcccttgcccttcatgaagtgtttccacttcttgctattcttctagaccatcatcacatgattagagttctttctattgctcttctcagctgtcttaaacatcctatgcaactcgtgaaggtcttcaccatgctattcacgtgaaagttcaaaatgaatgccttatatagcgtgaagggagagaccgaaggatcacatccgtagctagctcatcaataagagcgaaatcaagctgtcaaggaacgtaacccatcatcccgattacatgagggctgactggacttcctttcagttagcttgcatgtaaataaaaaaaactc

SEQ ID NO: 167684 - DNA, 967 bp, Zea Mays
gaaggacgacacaaattgtcgtcactatgggaagggccattcatggtagcagaagtcactcggccaggatcatatcaacttactcaaatggatggcacggaaatagggaattcatggaatatagagcatctcaggaaattttacccctagctagatttcaaaagctatcggggcagcattgtattctgtaattggaaaagtacatcatcaataaaaagacttcattctcaaaggcactcgaactatttattatcgatctgcatgcttacttgacttagggtgaccactataccctactaacggagcaatcgacttaagtcggcagtgacttaagacggtgcaacatgctcacgcttacttaacttagggtgaccactataccctactaacggagcaatcggcttaagtcggcagtgacttaagacggtgcaacatgctcacgcttacttaacttagggtgaccactaaaccctactaacggagcaatcagcttaagtcggcagtgacttaagacagtgcaacatgctcacgcttacttaacttagggtgaccactataccctactaacggagcaatcgacttaaatcggcagtgacttaagacagtgcaacatgctcacgcttacttaacttagggtgaccactaaaccctactaacagagcaatcggcttaagtcggcagtgacttaagacggtgcaacatgctcatgcttacttaacttagggtggccactaaaccctactaacggagcaatcagcttaagtcggcagtgacttaagatggtgcaacatgctcacgcttacttaacttagggtgaccactataccctactaacggagcaatcggcttaagtcggcaatgacttaagacggtgcaacatgctcacgtctacttaacctagcataaatatgcttacgatcactcatcttagggcggtctctatgcctcacaaaacaggaagaagttt

SEQ ID NO: 167685 - DNA, 512 bp, Zea Mays
ctgattattagctggtgcgccaggattttaaacagcagctagttttctcaaagatccttctctttgaagtttttgttgtttgtgctactagtctcctaagaatggctaagatgacaggttatgcggtttgcatacagtattattctttcttttgctcatatttacttaaatgcaggccaactatgttgtgggattcatttcctaaggaattgcagattactatcatggtagaagtagccgcacgcaccatctttgagttattggttttgcatttagctagtgatattaaattcatgataggtgccacctacattccaagaagaaaacaatgactagtagcctctccatgtatttcattttctttttagagttatattggtccctgagacccgtgtgtaacgtgttctagatttgtttcgcgcgctgcttgcattacttcattactgactcttggtattgtaatctccaacacactaaacaccatgctttttgtgctctttagagcatctcca

SEQ ID NO: 167686 - DNA, 476 bp, Zea Mays
cgtttaccacctaactaccgtaggaagatcataaggcacattccccgaggtcaagaaaggaagagccacaattcgcccgagaccccgctcgacgatcgctcaaaatgtctgtcttgtccgatcctgtcctcgggcgatggcaacattcgtgaaaacctcggctcgcccgtggtctcctcttcacgggacgctggttttcgtctcgccggagcccatctcggacaggaggacaaccccaagcccagcctcagtcaaaggtcacgggaaccgtagagacacaagcatttaatgcgaataactaccccacgtgatgccacaatcaaatagggagcgacgggaccacgatcctatccactttcactagctacgatgatgcatgcctgggaataacgaccactgctccccacatcgtctattgtacccaaacaactccggatgggacatgcgtagggatggcaacgggtacatactcgtcg

SEQ ID NO: 167687 - DNA, 718 bp, Zea Mays
ggggcagggggtacttgttcttgaaagtcacttcattaaaagatctataatcaatgcacatcctcttcgttccatccttctccacaaatagcactagggctgcccaaggtgaagtacttggtttgatgtagccttactccaacaactcatcaatttgcttcttgagttccaccaactctggtccggacactcgatataggggtggtgcctgggataagatctatggcaaatacaactttcctttcaaggggcatgcctggtaactcctcaggaaacacatcagggaattctgacacaattctgatatcctcaattgggttggcctctttgtcatctactgatatacggtgacaggctccttcttctagttcaggcaagtacattttagttactacttcatttccggatggggacaccaacttgactgttctcttgtcacaactgatagtggctctgtttttgtgtagccaattcatccctaggatgacatctaacccttgagtacccattacttctaggttagcgaggaagtctatcccccttatttcaatccttagattcggacaaatcctatcggactgaacttttccccaactaaattaactcttaaaggtggaatcattggttctatgaggatgttatgtgcttctacccaagatgtagaaacaaaagaatgtgtggcaccagtgtcaaataatacttttgctggatgggattc

SEQ ID NO: 167688 - DNA, 975 bp, Zea Mays
aagaaaaaaaaagatacgcctactctcactcctgtccgaccattcccgtgcccttgaataggaccaattgcccttacacatgcacgcagatcgccaagatcacttgtgtgctagacggaagggaacaaactcgtaggccgagacgatggccgcgtccagaagagcggcggcggctatgctgtgcctggccgtggcggttgccgcggtcctggcggcggagaagagcggggcggaagcggaacggccgggatgcttctgcgactgcatgaagaaccggtgcatgaccctcggcgcgagcgcggcggacaagttcgactgcgcggccgcctgcaccgagggctgcgcgcagatcggtcagccgggccagcccagggccgacgacttctgcggtttctgagccgcacgctctctcgggctttgcagattatagcaggccggcgtaggctcgatctatccggtgaccggacggcccagttggatgccgccacgaccacggtccacgacattcatgcatcgtatgtgcatgcatgtcccatagcaagagtctaaataaagctggttgttattatttcgtgttactcctatgtccgatagcatatactacaggattggattcttgtctcacgcacacacatactgaacacaaagcccatactagattcggatcttgcctttcacgactagattagtagctatgggtcgatttaattaggagagctccaaaactttatagaactagattttagaacaacttgaacttcgagagctgcgccatgaatgttttgagtctaggaagtaggaacagtatttttgggagttgcgctatggatgtttttttttgttgttgtttacagacagtgagcctgattgtaccactgattgagtctaggaacaatattttaatttgggagttacttgtacctgtaaaattgtacccctcgaccctcgttgagttaccccactttgtatccggcg

SEQ ID NO: 167689 - DNA, 458 bp, Zea Mays
cggaagccgtcgggtggcacctaatgtaagcctttgacatggggcctgccagcattaagtgtggacgggatgcacacttgctcgtgctagtgtcaagtggcgtgcaccccacattaaattcatgcaatgtgcttagtctgcaacgcatgggctacactgttagtcacgtgttaccaaggcaagaccattgactcattgcaccacctgggtgaccttcattatggcctctactattcctcatgatttgccgaggcatgatgagataggtggaggagacaagatgactacatccatacactcctatgcatgacatggtattaggctacgtcgcaatctacgccaaggcctatgcctgtgttccaattagacgaggcaagaggataggatgccaacagcctgcacgacgatcaagaggagatacacgcctagaagatctagcaccgccaactctacccgac

SEQ ID NO: 167690 - DNA, 1202 bp, Zea Mays
tggtcgaggagtatcaggggcacacaagaacactaaaacgagagggcagagggtatgagcggacctgagacgagctgaccacggcgaggtcacaccgcacggtgttcttgggtgatttaggggaaatcccaaattggggagttctagtggatgattcgaggcactggttgctctgctgggtgcacaattacttagcggagcaggcggggtcggcaatttatagcaggcttgagcggtggccagtgaatttgagagagacgcgcgacggctggagaagaaggttactagcgcgcgcaattggtggcaattaccatggcaagctccccggcgaccaccggacaagctaacatgagtcacggcggtgaggttaatgtgtcaaggcacgtggcgcaagaccgctcagtggctagctccggcgaacccatccaactcaactgtggtctgctcgggtacggtggccggagtaaaatagtggtcggagcgtatccacggcgtgatatttacggatccccggtgttatccaactgatccgagcgcgaatcaccacggcgatagcacgaatccgcgcgtggctcatcggcggcgaggggatcagaacctgatcctatctgttactgtaccatgggattgttcttcagtcagcctgacagcccaagtttggggcgaatttcctcctgattttacatggcaacaagaccattgttctgtagcaattgtagcctaatagaccagctccaactttgctacatcgtgcccccacaaaaattcacaagatcttgcttaagattgagccctaagttcatccaatcccactgtcaatctgaattcaggcttagggtagtgtgacagcccaactttgggctcatttttctccaaattcttcatgtgaccatggtttaatctctatagcaaagttattcccctttcatagctctacaaatttgatgtactggccctaggcaaattcttaatatttttggatctacagagccctaaagtcagccctatttcactgttttctaactcaatcccttggagcactagggtggcctttttgcaaataagcccaaaacttatggttttatttgcaggtctccaaatatgtgaatcatatgacctaagataccttatttccatgatttttgcacttaggtccaaaaatgtgcacattttgcatacaaccccttagggtttcaatctag

SEQ ID NO: 167691 - DNA, 336 bp, Zea Mays
caaggataatggaaggggatttggttaaccagtttgcgctcttggtgttttgaggaagtcgattcggcgtcggatgttgaaggcgatgaagagtcgatatcatagtacaccaccttcttcatcttcttattcttgacgctttcttcttgtgcgtcttggaggagccttgagtttctgatttcttctccttgtgcttctcccccgaaggcgctttgatttctttcgacgataacttgtctttgggcttggttgatgaagatttgatctttcctctaaagttattttctcttcgggcttctctcccgagggtgccttcccgttcttggtgacttttcc

SEQ ID NO: 167692 - DNA, 521 bp, Zea Mays
cgataatcgatgcacatcctcctagtgccatctttcttctccacgaataggacaggggcagcccaaggcgaggtgcttggcctgatgtaacctttctctgacagctcatcaatctgcttcttgagttcaaccaactctggtccagatactatgtaggctcttttagaaatgggggcggtgccaggaagaagctctatagcaaactcagctttccgcttaggtggcatgcctggtaagtcttccaggaacacatctgggaattctgacacaaccttgataatctcgagtgaaactggctccttgctatcaatagccatctgatgacaacttcctttccttggttcaggtgagactaactcggctaccacttcttctcctagtggggacaccaacttaattatcctcttatcacaactgataattgcttggtacttatctagccaattcatccctaggatgacatctattccctgagtactcattactatgagattagtgggaaacactaccccccttatttc

SEQ ID NO: 167693 - DNA, 695 bp, Zea Mays
attgagagtaaatcctgctccaacttgctctgtcaggcatcaaaaactgaatctctgatggtacagtgccctcaacggatcagaacaagcgcagcagaagaatcccaccgccggtgatctccctcgccgtgattcgtgtcgccggcatcaagattcgcgtgcggggtggattgataacatcgcggggtaaggatcctcgccgacggtgagctggaggtcactccggtgactcaccgtggctccccttctgctttgcggctgaaaccgataagctcgccgataaccgccgcctcccgaccgtgcgccgcgtggcctagccgttctacagcaccgccgtgacaccttaaggctgtcccatcgtcgccggggagcctgccacgccgcgggacacgaattcactgcgcccgccttcttctccattttcggccgccacgcgttctccccgaattcactggccaccgcttcccctcgctataaattgagtgtccccgccactccgtatgataattacgcatcagttgcaccaaaccttgcaccggattatccaccagtgactgagaattgctcatttcccccaatcacggtttccgccaccgtagaactcaacccccgccgcggtcagcccaactcaggtcagctcttcccctctgctcccttgtctaagcattcttatgcgcctgtgatgctcacctacc

SEQ ID NO: 167694 - DNA, 1457 bp, Zea Mays
tgcgccgagcagccggcttatataaatggaccggccagcccgagcgcatcctagcgtagggttcctctcatcgcctgttccgccgcgccgccttctccacccttcgcgcaccgtgttcttgtcacttgtcggcacacatcttgctacggtgttctacgcgggatttgctgtctgtgtttctctttcattgtcttccatgtaggtttgatctacgcgccgccctttcattttggttcctgatgctttcttccatgattccgcttgcggttcgcctgatcggtattgacgaggaggtagtatgatggcgatgacgaaaaactatggttcgctcgtctgatcggcggcggggtttaatccccactgccttgctgagcttaaaagtagtccgagccactcgtttccttcctctgaacccagatctggtccgcttttttccgatatgtggctttctgtgcggttctgccgtgatccgcggtctccaatctgtggttttctgagttgttctgcggcgttcgggttcttaattttttttggtattggtgttgcgatgatgatttctcatcagcttagagatctgctcgatgagcttgggaaatgatcttgcattgtttcctcctgagcggttacctgagcaacccaacaatccttatccttgatttgtgattttgcatcgatgtagatgacattgttttggcaatgaaaaagccccataaatagggatccagacgattcgttttccaagtactatcatgcttgacagagttcactgaatttcaatatacaagtacacagacgcgggcaacgcatctgcgacatgaatattttttgttgcgatgatgagttctcatcagctgagagctctgctcgatgggcttgggaaatgatcctgcattgtttcctcctgagcggttacctgagcaacccaacaatccccatctttgattcctgattttccatcgatgcatatgacaatttttttgtcaaaaaaagattgcagatgattcattttccaagtaatatcatgtaaagccgagtcaactgaattctaagatacactaacgccaacaatgcaccttacacgtccaagtatgtaacttgagaaaatgagaaatatctttacaagtgcatgacaaacaaatttaaaaggcttgtgataattctgcaacttggagcaaacaaactgtaacacaggcacacgacaacggtcccaattggtagagctggttgactaggcaccttaccaccttgtccttgccgaccaggctctttactagagatggcagcggctaaaaaccgctggtattatttgtccaaactcacttatccaaatacatacccgcaaagaaaaaatatgcccgctaaaaaactcatattcatggcaggtataaaattttgtccaaacccatatccatgcgggttttggatatccaatgggttttttatatccactaacatca

SEQ ID NO: 167695 - DNA, 430 bp, Zea Mays
cgggtgtctagcttggatcagggtgccggtccttctgttcctgttgctgaggaagtgtcagtgcctgaatttgctgaagctgaccccaatgggtgtgacccgtctgatgctgaccccaatgggtgtactgtctgtgtcgttgatgaggatgatgaggaagaggatgaaatccctctaattcggaagaacagccggcgttacatacctagtggggaaagtagtggtgttccttctcctgccttgtctgccctcattggtctgcaagaattatctctggcgaactttgatcaaactcttgaagacatggttccagaagatctgttgtcagagccggcagatggtggcgcgacggatgtttgtgctgatgtgctcgatgccgggttggggtcatctcgggcagcgtcccgcgcctcatcgaccttggagcgcg

SEQ ID NO: 167696 - DNA, 521 bp, Zea Mays
atagatttgggggaaatcccaaattaaagctctctggtggataatccgagacacgagtgggtgtgctggatgcttgactacctagcggagctgatggcacgctcaatttatagggcccgagtgcggtggcttttgaatttggcatggcgcactggtggccggagagagggacttagtcactggcgcggttgaccatggctattaccgtggcaaggccttaggcaatagaagggttgtgtagtgtggtcagttgcaacgtggtaagatgggtgacggcgtggcataaccgcgaggaacggtggcacaacggtgatggtcgcatggtcacatcgccggcaagtggatgagcgacagagcggctactgtgctccaagttcatccacggcgagatctttttacctagggatcgttatccacatttaactgggcgtgaatcgcggcgccatcgcaaatccgagcgcaaggtcaccggcggcgaggcgggctgaacctgagatatttctgcagacactgtaccatca

SEQ ID NO: 167697 - DNA, 523 bp, Zea Mays
cttgaccaatctcttggctctgaagaccgccttccaaggtcgacgatgcacgagacgctgcccgagatacctctaatcccacatctggaatgtcagagcagatgtccatcatatcaccatcagttggctcggacaacagatcttcaggaacaacatcctcaagagcctgatcaaaattcgctagggataattcttgcagaccaataagagcagacagagctggagaaggaatatcgctactccccccactgactctgtaacgtcgactgttcttccgaattaatgggacttcctcttcttcttcgtcctcgtcaacaatacagacaataaacagcacagggtcacacccattggggtcagctccagtaaagagttccactagtacttcttcagcagcaggagcagaagggccagcatcctggtccaaacacgacactcgccgaagccgtctctttttctttttctttccctcggaaggtgcagttggatgactgacctggcagagacatttcgggcgagtacc

SEQ ID NO: 167698 - DNA, 557 bp, Zea Mays
gtcattgggttcgtttacccagactactgctattccatccagaaataagggagaaaaggaaagtcgctacctcagcatctactggtgtgtcaaagtcaaagaaaatcaaggttttgacatgtaacccaggtgcatcgagacggacgatgtgccgaagttaattgaaagggtgaaaacaaccgccctggccatagagactgtttcagttgtgcctattgaaactattgtggacccaaccacagagctagagctgaaaaaggtagcagaaagagtaccagagtagccgaagatgaaggggacaacactagcgaagccgccagctaccacaggaactccgtggaagaggaggatggctactgtattggaagctgttctagaatctgtgaaaacgccgcctccttcttctgccgaagcttctggcagtcaaactgaaaatgtcccagagatgattactgccagtacctctgctcatgccgaggcgggaccttcggaagttgcaccaggaaatcttacggaagagagccttccagagaaaccctcggcgcctgctcccgaag

SEQ ID NO: 167699 - DNA, 709 bp, Zea Mays
ggcccgcctatgtatacataacctattgatggatttgtatccctaagttgatagagaatgtacattacacctatttttggaccccttcctgttgtgtctggtttttgtttttcttcatattccttttaaagcgctttggaactgtcctagaatggacatgtgaatgtcggaccgctccatgtgatttcctggtcagcaaccacaacattgaggtgttggcgatggtgtcgctagcgctctctgccagccttcccttcggaccctagaacatgggatctaggaggaggtttgggtcctagctcttcagacaagagagggcgtactcggtcgagcctggccactacatgccccttggactctaggcgggataacatctggcccttgaattgttctagctgcccagccatcttgccgaagccatggatgcagtggctcaacattagctccatgacatcaccctctcaaagtcggcaacagacatgatggattgcattttcttgaagcagtccaccgccatcctcttcgtctcctactaggcctaggagcttgaattagggcccagggccaccacactgttaccggcatggttgacagtccactcgccacacgctttaacaacttgacctcgcgtgcagagaatacaacctcatgtgctgtcagcaccacctcatggctagagagggccttgtcagcaaccatcctcgcttgg

SEQ ID NO: 167700 - DNA, 401 bp, Zea Mays
gaattttataagatatacgctcatgaagctggttttgctgtacgagtaggagctcaaaacaaggtggtcggtgtggttgagaataagaggttattgtgtatcaggcaaggtttctcgaagaaaactgctaaagtagatgttgttccttctattgtaaaagataacaaaaatgcaaagatgcggccggagacaagatgtggatgcaatgcacaaatatatgtgaagttgggttcacataaaaggtaccatattgcttctatggttgagcaacataatcatggtttagtctcgcctgataaagttccctttcttcgatcaaaccgctcaatcagtgaaagagtcaagacaaccttatttacgtgccacaaagcaagtataggtacatcgcaagcatatagact

SEQ ID NO: 167701 - DNA, 490 bp, Zea Mays
tggaagtggagaaattgtctcattggatggagatgatagtttgtagaggggacatcgaatatcgaacatcatgttcgaggcagttgttttgtacgacttatggatttggtatgtttttggggtggcggggtcaagcaacaacatcaatgtgttttactagtcatcattgtccactggtgtgctcaagaaataagcatcgaatgtgaagtcacggtgaatagacatgagtgcaaccaagggtactgccttgcatgtagcatctaccccggtggttgagtgtttgtgaagatcattccctcccatagactcaaaagcaatggatgtttgctgcatgtcaggacggcgcacgaaaggatacagagagagagagcatttagagtcctcaaagctcactttcatattctcgttagtttaagttattttttctaccaagtacttaatgtgatcatatatgcatgtatcattctgcacaacatgatttacttagaat

SEQ ID NO: 167702 - DNA, 347 bp, Zea Mays
gggaaattgccaagtacatatccgagtgtgacacctgccagagaatcaaggccagtcatttgaaggcagcgggccctttgcaaccccttcccataccatcttggaaatgggaggacatttgcatggactttatcgtgggattgcccaatacctcccggcaccatgattccatttgggtcattgtggacagattgaccaagaccgctcatttcttaccagtgcataccacccataagacagagaaatatgcagaaatctatgttgatcaaatagtgtgtttgcatggtattccaaagactattgtatctgacagaggagcaatgtttgtggcacgcttttgggagcag

SEQ ID NO: 167703 - DNA, 303 bp, Zea Mays
catgatcgaccgacattcttatttaactcagggtgaccactatgccctgctaacggagcaatcggcttaagtcggcaacgactcaagacggtgcaacatgctcgcgcttacttaactcggggtgaccactatgccctgctaacagagcaatcggcttaaagtcggcaacgactcaagacggtgcaacatgctcgcgcttacttaactcggggtgaccactatgccctgctaacggagcaatcggcttaagtcggcaacgactcaagacggtgcaacatgctcgcgcttacttaactcggggtg

SEQ ID NO: 167704 - DNA, 614 bp, Zea Mays
gaaaaacccagtgcaattgtatgagcatggatgcaagagttaccaccctgtgtgatgaattgtgcaagctgaacctggaagttgttccttcaggtgaattaaattatatctcggtggagcccacattacaagagcaaatagtcagggcacagattgaagacaagggtgttcgggttatcaaggaaatgatcaagcaaaaggcagagaaatacaagtgcttccgtcaggaaagcaagggaattctatggtttggagatcgattggttgtccccaaggaccctgaactcagaaagaggatactggttgaagctcacctttccaaattctccatgcaccctggtagcaacaagatgtaccatgatctcagatccttatactggtggaccagaatgaagagggaaattgccaagtatatatccgagtgtgacacctgccaaaggattaaagccagtcatttgaaggcagcaggccctttgcaaccccttcccatcccctcttggaaatgggaggacatttgcatggactttatcgtgggattgcccaatacctccaggcaccatgattccatttgggttattgtggacagattgaccaagaccgctcatttcttacca

SEQ ID NO: 167705 - DNA, 789 bp, Zea Mays
gcccgcaacatgtcttccaaaatctggttcacccattctgtctagccatcggtttggggatggtatgctgagcttcgtatgacctgggtcccaagtaattcatgcaattgctcccaaaatcgtgccacaaaaggtgctcctcggtctgagactatagtccttggtatcccatgcagacgaactatctggtcaatgtagatctctgcatacttctcggtcctgtgggtggtgtgtactggcaagaaatgagcggtcttggtcaatctgtccacaataacccaaattgaatcatggtgcctggaggtattgggtagtcctacgatgaagtccatgctaatgtcctcccatttccaagatggtatgggaaggggttgcaaagggcctgctgccttcaaatgactagcttttaccctctgggaagtgtcacactcggatatgtacttggcaatttccctcttcattctggtccaccaatataaagatttgagatcatggtacatcttgttgctaccagggtgcatggagaatttggaaaggtgagcttcatctaggatcttctttctgagttcagggtccttgggaacaaccaatcggtctccaaaccataaaattcccttgctgtcttgacggaagcacttgtatttctctgtcttttgcttgatcatttccttaatcatttgaacacccttatcctcaatctgtgccctcactatttgctcttgcaatgtgggttccaccgagatataacttaattcaccggaaggaacaacctccaggtttagcttgcac

SEQ ID NO: 167706 - DNA, 631 bp, Zea Mays
gggaagatcatcttgcattggcagagtttgcttataacaacggccaccaggctagcatcaagatggcaccatttgaggctttgtatggcaggcggtgtatctcccctctgtgctgggagaccttgggagagagatccctggttggtcctgattgggttcagcggacttctgaaaaggttcgggaaattcgtcagaatattttggccgctcagagccgtcagaagagttatgctgatgtgaggaggcgggatttggaatttgcagtgggtgaccaagtccttctcagggtatcacccactaaaggagttgttcggttcggtgtctccggaaagcttagcccgagatatattgaaccgttcactatcttggcccgggtgggcagcttggcttatcgcatgcaattaccagattccatggcaggggtacacccagtttttcatgtctctatgctgaggaagttcttgcgggatccggaccatcagattgagatggaaccaattgcggttcagcaggatctgaccttggagtgtcgttctgtgcgtatcttggaatcctcagagcgtgttttgaggaagagatcaattaagtatgtcaaggtcttatggactaatcagtctgagcgcgaggctac

SEQ ID NO: 167707 - DNA, 643 bp, Zea Mays
gggtccactcgtcagttgtcgcacgcgcgttcatctcaccgccatatgggaccacgtcgtcagctgtatcccttccctcaaccaactctccgttgcgctcggctgggatttcgctggtgattcggcctagcgaccgtgcacgacctgtcgagaccgcatcttcctagatgtataaaggctccctcaaagctatccatcccccacttctttctcccccttttcttagcctcgtagccatctccgtgcggcggagaggatttcgacacctgggaggcaaagctctgcgccgcccttgacttcacgccgagcatcggtcgccaccctctggtgggctagggagcatcgccacaaactagagaagctcgacacccatcgtcaccggagtgtcacagacgagaggagcgcgccattacccatcggagagagtgcgccaccgccaggggaaaattgctaaatactattggcatacagtcgggtttgatccgtgagcgttgctgggagctttggagggtgttcgcggtgtcctcgtctgagttcggtgaccagagatccggcgattcgtcaccattgccagtgctccgccgcggagccgcatcgtcgcgtggacagagcattcaccgccccaatttgaggtaaaaccacc

SEQ ID NO: 167708 - DNA, 300 bp, Zea Mays
ccaagatgtagcaggatttgaagcagaaagtatcggcggtatggactgaagagagatgtggctacacatgtggctatgtgcgatgtgtgtcaaagagttaaggctaaacacctaagactagctggactattacacccactaaagatacccaagtgggagtgggaagagattggtatggatttatttactggattgcctcgcaccccgaaaggatatgattctatatgggtgattgtagagagattgactaaagttcacttcattccagtcaagactacttataagggatcctaattggct

SEQ ID NO: 167709 - DNA, 1008 bp, Zea Mays
ccgcggataactacgccggtgaaccgccgtcgcacggtcttgcgccgcgtgtccgagtccttccaccgcgtcgccgtgactccctattgctgtcccatcgtcgccggggaggttgccacgacaatggacatgaattcactgcgtctgccttcttcttcatttccggccgccgcgcgtcctccctaaattcatcggccaccgacgaagctgcctataaattgagcccccgggcagctgcattaggtcatcacgaagcccacacacccgttcatccactcgattgcccaccatagccggagaatttcccttttcccccaaactggtttccgccgccgtaaaactcacctcaccgcggccagccctttccaggttagttcatctctctctctctctcccttgtttaagcaccctggttcctctgtgatgcttgccgagccttcaattcaaactaggggaccaccagtcgccgggaacacgacggtctagccgccatgcccgtggtcaccgtggccagagcttcttagttggtcttggatgcaattaggttgggggaaaggctcgggatgggttcaatccggtgtatgtcgctcgagagcaccggtcgtagagtaaatccgccagtacaatctcaccggagttcgttcctcgcgctgccgccgtcgtgaacttcaagccgagaatagatggaagtgcgggggtctttttgtaaacagtcagtgactctgttaaacagtagagagacggatccctagttagtaaaaaccctgagggcttttctgcaaagccgccagggcgcgggcgcacgcgcgcgctttcccctctggactgggccgcttgggccgaaaccagcccaatactatttagccttttcctttttatttttcagcagaactttggaaatctatagaaaaatgtagaaaaatcccaaaattgtgaaaccaattttcctaggcttattattttccctagaatttaataaaaatagtttcatgatttttagtttaaaca

SEQ ID NO: 167710 - DNA, 791 bp, Zea Mays
gccgggtccctaccctcccctctacctcgtcaacgcgcgaacagccgcaaccaagccgacctacaccaccgccgtgagaaccgagagggctgagttccgccgccgccaccgcggaatcgtgaacctgtcgccgtatcggcctcgggttgcaatcggggaccttcgcctgtgtataccgcttgggtctggagccttcttgcgtgacttgcgtgacctggcatagatgaattgctcgtcggagttcgtatctcatcaccggaccgcgcaccttcgtggttcatcctcggctcgccacttccaccagtaagaaccactgtcctgtactcggtttggactccgctacgtgtaggaccgatcggatttaagtttgggggccggaatggcacgcagccgcttcaccggccatggcaccgccgcggaagcataggcgctgccgtgtctggccaccaggaatggctagggcgcagtggaagcgtgtgggccgttgatcttctaagcgacggtcgcgattagatagagcgataccccttcgtgggattggatctgggccatcgatcggtgatcggacggccttgtgcgctcgcgggtttaaaatgacgagatctgatcctggcccttggatctgatctgaacggtctgaatcttcccataccccttcgcgggtactatttgttaaagagccctcgggaaatttagaaaacaacccgccgtccaccctgtcgctctgagtctgtggaaatcttgcgccagaccccctgcacttcccagaaatatgtgcatagttcagatag

SEQ ID NO: 167711 - DNA, 955 bp, Zea Mays
tttcaccggcgttgcctactgatgcttatggtttcagtgtccctggcaaaattttgaaacgtcgtactgtcatgagagggaacaatgcttgtgatcaagttttggtgcaatggtcgttcatgccagctgaattggccacttgggaggatgtgcatgaattgaagcaacaatttccaaaggccgctgtttgggggcaatcagcgttttcagcaagggggactgttagcggtactacatcttctgctactgggaccattgtggcgcaacggattagcaggccgaccaagaaatctacaaaggtgtatgggccggattgggtgaatgggctgcagctgtgctcgctttgcgaataagtagaacgagagttgcctcgtgaagggcatgtaagaattattcactacaacttcttctccaagttctactgctcgttcgccgccactcttcttcctccttaccctccgctactcttaatcgtcctctgctactctttattgttgttctcttctactgctaccttgtatccataccgagttgctaacactggtcctcattttatagtccgtcctgacgtgggaagcacgcgggggaaggagtccagcggaggaacgccatcagacagtgtccgatccgaactctagcatgaggaagaggaagaagctgacagcgcgggcccggttgtcagtggaagcaaggcacgacccacttgtcggtggtcgagacagaagagggagtgcgcgctttcagcaaaaacaggctacgcgatactgggcctcaagctgctgggctacggccgcggaccgctagagctgaccacacgcttcaccaggcttagcacggagagaaaagaagagatgggctgcgttttggtgtggagctgggctgtagaaacaacttcactggaagactgcgcgtaaagaggatggggaagcaggccgcggctttgggcttccaggta

SEQ ID NO: 167712 - DNA, 374 bp, Zea Mays
caaacttagaaataaaggaaagaaaataaaaaggagaagcaaaccccatctgggccgtcgtaccacaatttggcccaattcccatttccctgcacgcggcccagcagtcatcacaagcgccgacaggcggggccgctctgtcagccggtacacagcgctccccacgctcatgtcactgcaccgtggcccccacgcgtcggattcttcgtcaacgacctcgcatgcaccccggcggaacttgcgggcacaatcgcggcgaggcggtgcggagttgaccggactcgggggaatatatgacctagagccacagtaccttgaccctctgtaaccctaggtcagtgcccctccatagctattcaccgccgccgtaagca

SEQ ID NO: 167713 - DNA, 499 bp, Zea Mays
aaaatgaccgtctgaggaaacaccagcaagaagacgacgaatagcgagtagttgtgaagatgctccctataaactagatcgtgcacacatccaagcatgtgtgacaaatggtgattctagaggcctactatgcaaacactccttacacacagatgtttggggtggggtattcgaacgcaactcaaccaagaagtgagatataactttatgttgttgtattccaccattcaacagcttccctatcctacctcctatcacactctctatttcaaactccactctagaaatagtgcagtctatagtgcaaaatagtattttacatggccgtatacacactctactaagcacaacctaagagctagatataatagcaaaagatggaggaagattaaaatacgaagtagtcactggatcgtacactcattactttgtatgttacatgtccatcacacatctatcaatttagctatctgtccatgacacctctatcaatccatcg

SEQ ID NO: 167714 - DNA, 795 bp, Zea Mays
ggctgacaagcgggccagggagtgtcagcggcagaggaggagggcgcactgaccgagcgggcccagcgccagaggacttgggcgctgacaggcgggccagggcgtcaaggcacgcgtgcgcgaagcgatacccgcggtctgggccgtgcgatcaggatcggatggaggggatcagactggggaaacagacatgcgcgaagcgttatccgtggtccgagccgttcgatctgaattggacaaaggagatcagaccagggggaaacaaacgtgtgcgaagcgttatccgcggtccgggccgttcgatctgaatcggacggaggagatcagaccagggggaaacagacggctgtcggcggcgctgctcctctccatggcggtgaggtcgccggagttgaggcaggtgtgagctagggggtttccggggtcgtcggagttgggcagagagggagagggcaccacgacgaactcaatggcggggaaaaggccatgaatccacgggcagagaagggagaacggcggtgagaaggtctcgggcgggccggaggaactccggtgagccattccggccacggggaggggtcctaaggcacgctaaggtctgggctagcttcagcagaggtaggggtgacacagggacctactccggtgaacaagatcgggctaaatcggtcggccaccacgcgagcacggtggaccaccgtggccgagcaccggtgaaggtgaaattggccgagcacagggcgcaataagggaaattgggcacggggacgggtgtctcacctcgaggcggagctc

SEQ ID NO: 167715 - DNA, 576 bp, Zea Mays
cttcagagtgcggtaggcctcacgggtattggtttcctcgccttctgctatttcgaggctctcttgaagggacaccttttcctttgttagttccctgactttttgctccaggctttccacccgggaagttaggtgggtgcagtggagggtgaggtcatcatattgattatcaagggtgtgaaggtatccagccatgtagacgatggtggggtcatcctcaataggatctcctcctgacagggcctaaagtcttttcctccaggtggtgtgtttttgttgctgggtgggaagtagcgaaggggggtttcaaagattactttgctgtagttctggcatagttgtcggagggctgttcgggcaacattctggcaagtatctgggaagcggtatccggtaaaagtgacttggaaggaaggatggttcggatagttttggctttctcccaggtagactgccatagagcattttcccattccgttctcgagatactccttccagacgtattctggcttcttgcggattcccatgcgaagcgcacaacttcgcaacagatgtgggaacccttccacctctgag

SEQ ID NO: 167716 - DNA, 448 bp, Zea Mays
gaaggaggcaggttccatgctgaatatgccactggggcaccagtatttgataccttgcctctaaaaatcatctcaagtcggttcaccaagtctacagagggaattttcctgttggtaacccgagttgagtcagctagacctcggtacagataagccgggtatgccctgtccttcaacggctgaatattcttgaaaacaaaatcaacaaccacagcctcaacagtcagacccctttctttcagcagtccaacttcacctagcaaagccctcgcctcagctacctcctgatccgtgggagactcaatccaactcggagtgcgaacatccggctgtcttctcgaccgtggggggagagaatttccatggttctcaacaataaaccattccaagcgccatcccttgatactgtctttgagagggatttcaagatactcagtcttcctcccac

SEQ ID NO: 167717 - DNA, 470 bp, Zea Mays
tgcttctgaagtagcaatggattccactgcgtcagaaacagagctccttcggggatagacgcaccttgtgatctcagttgattagccatcccatcgaccaaagcctgatattgaacataaatgagtacaaagacggtaacttgccaggagtattgctagaactagaaaagccgaattacctgaagattagagaagaatgacggaaatcccaagtcacgagaagctaggtggtggcttgatgaaggaatatcaactggggcaatttgaagaacatcaccagggatgaactcagcaccaccagcaggcatcagaactctagcatctggtgcgccgacctctaaggcgacttcctcatttgaagcatgcgctgttaccatgccattggaacatggaggagaagacccaacgtggacatccatggaggtatgagaaggggagcccgcttggacaccctcgggggctgggttgca

SEQ ID NO: 167718 - DNA, 609 bp, Zea Mays
ggcggcggggcgcgtggcgttgcaccggctgttcgtgttcgcggacaggacggacgcggcgctcatggccgtgggcgccgtcgccgcggtggcgaacgggatggtgcagccgatcatggccttcatcttcggcgacgtcattgacgccttcggctccggagccaccgacggcgtcgtacgcagggtcgtccaggtagctgtgtgccctcttgcactttgcttttggcccataagacacgcttcggcccaaagctactgccaggggtgaaacgattggtgattgctacgtcagggtgatggttctgaccaaagccccattctcgtctcaggtgatcatgaacttcgtttatcttgccgttggatcaggagtagcttcaaccctccgtaagtggatttgctcttccaacctagaggtatcatgttgatgacttttatgttccctagaggtatcatgttggacaatcgccggagaaagacaggcggcacgaatcagagccatgtatctcaaggcaattctgaggcaggacattgcgttctttgacatggaaatgagtgctgggcaggcagttgagaggatggcaggggacacattcctcatccaagacgcca

SEQ ID NO: 167719 - DNA, 421 bp, Zea Mays
ccaggtgttacttagggttttcacccaagactacacaggtaaagccatcatcacatgtgacttaaattgagtaaaggacactaaacttggaaaccaagatccttagtaagtgcaacccatcttagaagtcatgccttggctttatcatgcacatacaagggggagaattgcccaaaccctaattcatacccctttggacaattggagcactagaagtaagtatgacaaaaaggctatgaaaaccacatgatcatgacttgggccaattataaaagttgtagtacactgaataccctacaaaaactagaaagaaagtgacccaaaaaggtttcagaaaaaccccaaaaaggtcacccaagggaagagcataaaaggaaaatcagaaattttctaagtccaaaaccaaccctcttccaaagat

SEQ ID NO: 167720 - DNA, 1177 bp, Zea Mays
atggaattcaaattttaattcaaatttgaaaaattaaaatagaaaggaaaataaaaaagaagaagtgaacgcctaggccgacttcccatccggcccaaagtgcattcgtaacctagttcacctcgcgcagccacttcggggcgccgacaatcctgccccacatgtcagtctcccatgaccacagcccacgtgtacgctcctgagactgatgcactgggcccgccggtcagtcgcacgcacacacgcctgtgccaccttcttcatttcggttatcgcgcgccgcatccccttgtccctatcgcttgggcccagcgcgtgcaggtcatctcccccaaacagaaccgagctctgcaatgatcgcgtgcgagatctctcgtaaccgcctactctggctcgtggggatgtgagctccatccctggactataagactgacctgggcacccctttgactgccatgggtagagctccaagcctcacgcattcacgggaagtcgtgcgcttcatagtgagagggaaagaggaaccgggtagaagatggcaccgccgtgagcttgctcgggtcatgccaccggagtcctgcgccgagtaagggaagtgatccgttggacctcaccgtgagtgtacgggtaccaaagaagcttaggggatcgcttggagccaattaattgctcaatagagtgccacctcacaccgtgggccaactcgtcttcgctttaatcgtgggtgaggaccttcttctcggatctgccatcgtctaggccacagttagcgcttagggtagttgggttggcgcatcggggccaggagtgccctacggcggcgccgtcgccgccgtggtgtcctgttctcgcccccagccctccgatcggctagaggtaggagatatgcgatgttcgtcggatcctgtctgtgcggcttagattagatcagggtgtagcgtttcggttggatgactctgaccgtggatccatcatttgatgatcaagattagatcccaggtgttttaaatatcggccatcggcttttgatcctacgactccaggtgcatatcgtttcggtcttgggccgatctaatcttggcccttgacttgcgatcgacgactagggtcgtccgataccccttcacccaggatcatttgcataagagcccctgactttctttagatttaaacccgc

SEQ ID NO: 167721 - DNA, 429 bp, Zea Mays
gttcagctcccctcgccgccggtgatctcgcgcccggattcacgccggcgtcgcgattcacgcccagttaaacgcagataacgatccttggatgaaaaatctggtgctggggatgagttcgggacaatgtttcgccctagctgtcgtacccccttgccttacagccggtccagataacctcgctggagttggccgcttgctgctctggtgccacgtgcctaggtgctctaccacgtcgcagtgacttgctttagcatgtccggtcatcgacggtggtcaggccacggtgaaagccatgaatcaattgcgaagtgacctccccctctccggccgccagtgcgccatttcaaattcaagatccaccaccctcgggcactttaaattaagcatgccatcagctttgttaagtcatcacaatgccaaagcacc

SEQ ID NO: 167722 - DNA, 856 bp, Zea Mays
gacggtgaggattagtttcgccccaccgtgaaccggtatgccatgcggatcgtcagatccagatcccaccgtccagcttgttatgagcaccgaaaccagatacgaccgcccgatcccgatcggacgatcctggatcccgccctcaatcggtacgtgcgactaaacctatgtcgttgatctctcatcccacggtcgcaagtcgacccggtcgacccgacaccctcttctaatctcagccaaccaagaaggatcggacgacactcgtgtcctcttcttcccctagccctcggttccccaacgccgacgcggcgagcactaactccggcaaagctaaaccacgacctatgtacataatacactaattcggcttgcccacacgctacgacaatgactacgagtacgggcgtgggattcttaccagagaattttagctctagcgagtagtccacggtggaagatgtgttccgcccccgatccaactccggtgaggaattccccctgattcgggaactcccagtccaccccgaggacacagatagcctccccagatcttggcgcttcctcacggccacccccacgagctagaactccggtgtggagggaattcaccgacggcgcaacccctccgttcgctcggcctctcctgacggtggcggttcacttggtccacgacgcaaaggggtacgcccggggtgcccatgtcgcaacttatcagtgcacggacccaagggcggtcagctaaggccggaagactcgggaggatacagttgcggtcacggcggcgatttctccgtggttcggcgagtcgtgcgagctgacacctatggcccatcgaacggtgtaggagacagagtcc

SEQ ID NO: 167723 - DNA, 274 bp, Zea Mays
ggatccatcacaatacacctgtagatagagtagcattgtagcaattagatggtcgcactttggatctcggcaggacagatgccacaaccattcacagagcactgcgctaataactggaacaaatcgaaacttagaggaaagaatacaagacgaggatcgaagactgtagcactctgcactcgcaaaagagagagcaaattccctcaatgccatcaaaacatatgtgaatcctccgtgtgcgattaaaaattataacagcgcttatggaagccag

SEQ ID NO: 167724 - DNA, 703 bp, Zea Mays
taaaaatcttagctttttcgccttaggcatggcggaagaggatgaagttgccacttttcttttcgacccttgttttcggacaggaaagcagtaatcaggataaaaaaccgatcacatcaaaaactctatttagtctcctcttgccgtgagcgccgaaggcaattgtgatggcttcgtcctctacattcgtataagcttccaacagctcgtcgctggtagcctcaacaccctcaagccattcatcattcgacttgtaagtgtatcttagataaaccagaccgccttagctggagacagtagcagtctccttcggcatttcccagtcatttacaagcggccacaccttgtaagcaatatgctctcgaaccaaatccctggtgccaatgtaagtacacaccatgttgaaggccatcaaacatgcttgcacttcattcccacttgcaatcgatggcctcctgatgccgaagcgtgaccgtatggtacgttgcattatacccctcacatcttccctctcactgagatcattcttgacatagaaccactgcttcatctaagagcccaaccatttctttcggaatgttggcacatgatacctcacatcagaacggtgcacaaaactataacatccaaagttgttatgatactgctccttcccaattgccttcgtctggtaggataattcatgaatgttgcagaagcactt

SEQ ID NO: 167725 - DNA, 492 bp, Zea Mays
tgaccttggctacgacaccaccactagccagaattcgagggcagcagtcggacacaggactcgatttggggtcacccattgccggagttggaattattgatggtggtggcagatctttgtcaacgttccttggtgtgttagtgaataaaaagcatcggatacgggatagtgaataaacagcgtagggcaaacggtctgagtgtcagactcacgacttagagtaagaattgcttgctcgtctgatcgtctcacgcaaaccatcacatgtaatgagctagtgacatgaacgacagacatatagccacagcgagaaattttgaataggttaggggatcttgatctcaccttccttgctcgtcattagtgtccatcggcgtcagcgtcgatgaagatgccattttcgacatgggctgggacaccattctatgaagttgcggacttgcggtgtcacagacagacactcatagatgaacatgccctatggataatcga

SEQ ID NO: 167726 - DNA, 504 bp, Zea Mays
gaagaggaaggctactaatcagggacagacaggaagcagtacccatccccattatgctccaccacaaggcaccccaagtcgtggtagtcccagggaacagtcatctcaaagcccaactcaacaagcctaaccttcagaatatcatagatcaggtcctcatcaagcaggcattccagtgggaccagttgctcataacacttcaacatatagggcatgctttaaatatggtcaagtcagacattatgccaacaactgcgctaacaaggttgcctacactactctagctctgacgaagcagtgccaagcctcaggaggtaaaagccatcccttatcagtcaatcaagggcaaaaaaacttctcgtgcggccaagtcaaccatatagaagtagaggcagaccccgaagaaccagaagacctagaagatatgcttggagaaaatgaagaagtctctcaagaagaaaatgaacagcaaaattagagtctcttatctccgtactaatctcg

SEQ ID NO: 167727 - DNA, 395 bp, Zea Mays
gggggacccactggccggtctcacttccccgcgcccgtctcatccgtttcactgctgcgcgggcccgcgtgtcagccactagctatcgtgtgtgcgcattgcctctgcttggactggctcgctgccaggtggggacctcgcgccagtgaccatggacgaagtcctgtttatcttctcgcaaacggcttcgccgaacggtgcgcgcgggattgacggccacggcatcagctggatcgcggcacgactccgtcccacggaggctacaaaggcggaccggctccacctcgtaacccttgcctcgttgacccttcctgccgccataaccccaaatccaagcttacctcgccaaccagagaagaagggagagccgccgcggtgggatcccactcgcgccc

SEQ ID NO: 167728 - DNA, 852 bp, Zea Mays
tggaatttgaattgagacacgaaatgacatggaattgagccgatacttcacgaataggtttatataggtgaatatgagtgaagtgtgtgcttggtttgaatttaggcgaagaaaaagagatttgggcactcggctcggaaacgatcgctcgaaacggggaatttggtgaaattaaagcctggaatctcggattggcgtgaaatttggcaaatatgttactggaagtgttgtgaagttgcctaaaaaatttgggttcaattggagcattttggctggtttgggcatttcaccgagcacatggtgggcgaagttttaaggtttcggggaaatggctatttgaggtggaaaaaaccctcccgaaggagctaggaacctgcaaggatactcaaggcacacagagaaacacatatgaccacttggtttcactggatttcacaggaaattggaattggcacacaaagggtggtgcactgcctcactgtctaaagaaatagattgaagagacagagggagaggagagctgagagctgctcaccgagcgagggagaagagacgagcgcaggcacagggtcaccgaaggatctccgccggggaggggagatcgccggcgagggggagcagtcgcagagaacagagagcacagagggagaaatgaacctctggctcggtctcgggctggaggccttttttttaaaacgcgatatgggcgcaccggatagtctacagtacctgtccggtgcacaccggacagcgcacagtagctgtctggtgaaccaccggacagcgcacaggggaaaggagttttagcgcgcggcagccggtgcaccggacattgcacagtgcagtgtctgg

SEQ ID NO: 167729 - DNA, 436 bp, Zea Mays
caagatctaagacttataaatagacgggacgatggacgaccactagacgaggggcgaaggcaggtcttggagagtggatgaaggagcgaattgttgctcggtcgctgccaccgccagacattggggagggagatgactattaggcactaacacgcggcgacactgttaggtggacccaaacactcggggagcaggagagagctcagatgcacaacaaaacaaattgcgggaaaccaaaacttcttggtatgcgtgtcccatcacgttataggacgagggtatttataggcctatcggggggggggggggtaggtggtccaaagtacatctctacccctggctaccaactatattcgagtaacagagtaattacagtgctgcccatacagtaatccgcatacaccagataacacacccacacactacgctgacaggt

SEQ ID NO: 167730 - DNA, 285 bp, Zea Mays
cccaaacactatctggtgcttccaccatcattctctcaccattccatccaaaaccactttgctccaccaattctttaacactgcgataatctttcttcaaatcttgctccttctgtttgacttggccaatagtatacgatgtaccaaatttttcattcaagcgacgaacaatgttgttccatgcctccttactccaagcattttgtgttctaaaacccggcacattgtgatcctttagtagctgaataaggaacaacttcctctcatggatccacttggctctct

SEQ ID NO: 167731 - DNA, 466 bp, Zea Mays
atcgccggacctccgcggctataaatatccccatggatcacggcgaggctcggtcatcacgaacaccagtgaactaaatcgaagtcaaattcgcactgccctctccaccttcgcccaaattgattgcgcgcgatgaaagcacagcctcttacggtcctatagccttaatcccatcccccaatttcacccagagtcgacgcgacgtcattttccccttttctctgtcaccggtgagcacaagactccgcgctccgtcgccggaccactctggtaaggctctgcctctctcgagtgttgttctagcaactctgtaggcacgtaatgctcaccgtagcatccgtttgaccaattcgggcgtaagtgattgggaacacgggattaacatcacggtttccgccgtgcacgtgggcagaccgctctcaaagtgttcaagccaaagtgaagctcgttcctaggtcgccttggg

SEQ ID NO: 167732 - DNA, 614 bp, Zea Mays
gtcggcctggaatggctgggggacagcaccagctcgtgggggtgcgagtttggagatgcgccgtgggaggaaaaccgagtacctcgacatctcactcaaggacagcatcaaaggatggcgcctgaaatggtttattgtagagaatcacaggaactctctccccctcggtcagggagacagccagatgttcgcactccaagttggactgaatccccccacagacttggaggtagctgaggccggggctctacttgccgaggttggattgttgaaggagaggggtctgactaccaaggctgtggtcgccgattttgtttttaagaacattcagccactgaaagacagagcgtacccagcttatctgtatcgtggcctcactgattcgacccgggttaccaacacaaggattcctgctgtggatctagtaagccggcttgagatgattcttagaggcaaggtgtcgaatattggtgctcctgttgcatactcagcctggaatctgcctccttccaaggctttcatcagttttatgtcaaatcctcctactggtgatagtggcttgggtcttagagtgcgaccttctcccaaagaggttgaggctttggttgtttcgc

SEQ ID NO: 167733 - DNA, 409 bp, Zea Mays
cgatgagcaaactggatcagtgccccacacacatccggttcaccgatgccacacaaagcatcagagggcaccatcgaacatccccaggtctctttcagaggtcgggtcggtggcctgggcatgaatcgaccacgacgacgccattagcttcgaggaggcacacgacggcgcgctgggttgagaggagggcactgtccgtatatatatgcgcgatagaggtccgaggcgactagttcgtaactctgtggaagtcgcgggggagaacaacccaacctgtcgcacggcatcggtgtccgatgaacacggaagtagcgttcggccgcggttgcgaggttgaggaccagcctgacagagaggtccaccagtcaacgaccagatgaacatgctaatgccctggcagcccggcccc

SEQ ID NO: 167734 - DNA, 876 bp, Zea Mays
gccagagagggggaaactcttcctaggagaggggtaggctaagacaagctagattaacgtctcttattgtcgtcttagccggataactttcaaggctcttggcttgggtttggtggattttgcttgggattctagtgggagttgaatgttttcgaccttgtgaacctgaattgaacgttgctctaacacccctttttatagttcaaaagtgtgatagtattacatgtatatacttcatgtgcccctgcttgtcatagagccaattgtccatgtcttgccagtttgtcactggattgtgttgtgtctctcaaagtaggcatgcattgatgtaatcatgtcgttcttcccttaacatattaatgtctccttgtaccttttattacaagcatgatcttgtgtaccactagaaacaaggattctcccaatcctcggacaagtgagatttcttgtcaggaagtagtggcatatactaaactatgtgcacacaacatggctctaggtatcagtgcattagctaaagccccatatctctatgtggcaaattttagcacaagagatctttctagccaccggctctcctcaaagacaagtagcctaaaggctcaaacagcaccgacatagttatatatacaccactagcaagttaacaacaatgaagtgttgcccctctatatctatttgtttcatgttgttgcccctctatatctatttgtttcatgttgttgcgctgccagtcaatcactagttagccatcaatattatttgtgtttgtattaaattattagtttccgcttaatatttctgttcccattcgttttcgtacgcccgtttatcctgctcccgttcccgacttttctggacctgaactgttcccgg

SEQ ID NO: 167735 - DNA, 378 bp, Zea Mays
gatcgtcgtaccattccatatttttgaacaggacaatatatcgacgatgagtaggcgggtggaaagtatcctggcatcacaagatgaatatacaatgtttgttatgttgccttttgagtcgttttatttggccgttttgttttagcgggtgaccggggtttctttgttggtcgatcgcatagaacgactttcttgctagcatatttggagagcaattgatcaaaagtagggtcggctttgaccagccgaccatgtgcgttatgtttgctttgccccttcctcttcttccttgctttgtgtggaggctgacgcctttgtccatgggcggactatccggctgtgtaagctggaccatctgcatgagcaccgaaccgtccg

SEQ ID NO: 167736 - DNA, 594 bp, Zea Mays
tattcaaatgcccaggccaggcagtcctgaatggttcttcctttgatgaagccatattgatttttgtgaacaagggaagtcatcactgtctataaccgattggccagcagcttagtgatgattttcatactattattcagaagcgaaattggtctgaaatcacccactaaactagcattatccttcttcggaatcaggacaatataagaaccaatgatgcttcgaagacaaacacccccgtggtaaaattggtcacataagtcatagaagtcctgagaaataatcggccagcattttttgataaagttggtattaaacccatcaggtcccagagatttgtcagaaggaagggctgcaacaatactatcaatttcttgctttgaaaaaggctcatctaaccaatgcaagtcactgtggaagagcaacaaactagggagatcaaagacattatccacaaaatcagaggatcccaagcgacatttgaaaacattccaaagcaggttagctttgagatcatgctctgaaaagattgagccactgtcatccgagagcaacgcaattgtattgcggccttgttttaccgttgcatgagca

SEQ ID NO: 167737 - DNA, 401 bp, Zea Mays
agtaggtcctgtaggtgcttttaaacaggtctgccattgttcaggtatgtccccggaccatgtttctctcgcacgctgtagctctgttttagtttggatcccatgtgttgtgacggtctttgcatgctgcagctctgtttcagtttggatcccatgtggtgcgatggtctttgggtactacttgaagcagtacatttattcctgtgtacatggctccgatcagcatttttaacttgtagcatgctttatgcatctccatgtacacctccagactaattatatagagatgatcaattgatctgctgacagaaatccttccaatagtcatatctagtcaagattataggacgcataacagtgacacacttaattatagaatggtagtaattcattatcatgag

SEQ ID NO: 167738 - DNA, 401 bp, Zea Mays
agaaatacccgcagaagaggaagcccccggagtgaaattaacagaagaaccccactgagccactggatgaggcaggcgtggagctccaaactgagacgacataggagtagacggtgcaggagtaggggcgacctgatactgaggaaaaccctgcatcgacacaaactgagaagtcccaggcacatagagctgttgcggaggaagaggaactgaaaactgctgctcagcacttgacatcatgttgatggtgccctgagaagaggaggaagtcaccggctcctatctgagcttcccattaggattcctcctacacaccacatccttatggtcctgactgcagatagaacacctcccactccactggcactctgcacggcgatgcacatcaccacagcgaaaac

SEQ ID NO: 167739 - DNA, 377 bp, Zea Mays
ccgaccaggactcgcggacaggacgcagccggaacttctaggggtcgggatgtcaccccaaatccacccccggttccacccacgctagccgaggcgattgccgccttggtgaatgccaccgccgataatacccgcttccttagggaaatggcgggtcaacagcagttccagcagcaggcaggaaggggttttcagcaaggcccccgcgaaactacttacttggatttctcggaaactcgtccacctttattcaccaaagcagaagacccactggaagctgacgaatgaatatgggtcattgaacagaagtttggtcttcttcgttgttctgaaacgcagaagccattgttcgcggcacagcaactccgtggccctgc

SEQ ID NO: 167740 - DNA, 299 bp, Zea Mays
actccttcatgatgatttggtgatagcccgagtatgcatctagtaaggaaaggaactcacacccatcggtcgaatctacgacttgatcaatacgttgtacagaaaaagggtccttggggcaccgcttattgagccatgtgtagtcgacacacatcctccaactcccattcttcttcttgacaagcacgggatttgcgatccacactggttggtgtacttcccttacaaatcccatcgctaggagtcttgccacctcttcacctatggccttgctcttttcttcatcaaaacggcgaagc

SEQ ID NO: 167741 - DNA, 363 bp, Zea Mays
cgacaactaggcacgacggcgtgcatcgacccacggtggcaacattgtcggtgaagtcttcctgttgacccggcgccccaagctttctagagaaaccatgctatacaacacgaagatgccaactatcacgaaggagctagtcttaccacctattgcgtaggcacgacatctggccatgacacagcgtggatctgccatacccgcccaactccggcgaccaatttctcacactccggtaaccaatcgcgctaggagacgccacgaattccttcctagggaccaggcgaagtttcctaacccgacaccgacaccacgacaatggtttatacgcgtatcaacaatggcggcttcggttctctcccg

SEQ ID NO: 167742 - DNA, 529 bp, Zea Mays
cccgtgcttggtttgccttatttccgctcagtcttagccaatttggcctcgatggagttcggtcgcgctagttcactgcgcctcgcgcggcgactggccgatttagcctcgcgtcgatcccctgcgtaggtcagcagtattccccttaccacgccgaagccaatccagaccttaacacgctcgaaacccccttcttacggctgagattcctcgccggagttgcccgacccgcccggagcacctccccttcatcgttccccgtctctggtcccattctcgcagccggagtcccgccagtgagttcgtcgaacctccctagtcagttccagccctcatcgacgaccctagatcccccgacgaccgcgtctgcctcgtctctgacgaattcgccgccgtagagagagcaacaccggtcaccgagctgcaaaaaccccgcgcacccctatcgcaaccatccgtcccagatccaactgttcagatctgcggatatcggccgtgtctgcgtgctctgcccctaggccccatctgt

SEQ ID NO: 167743 - DNA, 681 bp, Zea Mays
cctaggtcctccatagccaaacgagcctcccgcttgttgttttaaaagcgacaaaaacatcgcaatacttcttttcaataagaagtcgtgtgccttaatagtgtctgttgctccttttcattagctctgtcgtcgattactatccgcaaccgatgatcagtctcatcctctataggatcgaccctcgtcgagttgatagaattcttattgctctttgccttcatctcatatgcttcaacaagctgcttcatgcactcatctctaaaataatgtattctccttaggagagtcatgataggcttcccttatttcctttccacgcttagagacaacaggagacatgttctcatcctcttgctgactagttagaccgacccatcactatctaaagcagcctcacctctacaccctcctggaacaacaaagctctcatttgtacacacaatgggtgcaaacattatcctaaggtcttattcgttctcaagaggtgtagttctaaacatgagacttccgagcattgcccaaaatattacaaacaagaaacttcagcacccacttcttgaatggtaatgagaatttacaaccatagtgggccaatattatcacaactcacctcatttttttgagtcgaccattcgtccctagcactgatgcaaccagtatgtagatctctaactaaac

SEQ ID NO: 167744 - DNA, 838 bp, Zea Mays
tgagcgttaagggcgctttcggatcgtgttcgagttctaggaaacacctgacccatggtttattgtggagagaggcaacgagccgtttgtcctagtcgaacaaggtcgacaactatatgtgttggcacctggaagtatgaggacggtcataagttgaccacaccagaggcgattgcaaaggggggttgttggggctgtagccctgcctgactatgattagtagaggaacatgtatttagacaagcctaaatgtctcattctataacccatcatgcattagctatgtcctcatctaacatgataatctaatcttttatcatctttacgaggtgaatgtcacataaaatgtcatattaatgactcaggcattagtgattggtaatttagtgtcatccgttaagatgacaaaagattcaatatctccaacacacgtgcaccacgaccacgacaccgaccttgttctagtttgtgtcctaacattagctgcctcatgtatggtgcccgttgtgacaccctagtgtcacctagggttcttccctaagctaaccccaacctattatcacatgtaaatctagtgaaaggttgaacatcaaaagaaaatttagagcaaaggtttataatgaatcttcttaaactctccctaatcttgtcatgaaccttgagagagaaagactcacaaaccctaataaatcctaagtaaaccaagttaagcataaagggtaattgggagaagtcatgggggggaatgcaaattttagatatgatcaaattacaaagttttagttcatcaaataactaacaaatcatagtaagagagtttggccatttgtttttttaa

SEQ ID NO: 167745 - DNA, 500 bp, Zea Mays
gtaaaatgctgtttgatggttttgaaatttgtttatgggatatagaagtcacccctatatgagtattcgtaagcacgcaaaatcgtcttaagtcgtcactgacttgaatcgaccgcttttgttagtagggcatagtggtcaccccgagttaagtaagcgtgagcatgttgcaccgtctcaagttgctgctgacttgagccgattgctctgttagcagggcatagtggtcaccccgagttaagtaagcgcgagcatgttgcaccgccttaagtcgttgccgacttaagtcgattgctccgttagcagggcatagtggtcaccccgagttaagtaagcgcgagcatgttgcaccgccttaagtcgttgccgacttaagtcgattgccaacgttggcagggcatagtggtcaccccgagttaagtaagcgcgagcatgttgcaccgccttaagtcgttgtcgacttaagtcgattgctctgttaacagggcatagtggtcacc

SEQ ID NO: 167746 - DNA, 1042 bp, Zea Mays
ggctgtttaaattctgaacttcagactagcagtgcaactgcaagcactttgggcatgaattaatgcatgatcgagcaaggatttgcctagggttgctataccaagattatagctggatcctagggctatgactttgctaaagagtgtcgatcatgttgctatataaaatcaagagaaaatatgccctaaatcctggctgtcagatgcactgaatgaggattgccatggtacagtatctgaataagatcagatcaaacattcagtgaacctcaccgccgacgactgatctgcgtcgtgatttgcgccggggtcgggctgagctatcgacgggcatctcctcgcgacgatattcttgaagtaggataagatcgccgcggtgggggggtgattattccagccgccacgcggtcactgatctttccggccatgcttggtcaccggcgccgctctcctctgttcgtccacgccatcaccgattggactactttatggtcgcggttgaacgtggcacaactccgcgaacccaaccgcatgtggccggagttatctcaccggcggtcaccgtggctcggttatctccgccgcggtgtcatccataccctgctcttccctcactgtacctctcttcaacatggtgaacatgagctagcaatgctatccgcggccgctgatctctagtcggtccgccgtggctttaaatagcggcatgaaccacggcgaggcactcaccgcctcaaccgcaagcttgagaagaacccaaaattcgcactgccttctccacctcctcccaaattgattgtgcacggtgaaactacagtttcttacggccgtatagccccaatcccacccccaatttcacccagagccgccgcgtttcccttttctctgtcaccggcgagcccaaaactccacgcaccgtggctggaccactctggtaaggctctgcccctctcgagtgttgttctagcagctctgtaggcacgtaaagctcaccgtagcatccgtttgaccaattcgggcgtaagtgattgggaacacggga

SEQ ID NO: 167747 - DNA, 966 bp, Zea Mays
caaaaaacgaattaaatctagtggttcacttgtttgggttggtgttggatgtgatgtaccagagatgctgtgtagttgtctgaaactctgaatcatgctgagatttcagcattggtccagtgtgcattcttagacagtatagttaatcagttatgcctttcacacaaccaatgtatgaaactcaatgacaagtttcatgcatcatgcaacctgagaacaatcacaatgtaatgggagcaacaaatggacacctcaaagtaaacactatgtatagaagctgcaacttccaggttcagtatgtttatctaactcccaagcacaaagcacaatccccatttatgcaatggtgacttgagttgcctttgtaaattgcaaaattgggagttatggacagatacaaagcaatacagattcttaaagaagaaacagaacaaattttatcagtgcttaccttagtggctgctagctcattcatgtgaggatgacataaaaaaagtgccataaacctataaaagtggatgtagtgtcagctgggaaatgtaattgtcttggcaggaattcgatcaatgctctatatggttgatgaagcgcaaaccttgtacagtggtgagtgctgtctatgtcttactgagtcaccaggtcatgggtttaaagcagtctctccatttttgtaggagaagactttctcggtttatcccttctctagatcccactcatgtggaagcctctggtactgaatctgccttttttactttatatggttgctaagtgtttggctaatgtgtcgagatgctgaaccaagacatctgactatactaactgatgtgaacggtctggaagttgaatcttggacatgatgtgcagtccttttcatgagacagggtagtggccgatatacaatagactgaactcaaacttctttatacaagatacattacttcaacgcagtggaatatatcatcagaa

SEQ ID NO: 167748 - DNA, 518 bp, Zea Mays
ggagatcctgacggggaggcacccgctggacccgacgttgccgggcggcacgcacctggtgcagtgggtgcgggagcacgtgcgcgccaagcgggccacggcggagctcctggacccgcgtctgcgggggaagccggaggcgcaggtgcaggagatgctgcaggtgttctcggtcgccatgctctgcatcgcccacagggcggaagaccggccggcgatgaaggacgtcgtggcgctgctcaaggagatcaggcggccagccgagaggtccgatgaggggaaggagcagccggcgtgcaacaccgcggcggcggcgaccgccgccgccgctgagccactggacgggcaggcgcaacggtcgccaccccggagcccgctgcccaagggcggctcgtcgagctgctcgttcgccatgtccgactactctagctgatgaatcatggtccctggagtgctgctgttagataacgattagcaaagcactaggaggtgaattttggaggtgtaataatatggtg

SEQ ID NO: 167749 - DNA, 312 bp, Zea Mays
ccggcctcgccacttctgtaggagattgtggcggctatccataatgatggacatgagggcgtccaacgcacactacaccgcctccgtcgtgacttccattttcccaacatgcggagtgtggtgcaggacttcgtacgggcatgtcccacttgtcagcggtacaagtcggagcatcttcacccgacaggtctcctcatgccactaccgattcccaccatcgtttgggcagacatcggcctcgacttcattgaagcactgccccgtgtcaatgggaagtcggtgatcctctccatcgtcgaccgcttcagcaag

SEQ ID NO: 167750 - DNA, 944 bp, Zea Mays
gcacgaacggatcgaatgcagcctccgcgcccgcgcatccaactagaccgcaccgtgctgcgtcactgccgcccaagctacgacgcgcccgcagccgcgctcgtctcactacgcctcacccctttcctattaccgcagtcgttttttgttcgttgaatgccgatattaatggccatcaacgctggccaactccgattgatttctcctctctcccctcatctataagagcagacctctgcccacacttctcacctcgcctcacccctactcggcccttcatgtctctgctcacccgttccttctctcgcccgagctgcctgcacgcactgcgtcgtcatctattctcgccgctgacgctgctgactccgaccgttgtgccaagttcgtcgaagccttctacgtctacgagtcccctcaccgatgtcgcgcaccgctcgccagagtctcccctcgtcgatgcaactccacgaagctagcgcgctgctacctcgtctctgagttctctgctcgctcatcgattgcagcgcctgcacggcgtcattgtcgtgtcgtgctgctgtgctacttctccgtcgacgccctgcagtctgcgaattttcatcgccggagcactgtcggtgaagccacgccatcatcgctattcttcatcgccacgctcgagctcacgcagcgacctcgtcgtcacccgctccctgctcatcaacgcaccgtcagcttctatgcaccaacgccgctggaatttcgcttgctagatgtcaccagagttccccactctgctcaccgtcgatccacacgtacactcgtccgaacccatcaccagtaccgtgtcgacctcgctgtcaaagcctgtttccaccgcgttctgctctggcgtgctctactcctctactatttgcaagaacgaaggtagaagacatgaccttcttgcaatctagccttttttg

SEQ ID NO: 167751 - DNA, 280 bp, Zea Mays
tagtggtcaccctaagtcgagtaagtgtgagcatgttgcaccgtcttaagtcactgccgacttaagtcgattgctccgttagtagggtatagtggtcaccataagtcgagtaagcgtgagcatgttgcaccgtcttaagtcactgtcgacttaagccgattgctctgttggtagggtatagtggtcaccctaagtcgagtaagcgtgctgattggtaataaacacttcgagtgcccttgagaacgaaatcttttattgatgaggtatttaccgattatag

SEQ ID NO: 167752 - DNA, 551 bp, Zea Mays
ccttccccaactctgatgattttggcctctccccaaaattctccatctcccgggccatggcttccaatctcatcttcgctaaggccttcccattctcctccaccctcctagacagaatcgccctttcatctgccgcctgcttcactaattcagtcgttaattcatactgtcccaacaactgatgatgaactttctctatatcttccaccttttccatcaatgtctagtgtgttcatcatcttttcccatctcacttcaccctgctttgcttccactgccattgcttctaacaccaaatgagactgttcaaatggttttactaacgacgtcgtggtgcttcccttctttacaactaacttcactcttcactactacacacacccacaccgaggaaggaaagctttgataccacatgtgacggtcgttgtgttgaggacgatgagatcccgggacaccggcctctcgtgaccggcggtgcgcctccgccgatgtgagaagtcgtagaagttgggaagatgacacataacaagaagtctgacagataagtttga

SEQ ID NO: 167753 - DNA, 399 bp, Zea Mays
gcttaaacatttttgctcatgtttcttcttaatctcagtgtttccattttccatctggcatacttgaatctgccccttgtacttaaactggcgttagctgtatagctttatgaggaactttcgtgcagggatttctacatgagatgtcatagagggacaagaaggtcaagtcctaagtgagcatgggctttcatgaggatgaagacgaaatggcaattactagatgtagtacgtctcatttgaatctgccgtaaatgttgaccttgttcgaatgaaattaactcgttatgtctacttggactgcgaaaggatctctagccgagttagttaggtggtctgatcaatactcctcagatcctaggtttgactttctgtgggagcaaattctcagattgtggt

SEQ ID NO: 167754 - DNA, 402 bp, Zea Mays
gggagcgcatcggagatggacacagactgcttcgacgctgggatggtgctcacccccagcggcaccaacgccgagctcgcctcatcggcccatgcggcgatacgcagaaccccggtgcgatgctccacccagagatcttcaagggtcttcttcatcgcctccaccgcctgggagcccggaaccgcctgcgccacctgggctacctgcgctgcccgcgtcgcctgaaaccggcggacccgctcctccagtgtccgctccttctcctccagtttcttctccttctcctctgcctcgagctcatgatcggccagcaacttgtcccgcctttcccacatctcctccctgaaggcgaggtccttctcctgccaggcgtgatccgtcgcccgctcctccagggaggca

SEQ ID NO: 167755 - DNA, 349 bp, Zea Mays
gatgacaacggccctgggcggcaacgcaccaagcttggggtggccggcagctgaggagaactgtctggcgcgcggcgactcagcgtcctagaggcgcctcgcctgcggatctacagtgtggcgtcctagaagcactcgcacgcatcccagcgatggcatcccaagcctccttggcaatccgattctgagaaagcgaaaactgcatctcgggcgggactgcagcgatgagggcatccagcacccatcgatcctcgtagtagtcgacgccatcgtaccgaagtgtttcccacatgtggcgaacctagaggcgtaccctcatcaccacgacccacttgatctatttggtctt

SEQ ID NO: 167756 - DNA, 404 bp, Zea Mays
tgttgtgaaatggtggagaggcattgatctagcaagaattttagtgcgtggtgctttgtttgcaccataaaaggacacatctagatgtagggccgctagtgccacaccgccttgaccaatctaatgagctctcttttgtatgaggccaatttggagtattgtgggtgatgggtcaattgtagaaggcaatgaggctaacatattgatggatcatgacaccaaagctaatgttggaggcattgtggtggacgatgaacacgacattgatgtccagaagctatagaggaggcccaacgactagggtctgcttgagggtgtcgaaggcccaccaccaaccctaccaccgcctgcaccaccattaactccaccactgccagatgtttgcaaccctccgactatgtcgt

SEQ ID NO: 167757 - DNA, 390 bp, Zea Mays
gaaaaggtgatcggcacctaaacaaatgtggtggttagggtttccgggcgcggaagcgttggcgttcatgccggcctagctactgtttatatagtgccctacgggccacaaccgattagaacagattgtgcccccggtcagggtgcatatcatccgcacgcagcaggggaggactcctccttttctcgctttctgatagtgagtcagaggacacatcctaacatcaccacagaaggggccagatcagtccacaagcacctcacctaatattatccaccaaagaacaccagctattgaactgtgcaaaagctctggcgtggcatcgccaataaagtgcagggaaaacagctactgcattccagtgtgcactgctctcaagcattgtccaat

SEQ ID NO: 167758 - DNA, 481 bp, Zea Mays
gcatctctcgttcatcatcatggtacctcttctttcgagcaaatacattatgttcttctgcaaagtaacaacttgtgaagtgtgctacctccttcagtttaaattgttccgcaatacatccttcaactcttgccttattgtccaccattgctctaagcttctttaatgctctttctatatcaaacatccacctgtactgaacaggaccaccgaccttagcctcatatggaagatgtataaagagatgctgcataggattgaagaaacctggtggaaatattttttccaatttgcacaaaagcaccgatgcctctttctccggctgttccatcacatctcttctgatttatttagcacacaatcgtctgtagaaatagctaactttagctaacgttttccacacagcatcggaaatgtacccacgaaacattacaggcatgagcctttccataattatgtggaagtcatggctcttcagtcc

SEQ ID NO: 167759 - DNA, 670 bp, Zea Mays
gtagtaaagaacagacagtgtgacatttgagtcatagaacagttcaagaaaagacaacattgagtcatagaacagttcaagaaaagacaacaacttatcatcaatgtattgatgattatcagttaacaaaggagaaccatctgaacttagtggatggttgctttggataaagatagaaattgtgtttctgcatggaacaatatgcttaaacatcaagtaagtagaattccatctaacatccatgtcaacatcaaacttacgagggcgaacaccttgactggcatgaaacatatgcactgaagctgctcgagaagactggcatgttgagttgcaatggttgtgctacacccatggaacccaggcttgaactgtccaaacagagtacagctcctgcaggcgatccaacctagtacagaagaataatcggtggacttcgttatctcttacacataaggtcttatctcacattcggtgtaggcttcttgagccggttcatggagtgtccaaagaccgaccatcaagctgcactaaaacatctcctacgctatgtcacggtgacagcagattacggactacagtacaagtggggagaagggagtctaaagctagtcgagtacccggacaatgacttggccggggacgtcgacgatcgtcgtagcactactggtgc

SEQ ID NO: 167760 - DNA, 601 bp, Zea Mays
tgactcagggcattgcattcttccatctggtctgtgatgatgcttggttgtgatatttcttggacaaagatcccaggtggagcctgggcccgactggaccccagcttcgacaatgcatctactgttgcattgcgatccctttccacgtgatggaattccaatccttcgaacttgtcttctagttttcgcacagctgcacagtatttgcccattaagtcggtcaagcagtcccaatctttgtttatttggcttatgaccactagcgagtcgtcatataccatcagcttcttgataccgagtgataccgtgatgctcagcccatggaccagtgcttcatattctgctgcattattggatgctggaaacaacagctggagtgcgtacttgagttgttcacctccgggagcaataaagagaatccctgcacccgctccttgcagctttagtgatctatcaaagtacattctccacacttcaacaacttctaggctatccaggacctggtgctcagtccattctgatatgaagtcgaccagtgcctgagtttttatcgccgtgcggggccaaaactctatgtcgtgagccccgagctcgcgtgccc

SEQ ID NO: 167761 - DNA, 333 bp, Zea Mays
tcttgtatgcagtagcatatttcaaagactcgtgaaacctattcattacagcccttgtgtatgtcctcgctacacgtatctcaaacatatacaatgtatttgtttccttttgaccctacagtagacaaaaatagacgttatactacggtaagttaaatattatgacataataatattctacgtactcaccatgcatcctagtgcctcttttgcctctttcatcttcctactgtgtagaagcttcaacatttgcttggcgaattgatgtagtggcgtgtttgcatcgacatgagcactttttacgagtttgtttatgctctcgctatgctgtgt

SEQ ID NO: 167762 - DNA, 456 bp, Zea Mays
gagcaccgacacccgagactgagtgtccgcctcgatctggacgagtttggcatccacagctgcatccgctgcggtgaggtgggcttcgacatcggaacgaagtccagaagagaaatctgacatggatctctcggatgcggacacccgagactccagatcgacgattcaagaattccatttggtgtccatcgccaggaaccgcttgtccaactcggagaggagagctcgggtctggttctcgagggctagggttaagccttcggttggggtggaagatgccatgggaagctgtccgaggaacggtgaatctgatactaattgttagaaaagggaggagacggaaggaagataggaacagcaggagcgacggggaggaagctgggagtagttctattagagtttttctcagttttttgcttaatcccgatacaaagacacacactaccatttatacaa

SEQ ID NO: 167763 - DNA, 447 bp, Zea Mays
gagctcttccattggtaactgtatctcagggacacgaagacacttcttaagttgagacacacggaatacattatgcacatcagatagattatcaggtagctcgagttgataggccatctctccaacttgcctaaaaaaactcagaatggtccaataaagcgaggggacaatttgcccttgactttaactctcctcattccacggagtggtgaaaccttgaggtacacatgatctccttcctcaaattccagtggtcttattctattatcagcgtagctcttttacctggtgtgagctaccctcaaattctctcgaattatacaaacttgttcttctgcttcttgaatcagttcaggcccaaagaactgtcttcctctagtctgatccaatatagaggagtcctgcactttctgccatatagagcctcaaatggtgacatcttcaaac

SEQ ID NO: 167764 - DNA, 670 bp, Zea Mays
ttcggctaactagagcaacgacctagcccgctatgcaacctactcgtcggctagcctattgttatcacaatccgagacacaacatatactacaacgtttttataaacatatatattcacaagtattttcgcacaccgaccaaagcatacgaatcgtaaaccactaatctctaaatcgaaaacaccatgcatttacttcccaaaccgtgaacacatacatgtttatcatatgaacagaacattccaataattattctaaagcgactaacttcattacacaacttgtatcacgatcctacttgatttacttgaagtgtctactcgaaatcgtgagcacaatcatacactatatgcgaagcataatttaacgaacgcgcaatgcgcatcgacatgactcgacttataaatatagagaaaacgatgactactttagcatgtcaccacctctctaattaagccaaaacaattcttacttatatcgaccgaacattcgtgtcgagcacaccttatattaccttatctcgcatacaaccatgttgtggcgtgcactcgagacacttcaattaatgtggcgcgaccactaatatatgaactccgatactcatgttttaataattcatcctctacgcaactagcattttctaactactcgtcacatcaataaatatact

SEQ ID NO: 167765 - DNA, 1318 bp, Zea Mays
cttcatatttagttctgactgcaatattcccatatgtcacttcccaatgagggtagaggtcaactggcgatgcttcgtcattagctcatgtccagcacaattgtgtgagcccacaatttttgttatcttccactttccgatgatcttctatatcatagcactgaccctccatggacactggtccttgtcacatacaatagcgtacgccgcttctcgtttgaatgaagcaccctatacgacctcttacgtaagatggcataatgttgcgaccacatcttcaaggcatttaggtccttgaaaaccggacccatttcgatcatcatgctaggacccgcctcaggagcatctagcaacccatcatccctcccttctgcaaaggcgtcatgagatagactcagatcgctgaactcatgcactcttggattctggtgctctggaataacacgcttcaacatctcaatatcactatgtgtaagttcaccaaccgaacggttatcatctgaatcagcggccatagcaaaggcataaggctcctcttcattcctaaactcaggactattggatgcaataattccatctccacaatggatatgtgttctgatcgtaggatcaaccagaacataaggaatgtctcctgcaacaaggaccaacaaaagaataaaatggcagcaatgaaaagaacaaaataggtatgctcgaaaatgatgagcggctacaaagagacttactgcaagggtccctgccaaagtgataccctcggtagaatctaggtggaggtaatgagttccacaatcatttgtaggctcacttaatgggatcatattgggggcagattgagcatcatgcacagttggcacgacctcaacaccacgatcatagttttcatcttcaaggcgagaggcaactaacaaacgtcgtaccactacctccatgacttgcttttgtgtcttcatagctgatttaacataattatcccactctcactgacactcaattgggatgataagtctttgcacgctgggtagaggacctacgtttagcaccccatcaatgacgatgtcatcagcatcatgacaataaatcttctccttagccttagcaaccacctcattaaaggagggtctatcatcgaatatcacagccacacgttgcatgtcaacgaactcagcatttccataacgatcttattccacgatgcatccatggtatatgcccaaaaaattgtccatctatttgaaatacgaattcaacgttgaataaccaattgtgatggttagtgcataaccccatccactatgactaactaatacctaactat

SEQ ID NO: 167766 - DNA, 918 bp, Zea Mays
attattttgtttgttaaaacttagaattgaattaatttgaagttcaaattcaaaagaataaagaataggaaagaaaataggaaataataaagaaaaaggggaaacaagacctatttgggccgaatctaccgtggcccatctccatcggaacgacctccacgcgcgcactatccactcctctggcgctggtgcctccgcgtggtggggccgcctgtgtcaacttcttcctcaacagaacaccgcgaagactgccgcgcgctcgcccgcgattgtcggggagttcggctggccgagttctttcttccccctcctcggacttccctggcttggagtataagacccacagacatgtggacccccagcacgggagcttcttcgccctgttaatcggaacggaattgcggctgtcgcatggtcccagtcgagatcttcgctgggctataaaagccaaagccgcagcccctcctcgactcacaacccatagctgaccgtcgccccccccccctcttcccatccgcctgtgcccacctccgttgtgcaagcgccgtagccaccatcgccgttggatgggggagaacagcgccgcgttcttcgaccacacaattccgtcgtcgtcgcaatggagtccgggttacgccgccgatctggcctcgactggtggattgagagcttcgtgaaattgagcgaatcaggcgttgggtcgtcgaatctggaagccatggcgtgcataactgggactgcacaccgaagaaagaacaccaccgcggatccgcgtgacgccgtgggggaccctgttgctgcctccattaccggtgagaaactatttaatcaattcggatgaccctcctcggtatgttgcgcccaaccgtgaccaattttgcgccacggctttgattcggccgttcaccggcgtacctc

SEQ ID NO: 167767 - DNA, 671 bp, Zea Mays
ggaggcaaagtactgtccgaagtgtaaatcatctaggttcatggaggtagactctggtgatggacagaagaggtagctcgacatccttttgacaatcctacggcaccttatgttcataccgaggatccaatgtctgtacatgacagaggaattcgtgaaacagatgacatggcacaaaaatggaaaacgatataatcctgacaagatggtgcacgcatctgatggtgaagcatggaaacactttgatgccattcaccgtgagaaagccgaagaggctcgtaatgtacgtgttgcgctggccacagatgggttcaatccttatggaatgagcgatgccccgtacacatgttggcctgtgtttgttatcccaatcaatctctcccctggtgtgtgctttcaaaggtagaatatattcgtgtcgttgataattcccggacacccagggaataaaatgggcgtgtacatggatcctttgatcgatgaattggtatgtgcctgggaggaaggggtatggacgtatgaccgagctacgaagacaaacttcagaatgcatgtttggtaccagtactcaatgcatgacttaccggtgtatgggctattctgcgcctggtgtgttcacggtaagttcccatgcccagtttgcaaggaagctctcaggttcatttggttga

SEQ ID NO: 167768 - DNA, 694 bp, Zea Mays
tccggctaggcacacgggactggacaacaccttgtcgtgtgcatcacactgtcacgtgccagagccgatgccgactgtcgtcggcggccctggcacccacaaccaaagccagctgcctccggacactcagtcgtcgtcgccgcctccgagcgccagcccaggccatcacgagccaccacccctgtgcacagaccataaccagcagccaaacactgcatcgacagcacgcgcgcagccactgccaagcgcaatcgtctctactcacgcctgacgccgccgctatcacgtgccaccctcctgccgacaaatgcggcctcctcattgccaagcgcaacccctcacttctctcttggctgcgccaccatgatgtcgccacggaatgcgcagagccgccgaggagagcaaagtcccagcgagaaacacaggagctcttccttccacctctggcgaacctccaaggaaactcggcgcccagacctgctcgcgcacagggagcatctctgctccggcggctgctcaccggcctccctggttcttcctctcacaatcgtgcagcgccctcttctctacggtggttgctactcctctctgaagctatgcgcaggaggacgtcacgcctcctccctactacacgccctggtcgacgacgaatttcccgtggctcaggaggccgcgcccgcccaaatccgccgga

SEQ ID NO: 167769 - DNA, 790 bp, Zea Mays
tgcagcacgacgagcactttctcagtattgctcgttgttcagcggggtagctgatggccttgacctgaagtactaccctcgccgttcgaccgactgtgctggaggtgtgattttctcgccagttggtgagggcaatcctaggctgaacagtatggtcaatctggtcatcgtgctcaacacagagttggaccacgcccttgacgagttgggcaaggttcgggcggaggttacagaattgcgtgctgagtgcgcagcatgccactatctggatggtggtcctcccgcccctgtcaggattcagcacccttaccgttcaccgccccatggtcgcttcgactatggtaccccagactgtaggacccggatatatttggatccttagatcgacagagtcggagtctataataatgcttagttcagtgtcttagactaagtcaattttagttagagttagtttgcttatcttatgttggatgcttgttatgatggacatgtactaaagttggatctttgtaataattgtcaccaaggtgtgggtatcccctacaacttggtgtggttattaataaagtcagttatttagttgggtaatccctttatttcccctttcctctttatctaagaagctgtcagtgaagatgatcaattgttcagtgttgtgaagatttctgtataccttttcttatgctagaagactacagagttagatctgatatgtgtgtgattcctacagatgtctgagaacaggcgcagaggtgcgaggcgtgcacagccagagcagcaggcaccc

SEQ ID NO: 167770 - DNA, 298 bp, Zea Mays
ttgctgcagagatttggacttggtaccatagaaaatctggagaaaaccagccctaaatcttgactgtcaggtgcactgaatagaacttctgatggtacagtggctaaactggatcagaccgccagcgcggctgtcctcaccgccgacggatccctccgccgcgattcgtgtcgccggcgtttggattcgtgcaccggacttgtggataacctctcggggtaaaagatcctcaccgccgtcaagctggaagccaccccggtcagccgcggtactcctcccctggctcaccgctcgcggg

SEQ ID NO: 167771 - DNA, 424 bp, Zea Mays
ctcgggcgggccggagtaactccagtgagccattccggccacggggaggggacttaaggcgcgctaaggcctgggctagcttcaacagaggcaggggtgacacagggacctactccggggaactagaccgggctaaatcggccggccaccgtgcgagcacggcggaccgccgtggccgagcaccggcgaaggtgaaattggccgaacacagagcgcaataagggaaattgggcacgaggacgggtgtctcacctcggggcggagctcggggaggcttggagcggtctctggcgagctggacggccgggaacgcgggcgcgggtctccgacggctgctggcggcgtgggcagagcgcgagagagggtgaaactgtgcgaaatgaggcgaggggtgtgcgcggggcactggcggggctctaagaag

SEQ ID NO: 167772 - DNA, 615 bp, Zea Mays
gcaatgtgggccatggccccaccttaattttttttaatcccttatacctaggtttaggtacacaccaaaataaacaattttttgtatagttagcgtggacaaatctaatgaaaactaggttttgatctatttttctctcgacgcttcactgctcagtccactcttcacctgagccatttgattatcttccctagcgcaagctcactcgtggctcactcgcttcttcgatcatcgacagaccagtaagtcggtaacctaacccgccgttgtagcgcaccttgccttctcatcactcatcagctcgtcgactcatcgggatcctgcacacaacgttgatattttgcctcctagtctgcaccagcatatgggcaagctattagtgggaccatggcgtcacctgtccctcgctaactcattagagtcccaccgcatcgttgcaacacgacaataggtgtcgcttgccgtcaccgtcatctaccgctacctcgcctcctgcactcgctcctcctacctgtcgttgtctcaccaacgccatctcacgacaaattcgatgactcgccagaacaacacgccgatgcggctgctctgccctagtgcctcgtcttgagtcagttc

SEQ ID NO: 167773 - DNA, 289 bp, Zea Mays
gccaacaccaccctggggggtcaggttttctacatcagccgcctctaaggctgaaggctcccctgtcacctccatgggagtcgggcaactcggaccaacgtctcggctttgaagactgccctccaaagtcgatgatgcacaagacactgcccgggatacctccaatcccatgtccggaattcctgaacaaacagccatcatgtcatcagcagctggctctgatagcatatcctcagggacgacctcctcaagggtctgatcaaaatccgatattgacagttcctgaagg

SEQ ID NO: 167774 - DNA, 1063 bp, Zea Mays
ggagaatcttaccataggtagaagtcacaagtcatgggtccatggcacaccacggagcattgaggcccacggcggcgctaaggtacccggcgagcaattcctactgcgccaaagctcgaatcgtccctaccgaagcagctacacgaagcggaaacaagcacgaagctattggaggattgctcaccgagaatcgcctgcaaagatgctctgcccacggtggtcagcggattccagaggaggaatggacggcggcgagaaattctttggtccagggcgacgcttacgccagatagcaagcttgcgtacgatcctcggtcactggttatcgcctccgaccaccaccctgggattcgaacggcaggaattgccacatgcaacggtggcggcgtacttctctctcctctcttcctctccgcggcggcggtggtaaggcactgcacgcacggtgatacgacctcgaatcggtggatggagggaagggggtcgcggagcttcggcttttatgcaccacggtgaagtccgagcatggttaagaagcgatatcttcacgcgcggattcagcgtttgcgaacggaactagagctgggagaagaccctgccggtggggcccaccagcaagtgaccgagtaagacccggaaagattagttgcggttgcggcgaactcggggggtgagagccagctccgcgcggattttgttcaggtgcgagcgcggatgagaacgatgacaagcgggaccctcttgtcagccactggatgtgtatgcgcgtgaggagccagatgattttgggccggccaagcgtggttgaggtgggtcgaaggattgggcccagtttagtgttttcactttattctttttcctgctttcttattccaaatttctatttccaaattccaacttggttttggatttcaaactcaattaggtgcacatactaaactccagcatgaaattctataggtttttagtaatatagttattttattttagttcttttagacatgcttccaatcatataaaagagaatagttcacacattattaattcttgggagatataattt

SEQ ID NO: 167775 - DNA, 778 bp, Zea Mays
tgaccccaacaagaagtaggtaaattgcattcatgaagtaaaggtcttgcgatgagtttgatcctcttaataagagattcagctaaaccattttgagtatgtacataaggcacataatgttcaatgtgtattccctggaccatacaataatcattgaatgctctagaagagaattcagccgcattatctaggcggattttctggatttgatgttcaggataatgtgctttcaatcgaatgacttgcgttatgattttagcaaaagcatggttacgtgtagacagaaggcacacatgtgaccatcgtgtagatgcgtctattaataccatgaagtatctgaatagtccagataatggttgtatgggcccacaaatttcaccttgaattcgttcaaggaacttgagtggttcagcatgaatcttaagaggagatggtcttaagattagctttctcgttgcacatgatgtacatataaaatcagatcgtttagggaatttagcaggctttaaatcatgaccaatgcaattacatgtgattttctgcatcatccctattccagggtgaccaagacgtgcatgccaggtcttgaatgaatcgacattctaaaaaatcactttgtacgtaacatgaggtactggttttatgtatgtgtagtacaatccggatggaagtgaaggtattctttctagaatgttagcgccatattcagaaggtttggaaatgaggagaaattcctcattattttctgtatgagtagtaatatgtaaaccacttatcc

SEQ ID NO: 167776 - DNA, 761 bp, Zea Mays
cttggtgcccgcatatcttgcaaactagggcagatcttccatggaaacttacacaaactagctagccctaggtgccaggaagagatcttgcacaagacatttggcgagattcgcacgctttggagctctgcaggcgcaagaactcgggcagatgaacacgaccacgtgttcgacatgccctggcgacgctagagcatgccctcggcgctccgcccacacgcgcagccccgcgccgtgccaaccccacgtccatgcccacgctcgcagctataaaagccacctcggcctcgaccgtacacccccacgcgtccctgacccagcccgagcacaagttcgccggcgtttgcccagagagcgaagtgctagcgaccgcgcaagccacggccaccgtagaccggccaaaccagccactccccgtcccgtccgaccctcgggttagcttctacggacctcattgaagctccccaacctgcggattgaaccatacctcgccaaagacgccgtatcgacatagccggacttcaatcggccgccgtcgcacgtagaccgagctccacggtaagccattcgtcagttccttgtacctatagcatccttagcatcccataaagctccctgtgccatttgattgaaccctaccactgtgagaaggccggagcatacgccatcgatgagcccgaccgcctgtgcacgcggacagacctatttcggccatcactgtcgacgacccgcacctcgacgtgaccgccaggaccttccgg

SEQ ID NO: 167777 - DNA, 646 bp, Zea Mays
cagggactctggcgcaaaataacccagacacagagaacatggttcccggatggcgggtttattcatgcaaagggcgaggtttctttagcaaaaatgcctggccgaaggggtatccgcaaacctcggccgttggatcaccagccgagggctcggattagatcccaacccaccaatacacccgagccacggatcacgagatcaacggccagaatcaatcgcgcgaaggggttatgtgtcatttaatcctggctgtctacgcggagatcaacggccagcaccagtcgatcaccaacttctaatcgcagctgttcaaatcagatcctacggtcagaaagactcatccccaacctccagccgagctggacgacggcgcccacgcgagaccacggcggagccacgccggtgaagtattgccccgacaacccaacgcaccagacaaaaatccagggagtgcaacgcggtgtgcatggcatggagattacaatggatgtctacataccgtgattcgggcagcgcagagctcacgcatcggtacacggcggcatggctgatctccgttgagaaattcgccggttgctggttactcccccagccttaattctgcccggacacgatccccgtatcaaggcggattccccaagccacc

SEQ ID NO: 167778 - DNA, 474 bp, Zea Mays
gcataccccttttgtaatagtggatgggctttactgctatgtcgtaatgccttatggtctgaaaaacgccttgccgacatttctgtgggcgatgagtaagactttcggggacctgattagggacaaggtggaagtgttttcttcgatgacatcatagtcaagactaagagatggtcgaccctagtggaagacttaaccctggtctttgacaagctgcaggcaacatgcacaaagctgaacccggacaagtgtgtctttggtgtctccgtaggaaagttgctggggttcctggtttcgcaccggggcattgaagcaaacccggagaagatcaaagcgattgaggcgatgaggcctccagcccgtatcaatgacgtccagaagcttacggggtcattagccacccttagccgcttcatttcaaggctggctgagagggcgctacccttcttcaatctattgcggaagtccggccca

SEQ ID NO: 167779 - DNA, 367 bp, Zea Mays
gttatcccctctaaccttgaaacctaagggctgtaatttttgtaccacgttatgtacagaaaggaaaaacagacgatggtggatcatcattaccttctgtgaagctctcatccagattgcgaatagctttgagctttgtagcatgttccatcgagtcaccagcgtaagaagctcccagtctcttgtatctttgacatgaaggcgatcccagcaacacctcaggtactgcagccagagacagaacttccggagtgtgaaccacaccctatgaaactgctatatgtacaaccgaagctggactggccagcacagctgcacacggcttttctgaagcatcagacaccagcataggcgagcatagttcctg

SEQ ID NO: 167780 - DNA, 560 bp, Zea Mays
agtcagatggaggttcagtgccaaaccagcttttgccagaatgaagagggtttccccaagttgctgaaagcatgcacagttcgccttggaatcaggagccagctagagtatgatggtcgtgaattcgtcaagcatggcacagagaagtgtgtcgtgactgtatacattggatccagtccgcaccatgtggaatggagtgtcactgctgctgggcacagattcaaagacacctgtcaagtcgtcgctcgcaaggcattgagggccctgtgtcagatctatgaagaggaagtggccgacacaccgctcatattctttccgccctttcagagaaaccgtccagtttggatgaccaggatgcgtgcattggaaggtcagcaactgcttgaggacaaccccacagtcgtgtacctcactgcgtacctgctcaccctggatgcgcagtatgatttcttggctcggcaccaccatcagatgattgctcgagcagaagatgcagagaagctcaactgtaagctccatgtggatctcaccacaactcaagcccgtgtagctgccttgga

SEQ ID NO: 167781 - DNA, 399 bp, Zea Mays
tcggtgggggaatcaatcgcggggaaggataacctcagacgtggcaccatcccgcatacctagccgggcgtggccggagatattcaccggcggtcgccatgactcagttatttccgccgtggtgtcacccatgccttgctcctccctcactgtgtcttttccctacgtggtgaccatgcgctaacgatgttatctgtggctgtggatagttagccggaccgtcgtgcctataaatagcgccatgaaccccggcgagacactcacaacttcactagcgagcttgggaaaagccaaaattcgcactgccttctccatctctccccaaattgagtgtgcacggtgaatcggtagcactttgcgatcgtgtagccccaatctcacctcccaatttcgccagag

SEQ ID NO: 167782 - DNA, 629 bp, Zea Mays
cctccgctccgaagacgccactgcctgatccactgatgtcgcggggtggttacgccagcctggcggtcagctcatccgctcaccccgccgcgtcttcgctctacgcctctgactcacaggaccaggtcgttaggcccgtcatccccgtgtaacagacctcaccgatgaactcggagccgggcgcaaccgaataccagccaggcgcatgcttccgagtccatataggcgaccgcgccacaacctctttcctcctcgtctaaagagttctaagccaccgcgggggaaacagagagaaacgaggaggaaatcacgagcaccgccgcccagccacagggctgcagggtctgcgtgctcggcgtcgtgaaccgggaagaagggaaggtcgtctgattcgcctggttcagcggatcgtgttgggggtggtttcgaagttcggggacttctgctgctggccggattcctcaccggaggtctatcgccgtcgtgggaccgcctagcaccgtgggcagagcatcttcgcgggcgattcgcggtgagcaatcctccaatagcttcgtgcttgttttcgcttcgtgtagctgcttcggtagggacgatacgagctttggcgcagtaggaattgctcgccg

SEQ ID NO: 167783 - DNA, 502 bp, Zea Mays
attaaatacggattaaacaagtttatggatttatttctaaactaaaaatcatttttatgaaatgttttatcctttttattctctgattgaactagggttactattatgcgaaagaccaggggctaattcctatatttctccaagactcatattcaccccgcgtggatggcgggttgaaactctaaatttgcaggggttctttagataaaaatcacggcgaaggggtatcgacgatagtgggccgttggattacgatcgagcggatcagattagattcaaaccccaccgaaccgctatgcagctccagtcgtccgattttgatcaaacgaccaggaacaccccacaccatgatctcatctgattcatccgtgggtcgatcgacgacacggattaatctcaggaaaggggtacgtgcacatcaaccgcaaccgcggatttcaagatccacggccatagtacttcttctccacgcgaataccaggtgtggcagcaccgttccccc

SEQ ID NO: 167784 - DNA, 318 bp, Zea Mays
aaccatgagtgctataatggctctggcttttgtaattagctctatagactaagtgcttagcaaccctacctgaaagatgggcaagaggggcggcagtggtttggtggaagctcatgttaacatggggtggtagtcttggctatgttacatcactcagagggccatctatactgacatggaaacattagcgggtggctttgtactaaggatattttctgaaagcctcataatggatccctagtcattcacctcggcagtgtttacgggtccgatcaacccaggctagatgggatacatggcttgtgggtaaagttgtac

SEQ ID NO: 167785 - DNA, 614 bp, Zea Mays
gatatgaattttccaagttctagcaattgtttttgcattaaaaatacatttactaattaatttattcattttaaacaggttctggactgggcatcaattctcagaaagctcaagggtctctgcgcaagataacctagactcagggaacagtggccaatggactgcgggttgtttcagtggaaacaggaggtctcttttgtgaatttaccacggtgaaggggtatcgtccaccgtgggccacacgatcaagtatcagtggccaagattagagcagcgcgattatgaatcggtatgaagccggaaccctccgatcccgatcctacggtctagattcagcgccatcctatccctatcgtgagccgctcgatcaagatctgacgatcggcattaaacacgagaaggctattcccttgattcatcagtaaccgttagatgtagatccaacggcgcaaacatgattaccctgagatctaatcgtaaccgtccctttcttatccaaggatcaggcgccctcttcccgcaccagccacctgacgtggcggcgccgcccgacttgcggcggcacaccgccggaggacacatgaattcccccctggtgcacaatttccctcccg

SEQ ID NO: 167786 - DNA, 719 bp, Zea Mays
tcggcgcactagaagatgccgaagtagtagttttccttttcctcttttgtttccgaataggaaaacagtagtcagggtagataaactcgataacataaaaaaccctatttagtctcttttccctcgagcaccgaaggcgactgtcatagcttcgtcttcagccctcgagtaggctccaagcagctcatcacttgttgcctctatagcatccaaccaatcatcatttggctcgtcaaaccgatccctgaaccgaaatgtgtacttcagataaactaggccattttggctggagccagcagcagtctccttcagcatttcccatccacttgcaaggggccatactctgtaagaaatttgctcttggaccaaatccctcgtgccgatataggtgcatatagtattgaaagccgtctggcacgcttgcacgtcttttccgagtgcagctgaaggtcttctaatgccgaagcgttaccatataggacgttgaatgatgccccttatgtcctccctctggtccaggtcgttcttcacataaaaccacttttgcatccaagacctcgaccacttcttcctaaatgtaggcacatgataattggcctcagagtggggcatgaagctgtagcagccgaagttgttgtggtattgttctttcccagtcgctttcgtctgataggataattcgtgaatattacagaagcacctggcgtctggttctaacc

SEQ ID NO: 167787 - DNA, 857 bp, Zea Mays
atctaagttgctggattagaaaccaagggttaggattagatcggccaaaatactgaaccggtacgccacgagatccatcagatctaaatctaatggtactaactcattacgcggtgatctaatcttggccattggctaaagatccagtggcttggattaagtgaccgaagaggtatgctccccgcctaatccccgccacacatctggcaaccgacgacagaagccctatcttccccccatcggtacccaggcacggcggaagagggtgatgtcacgacggcgctttcgtcgagataggtggcctggcggtaaggtcttcactcctacagaactatccggacccacgcgaagaggagagcaaggcgaatcgatctaagggtaactcaccgtggaataagtagcaggtcgctatgccgacgatgaagggcggtccgaggcaatttcttgaaattcggtgagcaattgccggcactccggccaattcccccgtcagaggaggtcaccaggatgcgtggttggcgcgaccgattcttcccatactatatttaggtggacaacgacgctgcacactgattccatgcacggtggcgcccacccccgcgctggtcgtcgacgtgatgctctgcagagtcgttttggtgccccggttcgaggaggaaggtggtcgccagggcttgcttttatagcccggaggcgttgacgagttggtcatgtcggcccccaaggatctcgcggataccgttgagctctaaactcgacgttggtttaatcttggacacagggtaggagacgaccttcgacagcgcgggcccgtgctccagagaaagaggtagcggcatgcgtagctggtcactgac

SEQ ID NO: 167788 - DNA, 396 bp, Zea Mays
tcgggcttgtggtcgaagtcggggtcatggaccttgacgtggctgcagaggaggaggagcgccggcttgaggatcacaatgaggcgcaggatgctaggtactttctggggttcggtgacacccatggggatcctattgaagttgatactgttgtcagctctcaaattggtactggcactggatccacaagcccaccagtccctgatcctagtcaggctaatcctgatgctagtggtaccaacatgaagaaaaggtccaagtgctggaatgacttcgatgaattgactaagactgtcgatggtaagaaagtcaggtatgctgctcgttgcaagcactgtaagcaaacactcagtgctcgatctagttctggtactggccatttgttgcgacataatt

SEQ ID NO: 167789 - DNA, 559 bp, Zea Mays
ctttatatgggctatgagaagccaaggactagaaccatatgtgagatgcttttgcaacatccatgagttgtcgtatgagacgaaggctactggaaaggagcagtatcacaacaactttggttgttacagttttgtgcatcgatctgagaagagctacccaattcccacatttcggaagagatggcctaggtcctagatgcaggaatggttctacatgaagaatgacctaagtcaatgggaggatgtaaaagggatcattcaacatcttatatggtctcgcttcggcattaggaggccagccactgcccttggaaatgatatacaaacatgccaggcggctttcaatatagtgtgtacttacataggcacaagggacttggtgcaggagcacattgcttatagagtgtggccacttgcagatgggtgggaaatgccgaaggagactgctgctggctctagccaaggtggtttagtttacctgaagtataccttcaggtacaggagccaatttgatgaaccgaatgacgactggctagatgccatagaggcgactagtgat

SEQ ID NO: 167790 - DNA, 376 bp, Zea Mays
gtcgtggcaagctccctctgcgccctcgagaagcttcctcccccacgacaatctcccctgaggcctcgacaagcgcgtccgccccggatccgcgtcccagccatcttctgtcccggatcgtgatgctcacgtcatccctaaaccctgctcggtctccatggaagggtcctccacctccgccccggatccgcgtcctagccatcctccgccctggatccacgtccgtgtccacgctcggtctccatggaagggtcctccactcgtgaacctcgcccccaccaaccaggctctctatacgggggagaagtttccaaccaaagcaaaatcgtcgtcgtgctgttcgtagcggtcgccgcggagaaggagcgggccccga

SEQ ID NO: 167791 - DNA, 569 bp, Zea Mays
gtcctatttgccaagtattcttgcaccaagtccctagtgctgatatgctctgccacaactctaaattccacctcggctagtaggtagggggaccccaactacatgttacacaggggtcgagtcatgcgaagctcagtctcaagggacccgttaccatgctcatgagcttctccctcttcttttcgtcagccttcacataaaaccactcatttgtccacccggtcggccacttagtacgataaccaatcatgggggccttggtatccttttggtatgcaaaattgtagcacccgaagttcttgtccagaccatcggctctagccttcgtttgataatgaagttcgtgcactcgacagaacccttcggtattggcactttttccatggcttcgaacagcccaaatatacacgctaagtctaacaatggcattgagggtcagttgatgtaggtaaatttcgaacttcttcaaaacttcaccgatcatctcataaagggggaaccgaagtcctgccctgaagaaggttttgaagacgacgacttcatcctcttttggctctagaatcacctcc

SEQ ID NO: 167792 - DNA, 449 bp, Zea Mays
ttgtggatcccggggtgttacagttggtatcaaagcttaggctttagattcttggcaatttgaagataaattttgacacacttgcacatataaggaagggtatgggttcatgtatctttgatatatattagtgtctttgaagtgcagatgacaataatttcacccctccccattcctttacggtgatgtggtaagttgtttatggcttaatgcttgatataatttatttctgaaattttgatattgttttattaatgcagttcatatcgctggtcatttgtgagattgaagttgttactatgcttgtgatatacaagtatgcctatgttgttttcaccatgtttttcatgggtgagttttattacaataatattgttatatatgcttgattgaggatgtttctaagaggagtgtgaattgcgtgtttttggggtacaaggtaatcatca

SEQ ID NO: 167793 - DNA, 1400 bp, Zea Mays
agggttgagggctcaactttggagccttgtaactttcaaaatatagggtttttgccctaggtcaccacatcaaaattgtagagcaaactaaggagaacaactttgcttaaggttgtgagctcagttgttaagaaaaatccagagataattaagctcaaaatcaggctgtcaggctgctaaggtctgaattttcagactaacagtgaactgacatcaacttcaagcctaaattcaagcatgatccaatgggtttttgtggcagcatcatatggcaatattgtagatggtatgttgctttaccactttgatgcagagtttgagttgagttgtcattcaaaattaagagaaaaccaagctccaagtctgtctgtcaggttgtctgaaggaagtgctccatggtacagtgaccgaattaagttcagaacacttcatcgccgtcgatcactcctctgccgcgattcatgccgccggcgttaggactcgtgctcggggtaggtgtataaggacgtgcggtgaaagatccttgccgacggtgagctggaggtcactccggtgactcaccgtggctatcttttctactttgcggctggacagataacctcgccggtgaaccgtcgtgttctggccctgcgccgcgtgtcctaaccgcgccaccacatcaccgtgactccctctagcttcctgtcgaccaccggaactaccgccacggtagaagccacctagcgcttgcgccagtgtcttcttctacctccgaccgccgcgcgtctcgcccgattcaccggccaccgacgaagccgcctataaattaagcccgtgaccagctccgcagggtcatcagctaaccagccaccactaatcagccaagatcgttcgccagagctcgagaatttcttgtttcccccaaactggtttccgccaccgcaaaactcacctcaccgcggccagccctttctaggtcagttcatccctcactctcctttgtttgagcactcttgtcgctctgtgatgcttgccgaaccgccaatttgtacggaatagctctagatcaccgagaacgcgctcatccgtccgccacccattcggttcacgcggatagagcttaataggttgtcattcgtgcaattaggttgggggaaatactcggggtaggtccgatttgatgtccgccgctcgggagcgccagtcttagccccattcggccggtacagacgctcgccggagctcggtcgtgcatgaacgccgtcggggacctcccactgcgaagaaacagaaaccaggggtctcttttgcaagttgtcagtggctctgttaaacagtgaaagaactcgttcgctgttagacagaaacgcaagggccctttttgcaaaaccgccagcgcgcgggcgcgggcgcgcgtttcc

SEQ ID NO: 167794 - DNA, 777 bp, Zea Mays
gtgatgattgattattaaggaaatgtacgactttagttgagtttatggactaaccattgtgtgtgtgtggtgcaacatgtcttatggattgtgatgtgcaggtgtagagctcagagatggttgacgaagaaggtaaaggccaagcagggtatgtgatgatggactaatagtggtgaaagacagacgtaaagacttaggctgaatgactggagaagctggaagactgatcgtggtggctaacatctaggaacattgataagtgcaagagacctagtcaagatagtggttaaccaaataaaaagaggcgctggaggatatagtgatcaggcgcgatggactgacgggtgacacgcgtcgaggtcatagagaaaggtgtactatgtacggacacagtactcacgagaggtttggtggtttgggcctcaaaccatagtgcggacggtttgtttcttttggcctcaaaattggcgagtggtggatcaacggacaagtggcaacatcacgaagcttgtgtcgaggcaaaaattaagttgtgaaggcatcgagaccgtcggatgtgcaataaaaaatatgtcttgttttgtcggtttgtagattagcattttagtatttttgccataaacccatatgtattggatgtggctggttgggaggggtatccttgcaccctaatttcaattttttaggcttagccaggtgcttaaggagaaagagagagtagagtcgaccaccattgaccacctattgctctaacttcttcacttttgagtggaagtg

SEQ ID NO: 167795 - DNA, 353 bp, Zea Mays
ggtcttagttgattcgtttgatgcccatgctcttttgactctggcgctagttttttgtttgtttcggagaattttgtgtcgcgtgctagtctatcggtgtagaggatgggtcacccaattgtggttagttctgctaatggctccattagtagctgttaagtcttcctgtgttgttccatcgttcttgctgatgaggtcttttcagctaatctcgtggtgatttccctggggccatttgatgttatcttgggtatggattggttatctcagtatcgcgtagttatatcctgtttttggaagacagtgttattgcaggcaccgtcgggtagggaggtggtattcttgggaagctc

SEQ ID NO: 167796 - DNA, 1243 bp, Zea Mays
gggctaggagcctcccttaggaggagcttcataaggttagaagccccagctaaacaccacatctggaattcagtagccactgagcaataactgcctgcagcttgggttgagctccatcgaacacgcaggcatttctgtgcttccaaagctcccaagtgaccaagatgactaaggaattgaaccttttttaaaaatctttgggaatagcagcggtggccatacaccaccaggaccaaaaccgactcaaataattggggtgtggaaccatgtcaaaattaagtttccttaaaatcactcccacacttctctgggcagcacacaagaggagaggactatgtccagatttgcaactatagaagcaggaaagaaagtgcatgataccatccttttaaccggattttggagctcaattgaggattgcttgagagtttcacaaccccttattgttttgttgaggatagttgatggggataagaggccagcaatgccagaggtttcattttgtatggaacattggaacatgcacagaaaaagattaagaaaatttccctactatggcaaaggcaaacatgcttaagcctatcttggaaattattgaccggtattgggaagatcaaatggaccaacaactatatgggcagcgctatatttgaacgcaaacaagtattttgagctgaaaacagatgatgttcatgctggtaagctaaggtctgcatttagacaaaattgatgaccaagctttggaatatgaggacctaagggctagcttcagtaacaaaattgcaatcaacatcatcaaaattcaaaaccaagacttttagtaagttcttcacagatcatacaatctgaattttttagtctttccaaatttctaacaagaatttttttttggtcacttgatctagttgaatggtggcgttcatatggtggcagagtcgtagagctccaaagatttgcaaaacatgtcattgggctttgtgcttcatcttcagctgtgagcgctgttagagcacatttgagtccgcaagtaatttgtcaatctacttgtgtttgctgaaaatttcttttctttgcatttttaccattgcagatttatactaagaaaagaaacaatttagagcataagaggctgaatgactttcagtatatccgaaggatggcagtgaggttctaacagcgacatgagaaaggagcagacagctttgattctttgtgtttggaagactttgattagaacaatgag

SEQ ID NO: 167797 - DNA, 308 bp, Zea Mays
agcagcctaagttctcatgaagaccatctgctctggccttcgtttgatagtgcagctcgtgcacccggcagaaagcttcggcattgggactcatacactggcttcggagggcccatatgtagacactaagtctaacgattgcattgggtgtcagctgatgaaagtatatctcaaaaattttcaaaacttctccaatcatctcatgcagggggaaacgaagtccttccctgaagaagcttttaaacactacgacttcatcatcttttggttctagaatcacctcttccccaacaaaccggataagcttg

SEQ ID NO: 167798 - DNA, 579 bp, Zea Mays
cttggatgcggacgtcggtagggtggttctcagctgggtggcgtgcatggctcggtgctccgatgacagatgtcggggtgcggtcattggtggtgctccgagcatggaggggcgagccctagcggtgacttagcggggtaagtgcagggcgacagttctgagcgggcgagggcaggtgtgagaaatgaggtgagggggtgagaacgagcgcttctaggggttcaaaaggggacgtcatgcgggtgattcctgaattggatgcacgacgtgcgcgcgtcgagcagaggggggcggggtggcgactatggtggggacgaggggagctgacagggggcccgtggcattgtgaagcgggcaagggtgggcacggtgtggctggcaagcggggccagctaggtagagggagactgagggcacgtggctgagggcgccaacgccgacagggcaggcccgatgagcagagagagaaaggggggaaagggcacacgactgagatggaccggctaggccaaaagcccgagggaagggggttgcgagcttcttttctattttccctttcttctgcttttgctttccctt

SEQ ID NO: 167799 - DNA, 1154 bp, Zea Mays
cgcatatgagcagattttttttatcaagttagtctcacaagtttatgcaatttacaatattgtgttatgctgctttgttgatagaattatgcaatttacaatttagtagtgatgttgcacgatatgttgggatctaatggaatacatggtcatgaactgaactgaattgacttgcgcttatctttttttttatcctttatgtattttatgtatatgtgttgtttcatttggcaggaacatcagacatgaagaacgtagaccgacctccttccaatccaaaacggatcataatccagtctactcaggagtgcttcagcgttgacataccccgtgcttcggcggggactgttagacctgaaacaaggcaggctgctgatgaggatgatgactttatgccattatccaagaagcgtaacttgaacgacagtcctgggaaagttttgaaaaaggtagtcactaagcggaggaaagcagtgccccccgacaggttagagatttatgtctatggcaatatatcattttatacgtgaaatcatgttgtcttgatgtctgagttaaacattgtgttgcgattatgcagatgtaaatgtttacgatattcattttatatatttttttcagtagaggcttaacgtcagatgcaacccccaagatgtgttagtaagcatacagatattaaatgacagacagcaacaagcaattgcacgtaggggattttctagtattcttgatatgagactggatgcactcggcagcagatcacacttagcttggctgatggaaaagctcgaccacaatgacatgacaattcgagctggccctggaaaggagctgaaaattacaaaggatacggtacacctaattttagggttaccgaatgctgggggaggaactgcattaggcatcgatgaagctgttgctgccaacaatataagagctgaacttggtctatcgaaagaagattttggggttacagctcttcaagatcgtttgaggaaaggttctgacgatgatttaagcatcagatgctttttcttgatattgttcaataggttgttgttccctacttccagctggggaataacaaaccatgaggttcttttaaccgaggagatggatcgtttccaccagatggactggtgccagcttatttt

SEQ ID NO: 167800 - DNA, 505 bp, Zea Mays
ttatagacgttgttactttttatataaaaatgataaaatataatttggttcagaggtgatctaagaattaatttgttttttaacagaggacatgataatggtgaatcgggcgagggcgaatgaacttgaggggaaaattctactttgcgattagagcaacgcatcgcgaaatgcatcagtcgtggctcttgacttttttttgtcagtcacagcaccacaaattaatttgtgcttgcggagtcaagggcaatccaaaaaaacaaagctaatgatgacgcactgctacagaccgaattaaatatgcagaagagaatcagaacaaatcgccatgttttgaattcgtcgcccttttacggaccgagtcgccagccatagacgagcacaccggatcaaaactttgctcgcagattgattgttgatccagtttgacttgcctctccgtttacccggcatgcatttgtttccaaattccaggcacgagcgaagcaatcgatcttcttccatg

SEQ ID NO: 167801 - DNA, 657 bp, Zea Mays
cgagtttatacttcaactttttacaatgcacatttacaatacaatttgaccgattagtgcctaccgattaattcatgattaatatgtgataagtgattaatcgctcatgtctagcttgcagattaaattctgatgtccgacatcttaaacctttatatatacttgcatatagttgtgctaacactacgatcccgtggaggggaagggtcatcgacggcgtcgacaacgtgaggggagatgttgacggcgatgacacgagcgaggggaagagggagggggattttcacgacttgcctgagaccaaccctgggcgagggacgcaggtacgatttgtccgaggccaaccttggccgagagacgcagtcacgactcgcctgaggccaaccccgtgtgagatatgtagtcacgactcgcccgaggtaaaccctggcgaggagacatagtcacaactcgcccgatgccaaccccaggcgggagacacagtcacgactcgcccgaggccaaccctggacaagcagcgcacttccgacttgcccgagggcatctcgagcgatgctgcgaaaggtgcccaactccgctgaccaactctgcaaggcccgattgggagatgcagtcacgaatggctcgaggccaaccctaggcgggagacgcactcac

SEQ ID NO: 167802 - DNA, 595 bp, Zea Mays
cattcaaggtttttccaagctctgggatagttgcaacagcttttgtttcagtagggaccgagtcagaagaatctttagccaacatgtccagcatagcacctatctctgcatcgctcgggtttataggcatctcaaagtgaacttgcctctcatcattgggaagatcaccaagtgaagcaaccaaagcctcaacttcttcgggagagggtcgcactctaagacccaaaccactgtcaccagcaggaggattggacgcaaaaccgaaaaaagacttggaaggtggcagattccaggcagaatatgcaacaggagcaccaatatttgatactttgcctctaagaatcatctccagtcggcttaccaaatccacagcaggaatcctcttgttggtaacccgggttgaatcagtgacaccactatacaaataagccgggtacgctctgtccttcagtggctgaatattcttaaaaacaaagtctacaactacaacttcagcattcagacctctctccttcaacaaacaaatctcagcaagcagaaccctggcttctgttatctccaagtctgtgggggattcaatccaacttggagcacg

SEQ ID NO: 167803 - DNA, 420 bp, Zea Mays
cggatacaatggtgaagagcaagcgaagctgtgatcaatggaccaataagttcataagaatgaagtggatcatatcatttatgtaagatcaagcaagatgctgatgtgtgttgattatcaagtggtttgatggagggtgacaaaagagcttcacgatacgagaaatgatcattgctcatcatttggtgaagatggaggttgtatggttgtgtagcattaccaatgatggagatgaaataggatacacaaggcaaaggtaaatttggagggtatatttcatttcatcggtctatggttgagttgaaaagtgcttgactaggtctatgataggtatacatactatcacgagaagcttttgtgagctaaatgattatataatgccactaagtgagatctaactagcattacatttagattgag

SEQ ID NO: 167804 - DNA, 791 bp, Zea Mays
tgtgacaccccagtgtcacttagggttttctcagtgctaacccaagaactatcatttcatgtaagcaaatttgagcaaggagcatcaaattaacttgagaataaaagatccactaagtttatgtctaaatgaatcatgctcaaacaattgaggttttcaaaaaagggaaaatgttgaaaccctaataccaaccctaaataagccatttaagtagagaagaggaaaagggatgaaagaccatggaaaacataaaatcatggcttaggccaattataaacattgaaatacactaaataagctacaataaagcttgtgaaagcttgtccaaaaaagtttattaaaaactccaaacaagccattcaagtggaggttcaatggggatttctgaaattcagatttctgaattttcagcccttgaaccaaaaccgagcatgttcaccttgatccttaaatctaatccaaatgctcccattgacaaaaacatgtctaactaacccctctgtcgcatgctagaagatggcattgggacgcgagccctagacacaacataaccaaggatttgcctcgggctcgggcagggagacagaccagacttcagggctccaaatatttgaaaccagtaggcaaaatcctatgacccccacacaagatcggtagcttatagggaggagaagaggttttgtgcactgaccaaggcaagagcaggctcggatgaatgaccacacgcgccaaacttgggcagaatgaacgagcacacgtgttcgaccctggtcggcacgccggtgttcgcc

SEQ ID NO: 167805 - DNA, 509 bp, Zea Mays
ggccacgacacacccgtgtagtaagcgagtagcggtaaggtcctaaccttggagtacaagccgatggagtggtcggcggtgaactgctcctacggcacgcggaaggcgatcacctcggcaccgatgggggaggaagagacggtggtaggctgtgttgtgtgattctccacgccccatcacgtcctcctcaccgtcccgacctaaaaccacaaaatcatcgcacaaaagatgaacttcagatcaaatccccacggcaatcccagcgctccacctcctgtcggctggcaccagcgatgtgcgggtcgcgcttggggagtgccccatgaccgccagctcctatgcaggttgattgtgttggacatggacattgggtcaggcggcggcggtggagcctatgtcgtgctgttgacggttgggagcagatggagttagggtttaggtgcgcgctaattgttgtggtggacgctgatcgtgttattggtcaatcctgttgtattgggctgcgggtt

SEQ ID NO: 167806 - DNA, 767 bp, Zea Mays
ggctgatctcttgacggcggagaaggcatcgtcgtattgtactcccgtggtcgaggattgggcagcgcacgactgggcttggtcatcgcgctcgggaacttctccccggctgcttgctccccatcagaccaccagccgctcgccccttcttctccgtcgccggtcgcaagatggagaaccaccgcaacttcagggacttcttatcccaaggttgctcttcatcgacgtccaggaaccgcactgatcatgaagctcccgaggacgacgacttcggcaccttctcgcagtcgctgtttgctctgccaccacgcatcaatgtcccagcacctcgcagccgcattgaagctcttgatctgaactcccaatcccagggtaccgattttccatatctctcatccgaccaagatgttctccggacaggtgatggtggatccgacctaggtttgtctcctcttggtcgtggtagatcagcgcgcacactatttcaatccaccagatccatttcagctcctatttctcatgcccgaggtgcaattcgaggttgccgtgtagttagggggagatgcactagtagtcgtggtggaggtcgatctgctatttctgcacctattgaccctgtcctcattgaagattttggagatgaaccaaccaatgaaatagattctcgagctccagtggtaagaaaaaaaattcatgtcttgattacaatgttttactgtgtttgctataatggattgtatgtgcctcaagtggtcattaaacaagat

SEQ ID NO: 167807 - DNA, 382 bp, Zea Mays
gtcggaatggcacaaagaggaagaacaacaagggaggtttcgagaggcagaacgcaagggtatggtaagcaaaaactaaccctgagcgcactcctcctttatttatgcgaatgggcaaggggcagccacaaacaaattgtgaaggaactgccccttcaaccaagggacgccttgggtatcgagcaaagagaccatgtgttttgcaggacctcgctgcctagggcagagcaccaggacaatgcgccgcgagaagtacaacggtaacgggcggggaggttgactagaccaccaagcaacccaaccatgacatagcagacgaaccatttcgcgtcccatcagacctcccatgccaaacaacatcatcatggccacccattattac

SEQ ID NO: 167808 - DNA, 1162 bp, Zea Mays
agtttcctaaccctcaaggccgcgctccaaggtcgatgaggcacgggacgctgcaagggatgaccccaacccggcgtcgaacacatcagcacaaacatccatcgcgtcaccatccgccggctctgataacagatcctctggaaccatatcttcaagagtttgatcaaagttcgccagagacaattcttatagaccaatgagggcagacagagcaggagaaggaactccactactttccccactggctatgtagcgccgactgttcttccgagtcagagggatctcatcttcttcctcctcctcattttcatcagcaacacagacagcacacccattggggtcagcgtcagatggatcacacccattggggtcagcatcggtaaattcacgcacgggcacttcctcaacagcaggagccgaaggaccagcatcccgatccaagctagatactcgccgaagacgtctctttttctttttctgctcatcggcaggagaatcaagttgattggctcggcaagggcgcttcgagcgaacactgacaggcctctgaatatccaaggctttaccagcttccgggagaggcgcgaccaccaatgttccagcaggagcggcatcagaagaatcctcggctaacatatcaagcatggcacttatctctgcatcactgggatccaaaggcacctcaaaatgaacctgccattcatcatcaggaatttcttcaagcaaagcaaccaaagcactaacttcttcggcagaggggtcgcactctaaggcccaaaccgccatcgccagtaggaggacttgacacgaaatgggtaaaggccttggaaggaggcaagttccaggccgagtaggcaacaggggcaccaacatttgacaccatgcccctaagtatcatttcaagctggctcaccaagtccacagcaggaattcttctattggtgacccgggtggagtcagctaggcctcggtacaggtaggccgggtatgccctgtccttcaatagctgaatgttcttgaagacaaagtcagcaaccacagcttctgcagtcagatccctctccttcaacaatccaacttcagctagcagaactcctgcctcagccacatcctggtctgtgggggattcggtccagctcggagtgcgaacatccggctgtct

SEQ ID NO: 167809 - DNA, 492 bp, Zea Mays
gccaaggtcttcattcgacggtagtagtcagagacagagagggcgccttgctgaagagtgtgaaactcagtatccacgagaaggacatgagtttcacggttgccggtgaactgttgctccagagtgatccaggcgccgcggggcagagggagtcctcgttgtgatgatctcatagaggttgccggtgatagagccatagagccacgacaagacatggaggtccattcgcacccagtgcaggacaacaggaaacgaggcgtcgaaaaggacgtggtcagcgagcacatacatgtcgagggagaggagcatgaggtagcgtcacttggagaaggagggcatgccgagatcgaggacgatcgggacgagggtgtggatgttgaggataccgagagcctgcgtatggagagtagcaagagcgttagcatcaccagtgggtggagcagcgtcatcgtccacgacactatcaaaggcaccgtcagcagtggcatcagc

SEQ ID NO: 167810 - DNA, 435 bp, Zea Mays
aacgggatgatattggaagcactcaggaaaagggtcttcgataagaacgaaaaattcgcagggaagtggataagagagttaccttatgtcgtttggagcctgagaactcaacctagccgagctttacatgggaacactcctttcttcatggtttatgggtcagaggcagttctacctgctgatctcaaattcggggcgccgaggttgatcttcgaaagcatagcagaagccgagactaccaggatggaggacgttgatgtgcttgaggaagaacgactgaatgcagtaatccaatcagcacggtaccagcagactttaaggcgccatcacgataaggctgtgcggcaacggttcttttcagtaggagacctcgtcctccgccgaattctaacgggggagggacgacacaagttatcacccttatgggaagggcct

SEQ ID NO: 167811 - DNA, 1100 bp, Zea Mays
atttgaatattataatttgaaatggaaccagatataaaaatagaaaataagaaaagaaaccaaacctgtattgggccgccagaatgggatcacggcccacttgcgctcgcttctccactgatgcacgggggtggatgacgggtgggctccaccgcctagtcccaccatgtgacgcgttcgggttccttacgcactgacgtgtggggccacctttggcgggtccgtcttcctggctggtgtactccacatggagctccaacagagttgctatgttgtcgccgggtttctcgggacgatccggccgccgcgcgaactactcctgtttggattccgcatctcgcagctatatatgtgaccacccgtgcccaggtcgttccatcggcaaaccctgcgaatcaccagctacaaccggagttgggagtgacaaagtgtgacgcccttcgtcgatgaccggctcctgcgctgtccaatactccgataaggccctccttctcttagataccttctttggttcaattcgcgccgaattgtgctcggattagggtgtcggggcgtcgacgattgcttgtcgttgtttcttacgccatagatctgcgcctcactgtggctcggcatcatcgcgagccgattcgtaatgtgatcacttccctggaacccaccactctccctactatgtatagcaactagctaatttttgaataaggcaccggggcatcgaatagccatgctccactgatgctccgtcgtgggaagttatggcgccgccgcctgctatcggcagggttggaggagggggtggttggtggcaccgtggtcgttggatggcgtctggacgacccggattagaagtcgcgtacccttccgcgtaaatcctggccgctgactctagatcgagcgaaggagattagatcgcgcttatttgaaacctacgccgtggatcttgtatccaatgacccatattttgtaccatttggttaaagtgatgatctaatcggcgtcgttcatggccgatcgggcggctgtgatcagcccatacccccttcggttacgcgtcttttgcaaatgggcccctcgggttagtgcaaataaacccgctgtcc

SEQ ID NO: 167812 - DNA, 648 bp, Zea Mays
agtggtttagttcagcctcttctaatttttttctggcttcgtccctactcacctccctcttattgaagacccgccgacaagcctcatcgtcacatccgttatacttagatgcagtatatcgagtatctcatctttgttcgtctcaatgtcagagtctgaagaagatatagcgagagttgtttggtagggtgaaatgagagtgagaggagtgaaatagacggccagtgtgtaaatgaactcaaacaccctctctaacttagatcaaacaccctctctaacttagatcaatctattggcaagcccactaatcgatcagtggaatagatccacgttagaatcagatcgatcagtatcgaccgcatgcctcggctccatgaaggccgtagacgcagcgagcctgatgagtgagtaccgtacccgttgtttttttaagttaagttactgtagggaaggcctataataattttattatttcttggccaaatatgaacaatttacagtaaaggaaaaggtgattacgatacatagcactgaattcaattgctaattttatcacctatctctggcttaactcgttggcaaacgagactcatttctcttttagggctagtttgggaaccacattttcacatgggatttctattttcc

SEQ ID NO: 167813 - DNA, 652 bp, Zea Mays
catgttgcaccgtcttaattgctccgttagtagggtatagtggtcaccctaagttaagtaagcgcgagcatgttgcaccgtcttaagtcatcgccgacttaagtcgattgctccgttagtagggtataatggtcaccctaagttaagtaagcgcgagcatgttgcatcgtcttaagtcatcgccgacttaagccgattgctccgttagtagggtatagtggtcaccctgagttaagtaagaatgcaggtcgacaatgaataatttgagcgctcttaaagtctttttattgatgatatattttttagtttacagagtacattgccgtcccaatagcttttgaaatacggctaggggtaaaacttcctgaggtgttctatgttccatgagttcccaatttctgtgtcgtccatctgagtgaggcgatatgatcccgaccgagtgacttctgctattatgaacggtccttcccatagaggtgacaacttgtgccgtccttccccccttagaattcggcagaggacgagatctcctactgtgaaggatcgatgtctcatggtcttatcgtgatagcgccttagagttttgttggtaccgtgctgattgaattaccgtgttcagccgttcttcttcgagtacatcaacatcctccag

SEQ ID NO: 167814 - DNA, 650 bp, Zea Mays
catcttagaagtcatgccttggccttatcatgcactaaagagaagagaatgactcaaaccctaattcaaatcccttgtaggcaaagggagccctagaggggattatggcaaaaagtctatgtagatcacattgtcatgacttggactaattataaaagttgtaatacacttaataccctacaaaacatagtaagagtgtgaccccaaaaaggattcagataaccccaaaaaggtcaccaaagagaagagcataaaagaaaaatcatgatttgctcaagttcaaaaccgaccctctttcaaagatcaaacatgttcactttaatcccaacctcaaaaccttatggcccaattgacaaaatggcacccaaagacccctagaacaccctggaaatgtttgaacccaaccctaagccttttgacacgacatggcatggcttttgtctcggtgtggacagctctgacagagccgacttctcacccccatatctctctactccgaccgtatccttgcttggaactcacatcaaaaaggtaggatttggtgcagagaagagaccgtacacggcggtttcgccaagatctgcacgctaaggcgatcaaatcggccgttgaaccttggcagaagtaaacccccacgtgttcgacgtggg

SEQ ID NO: 167815 - DNA, 658 bp, Zea Mays
ggaccaggaacctttgaatacgatgagcccaacagagttataaagattgggggcttgtgggggacatatatcccccaggtccactcgggggcgaaaactctgctcggggccacatgccagtcgccccgcagtgacgcctcatcgtcagccaggcagagagaatggtggaaatgggccaacctaggaatgcgataggcccgcacccggattgctcgtggtttgggcgtggtcccattgaagctgttcgcttttcctgcgctcgacatcctcaaacaccggagagagctcggagcggaggtgccaggttttcctcggtatagtgaagtttgttcgctattagctaggagataagttggaagaatgtgatcagtgtgtacgcgggaagcaccttgcgttcgtgtatataaggccaagggggatcctcatcattttcatctcattagcacctcaccacccggtagacaccacttgtaaacacctcccacatacaaagtcatcccatgaagtagggtattacgctcctcaagcggcccgaacctgctgaaactcgctcgactctctctttctcgtgccctcagcacgaaccattgcgttataatccacgacaccgtcctacccaaaagcaccacgagggtaccctagggtgtgcggtcggaca

SEQ ID NO: 167816 - DNA, 866 bp, Zea Mays
tagcggtcttacgaaaccccaaggttactaaagccatggattagggtttgagataactttcaaatgcactcatgattcaattttctttttacctggtttgtgccgatcagaattaatgtctgcgcccttcttcagtttgttgtggcctaacttgtgaaacccttgctatctcacaacttccatctgttagacaatttattttcttccctagttacgaggatttcttctctgattatgtgccagcagttgtttcctccgtacgtagctgtccttgattaggtgtggacaattggttccttcctccctgactgtttccttttagcgcccagatcatctccccgattattgtttccacgaattcaggtggagcacgttctggtagaggcctattgttctcctgctatttagttgaatataagcaacatttcgcgctattatggcatcaagagattgttacgatcccgtgagaactcgcttttggtaatacttgcttgcccacgtcgcctccccgatgttgtgccgtcatgccacctagtgaccctctgcccgttttccggtgaccaacaacataccgaggatgcagccacataggagaaggcctgctagatccttatcgttgctgccgatgaggctgtcaaggccgtcactgccgcctaggatcgtggccgcacaacccaggacgctctcgcgagggaacgctaggctgctaccggtctcaagcgtgctaaggccgctgctcgtgacgctgccttccctcctctcaacgacgaccctgatgatgacgccgacgctagtgaagatttcaattatgaggccgctaccgcctccaacctccacgtggaggccgtgggcgtacagaacctcca

SEQ ID NO: 167817 - DNA, 463 bp, Zea Mays
caggaaaggggtgaagtcgtgggtgtcacacatcaggaagggagaggcggcatgcagtgtcgggaacgggcatcgacattcgaggcttactagctcgagcgagattgggaaaaacggggtgggcggttagttgcaaggtctaggctgggctgaggaggaggagaggagtcagaaggactagaccgatctgacgatgaggcccaggacatagttgttttatcccaccaaaaacttcaatttagttgttttagcccacctaaaactttaatttttctaacttaacaataaatgaacattaagtataagatgttttaaaaattgagggggcatgggccactttgcccccctttgaatttgctcgaggtttatttgcacccttctaattgcttttctctttcatctctcatttgtttggtccaaggctaatattggtgcccacttaggggtggtaatagatcaagat

SEQ ID NO: 167818 - DNA, 511 bp, Zea Mays
ggctactttaacgatatcattatccctcagggagtccagtttcatcaggaggaggaagccccggtgccgactgaagcaattctcgccttgccagcattccctcctgaagaataattttggagggaaataacgaccagggagaagacgacatgcaaattgaagataacatcaatgtgggcctcatgttacatttggagcagtccatccctgatcctgcttttgaagactatatggccagaaagcgttcctcttcttgggctgatttattccctgacaatgctggccttgtttctgttccaaaagtctgggctgctttcttcatgggcctactaatcaagccggattcttttgactgggccaggaaattactgttgtcaggagctatctctgccttcatcgagcccagcatggacaccatttcaatcaagattccctccaagtgtctactcccttccagtcaggacacccatgttgagccacaatccccatcctcgacaaaggcagctctcag

SEQ ID NO: 167819 - DNA, 609 bp, Zea Mays
gatccaacggtccgagcggcttctcattcctcccgatggccagagacgagggagaagtggccagcgacggcgcgccatggccggacccctccccctcccccacacacagctacacaaactcgaatcccacgggtgctacacgatgagaaggcgaaggtgaacaccaagggaaggtcttaccaaggaattggagggcgcagagacctggcgtcgaagaagggcagcacagtgggggaagacggagcttcggcgacaattccgaacactacgatgacccccgagcccacccagatgctaatatacgatccctgagcttcggcggaccaccacgacccaacacagaggccggagcaatgctggggatccaattcaacggcggcggcggaggcttttccccgcacaaatggcggcggttttagggacgcgatttcggtagagcgagggccatgtacccgcctatttatacccggggcaatatcttcgcacggaattttcgccaggatccaacggatagagccaagatcagtcggcctcccggagattttgttgcgcttcccacggagtcgcgtggggttgtttggaggggacgattctgactgtgagggcccg

SEQ ID NO: 167820 - DNA, 394 bp, Zea Mays
tcttcgccaaaagactctccgtgcaaaagtcgcctaagggtgcagccggattctccgtgcaaaagtcgcctatgggtgcagccggactagcacaataagtgcgcaaaatcaaaaactttgtcaaaagactctccgtgtaaaagtcgcataagggtgcagccgccccccgccggactagctcaataagtacgcacaatcgaatactttcccaaaaagaccccgcgcacaagtcgcctacgggcacggccggatcaacgaaggcacgcagcctcatacaaattacagttacatacatacagcgagggcatcacacattacattggctcaaccttcgggatgatacccatctccctgtagttgaacagcattatcctcaattcctcaccctcaaaaa

SEQ ID NO: 167821 - DNA, 734 bp, Zea Mays
gtcgcgtaagaagccgtcggagattaattggctgtcggatgtgcgtcgttttactgtagtgcggctctccctcgcagcccacaagcaaccactagggatcttctcaacctggcttgcctatcgcctagcttcctcagttggctttggccctcacatggcctatggataagggtggcgtcgacggtgtccccaaagacaatttggacagcgatggaggcgacgctcactagactgaaggggcgcaactcctcgtattgtcgtggcgacaccgactgcgggccgcgcgctgtggatagaggaacaagtggggaggcgcgagcgactggctgcggctcgcaggaaacgggagtcagggtgacgcggctgcgaagggaagagcgagagctagggatgctcgtgcggagtgaacgactggagggactacacacgcgagcatggcagcgacgtacgatgcagattcaacagaggcaggatagggagaggcagaattagggaggagactacgtcttgcagcattaatgagtaatagttaagtgttcgtgcattgctataaagatcatataaatctgtgtgttctgttaagcgacgcaaggggtcgacattattaatagtcattttttctatcgaacctagtgaggtacctttgtgttgctacgaagaccatataaattcatgggttttgttatttacattgtaataaattttttagtgtgcaacttccaccaattacacaa

SEQ ID NO: 167822 - DNA, 502 bp, Zea Mays
caggttggttgcggcgaactcaccgggcctgcctccgcctcagtcgggaatcgattgcaaccgcgcgcgcttgaggtcttctttcactgtatcccgggcccgcacgtcagccttgcactgccgtgcctcgcgcactcgttgactgcttggtgggccccgaaacgccaggacgtcttcctcgctgcagactcacccgaaatccatgtgttctggccgtaaatctcgccggtggttatcaaccacccgccgccatgaactcaatcctcggccttataagatgcgctccggtatcccttccttccatcgagcttgcaccgattttgggtcatccatacgcgaccgccgcgggaggatgtgtgtgtggtggatatccgccatgggagaagctctggctcgctgctgtagatcccttggggcaggccgtgcggacgactgtggtcaccgggatggtgctcgtggccttgccgggcttgataagcatgtgtcgcgctggaaattcctc

SEQ ID NO: 167823 - DNA, 544 bp, Zea Mays
ggatttccatggaagagaggtcaaggtttggctataattgctcagcggagcgtgggtgccaccatagagccacgcgtcgccatggtcatacgtcatcacgactccaatcactggtgaaatctttctcaaactcggagctggaccctttggtgatcatgtgaattacaactctgaagggtggatcatcaaattcttatttcttgggtggttggggaagtggttggtggtgttggtttgcttgctgtggtggaggggtggcggggctaacctctcctagtgttgaaggtgtggttactgtggggaagctggattgtggttatgttcatgctgggggtaatatgagtgttcattttggtagtggtggtggttgtacggatgtggttggtacgtatgagcaatggatctttggttgtctgctggagcgactctggccattcggtccttggttgccttagtctctggacaatctctagttggatgttctgagtcctcgccatggaagaccgagtaaaatcttcttggctgctgagggcctcggcctctg

SEQ ID NO: 167824 - DNA, 550 bp, Zea Mays
aatactcaagccatttttaatatagggacatgatctaatcaagtgcccctcttcaaagcattcactacacttcttgattctatttgtatgaagtgtaacttgattattaccttggatgttaccttttatggaggcatggttgaggcttttggaagaggtattgactttctccttttgcttcctcctcttggcaatcctcaagtccttgacattttcttcaagggatttagtgcatgcctcggttgttcccgtctcaagcttcttcaccatgtgatcacggttatcttgagaaggttgagcaatgcatttcccttttagttgagtcaagctcatttttagcctctcattttcttctttgagcttttgatatgtatcaccatttgctcctgcagattctagctcaaaggaagatttgcttgtcgacggacaacaagcattagcacatggtaatatagtttcaatttgaatacatgtgcaagagtgaggttgttgggattttaagttttctatcacaacctcatgagcaatatttaatatgatatgatcatcc

SEQ ID NO: 167825 - DNA, 599 bp, Zea Mays
gctcattgtagctggagctggagagcgtggcgctggagtcggtggagacttgggggctggggtagacctgctcggagaagagttgcctactcccccggctccctcaaagtggacgtactcgatggtgaagtcgtcgtacgtcggagtcgtgccgtcatccactaccttgtcccaggtccatccttgccctttgtcgaacactacgtcgcgcgtcgtgcgcacacgtagtgttcctaggtcaaggatgcggtaggccttcgtgccctccgtgtagccaatgaacacccccggggtgctcctgttgtcgagcttgccgatgtggccaagctccttggtgaacgcgaggcagccgaagacttgtaggtgagagaccgccaacttgtgcccatgccaagcctcatacggtgtcatcccgttgagtgccttggtgggcgagcggttgatgatgtagaccgctgtcgccaccgcctctccctagaagacatgcgacattcccctctgcttgaggagagcccgagccatccccacaaccgtttggttacgccgctcgatgacgccgttctgttgcgggctgtacggtgcggagtagtggcgctgaa

SEQ ID NO: 167826 - DNA, 485 bp, Zea Mays
atgccgggacctcgggtgagtagccacctcggactcacctcctttcctccatcctatggcttttgtgcggtccgtggaggagcagtagcccaaagcgaagtttaggtgcggaccgtgattggtgcgccgccagataacggcggtgtcgtgtactggtccgggctgtgtgcacgccggtggatcaacgggagagagagagaaccctggcgagggcacgacgtctgtgcatgggcgtccggaggttgaagaagaacggcggatcgttgatctcatctccaacggtcacgattagatggatggttgagagtgtgggaaccgtagatcttagatggatggcctagatcaaaccttggcgtaccccttcgagtcattaaaccagggtcgtgaattccggatccaacggtagcgttgagcgcagatgaataactagcgtgaagtctaatctggcgcgcagatgttgaatttgacggtccatgatccacgat

SEQ ID NO: 167827 - DNA, 1076 bp, Zea Mays
ggactgcgtctcaatttctatagaagacaggggccactgcgcaagaatctctaagacacagagcactatacaccggactgcgggtttaattctaaaaacccgaggggctcattagaaaaatagacaccgcgaagggtatcacgggatcagggccattggatcaattctagatggctccgattagatctaaccctctcctgaaccggtatgcactaatagtcgctggattaagatcgggcggcccagacattatgaacccctatccaccactcgttacgagatcagtggttcacaccatccggatccaatcccccgatcatcaccattgattaatcaatcaactgtcagattgctccctagcgaactgttacgtgcctacctcaacccaccgcttgattaagatccgacaccaaggagagctcccccaaactcccgacgacggaaagcggcagccgacaccgagcacggcggcgccattgccgaccaggcgttccccggtttatgcgcgctaagcatcaatccaaccggctctatacactacgacaatgaagacgaaagcgctagaggtaaccgtaccggaagtcatgcgtggtggtgggctgtccacagcagttgcggacttcgatcaacgcatgaacggcgacgagcaattgccgcccactggcaatagaatccgacccgggatcggttcctacacctgcggcggaaccttccagtgctctcggtacacaccgccgcggccaaggaatcgacagcagcagcgtcgacggcggcggcgtgatttcacggttaaggctatggcgtcgggatgtcttgcgcttggctctaggggacgagagggggaaatgtggtcgggctatataggggcggagagagagttcgggcacgcacggccaaatccgaggtccccggcggcgggattttaccggagcctaatgaatcacgcggagctcaaccgaagttgttcttggccgcagaacttatggcgaggagggtgcgccaaacttcgatttatacccagggcaggattcgcccctaccccgaggatctcggcggggttggagccacgtggagag

SEQ ID NO: 167828 - DNA, 377 bp, Zea Mays
ggctgacctgctacctgaagcagtctgggcactgaacacgaccgagtgtcgggcgaccggattcactccctttcgccttctatacggatcggaggccatgacccccacaggaaatcaaacatgggtccccacggacaagcgctttagcagtacccgacgtcgacgagccaacttccaaagacctcattgacggagaccgtgtcttcgccctgcaggccctcgccaagtaccaagcccaaacgaaggcctggcgcgaccacgcagtcgtcccaagagaattcaacgaaggggacctcgtacttatccgcacaacccggacagagtcacggggtaagctggaaccaaagtgggaaggaccgtttatcgtcaagacgaag

SEQ ID NO: 167829 - DNA, 485 bp, Zea Mays
ggggcttacttggatagggtggcggtagcgatgttgcccacacagcacagcggggcaccaaccccgtcaagaaatccgggcgagccaaggtagtttccccatccgagatgtccacgagcaaatcactggggttcggcaaagttctctgcccaagagcccgagcgatggtacgccacggttccacccacggtggcgctacacttcccctggttcgacggtggaggttctccgttctccctctctctatttctggcggggcgcttcctactgggatggggtgaggagaataggtcgcggggccagatttatagcctggggcgaggacgagcatggccgagagtccggatgagaacgagcctgggaggattcacgcgaccatcggtgttctgttgggattcggttgagggagcaccgtgaggaccgcgcggcttctgtttcgcccgcctggttcgcgatccgttgggaacgaacgatctggcataagg

SEQ ID NO: 167830 - DNA, 739 bp, Zea Mays
agaaaaacacaaaaaagctgcattgaatgttactaggttcatatgacaagaaacttatgttttgtatcacaaaagcatatctgcatattaattaagtaatcattggctaaagcttcgtccaaacacaatgaaagatgcattccaaattcaaacaatgtactaaatttgaaggaccacaagctaaaataaatttatatatcgaactacacataaactatgtttatgatttaaccagaccaaaatatatgaacagagacaatctcacaaggaatatgaatacaaaaatgatacacatacaagttgtagtagcaatgggcgtcacgtggcaggtacagatcggagacatcggcgacctcggccaacatggagaaggcgcgcacaaagcctccagagcggtggacggtagaactaagcaaaagtgaaagacgacctaaagtcgccatctcagccgagcaagcggcaaggaccggcgctgggaagctttgggatctcgggcgtactgtaagtaacataggatcaacagcgtaaagaactagcactaatttaacattaggatcagatactaatttaaacggtccagctaatagatttatatgcttttttaaacggcgctaggatgcataactctaatcttaggtaaattttgctaggaagtgcatttgtagctgttgaacttattttaactgattatcatgcaataaaattatatgttcgctgatgttattcattcaaaattcag

SEQ ID NO: 167831 - DNA, 654 bp, Zea Mays
tggaacgcgggtcatacgaactggtcactccctgagatgtcttggtcacaacgaggtgaggaaccggtgagcgtggtcaccagacttagcacgcgcagcacatgacagtgctaacctgggctggggagaggattaacaccagcagtggctacatgtcgcaggtagccgtgtggctgcagggattcgagcccaggtcactacgatgaacttggctagcaaccatggagaccatgagcactcttattgagctgaacatgatacaaagaatgcaacacgccgcgtgcagctgcttcttataaccagggactagcgagctggcgcaagcagttagtggcactaggacgcatggctgcaatacatggataccacgtatcagcaaccgcacagaaaaacaatgaacctggccgacgacttgaaccagcggcaaacaggccaagtgtccccctaacgtggataactctagttctctgcatgcgtagatatttgaactttgagcctatcctctattccctccatgcaaatatccatccaccacgccaaactaactgggtcaacttgagcacacaagtgacgtacagcagggatgaaaaatcttctccagattttttttattcacactggatccagtgcagcagtcctgctgtcccattccac

SEQ ID NO: 167832 - DNA, 470 bp, Zea Mays
ttcatcccttccattcttccatacccatacagatgtcagaccttggaatgtcaactacaagtgatgtcactaagtgcaaagaatacattgtgttggcaactcctccagctaaggatcagatggaacagttcaggaaggcgcatgctcagtttctacaagcaacatctcaagtggtagctagactccaacaagttgatttagcagaatttatagcacatgagcagactaccgataaccatatgacatcaaccccaacatcaccctcgatagttgacttagaaaagctgttacatgcacaagctcttgtaatacacaatgtatcgcaactcacctcctcataccagcaagtgttggcaagtcgaaacgtcactagaaatgaaacaactgatgaacaaaaggatgcacaccaacagacaaatgatcttggaacatgttgtgagtactatggaattccttgtcgccaaattagt

SEQ ID NO: 167833 - DNA, 1073 bp, Zea Mays
ctgacgtgtgggtcccacctggtcggactcgtcttcccctccacaacagacccacgcggcgtccacggcaacggccaccgcgattctcgcttagagcaacaaccgcgcagaccacttcctcaccggcgccactgtcacgcgggcccaccctagcagcctctgcgccaacgccgtcgtcttctccgcgcggtcacctgcacccacccgaccacgaatggcggatctcgatccccataaaccggcatgatgcgaccaccgcgctcggaccttaccactatgtgaccaccgcctcttttccctcgcatcatcgtagtaacctaagtacccgaaacatagagaaggagtgggagacagagagtgcggcgtggttgagctcggtcaaccgtgagttgcgtggccccgccgttgattgagctcggagagttgccggggaggaccgtcttgaccgcccgaacgtgggaagggcatcatcttccactgtggggcgccgattgcgggtgaattgctcgtcgaatctcttcatccgccacggggccgctccgcactgcagacgacgcactcacacgcgctgttactgttatgagtccctttcccgtgttcgcgttcattaccgcaatgagtagaactcttcgaattaaagtttaatgcgctggtgatggggaatctcttcgccagcaatggagatcgccgtcgttggcgcgcggcgccgtactcggttagtcgagaggtaggggataggcctagtgtcgtcctatctcctgggaagggctcagattagaagtcgaataccctttcgcccgcagtcgatctaaaccgcagatctcctaatcgacggctacgattagatcgcgctagtttataatcgtggtcgtcggatcccgaggaacgacgtagattaaaacgttgtgtaacccttcgtaacataaaatattgatcgttgtttggctaatgggcggatctgatgaacccgtgatgtggcgatctgtcggccgcggattcaggatcgtgttgccgagattgcgtacccgttcggaattattgtgttatgatccgggtcgtcggcttcagatctg

SEQ ID NO: 167834 - DNA, 919 bp, Zea Mays
cttaagcagcagggttttgtaggatggcctttatttaatcacgtcgctcaccctatcttgtccacctagctttcggttccctagaccctcgtcttctttgcttggtccatcctctctttgttcgggtcttccgtcgctcctcccatggcgggctagtgccaatccttgacgagttaggagaaccttcgggccctcataaggcgtggtttactagatgaaggcagttggttgatttcatgtgctgaggaggcctcaaccccgcctcccgattacatgatctcgtttgtttgtttccatgagcggggtctcgccttccaccttcatccttttgttgtgactctcttcaagtatctataggtgcagctctagtttttgaacctgaacgggatccagcatatggttgtcttcatcgccctatgtgaggggtacctaggcgtcgagcccaacttcaccttatggaagtacttcttctacgtcgagctattgtggaagagggaggagcaaagggtaatagatgcatggccagtcggatgcgccagcatccaccttcacggcagaaggtcatgcgagtacatcttaattcccctttgcctttctaacaagggctagcacagatgatggttttatttgtgggatgccggtcgggggccttttccgaggcagcatctccatggcttggcatggagcggagcactacgtttgaggtccccctaaattggagctgcgatgttacacccaaggagaaaactcgaatccgaagccatctgtcgggggtgctcttcctttgagggaaaggagtcacagacatgggtgtcattggagcctacctttggtgaggggtgtctcctctgaaggctcgatctatggccctatacgagatggggaaggatttttgtcctcaagcgtcgaggtccttcca

SEQ ID NO: 167835 - DNA, 529 bp, Zea Mays
cttgttcggtcgacaaacgagatctaggtgtgcatggtcttcaaatctagacgactgaacgcagtacactgtctcagacaaggttccatgcagaaagacattctttacatcaagctagtgtacacgccatttctgggagaggaccgtgcgaaccgtagctggctttaccactgggctgaatgtttcagaaaaatccacacctaggcacttggtgaatcctcaaagaacccaacgcgccttgtactgctccaatgtcccatcggcattgaacttgtgcttaaagatccatttgcctgttaccacgttggcatgaggtggtggaggcatgtgatcccaagtgtgattctgcagaagggcaacatgctcttcctccatggcagcgccaactcgggtcagtgaggccaccacggttggtcttgggcaccacggtggtccaataagatcagatacaatgttaggatcatcaagaaattcaaacgttgcaggagagcttggtccatcgcgatcagcaaagggaaaggcagattca

SEQ ID NO: 167836 - DNA, 676 bp, Zea Mays
atccgcgacggttaagtaagttgtgcaatgagccaagttcaaaatcctttgaaaacatcttcgagaatatttttccagatcatgaatgcccttgagaaaaacaaattttacttcccacaaagactccacttttgttctcttcaaaatactcaaaatttggtttcagccctgaaaaccggttcaaccggtcctaaaaccggttcaaccggttttgggactgttcctctgccatccctgctctgacctgtatgacagtcagagctgtcagaaaagtcactgcagatcctttttgaaaaccggttcaaccagaattttctcttactcaaccggttttgaaaccggtcgagtctccagctgagtaggtcagtggaccgggatccccctggtagaaaccggttcaatcggtctgaaaaccggttcaaccggtttttactctttttctcccaacggttgccagcttttgggggatcctttatataccccctcacactctctctctctcatttacttctgcctctcccacgaattcttggctgaccaaacttccaacaagcgcattcatttcacctttcacacccgcaatcgcatctccttcaatcatttgaaggacccttggtgtgaggtgaactcgatcgaacacgctgtcaatttcatctcgattctcccattctctttg

SEQ ID NO: 167837 - DNA, 484 bp, Zea Mays
ttggattcgtagtgaacggttgagattagatcccgcgtacccttccaccacgtttcaatctggtttgtcgatctggatcggacggacagagatagatctagaataataaaaccctcactgtttgattcggatccaacggacgcgattccgtaccggttcgcaggaataacgatttaatctgggcgctcggtgtctaatccagcggctcagaatcacccataccccttcggcctggacattttacttaagagccctcgagaaaaatacgaatcaacccgccatccatgcctggggttttctgagtcttcagaatgttgcaccgtagcccctgcactttccataatttgaggcctagtccagacagtgggaaaacttataaaataaattaagaaatagatttttatgagtaaaaataatcctagaacttgtgtaatccatagaaaattcatataaactccaaatttgaccattctagtttctaaat

SEQ ID NO: 167838 - DNA, 803 bp, Zea Mays
tgaagatcgaacagaggggatcagaccgaggagggacaaacgactgcgggcggcactgttcttctccgcggcggcgaggtcgccggagttgaggctagcgcgagctagggtggctccggagttgggcagagagggagagaacgccatggcgaactccatggcgtggaagaggccatgaatccacgagcagagaggggagaacggcgaagagaaggtctcgggcggaccggagtaactccagtgaggaatcccggccacgaggagggggcttaaagcgcgctaaggccttggctaacttcagcagagatagaagcaccttagggactaatgctggggaactagaccgggctaaatcgatcggccaccgcgtgagcacggcggtccgccgcggctaagcaccgacgaggttgaaattggccgagcacagagcgcaataggaaaaattgggcacggggacaggtatctcacctcggggcggagctcggggaggcctggcgcggtctccagtggcctggacgatcgggaacgagggcgcgggtctttggtggcggctggctgcgtgggcagagcgtgagagagggtgaagctgtgcgaaatgaggcgtggggcgagcgcggggcactggcggggctctaagaaaggagttgggcgcgtgggcgggcgtcgtgcccgagaaactcggcgacgtgcgcgagtgcgcactcaccggtctatggcgagggcgagggggggatctgacagggcaggcccacagcgaagagaaagaaaaggggacacacggggcaacaacttggcaactggcg

SEQ ID NO: 167839 - DNA, 519 bp, Zea Mays
cgtgaacatccatggaagtatgagagggagaaccaactcggacaccctcgagggctgggtcatagctcgcgctacccatccgagctggatcatctccggcaacaccctcaggggctgggtaaacgctagcgccatccttgaggaccgagccctctgtaacagccacctctaaggctgaaggaccttcaaccacttccatgggaacagagcaatccagaccagcctcctgactcttaagaccacgctccaaggtcgatgaggcacgagacgccgctcggaataactccaacccggcatcaggcatatcagcacaaatttccatcatcccaccatctgccggctccgacaacagatcttctggaaccatatcttcgagagtctgatcaaaatttgccagagacaattcttgcagaccaacgagggcagacaaagctggagaaggaacaccactactctccccgctggctatgtagcgctggctattcttccgaattaaagggatttcctcctcctcttcct

SEQ ID NO: 167840 - DNA, 1277 bp, Zea Mays
tgcaaactctctcagtacagtctccttcgggtccttacaccatcaaagatgggctcattctctacaaaaaacgagtattggtaccagctcaatcagaattccctaagaaaatttttctcactttccacacatcccctatcggaggtcactcaggatttgctgtcacctaccacaaagtcaaacaacttttcaggtggtttggtatgaaacggatgattcaagattggtgtcaacagtgcacgatctgtcaacaggccaaaaccgagcgagtcaaataccctggtctactgcaatctcttcctgtaccggacgctgcatggaaggtaatctcaatggactttgtggaaggcctcccgcagtcagatcacttcaactgcatcatggtgatagtggacaaattctccaaatacagtcattttattcccatgcgtcatccctttactgccctgatggtggccaaacaatttatggacaatgtgtttaagttgcatggcttcccacaagctatcatttcagacagggataaagtttttaccagtgccctttggaaggaactcttccggttgattggtgtagagcttcgcatgtcaacagcctatcacccccaaacggacggccagacagaacgagtcaaccaatgtcttgagacttatcttcgatgttttgttcatgcttgccccaccaaatggaaacagtggatttctctggcagaatattggtacaatacaagttatcactcttcccttcaactcactcctttcgaagttctgtatggtcatactcctcaccagttgggaatggacttgcgtgatacttgtatggttccctccttgcagtcatggcttcaggaacgtaaagtgatgattcaattggtgcaacagcagctccatcgggcacaacaacgccagaaacgtcaagcagacaaacataggactgaacgttctttcgaagtgggtgatctagtgtacctgaaacttcaaccttatgtgcagtcctctctgatcagaagagctaatcacaaacttgccttcaagttctttggtccgtatctagtgattgccaaagtggggtctgtcgcctataagctggacctgccggcttcttctcacatccatcctgtttttcatgtttccttgctgaagaaagcgctgggcccccaagaacaggtcagctctgagcttccttcattttcagatgctttacagtatccagaatctgtgttgcagcatagaatgcttcaccgtaagggcactcaagttcctcaactcctcatcaag

SEQ ID NO: 167841 - DNA, 414 bp, Zea Mays
ggaagagccggatgacaaaaatacaacagaaagcattgcaaggcagtcagctcatcatactctcattggggaaacactatacagaaggggcgcatcaggagtcctcatgaaatgcattctttcaactacagggaagcaacttctagaagaggtccatgctgggcaatgcgggatacacgcagtatcaaggactttggttgggaaggtcttcaggtctggtttctactggccaacggcgaagagtgatgcagccgagttagtccagaggtgcgaagcctgtcattacttatcaaaacagcagcatctaccagcacagcaactgcaaaccatacctgtaacatggccgttcgcgtgctggggactggatatgattggaccctttaagaaagctcaaggaggatacactcatgtact

SEQ ID NO: 167842 - DNA, 277 bp, Zea Mays
ggcaaagccaatgttgtggcagatgccttgagcagaaaggcccagtgcaattgtatgagcatggatgcaaaagtcaccaccctatgtgatgagttgtgcaagttgaacctagaagttgtttcttcaggtaccttaaattatatctcggtggagcccaccttacaagagcaaatagtcagggcacagattgaagacaagggtgttcaggtcatcaaggaaatgatcaagcagaaagcagaaaaatacaaatgcttccgacaggacagcaaaggaattc

SEQ ID NO: 167843 - DNA, 674 bp, Zea Mays
cgtgtgcagccattagggctaggacaacacaacaagccttcataataagtgcaacaggcacaattatggctcggtaattgggtacacgataaatccacgcaacgtgcgcaacaagcgcaattgtggctgaattgttgcgacacacatgcaatgccttcagggcccacgaaaaatgtgactcgaggatggcggtctgactcaacgggagcgatccgattaagcgagagcgtgatatagcaatcacatgacgtagccaagttcgaacggcacaaatattgtgtcgtgttgccacggcgcagtcaatattcagctaatgccataactcagccgataataacatagcttgatcaatatgttcgagtacccactataatatttaatcgctcggcgtgaatcagaaactcaacgcaccacaaatatttagagcgatttaaaaatacgcaacatagccttcacatgcaatttaattattttctattaattatttgcagctagaaataattattaatacagaaaaattaaataccaaaattaatgcatgagcattgccacctaaggagcaaaaggcatttccccattattaaacgtgtattttgtactaattatttactgccagaaataattaattacgctagaaactgcaacatgtttagtctttttgttatttgcaacgg

SEQ ID NO: 167844 - DNA, 1073 bp, Zea Mays
cgcggcccaccgctctgctaccgccgcgccacactcactgagcctcagggcccacgtaagtatagctcctgctgtcgtctcgtgcgcacactgctgtcactggcaggtggggtcgcatggtcagtcctccttcaacctcccatcgccgaatcggtcgtgcttctcctccgtccaaaaccaccgccgcggaaaccggaactcgcccaacaaattcggcacgttcgttgcacctcgaccacattgcgcagataaattgcttgcgccctcctccacgcgttcaccccatcctccctaggaagctagaaccactcaccccgtgatactcgcactagaggcgggtcaccctctccgacgttgcgtgcccacaacgacactcgggtcacggtgggggttgcagaatctttgtcaggccgcgtggatcgcgccagggtcctcgccgggccgagcttgtagttgctgcgccccaaatttactcacaggaagcgggattcgttgtggagtcgccctgtgccgcggactagtgccctggcgtcgccctagccctggtatgcccaactcatgccttatccctcgaattcataccgagtagcaccgatccatgtaggaagagcgtctctgataggtcgagaattgctcgtcggcgttgcgcgtggtagtggacctgcgccttcccgtgggtacggcgtggtgtcgtgttcttcccgattagcagactacgacccgactcatggtgtaccagcaggagtgtagcgcccttgtggtgtgtgcttaggcgtcgggggtgcgagaatggtggtgcatgaatggcgccgccgtgcggatgaacaggggtgccgctgcgccggtgtttggattggggaagaaaggctccgatccgttggatcgatcaccagcgggcaggattagagcaacgaatagcgtttcagtccatttaatctggggcgttccgagctgattggatggataggattaagtcaaacgcgcgaacgtctcttgtgtcgtgtatctctgatccaagggctcatactgcataccggttcagtaaggggctagatctaatcccgtgcgtccat

SEQ ID NO: 167845 - DNA, 482 bp, Zea Mays
ctcgctttcggcctcgtttgcctccatatcctggtggtgcatctctaggtggtcgttagcttcctcaagctcctcctgcacattgtggagctggttctccaggacatcaatggtgttatcccggatctccacctgctgctccaggatggcgatgttctggctcaactgttccacctgtaggtccttttccaccaactctgaagacaagtcgaccacgaagtcctctctgctgtcgagggtgagcttagtggtctgagcaaggttagtgaggtgtgccatggcatcgttttgcagggcctgaaggcggtacagtgcgctcatgcactgaacagtgatcctcccaacttggtcgggatgcatggcccacacattcttcacgtggctcactcggttgcaccacatggggtcatccctcttctcagcgggaaagagtcccagtgggtgcattacaatctccaagggatcatagcctcagaaagttg

SEQ ID NO: 167846 - DNA, 896 bp, Zea Mays
gtagcacccatgtatccacctatgagggttagttcagttggtggaaggacccaaactgatagattttgccctagtgcaaaggttcaaataagggggatagagttccccattgatttaatagttatgggtaaccaagatacaactatagatgtcatcctagggatgaattggttaaccaaatatcaagctagtcttagctgtgacaagagaacagtgaagctagtgtccctatcaggagaagaagtgttagtagagttggccttgtgaggaccaaggaaagggagttgtcaccaagtcaccgctcatattgaggagattaaaccatcagaggctatcagtgtagtatcagatttcccagatgtgtttcccgaggagttaccaggtatgtcacctgaaagaaaggttgaatttgccatagagcttattccaggcaccacccctatttccaagagagcctatcgagtgtccggtccagagttggtagaactcaaaagcagattaatgaattgtcagaaaaaggctacatcagaccgagtacctcaccttgggcagccccagtgctatttgtggaaaagacggatggcacaaagaggatgtgcattgactacagatccctgaatgaggttactatcaagaacatgtaccccctacccagaattgaagatttattcgatcagttgagaggagccagtgtgttctcgaagatagatctgaggtcaggctaccatcagcttagaatccgacctttggatataccaaagacaacattcatcaccaagtatggactgtatgagttcacggttatgtcattcggtttgacgaatgcgccagcttacttcatgtacttgatgaacagtgtgttcatggattatctcgacaagttcgtagtggtgttt

SEQ ID NO: 167847 - DNA, 709 bp, Zea Mays
attttattccctttatttactgaatggactggggacactactctgtggaagatcaaggtctaatgtataaatttcaggacctatctgcggtatttcttcactgggtatggactgcgggttgaatagcaagttttccggggtctcttttacaaaattgcctgaccgaagcggtaagattgattctgaaccgcacgattgcagatggacgaccaggatcaaatccttaataaaccgaattggtacgcgctaacagccggtggatccaagatccacggctcagattcgtccacgtcaaactcgcacccgagcccaccgatctgatcactacggtcacgatttaatgccccggatcggtatccggagatctaatcggagtcgttcgtttgagatcccacggccacggattcgtcttcttcctccaggatcggcccacggtggattagagcggcggcgcagggtgacatgcggtctacgccggtgtacggccaactggcgattccggcccaaacccagctaaactggtgatgctacacgaccctgagtatgcggcgaaaacaatcgaggacttaccagtgttagcttatggcgcccagaaggttgcccacgacggtgggagacattacagccgcgatgaacgacgatgatcaattactcgacccatgcttcgtcccccggcttcgctggttcacgaccgcgcacccgaggcccc

SEQ ID NO: 167848 - DNA, 698 bp, Zea Mays
gctgcagcagaacgcattgcaagacagtcagcccactataccatcataggggggctgctgtatagaagaggcacaggaggggtcctcatgaagtgcatccactcagctactaggagacagctgttagatgagattcatgcatggcagtgtggtgtgcatgttgcatcgaggactctagtggaaaaagctttcagatccgggttttactagccaaccgccaatagtgatgctgccaagttagtctagaagtgcgaggcatgccaattcctatcaaaatagtagcactttcccgcgcagtagctgcagaccattcctgtaacctggccgtttgcatgctgggggctagacatgatcggacctttgaagaaggctcaaggaggttattctcacatacttgttgcaattgacaaatttacgaagtggatagtatacaagcccattgcttccttgacctcaacaaaggcagttgaatttatctaggaaataatgttcaggttcagaataccaaatagcatcatcactgacctgggatccaacttcactagctcagagttcttcgatttctgtgaacaaaggagcatccagatcaaatatgcagttgtggcacacccaagagctaatgggcaggtggatagagccaaaggaatgatactggatgcactcagaaaaaggtatttgacaagaacgagaagcttgca

SEQ ID NO: 167849 - DNA, 543 bp, Zea Mays
agggaacctcaagttcaccttcgtcgccatcgaatatttcacaaagtggattgaggccagggcagtatccacaataacatcgaagaccgctcaaaaattcttctagcaaaacattgtctgccgcttcggagtcccgtccgaactcatagtcgacaacgacaaacagttcgacagccaagacttcagggatttctgcttttccatcagcaccaagcctgtctttgcctcggtgtaccacccacaatccaacggtgttgttgagcgcgccaatggcaagatttttagtgccatcaagaaaaggcttcttgacaacaaaagggcaaatgggccgaccaattacctgaagtgatatgggccctaaacatgatagagtgccgggcaaccgggttcacacccttccgcctattgtatggatctaaggccatgccaccgcaagaattaaagcacgggtccccccgaacaaacaaatcagtcgtccccgatgtcgacgaaccaacttccaaagacctcatcgacggagaccgcgtcttcgccctgcaggcc

SEQ ID NO: 167850 - DNA, 501 bp, Zea Mays
ttgaacactcagatcttccattggcagttgctcctcaggtaccctgaggcacttcttcagctgagacacatggaacacatcatgtacatctgacaggtgatcgggtaactccagttgatatgcaacttctcccactcgctttaagatcaagaaaggtccaatgaagcgaggggacaactttcctttaactttaaatctcctcataccccggatcggtgacaccttcagatacacgtgatcaccctccttaaactccagtagtcttctcctattatcagcatagctcttttgtcttgattgtgcaattctcaaattctcccttatcattcgaacttgttcctctgcctcttgaataagttcaggcccaaagaactgtctttctccagtttgatcccaatacagtggtgtcctgcattttctaccatatagagcttcaaatggtgacatcttcaaactggcctgatagctattattataagaaaactcagcatatggtaagct

SEQ ID NO: 167851 - DNA, 416 bp, Zea Mays
ggaagaggttgtgtgcgccgtccgtctcttgatgaacggcgtagattagagaagatcgtaccccttcgcgggatagaatctgggttgtcgatcttactgcagatggttgagattagggattggcgtgggctggcgctgatcgttggatctaggtctgaaggtcggtgttgcgtaccaggttggattgaagaaggatttaatccaagcgctctattttagatccaacggccagtagtattccatacaccttcgtccagtcctttttgctaaagagtcctcagactttctggactttgaacccgccgtccgtggtagctgtgcactgagtctgggtgaatttgcgagtgagcccctgatctttttagtaattgacgcgcaaaccaggaaaatagagaaaacagggaaatcaatttaga

SEQ ID NO: 167852 - DNA, 284 bp, Zea Mays
accataacgtcgaagaccgcccaaaagttcttctggcaaaacattgtctgtcgcttcggagtcccgtccgaactcacagtcgacaatggcaaacagtttgacagccaagacttcagggatttctgtttctccattagcaccaagcctatcttcgccgcggtataccacccgcaatctaacggcatcgttgagcgtgccaacgacaagattttcactgccatcaagaaaagacttcttgacgacaaaaagggcaaatgggccgaccaactacctgaagtggtcta

SEQ ID NO: 167853 - DNA, 508 bp, Zea Mays
cgcacgcgcgcccgcgtctgcgctgactgctttgcaaaaagaccctcggtttatcggctaactcgaagtgggttcaatcactgttttctggagtcactgacaatttacacaggagtcccccaagttctatttcttcaccgcccgtggtccctgacggtgcacggcgcggcagagctccagcgagcgcgtagaccggccgaacatggcaacggctggcgctcagcttcgacctaaaccaaattcattacctaacaaacgtttcccctaatttaattgtgcaaatggtggcctattctatcctgcccacgagaaccgcgaaggccatgagcatttgatcgcgttcccaaatgattggtggtctctcagttcgaattggtgactcggtaagcatcacagagctatgagagtgctcaaacaagggagagagagggataagctgaccggattggggctggccgtggtgaggttagtttcgcggtggcggagaactgatttggggcgaaaccaa

SEQ ID NO: 167854 - DNA, 475 bp, Zea Mays
gggtgtaataagttaaatccatcttcttgaagcggttgaagaatgtggtaatgtgacttccgactcaaagtgtcagccacaatgttagtctttcctggatgatagtgcacttgtaagttgtagtccttgatcaactcgatccacctgcgttgcctcatgttgagctcgggttgggtgaagatgtacttcaaacttttatgatccgtgaagatattacatacattcccaagcaggtagtgcctccaaatttttaatgcatggactacgatggcaagttccaagtcatgcgttgggtagttagcttcgtgctttcttagctggtgcgatgcataagctatcatcttcccatcttgcataaggacacaaccaattccaatccctaatgcatcacaaaacacatcaaagggtttctcaatgtccggttgagccaaaacaggcatcatggtcaacaactttcgtaaggtacgaaaagctg

SEQ ID NO: 167855 - DNA, 1486 bp, Zea Mays
attagctttggggtgtgctactgatgcatatttgatctgaatgctccattgttcgcagaaatcaaagaatttagagctagtgaagttggatcctaggttggttatgatgctatttggtatcctaaacctgaatattatatcttgtatgaattccactaccttggctaaagttagagaagcaatgggtttgtaatctatccatttggtgaatttatcgatggcgaccaacacgtgagtatagcctcctcgagctttcttgaagggttcaatcatgtctagtccccagcacgcaaatggccatgttacaggtatggtctgcagttgttgcgctagtaaatgctattgctttgacaagaattggcaagcttcacatctctggactaactcggctgcatcactctttgctgtcggccagtagaaaccagacctgaagaccttcccaactagagttctggatgttgcgtgtattccacactgtccggcgtgaatttcatctagtacctgtctcccagtgatcgaggaaatgcatttcatgaggactcctgttgcaccccttctgtataatgcctcccctatgagggtgtagtgggttgactgtcttgcgatacgctctgctgcggcattgtcatccggttcttctttattttttatatacttgatgataggctcactccagtcatcagagtctgattctggctggctcaaagcattgcactcttccgcctgatccgagggaatgcttgggcgtgacacttcctagacgaaaactccgggtgggacctgagctcaactggatcttagtttcgacaacgcgtctgctactgcattgtgatctctttccacgtgatgaaattctagcccttcaaatttgtcttccagtttttggacggctgtatagtacttgcccatagaatcattcgagcaatcccagtctttatttatctgacttatgaccaccagtgaatctccgtataccatcaacctcttaatgcccagtgatatggcaatgttcaatccatggatcagagcttcatattctgctgcattatttgatgctgagaacgacaactgaagagcatatttgagttgttcacctctaggggcaatgaagaggattcctgcgcctgctccctgtagtttcagcgagccatcgaaatacattcgtcatacttctgcagcctccgggttgtctggtacttgttgctcggtccattctgatatgaagtcaactagtgcttgagtctttattgcagtgcgaggccaaaactcaatatcgtaagctcctagctcgcaggcccacttggctattcttccaatggcttctttgttgtgaagaatatcccctattggaaacccggtgactactatgactttgtggtcgtcaaagtagtgacggagcttacgagcagttaaaagtaccgcgtacaatagtttttgcacttgaggatacttctttttggagggtcccagaacttcactgatgaag

SEQ ID NO: 167856 - DNA, 708 bp, Zea Mays
gggatacagaaggattggtttgtgattcgtcttttagtctataataggtttaagatccggagtttcatatatttctttttatagacaatagtgggtgattaggaaggcctgggtatatatgggtatagccaccttattatgtaggatatgagatgggttggttagggcaagaataacctggggtaagaaagtttatagtgagaagaactccgtgttggatggtaatgcatctgaagatcgagtttgacttctctccttccttgacgaggttgatcttctttggccttcaatctttggagttaccatttgagtttatagacatgtagatggacatgggtaggataggttttatgggatagttcaaactttcggatgcttttatgttgatttatacggattgtgcatgtaggtcaagtagtggtatatggccgagttaatatcagataccagttttggttaaaacatgtgtatagacgtagggtctaatctatttcaccaagattaactaacatgttagataactcatttttgattagatcagacttagattagatgggatctagattagactggataggactagactaggttagattagataggtttattagggtaagatgaatctttattaggataagttaggatcttttgagataagatgaatctcaaaaggtaaaatagaatctgccaagataagatagatatggg

SEQ ID NO: 167857 - DNA, 639 bp, Zea Mays
ccaaaaccgagcgcgttcaccttaatctctatctcaaaactctaagctcccattgacaaaaatgtgtctaactaactcctctacctcatacctgaagatggcattgggatgcgtgccctggacacgtcaaacctgggatcttctctcagtgttcggcaatgagacaaacccaacttcacccctccatatgtcttgatccagtcagcgaaacccataagcctccacacacaaacgacaaaggaatgtcaggggaagacatctctcaacgggatcatagccataatctcaaagatttgcagccaatccaggcttgaacacgacctctctctgcgctgcctcatgctcaacgccgttcccagacgccagagcgtgcactggcgctcgcccgcgcacgccccgagtgcttgtcagagcctcccctcggccgtgctcaccctcgcctttgaaaacaccctcgggcacacctcacctcactccgcgctcaccctcgctggccagacacccctcccttagctccggcgagctctcctccgcctaccatcactgcccgagcctcagccaccgcggccagctcactccagccacatccaagctccgcctgccacccggttagcttcgccagtggctcgtgaagcttcc

SEQ ID NO: 167858 - DNA, 689 bp, Zea Mays
cgagcttgtacaacacaggctccatgctcgactctaccagcttctgttgttcctctaaaggactcctacattgctcgcttgaaaggtcccctgctaggcgctacagtctccacatgcacgtgtcttacctctattgtgttttgctgatccattattgttttgtgttcctccagacaacaatccattcctttcttattatggtggcccgacgcacgaatgccctttttgcgccgccttcttttggttccaggagcatgtcaagagttcttctgttgtaactcagcggaggattgtctacaacctttgttgtaagggtgggcagatcaggttggaaccttacaaaaaaccacctgaacctctatgaactcttctgaggtttgatggcgacgctcactcaaaatggtttttgcgccagatatgatattacaagtcacttttcgctttcacctccttgggtgctgccgtcgacaaggctataaacaatggtactgcaccgtatgttttccgaattaacggtgtggttcatcatcgaattggaaccttgctacctcgtcaaggttcacaacccaagtttgcttagctttacatacgtgatcctgatgctaagctccaatgtaggctccacgtttttgagagcgatgatgtcagtgctacttgcccagactccgctattacacagtccttaatgg

SEQ ID NO: 167859 - DNA, 504 bp, Zea Mays
gtgttttcattgtgcgcaatcaatttgggcgaagatggagagggcagtgcgaatttgacttcgactgagcttcactggtggagatgaaagcacctcgccgtggtccatggtgccatttatagccacggtgagtcagctaatgatcggcggccacggatagcatggtaagcgcatgactaccacgtagaggaaatgcacagtaagggagatcgaagtatggcgacagcgcggcggacaacgctgagtcacggcgaccgccggtgaggtaactccggccacatgcggctgggttcgcggagtcgtgccacgtacgagttatccttttcccgacgttatccatccgatcttgcgcacgaatgggacggcgatcaacgacggcgagcttagctggcgttctgatccacccagaacactgtaccatggcacaccttcatcagtcacctgacccgaccacctccctcccacattatctccagatttttgttaataacaaggctgtcttcc

SEQ ID NO: 167860 - DNA, 540 bp, Zea Mays
gtcgacgagagcattgttgggaggcagcatgttattgtgagggggttgaaaggcgatggcggccgagggtgagacggtggcactggagttcatacccatcgctgagcgatgcctccagtacctcggcaaggtgtgtatgtgtgcgatggctactctactttcctggattcactcagccattctatctcctgatatcgtccatgtcactgatctaggtgtcgtgtgctgctgaagctcaagaaaaaggcggtcaaagaaggtgccccatttcttcttgtttttgctttgacacttatcacaggaggtcaagaggattgcatgccgcttggcattatggtttatggttatgagaagcacctcaataactgtgttctgatttccttgtttttatgataaaactgcataaagaagcatgtagaaagggattgtatactaattttttatgcattctttttactgtaggtctcaattattttgttactggtttggatctacttctgatgcaagctaattatttatgcttctgatccttgttcccag

SEQ ID NO: 167861 - DNA, 367 bp, Zea Mays
caacaactaaaaattatgcatagcctttatggctattgaaacaaaccatagaaggaaaacatgcatgcctcttcaactataatatagacataaaatccacttgaaaccaccctatttattgttaaaaataaggttgcacacaataaaaagacctatcaggcagacatggttggacttatctatccacgtcatcttaaaaattcacttgagttctaccagtctcaagatttcatagacagtacaacattgcctttgctctatagagacaaaccaattgtatactaagatcaagttagcaagtagccacactagccaaaaaggggtgaggcacaaagcattgcatccatggaaatattacattgataag

SEQ ID NO: 167862 - DNA, 941 bp, Zea Mays
atcagatgaaggaccagttcaggatgagcgatcttggattactgagtttctatctgggaatagaagttcaccaggcctagggaactataagtctgagccaagctgcatttgcatcacagattgttgagaaagctgggctggtggggtgtaacccatgtgctacacccatggagcctaggcttaagctgagctgaaatagcacagaaccactggtagatgaaactgcctataggagtcttgtggggagtctgaggtatttcgtaaacacaaggccagatcttggtttttgagttggatatgtgagtcgcttccttgaaaggcctactgaggaacaactgttggcagtgaaacggatcatcagatatgtagcaggaacactacaccatgggtgtcagtatggaagggagagcaactggaaactgttgtatgggttcagtgatagtgatctgggccaatggcgtcgatgatagaaagagcaccgctggagcaatgttctttcttggtcagagtccaatcagctggatatctcagaagcagagagttgtagctctttcctcctgcgagaacgaatatatagtggcagccacagccgcttgccagagcatctgactgaaacggctgctgagtgatctcagaaatgcagcagctgaaactattgatcttaaggtggataataagtctacattggccctcatcaaaaaccctgtctttcatgatagaagcaagcatattcagacaaggtaccacttcattagaaaagctgcagagaatggtgatgtcaaactagattacatctgcacaggagggcaactcgcggatgttctgacgaaaccatttccacgtgatcgttttcagatggtgcgaacacaaattggcatgagtgattttggagcataagcttaggggtagaattgttagcaattaaccttgtgctccttcag

SEQ ID NO: 167863 - DNA, 733 bp, Zea Mays
tgtatgccctgatgaggttaaaagttcgagtgggaggttttgccattgcaagaaccaaccttaagaaattaaagaagaatgttatttgtgaataagcaacctgataaagatactagatgaccaaatgctaaggtacgacagtagtttccattggccatagtaagcagaggaggtacactaaacaaaatagggaaaaggatatctgtcataatagtgggtggtggtaatggaacaataatatggagttattcagaatagaaagaaagtgtggtagatgcatatccattcagggtaagttcggttgcctaccctagtcctcggccacgaccatcttgtgcagcggcaatatatttggttgcctagcctcccaccacaaccatgctcgtcagatgcagggggacatcccaggccttgactcgagcgacacatagaatttagccttcgctcctaagcttggctcagtggagcacacacatgagttgtgctgatgcaccttataaaaacatgtgagcttcgcaccctcacacttcctaatggctagggttatcacttgcattgtgctccctcacctctctctccgctctcttgctcttctagatttggtggtgagctcccatcttctctttggttgggctagggaacccctatgcaatggtaaaaatgaccccctcttccttcctctatgatctatccattgatttgaaccaccttttcttatttttttggttgcaat

SEQ ID NO: 167864 - DNA, 594 bp, Zea Mays
gttttctcccgctcgggcaacccttcgcagttcaccaagttgattgcccacacatggccacttcaacgctaggggctggatattgtcgggccactacctacggctcaagggaacctcaagttcactttcatcgccgtcgaatattttaccaagtggatcgaggctagggcagtatccacaataacgtcgaagactgcccaaaagttcttctggcaaaacattgtttgccgattcggagtcccgtccgagctcacagtcgacaatggcaaacagtttgacagccaggacttcagggacttctgcttctccatcgacaccaagcttgccttcgcctcagtataccacccgcaatccaacggcaagattttcactgcaatcaagaaaaggcttcttgacaacaagaagggtaaatgggccgaccagctacccaaagtagtctgggccctaaacacgaccgaatgtcgggcgatcggattcacaccttttcatctactatatggatcggaggccatgacgctgcaggagataaagcatgggtcgccccgaacaagcacatcagcagtccccgacgtagacgaaccaacgtccaaagac

SEQ ID NO: 167865 - DNA, 550 bp, Zea Mays
ggatgactccgcgatacggctgatcggcgaagtcttcttgttttggcgcttgggggtggtttgggtggtggatgttttgctgatgcgggggcagaggcggaagtggaggtggtacgacttgtacctcctgatggtgttggtatgcgtggttaggtggatgctgggtggggccgtggttgtatggttgtggtaggtggtgttgatatgtgtgcgcgacaacccgtgggttgtcggctagttgcgcccgagacattctgtccctggtggccttcgtttctgagcaatcccttgttgggtgtgcgcagtcttcaccgtggaacaggcagtaaaatctgcgcggctgctgcgcccgtccttggccccgaccatgggtgccactgccacggccctgggggggataatcttgacggcgaggggcctcacctgcggggtgctagttggcaatgttatggacctgctgttgactgcggttgtcccgaccggagtctgactgtgaaggtcttgtgcatgtgcggctggactgtggagggtccttgggtttcctctggga

SEQ ID NO: 167866 - DNA, 324 bp, Zea Mays
gcaacctccagtggcacattcggatgtagctagtcatacagcacgtgcacttcctcgtgcagagtattattatacgcttggaaattttctagggctacgcttagctcttccacccgagctcgagaagtcgcctcgcaatcccaggctatagatcatgaattcacagcccagtcaatagccatatccagctccacaatctcccgcagtaaacggtcaatctctactgacaactctatgatgtggcggctatcacgtgcacgctccctgcttccatggcacagttccatcgttagacgttcaactctggcctccgatcctctatag

SEQ ID NO: 167867 - DNA, 386 bp, Zea Mays
ggaccctcggggttaaagaggatgagaacaccatgccacaatcccctcgtaacaagggcatcatacaacattttgagcgacaaatgcgcctgtaacttgatggcctcgctgaagacattcacatcactaacgagcgccttggcccgcttgaaacgacacaattcgaagctggtacggtgctccaggaattacgaacagcccaagccaccaccaacaccaccctcgataccatcatgacacggctggagtagttttcccagcagcttggtgagctacagggtgacactgattatggtggcgacatcgagtacgacgatcagccccgtcgtcgctagcacagacctcgtcgtgttgtacgtaaccagaatgatttttcctctaagctt

SEQ ID NO: 167868 - DNA, 424 bp, Zea Mays
ctaccaccaatatacagtccactgtacccgacctcggaagtccctcaatgaagtccatggaaatggaatgccacacatgaggaggaaccggtagaggagccaacagtacaggataacgagatctatctggtttggcctgttggcaggtgctgcacgactgaacataatttcgcactgcttgtttcattcctttccaatagaacaaatgtttaattctgttgtaagtcactggaaaaccggagtggccgccaataggtgaatcatgaagggccaaaatgatttggcgttgtatatccggactactccccagccacacgcatgctttataacgaatgattccctgagatagagtgtatggagcagcagcagttgcggatacagtcagtttggtcaagagttcctgcgcctgcggatcatcgctgta

SEQ ID NO: 167869 - DNA, 929 bp, Zea Mays
cgaaccaactgggatgcataggcggttagctctaaacaagcatccatcatttagcaaaaatttattccatgtatggccctctttacaatttaatgcaacctctttaaaatcatcatcaaaagcatattgtcccttaattgtttcaagtccaaaaatacgacaatgaagttgagacaaaatagcatagcgtttagacaaagcatcagcaatcacattatcattcccctttttatatttaatgatgtaaggaaaagtttcaagaaattctacccacttagcatgtctacggttcagatttgtttgactacgaagatgcttaagtgactcatgatcagaatgaataacaaattccttagaccaaaaataatgtttccatgtttgcaaagatcgtatgagagcatataattctttatcataagtggaataattaagaacagggccattcaatttctcactaaaatatgcaacgggtttacctccttgcatcaaaacagcaccaatgccaactccacttgcatcacattcgagttcaaaagtcttaccaaagtcaggaagttggagtagtggcgcgtgagtaagcttctcttttaaaagagcaaaagattcctcttgtgactgccccaaattaaatgaaacacccttcttggtcaactcatgtaatggggcagcgatggtgctgaaatccttcatgaaacgacgataaaatcctgcaagtccaagaaaactccgcacttgtgtcaccgtcgatggcgtcagccaactctgaatagcatgcaccttggcctcatcaacctcaataccctgtggagtgacaacatagccaagaaacgatacacgttcggtgcaaaaggtgcatttgtcaaggttagcaaataagcgcgcggtgagcaaagcatcaaaaacaacacgtagatggtcaagatgttcag

SEQ ID NO: 167870 - DNA, 730 bp, Zea Mays
ggcccgactatcatgttcttctaatatgcttgaaggtgatacagggtatggcttcattaaatgctctaggatcccgtggtcaaatattttaccatacaagtttcatatattattttgatatattgttgattttttgctattttaggtgttcaatttggccatcaagtttattcttgtctgaatttgttctttcataccctaaaattttctccacaaagtgttgcttcgaggtaagtcattaattgtacgattagtgatttagtgtgagatacattaacaatataacttcatgtaagaaagataatgtaaatatgttcagcccatgctccaataattaaattctatcaaataataatgcaaatttatttggtccatttttgtttgctacgaggctaactagaatttaatagaaggatcactatttgtataagtgttgttatatgctctttgcaccaccatttgaaatcttgggattaattgtatacatgccactctacttgaggaagacactttgtttatgtgcaaaattacctagatcttctttgcacaaatagttaggtagtggtgtttactgtttttccttgcatttgaggggtatcctcagattttgttaattgtggttattgctctaacattttgcatgataagcagctaggttccggtgtcggtctggtgggcatttgtcttaatcatgttggtgcctctaaggtatataagtctattatgccac

SEQ ID NO: 167871 - DNA, 738 bp, Zea Mays
caagaaaggcctcacataggtgtacgaaaatggcaacttggagaatggagttggaatttaagtgtgtaagatttaaatcgtagaaatcaaggagaccacagaaaaatggagaaacaggaagggcaagccctcggatgaggaatagcacaaaaacgacgacctcatgggtgtcctttgtcggaacagtcaccccgcgcgagatccgccaagaacatagttctttcgagggcaaaaccccagtttccacaagatgcagaagatcgggctcagaaattacagacatgtaattaccgacaaatggaagctggctgttgggatcaatgggcagaatgattggaacagcgacgctctgtctctttcgcttgggagctatcacaatatcttgggcggagtgggcaggctcgagaattcagaaaacagagaagcggcggaggagaaaagtgagatttagggttcagaactcaagaagacgcgccatcatgagtataagttagctccttaagtcggaaattacctctaaaatgccagatcataactcggaaaagtaagaaccgcaatcatcactcaggcattacctctaaaataccggcaagccttcaagcacatgaataaaaagcaagcaacggtggttaagtggagtaacttcatccttcattcgtcaagggggattcaacacaaactcgaagccgcctcataatgagtcggcctcttctacccttggtcactatattacataac

SEQ ID NO: 167872 - DNA, 946 bp, Zea Mays
attcttcgggagcatcccaaatgggtgatggtggcctgccatggtggcaaagcctggaggggacagaggcaggttccttgttaggtccggccaaactttatcttgatagggttggttttttgggtttgatagatggtcttttgaattttctgaactggtggtattgaccttggcctcttgctcggtggagattgctatctgcttttgctttaccgtgaggtcctcgccatgcaggttgctggtggtcttcgggttgggtggtcgggaatggtcggcagcgagggcaacatagcctttttggtggcaagggctgccctggcgtcatcgtcatttggtggtgggctagaacgagtgctcttcttgggggcatcgtgggtttagtcttcatcgtacgaacggtgggcgccaaatgttgagtactgacacgtggtcaggtgggcccaaacacttagagacagatagagagtacgagagagcgacaagacggctggtgggaactatagcttctcgttatgtgtgtcccatcccgctacaggacggtggtatttataggcccgtccatgggtaggtggtccaaagtatggttctacccctggttaccaactacgtctagggaatattccatgtaacgaagtaattacagcaccgtgcgtacactagacagtgcacaccaaataacacacccacaaactacgctgataggtggacccctagggatgccctccggtggactggtgacatacatggcctctctgtagccctcgcccttggagcccttgcgtcatggtacccttcgttgagcctagtcaaatgaggagcagtggagcccctagggcgacgcagtcggtgaacaccctgtcctatgtcaatcgctctgtggcctctaccgttgttaccacttgttgtagtcgcccactagattgatggccccttcgcttgtggatct

SEQ ID NO: 167873 - DNA, 481 bp, Zea Mays
gttggctgcttgcaacagactgggtgtggaagaaactttgaccaggctagttgagacgtgacggagcggatcctgctggtttgctaaagtttgacccttggaagggaacccaaaatatcgaacgctctggtgcctgtcctgctattgagctcggagaacttgaaattttctcttgaggtgacctttttcctcttctcgtgctctttccacctggatggccttgttcgagaggtgcaagaaactgaggaagtcttggctggcaaggatggtcttgagttccggtcttaaccccttcaagaaatgggccatcttcttggcttccgtgctgacgtcatcaggtgcatagcgagcaagttctgtgaatttatgcatgtattcactgacggttcaccctccttgagttaactcccgaaattcctcttccttgagctggatgattcccaagggcacatgatgctctgagaacgcaccctcaaactct

SEQ ID NO: 167874 - DNA, 1152 bp, Zea Mays
aagctaatcagatcatacatttttcattgtcaggttcgttttcttcaaaactgaactgtacggatttgtgccaagccctggttccaaaaaaagagtagtgaaatgatgaatctaagtagtgagaatattgttattctatgcatttcaattagaacctttttggtggtgactcaaaatactgtaagtactgcccttcattctcaagtatattctattgatggtatgtaaattaatgtgttagcatagaaatgtatatgttatggtgggtaaaacatatgaaaggcggcccaagcagcccataggccaggccatgctaggagatcaggattagagggataaggataagtttgttagattagatatcaaaaggagagatagtaggaatttgttagagaataagtaggggcagcacagtttatgtgcgcctgtactggactatataaagtccttagtttgtacctaggaagattagcaaagatcaatctaagaagagtattgctccttgccacattctatctcagccgtgcgccaacatggctccctctcgccctcaatcctcaaggcctcgccctactacccactcatacaacctcagaagtcgagatcattagaatctggtatcagatatgtcaggtcatgatgatgaagatagcatggcagccactgccctgcagccgtccctggcgtccatcgccacgacactaggtgaagtccaacgttagctctgcgactttgcctagcagatgtcctccatctcctcccgtgttgcggtcgtcgaggcatgtccatcttcatccacgccggccatcccgcaggacattccctatggcctgccgggctacggcagcatccccaaggtaccgatgaataccaatcatttgccagtcacgacacattctacctccatagcccccttccaatccatcgtctaccccttactcattccacatcaccactaccatcatccccccaccaccggaatattcaggagcaccattctctcgcaaccagcgacaagtgttcctcgctttcatcgactggagttttcattgtttgatggtaaagaagaccccattggatggaccaacagatgcgagcaattctttgaaggacatcgtacgctggaagaggagaaggtgtggctagcctcat

SEQ ID NO: 167875 - DNA, 357 bp, Zea Mays
ggagtcaacaaatctgtcggcaataatgtcgagttattgtggcagtccatctgtcggtaaaactgattatgtgtggcgcacagtctgtcggaaaaaagtagcatcagatcgtttgtcggtaaatggatgtcatgatcctataggaaaaaaataaacgagcgtgagtacgtatgtaggaatcaggaatcgaacccgtgaccctttgcaaaaagagaagacacagaaccattgaactagtgatgattattcaatctgctttcggtattgttttttataaacatgtacacgttagttattgaaggggatacaacacatcggcccagtaaaaaacctggcaccgtacgtgtcccgcgcgac

SEQ ID NO: 167876 - DNA, 859 bp, Zea Mays
tgtgtccagtttgttccagaaactgtgtgtgtgagtgaagctcttcgcctctgctgagttcgagtgttcgccggtgccgttcagtgctgttcaggcctaacaattggtatcagagggttggtgatcgtgacccgcggcgcccatggcatctccaccgcgcccacgaggacgctccccgacacggaaggagaagggcacggactcaggcaccaagacgccgccgcgcatgcctactccgccacgccgaccacgcacgcgcgacgggcgtcgctcgcgcacccgtggtgcacgccatcagcgggaggtggtgatcgagcgcgtcatccgagagggcagcagctccggcaactggccgcagttgacgaagacaaactaccacgagtggtcccttcgcatgaggctgaagctgcaggcacgccatctctgggacgccatcgagttcgatgacgcggagtacgacgacgaccgcagtgcgctcgacgcgatctgcagcggagttccggcggagatggttcccgtgctggtggccaagccatccgcaaaggaagcctgggaggccatcaaaaccttccgcatcggtgatgaccgagtgaggaaggcgacggcgcaaaacctttgcgccgagtacgagacgatcaagctgcgagacggagaagcaatcgaggatttcgcgctccgtctgacgggaattgtccagcggctggcatcgctgggtgatcccgagccagacgacaaggtcgtggccaagtatctgcgcgtcgttcgaccgaggtacaagcagctcgtcatttccattgagacgctccttgacatctcccagctctcggtcgaggaaatcaccggaaggctgaaggcggcg

SEQ ID NO: 167877 - DNA, 976 bp, Zea Mays
attcgtggcgcgtttttgggagcagctataggaagcacttggtaccactctactccagagttcagcctaccatcctcaaactgatggccagacaaagagagtaaatcaaattcttgaagatatgttaagggcatgtgtgattcattatggcaaaagttgggacaaatgcctttcactggccaagttttcttacaacaacaactaccaggctagcttaaaatggcaccattcgaggctcacatcctaggccacagctagaagaagatgcatcgtctaccaacctaagaaaacgaaacaaaggaagaacaacatcaaactacaagaatgagagacttagggttagagagtagggctaagattttacctgcacaactggagctaggtcccagagaaaatgacgagcacaccaagaacaagaagcaagaaccaccagagaagacgacactcgattagcaagaactgtgactgatggaggagggacacaagacaacaaactcacataatcaccgatttaccggcggagaagagggagatagagagatggaaaagggagaggcagagagggaggcgatgtcgctgatgacaggtgtttcgagtttgaggtcaccatagtcggtagagaagccagagagcggagaggtagtcaggggagcttgaaggcgctgaggcggaggcggaactccgagaccggctcgctgctcgccgaagaggcagtcagtcaaaggctagaggcacgaaggcagagttatcgaggcagagggaagagcagaggtgtcgatttagggttagggcgacggggtcgagggtgtggaactagggtgggggaacatagccgcacaggctacgtcatataaacgcgaccacacatgggcagacggggggagcttggccattgctcggccacagcctaacaattatgccgggtcatgcctgcccgtgggcctgggtgccagcccaggcatggcctgctagacca

SEQ ID NO: 167878 - DNA, 924 bp, Zea Mays
gccccaagtaactcgtcgctagtagcctcaaaacatttcagccaatcgtcatctggctcgtcaaaccggtccctgaatctgaaggtatatttcaatcgaactaatccaccttcgatggatccggtagcagtctccttcggcatctcccaattatccacaagtggccacactctataggctatgtgctcttggattatgtctcttgtgccaatgaaagcacagacattgctgaaagccttttgacacgcttcggcatcactttcaatcaccaccctcggtcatcgaaggccgaagcgagaccagatggggcgctgggtaatttccttaatgttctctctctcaaccagattattcttaacataaaaccattcctccatccaggccccggtccaccttttccgaaatgttggaatcgggtagcttgcattgggacgagcaatgaatccataacaaccaaagttgttgtgatactgctctttgccagtggccttcgactcatacaatagttcatgcatactgcaaaaacacttcacgctcggttccagcccctgtcttcttacagcccaaacaaacaagcccattctaattatagctttgggagtaagttgatgaacaaagatctgaaatatctttagcacttgaaccaaaaatctgcttaatgggaaccgaagacccgccttcaaaaggcttttgtaaacaaccacctcattttcttcaggagcaggggtggtgctgtctcctccaaccctcacaatagacatgtcacgaaagtatcttcccttcatggcgtcaacatgactttgcttaatagtcgactttccgaagatggtatggcttggtcgctagggccggtcctcagaatcttcatctccactttccacatcatagtcatcgctatcgtctgaatcctcagacaaatccgcc

SEQ ID NO: 167879 - DNA, 780 bp, Zea Mays
gttgggctgaatctggcccgagccggcccagcatcgacagaacgcgcccgcgcgcgcgctttcgcgcggcggttttgcaccaaagaccctggccttttaaacaacccgaaagagtctacgacactattgcttcagtcactgacatttacaccgaagccctccatgttctaattcttcacgacatgaggtcctcgatggcgagcggcaaagaaccgagctccggcaaacctgtaccagccaagataagcaatggttggtgccctaacttggctgaggcctaattcaacacctaacaaacgtttcccctcgctcaattgcacaatctgagctctaaattgccctgcccacggagatagtgcgaactacggatgaacaaacgtgtccccggcgatctagcacggtttagctcaattgaacgggtggaggagcatcagtggcatgtaagagtgctgaaacaagcgagcagaggacaggaccagacatgaaacgagctagccacgacgtggactcttttgctgtggtggaaactcgatttgggggaaatgagcaatttgtggactctggtgaacaattggaggcaagtgctggtgctttggatgggtaattaccctacggagctcatggcgtgctcaatttataggtcccttgagtggtggccagtgaatttgagctcgcgcggtggcggtcggaaagaaggaggtgtactggcgcacgcgattggtggcaactaccgtggcaagctcaccggcgatcaccggatgggctaacatgagtcacggt

SEQ ID NO: 167880 - DNA, 471 bp, Zea Mays
agaaatagggtttggggcactcggctcggaaacgatcgcgcaaaacgggaattttggtgaaatttaagcctgggatctcggattggcgtgaaatttggcaagtaggttactggaagtgttgtgaaggtgcctgaaaaatttgggtttaatttgagcatttttggctggtttgggcatttcaccgagcatgtggcgtgcggggagctagggctttaggaatatggccatttgaggtgagaatgccctcccgaaggagctaaaagtttgcagggatacacaatggaggtacatgaactcattccatcaattggattcacaggaaatcacagatttggaagaggtgtgagaaggagtggagaaggggcaaacttaacacagggaactgagagggagaagaacaggagatggggggaagacctgctcaccgagggagggaaggagagagacgaggtcgccggagaaggtggccgg

SEQ ID NO: 167881 - DNA, 698 bp, Zea Mays
gtgcacataaggaatgtcggtaaagctgagaaaaccgagttgaccaactccaatctcccagctttagagaggaaattagaggtacaggatagtctcttttcaattctttggataaggggtaaaaatgttgaattcgaggttttgataatcccagaggaagtccaaggtaggcgaaaggctttgatcctatctgacagttaaacgttcttgaaagaatctccattttctccgggttaacattgatcgggtacatacttgatttattgtaattcaccctgagccccgtcaaagttgcataggaattgagaactgcttttagaaaaaataattgctttgggcaggcttccattatcagtagtgtgtcatcagcatattgaacaatcggaaaatcttggccacaattttcagtcaagggtaactggagcaaattctggtgtcttgctttactgataatactctgaagtaaatctaccgccaagacaaacaacaaaggtgagagaggatctccctgcctgacccctcgcttgcaatgaaatgttttccctggcactccattaaataaaaccgatgacgtgccagtttgtaggatatttcgaatccatctaagccatttaggtccaaatcctctatgaaacagcacctgaaggataagttcatgctctacagtatcaaagactttttcaaagtcaagctttagc

SEQ ID NO: 167882 - DNA, 360 bp, Zea Mays
cccaagacacagtgaacagcgctcactggacggtgggttctaattcgcctaaacagaggggttcaaatgtaaagtgaacccacgaaggggtatcgcgcgatatctgccgtcagatcagaaatggatgccccggattagaatagttttaacttgaatcggtatgcagccatggtcattggatcccgaatggatggctcgggttcaaaatcacccagagtgagttgcggccgccagatccggatcggacgacccgaaatcgccgtccacaaattactacggtctaacccatctccaccacacagattacatctaacggctgtggtgcttcccccaattccccatcggtctacggtggcgccg

SEQ ID NO: 167883 - DNA, 580 bp, Zea Mays
gtgagaccaatttctcaacaccgttggactcacatgacttagaagaaatgaccacacaacatggttggaaggtgtggtcatacctctgatcggagcgggtgaccagatagtgtcagtaccaacacccagcctctgagcggtggcggaattgctcgggcgtcatcccaagtgggtttgcttctagatgggtggaagctgacgcaccctcaatcaccgagatcttgttgggtggcgtagaagaatattcgatcgccttgtcgagcactctgtccaccttgttctggattgtctttaaggtttcaataatcacccccaccttcgcctcaatacccgatcgccacttctagaaatcgccctaatcgctcaccaaacgcttcaccgtaggctccatgctcaccatggcggattgcattgactccatacgccgaacagtctcatgtttcccttctatcttatacattagttgtgcgattaggtcttcgatgcgcgacgacgccatcgtctcccactttcacttgaaacctcatttggtggtcgtggggtggatccaggatggccctgatgccaaatgttagcgaac

SEQ ID NO: 167884 - DNA, 443 bp, Zea Mays
ttatggaatgaagttttaacttcttggcaatgtatctgagctcacacactagggacttttctgcgctgcatcgaacatgttcggtgcgccatcgatgtgtcaccggacacgtctggtgccttccacgttgactagccattagagacaagccgttatcggtcgttgagcctttgggtatccattgtgccaccagtgattacattttgcaacgtctttgagtgacatatctagtgcggagtcttgcgctagacttaacacgttggatgccctttaactcccaaggttgctctaaagtactctctctgcgtcctatctagtgcctcatatccaatgtacaccatggtaatcggtgcactcaattcttcagccccagcaacacacatgtctagtgtgacatttggtgtgccaccggacacgtacggtgcactatgtgtagcctgttt

SEQ ID NO: 167885 - DNA, 427 bp, Zea Mays
ctaaaatgtaagttccaggggcatagattaaacctccctatactgtttatggaccgcgggttcatttcgtaactcaacaggggctcattagaaaagtgcgcggtgaaggggtatcgtgtattcacagccgtcagattagatccaacagccccgagcacgccagtacttaaaggtaacggcgatcaacagcgtccctatcatggatcagcggcccacacacgaccacgccacgatccaatcctgcccatccattccaatacctacgactcagatctaatacgacgaaagggtatttggcattctaatctacaccattcatccagatccaacggtgcagagtgcttcttctaccccgcgtccaaggccgagcaaggcacccgcgcccacgccggagagtacgccggagcacaccatcgcagcgatcccg

SEQ ID NO: 167886 - DNA, 723 bp, Zea Mays
attttactagttggttgggaccgttagtccaaacatcgacaagcaccaaatagagcaggagcatgtatggagcaccataagattcatatgaagaaccatcgtatggatatccatacgagtatgaaggagtgtatggataagtaaatggtggtggaggagcgttggtggtaggagctttagtgtgaggaggggtgttggttgtaagattttcatttggaggagcaagaacgtccatggaaggttagtagggatatgtaagaagaggatatgggcatgaaaacatagcttgtggagtgaggaaacaaggacatacaaaacatcctctcgtcgatgatgcactagagaattgtcgtcgaagaagacctcccccacctcggcaatggtgtcgagaagttgtggagtttggtcgttgatcaagtcaatgatagtttgaaagtttagactccacttagaatccatattcaaatagagtgttggatgctacaatatgaataagataaacgaaataggaagtggtgagtgtgaatgaacccaatcaccctctttatttataggttggattcttgttttcttttatttttttgggtttttctaatttttttggacttcaaaaggtcgaaacagtatggacccattagattacgacacgtggctatagaccgccggaaccgattggatcctccaatgcaacgatatgtacggagcagtcggtatagatcggtc

SEQ ID NO: 167887 - DNA, 726 bp, Zea Mays
cgacgacctagattttaaacacacagatctcaccgtagccgcgggatatgagatctacgattcattttccccacacgcgaggggttacggaagatctaatccaagccgcataatgtcgatctaacggctagaggctttccccccactcccctttctcctaccggcgtcaacacgacggcgcctgactgaggcacagcggcgccattacctcggacccgaatcccatcaccctgtgcccgaagctcaaatctactaggtgcaacaccatcacagggccaaagcgaatacagagcggggcgtactcaccagtcacgagggtggagaggactgcacccacgatgtcgcgcaatccacgcacgccgatgacgaattgatgccgccctgctcgccgactcggtccgcaaatgggctggtctccttcgcagcaacctggcgaaggtcttcgagtcaattcccggcactggacagcgatgggtaacgcaatcgcgatggcggcggcgggttcgtttccctcgacgagcacacgacgaactggcggctgaagttaaacggtgaaaaggagggggaagaagaagactcggtccggtcctttataagcgcgcgggcgacggacttgggcacaacgtccacagccatgaagatcgcgatggcgcccgtggagctagggattcggttgacgatggaactgacgaggtcggcccactggtcagtgccacagggacgcag

SEQ ID NO: 167888 - DNA, 319 bp, Zea Mays
gtgcatcatgtgcactagatacattcctttgttctgtatgctatacttctatgcagtgatgcgtgttgaacactgaattttcacacgatctggctgcttgcgcacaattcgttgagaagggaacgattttatcctgattcgtaaggcatcagtcttattctgcatattgtcaacaagatggcaattctatatgatcaccaggtgctctaaggctctgctaaaacatgtctgtaggggtctaggggaaatggtctttagctaaggctgctgttttggtgtgtttttaagaatgtatctttgaaccatcgatctaaatcat

SEQ ID NO: 167889 - DNA, 572 bp, Zea Mays
ggatgagcttgaggaagagagggcgagctgctcggctgcttctttcctagttcgccgcgccagactctagctgctccgtgtggacgcgagagcggagcggcggtgggcgtggtaggcaaggcacggccagggatggagctcagcaagttcacgcgacgggcagaggagaggagacagagctagaggctgagaggatgaggatggcggccaataaaaatatttgggagcgatgagcgcctgctacgcaagtaacggagatgccaggggataaaatcagacgtagagaaccccatgagcggtggcccaaaaaatcccatggcggctggaaaaatcaaaggatggagggcggcgggagggatagaggatcagctgaggaaaagagaaatatcagcggtaggaaataaggttgcttgcgtgaaggaacagaaaataaacacttacggtgaagaaaatatcaagggtcttcaacggtggctgagaaatatcagaggagagggagagaataaggccatcgatcaacaactggagaaaaagatttttccttctctaatttttattacaaaaaactacgc

SEQ ID NO: 167890 - DNA, 379 bp, Zea Mays
cagcactaggaatatcgcatctcggatactacataaataaagctggattaggtgggcggacacagccatgcacgcggatactatcttaagcatcccggcgatcgaatcgggtcttttagctagctctgctccctttctccacccatcgtctgccatatcttccttccgtctctcgatcgatcgcaaccgcggcagcaagaatccaagcggccaaggacggagccaaaaacctcagatagatccatagccattagctagccacagcgacagcgggcaggatatatagccgattgtataataaagaggggagaaaggatgggaggggcgactactcgtccgatgttaataccccaaccgcaaagactagaaatgcttgtga

SEQ ID NO: 167891 - DNA, 333 bp, Zea Mays
cacaaacttgtcaaggtaatccatgaatacactattcatcagattcatgaagaaggctggtgcatttgttaggccaaaagacataacggtgaactcatatagcccatacatggtaatgaatgtcgtctttggaatgtctgaaggtcgaatcctgagctggtgataacctgacctcagatctatctttgaaaacacgctgactcctctcagctggtcgaacagatcttctattctaggcaaggggtacttgttcttgattgtgacctcattcagagctcgataattgatgcacatcctcctggtgtcatctttcttctccacgaacaggacagg

SEQ ID NO: 167892 - DNA, 879 bp, Zea Mays
caacctcttgacactgaagatcgccctccaaggtcgatgatgcgcgggatgctacccgggatacctctaatcccacacctggaatgtcagaacaaacacccatcatatcaccatcagtcggctctgacagcatatcctcaggaatggcatcctcaagggtctgatcaaaatctgttatagataaatcttgaaggctaacaagagcagacagggctggagagggaatatcactatctcctctactacatctatagagtcggctattcttgcgaattaacggaacttcttcttcttcatcgtccttatcaaaaatgcggacaaaagatggggcaggatcacacccattgggttcagcttcagcagggtcacacccattgggttcagcttcagtagggtcacatccattggggtcaacttcagcaggcacaccaccagtaggatcaactccagtaaagacctctgccggtacttcttcagcaacaggagcagtagggccagcaccctggtccaagcatgacaatcgtcgaagccgtctccttttcttcttcttttcttcagcaggcgcagctggacgactgacctggtgacgatgatttgggcgagtaccctcaggcttttgggcgttcgtcggtttgtcaagctttgatataacggtaacagccattgtttcagtagggccccagtcagatgattctccagccaacatgtcaagcatagcactcatttctgcatcatctggactcattggcatctcaaaatgaacttgcctctcatcattaggaagatcacaaagagaagcaaccaagacctcaatatctttgggagagggtcgtactctaagacccagcccactatcaccagtaggaggattagacacaa

SEQ ID NO: 167893 - DNA, 750 bp, Zea Mays
atctacccccacagaaagggtccgatcccaaccgtcgtgtctcggagtatttaacctcgtgctccgcggccacctgggtgtctaccgccgtgagctcgctctgccaccgtggcagaagggatccccgttagcatcgaccatcaagtttgtattcgtcccgggccatacagatagcgtgcaagcttcactgcacctataggttggtgctcgtggcctcacggccggagctaaagccaagaactccgggaattcctcaccagtgatcggggacatcgggaacccgtgccgaggcgtggagtgcttccccgccttcataaatcctggtaagcactcccttgaactgttagccatactcgtagttacgtaaagcgttacctgggtggtattttgggcactgatgggccgttcgcggggtcgctggcggggttgccgccgccgggtgtcctgcgccaccgtggtccggtatcgggggaagaagaaacagccctggcctttggatcggtgggcaaaggctaggattagaatgtcgggctatcggatcgagactgtagattgatgatcggacaacttggattaggagcaggggtaccggttcgggtacattaccgcgcgtcgttggataaaaatcgtgcgcgctagagtttaccccattgtttaaaatcccgaacgttgatatttgatccggtggctacgaccgcgtactaattcaagatcgaattcgggctcttggatctaatttgaatggtcagg

SEQ ID NO: 167894 - DNA, 474 bp, Zea Mays
ggcgcggaggtccatgtagtagtcgagttcgtcggtggccaggaggcggtccgcgatgcggttgacgaggtgcgccgggagagacgaccagtccgccattaccgctcggttgttggagcgcaactgcacagtgttcaggcttgcaggacgaattggatcggatattgcagggacttcagagagtgggagaacggctttatgtagaggatgaaagcagtgatcgtttcaatataaacgattcgtctttcgtacattaaaaacccatcgtttgcataccaatcgaggagctggaactccaaacgtccacccgatacggcgtgtggcggtcagtactccaattcttgggaagatgcggcaccataatgatcacgccgggcgatcgttgaacttccaagctccaacgacccacgtctagctgttcggctagtgcttcgttgcagccatcctagtgtttccctgagtggctcacagcca

SEQ ID NO: 167895 - DNA, 787 bp, Zea Mays
ggcatgcctgcacatcattcccaggtgcgatggatggccttctaatgccgaagcgtgaccatatagggcgttggataacgcctctcacatcttccctctgattcaggtcattcttcatgtaaaaccattctttcatccaagaacctgcccacttcttccgaaacatgggcacggggtaattcgccttagagcgaggcacgaagctgtaacatctaaagttgttatgatactgttcctttccggtctccttcgtctgataagacaactcatgaatattgcagaagcatttcgcatcttgctccagtccttggtcctcatggcccatataaaaccccactctataagagcttcaggggtaagctgatgaagttatatctcaaatgtcttcaaaacttcggccaacattttgtggagcgaaaagcgaagcccaactttcatgaagctcctaagaccaccacttcatcaccttcagggaggggaacaatgtcttctcccctagccctcactattgacacatcatgaaaatatttgcatttcatcgcttcaatttgcccctgtttgatagttgatttcccaaaaacaacgtggcttggtctccatggccgatctttggcatctttgttctcactctcaacatcgaagttcccgttgtcacttgaatcaccagatagtctagctagcatttcattggtgatttttctacgctggtcctctccatggcttcgtagaagctagcgagtgtgggatccacacttttcttatcttcaaccatttcggtgatgatcac

SEQ ID NO: 167896 - DNA, 556 bp, Zea Mays
agggccagaaggcatgcaggccgtggcgctaaggtcaaattcaaacaagtcggttgtctaccggtgcaacattgaaggtcatgaggacaccttgtacgtggagaatgggatccagttctacctgcagaccttgatctagggcaccgtggactttgtgtttggcaatgcccaggccatgttctagagctacccgctgctggtgcagcgcccaccgaaaggcaagcgcaatgtgctgacggcctagggctgcaacaacgcaagccgcgagtccgacttctcgttccacatgtgctccgtggaagcggcgccgggcgtggacctcgacggcgtggagacctacctcggccacccctacaggaacttctcccacgtcgccttcatcaagtcgtatctcagtcgcatggtcatccccaacggctgggtcgcgtggaacaagaacaaggtcgccaaggataccacctggaccatcttatacctagaatatggcaacgacggcaccggtgccgacacagccgaccgcgtcaagtgaccgggcttctgcgtcctcaacgctgac

SEQ ID NO: 167897 - DNA, 463 bp, Zea Mays
gatccacttgggattatcaagattgtgtccgagttcccagatgtgtttccaaaggacttaccaggcatgccactagaacgaaaggttgagtttgccatagagcttcttcctggaatcgcccccatctttaagagagcttacagagtatctggaccagagttggttgagcttaagaagcagatcgatgagctatcaaagaaggttacatccggccaagcacctcgccttaggccacccctgtcctatttgtgcagaacaaagatggcactagaagaatgtgtatcgattattgagctctgaatgaggtcacaatcaagaacaagtaccccttgcctagaatagaggatctgttccaccagttgagaggagccagtgtgttttcaaagatagatctgaggtcaggttatcaccagctcaggattcgaccttcagacattccgaagacggcattcattaccaagta

SEQ ID NO: 167898 - DNA, 342 bp, Zea Mays
gattgcccgagtcagcgaacatacattgctacgaatgatggctacaatagtgcttccgacggtgaggatgacgatgacgatgatgacaccagtgatgttgctgctaatgatgatgctatgcttggtgttgatgctacggtgaaccttcgaagcatcatggtgcagcgtgttcttagtgctctgcctgaatcatcagagaagcagcaacaccataatttgttccagactttcttcgccatcgagaatcggcgtgcacgtgttattattgatggtggaagctgtaataatttggtgagttcagatttggtcaagaagcttggcttgaccacacgtccacggcca

SEQ ID NO: 167899 - DNA, 487 bp, Zea Mays
ttcctctctaggttttcactagtttagccgggagatccgcaacgattttgttctgtcgactgtgtcttgtaatctgctaccattagtccgtgaagggtcgccggttcggctcacaggtttggatgacaacaatctcagtgtgttcccttgctgaatttttgaagtcttgtgttcttgatttcttcccttcccttctcttgatgatttgagaagaactatcaagttcttgtgttctgggtggtgttggtatttgttggtgggtgaggtatactcctaggatcactatttactccttgttggtgcagtttgtggttgtgatatcttagttgatcttgttttgactttgttctacaaaaccccaattttgttcatatttttagatctgcagttgattcacaagtccgattgagctcaaattttctagagacattagaaacatatttgtctatgtgtgtgtaaaatttcatcttaatcagatttcgtttag

SEQ ID NO: 167900 - DNA, 517 bp, Zea Mays
ctaagccaccaagtattgcctccaatcgtatacccaagagctctaattttggatttcccccaaactgagtttccgccaccgtagagacaccttcaccgcgaccaacttattccaggttcgttcaagcgctctagtcgactgttctagcgtccttaggtcctcctcaagctcctcgacccctctgattgaactagaccgccatggatcaccggggaacacattgttcctttgattattcgcactgtcaccgtggccagagcaaaccgggtagccattcttggaattaggtgaggggaaacgctcactagatcttgaatttggcttcggccaaagtaggacgccagtcgttgagcgaattggccggcacgcgagctcgtcggagctctgcacgtcgcagtccaccgtcgagggcttcgaagtgtaaaggaatagaaacgtaggggcttttctacaaatgtcagcgactcagtcaaatagtgccgcgaccccgatttaggttatcccataagacaagccc

SEQ ID NO: 167901 - DNA, 747 bp, Zea Mays
tcataggaggtttggaatttgaattgaggcacgaaacgacatggaattgagccgatacttcacgaataggtttagataggtgaatatgagtgaagtgtgtgcttggtttcaatttaggcgaagaaaaagagatttgggcactcggctcgaaaacgatcgctcgaaacggggaatttggtgaaaataaagcctggaatctcggattggcgtgaaatttggcaaatgagttactggggatgttgtgaaggtgcccgaaaaatttgggttcaattggagcatttttggctggtttgggcatttcaccgagcacgtgacgtgcggagttctagggtttcggtgaaatggctatttgaggtgggaaaaccctcccgaaggagctaagaacctgcaggaatgctcaatacacacagagacacacataccacaacatggattcacaagatttcacaggatttggaattgggcaaaaggggtggaaacagaagtgcttcactgcctctcagacagagaacaagagagaaagggatagagggagaggagagcggagtgctgctcaccgagcgaggatcacaggcatagggcgccggaggatcgccgccggggaggaagatcgccggcgaagggagggaagggcctgagaccgagagcagacgcgggcaggggagaaagaactgagccaggccacgggctcgggcagagagggattttttaaaaacggagtatgggcgcaccggacagtctacagtg

SEQ ID NO: 167902 - DNA, 567 bp, Zea Mays
cggcgctccctggtccctcggtccctccgccggcggtggcttccctgctccctcggtccctcctcccggcgctccctgctccctcggtccctcctccagcggtggcttccctgctgaaccggccaaggtaacctttccgaccccatggtaggcttgcatagttgaattcatggtgggctagttgttgctctgcggcagggaaactggaggctagtttttttgttcctctgcggcttgcatagttgaatccatgtgcttctgtgattctgtctagtttagatcgttaatgtgtctgcggctctgcaagtagctggcaagttcgccgctagcagcgaaaaagtacacaaatcaaattcacaagtgaaggccgattcagacacggctagttcagtgtcacaaatgaatattcagcacaccatgcataccctttctgctgtcagtttcatcatcagcttgttagttctactgccgttttcaaaaccaaacaacaggtaatgctgctgctgcttccagtcactgctttcaaaaccaaacaatgctgctttcagacaccaccatccatattca

SEQ ID NO: 167903 - DNA, 296 bp, Zea Mays
ctttgatgtacctacatacttgttcctcctttcttgtgccttggtcccattgttctaatacattttctaggccagcaactaggaagagtacttggaacacttactaagtattgctatctgttactgacttgtgtgccatatatatgtagtcagccttcccaaagctccaccatctctctcgagcagaataggttctcctttgcaatcacacccacactctttggacagtcacaccggccactgtttgccacctgcagtgatggtaagaaccttgtaagagcggggtaagactcttt

SEQ ID NO: 167904 - DNA, 1077 bp, Zea Mays
agagaatggattttaggtgtatggcagaccaccgatctaataacaaatgtgatacctagcttaaagcaccgcacgctcgggcaactatccaaataagctttccgtttaaggtcagcatggagccctctaaattttttttgggtgggggtaatacttttaatttgagaggtcctttattttgtatggtttagttttttttacttactctaacaataacttctaaattaaaaccctcaaattcattataatggtacatagaaactacttatcatcatgtaaaacaagttttcctttttttttctctttcattcttcatagtgagtcacccatgttcgccatgtacctatctgttgtgagatcttccccgctaggaagggagaggaggagccaatgaggaaggtgccctaccatcatcatcagagattgcactagagggtagtgatgatgcgtgcggggaggagcaacggtatggttaggacaaagcaattaggtggcgagagggaggtggtggtatgccaacgtggcatgcacaaggtttaacaagtgggggggaggattcgggccacgtaatagaagaaaattaatggtagtttgagcgcctgaaggatagatccaaagaatgagggttatgaagcctcatttgggagttgtctcgctttttagagccaagttgggactctgctagaccctgtgttttagatctacctatcagaaaatgagtttgagggccaaaagtgaggggcatgttggagttgctcttggatgtcaatgcaaattgtcagatcatcttggttttagtgaatttcatgttgcatttccccttcctgtttggttgtcctctctccgccattctcctagcaaaataacccacataatccatgtggcttatacacaaataagcctattatagacataggtttaacgtcttattgcgatgttactataatgggttcattaggaaataaaatcaatgatgtagtcatgaaactctgattgtatagttaagattaaagacacctactcacatttcaatcaaatggtgtttatttctatatttggacagtttaaacattttag

SEQ ID NO: 167905 - DNA, 996 bp, Zea Mays
ctgcatgtccgagctccgcgcgcggcgataacggaattcgaccgagattctcgccggtggcagtcgaccgctccacgcacaacttccacctgtggctttatatacggccgccgcccctgcccatcaccggaaaactaccgccgccagggacaaaggaagcttgcgcctgctgtgagctcgcgattgggatgagagagatgagtcgccgcgggtgattcacgtggtcaccagtgctgtgtccccgaaaaccggttggggagctccgcctggttcccgtgaaggagttcgtagcattgattggatgggagctccttctgtgcctctgtgattgctcgtcggtgaagcgcctccgccgcgggtccgccgttcgccgtgggcagaactgcctacaccgcctgcgatggtatgagtatttctgttagatttggcgtgttcccttgtgcgcgtagaacctggtaattgaggaatggcatagtcacgggcctgattgatctcgccgtcgacgtttgttcctcggcggcgcgtcgtgctgtgggaggagagtgaggcgatgggggagatggggtcggagccgtccgatctgctactaacggctctcatcagatctgtgggtaccggttgggtgttaatccctggtcgttggatcataatcgagcacagcgttcattaggtagatccaaaccattgatcctcaatcctgtggtgattattccgtaccggttcataaaaggtcgtgggtcaatccgatccgtagaactctaatcggatggctggcaatggccgataccccttcggccttggcgttttacttaagaagtcctcggattttaatggaatcaacccgccgtccagggaatagtgtcctgagtctagggtttatttgcgccgtggcccctgtcttctctggttatcttgtgcccagtccagaaaaatataaaattcagtaaaagtgattaggaaatgatttttaatgtgaaaataaatgctagaatttgt

SEQ ID NO: 167906 - DNA, 494 bp, Zea Mays
atacaaatgtcctcccatttccaagatggtatgggaaggggttgcaaagggcatgctaccttcaaatgactggcattgattctctggcaggtgtcacattcagatatatacttaacaatttccctcttcattctggtccaccagtataaagatctaaggtcatgatacatcttattgctgccggggtgcatggagaattttgaaaggtgagcttcatccaatattttctttctgagctcagggttcttggggacaaccagtcggtctccaaaccatagaattcctttgctgtcctgacagaagcatttgtatttttctgctttctgttcgaccatttccttgataacctgaacacccttgtcttcaatctgtgccctgactatttgctcttgtaatgtgggctccactgaaatataatttaaagcacccgaggaaacaacttctaggtttagtttgcacaactcatcacatagggtggtgactcttgcatccat

SEQ ID NO: 167907 - DNA, 945 bp, Zea Mays
atttgttaaggggtcataggcttgagtacaaactttctccctttcagatctagcgtgtactgatttgttcttccacaatgctgagaatatcgatcatattgccaaggtcttcctagcagcatgtgacatacagacatgggtgcaacatcgcattccactgtgtcaacatactctccaatcttgaatggaaatttcactttataaccaatcttgatatctcccgattcattcaaccattggacatgatatggatgtgggtgtcgctgcaacttcaaaccaagtttttcaaccatctcacgacttacaagattatggcagctccctccatcaatgatcacctttactactttttcttgcacttttgctcgtgtttgaaaaagattatgtcgctgtccaatttcagcttctttcatttgaacagtcaagatttgtgtaaccacaagagcagtaccatgctcaaattcacatccagtgtgttcctcaattttatgagtgtcatctacatttcctgcttcaacttcctcttcactagctgatgtatattctccatcatcatttacaaggatcatacgattatttggacactcctttatgacatggccacgacctccacacttgaagcactgaataccactactcttggatattgaacccactgatgttgaagtgaatgctgctggtttataactcgtgtttgtagtagcatcgttctttctactagaatttccttgaatattggatcgcaagcctccagttgaaccttttgtcgttgaggatgcagtagtaaaccttgagtttgatttgcttcctccagtcatggttcgtgcaccatatgacaagggcttgctactcttagcatcttgttgcagctggcgttcaactttagtggcttgatgtaccaaattaataagacattggtacggctgaaactcaacaatacgctga

SEQ ID NO: 167908 - DNA, 456 bp, Zea Mays
gtgaggcggggtggtcatcattatttcgctcgggatggactccttatgggacgtgaaacaacccacttgtcgtgctacacctaggtagtgtgcatgcctggctaacaatcttgcttgttactggctcgacctctatcacacatcttttcagtgctctaccccaagcacgtggggtcctgcaaaaatcacatggttctctttgtccaaggtgacctttggcctaaaggggatccctcgcgctgtttttgtgggggttcacgctatctaggtgtccggcctttctcctgcacttccgtataagtaactaggatggtgctcagggttatttttgcttaccgtattctcgtgtttgtgagtctgccctcttggactactttcgctctctctctcctttgtgcatccctgtttgctcgcatggcgtcgttccccccagtgcgatccatgagtgtcgtcttc

SEQ ID NO: 167909 - DNA, 753 bp, Zea Mays
aaataaaaagaatagtgcttgcatgcgcttgggcctaatctattagtctcggcccagatagccgcatcaccacaacccaacacaacccgcccttctgtgtttctctgagacgatggcgtgtggcccgcggaaacggattggtgttccttgcgccgacgcaggggacccacgggtcagcctcacgaattacttggccaggcgcgatcgcagccgaaacgtggtgggcccctatggtcattcgctagcatgtcacaatggtctgcggaccaggtatgccagcgagcactgtagatcttcccagtcaactgctcgccaatttcaccggcagctcgagcgcagctgcgcccaaccgacatctccaggctattaaggtgtgggtcacgggttcttccttctctcgttgttttcccttaatcctgaccgccactgttaccgtgaggaagaagggcgaagtcgcgcgaccacctccattggtccacctccgcgcgtcgtgagaatcccccgggctacagcgttgggcggtcgaagaatcagcgggggaggcatcaccgctgcgtggagaatccggggcggagtcctatcgaatcggatttcaaccatatcagggaagaatcgctcgccggtgcaggcgccctgcctctagcgtcgcgcttgtcgtggtccgggatccttgcgccaccatcataggtatggattctcagtaaagtttcgccttgattctaggatggtgtaaagcttctcgtatggccggtt

SEQ ID NO: 167910 - DNA, 398 bp, Zea Mays
tgagcttcggattacttgggccccaagtgattcttgcagctgttcccaaaagtgtgccacaaacagtgctcctctgtcagatatgatggtctttggaataccatgcaatcgcactatttgatcaacataagtttatgcatacttctctgtcttgtgggtggtgtgcactggcaagaaatgagcggtcttggtcaacctgtccacgataacccaaatagaatcatggtgcctggaggtattgggcaatcccactataaagtccatgcaaatgtcctcccatttccaagatggtatgggaaggggttgcaaaggacttgctgtcttcaagtgactggccttgattctctggcaggtgtcacactcggatatgtacttggcaatttccctcttcattctgg

SEQ ID NO: 167911 - DNA, 399 bp, Zea Mays
aaaattatctagcgccccatctggtctcgcttcggccttcgaaggccgagggtggcgattgaaagtgatgccgaagcgtgtcacaaggctttcagcaatgtctgtgctttcattggcacaagagacataatccaagagcacatagcctacagagtgtggccacttgtggatagttgggagatggcgaaggagactgttgttgggtctagcgaaggtggattaatttgattgaaatatacctttagatacagagaaaggttcgatgaaccgaatgacgactggttgaaatgcattgaggctactagcgatgagttgcttggggcatataccagggccaaagatgatgctttgtccttagccttcaggggtcagagcaagaaaagattaaacagagttttc

SEQ ID NO: 167912 - DNA, 399 bp, Zea Mays
gcgatgcctagccgtctaggagattggagctccaagataaatgaatccacaaagaacttgttcttgcaccaaagctcaaaagagagagatcaaagaataagagttgaaatcatgtttgagatctaaaaacttatctcacaccgaagagacttcccaccgtcgaaggatgaagacttggggcgtgagatcggaattgaatcactttgaatcgaaggagagcagctgtcacaacccaaccaagttatatggcccacgtacaccaatccttgccttcaaggcctttgtcggtaccctaaaataggggtaccccttactgccgtataaaggcacattacccacgcggctatccttggtcacgtggtaaaagacctgtgtgtgtgaccagaccatgactcgccc

SEQ ID NO: 167913 - DNA, 686 bp, Zea Mays
ctggagcggagctgattgagctggcttctggaaagaactagggtgcgccttgggcggcattgcaccctggctccggtggcctgtgtgagcaggaaactgaattctctgaaacttctcaggctgttggggcctcttgctctcaaatcgacatttgcgctcattgaactccgcctttttgtttctttcggtggtgattgctctgttaaccatggcattaaagtcattatgaacagtgacttccacaagggtcctgatctcagagttaaggccactaagaaaggcttcctgcttcttttcatcatcattgacatcttcaggagcataacgagacaattctgtaaacttgtgaagatattctgacacggacatggcgccttgacgaagctttctgaactcatctttcttaagcttcatcatactgctgggaatatgctgctctcgaaagatcttgacaaaatcagcccaccccatcacaactgcatcttcatttacctctcgataactttgccaccaagcaagagcctgaccccttaattgctgcactgcaagtaagaccttgtccctatcatcagcatggacgacctcaagcttcatctcaatctcacgcaaccaatcatctgcctcgatcgggttgtcagatcccccaaactttggtggttgtaagcggtggaaatctgcaatgatgc

SEQ ID NO: 167914 - DNA, 1296 bp, Zea Mays
gcgagcaggaatgaatgcttgaaatagtagggagcacacggcattgttagtggtgcgaatcacgtgctcagtcttgccattctaaggagaagtatatgggcaagacattcagagttgaaccccatgagaggagttatcaaactcatgaccattgtcacacttgacgaccttaatggtgcgaccaaattgagtggaaacacaagcaaaaaagtggagaagagttgcaaaagtatcatacttcgaaagcaagggaaaatccattaataatgagaggaattatctagaatcaccaaataatatttataaaccgaaacacctgtaagtggagaggtccacaaatcagtttatgagatcaaaattgtgcatagcctgagaggagctgtaaaaatgaagtcgaacatgacgacctagctgacagacatgacaaagatgctcagaggtgcccctattacaagaaatgactgaactactatacaacttggacaatacagtggggtaagatgaccgagtcaacgatgccaagtactagatgtaatggaagtagtcagtgcgtgcggtcgtgatgaggttgaaggcgatgatgtagtggaagcaggatatggagaagtggacataggcaatcacagggtgtataagggcctagagctatcacaaccagcgagaagactctagatggtgagatctttcatgaacaagccaaacgaatcaaactcaatagagcaaagagttattggtggtaaattggcgaacagttagaaggttgtgaatgatgtgtggggcaacaagaacattgtgaagatgaaagggcccgggaagaatcgaatcaccaatagaggtgatcgggagaatgttttccttgcccacaatgataggagtggacaagagaggtgtgtgggaagaagaaagtataccgacgttcggagtggtgtggtaggaggcactagaatcagcaacccagttggtgactgcgggaggagtcagggtcatcatgttgaaagagctaacaagggattgctgattccacccaccagaccatggggtccaggacgtaacagagtggggtggtagggtagaagttatggtttaggtgctgatggcatagagatagggtggccgaggggataccccggaacaagcatcgtcacgtgagccgactacggtggaggaagacactgggaaagtcctcctagggatgagttgggccacaaccggcccacgagttgtaactagagggctaaggaacgttcccctggccacccccatcatcgcgaccacccttccggcgacgacgaccac

SEQ ID NO: 167915 - DNA, 1515 bp, Zea Mays
aaaagtgttgaacttttgggctaaagtgcaaaaaccaagctaaataagtattttaagtcatttggttcacaaatatgtggacttgaaagccaaaccctaagttttggacttaaatgcaaaatggacctcatttgagttctatactaagtctgaaattcagtgttgaaggctccactttggggctttctaactttcaaagcatagggtttttgccctaggtcaccacatcaaagttgaagaccaatcataggagaacaactttgtttaagggttcaagccatgatcctatgagaaatttggagaaaaacccaatcaaagatggactgtcagactgcctgaagtctgaaatacagattaacagtgttgtgacatgaactttgagctcgattttgatttggatccagtgactttttgtgagtacacgttatagcaaagatatagatggattgtagcactacaactttgctatagatcactggttgtgttaccacttgaaaatcagagaaatggcggcttaaacttgctcggtcaggctgtctgaatagaactactgatggtacagtaaaggttaactgaagaagatcctatccctctgcccatcgccggtgaccgtcgccgtcgattaccgctcgccgtgattcgtgcacccgtggacatcagataagcatcacccagtaaaaatcttcacccgccgtgagctggccaccactccgacgaccccccccacctctgctttgcggctggcacgataagctcaccgtcgaccgccgcttcccggcccgtgcgccgcgtggcctagccgttttacagcactgccgtgacaccttatgactgtcccatcgtcgccggggaggttgccacggcggtggacacgaattcactgcgccagtgttttcttctacctccgaccgccgcgcgcccttcgcaaaattctcggccaccgcttgcgacgcctataaattgaagccaccacaagctccgtaaggcagtcaagtaccccgatacccactattgtccccagccgatcaccagcaagctccaatttcatatttcccccaaatcagtcgaagaacaccgtgaaaccaagtccactgtggccagccgattctggtaaagctctgtccgattcaaaccttgtttaagtcttctcatagctcagtgatgctcgccaagccatcaatttgaatgtagatgcccccaatcgtcgggaacgcgctcctccacccgcaacatccctggtcgtcgtggccagtgcaaaccatagggtcattagtgaaattaggttggggaaatggatcagggtgggtccaattcggtgacaggcgctcgggagcgccggtcttggccctctccggccggtttagctcgccggagctgagctctccgcacggaccgccgtcggggacttcaccatgcaaagggatagaagatgggggttcttagtgcaaacagtcagtgacttggtttaacagtgaaagaacctgttctcagttagtaaaaacttcggggcccttt

SEQ ID NO: 167916 - DNA, 342 bp, Zea Mays
gctgaaacgagggtgaggagggcgagagtagacctggagacggtggtccatggcgcggtgactcatggcggcgcggagaactgatttgggggaaatcccaaattggggcacgctggtggaggatcagaggcgatggctggggctctggcttcgtaacaacttagcggagcagactggggcatcaatttatagaagctttgagcggcggctccgaatttggaaggggaagtcactggcgtgagctaccgtggcggtcactgaggcaatgcttcaggcgacggacaggcttcctatgccggttcactgtgacgtggtaaagcttcgaggcatgtggcattcgag

SEQ ID NO: 167917 - DNA, 350 bp, Zea Mays
gtgaaaccgcgattgcaaggtcacagctgtattggtcagaagaaagtatgtggagcttgggaggccaaaaactaatatcaaggattagcaaaaatcgagtgcagattagcgaagttcaataagtgtccaaagcacaagtcacaattgctggctaagacatgtcctatcgaagcacaacaaggtaaaagtaacaaaccagcagaatgacagttctgtaaatagtgcagatttttcagcactagtagaaatcaaaggcgcgtttccaaaggagtaccagcaaaagagctcgaaatattctgaattttttaccactgatccaaaatcacaaaggatggaagcacacaaaattt

SEQ ID NO: 167918 - DNA, 1088 bp, Zea Mays
gtccttgcttcatcggagccggtgtagtgtaggcagctctgttgggacagtagttggcgtagtgtcccggttgtccacacttgaagcatgccctgttggtggatgtgttaggagcaacaggtcctgctggggtgcttgctagcggaggagcagttggtgcccgttgagtttgttgtccggaactgccactagctggtgtacttggagtggtagtatagcgaggacgtgaactacttccagcctgcccttggttagcagcccttcttttctctccaaactcacacctcttgttttccacagcaatagctttgtcgagtagtctttggaaggatggaaatgtgtgcgataccagttgatattgcaagggtccaatcaaaccgtccagaaagagctccttcttcctctcatcatcctcaacatccctaggagcatatcgagataactgcttgaatttgtccctatattcactcacggacatacttccttgcttgagggatagaaactcctttcttttgatcttcatgagtcctgcaggaatatggtaattcctgaattgggtggagaattctgcccaagtaattatgtcgacggcagcatgagcagcgcaatacgcatcccaccaatccgcagcaggaccagtaagatgacctgatgcgtagagcaccttttctctatccgagcactaagctatgttgagcatcttctctacagactttaaccagtcatctgcttgcagcggatccgcagagttggataaggttggtggtttgtggctcatgaattctcggtgcttgtcccggggtggaactggtggtggtggaggaggcaggggtgcttgttgctgttgctgttgcgcccttctctcttgacgtatctcctccctctcttggcgcatttctcggcgtatatcctctctttcttggcgcatctcttgatgctcctatcgcatctgtgcatgcatgtctgccatagtgtctgccatttgctacattatttgcatctgggctgtaataactggatcagcaccgactagtggaggatttgggggattcatctctgcttgttgttgttgtctaagcaccctttgg

SEQ ID NO: 167919 - DNA, 555 bp, Zea Mays
aaaaaatggtgtagtatcaaattatcaaaatttacacttatgttatgtgatgattgattgggacacctttaagaaatttatgagatcaaaataagcaagatattcaaggtcatttttaattagtcaataaatagttatgatgttacaagcctactcttcatatcttcaggtacattctcaaaccatccttgctccctgtcaggaataaaaagatggattgctatttattatttctttaatgttcctctagagaattggttgaaaatgacgtgtacattgggaaactttgtcatgcaccatatagcactttgcacggtccattagctcacgattcaaatacatgaatgggatccaattgcttgttggttagggaatcttgaggggttgtcggaattggtgttagcacttggcaaaataatggtgcagagttgggtttgcgttgcgtgtggtgctggtttacgctgcctagttcaaaataacaaacatgactagtccatttggtgcatgctgagcgagccatgctgaacctggttgatccctggaagctgctggggc

SEQ ID NO: 167920 - DNA, 915 bp, Zea Mays
taaaattataaataatatatataaatatatctccaaattataacttgtcatggcacaatataatctaaggataaattggtcacaagattgaatttaaactagaatttaaatttgaacttgagaaatctaaaaagaaaataagaaaggaaaatagaaacaataaagaaaagaaaaaaagggggggaaaactcaccttgggtcgaatcccacggtcaggcccaaaaccccactccaccgccagcccactctgcgttctttccttttctttttcttgtgtggcacttacatgtgggtccacttcgtcagtcgtcttcctcctcaggtcggactccccgctgtgaacagaaccgcggaatccgcgcagctcaaacggctcgaccgaggtttgcacgatttgcccccccacagctcttgctgtcgccgcgcggcactataaattcatcgcgccctcgtccatctgtctatggctcgaccaaaactggaggcagagaacccctcctcctctaccatcaacgccgggtgggagctcgttgtcgcctccacaaccttgctgcggaaattcctcgccgctgtttttgagccgccgcggagggccgtgtggcatggtccgggcctcgccaccatgccatggatcaggttgcagtaggcttcccgcaaggttgaaagcttggtcgacatcaccggtcgaacagtgaagttggaagccgtcactaggggccttgatttgccatccctgatgcaccgggagcggatctgggcgatgcgcctagcctccgggaagattctcgtggattcactggcgatgttctcctcctgcgctcgactaatttcgcatcggagtaatggcttcgtcgtgtgcccgcatcgttccgtgggcggtcttcctggcgtcgtacctatctccagtaagttccc

SEQ ID NO: 167921 - DNA, 412 bp, Zea Mays
gtctctcgggctgaattgcatcacatggccgactcactcgtggaggccatggaaagtatgtttaatgaacgtctgcccgcaataggagatcgaaggctacatcatcgtgatccagaagaattttactgagaagaatccggagatgagaattctagtttcagccatgaattcgatcccttcggcgatggtcgtagaatttatggtgatggtcaccacgctgatttcaataatctgcgtggaaggcatcgtgcataaggacaccgagtaaggtttgaagacgagtttgaagaccatgaccatgaggaaggatctgatgagaatccctttgcaaatgatggaatgtttggtcgacgacatcatcaccgacatgctgattttgaagatagagaccgttatcatgggcgtcgtcata

SEQ ID NO: 167922 - DNA, 743 bp, Zea Mays
gatcttttagtttaatttcatttggtatgtgtggcttctagtgttgttgtttagctctaactatgtcagattttacaatatcttcaggggtcattggatgaagaattattttcttgcctttaaacatcaaagagtaatagtttgcgtgaccatgatgtaagctattcgtatcatatttccaaggcctaccgagcagaagtgaacaagcttccattggaacaacatcgcaatcagcataatcatgataggaccccatagagaaatgaacacgtaccgagcgtttgttcctggagtttaccgccctcgttaagccattgaatatgatagggtgtgggtgtggacgagtggagagagacaacttctccactagctccatgcttgccaagttgttgtagctgcaccatcaataatgatgtgaatggaacgttcttgcgcaacacctttggtatggaacaaggtgtggcactggtgctgctcaagttgtgcaacctacgtgctaagtacgcgttgcatgacaaggcactcatgcttgtcagcatccgtggcatccacatgttcttcttgggttcctgcaacgtcaatggcaagcatagcatatatggtttcttcagaatcactagctgaagaatactcaccattgtcacgtataatcagtttgtgcttgttggggcagtcccgtattgcgttaccaaatcctttatagcgtgacattgaatatccttggtgcgtccagcgaaagaagc

SEQ ID NO: 167923 - DNA, 533 bp, Zea Mays
ggcaataccatgaccaccttcatacaaaccacccgaattgcctatgtatgatggtcactctgatttgaagcattcctcatgagttatgaagcaacaatattatcatacggaggcaacatagtcgtgatggccaagtccttcgtcatggcagtaaggagtgacgctcaaacttgatattcttctcttcggtcaggaacaataacctcttggtagaaattaaaggatatgttgattacaagctttcaaggattccacacgaagccagtcactgcccaggcccctttccaatgtacacaagaccatgatgaatacttgcaagcctatgtccgtagattcctccaacttcgagctcaagcaccaatagtaccaaatgaaatagttacggaggccacgatcaaggggcttcactcaggaccagtggcacaatactttgccagaaaaccccctcagatccaagaaaagcttctccagaagatggatcaatatatcagagcaaacaatgatattcaacaaaaacagtcacactcacggac

SEQ ID NO: 167924 - DNA, 643 bp, Zea Mays
gtgaagaatttgaatttagaaccatgggtaactttgctgagataacagttgaacagtgtagaactgggccagtcccaacccccaagttctcaagtcccaactgctcattatgctgatccatgtgcctgtaatttggactgttgtgtatagcagattagcagttagccagttactttatttcagtgttaatcatcaaagctgaaaatctttggctacataaacagcggaaattcaatggagatgtagctgcgtttgtgcgtccagccaaaatgctcattcatgccactcaatcgtgtttatccacaatcatagaataggttttaaacttctgcgatgaattagatgtgctcagatttcttatgctccatccactatgttgttgtgtgagatttcttctgctccatccaccatgttgcgtgtaacactaattccagtttcttcctattgcgatataagatacttgtgttatgtatcctctaaaaccaataggataatgtgctttgtcctggagactacaagtgtccgagcagttggcatgtcataatcaaattctattccactgctctgactgctctgaagtactgaacctcatgacccgtccaacctttagcagttaaaaagcaaaaggcgatgggaacatgat

SEQ ID NO: 167925 - DNA, 842 bp, Zea Mays
gccacctcggcgaccctccgggaatctcgccaactaatccaagttggggtgggcaataaggaccggccacggtgctccccgcagacccttccttgccatctcgaagtcaccgggtagtctcgcatagaagcagcaagctgtgaagagaaaaggggtgtggtcggtgctgccttgtggatccggagattgacaacattatccatcgatctctgggccaggtttgtcaccaggttgcgtcgtcgcgattggtggcctcgccgggggcttgcgaagggtgaggccgtgacaaattctcaccgagcttggcgtgccgcactccgccgtggccaagaacgatcgtgtggcgattctcggtacggacctcgttaatacattcgcaacagtattccctttgtgcagtgttgttccgagcaaagttcgagagcaagagattaggatttgcgtagcgccgacgatggagccgtcgtgcggggtgttagcgccgccggtcgggttggcggaggtagcagacaagttgcctgccgtcgatcatgagatatacagtcaagattagaccggggtgacaccccttcgtcccctttagccatgggtcgttagatcgcggcgcattaaaccctggaccattggatctaatcgacggtttcgattggatctagattcattatatcgtgaccgttgttacttgatctgatggtctctatcgcatactggttcacgaagggagctgatctaatcagtggcgttccttttagatcgggcgttctaggtgactagttcccttcggccggtgcaaaataacaaaagagtctccgtgaaatgcagaaactaacccgccgtccgca

SEQ ID NO: 167926 - DNA, 437 bp, Zea Mays
attcccatccctttctctgacgatgacattgagttggctgggcgctttggaatgtgcggctggtgagctctctctagcgtgcattaggtcttggcaggattctgtttttgacggctctctctccagcttgcatcagctctctgcagctcatttcagttttgacgactcctccagccaggagtagctgcctgggagcgagacggagcgctgccgggagtctccattgcttcaattggagtagctgcctgggaggagcacgagacgggggtacctgctactgcatagaactggtgaaacagaggtagtttgagctgcctggattttactgaactggagtagctgactggagtttactgaactggttgaaagttcccagtttgagctgccaaacagaggtagtttactgaactggtgaactcgacgcctttaacatcctc

SEQ ID NO: 167927 - DNA, 1374 bp, Zea Mays
aaaagccctaggtgacactggggtgtcacaatcatgagaatggaagcgccgcgatcgcagaagaaagtatagaggcttactggatgcatggaagccttgagaaggttcatatcaaggctaggcgagaaaggcctgccattgtacaaattgctcaagaaggtggacaagtttcagtggaccacagaagcataggaagctctagaagcactgaaaaagttcctgaccacgccaccagtactcaagccaccatgccgaatcagctggcataagatcttttgttatacatctcctgcacgactcacgtggtgagcactgtgttagtagtcaagcgggtggaggaaggacatatgtatccagtacagcatccggtctacttcatcagtgaagttcttggaccctctaaaaagaagtatccccaggttcaaaaactactgtacgtggtacttctaaccgctcgcaaacttcatcattactttgacgaccacaaagtcatagtagtcatcggttttccaataggggatattcttcacaacaaagaagccaccgaaagaatagccaagtgggcctacgagctaggagatcatgacatagagtttcttcctcgcatggcaataaagactcaagcactagttgacttcgtatcagaatggactgagcatcaggtaccagacaacctagaggctactaaagtatggcgaatgtattttgatggctcattgaaactgcagggagcaggcgcagggatcctcttcattgttccaggaggtgaacaactcaagtatgcacttccgctattattcccagcatcaaataatgcagtagaatatgaagcactaatccacggattgaacatcgctgtgtcactaggcgttaagaggttgatggtatacggagattcactagtggtcataagccagataaataaggactatgaatgctcgactggttccatgggcaagtactatacatccatccgaaaattagaagataagtttgaaggggtggaattccatcacgtggaaagagaccacaacacagcagcagacacgttgtcgaagctgggatccagtcaggcccaggtcccacctagaatcttcatccaggaagtatcacgcccaagtattccctcagatcagacagaagaatgcaacaccttgagccaaccagaattggaccctaatgactggagagagcctatcatcaggtacataaagaatgaagaagaaccggatgataaggctgcagcagaacgcatcgtaagacagtcggcccactacaccctcatagggggcgcactgtacagaaggggtgcgacaggagtcctcatgaagtgcatttcctcgactactgggaagcagctattggatgaaatcc

SEQ ID NO: 167928 - DNA, 861 bp, Zea Mays
gctcagtcatctagactcttgccctcctccttagtccagtctttgcaccaatctattaggcctcattctttctaacgcagccgaagctggtccacacagatgccctattcccgacaccgtccacagttgtcgccttcccaatggatgatgttgcccgaccccactcccttcctggtgccctatcttccttgtcgtcgtcgtgatgccggctcgccttgcaagcccgatctcactgccgatggatgatgctgcccaaccccactcccttcctggtgcccccgtcctccttgttgttgccatgatgccggctcgccttgcaagcccgatctcactcccgacgaatgatgccgcccgaccccactcccttcatggtgccccgtcctccttgtcgttgtcgtgatgccggatcgccttgcaagcatgatctcactcccgatggatgatgccgcccgaccccactcccttcatggtgccccgtcctccttgtcgtcgccgtgatgccggctcgccttgcaagcccgatctcactcttgacggatgctgccgcccgaccccactcccttcatggtgtcccgtcctccttgttgtcgccgtgatgccgactcgccttgcaagcccgatctcactcccgacagatgatgccgcccgaccccactcccttcatggtgccccgtcctccttgtcgtcgctgtgatgccggctcgccttgcaagcccgatctcactccagacggatgatgtcgcctgaccccactcccttcatggtgccccgtcctccttgtcgttgtcgtgatgccggatcgccttgcaagcatgatctcactcccgatggatgatgccgcccgaccccactcccttcatg

SEQ ID NO: 167929 - DNA, 1003 bp, Zea Mays
gtggagccgagtcgacgactctggaaatccaaagagctggcgtatctggctggcatgcagagtgacatcctctctctcaaagcggaacctcatccactgatgatctgggtcaatccacactgtagcataaaacactctgacccactcctcaatgtatctgccactcgtagtcagtagtgaaagaagtcctcgtagataggagagatgcacctctgaatcggcaccggctgcgagcagaaaagcaggtagatccaatagtcggtgcgctcatagggcgatctgccctgacaactgtgcccaaaagaaggactcctgagtcatggtactgaatagagccaccgttgtagggtccctctgagcaggcaaccagaactccatgggtacgtgtctgaaccgacgtacccgggctgcagtggcacgctgaaggtcaagcagtcgaggatcagcagctaggggttgcacctctgtctcgtcacgctccttgaagtgaggtggaggaatgggcggagtggaaatgggagcgggaggaggaatagtggaagctggagtggtggatggctatagagcgagaggagctggtgaagtgggaggtggggtagaagatgtggtggagggtgtggagggagcagaggagtgagaccgagatgcgaggcgacgaactctataagcaatttgatcgcaggaaatctgcaactgtcctccccgctctgtctgctctgcagctgctgccgctgcaagtgctgcacgggtggctctgtctatacaccgcttcttccggccttcctgctgctctaggtacactgtctaccccttgacctgcctattgggttgaggagggtcctcgtcgtctcctcccctggcgctgagacattcttcgtccgcaccatcctgacatgagtgttgcataagtgagtgaaaggctaagcacgagcaggtagaagctgataagattggtaatgaaaggatagctacctggaaacctcacgagaaagagagaatccat

SEQ ID NO: 167930 - DNA, 968 bp, Zea Mays
cgacaccttccacgcgaattatcaaaatcagcgcggcgaccatcaccataacctctacggccatcgccgaagggatctaattcatggacgaaccagaattatcatctccggattcttcatggttaaatccttctggatcatgatgaagtagccttcgacctcctatcgtgggcagtcgttcattcaacatacttcccatggcccccacgagtgagtcggccatttgatgcaattaagcccgagagacagggggctcttcgtctccatggtttccaccgtgaatacttgaattggatcctgccatgttagagggaagcaagagaaagtagaatatgaaagtatttgtggaacactcgatctcaccacttacttacttgagctctttcctgatctctaggactgtgatggtgctggtgtgacagcttcgacagaggtggtagagcggtcgaaaggatcacaagtcgaacgtcccggttcaggttttttgtggagctataggaggctgatcaaggtgggctatggtactgttaaccaagtgtgttgacatgctaagagatatgaaattgttgctggaaacattctcaccaaatcaatgtaaactaaaattttcagcaacacactgcaacacaatcccctttcacaatttttttgacttctttttttatacttctttctcttctttttttataacactgatggggtgctgagatcaaatgcaatgacacaatatgaatacgatggtggtaactagcaacttgaggaattttaaacaacacaaggtaacagtaccgccaaagggttataggtttttttgtggctttggactattggaaaaaatatataagatggatgaagactgtgataaatggatgacagtaagacctaccgtgacaacgaaagctttgataccagatgatatataccgagttatattcggtattggggtggcccgatcttcacgatagtag

SEQ ID NO: 167931 - DNA, 278 bp, Zea Mays
acacccttcttggtcaactcatgtaatggggcagcgatcgtgctgaattccttcacgaatcgacgataaaatcctgcaagtccaagaaaactccgcacttgtgtcaccgtcgatggcgttggccaactctgaatagcatgcaccttggcctcatcaacctcaataccctgtggagtgacaacatagacaagaaacgatacgcgttcggtgcaaaaggtgcatttgtcaaggttagcaaataagcacgcggcgcgcaaagcatcaaaaacaacacgtag

SEQ ID NO: 167932 - DNA, 418 bp, Zea Mays
gcggcatcagaagagtcctcggctaacatatcaagcatggcacttatctctgcatcacttggattcaaaggcacctcaaaatggacctgcctctcgtcgtcaggaatctctccgagcgaggcaaccaaagcactaacttcttcaggagagggtcgcactctaagacccaaaccgctatcaccagtaggaggatttgacacaaaactattaaaagcctaggaaggaggcaaattctaggccgagtatgcaacaggggcgccgatgttcgataccttgcctctgagtatcatctcaagccgattcactaagtccacaataggaattcttctgttggttacccgtgttgagtcagccaagcctcggtacagataagccagatatgctctgtctttcagtggctgaatgttcttgaaaacaa

SEQ ID NO: 167933 - DNA, 641 bp, Zea Mays
gtgttttcattagatactagtaagaacttggtaagacatggtagtttgtgttcctattcacccagagagcgcgtagttgcttattagggataacctttattgtttgttcttgttttggtgtttccaatggcaggatccgatgacgagattgaggtagtcattcccacacaattttctgattgtgtcagccgcgaagactttgatgttatttgcaagcgcatggaagaaaatatggaggaaacggtccacaagtctgtccatgatgcgattattgcaatggatcttggcaaagtgctagatagagtggagagacggataaccgagcttgtcgatcgggttgccacgttggagacacgtccattacatcagcagcctcctccaccaccacaaccccagcagcatccaccacggcatcagcaacctccaccacaggctcaagatgacgccattttcgatgcacgtggcaattttgatgaggtagctaccagagacgctcgcctacgacgccgtcttcatcggaacagggtaggtatgggtgacaaccagcgaggtaataacaatcgtattcctgatgacccttttgctaagattaagttcagcataccttctttttcgggtcattatgatgctgaggcatatct

SEQ ID NO: 167934 - DNA, 463 bp, Zea Mays
ggtcgagagaacaaagatatcagaagttacaagtcctttggcagaggtgacagtgccgaaggcacaaaaagatcttacagttacccctaagaggaaaaggatggtccacgtactagatgtactggaagaaataaagacttcaagctctactccagggaaaataaccgaagcttcaaaaacgcaaattgaaataaagcaaactgaagccgaagttgcaaagagtcatgccaaacccgaagctgggccctcagagcccgccaaaaagaaatccctggaaattggagataaagaaacggaaagagaagcttcagaacaacttctgtctgaacaaactgccactcccacacccgaagcatcttttgaagctctcgattatattgtacgacatgcttctggaaaaaggttgtctgcagaagaaaagcgagaagctcaatattatgcccaaagactgaaatatccaaaa

SEQ ID NO: 167935 - DNA, 503 bp, Zea Mays
atgctgtcctttagggtatttggaaactaataaatctgctactctttcagaatgtagcttgtaagggtatggcgattttgctacagaagataacagggctagcgcaaaaatttggggggaaatcatctattgaatggagagtagacttttgttggaagttggaacaaaagttgctagatttgaggcaggtggccagcataccggaaagaatcagccggtgagctgtggtgtgtgggttatagttactggttgcaaggggtggtgactcgatactagcttccgtccctcccttggctacttgtgtcaggtggttctctcttggagtttgtgggtggactgctctactctgtagaagaagcgtctgggcatggaagcaatcttttctttggaacggaacctcttggagtggagttatgtggtgaaaagccatggatcagtgaagaagaggacctggagaaggcaatgtcgtcgggcctttggatctagccccgaggatgatggct

SEQ ID NO: 167936 - DNA, 484 bp, Zea Mays
gcttgtgttggatcgagtaggcgtgagtgtgctgtgtcgatttaagtcactaccggcttaaatcgaccgctctgttagtagggtatagtagtcaccctgagttacgcatgagcatgtcacaccgccttaagttgccgccgacttaagtcgattgctccgttagtagggtatagtggtcaccctaagttaagtaagcgtgagcatgtcacaccgccttaagtcgttgtcgacttaagtcaattgctccgttagtagggtttagtggtcaccctaagttaagtaagcgtgagcatgtcacaccgccttaagtcgttgcagacttaagtcgattgctccgttagtagggtttagtggtcaccctgagttaagtaagcgtgagcatgtcacaccgccttaagtcgttgccgacttaagtcgattgctccgttagtagggtatagtggtcaccctaagttaagtaagcgtgagcatgtcacaccgcctt

SEQ ID NO: 167937 - DNA, 312 bp, Zea Mays
ctcctccggcctccgccttcgacaagcgcgcccacccgcgcgacagcgggcgcgcgcggctgcgactgctgctgctgcttcttctccacttctccttccttcccctataaagcaaggaatagtcgcagcttgccccagcttcgcaagctttcctgctaatccctgccattagtagcaagcaagcaagaaagcagtggtagtaggtgccacccacacggttttcacggctgccggctgggagcgaccgaggagatcgtcgtcacgctcgatggaggccctggtggggaggtactggggtctggggggacggcg

SEQ ID NO: 167938 - DNA, 901 bp, Zea Mays
gttctattagacaaatattcttgcaccaagttctaggtactaatctactcagctaacactctaaattccacttcggctagctaacagggtgaccccagttgcatgttgcataagggtcgggtcattccgaagctcaagcttagaggactcatgaccagggtaattagcttctccctatttttctcatcagccttaatataaaaccattcatttttccatttggttggccactttgtgcggtagctgaggactggtgcctttgtatcctttcgatacgcaaaattataacaaccaaaattttcgtgaagaccatatgccctggccttcgtctgatagtgcagctcatgcactcggcagaaagcttcagcatctgggctcatcccttgactttgaagatcctagataaagacgctgagcctaacaatagcgttaggagtcagctgatgaagatctatttcaaagttctttaggactacccctatcatctcattcagaggaaatcgcagccccgctctgaagaagctattgaaaacaataacttcatctttcttcggctctagggtagtctcttctccagcaaattgaataagtttgctttcagcttctccaaaatagcccagtttcatcatcataggcatgtcgtcttcagacacagtagatttttcaaaatctagatgactaggcttcgttgggatcataatactgtagtcttcttcgctctcaacatcttcaccctcaatcacagtctactcagcttcgacattagaagtaccttcgtcagccacaacaagacctgatcgtttcattacttctgaaattggtgatgttttagtgacctcggtttcctcctcctcatgagacacccttgcagttgatcgcactctggccattttgatggatt

SEQ ID NO: 167939 - DNA, 274 bp, Zea Mays
gttcatttatgcactaacatttagctcataagctggcagcctagcaaagttatattgtcatgcactttaatcccatcggttccaatttatatcgacatttagccccactggtctaccaaatgctctagttattactttcatgcctcaatttaatattgtttacttctcaaatctctactcctttaaagcaccggttccatgaagcgtgtaggttgctcctctatgccgcgtctcgcctaacaaactcagagagataatgatgctgacacctgga

SEQ ID NO: 167940 - DNA, 512 bp, Zea Mays
gaagattgggagatagactttctagttgaggggatcataactttgcaggaggcaatgaacgagttggtcctttggcatcgatgcaacattaagttgggtgatgagccgatcttaagccgtctatcgcgtcataagtcaccaatgccgaattcaacaccaatgcaacagaaaaatagttcgatcattccataccccatggtgcaggaaaatatagaatcggcctccacaaaaaccgttgaaacaatcatatcacctcttgcgaaggaactcgatgaggggacgtagacaaaattgttcctcagaatgtcgatgcggacatcagaaaggaagcaaaggttgacaccaatgttgaagggccaactacttcaaagaaatttcatcagtgaatcgccactgacaatgtcaagaaaccgtcagaagctgtgacacgctacctggaaaaattgaagagagttatgatagatcaatcaaaagcggaatcagcatctcatggagtacgcacacggtcccaa

SEQ ID NO: 167941 - DNA, 458 bp, Zea Mays
cagggaaaagaacttgtagcccgtacttgagttgttctcctttaggggcgatgaagaggatcctggctctagccccttgcagcttcaatgacccatcagagtacatcttccagacttccataggctcagggctcttagggacctgattttctgcccactctgagatgaaatcaactaaagcctatgttttgatagctgtgaggggccggaactcgatgtcatgagccaccagctcgtacgcccatttggctgtcttccctactttctcccggttattagtatgtctccgatcatgaaatcggtgaccgctttgactttgtggtcgccaaagtagtgacgcaatcacgcaacttgcgtgaagtgaggaggactgcgtagagcaacttctgaacttgaggataactgatcatggacggccccaagacttcgctgatgaagtagaccaggtactaagtcgc

SEQ ID NO: 167942 - DNA, 304 bp, Zea Mays
gtctgcttagcttcggtctcggttttagtaggcgaatcgttcgatctcaagctattgtgaaggtgttggatctgaattctcaagtataagagcgtcaaacaattaactgccaccaaatcttgtgccagctagcaggacagcggtggattatttccatggcatcttctctatgctagacgcaagtcctggtgcttctagttgtttttgtcttaaataaagatgctaatatgcatgtggctatgtgaggtctattgcatccgatttagtgctgcacatttaagtaatgttgatgattgattcaagc

SEQ ID NO: 167943 - DNA, 382 bp, Zea Mays
acattattacgaagctaacgcaatctgaacaatataaaatggatttataacataaactctaacatgtatttaataaactgcaaatttaaagtgatatggtgcgttgtgattggtccgagccaaatcccagggatggtcatggattttgcatccaccttggatccttggaggactgtttcccttgatcgcatgcaagcaggagaggaatacgacatgcaacgtggggctcgcgggcatttctacttgcatgcctttttccttcttgcacccacgcatgacgtgtacggttgatttttctctccctaccaccacgacaaccgcaaggggcattcaagcaagttagttgctggccaggagatggaccacgtcggtgtcggcggcc

SEQ ID NO: 167944 - DNA, 413 bp, Zea Mays
ggtagtagcgtgagcagcgcaatatgcatcccaccaatccgcagcggggccggtgaggcgacccgatgcatataacactttctccctgtaagtacattgagctatgttgagcatcttgtccatggactttaaccagtcatcagcttgtagtggatctgaggagttagaggatgtaggtggcttgtgactcataaactcccggtgcttatccctaggcggagctgaaggtggtggaggtggtagttgatgttgtttctgtcgttcttagcgcatttcttgatgttcttgccacatttcctgtcgttcttgacgaatctgtgcttgcatttccgtcattgtgttggccatttgttgtagtaatcgcatttgagtattagtcacatcatcaacaggcgggggatttggaggaggat

SEQ ID NO: 167945 - DNA, 790 bp, Zea Mays
cccattggcctgagccagaggcaaaggagaagaaaaagaatgagcgggcggaagagtgcaagtccaatcctgtactctgcaaatgttgtgttgaaactaagtatggactagttccttcggagcttgatgtagggtatttttgtggccatatggtagattacaaaggggttgatatttgttcttgatggcatgagatgtattgttgcatccgtacttattgtttgttttgtgtaggagaccagaaaatgcaattgggagacattcttcggtaaagacaaggtgatgcatacgatgaggtcgaagagactcgtgggagagaagatgtgatgtggatctcagtggtcgattcctacatcaaatatcgcagacaggaaatgtgtatgtataccgaatcacaggattgtgatagcccgatgtgtgtagagcaaaggagaatgaaggcggataatgagaagagagcacaggaagcaagggaaatggaggccgctagagccgaaaaatagatgttggggaatcttgtgggtcgtctgattgcaagtgagtgagaaaaacatgtgttgctttcgctcgcatattgtatttgtgttgtcgttgctaacttacttgtcttaatttatttgcagagattggatacaccgggaactatatcgcagacgaggctcgtgcaagatacgttgtggaaaaaatggcgagggtggagctgatggaggaggaggacaacacatcaaggttgagtgtgctcatcgcgctagctgagacaggattacatgtgcaagaggaggaggacgag

SEQ ID NO: 167946 - DNA, 556 bp, Zea Mays
tgggtccagagtttgtcttcacaatcaaacagtatcctcatgtatgtgcatcaggaggaggatccttggaacttgaatctttcccgtgcggccattgatggcatcctttatttgcgtcaaggatttccctcaagatttatgcatgcatgcgtggcacaaatttcttagctctcctaagtggggtaattattgtgttccattgctctcaaatctaatcctctatatatgccagttgatgttccaaatgtcacccctgttgagatgttttctttatctatgccagttggtgctgcaacaatcatacgtgtagagacatctggtggtcgatggtttagtggcttatccatgaaaaaggaaagtggaagagggagtcacgaatataaatagggtagtgagactggtcactggtgcttcagagacttagtaggaccccaacatgccaatataagtagatccatttgtgaaagtttcagcaaccgaaaaagggctaactttgtgcttagacgttgctttgttcccagctgcttgcctcgcttagctgttaattacaatcacg

SEQ ID NO: 167947 - DNA, 740 bp, Zea Mays
gggcagtgggctacagcgggcgtcgacgacgtgagtgttgtcgccgggagggtgttcgacacagccgcgctctggacatcctgatacttgcctgtgcgcgcggcgtgaagcggaccaggccacctcaccgatcgtcgaagactgtacgggaatgccacggtgcgggctagtcgatccggcgcttgagcttctggtgagtcccatcaatcccaaaaccccttctaatttacctagtcatgtcggtagagctttgtagactaagatgttgggggcgtgtcatcctcaccggcgtgtcggaggtggaagagaacctatggctgtaggatagtacattggcgggtgagattagggctctgatggcgagctcgggacggctcgctaccacagctatggcgttcggccatggaagatcagctgaggaaggagaaaaagaagagagagagggagtcaggggttgaagacggcgtgcaggccgtagatttggatttcgacggccaggattagaagtgacttacctcttcgccgcgatagatccgagccgtcgatcctgcattgtatgcatcagattagatctaggttctttaaatcgtgatcgtttgttgttgatcgggcggtcatgggggtgagcggttgggccatgcgcgggatctaatcgtggccctcgaatctgatttgaatggccctcagctaagaataccccttcggccgagaacatttgctaaagagaccctgactaaaat

SEQ ID NO: 167948 - DNA, 759 bp, Zea Mays
cctcaattcaacaacataacatacgatgttctcatattgacatgataaggaagagggggaagaagtatagtacttgtggcggcaacatggcgccctcaaagagcagcgcgtccaagcgctcgacggtcgcagcctacttgctccagaagcacctgatctctcaacggcaggtgtagacgttgtcgagcgcgatggggatccacatccatcccttgacgagcgccccgatgtggtgcgccgctagttctagtacctcacagctcctccccaagcggaatcgccagtgatggataccgcctccgcgcgagacgccagagcggatgaagtccatgagcatcggcccttcttatcacactctccatgggcttcctcctcgcggactggaacaacctcgaccgtgggacgctcaacatcttctactggatgctggccaggcgatggggggcatacccagagtcgaatccttgcggcgacgacgaagcgatttcttttcccactacttcgtgcatctggaaagctccgaagaagtcgataggtgtccatatccggagatcgttcctcagctagagatacgaccgtgaccatcgattgtgtggctgagatgcaacacaatgacgtggcacactgggagatcaattttgctcccgcatctaacgtcatctagaatggcctatggaggcgtcgggctccctggcgtggaggaagcggacgcatccgtcggatctcaatcctacgtctggaaaacgaaaatgtgacgtg

SEQ ID NO: 167949 - DNA, 618 bp, Zea Mays
tccggttggctaagtattcctgcaccaagtccctggtgctgatctgttcagccactactctgaattctaccttggccaactagcatgctgaccctatctgcatgttgcacaagggtctggtcattccgaagcttaaagccagcgggctcatgaccatcatcatcagtttcccctcttcttctcatcggccttgatataaaaccattcactcttccaaccggttggccatttggtgcggtagctaagtatcggagccttcgtatccttacgatacgcaaaattgtagcagccaaaattttcatgcagaccgtctgccctggccttggtctggtagtgcaactcgtgcactcagcaaaatgcttcggcatccgggctcatcccttggtttcggagggcctagatgaagacactaagcctaacaatggcgttaggggtaagctgatggagatatattttgaaaattttcaagacttcccctatcatctcattcagaggaagtcgaagtcatgctctgaaaaaactcttgaagactaccacttcatcatccttcggcactggggtggtttcttctccggcaaatcgaagaagcttcctttcagcttcgccaaagtagccaag

SEQ ID NO: 167950 - DNA, 499 bp, Zea Mays
ttttggtccaccttaaagtcgaccaggaattttgtctgggcctacttgatcggctgcttcttatgctcctcgaactcttgttgatcctcaactgatagagtctccatagtcagctcgataatgttgctgggagaaacgtcagaactatcttttgaaccgtgcattgagggcccatcggatagctcttcacgcgatgtccctagcggagttgtcaaaaagtgtgttggcgtcgatgggtgccaatcactgcgatgtgtaccggtggcggtgctctctgtgtaagcgaggatggtccacgaccgagggtcggacaatcgtgacctggcgcataggctagggtttctgccgatgagccggatggtccgcgcctgatggtcggaccgcccgcacgtgcttagaggcgataaagtttgccaacagcacctcgatctcgctcccgggagggacccgtcggaaggagagatcatagggtttgtccgactcaagattcctctaaatg

SEQ ID NO: 167951 - DNA, 639 bp, Zea Mays
taactgatctaggtaaacatttatacatgagaccttttgacataagagaaaccattctatacatttttttgtttgccatacgtccaatccacatgaatcctgtgtagaaaactatcctatgtttgatctacgagattcttgtagagatatttgattatatgtctaaaccatacaattaatttacataatcttagtaaaatgcagcgtatgctgctaccataattttttggcagccacatttacaacgttgtatctaaaatgaagcatgttaattcaaatagcataaaaaagaagtgccttaatactcttatgagacacaccagttaaatgcagacactttttcccttccacaacacagattgtgatatgctcatgacaaattcgttgtgacagatcatagcaatccgttttgcgccccatcaactatacctcctagcaaacctcattgtacacgtagggagttattgaatgaatgaagattatcatcggcaggtagcacgatcagcacataattttctaagggtttctataaactgtattaggtgttggcacatctgctcaacaggctccaacattgcagtgtggtcgccttgacccagagtttgttaaaacctttgcttgtatttggtcccatagtta

SEQ ID NO: 167952 - DNA, 726 bp, Zea Mays
cctctttggctgcttctatggacgttcacgttggatcaccactggttcaatctgaggaactcgtggtgacaaatttatctgatgctctcgtcggtccggtcaccttggaggctagtgactaggatgctaggaatccactgtctattgatggagctgaggtctctccgagtcatgctttcaacattgttcctgttgatgcccctcaacaagcagtgcatcgatgcctccagctttgggtcttcccttatttctttccaatctttaggtgaatcaacttttgcttcttattgttcgtgttggcaaacgggttctcttgataatttttgaaattccagaaagtcttcgattttgtatctgcccaggtgaaatcttgtggcgtccctgtccccgaccaagtttagtctttgatgcagtggaatcctctactgcttcagacagatggtagcatgcttttggaacgatcttgattagaagctcaacataccaacctcaaacagatggtcaaatggaaagagtgaatcaaatccttgaggacatgttgagggcatgtgcgatccactatgtcaagaactaggacaagtgtctttcactggctgagttttcttataataacagctaccaagcaagtccgaagatggcacccttcgaagctttgtacagaaggaggtgtcgaacaccccttaattttttgcaaatgggtgatgtcggtgtctagtgtgcgaccgc

SEQ ID NO: 167953 - DNA, 600 bp, Zea Mays
ggagcactccttctagaacatagtgctcacggaatgctagcttgaattcctcccaagtgatctgatgcccagtcggttgaactactaccaaatttgcccaccaagtactggcaggtcctcttagttgttgggcagcaaataatggcttctgcgtctctatgcagcgaatcaacccaaacttttgttccatgactcttacccactcatcgtcttctagaggttcttctgctttaataaaaagcgggggtcgagtctcagagaattcctagtatgtagtttcacggtccttgcggaggagctctgcctctgtgctgttggaattgattgcctgccatttcatgcaagaagcgcatattatccgcagtggcattaaccaaggcagcgatagcctcagccaatgttggtggtactggtggcgagttaggagtatcttctcgaccacgggaagtccgcgcaccatcatgtgcgcgagtccgtgatggcatctaaggcaaagaaacatttgggaaaaatataacatgccacatacaccatcatattacattaccaaaatgtaattatacagactccagcatacaacttgacttcaatacttatttt

SEQ ID NO: 167954 - DNA, 856 bp, Zea Mays
tggctgttttgattttctgggactgatccattcactcatgaaagtatgaaacaaggacgtacggatgattgagcaaggattcaaatggaccatggtggaaacacagcaacagagagaaaatagcagagtggagcactgtttttgcttttcttttcttttccatacttcctttccctcttcatttcaagcattagagctggacagtgcttgcagcctgtcttcctgtctggccaattcatgttgcgaaatgccaatgttgtccaacatcaaccccacagaaaatgtggtatgtcctaacaaaagatgcaactgaaacatgacagcaatgttgtggaagcataatgtgcacgtagatgtaacccaaactacatccttgtgtacttgtttgcctccaacaatcgagatatgacaggctcatacgttatttattgtctgaaccgacagactattcagaataaaagaatcaacctgccgcagagatggacagcaagctcacaagcaaatggactggcatgattcttcttgtctgctggttcaactgtgtgttgcttccacttctttcattatatatagagagagaagcccacggagagtagacaccattagagcagcattcctctcccctccaaaagaagagagcgctgcatttttcgccccaagcatggcttaccgtacaagatctgcgagtgcgccttccagccgttgctccaacgaacccagcatcgaggatcagctgcagattcattaacgaaaccatccgaggaggcttggaagtgtgtctacaacgacatttaggagatcatgtgcttgactagcaaccaagtcagcctgtgccaaccaaagcaaaggaaagcag

SEQ ID NO: 167955 - DNA, 741 bp, Zea Mays
tatgttacgaatgaaagaatcaaagctatccatatatctccaaacaaaatggggagagtttttctcactctcgctcctaataaggttgaagtctcccccaattataactggcaccacctctttatcgcaaatcatcgataattcctcaagaaacttatcagagaactgatggttagccggaccatacattgttatagtactccaccgaaaattagatttccggtccctaatcaccactttaatacaatacgataaaatttccgagttttctacttccaaagagtcccccttgaccccatcaacacgcctccagagtgcccatccgctgacaaccatttccattcaaactgtctgtccaacatgaacaactccttgtcagaaaaattttgcttaatggtctccttgaccccaacaatgtatatttttcctggacgatgtaatccctaagttgagacacccttactttgttccccatccccctaatattccagctaaacaacttcattgatactcttttggtgtgtcgatcgatcggcataccctagtagccctgatcacccgcttttttttgttgttgctgctgagatcaaactgtgtatccccgtagagcagtggcggagataggcctggactctactcttgggccgaatagcgtccatatattggccagtatgattagctgtcgaaagagctagctttttgtgtctaaaggtccatatgtcgtttttagtgttatatata

SEQ ID NO: 167956 - DNA, 699 bp, Zea Mays
cgatgatgacttaagacggtgtaacatgctcacgcttactcgacttagggtgaccactataccctactaacggagcaattggcttaagtcggcgacgacttaagacgaggcgacatgctcacgcttactcgacttagggtgaccactataccctactaacagagtgatcggtttaagtcgatgacgacttaaatcggtgcaacatgctcgcgctaactcgacttagggggaccactataccttactaacgggacaatcgactcaagtcagcgatggcttaagtcagcatgatacgatcacatctacttatcttagggcgaccactatgccttgccagccaggcgatcggcttaagttagcaaaaatatcaaaaccaacacgccacatttactttcacaattgttcagggtgactgttataccctaacagcaaaacaattagtactccaggaaaaaagaacgttgtacttgtcggcaccaaggacacgttttggtgccctgtccacaaaatatttgaacacaaccatcacacgcacatagaattcatagtacatctcgtgtttcgcaggatatcactacatcgaaacatctctgatggtaatgtttttttgcaggagcaatcaaggaagaagggcgactcgaagcgtcaggcgcaaccttgacatcggcgacaatgtcatcaggaaccactacgtcgggc

SEQ ID NO: 167957 - DNA, 277 bp, Zea Mays
ctggccggcccactcaacccaccagtccaccgatccctggccggcccatttctcttcccctccccttttctcatacggtgtcacttgcgcgcggcccccacatgtctgtcttctgcacacacctgggcttgcctctgtgacactgtcgggtgggtcccgttgggcggaatcgtccccaacctcgtaaccgaatcaacgaatccaccgcctcctaatccgcgagctcgcggtttccttgcctcagctagcgcaacaacctcccactcgcccgcaagct

SEQ ID NO: 167958 - DNA, 508 bp, Zea Mays
cttgtcggcgacgtggccgagcggccgtcgccgggatgtacaccattcactatgattgcgccatgccatgaccctttcaccacatcattaccaactgtaatagctcaccagtgaccgtcgtagctccttagcctgtgactgccatggtagttcacgtcagggaccttctccttccttcggtcgccagcgcaccttctccaaattggacaacaccgccattgagctctataaattcaagccccagtgagctccgctaggttgtcacgaagccagagcaccagcccttgcatccaattagccaccatagcgccccaattcctttcttcccccaaatctgttttccgcgccatagtgaacgcctcgccgtggccagccttctacaggtcagttcaagcttctttgcttgatgttctagcctcccttaggtcccctgctactcgtagacccgtttaattgaactagactgccctagatcaccaagaacacctccgattattctcgattttcg

SEQ ID NO: 167959 - DNA, 492 bp, Zea Mays
gtggacagcgacagagaactctgtgccatggacgtcggcgactcggcaaggcgacatcgcggagtctggtggagctccgaagtgacgactcgacgacggcgaggatgtagcgccgacgcgacgatgctcctgtggctgctccgacgaggcgagcgtgtgatggttgttgtggcgactgcgagagaggagagcagagcagggccgattgaacgtgggcgctgggagtgttgcgagccgagaaaatggaggaggaggtggttagaagaaggggcgcatgatgcatgggccagggcgaggcagcagcgcgtggctgggcggttgcacgcatgcgcgacggagccatgggcgcggggcggttactggctgggcagcgcgtgcgccacgcgcgctaggccacggttgagcggggcagctgggccaggggagggcacagagcgtgcgcgaggagctaggccgcgacgcgggccgagcgtgcggggtgggctgcgcgcg

SEQ ID NO: 167960 - DNA, 729 bp, Zea Mays
cccagaagctggtacaaccttggatattcagagacctgtcagtgttcgcccgaaacgcccttgtcgagccaatcaacttgattctcctgctgatgagcagaaaaagaaaaagagacgtcttcggcgagtatctagtttggatcgggacgttggtccttcggttcctgctgctgaggaagtacctatgcctgaatttactgatgctgaccctaatgggtgtgctccttctgctgctgatcccaatgggggtgttgtctgtgttgctgatgaaaacgacggggaggaagaagatgaggtccctttgactcggaagaacagtcggcaatatgtcgccagtggggaaagtagtggagttccttctcctgctctgtctgccctcattggtctacaagaattgtctctggcaaactttgatcagactcttgaagatatggttccagaggatctgttatcagagccaagggatggtggtgcggcggatgtttgtgctgatgtgctcgacgccgggttggggtcatcccgggcagcatcccgtgcctcatcgaccttggagcgcggtcttgagggtcaggaaactgacttggatcgtcttgttcccatggaagtaactgagggaccttcagctttagaggcggctactgcagagaacttggtcctcaaggatggtgttgacacttacccagcccccgagggtgttgccggggatgattcggctcgggtgggaagcgc

SEQ ID NO: 167961 - DNA, 421 bp, Zea Mays
caaccttgcctcctgcacgtgaacaacagggacgaaaaagggagctgctgctgtgtggggaaggagagggacgagcagaggggttgcttgcaggggaatggaggctagccgacgaccctaggcgcagccatggagctgtgctcggccatgggaagggagatggcagggggcgctatggccagtcggcgttgtgaccaagcagggaggctccatgagcacctagcagaggtccggccatggatggatggtggagctcggaaggtgggtgtggaggtgagggaggaggctgctgctgcgttttggaacagagaggaggagaagtggcgtgtgggggaagggaaggagatgggtgggctgccatttattgagctggagctctggacatgtcaggtggcagtgagcagtggcaggtgaaaaaatg

SEQ ID NO: 167962 - DNA, 380 bp, Zea Mays
gactagaatgaagagggaaattgctaagtatatagctaaatgcgacacttgccaaagagtcaaggccaatcatttgaaggtggcaggcaccttacagccccttcccataccatcttggaaatgggaggatatttgcatggattttattgtggggttgcccaatacctcccggcaccacgattccatttgggtcattgtggatatattgaccaagacagctcatttcttgccagtgcataccacccataagactgagaaatatgcagaaatctatattgatcaaatagtgtgtttgcatggaattccgaagactattgtatctgacagaggagcactgtttgtggcacgcttttgggagcagctccaaaagtcacttggga

SEQ ID NO: 167963 - DNA, 457 bp, Zea Mays
cggtatcctgatttacctgaactttgtgacctaaggcacatattcacagagagatatggaaattttgttgagcattttgttagccaggaggtacgcaatatgatgctaatatgttgttattgaattgtcttatgcttttgtggtcctctgctttacacacaatattattgcagttcattcggaaacttgacagtacagagttcactaatgaggaaaggttccaagtcatgcaaagtgttgctgaagaattatccgtcagttttgatgccaagtgaggccgtgagagatttccatattgaaaaagagaatgattaagtccttcattgttcatgtttgcctggtggttctgaacacaatgggggacatgcagattcagggctaagagctcagcgcctagagaatcaaggacgtccagtgagtcctcttagtggtaacactagcaaaaaggctccttaca

SEQ ID NO: 167964 - DNA, 1019 bp, Zea Mays
agttttcgatcttttcacttctaaaactagtgatgacaactatggcatggtcacaaggtttcccagtgtgctgccactccagacatgagcactcttgcgctcctagatcaacaatatgtctttcttgtttggggctattatcaaaaacctcagcatgaccatttccagcatttaaaacttttaaatgaccaagtcctctagaccttatattcaattgatgtactatagctggcaagatagttccacatagtttgccaccaattctcctccttttctcccataagaccagaataagctctctaatcttgtctgctagttgaactactggtaggtctttgtggtctttgacccagttgttgaaacactctgctaaattgttgttgatgtagtcgcatttgatatctggatcaaaagtactcctcatccacttgaacttgtgatctctatttagccaggtaatcacttcagggtcagaatgcaaaatgggcccaatatgtctatcaaattcagcttgtctatatgctcttgcagcaggatacattcctctgtaactattgtcatggaatcttttgatgaaattttgcatcaaatgtctgaaacattctctcttatcagcttgtgggaaaagtagttccacagcagtcatcaaacctttgccggcatcagtacaaatagctagtttctccatattccctatggcccttcgaagctgtgtcataaaccaaacccaattatccttgctctcagactccatgacccaaacgcaaccgggtacatccaattgtgtccatctaacgctgttgcagctgctaggtgaccattccatctaccattgagtgcagttgaatccacactaaggtaaggcctacaagcagcacgaaacccttctatacaaggctcaagtgcacagaaaaatctatggaagtagacattttcatctacaacttgggtgtctatctccaccacactatgaggggcttttatcaaaacttcttccttccacctgtacaacatactga

SEQ ID NO: 167965 - DNA, 297 bp, Zea Mays
gatgatggctacattagtgcttccgacggtgaggatgacgatgatgactctagtgatgttgctgctaatgatgatgttatgcttggtgttgatgctacggtgaaccttcgaagcatcatggtgtagcgtgttcttagttctcagcctgaatcatcagagaagcagcaacggcataatttgttccagactttcttcgccatcgagaatcagcgtgcctgtgttattattgatggtggaagctgcaataatttggtgagttcagattttgtcaagaagcttggcctgaccacacatcca

SEQ ID NO: 167966 - DNA, 305 bp, Zea Mays
atgcgtcaggtgttctagaactgtgttaattgcattattgactgttaattttcttcccattggaaacccagctccaatgatatataccaccatccgcctgctacggggggacatacaggaggagaacgttgctccattaattagtggatcgatgctgtgagcaatgctagttgctgatggtcccgggcaaagagagatgcatgaatggatcggcgggcgcgtgaggagagggataataaactatgaggagtttcgatcagttggtggacttgattgtatcgtgaatcataatccactttgcgatg

SEQ ID NO: 167967 - DNA, 606 bp, Zea Mays
ctaccactggtaatcacttccagctagggcgataaactcggtcaccggagagtggagaaataggaaggagagagagagtgcgaccaccataaacgcactcggttctggtgcggcggcggggacccttgggtatctcggcatcgaggattctcggtgctcccgtcgtgtggcgagccctcccatcgtgctcgtcggcctcgccctcgtctctgcggtggtaagacacgtccccctggtcgcagttgcgagctcctcggatgactgtatcggcagcgtgtggtagtggtcgctatgcgggctcatgatggacaacaaggcgccgtcgcggcaagcgcgcgccgtcggctcggtaagggtgacggaggtagacgaggtactctggtcgttagatggccatcgtggggcttcaatcgtgcgaaggtaatactgattcggtgagtgacggttgaccgttgatctacgatcgaacgatcgagtgctttgagtgggattcggaagttagtaaccgttagatcaacatcctggggctctagttgcagaccgatctgttgcggcgatgatctaatcagagccgttcgtttgtaatcatacggctctcggcgttgg

SEQ ID NO: 167968 - DNA, 1075 bp, Zea Mays
cttgcttcttcaaactcttgagcgtactcttcaactccattcttctgatacaggttcagaagatgtctcatggccttgggatattcttccactccaaatttggccctaacagctctgccaaactgcatccagtttcccagtccttgcctcatcttgtacacttgaagccacctcgctgcattcccctccatgtgcatggatgctgatattgcccacaaagcttcaggaacctgataaatggtgaagtagtcttggcacttggccaaccatattccacgttccttcccttgaaatctgggaaacgaatatttgggcaaagatggatgtcctcgccctcccatcacttgatcttcttcttctcttactctctcctgttgtggttctcttcttcttcggatttgatcaccttgattagcaccctcccttgatgatccagcaccatcgccctccaagtccttcgccatcatctccaaacgcaactgcgccaccaccttgcctgtctcctccatttgccttgccaatatagtacgctcttcttctgccttccttgccactgtagctgagagctcgacttgtccttccagccgatgctgtctagcttccaccgtatccaacttcttcaccactcgatccatcatcttcatcatctgttcccacttctcctctcccttctgctccacagtcgccatagcctccagcacgagacgcgtctggacagacggtttcaccaccggcgctgtcttgacagctctgaagtcgaccgtcctctgataccaaattgtcacgacccgtggcctagggttcgccaaaccctagacgtgagccgcgacagcaggaaccgacagctttcctagtaagcttcggtggcgaggaagaagaagtagacaggtttgtggctaatcctttcttattcaattcgtcatctctgacggtttatcagtacaagtatttataggccattagatgggccagattacaatcaaagaaaagccacacaatggcccagattaaccctaatgcttctagaacctcatagatctccagatctactactacaccgaactcacctctgctt

SEQ ID NO: 167969 - DNA, 291 bp, Zea Mays
tttgaaagagatgaccctcacacttatggaaggtttgatggagcaaaagctctccagcagcaaccaaagcttgctgctctcctaacttcacaaaatcccatggtaataatcttggtacagtagtgttgaatcttaatgaagcgaatagttcactcttacactgcctaaatttatgtcctaccataacagtaagctataatttttcttgtacattttaaggtctgatgatattttcacaccatatcattaagtcaatatgcttggtacttgaatagaactacttgttaaaat

SEQ ID NO: 167970 - DNA, 862 bp, Zea Mays
gtagtctaccatctagagtttatggtgctactatgggtagaacttcctgaggtgctcgacattccatgagttccctactggagtaccatccatctgaattaaccgatatgaccttggtcgagttacttctgcgatcatgaagggcccttcccatggcggtgacagtttgtgccttccttctcctaactgtatgcgatgaagcactaggtttcctactacaaatgcccggtgtcgctacaaccttatcatggtagctcctcagggtttgctggtatctagctgaccgaatgaaaacatttagacgttcctcctgtagcacatcgatttcctctagccgggttgcttctgcctctgcaatgttttcaaagactaatctgggtgctccgaaggtcaggtctgctggtaacactgcctttgatccatataccataaataaaggagtattcccatgcaaggctcggctgggctgagttcgcaaactccagactacattaggctgttctctgatccaatttcctgcgagtttttcgtttttgtcaaatactttctttctgagcacctctaatatcatcctgttcgctctcttcgcttgcccattagctcttgggtgtgctactgacgcatatttgacttggatacatttctgctcacagaagtcgaataattctgcgctggtgaagtttgatcctaggtctgtgatgatactgttgggtatcccaaatctgaagatgatttcctggaggaacttcactaccttggctgaggtcagggttgcaatcgtcttgtactctatccactttgtaaatttatcgatagccaccagtacatggatgtaccctccctcagcttttttgaatggccc

SEQ ID NO: 167971 - DNA, 456 bp, Zea Mays
gcaggcacttggcaagatctcaccatggattttgtggagggtttaccatcatccgagggttataacttcatcttggtggtcgtggacagatataccaaatatgctcactttattgcgctcaaacaccctttcacggcacatacagtggctcgagctatgtttgatcaggtcatcaagctccatggttttcctaagacaattgtctcgaatcatgaccgtattttcacaagttcatttcggaaggaactctttgctctctttgtgacaggtttgctgcgtagtacgacttaccatccgcaaactacaaactgacgggcaatcggagtgggttaaccagtgcctagagatgtacctccgttgtgtcgtccatgattctcccaaacgccagaaacaatggctcacactagcagaactatggtacaactcttgctttcatactgcattatggtgctcgcc

SEQ ID NO: 167972 - DNA, 475 bp, Zea Mays
cttgatttgttcttgttgggtagtccttgcgtcccttcaaagtggtcttgaagcgcttgatcacaagcgtcatctcgtcctcattaaggatggccgcctcaacttgcaccaccttgtcagggagtagctccttgttggtcgtcgctttgagagcaacaggttgtggctcgttgtgaggaagaagtctgttggtgatgtcgtcgacataccttgctttctttaccatcatgcgcccgcacacaaacttaccaataatttcatcagacaatattttggtgtacctaatgttctcacgaataagatttacaagatgaggaccaataacaataaatgaccttagcatgagacacacgacgtcatgatccgtccatcttgtactcccgtagctttggatcttgttcaccagggtcttgagcctattgtacgtgacagttggctcctcacccctcttcatggtgcacctccccaactcgtc

SEQ ID NO: 167973 - DNA, 468 bp, Zea Mays
tatagtacacctgacatggggtggaggtgtgggggagcccttcgaggtggcctaagccaccaaatgtaaatccatagcttcctgtttaaataagactaaagcaatgggcactagttaaatgccaaaacaaagaaaatattagggtaactattagaccaaaacatttactagtacacaatattatatatgttatccacaaaagaacattacactttaactaataagtgttatggaaatatatattaaaaagggatcaagtccagaacgtcataggctaagagatccatgcatccattgaataaaagtttattcatcattggttgagatggtttggaaatgtacaatagagacctctaaagacaccaatgtgtattggatagtaaggcgccacagtagacaaaagataggcatcaaaagaccaaagataagatgaaaagaattgtaaaagaagacttacaatactaaaat

SEQ ID NO: 167974 - DNA, 396 bp, Zea Mays
caacccctgagcctaggtcgcggggatgtcttggtcgtctgttatcttgcccgcctcttcctttggtcattcaaccttgatataaggctcatacaagtcagaggcgaagaccccattggggacaggttttcatcctgatgcgatggtcgagagttcattggattcggcgttaacacgtccattactgtggtgaagtttgaagcctttgaatttttttccaacttgcgcaattcaccatagtatgcacacatccgcgggtcatggggctcgactgccttcataacttagtcaacgactaacttgaagtcgcctattatgaggagacgtcgcgctcctacttcagctgaaatctggagcccgttgatgagggcctcatactccaccacgatgttggtg

SEQ ID NO: 167975 - DNA, 1205 bp, Zea Mays
gaacctcaatacgggggagtggatatttattcttgatagtcacttgattcaaagcgcgataatccacacatagccgcttgcttttatccttcttctcaacaaacaatactggggaagcccatggagacctgctaggcctaatgaaacccttagccagcaaatcatccaattgccacttcaattcaacctgctcctttggggccattcgatacagagccttatgaatgggctgcgtacccggaatcagcttaatctcaaaagctgcatcgcactccggaggaatgcctcgaagctctgccggaaacacgtcagcaaagtcacacaccacccggatgtcctgcacccgcaaggcagcctcaccctccaccaccatggagaaaaagattcccgacttgctggaccggtgattcggaagcaattgcgccaacaaggataacgtgaacttaggggaacttcccaagaataccacctccctacctgacggcgcctgcaataacagtcttccaaaaacaggacataactgcgcaatactgggataaccaatccatacccaagataacatcgaatgcccccaaggaaatcacaaccagattggccgaaaagacctcatcagcaagaatgatggaacactcctgacaaactgaacaactactaatggagccattagcagaactaaccaaaattaggtgacccaacctctgcaccgaaagaccagcccgcgacacaaaatcctccgaaacaaacgaatagctagcgccagagtcaaaaagagcatgggccacaaacgaatcaactaaaattgtacctgtcaccacgtctcctttctctctgccatccgcagcgggtagcacataagccccggaaatacccgcagaagaggaagctcccggagtgaaattaatagaagaaccccactgagtcgtcgggtgaggcagacgcggagctccaaactgagacggcataggagtagtcggtgaaggagtaggcgcagccagatactgaggaaaaccctgcatcggcacgaactgagaagtcccaggcacataaaactactacagaggaagtggaactgaaaactgctgctcggcacttgacatcatgttgatagtgccctgagaagaggaggaagtcaccagctcccatctgagcttcccattcggattcctcctacacaccacatccttgtggtactgactgcagataga

SEQ ID NO: 167976 - DNA, 324 bp, Zea Mays
caccggcgcaaatccttccgccgaacgccggcgcatcccatccaagcaggtggtataccatgtcgagcactcactcagtctgggcatgctcgggatgaacttacaaggccatggcaaactacggcaacgtaaagcagagaccttgaaggcaaaggggcgcagagagctcagaggcaagaggacaccgcgagtgggagagaagcaaggcatggctgctactcgagggatgaacccctctttaaaggcagactcccccgctcccgcctcgaaacgtcgcgagaagtctcccccgatgcacaccgaggtatccatcctatgacacgg

SEQ ID NO: 167977 - DNA, 627 bp, Zea Mays
tactctctctttaatctggccttatgaagatgattgcatcatttgcctataaggaggttcagaggcgcgttctgaccctcgtgactctggacaaaattctagcttcaatggatagatggaggagacggtgtcgatggttgatggtaagaacaaacaagagtggtgagagggtgtctccttgcccaagtcccctgccatcggagatcagttgcacgggggtaccattgagtagcacctaggacgtggatgtggcgagcattgatgtaatccagttttgcagtcggcaggaaagccaaggtgacccataagagaaatgagataatcccacctaacggagtcaaaggactttgagacatcgagcttcataaggagtatgggtgttttgttgtggtggaaccttctggccatgttatagacatagagaaaattgtcatggatgatgcaacccttaatgaacatagatcggttcttggatattatgttcctcatggaaggtgttatttcgagcgagaggagctttgtgaaaatctttgcgacactatgaatgaggctgatgggcctgtagctcgatcttgtcggagctaccattcttgtgcaacaagacaatgttagcccgattcagaagtt

SEQ ID NO: 167978 - DNA, 457 bp, Zea Mays
gtgatgtggttcatgtattctgtgcatagatacgtgattcataaatgaaagcatagatacatgattcatcatcccacttttgtgatgtggttcatgcattctgtgcattatatccctacaatatactactctttaaatatctctcactattttattacaacattcactcccaccgaaatactcttatatgcatgatattatatacatggtagttcatgtttttccccacccactggaatactcagtctgcaccgaaatactcttatatgcaatgtcaatccatattgcaaccaccagttttatagtttgataagatattggaggcaaacaaatcattttgtcgtaaaaaataggatgttaatcaattgttcatatgtaagaaatgacaagatgtcgttcctattatgatcgtttgtaacccgggatcaccccctgtgacgagtaagccaacctccat

SEQ ID NO: 167979 - DNA, 662 bp, Zea Mays
tccagagtctgatcaaaattcgccagggacaattcttgcaggccgatgagagcagacaaagcaggagaaggaactccactactttcaccactagcgatgaactgccgactgtttttccgagtcaaaggaacttcatcctcttcctccccgtcgtcttcattagcaacataggcagcacacccattgggatcagcaacagatggagcacccacatcgggatcaacagcagattgggcacacccattggggtcagcgtcaataaattcagtcataggcatttcttcagcaacaggaaccgaagtaccaatgtcccgatccaaactggatactcgccggaggcgtctctttttctttttctgctcatcagcagaaggatcaggttgattggcttggcaagggcgcctcgggcgagtactggtaggcttctgaatatccaaggtcgtaccagcctctgggaggggcgccaccaccaatgtcccagcaggagcagcatcagaagagtcctcagccagcaaatcaagcatagcacttatctctgcatcactaggattcaggggcacctcaaaatggacctgccgttcatcatcaggaatctccccgagcgaggcaaccaaggcgctaacttcttcagcagagggtcgcactctaaggcccaaactgcc

SEQ ID NO: 167980 - DNA, 406 bp, Zea Mays
gtttcaacctagagtagagaaaagaaaaacagaaatgaataccacatcactgaactagtgtgacccaacccaacaagtagctgaggcccatgcttaagagagtcgcccctccttttccactagaaaatcgaagggagtcatcagcaaagacaaggccccatcatagtttaatgctgcaagcggtacctgctgcatgagaatcaaactataaaattggggtggtccaaatctctccacctacactggggaatctgatctcatatataatcacgcagagttataaacaaatggttcagcaaaggacaaaaccacctatcatatgcggacaatcttttgtgtttgccattcttttagccaccacttgctgatttatctattccctcgagtaggttcttgctctttccat

SEQ ID NO: 167981 - DNA, 690 bp, Zea Mays
cagccccgcgcagcatattaaagtcaccgatcagaagccaaggaccagagatgctggggaggaggtctgagagttcagcaaggaaggtgggggagtcctggtggttggatggggcatagacgttggtgatggttatgggcgcattggcaaagtgcgagctgaaggtggtggtgagggagaaagagcgagagatgctggacgtgagctcaagcacagcgctgtcccaggcggtcacgacgcccccctggaaccgtcggcattgacgcagagaaagctggctagatttttaggcaaaaacgagcgcgctttaaggcagctgaggtcgcacagtttggattcttgtaggcaagcaacggacggggaggcaagggagataacaaacgatagtgcatttatccggatcgcctaaaccacggacgttccacgaaagcacaacacagtttttacaacccggactcatgactgaactgacagaccaccaggggacacactacgaccacggcagagggggaacacaccacggcgacatgtgacatacagggataggtatgaccagacaacagacttggggagacagcaggataacattacagaccacagaccgacaacagatttgctacagtatcgacggcaggtcgcccgtccaccggcagtcaggagggaagaggcaatcattccgaaccgggaggc

SEQ ID NO: 167982 - DNA, 571 bp, Zea Mays
cgcaggtacaagcccatgccaaccttttaccctataggggttttatcccacgagtagaatgtatccgttgccatctctactcatgcggtgggaacgatggaagtggtgacgacgaggatagcctgtgtatttggtggatcggcactaacctcggggactgaccccacaggggtctaggtgggccatggcccaccctaaaccaggcccaccaagatcccatcccggcccaattcgcttcagcctcacgcctacccacgacgctgggagacccgaacgagcgaggacgagcgcccgcaacaccgatgcgccgccgccccctggccctagcgcctcgcgccgtcgctccatggccggtggccctagcgccccgcgccgccgctctgtggccgatggccctagccctaggcgccgccgctccgtgggccgtggccctatcgatcatgccggagcaccgcccaccggctagctggcagcccgcagccgccacggcaccacgcgtccgactcccacgtggccatgcctcgtcctccgtgctcgcctagccgctagcagcctagcgcgacagtcggca

SEQ ID NO: 167983 - DNA, 528 bp, Zea Mays
aaaaataccgttttcggggatagggcgagtgtgggtgcactcgtctagggtttagaccaatcagccggtatgtgtctatccacgtccggtgcatatggcctcatcatatgctctagatttcctaacgtatctagataacagaagacgcaaaggtgtagtagtatggctgagaaccggagttatgcatggaacggtcaccaggccggggatcggaaggatatcatagcacgtgcacatgccggagatcccactctcgatcaagcagcagccttcgatcaagcagcagcagcagccttcgtctctcgctctgcccctgctcaaaagcccgagaacttctcatggccatggccgcctccgccacagaccctgagcacaacaaacagaacggccggcggcacggaccgtcctcatagttcaaagcagcaccggcggcggcgcctactcagccacctccacgtccaggtccccgttcccacaagcagctccggctggcccggccgcccctctggcccagcatctgctccctgc

SEQ ID NO: 167984 - DNA, 324 bp, Zea Mays
aatggatctatgagcgtactccccgcgtgggttaatgtcagccttagatcatcgatcagagtgcccttgctggatctgtagcgtggacgatttcgggctatcgatctttgatcctagggcagtgaacgcatatcgattcataataaccttccccgatctaatcatggcccttcatgtaagattcaacggctagaactgatcagtaccccttcgccataaccattttgcgtttgagcccctcggcttttgtaaaaccaacccgccatccaatacaggtgtagtaacattatagtatggccctggaattttgcgtagagcacccca

SEQ ID NO: 167985 - DNA, 719 bp, Zea Mays
tgcaaggcccaaatatatccactaagtctaactatagcatttggagtgagttgatgaagataaatttcaaatttctttaaaacttaaccgatcatcacgtacagagggaaccgaagccctgcctggaagaagcttttggaaactataacttcatcatcctttggctccggaattacttcgtccccagcaaatcttattagtccatcgtcattcttcccaaaatacccaagcttcttcattaaaactaggtcttctgcttttatagtagattttccaaattcaacatgattgggattgcttggactcaagataacatcgtcttcctcatcatcactaccagcttcggcatcaacattttcagcttcggcattagcactgtctttctctggaaaagatccttctccctcctaaacaaccaatccagaatgtctcataacctccaaaattggagctgtctcagtagtttcggtctctccaccctcacttgtcagtctagcagtagacctaatcctagccatttgagttcttaagatgaagctaacttttgattgttttaacacttggcagaagaccagttaatggatgcacagagcacagacaccttcatctttagtaaaaaaattcagtagcagaacggtgcaattgcaagtaatgttgtaataacttcttaccaaccaatctctttatatagtcctgcaggtgaagaaggcaaactgccc

SEQ ID NO: 167986 - DNA, 709 bp, Zea Mays
agaaattgttccatgtaaggcatcacctcttcaaggttggtcaatacatatatcctgatttgccgccactcttcatgtgtcagggtcttggtggtcgagccacttgcgcttccgagttggcctcgaaatatgttgaggttcgattcattgtcgccatcattgtaacgagggggtggattatgcacgctcggcagtttgtcaccatagtaagttgttgtgaagtttgacacctcctctagaatgtatgcctctgcaatggaagcctcgattttgcatttatttctacatttctttcgaatagtctttagacatctctcgattggatagcaccaacgtccctgcacgggcccccccattcgttcctcataggggagatgaagaatcaaatgctgcattggattgaagaagtcgggtggaaatatcttctcaagcttacacagtaacacgggtgccaatctttccaagtctgcaaccacggtccgagataactcttttcacaaagctgacggaagaaatagctcaactctgaaagcgctagccagacatgctcagggacatagcctcaaaccatcacaggaagaatccgttcaatccatatgtggaagtcatgactcttcatccctaagactcgcagagtagataagttcacccccctactcaggttagctgcatacccatcagggaacatcaacatcttgatccactgaag

SEQ ID NO: 167987 - DNA, 722 bp, Zea Mays
tgcgcggcaagttggccaggaagctaatagatagcagcgcgaaagagagttcgctggacctccagtacgtactactctgtccgtttgtctgtcctcggcgcgtgcgtgacgtacgacggcagtgctgggcggccgcgatctggctcgcttcgcttgccagacgcagacggtaatgcgctctggcttgcctttaccagaccgtaatgcgctctggcgcacgcagcactcttgggatttttaaccaaaaaaccagtagcagctatggcgtgtgtgccagcactaacgcttctctcccggccggcctgtgtgtgttttctttgatcgtcttctttttcagtgacaggattgccgccgcccgtcagcgagaggccggccggcgtgtgtgtcaattttagtgcgttcttctcttctccgattcgcttctctagctagctccccatcatgcctgcagcttgaatttttgtgccatctaggctagggtggaacgctgaaacaaaaatcaaagggcgatcgatcggcagctagctatgatgcatgctagtacatgttttgaatcctgcgtcctcgtctgaaaatccagtgtcaggtccccggatgttctgtatagggctgaaaaaaaccctcaaaaactcaataactcactcagattaattaactctttaatggcttgactcgagtactcgactcgtctcggctcgttaggattttatagtgagtccagc

SEQ ID NO: 167988 - DNA, 778 bp, Zea Mays
gagacagggggatctttgtctccatggtttccaccgtgaatacttgaattggatcctgccatgttagagggaagcaagagaaagtagaatatgaaagtatttgtggaacactcgatctcacctcttacttacccgagctctttcctgatctctaggactctgatggtgccagtatgacaacttcgacagaggtattagagcggtcgtcacaagtcgaacgtctcggttcaggtttttttagtggagctataagaggctgatcaaggtgggatatggtactgttaaccaagtgtgttgacgtgctaagagatatgaaattgttgctagaaagattctcaccaaatcaatgtaaactgaaattttcagcaacacactacaacacaatcccctttcacaaattttttcacttcttcttttttttgacttctttctcttctttttttataacactgatggggtgctgagatcaaatgcaatgacacaatatgaatacgatggtggtaactagcaacttgaggaattttaaacaacacaaggtaacagtaccgccaaagggttataggtttttttgtggctttgggctataggaaaaaaatataagatggatgaagactgtgataaataaatggatgacagtaagacctaccgtgacaacgaaagctttgataccaaatgatatgtaccaagttatattcggtactggggtggcccaatcttgacgacagtaggttgataaataggatggttgggtataaaagtaactgaataacaaggtaat

SEQ ID NO: 167989 - DNA, 646 bp, Zea Mays
taatcattaggtcatgcatgcatcatgttcaaactatactaaataaatcttcccctcttatggaagtatggcgtgcaccaagactacctaacgaaaggcatccggacctcaaggtgtgcctcgacaccagttggctcctcgacatgaggggagcagtagcggaagcaatgatcccataggggatctagaggccaggctggaatgactcatgtcagaactgtgccatggatatagggagcgtgcgcaagatagctaccacattgctgagctatcagcggaggtaaatcacttgcagcaggaaatcgtggaacgagacacaactatcgattaggtcgtaaattcatgctctttcgcctgggattaagaggcaaatgctctagcccaggtagcagaactaagcgcagctttggagaatctgcaagcatactgtaacaatctgcatgaggaagtgcacgtgttatacgatcggctgcatccgaatgtgccaccagaagttgcagcaatgggagccggaacatctggagcagctagtggaggacctgatggggagttggatctttttggagcccctccttccatgaacctcgcagatgaacgctctcccgaagctggcagtggagcgggagtggccaaggacgaagataat

SEQ ID NO: 167990 - DNA, 546 bp, Zea Mays
gagtgaaacctgatccaaccgtattaatggtgtgtcggtgtactccacatatccatcttaatcgagtttgagctgcttgcctaggattttggtttttggacgatgtctgatcgcaaagaagcagccgaccacctgcagatctgagacctacaggttcttgacattgacgcggtgtgcacctgtgtcccgcatgctcgtgccccagccggccaccggcctccgcggcacaacctaactcccgcgtagatgcattgcatgtaccacacgctcgtggcctccggccactagccgccacccagccagcgcctgctgtgctgcccttgcttactgctataggggcgatgacctacaccacaggcttgaggttggtttccctcgccatcgcaggtcgctaggcttagatcgacagcaatctgtacctcgcaacctatatctatggaagcagttgtacgacaagtgtgggatgaaggtgaagagcaagacatcttgaggaggatggatggggcggcagcgacgaggaggatgggtaggcggctgctgctggga

SEQ ID NO: 167991 - DNA, 1319 bp, Zea Mays
ggcagctcttggtgtacaccaagctcaaagaagtaggcattgaggtgtgactcgttgaattcgccctctcgatcggcatgaacggcgccaaaaaggttcccgcttttcctctctactatggcctagatccacttgattgtagctggtgcctcgtacttgggcatagcagtgcaatccacatagagcgagaatagtcatcaacgagcagtaagaagtagtgattgccacttagagtggttggcatgatagtcccacacatgtccctatggatgagttccagggacctcgttgcatgccactgtgcttgatggggaaatggcgcacgccgatgtttgccggtgaggcaagcttctcagagttgatcaatgtgttcaagttcgagtagtccatgcaccaatgtctccttgcccatcttccatagcaatccaaggatgaaattttttaatcgggcatgccaacgccaagcatattctcctacgtgtgtaaccatgcacaccagttgcatgattttgatctcgaggtagacaaccgggactgcaacacaccttgtccactagtcgatgttgtcatcgctaatccacatcaagccatgcctcacatgttcatcatactcctcttcatccagccaactagtgttgatgatgtttgtggtgagatgaggtaggtagtagacattattgagcgcatagtggtcgtcgttcttgcattcaaagagaatggtaccacacctagcaatgggtgttacagagccatcccaaacttcatagtccccatcgttctcatgttgatgctggcaaacatagccctggaccccgtcatatgttttgaagccctagtgtcaagcacccaatgtcagggcatcttgcttgtccttgctatcgagcgcaacatgtatcttgtcctcaatgaaggcgatctcactattcccacattcatcagaaagttgccattggggcctctcgtataggtgccagaattgtgcctagcatgttctcttcatatgtactgattgatctgggcgactggccacaaagagtcacctcctcaggtccgctgacaccgtcattgaggatgccttgagtgactaggagggtgtcttcgtcgtccacggctacatgagcctacttctccttgcatttggatctacaatcagcaacctagtgccccaatttttcacaattgtggcacacgtctcccttttgacttgagtttgaacatgaccgatgattgcttgtcccaccatgcaggtgttgaccgccaccactgaaagggaaattgggtcaaccattttttctaattaattttggtggttgatgacc

SEQ ID NO: 167992 - DNA, 1011 bp, Zea Mays
ctaggtttcatgcgagtagttggaatgtagggtccctaacaagtaagttacgtgagctagtggatgtagcatttaggagtcgtgtaaatattccttgtgtccaggagactaaatggaagggcaagaggtggaggatattggcttcaagctttggcacacgggggcaacttcgggcaggaatggtgtcggtatcttgatcgacaagagccttaaggattgagttattgatgttagtaggcaaggcgaccggattatcctagtccgactggtagttggagatgcgactttgaatgtgatcagtgcctatgcccctcaggtaggtcttgtgagagcaccaagaggttgggaagatctggatagcatgattagcaccgtgcctatcggtgagagactcttcataggaggagacctcaatggtcatgtgggtgcgactaatgtaggttgcgagtgggtgcacgaggggttcaagtacagtagtaggaactaagagggggagaatgttttgaacttcgcgttagcctatgacctgttgattgcgaataccttctttagtaagagggaatcacatctagtgacatttcacaatggtcaacactcaagccagatcgactttatcgttgcaaggagggaggatagacgtgcttggttagattgtaaggtgatacctggggagtgtgttgtccctctacgcaagcttgtggtggcggactttcattttcgggtttgtgtccaccaggacaaacgtggcaagatcgcgagaacgaagtggtggaagcttagaggagaagcgacacaaacgtttaaggacaggatgctatgcgaggggccttgggaagaaggagaagatgcagacgacatggggctacagatggcacatgtgttcggaaggtggctttagaagtgtttggtgtgagtaggggaggcaaacaggaagtgaaaggcacctggtggtggaatgatgaggtgcaaagggctattaagaaaaatgactgtttcaagcgcctccacctt

SEQ ID NO: 167993 - DNA, 526 bp, Zea Mays
gtgtgtggattaataatactaattggaaggacagtcattcaaattggtcagtccaattaagaatgttttgcgtgtgaggtgaggtggtgacatgccaaagtagtcatcggttccctatgtttataaatcgagtcaataccattaggcattcatgaaatttcacgttgcatatagtgtatggttgtattcgtgacaaggaggtgtaggttttactcaattagaagtttggttgatgtggctaggaaatttgtttcggcttgggtaatgaagtagtgacgtgaccaagtagtcccccccggttatgagtcgggtctagatgtgttatgccttcgccgtgatacccatcgtatatgctaactggatgtatataagaaatgaaatagacgcatcatatgatttattggtgctggtattgtgatctaagtacattatatatgtgtgataaatgtcgggcttgaggattgtctttcgagcgaggcaggtgtaatagacttatatgtgtagaatgattaagctagtaatacaa

SEQ ID NO: 167994 - DNA, 723 bp, Zea Mays
aactagtcgtgacttcacggaaggaagggaccgctcgattgatggtaattcctcaccggaaatgcagcactgccactgatccgccatagcgtgtggatagcctcgtcctcgccctagtgcagggtatgaaacctcccttgatgatcgtcgtggtccgctcttcgaatatctagcaacaattcgcgagtttggggtgctctgggggctgcgcagggcctttgccggacatggcgccgtcgggggatggccctgtgtcgctgtgtcggccacctggggagggagatgatacgtaagtcgtggggtggtaaacggacggctgggattcggtcgaggatgtagttcggccgtatccgatatctgccgttggatcggcaatggatgggcgaggggtcacagaccggtgatccatccgtgaacggtcgagattaaaacgtcgacaccgtttcgggtagatcgcttccacacggttgatcttcacgtctagggtcgggatcgggtccatgttactttgaatcgccaccctcggttctgtatctatgggttcatataagcatactacggtgatctaatcggggtcgttcaattctgatctggcggctgagattgaagcataccccttcggccatggataattgctaaagagcccctgcaatttttcttattcaacccgccatcccgtgccattacaagaccattaccgtttagtcctagaatttatgcaga

SEQ ID NO: 167995 - DNA, 1087 bp, Zea Mays
aagaagaacaagtaccaccaccacctaggcacaggtggttacaagcgtcaagttcctaaatggagacaagaagacgccgagaagaaggccgcagggttgtcgacgctgtccgagcaacttggtgaaaggacggctaattggatctagaaaaccaagggaaaccgagtctggtgtatcttttgatgatcccactatcgaagaagcgacaaaaaacatatatgcaatggcagctaagcagagccaaggaacatttaagccgcaaagggagagagacatcctaacggctggcctcggtaaccctgagcatcctagtcgtgtacgaggaatctcgtctaaggaaggatggaaggaaggattcggaccacagtgggaaggtctgtacaagaaacgtgatcgatacaaggaaaagatggtggattattttaaggaagaggccaagaaagagttcaaagacctgatgtctcaaatgctatcgaatcctcctctagaattgatgcagcaattggcgagtgcgatgtctgttcaacagatgaacactccacagatgcaaataattccagtagctcaaccgccggcttccaccgattgtacgaccgtcccaagctctgtcgcatcaacgggaaataaggtccgctatccagttgatgacatcacaaggcctatggcgtgcacactagttataagatatggtattaacaatcatcgtacgaagaaagtagccacatgccttgcgatcccaggacgcaagttccatggaagcgacattccagaagattattgcagggtagaagtgacgacggtcgtccaaggatacgaggaaaacatgctagacatccctgggcctgaaggtatcgagacacttggacaagctatcaagaatttcatcctttggcctcgaagggatgtcgaattggttgatccacaacggcagtcgtcgtcgcaggcccaaccgtctccgcctcctcaaactgctgttcctattgtacatccatcatcacctcctcaaagttcacatgctgctcctcatcctctttctgacccaccgtctccgccacaagcatcaccattcagggctccaccttctcct

SEQ ID NO: 167996 - DNA, 459 bp, Zea Mays
ggtgtcgatggagtggaggtgcgtgtccaactcggcgagtagggagcgcgtttggttcgccagtgccagcgtaagcaccgaatctgtcgtcgaggaaggaaccatggcgacaaattgttgagggtcgaaaggattatgataccaattgttagctacagctagggaatggagaataggagagatttgggggaagaagatagcagcgaagaagaagaccggtagggaattttagattgtttttcatctttcatatccctcttcttctgaggaaaggtatatgtatcagggtcatcacgcacaaagacgccacaccagttcgcgcacgcaggcgctacgccacacacacacacgtttaggcccactccggccttgcacacggacattgggccgacgcacccacttggccctggttgcttctccaacattgctgacaaggaggcaccaaactatacacctcag

SEQ ID NO: 167997 - DNA, 349 bp, Zea Mays
acagcatgttttcattcgtcctaccactgcccccacttctacaaatcagccgagtgcccctggtactcgtttccccgctctccctagttcttcaactggctgcttcaactgtgggaagtctggtcattttataaaagactgtccatacccgaagcagaataaattcaacactcagcagaactctgggagctccaatcaaggcaaagggaacatggctaataatttagcgagcaaaaatgtcaagaagacaggacgaatctattatactcaagtggccactacactggaaggagagccggtaatgatgggtatgttccttgtggccaatcacccaacagtcattctcttt

SEQ ID NO: 167998 - DNA, 467 bp, Zea Mays
cccaaacgaaatctgtgggtaccgactgcgagaactccgggaaggtgggctcgtcgcgatccatccgcctcctaatccgcgagctcgaagataaactgactgctcgtgacctgaggtccggccgctacgagtcttcaccctctctgtactctctctgtttctctcgccgtgtttctcgccacccgcgcggactcaccgccaggattctcgccaagcaacctcgccagtagttgcttgcgcgggataaatacgctccgcgcccgcctcctccctgttttctccatagcctcggatcgcgtcgcgccgcccgcacatactcccccttcgtccggtgagcacctcgatctgcttcctcgtcggcgctagcttctcgggacagcaccagagggtcgcgtgggcagaaggagtccggtgcggacgtcgggcagtggtggcatccactagaccgacagcgatttcttgccgcc

SEQ ID NO: 167999 - DNA, 658 bp, Zea Mays
gtacaggcataagaatagctcacaaactcagcctccacggacttagccagacctgacccaatgcttattacacggcccattctagcacacgttcccatgccacacatgcacacaatagtcttcatctgttgttgtcttctcggccatctcttgagctccttgtgcctcttgcgcgtgtgggttgctgacattccctcatctttgcttgtcgcttgtccccaagtgggtgcttgaggaaaacgagaccgcaatgcttccgcgtcctcccacgttgcgagtgctgcgtccaccccaaaccatgtcactttcacttgtgccaccattgcacctccacattgtatcattttgcgaccaataacctggatagggacttgcagtggttcattagtcaccggtaatgaagggatgaccacatggcgtccaccaatagctaatttgagctgagggacatgaaaaactgggtgaatcaaagaagaatccgacaacttgagtttgtaagctactgtaccgacgcgttgaaatatggtgtacgacccgaagagcatgaagggcaatttttggttggcacgattagtgacagaagactgcacatacgactggagctttaagtacacttgatcacccacaatgaactcccattcagattgctggtttgtgc

SEQ ID NO: 168000 - DNA, 1032 bp, Zea Mays
attgtcccagaaggatctttttgtcaacagtttttttacccaaacgagttacatgccttaactgaatatataaaacaaattcagccttttggtgttcgtactaattctaaattttagagtctatcccttcacttcttccccattgaaacgttcttttttctccattttcctgcatcttcatagcatgagtgggtggtggttctgtgggagcggagcggtaacactacaagttgctgatcttttcatcttcttcttctcttttccttgtgggcctgtgatcacagaaaacaacacatatttgtggatcaatctaattttgttcaatttatatttttaggggggatgggaagaaaaagatttaaagttaatgtaattgtttaaaaacactaagcgggatgtgttttcagttagacgtacttgctgctgcattgtttgttttcttgtttttttctgctctgccttcttcatcttgctgcggatttcctctactattggttttagccttgtaggtttttttggccttcctttctgtttcactgcttcagggttcttcagaatttcaactattggtctgctctgattttcagcattgttccctcccactgttcctgtccaaggtccccctattataacttcttctgatgatagcatttggcaaaccttttcttgtagtttgtctaattcttcagatatatactgcatagtcttctctgtttttgctgctgctgatgtgagcaatgctgctttccgactcaataggttatgccttagtactggatgagttgccattgatgcatgcatcagtggtgtatctttttggttttgttttttcttccacctgtccattatgtattcctctgggattttcgtgagcccttcttcaatgattactttaagtatgtgggagcataaaatgccatccttgtcaaacttgccgcatacataagtgaactcttccattccatatgttaggttagccataacaaggtacctccttgttttatgtggtttgtgttcctggtttgtttttgg

SEQ ID NO: 168001 - DNA, 605 bp, Zea Mays
accgcgaagactatccgcgcagaagtcgcccaagggtgcagccggactagcacaacaagtgcggaaaaaaaacgaagtctaccgcgaagactatccgtgcagaagtcgcctaagggtgcaaccggactagcataacaagtgcgaaaaaaccgaagtctaccgcgaagactatccacgcagaagtcgcccaagggtgcagccggactagcacaacaagtgcgaaaaaaacgaagtctaccgcgaagactatccacgcagaagtcgcctaagggtgcagccggactagcacaacaagtgcgaagaaacggaagtctaccacgaagactatccgcgcagaagtcgcccaagggtgcagccggaccagcacaacaagtgcgaagaaaccgaagtctaccgcgtagactattcgtgcagaagccacctaaaggtgcagccggactagcacaacaaaagcaaaaacgacaacaccaaaccgtccgcgccaagaccgactatatgcgcaccagcacagcataacaaaacacaccagaccaagtacacaacgccttcgcaagcatagccaagtgtgcgggggcacacaacctcatcatacaagcctttacaca

SEQ ID NO: 168002 - DNA, 413 bp, Zea Mays
gggacttaatgacaggcttcaacggaaaatggcaacatgtttggatcttacctatagcagggctgtcagtacagcattggcagtggaagccaaaaatgtcgggcatggaaaatcaaaggggtttggaggtgaaaggtcaaatcaagggcctgagaagagaaccaggttggtgatccgaccttttaatcagaatcgttcttcgcctcgtccacctccctatccctttaagcagcttgtttttattcgtcccactactgcccccgctcctaccaatcagtcgagtgcccctggtactcgtttccctgctctccctagttcttctactggttgcttcaactgtggaaagtccggccactttatcaaggactgcccatacccgaagcaaaataaaatcgatttccaacagaactctg

SEQ ID NO: 168003 - DNA, 519 bp, Zea Mays
ggaaaattaacatcacaccaaacatgttctggactaggcctcattttctgtgaagcacagggggctcggggtaagatttctaaggcacagggaacagtccagtggaccgcgagttgattcccaacgtcccgaggggctctttaacaaaagtgccagcgcgaaagggtatcctttaatctggaccgtccgatctagtgcctacgtgccagattagatcgacgcgggttatgaatcggtgcgtgtctgcagccgctagaacctaatcctacggctcggattcaaaatacacgagattgaatcgtaatcatcggatcgcggatttacgattctaatcgatcgcgcgaagaggtgtgtgatcttctaatcttggccgtcgctggtcatccaacgacacacgtgcatccttcctccccccaacccgttgcgcggcagcaccgagcacgcacggcggcgcacgccggtgagccaccccacgacggcgcacaggtgcacgattcccaaattaatagggtgctacac

SEQ ID NO: 168004 - DNA, 1193 bp, Zea Mays
gaatttcctaagttctctgttcattaaaaaggatatacagaaatggttaaatggaaaactaacttgcatcggggtccctagcgaaagtttctaagtttccttgcagactagtcctcgggttactattcacatgagtctttgactacgcagaaaaccccctggggtgactctaaattaaacccacggtccttcccctaataaaacagtaaccgcggtggaggaaagggcggaggggcttaccgacggcgagatcgctccggcgaagaggccgagggtgtaggggaggtcgtgacggtcatgccgatgtgcggattgtctctggggatggtcggagtaggtaggtccacgtgcacaggcgggggagctcgtcggcagcgatggctctagcctaaccagggcggtagagttcaattgaataggtcagtgagctccactaggtgctagggaaggcatgggcgcgaggaattgaagaatggctcaccggataactcggtctacgcgcggaatggctcatcggataagtccggcgatgatgatcttgctgttccagtgagacagggcttcgattctcgcttggagaagcttcacggctcttcagggaagctgtccaagggttggttgaggctgagggtctctggaaatggctggccacggtggtaggcgctcaggtggctcgggcgggtggcgcagagctcaccggagataagggtggtgtctggctagcgagggtgagtgcggagtgaggtgaggcacgtctatgggtggtcttaaaggcgtgggtgagcacgatcaaggggtggctctaacacgctctcggggtgtgcacgggcgagcgccagtgcgcgctctggcgcctaggcacgacgtcgagcacaaggcagcgcagagagaggtcatgttctagcgcagattggatccaaatctttgtgattatggccatgatcccgttgagagatctcttcacctgacattcctttgtcgtttgtctgtggaggcttatgggtttcgctgactggatcaagagatatggagggatgaagttgggtttgtctcactactgaactctgagaggaaaccccgggtttgacgtgtctagggcacgaatctcgatgccatcttcacacacgttgcagaggggttagtttagaacaaatttgtcaatggggacttaaggatttgagctcaggattaag

SEQ ID NO: 168005 - DNA, 619 bp, Zea Mays
caatgaagaacacatttcatgaaatggaagatagaaagatgtagcctacgaactactaattgctgcacatcttaattgctaggtatgcatgaatacacataagggaaagtgacattggataccttaaagaacaactcccacaatttttcgaatggaagcttgcccggggtcaggaacataaaggcaatctttgggttccttgatatgaaaggaggcgtggagagtatctgtctgaaaacaacacgtgcagcagtctctgcatcagtaagttcccgcgtaggttccgagggaaaccagtccctgacagggtaggtgtaatcctggggagggtagagataagcccacagcacagtaatggcgacaaatactacgacaactgatatccatatgcgtcttcttggacttgctcttgtgcgaggaactgcagtacccttcatgtcgctgaagcccagttttcacacctgataccaccacttcattccctttggctactcacattgatgtgcctcgccttcattgctttcctcttgactaaagcaaatgctaccctactggagcttccagcaacgtgaaaattggaaaaacaattgccttctgcttctataagtgcttctgcaaa

SEQ ID NO: 168006 - DNA, 729 bp, Zea Mays
cgcggacgcgcgggtgttcgcgcacgggcgtgctctgggcgcgcccccgagtgtcagcccgcgtcgaacacgtgtgtgtttgcttctgccatggttcaacggccgattggagcaccttagcgtgcagatcttggcaaaaccactatgtacggtctcttccctgcaccatatcctaccttttttatgtgagtcccaagccaagatacggtcggggtagggagatatagcggtgagaagttgcctgtgtcctagctgtccaaaccgggacaaaagctatgccaagtcgtgtcaaacaacttggggtggggttcgactttctccagggtattctagaggtattttggcgccactttgtcaattgggtcaaatggttttgaagtttgaatgagggtgaacatgttagatctttggccaagggttgggtttggacttagagaaattttgattcttcttttgtgctcaaccctttggtgaaccttttgggttttttctgaattctttttggggtcaccttcttactatcatttgtagggtattaagtgcactacatcttttataattggcccaagtcataatcatgtggtttttatacccttttgttcatacttacttctagtgccccacttgtccaaaggggtttggattagggtttgggcaattctcccccttatatgtgcataacaagccaaggcatgacacctaagctaggttgcacttatttaggatctt

SEQ ID NO: 168007 - DNA, 710 bp, Zea Mays
gggatttcgctgtgattgcgactttgtgccggtcaatggagtccgccgcaacaccgggtgagcgcatcggtgtcggccgcaagggaagggaggaaacctcgtctgggcagttcctcgcagccgtggacactcgccgtcatccacctagcgatcgactccacccccgttccgaactctcggtaagcgtcactctttgtacgtagtcgtccctttgctgagtagggggcatcgttcagttatagcgtagcgggcgtcgcgtcgccgggcatcaaggtcatgctgccatgtgccgccgtgggcagagctttccgcttcgccaatcgcattaaaacctacctagatcgatccatattcgcccccttgccatgaataatcgtgcttagggctgaatttgggttcctgggtacatctccgacactacgctggtgttgcgccgccgggtgggctggagctccgtcgagctcgggtcgcagtgataaggtaggtgaggcattggttgccgtcgatcttgtgatgggcgatctagatggaatcggcgtaccgatcggatatgggatggcagtggccgttgatcttctaatgaacacgctggattagatctaggtgatgtttcacccgcgactgtcggatctcgatcgtgtgaatgtggttagttagagcgggatgaaatctgcgccgttggatctttatccatcggtggtggttgcata

SEQ ID NO: 168008 - DNA, 632 bp, Zea Mays
gcgagctaccgtggcagtcactggctaatgagctatgatggtcactggttactctccatgactaatgacgacgtggtaaaacagtctaaggcatggcgtaaccgagtgaacaacggcagccacgtcgagagccgcacagccacgtcaccgacaagtgggtacggtgaacagtctggtgatagggtccaagatcatcccagcgccaagatcttttaccccgagtcattatccacgcgccaccgggcacgaatcgcagcaccggcgtgaatcctggcgtgaggatcactgacggcgagatacgctgcacctgatcttgttcagtactgtaccatctaaaccattcatcagagcgtctgacagagtgagttagagggcttgattcccaaacttttgtgtagcaactcatcaatccttctgcagcaaagttgtttatctataatctagctacaactttgttacaaaggtcttgcggaaacatccactaaatcccccacaattcgattacagagttcatcggattttactatcagtataaatttagtctttaatagtgacagacagtccaacttcatgtccatttgtcttcaatttttgtacaacactaatgcttagtcacttaatcaaagttgtgc

SEQ ID NO: 168009 - DNA, 2654 bp, Zea Mays
ccacaccatcaagcagccccatcaattgcaccagttcagcagcagctaccgttgagagccgagagacgaaggcgaggcgcagaccttttgaaagaacgtcgctgactgaggcatttttatgtcgtgcgtgtgtgtacagcgacggcattgcctccacgaggggccctgagggcagccagcagtcataccagaaagccgtagtacgcccatcaccaacctccaccgtggtcagcaaccgatagtctgggaggagccgacgaagggccgcccaatgcgaacccgctgtggcattgtctggtgcagataaaggcccaccaaactccacttgtagccaacaggaccatgctgaatctggagagttgtgagcacggtgcagaagctttagtagcaagcatgtgttttgcaagcggagatcacgaatgccaaggccgccatcttttttcggaaggcaggcacgtttccaattcactaggcatttagctcctgagatgtcttcctctcctgcccagaggaaagcccggcgcctagtgtcaagagcttccaccacaccctggggaaggactagagctcccatggcataaacaggaaggctgtccagaacagaattgacaaggacaaggcggccatggtgattgaggaggctcgcccaccaccctgatagatagcgatcaacactagcaatgatgggagcgaaggcagccaaattaagcttctcattagagagggggagaccaaggtaggactgagggaaagccccttcggtgcagccaagaatgttcacaaactgagcaacctccagtgcaggcacatgcataggaaccaaggtgcttttggtatagtttatgtccagaccagtcgcccgggtgaaacttcggagtagctccttgagtcgcaccatagccgactcatttgctcttgctacgataagtgtgtcgtcggcatactgaagtacagtgcacggtcggtctgctgctaggggatgacggatgacgcaatctctagtcaaaagttgttgcagcacatcagcgacaaggatgaacaagtaaggggacagtgggtctccttgacgaagcccttttttgcaagagatccatttgcctgggacaccattcagcaggacagctgacttggcagtaacctgaagttgtttgacccattcacaccagagagtggggaagccgcgtgcccgtaaaacagcgagaagtccattccagcttacactatcaaatgcttttgcaaagtcaagttttagaacaacagtgggagttcgcctcttgtgacaacattgcaccaactcagttgcatatacaaaattttcagagatggaccggcctttcaggaaacctgtttgatccatatcaaccaatgaagacacttgctgttggagccgggaggtcatgatcttccccacaatttttaccgggcatccttgaagcgaaatcgggcgaaacgaacctggggccactgcaccagcagtttttgggagcagcacgatatacgcacggttgatccgctccaaatcagcaacacccccatgaaaggaatccagaaatttcatgactgtaggcttgacaaaatgccaggcatgcctgtagaagctggggccaaatccatccggaccgggggcgctatttgaattcatggctttgactgccgcatgtgcttcagcttcagtgaatggcgcaattagcggctcagggtcaactctcggcaaggtgctgtacatcgcaaagacatcaaaatcccaaactggctctatgtttgctccaagcaaggcggaaaaatgattgtccagaatcaaggctttgtccacatggctcgtgcagcgaacaccatcaagctcgagcactctgatctgattctggcgcatccggtgtgaggcatacgcatggtgaaacttagtgttctcgtctgcctctttgacgactttgatttttccacgttgcttccagtacgcagcacgagctttgatcagctgcaagagcttttcacggcagtgagcacgtaggaccatctctcctgtagacagaagacgcctctcctcaagcaggtcaagcagttttataataaatttgcagttattgataaggagtggagtgtggttgtgtttggaccaaaccttagcgacacggcgggtgtcctttaacctagcgacaaatgcacccgtggcacaacctgcatggttagtaactgttgtccaaaccggttcaatgacagggaggaaggaggggttatggagccaagcattctcaaaacggaagcagcgagttttggggatagaggtgtctatggtgatttttagaggggtgtgatctgaggtggcgtgagagagggaggtgagggaggtgttgggtgcagtagactcaaattcaccattgaagaaagtatgatcaagtcgagccagaacaggagacgtacgtttgtttgaccaagtgaaaagccgatcaaggagtgggagctcgactagagataaatcatgaatggtactgttaaaagcgctcgctaaggagacatcaaagttatcattgtttttgtcagaggggtcgcgaataagattaaagtcacctgttatcatccagggaccagaaattgagttggcgagagagcgaagctcgtccaggaaggcagcagtgtagaggtggtcagcaggagcg

SEQ ID NO: 168010 - DNA, 463 bp, Zea Mays
ttcaaataaaccttggattaactacctaattaacgaaaacatgtgtcatgacgaaatactaattgtaacacgtaggcgatgttattatgaagctaacaccatttaaacgatacaaaacggacttaaaacgcaatagataatgtacaattaatacaccacggaactaaatgacgtggcacaaattgagtggttttagaatatccacacgttggaccataaagagcacaactattgaaaatcctgggatgctttattggggcgttgcatgtcgacatgcgggaaggtgcagatgtctcatgtggaccgtgaaggacggtttcttttcaaaatgcacagcactaaagagtcgcggggaggtggaaataggcatgcaggtggggcccactagcagtttcttcttcctcttctcatggctaactggtaaccgcacgagtgattctctcgctgctcacgacgcatgcac

SEQ ID NO: 168011 - DNA, 531 bp, Zea Mays
ccgacgggcgggacccgcgggtcagtcgcttcgcgcgcttgtgcgccaactgacgggtgggccatctcgatcagcctcttcacacggtcgcgttcaccgccatgcgggacccagttaccatcgtctcccgaccacgcctcgttttggtctcactggcttgtggggtcatcaggtcgggagctccgtccatctcgcgccgtgttcggacttcggtgtgatgctattgccgatcaatgtcgcacaaaatccaggggctcctcaaccaaatcgtagagattctcggttgattgcatctccccgcgactatataaccatgccccctcgggccatacttcaggaataccttgggcgccgttgccgtggggttgaagaaatacagcgggtccgccgcgggcaaaaccatagtacgccgccgttcagggtccatattcgtgccatggagctttgtggtgatgtaaggaagatgggcgagataaattttgggcgctgggtcatgggatcgacacgaatttgtcaccggagctcgtgcac

SEQ ID NO: 168012 - DNA, 521 bp, Zea Mays
aaacaacactggtaatctaagtattcacggaataacacttcaggcactagcagcagtcagaaaaccgcacgcatcgtcctttcctatcccttccgatttttttttctttcccttacccccaaagccaaaagactgagttggcccctcgtctctcctgtgccccttgcctttcttgttccgttcttctgccaccaagcgccaacataaccctagatacatggctggcggcggcggctgattagcacttcaaccacaaaacacaagatcagaagtgagcggcgatggacatgaacagcttcaacaagatgggggatgatcccatctgcagcgggtggaagggcacatacggcatgagaggcggcaaaatggacggcaatgagatggccgacaggtcatagcttgatggaaattacagcgcattcgtagagtgagttccatatcctaatcccaacgtgagtctgattttgtagttcatccgtagagtgataggtctaatttttgttaattttccttgattggta

SEQ ID NO: 168013 - DNA, 590 bp, Zea Mays
gtgtaaggcattttatgagcttctctcaagatatccatcttcacctctgatttctgaggcacacaaagacggcccctgaaacgaaccaaatcattctcatcaatggtgaaccctcgtggtttaccatcaccaaccctctttcgagcttcctgcaatagacgatcctgctgctgagccgcacgcactctctccatgagagaggattgaataagcatctgagtctcctcgctagcggtaccgacataacacaaagcgattcccaaacggtccagatcagcgatcaatggcaaggccacctttggaaccccggacctgctaagggcatcagccactacattagccttccccgggtgataatgaatggacaaatcataatctttaatcaattccaaccaccgacgctgcgtcaaattcagctccttctgagtaaaaatatatttgagacttttatgatcggtgtaaatgtcacaagcctcgccataaaggtaatgcctccacgactttagagcaaaaaccaccgcggccaattcaagatcatgagttgggtaattcccctcatgcttcctcaactgccttgagccataagcaat

SEQ ID NO: 168014 - DNA, 931 bp, Zea Mays
cattcaccgagttggagtaagcaggtcctgatgccttcaactgggggcagttgttcttgaagtgactggggtctccgcagtgccaatatgcatttgctagtggttggttgcttgcaaccgagggggcctgaaaggagctctgactttgctgactgaaacgtgacggagtgggtccagctggtctattgaagcttggtcccttgggtggaaacccaaaggatcgagttctctggtgccggtcttgttgctgagctcggaggacttggaatttcctcttgaggtgacctttttcttcttcccttgccctttccacttgtatggctttgtttgagaggtgcgagaagctgaggaaatcttggctggctaggatggtcttgagttctggtctgagccctttcaagaagtgggccatcttcttggcttctgtgctgacatcatcaggcgcgtagcgggccaattctgtgaatttgtgcacgtactcactgacaaatcttccaccttgagttagttcccggaattcatcttccttgagctgaacgatcccttggggcacatggtgctctcgtaaagcagtttcaaactctgtccaggtagcatctctgacagcagcgttgaaggtatcccaccatgctagggccatcccggaaagttgatgagcagccaattgaacacgctgattctctgggcatccgatggcttctaacttccttttaatcgtgcgcagccagtcatcagcatcgaggggattgctggatccagcgaatgtgggaggcttgagcctcgacaatctcccatcctgtcttgtggtcttccaccattcggcgttgattctccagacttctagtgaggacctcaatgagtcgggtttggttggctagaacttgggctaaatctaatggcagctccgaaggtgcggggaggtgggtctcac

SEQ ID NO: 168015 - DNA, 1307 bp, Zea Mays
ttaaacaagtttctagatttatttttgtattaaaaatcgatttctaatattaatttcctattttcccaagtttctggatcgggcctcaaatacagagaagtgcaggggctggcgcgtaaaaattcctaagactctgagtacagtcacccaggatggcgggttattttctaaaatctataagggctctttagtaaaaaggccatcgcaaaggggtacgtatcgcacgcggctgttggattagaagtctatggctgatcatctcttgcggcgcgatctaatttccaccgtgcctacgcagatcaacgacgagtattcagctaagcgaagggggtaaaccccgatctaatattggcccttcatcaaaggaccaacgaccaggagtcgtcttctacctcaagccgctatccttccctggtacacgccggactacgacaacagcaaaggagtaccgatgatggaggaggggggggggttctcaccattgatggaggcagagctgaccggccgacgatggaaagcagtgcgcggcgaggcataggtccaagcgttcgacacccttccgagcatgcccaggtcggcgacacaatcggacgacggtgcccgagaagtgagttctcgcggccagcggtagccaccatgccgcgaacaagcagcaccagatgaccacccgcactggcagacacacgccattccactactcgtggtttctatcggcacatagtcgcatctatggctacaacatggcggtagtcgcagggcattcacgcggcggtgccctaccttttctcttttagcgacgatggcgagcggtggttcggagctagctcatatagataggagaagcgacacatagctatatagggctcgggccagagaccggaacggccagctagagacccctgattcccacggagcgcgcagagaactcgcgttctgtttgagggaggaggaatcggtccgaaccggccatccgcgatcctggcgagaagaacgactcggtgccgtgggcccaccagtcagtggcatgagcgtggggcgcacagcgcggtgtgagacaccgaggacccaggcccgcacgtcagtgacttcacagaaaagaaaaagggaacgaggaaatgggctgccgtggggtagaagagagaaagagtgggccgaattggagaagccagcccaaactaggttttagtcttttcctttttattttcttctctccctcttttcaaattcaagttgtattcaaatttaattcaaactcttgtgacccattattacagtttatacttgcaacattgagagatactaattct

SEQ ID NO: 168016 - DNA, 674 bp, Zea Mays
agtgggagacttggtcctccaccgagtactaacgggggaggggcggcataagctatcaccaccatgggaagggtcgttcgtcatggcagtggtcactcggccaggatcctatcggcttactcagatggatggcaatgaggtggggaactcatggaatatcgagcacctcaggaagttctacccttagtaatacctcaaaagtctcaagggaaagttgtactctgtaatcagaatgtttcatcatcaataaagctttcatcttccaaaggcattcaaactcttgattgacaactgacttagattgggcttgactcgaaatcggcatgacatgacttagggtgatcactatgccctactaacggagcaatcagcttaagtcggaaacgccttaagtcggtgcgacatgctcacacttacatgacatagggtgatcactatgccctactaacggagcaattggcttaagtcggaaacgccttaagtcggtgcgacatgctcacgcttacataacttagggcggtcactatgccctactaacggagtaatcggcttaagtcagaaacgccttaagtcggcgcgacatgctcacgcttacatgacttagggtgatcactatgccctactaacggagcaatcggcttaagtcagaaacaccttaagtcggtgcgacatgc

SEQ ID NO: 168017 - DNA, 666 bp, Zea Mays
ttttaacttatcacatttagcctttgacttcctaatgatttgagtgtattccttaagcaagtcagctaattcatcatgggaaggtgaagcaaattcatcatcactagcactatcatctataatatcattatcaatttgtaccttccgttcacctttagccatgaggcataggtgagaagtggatgagggtgatggtggtggtgaagagaagtccccagcgatagcggcctctttttcatcattttcttcgtcacttgaagaagacccgcttgaggactcaatgtcagtgagccagtcaccaacaatgtatgcctttccatttttcttcttatggaatcttttgtgcttcccatcctttctcttgaagattttcttttcctttttctcgtcatcactgtcatcatgtttcttgcccttgaacttgttcttcttgggcttgttgcattgatgagcaagatgaccaagctctccacggttgtagcagtccatttcagagatgggctttcttttactggagaagaacttcttctttcttgagtcaaacttgatgccttctctattgagcttcttcaacattttggtggtctttctcaccatcaaagcaatgttagcatcaagatcatcatcacttgaggattcctcctcaatttgcactttagcttttcc

SEQ ID NO: 168018 - DNA, 761 bp, Zea Mays
aacaacattgttcttatacttggacattgagcagcaatgtgcccacgaccatggcacttatggcacacaatttctcttgtacgggtacaagaaatagcgactgaagcttcagtcgggtctgatgtactagtagcaggtcgctgcttatttgcagggaatgaccctatagaagccaccatctttgatgtaccattggatggagaagacctagctgcatttccttgggaccatcctccaccaaaagaagcaatggattgctgtttgtgccatgagacaatattataatgacttgcataagattttccacgtgacacttgctgattttttctctttgtatgcattgcttgatcaactagatcttgcaaggtatggtatgggaacatctcgacaaatccagaaatctcttcattgagtctgcctagaaatcttgccatggttgacttgggatcttctctgattccagtccacactaatagcaactccatcttcttaaaatattcatcaacagatttctttccttccttcaataattgcaatcgatttcgaagatcacgttgatagctggaaggaacaaatcgcttcttcatcacttgcttcatctcttcccatgtattaatatgtcttagtcccaatttaagttaatgttcttgcagttgattccaccaagtaagagcataaccagaaaactcgactgaggccaagttcactcggtgttgatctaaaaaattgtgaactctaaaaatttgatcacactgcacagc

SEQ ID NO: 168019 - DNA, 339 bp, Zea Mays
taaagcttagaaagatgaagcattttctccttgcgcttctcaagttgttggtggatgagttcaaggttgctgatctccttatcaagttcctcttctcggggtggtgggctagtggccttctcctggttccttgcttctctgatgtgagcttcattcccttgattgggattgatgggtgcaatgatggagctagttgtcattgctttcttcggcggcatggtgtaagctaatgtggttgtcgaatcaccgaaggtggtcgctaatgttggatacttgatttcaatcccctgaaggcgtcgagaatcaaggcaacacgagttaggaatgtggacctttgtc

SEQ ID NO: 168020 - DNA, 1115 bp, Zea Mays
agttcagtcactatagtcgaaatataggtggtatatagctctccaacattgctacagagcatagagtatgttaccatagggatttgtgagcaaatcaagcctaaacattgactgtcaggccaactgaatcctatttcgatggtactgtagtctgataaggatcagactgccagcgttggatcctcacggccggcgactcctccgcgtcaaccttcacgccgccgccgttgtgattcacgtcgtcggtgaccagataagaccgctcggtaaagccatgcgctggacggcactccggtgaaccccccagtacttcccctctaccgtgcggcttgagcagataagcccgccggggatcgccatcgctcggccttacgccacatatccgagcacctctgtcgcgtcaccgtgactctttacagccgttaaatcatcgccggtgagctcgccacgactgaggacacgaacccacggcgccagggtcctttcttatctccgaccgcccgcgttgttcgatcaaattgagcgccaccatcgaagcctcctataaattgagcccccggttagctacgctacctcatcgcaaaaccagagcccccaatcccaccctcaatcgttcgctagagctcgtgaatttcgaattccccctaattcggtttccgccaccgcaaagaatacctcaccgtggccagctcgattcaggtgagctcaagtccctctgctgcttgttctagcatccctaggtcctccttaagctcttcgaccccttcaattgaactagaccatcacctatcgccgggaacacattcctttgtccgcaatgttcacggtcgccgtggccagggcaaattaggttaccattcttcgaattaagttaggggaaatactcggggagggtttaattcggtgtatgccgctcgggagcaccggccgttgcataaatccgccggcacaacctcaccggagttcatcctccgcgctgccatcgtcgtggacttcgtgcggtaaagaaatagaaatccagggaccatactgcaaactgtcagcgactgtgttaaacagtaaatgaacctacttcagtttagccggtaagccgagggtccttctgcaagattgcc

SEQ ID NO: 168021 - DNA, 1448 bp, Zea Mays
ctgcccaccaactttccgggatggccttagcctggtgggacaccttcaacttcaccatcagagatgctacctgggcggaatttgaagcagctttccaggagcaccatgtgccccaaggacttgtacagcttaaggaggacgagttccgagaactgactcaaggcggaagatctgtcagcgaatatgtgcacaagttcacagagttagcccgctacgcgccagaggacgtcagtaccgagggcaagaagatggcccgtttcctgaagggactcaggcccgaactcaagacaattctggctagccaagacttcctcagtttctctcacctttccaacaaggccatgcaagatgaaagggcaaaggaggaagaaaaggggcatctcaaaagaaagttccaggttctccgggcacaacagcaggaccggcaccaaaagactcgatcatttgggtttccacccaaggggccaaacttcagtagaccagctggacccaccccatcgcggttcagccagcagagtcagagctctttccattctccctcagtggcatgcaaccaacccccggcgaatgcatgttggcactgcagtgaacccagtcacttcaagaacaactgtccgcaactgaagccaccaggacccgcctactccaactcggtgaatggccccaagaatacctcggcatccgcccccaaggcgccctcctccgtcagccagcagaacaagaccccgtacctaggaagggcacgagtgaatcacgtcgatgcccaggaggctcagcaagctccgggagtagtgctcggtgagttccttgttgaatttactcctgctaccgtacttttcgattctggagcatcccactctttcatagccactagttttgtggaaaagcatggcattccctctactcctctagagattcccttggtcactcgaaccccagggtccgaccttctatgccagctcaaatgctcccaagtcagaatccttttaagtggggtagtattcttggcagacttaaccgtcttgccatccaaaggaattgatgtgatcctagggatggattggctaactaaacacaaaggcataatcagttgcgcagacaagacagtcctcctcaccgaccaacagggaaagtcagtctcttgtcaggcacagccacccgccagtgacccaatgatgttcaatctagcaacagaaagtatatcagtggtagaagaattcatggatgtgtttccagaagaattaccaggaatgccaccagaaagagaagtggagttctacatagatctgatccctggaacggcacccatcgcaaagagaccataccgcatggctccaaccgagttagcagaactgaagcttcaaatcgcagatcttcagcaaaagggatacatttgtcccagctcatccccttggggagcaccagtcctgttcgtctctaagaaagat

SEQ ID NO: 168022 - DNA, 928 bp, Zea Mays
ggacgaggagaagaatgattggaattgaaaggtcagattactaaccttgtcctctttttaggtccctgagttgatctttcacccgcatatccttttgactttccttgcctgcatttttggcttcaactgacagtgttgtgctgacagccctgctatatgtaaggtccagacacgtagccatcttacgctggagtctatcatttagtcccctcatgaagcaattcttctttttcaagtttgtgtccacttgatcgatggcgtattgggagagatgattaaatttgttgagatactgcatcacagaatctcccccttgcttcaaacgtatgaattcttccagcctcatctgtagcactccttccagaacataaagttccctaaatgctagtttgaactcttcccacgtgagctggtgtcccataggttgaaaggaggaaaagtttgcccactaggtgctggcggggcctcttaattgttgagcgacaaatatgggcttccatatctcagtgcatcggatgagcctaaacttttgttccatcactcgcacccattcatcagtttccaagggttcctccgccttgacaaagagtggtggacgggtctcggagagctccagatatgtggtgtctcatggtccctgaggttgacctcttcctccgtgttgttgaaattgatttcccaccatttcacgcaggaagcacgtgttgttggtggtagcgttgaccaaggcagcgatagcctcggccagggtaggaggtacaggtggtggattgggagtgtcctccccgctgcaggatgtacccaccccatcatgagcacgagttcgcgatgacatctgaggaagaaaacatcctgaattattacatgccaacacaccacctttattacattgcggaacagtaatgattacacatactcagtatacaac

SEQ ID NO: 168023 - DNA, 729 bp, Zea Mays
ttagaaaacaccattttctgtatgcgtgagcatgtaacatcaacatgagtcggacgatgactcgtatcgattgctctgttggtaaggtttagaaaacacccttttctgtatgcttgagcatgtaacaccggtatgagtcggccgtaactcataccgattgctccgtgacagtattcgcaggcgaaaacaagaaagagaaaaaataaagcatgtaaaaagacatgtagagaacatttctttattgagtttgatgctttaaagtacaagttcagggtcatcattttgagatcatgactcttctagctctatgggtagaacttatcgaggtgctcgatgttccacgagtccccgattggtgttccatccatctgagacaatttgtaagatcccggatgagtgagttctgtgacaatgtatggcccttctcaagggggagacaacttgtgccgcccctctcctaatgctaccctacgaagtaccaggcctccgattaaaaacgctatgaaacaaactgctctgttgtggtagcgccgcagagtttgctgatatcgaactgactgaatcactgtgttcaaccgcttttcttctagcgtattgatttcttcaagccgagttgcttcttctgctatatctttgaacattagtcttggtgccccaaatgctaagtccgcaggtagcactgcttgtgagccatataccatgaagaatgggtgttatcctagagtgctc

SEQ ID NO: 168024 - DNA, 437 bp, Zea Mays
tttttcttcaaagcagcttcgtaactttcgactttattttctagatctttgatggtagcttcgtttttctcgtcttcaagatcttgttgtatcctcagcactttacttagtagtatactctggcaaaacaattttcgtcagaaaacatcttaattcaaaaaataataaaaagttaagagttttaccttaaaattagcgtagaacaagctaccggcgatatgctgtcgctggtacctgcagaggtccgcctcaatcttcggcaggccaacattcttcgagaaagtcctaacgaccttggcctcggttcgattccgaaggcatcttagtttcccttcattgactccgccaaactgtagagcccctggtttgtacccacaggatacagcatatttctttagctcttctttttcagtttctgataactcttgtcctagtat

SEQ ID NO: 168025 - DNA, 403 bp, Zea Mays
caagcacgacggcgcggagcgggcatgagctgggttgctcgccggcggcgctgtggctcgacgatggaacggaaggagatgacgcgaatgataaactgagaagaaaaagggaagagaagaggctcaccaggatgggtatctcgctgaagaccgggaggggcgggttctggtgcagtgcggtcgtcgacatgagcggggcgacgaaggcgatgtgctgcgtgggccgtgggagagaagagcggggctagtttggaggagggtcaagcgggcgcgctggcgtttgaagggtgtcgaggacaggcggttgccgagatccatgtgacgtgggtaggagatggtttggaagatgaatagtgtccctaacgtgcaggcccgtggtgcaggaacatgtgagacgctcgac

SEQ ID NO: 168026 - DNA, 579 bp, Zea Mays
cacgaaatgatgtgggattgagccgatacttcacgaataggtttatataggtcaatatgagtgaagtgtgtgcttggtttgaatttaggcgaagaaataaggttttgggcactcggctcggaaacgatcgcgcaaaacgggaattttggtgaaatttaagcctgggatctcggattggcgtgaaatttggcaaggatgttgctgaaagtgttgtgaaggtgtctgaaaaatttgggttcaattggagcaagtttggctggtttgggcatttcaccgagcacgtggtgtgcggggatttagggtttcggtgaaaagcttatttggggtggaaaacccctcccgaaggagccaaggacctgcagggacatgtaataggggcaaaggaagatattccaccaactggattcatcggatttcacaggatgttgaaggatttgcaaaagggtggttcactgcctagagacagagagagagaaaggcaggggaaccaagagagctgctcaccgagggggaagagctcgggcgaggtcgccggagcccagcggggacggtggccgccggtggctggagatcgccggc

SEQ ID NO: 168027 - DNA, 517 bp, Zea Mays
aatcttcatcttcgtccaccaataatgctattttagatcatgatacatcttagtgattccgggatgaatagaatagcgactaagatgtgcttcatctaaaatttgttggcggatttcatcattcttaggcacaactatgcggttgttaaaccatacaacaccttgatcatctcttctgaagcagttggctttaccggcctccattttctcatgaatgtgtttcattcccttatcatttctttgtgcgtcaattgttctttgcaggaggactgactcaagcttcaagtgatctgaagttccatgttgaatcatccccaggtttaacttctccatttcttggcataacgtaatgtcagaagtcttcattgtaagacaatgatagaaagccttgtgacttaacgcatatgccactacattagccttgcctgggtgataatgaatttccaattcataatctttaatcagctcaagccatctcctctgcctcatattcaactctgactgggtaaagatgtac

SEQ ID NO: 168028 - DNA, 983 bp, Zea Mays
caacagactccgcgcgcgggcgaaggagacccctattccaccggagctggcgcaactactcgcgccgacctcatcgggtggttacaactaccccccttggacggagtgccgacccgggtacatgacacatcgccatagttccccatcatcgtgttcggtcgagcggaaccaggggtgagggagagagaaaaatagctgttgccgcggcaggggaaaaactcggttagcaccgtcgggaggacccaaaaccctcccagaatcttcgtcgcggctcatggagggcgtccctggcctcgtcgcgcgggaatggcgactggaaccggtgatttcgcatcggcgcccctcttcacctcggatccacgagttgtcgtgtgttgcgctactgccgggacttctgatggcatgcagggagcgtcaccagcttttgtggtagccggtgcgcgattcggctggacgtggggtagctcggggtgagcgcaattcatcgtcggagtggagtcggtgccgtcgatccgctgctcgccgcggagagtatcactagcgcccaaaactacggtatgaatgcctcctcgtgcctcgcaatcctctattaggcgcgtagaaaacctcgtctaatcaatttggtggccgaaacatggaacatggttactccggcgaggggcgccgccgtgctcttgttcctgggagctcgggtgctagcgtgggagagaagaagacgcgtgagccattggatgtggagcggacgagtgggattagaagtagtgttctgatttggggtaatgaatcggagccgtagatctcagatcctaggatcacaaaagcataccggtttagtaaagacttcaatctatttgcatccgtccgatggtgatccaacaaccgtggctagctcataacccttctcggcgtcaatttcacaaaagaacccctctgtttttagggaataaacccgccatccaggttgactgttctctgtgtcttag

SEQ ID NO: 168029 - DNA, 300 bp, Zea Mays
gtaacaaagctgcttacgtgcaatcttcgtagtcacggtcaaaccatcgtcattttcaacctgaacgaatctacgctcaccacaaacagtacacttcttctcacccgcggtctccttccagaaaagcatacaattattatcacagacatcgattttttcgtagtccataccgagcccagataacaactttttggactgatacatgtcctttggcatcttgtgattctccggaagtacatcactgatcaagttcaaaagctccttgtagcagttgtttgagaatgcaaacttagacttaat

SEQ ID NO: 168030 - DNA, 420 bp, Zea Mays
tgaagtttgctctgctctcatcagttattgcttcgcctgcttttgacattggcttcagtagctccacatagcatctttccggaatcttcatctcagcttggttcttcccgaccttctcatttcttgcttcccagaaatgatgcaatggaagaccaaaccaccaactcatttttatcatgaattgcttgaattaggcgtgtctcgtgctctggacagttgttgaaacaatactacggagtactgacatgtacaaactactggttgctggtactagcctactggctactaggggtatcccgtgcctgtacagttggagcaatactactggcatctaaagggccaatgagcaggttcttttcagtctgtgctgtagctaacccgtgatgtagactttactattaggtatctacctaatgcaga

SEQ ID NO: 168031 - DNA, 437 bp, Zea Mays
gaaagaagaagggctcaaagtggctaagtgtgttgttgtctctagcacatcggatcggtccggtggggcaccggaccccatgcgcagataaggcagccgagggacttggcggcttggtgcaccggaccgcctacagaactcagtccagtggtgcacctaatcgcctacagcgaagacagaggtctcaggcttttggctaaaattcaccataccccaagggtctggcgcaacatctacctcggcatgcgaccgttggccaacaactagatgacatgtacctgaatccggtatcgcaccagactgatccggtgtcggccagaagaggaagtccccaatcagaatcccgtggaggaaggcgaccgttggaggtccgatgtgcatcggactggtctggtgccctagtataccaaggcagcaagcaagtgtagtacaagcat

SEQ ID NO: 168032 - DNA, 560 bp, Zea Mays
gtccatcacttagtatggctggccaatccagtcatcatccccaaggcgaaagggaagcttcagatgtgcatcgactacaccagtcttaataaggcttgtcccaaggacccgtatccacttccacgcatagatcaaatcgtggattctacctccgggtgcgacctcttgtccttcttagatgcttactctggtttccatcagatccagatgtctagggaagataggaagcaaaccgcttttgtaacagtggatgggctttactgctatgtcgtaatgccttacggtctgaaaaacgccttgccaacatttgtacgggcgatgagtaagactttcggggacctgattagggacagagtagaggtatacgtcgatgacatcgtggtcaagactaagagagggtcgaccttagtggaagacttaacccttggcttcgacaagctgcgcgcaacccgcacgaagctgaacccagacaaatacgtctttggtgtctctaccgggaagttgctggggttcctggtttcgcatcggggcattgaagcaaacccaaagaagatcaaggc

SEQ ID NO: 168033 - DNA, 754 bp, Zea Mays
cgttagtagggtatagtggtcaccctgagtcgagtaagcatgcaggttgacagtaaatagtttgagtgcctttgagaatgaagtctttttattcatgatgtatttcccaatttacagaatacaaggtcgtcccaatagcttttgaaatctagctaggggtaaaacttcctgagatgttctatattccatgagttcccgattttcgtgccgtccatttgagtaagacgatatgatccaggccgagtgacttctgctactatgaatggcccttcccatagtggcaacaatttgtgccgtccctcccccgttagaattcggcggaggacgagatctcccactgtgaaggatcgatgtcgtatggccttatcatgatagcgccttagagtttgctgatactgggctgactgaatcaccgtattcaaccgttcctcttctagtatatcaacatcctccagcctagtagcttcggcttcagctatgttttcgaagatcaatcttggtgccccaaacttgagatcagcaggtagcactgcctccaaaccatagaccatgaagaagggagtgtttccatgcaaagctcggctgggttgagttcttaggctccagaccacataaggcaactctctgattcactttcctgtgaacttttcattcttgtcgaagactttctttgagtgcttctagtatcattccgttggctctttctacctgcccgttggctcttgggtgcgccaccgaggcatatttgatctga

SEQ ID NO: 168034 - DNA, 685 bp, Zea Mays
atcttatcagcattcaccccggtctttgggagattgtgcgtagtggatttcaactaccaaaggaccccaagaagcccacaaatgatgagctagcagctgtccatctcaatggccaagccacaagtattcttcttagtaccttggatggaaatgaatacattagagtgatgaatgttgaggtggcaaaacagatttgggacactttgcaccttgcacatgaaggtgtagataaagtgaggatggcaaagattgatttgttgttagccaagctaaatgggtttgtgattgctaatggagaagggccacaagagatgtttgataggttgatgacattagttggtgagattagaggctatggttgtgatgagcttgatgatcacaaggttgtgaagattatgttggaagcatattcaccaagaaatgagaccgtagtgaccttgattagagataagaagaagtttgagcacttcactccaaatgatgtgcttggtagattgttgacatttgatatgcaaagagttgaagcaaatgagagaagaaagcttggtgagttgcaagccaagttggatggcatgaagatcaaggatatagctctcaaggcaaacaagacaagcaagcaaagcacctcatacaacgcaaagggcagcaagcaaccatcaacaagtcaacccaagaaagagaagga

SEQ ID NO: 168035 - DNA, 315 bp, Zea Mays
ttcgaagctcttcttctctctcccaagtagcttcatcttctccatggtgactccattgcactttgcacatctttatcaccttatttcttgtaactcgagtcaaagtatcaagaatcttgataggatactccgtgtaagtcaaatcaccctgaacactaagttcctcctttggtagctgttcctcagggacacagagacacttcttgagttgagacacgtggaatacatcatgcacatcagatagatgatcaggtagctcgagctggtaggccatctccccaacgcacctaaagattctgaagggtccaataaagc

SEQ ID NO: 168036 - DNA, 528 bp, Zea Mays
gccgcatcctgggctcgccggtgctgcccttctacaccagtggggtggttctggggcttcgcaagcacgcggggaagctttgcctggttcgtgcgcatcggggttgtggccggagcctgggtaatttctcgacggaatttcggcctccatggtgttgccaccgagcaccgcagattggacacgtgatcgcataacagaaggtaaataaccaattgaatcacttccccatgtcctttcaatcgtatttacgcaaattggggcggaaaccaggcaacgggggcaccggtgcgtcgtgctccggcgggattccgccgtgcagactgggcggcgccgccgcgctctggcgtcgggcggggaagacgcctcgtcaccgtcagatcacttgtgggcggttgagattagatcgacccataccccttcactcgattaaatctgtgtcgtcggttgcaggctttgcggtcgagattgggttacggcgtggatgcctcacgaccatcagatcttaatctagcggctgtcgttggatac

SEQ ID NO: 168037 - DNA, 1313 bp, Zea Mays
gggagagagtggagtcgctgaccggtggggccggtccgtcagaggtggcacgggcgcgcgaagctgggccgcctgggccggggaagagagggggggaaaacgcggacgcggcgcgggttgggccagaattggcccagccgagggcgggagggttttttctttttctgttttctatttcttttcttttctttttctatttttgtttcttttttttatttctttctcctttgaatcaataattttctaaatgttcttgagtgatgaatatagtctatgtgaggtgcttctatcatttcaagtgtatgcacatgatgagatgacctaagggtggagtttagggagaaaataaaagaagggggggtttaggagattagggttccaaaccttgggttgggatttttgggatgttacaaacctaccccacttaaaggaatttcgccctcgagatttagactggatttgagaaaagataagggtattccctcctcaaggagtcctcactctcccaggtagcttcttcttctccttctttgctccactgaactttacagagtttcacttctgaggtgcgggtctttcggactgctgaatcaagaatctttactggcttctcacggtactaaagatctttctgaatctgcactgcctcttcttcgatgtgactttccggtgcttgcaggcatttgcggagctgggatacgtgaaacacattgtggatgtcaaacatggactctggtagttcaaggcggtatgctgcgggtcctactctgccaatgatgggatagggaccaacgaatcgtggtgctagttttccttttacttggaacctcctgacaccacacatcggggagaccttgaggtagacaaagtctccttcctcaaatctgagttctctccacctgttgtccgcataactcttctaccgactctgagcttcaagtaatctcctgcggatcagggcaactttctcttccgcctctttgacaaaggcaggtccttctagtgctttttcccctatgttggaccacatgagaggggtccggcatttccgcccatacaatgcctcgaacggtgacatcttgatgctggcctgatagctattgttgtatgagaattccgcgtagggtagactggattcccaacttctatcgaatgctagtacacatgctcttaacagatcttcaaggactttgttgactctttctgtctgcccgtctgtctgagggtgataagcggtgctgaaatctagcttggtgcccatagctttctgaaggcttgtccagaatttggaggtgaactaggttcccctgtct

SEQ ID NO: 168038 - DNA, 467 bp, Zea Mays
gaagcaaagaagaacgcacactaagcagaggactaagatgcggaagcaagcgtagttagccaaacaaacctacgaccacgaccgcctccacccgagctaggtcacgaacggcatcagtgcaacaggcaatcccagcggcgtcggcaagaaatcagatctggaagacaaggaagacggaggaaggagatccgaaaaatgcgaggcagagacggggaagacgaggaaggaggtaagaataacaaaaatggatgctaggtaccaaccttatggccgtccggaggaggactgtgaggatgcccatgccgcggcactgctgcgacgtgccctcactgtggagcactgcttcggcgggctcagcgaggagacgcatcggaagccgccgcgcgacggcccaaatcctctcccgaagccgctgcacgtgggtccgcgcgtgacctgggaccggcacagcagcggcagcagctccc

SEQ ID NO: 168039 - DNA, 340 bp, Zea Mays
tgatccatgacaaagaggagagaagaaacacagagatcttggcatgggcatacctgatctaaatcggagtgggcgggatcggcggctggagcaaaggcggagattgggaacaacagaacaaatcacgttctctggaggcaagccattgagagagatggcagaggagagcgcgcgacatccagtggcgtggggcgagggtgaggacggggttggcggcggcggaattggggaagaggaggctaggggcgaatcgcgatgacttcggggctggggcagcgggatcgggatgcaggggcggaaaattgggtgggcagcatcggacggctgagattgtagaact

SEQ ID NO: 168040 - DNA, 609 bp, Zea Mays
ctgtcttcatatttcaaacttgagtccgccaagagagcctctaagttaaatcttacctggcacgatgcaaaaaaaaagataaataataatgtcggtgtttcgaaccttactccgacaagtaaatttgttgtgtgcgttccaggcttcggacggtgtgcacggtaggcgcaagatttatactggttcgagcagaatatccctacttccagccatcgacgacttgcactaccgacaccattgatgatcaaaactcatagtacgagatacaagcaggcgatagagagagaggagaggctcccaagtctcttattcgtggtggagttggttacaaaatggagtcctagctaagtcttggtttggtggtggactccggcctctgggtcctcctcctgtccgtcggtccttctaagcatcttctcgtctagggttcatccttgcgtctatcgtgtgcccggggcccgaatcctagccaggggattcaggttgtgcccgtccaacatggagcctcgggtcgtcctcctccttttataggccaagaagggggtcggccaacaacgactgcctaaataaagagccaacggacgacagtaaaaccgatagttctaccat

SEQ ID NO: 168041 - DNA, 421 bp, Zea Mays
ttttaacttatcacatttagcctttgacttcctaatgatttgagtgtattccttaagcaagtcagctaattcatcataggaaggtgaagcaaattcatcatcactatcactatcatcaataatatcattatcaatttgtaccttccgttcacctttagccatgaggcatatgtgagaagtggatgagggtgatggtgaagagaagtccccagcgatggcggcaactttttcatcattttcttcttcacttgaagaagacctgcttgaggactcaatgtcagtgagccagtcaccaacaatgtatgcctttccatttttctttttatggaatcttttgtgtttcccatcctttctcttgaagaatttcttttcttttttctcgtcatcactttcatcatctttcttgcccttaaacttgttc

SEQ ID NO: 168042 - DNA, 1018 bp, Zea Mays
tcagaaagaaagtatttgacaagaatgaaaagcttgctggaaaatggatcagagagctgccatacgtggtttggagcctaagaactcaacccagtcgggctctgcatggaaataccccgtttttcatggtttatggatcaaaagtagtgttgcccgccgacctaatcttcggggcactgaggttgactttcgaaagcatagctgaagcagaaataactaggctagaagatatcgatgtgctggaggaagagcgattgaacacagtaattcagtcggctcagtaccaacagaccttgaggcgctaccatgataaagtcgtgcgacaccaatcttttgcagtgggagacttggtcctttgccgaatactaacggggaggggcggcacaagttatcaccactatgggaaggaccattcatcgtattagaggtcacacggccgagatcataccggcttactcagatggacgacacagaagtggggaactcgtggaacatagaacacctcagaaaattctatccttagcgaggcctcaaaactcttgaaggaacattgtactctgtaaatgtgaggatttcatcataaataaagttttcattctccaaaggcattcagactcttgacttacagctgacttcgattgggctggacttgaaatcaacacgcttacttgactaagggtgaccactgtaccctgccaacagagcaatcggcttaagtcagcgatgactcaagtcggtgcaacatgctcacgcttacttgactaagggtgaccactataccctgctaacggagcaatcggcttaagtcggcgacgacttaagtcggtgtgacatgctcacgcttacttgacttagggtgaccactataccctgctaacggagcaatcggcttaagtcggtgacgacttaagtcggtgcgacatgctcatgcttacctgactaagggtgaccactataccctgctaacagagtaattggcttaagttagcgacgacttaagtcggtgcgacatgctcac

SEQ ID NO: 168043 - DNA, 624 bp, Zea Mays
cagcacacaagccaagaagatagcccgtttcttgaaggggctgagaccagaactcaagaccatcctcgccagccaagatttcctcagtttctcgcacctctcgaactaagccatctagttggaaagggcacgagaagaagggccacctcaagaggaagtttcaagttctccgagctcagcagcaggacaggcaatagagagttcgatcttttgggttccctcccaaagggccaagctttagcaagccaatagggtccgctccgtcatgtttcagccagcctggtcaaagttccctccacacccatctgttgcaagcagccaacctccaaccaatacttgttggcactgtggagaccccagtcactacaagaataattgtcctcagttgaagacatctatacctgcctactccaactcggtgaatggccccaagaatgtttcagcacccgcctccaaggcaccctccaccaacagccagctaagcaaggcccagtttcatggcagggctcgagtgaatcacgtcgacgcccaagaagctcagcaagcccctagagtagtgctcggtgagttcctagtcgaatttaccctcgctactgtactttttgattctggagcatcccatac

SEQ ID NO: 168044 - DNA, 468 bp, Zea Mays
aattaacctgctcccacctatgtttttgagttgcgaagtctaaaatacttgctaagttttatactggttaaccaacttgttagatgactttagttaagctcgtggtcacgatgaactgcttgttgtagtctaaatgcgtgtggttatggtcgcgggtaaaaatttagtagtgctcatgtggtgtctaagttaaaaggcgaactagtgggtgaaaagcgtttcgacatacatgtataccgaatttgattattgtggtgaacgcgttgttaattgtgtatggtaattctaggcacgaaatgacttgaacaaaatttataattcgactgattagccctcttttgattaatttagctctaacaattggtaaagtgttagaataattcaagtctctagaatgcggcaattcttgaattgtataggagctgaaatttagtagttgctgttttggactgcacgcagcgatttccc

SEQ ID NO: 168045 - DNA, 682 bp, Zea Mays
gccgagctccggcgagctagcagaccggccgaacggggccatgaccggcgctcccgagcggcggacaccaaatcggacgtaccccgagcatttcccctaagttaattgcacagttggtgagctatcaagctctgtccgcgtgaaccgaatgggtggcggacaattggatgtgttcccggtgattggtggtctctcagttcgaattggtgacacggtaagcatcacagagctatgagagtgctcaaatgaggaagcaggggacagggactgaccggaaaggggctggcggcggtgaagctattcttcgctgtgcggcggaccaatttggggaaattcaaaattcgtacgccctggtgaacaattgagggtgggattggagctctagtttcgtgatgatgtagcgcagctaaccgtgggctcaatttataggcagcttagacggtggccgggaatttgaagaaggacgcgcggcggtcggacgtagaagaaggcactggcgcacgtgaatccgtggctaacgtcgtggcaacctcaccggcgacgatgggacggccccagagagtcacggcgacatggtgtaaaggcagagccacgcggcgggcaacgacgaaggcttgacgacggtgagcccctttatccacgagcggtgagcaaggggaggggtatcgcggctagccggagt

SEQ ID NO: 168046 - DNA, 439 bp, Zea Mays
gacaatgtactctgtaaaatgggaaatatgtcatcaataaaaaaggcttcaagaatactcagtttgttcatgatcgacctacattcttacttaactcggggtgaccactatgccctgctaacggagcaatcggcttaagtcggcaacgacttaagatggtgcaacatgctcgcacttacttaactcggggtgaccactatgccctgctaacagagcaatcggcttaagtcggcaacgacttaagacgttgcaacaggctcgcgcttacttaactcggggtgaccactataccctgctaacggagcaatcggcttaagtcggcaacgacttaagacggtgcaacatgctcgcgcttacttaactcggggtgaccactatgccctgctaacggagcaatcggcttaagtcagcaacgacttaagacggtgcaacatgctcg

SEQ ID NO: 168047 - DNA, 479 bp, Zea Mays
gccggtccgccgcacggtggcggatgtccgcggcggtgatgccgccggtgcggttgctgggcacaataggagggggaaagtggtgccttgtgaccgtgagagtgtggcggagcttcgagcacagtttaattggaccaaggatcactagaaagggcgaaaggagctcaccggagcgacgggggaagcacggcgacgctagctcgattggctcgggggaaggcggaggagatggccggagctggtgtggtgaagacggggctcgggcgggtccttttataggcgcccgggggagggagagggatggaggggacggcgagcactgacgagctcgccatgatggcgggaatggcgataacgtcgattgagacggctcgggtaggcgggggtgaggggacagctcgggtacagtggcggggtggtcgctgaggttgggcgagccttaatggcgaggcgacggggcgagaggggctcggcggcgg

SEQ ID NO: 168048 - DNA, 327 bp, Zea Mays
cgctaaggtggcagtgtcacaaggtcgagtttcgaggtaaatccatgtcaagatcgtgtcaaacagtggagagaggtttccaaactttgtcatggtgtgttccaggaaatttggcaccactttgctatttggacttgtttgatttaagttttgaaaaatagagaacgcggttgatctttgaaaaggggctgaaattcagatttctgaatttctgaatttttcccaagtgcattagtttaggggctgatttagggattttgaaaaattcaaatggccaaactttcttactatattttgttggttatttagtgtactaaaatttgttat

SEQ ID NO: 168049 - DNA, 621 bp, Zea Mays
gggatggtaggcgacgtgaggaggtgtggcctaggcctggccatggcggtggccctgatgctcgttgcactggttgtcgatgcaagcggcggcgtagagacgaggcagaagctgcctgctggcagtggcaacgacgatgaccactcagccgttcttagccgcctgtccaacatcattgttgcatcggggagctagcctgcgcacgctgatcctgtcgtggtgaagcggtgcggcagcgtcgctgctccgccgccttgctacaccagcatccaggcagccctggatgacccaccataagaagccgaggaggacaagtacatcgtgcatgtgctccctggcgtctacgatgagaccgtcaacataacaagaaggaacgtgatgctgattggcgatggggtcggtgccaccgtcatcatagagaacaagagcaatgcaactggtgtccccatgaacatgacgcgacagtgagtgagtaactctggcgatcgatatttcactgcagttgagttgtcatgcatgcatactgtaaattagaactattaatttgttgctgctgctgctgcagatgccttgggtcacggcttcatagcatagaacctgacaatcagaaacatggcaagg

SEQ ID NO: 168050 - DNA, 297 bp, Zea Mays
cttagccgatcactggggcaagcgtgtggaagcttacgtagatgatgtggtgatcaaaaccgaaaatttggagaacttcatcgaagacttacagctagttttcaacagcttgagaagatatagatggaagctcaatcctgaaaaatgtgttttcggggtaccagccggaaaattgctcgggttcatcgtcagcaaccggggaattgaagctaatccagataagattgaagctatcatgaagatggaagcccctcgatcacagaagaaagttcagcgactcactggatgtatggccgc

SEQ ID NO: 168051 - DNA, 445 bp, Zea Mays
cactagtgagagaggtgccaagggcttggggcacatgcgaaggccttgagggtagcaatcgatgtgagaggcatcagtgttaggggtgtgtggagagggagatgttaggggctagggcgcatggatttggggcggtgaccgacgagggagcatgaggctaaggggtgtgtgtggagaaggaggcaagcgcaacgatgcttgcccaatgtcacctaatacagatgggtatgactatattgggaaatgtcacttctagttatagtccgacgccaaggaattaaagttctaattctaaatgccaattccatagacattcaaacaacataatttagagaacttggtaccaaccccaattttaggctccaatatcagcatccaaataggacatgagacatcaagacatcaagaaccttttttgctatatcaggtactcgctcgaaaccaa

SEQ ID NO: 168052 - DNA, 522 bp, Zea Mays
acttaagttatatctcggtagagcccacattgcaagagcaaatagtcagggcacaaattgaggataagggtgttcaggttatcaaagacatgatcaagctgaaggcagaaaaatacaagtgcttccgtcaggacagcaagggaattctatggtttggagatcgattggttgttcccaaggaccctgagctcagaaagaagatactggatcaagctcatctttcaaaattctccatgcacccaggcatcaacaagatgtaccatgatctcagatccttatactggtggaccaggatgaagagggaaattgccaagtatatatccgaatgtgacacctgccagaggatcaaggctagtcatttgaagacagcaggccctttgcaaccccttcccataccatcttggaagtgggaagacatttgcatggattttatcataggattgcccaatacctctaggcaccatgattccatttgggttattgtggacagattgaccaagactgctcatttcttaccagtgc

SEQ ID NO: 168053 - DNA, 555 bp, Zea Mays
agagaagcaacacagtgtccagcaaagatctttgtgtgctgtcagcattaattattcacataatgtattccttccattatgctcctgggcccgcatgttggagctcagcatccttgtatgtacctcccttaaactataaaagggaggggacacagcgttacaagggagacggtgaatacaacttacggaaagtggatgtagggtattacgctccagcggcctaaaccactataaaccctcgagtgttcttgtgatcatccaaaattcaccaatcaggcgagcgcttaggccccctcctcatcttaggattagggcaggtgcaagatgaccggggataagaagcatgtgcgcgtgtaccagggaagaagacgcacggtgaaggagataaggaagcaggaacaagggctgggcatgcgtggaagataaggcttcaaagaacggcggcgcgtacagaaaaatcagggaaggggcggcgtaggataggatccaatccctggatatttttctctttctatttttcattctataatcccttctccgaagtatctttagcac

SEQ ID NO: 168054 - DNA, 419 bp, Zea Mays
gcagaaaagtggatcagagagctgccatatgtggtttggagcctgagaactcaacctagccgagctctgcatggaaatacccccttctttatggtttatggttcggaggcagtgctacttgctgatctcaagttcggggcaccgaggttaatctttgaaaacatagcagaagctgaagctactaggctggaagacgttgatgtactcgaagaagagcgactgaatacggtgattcaatcagcacgatatcagcaaactctgaggcgctatcatgataaggccatacaacatcgatccttcgcagtgggaaatctcgtcctccgccgaattctaacgggggaggggcggcataaattatcacctctatgggaaggaccattcatagtagcagaagtcactcggccggggtcatatcgcct

SEQ ID NO: 168055 - DNA, 388 bp, Zea Mays
gtccgacccctgttatctcgcatcttgaccgaggagagagccgaggccaggtcaggggctcgaacgcgtacctaggcctatcttgtggatgtgttgtcagagtcgtagttgttggaatagtgataataagtatggtgaaaagcacacggtaagtcgtcccgtatggcgtaaatcagacttatcaccaaccccacagcttttgtagccatcctgttatcagctgtctctgcggaggggttggtggcgttgggcgtcctttcgtcgatgttatctgggtcgaggccatgctcgggcaaaagcgaaggttcctctcgaggccatggtcgaacctgcgctggggcatgcattcgtgtagggagtggttagaacagtcgccgatgtggcctcc

SEQ ID NO: 168056 - DNA, 457 bp, Zea Mays
gatacgacgaggtgctcggatacgtggcataaggctgtgcgacgacggtttaccggcgagcccatcgaactttccaccgcggcatacacggtacggtggccggacttgtttatggccggagttatccacggcgaggatatttatgtgacccaaagtgttatccaacttagccaagcccaaatcgcggcaacagcagcacgaatcgcggcggtaggtcaccggcggtgaggaccgttgagctggcgatctgatcccttttggtctactgtaccatcgcgaactgccatcagtgcgcctgacagtcaatgtttgggctcaattttctctcaaatttccatggcaacctatccgaggctctgtagcaaatttgtagagctacaaaccagcaacacttcgactataggggttgaactcatttgagcactggatcaaggttgaattcacactcaaagttgac

SEQ ID NO: 168057 - DNA, 769 bp, Zea Mays
ctgacttgacactggcgtatctcctgacccgaagcatatcttagttcgggacacacatagaaaagcaaggatttggagcagggaagagaccctacatgggatccttgccaagataggcacgctagggtagctaaacaagcgcttggataggagcagaagcgataatccacgtgttcgatcgcggctgacactcaggagcgtgctctgaccgcgcacgccacgagctacggtcggctcgactgctcgcctagcctcagccctcacctataagaagccccagcccttagctttgccctcctgcacgccccatactttttactggtgactggacgccggtaatcgctagaacaccgagggtggtgccatctgcaagctcgtcgacgcatcgaccaccgtagcctagccactccaacctatcctcgtcaagtctagctccccggctagtttccccagagactagcggagtttccaagccactcagaccaagcgctacctcgccagagaagccaaaccacctcaccggacttgcccttttcgatggttccctcggtctaggtaatctaaccatccattcatcgattctttgcacacatgcactccctaccactcagtgaacctccctgtgtggtctgattgagctctatcgccgtggtatggccggtgcaaacatcaccgacgagctccatcgcctgagtccgtggacaaaccagctccaagcaccatcgatgccgacccgtacctcgacgtgaccgccagaggctccccatcc

SEQ ID NO: 168058 - DNA, 303 bp, Zea Mays
cggtgctgaatggagcgtgttgaaaggggttggagcatgccctcatcagcagctttaacaattaggccattgagaacatccataacgatgatgaaaagaagaggggatagcgagtccccctgccgcaggcccctcttgtgttgaatgtattccccaggtactccattaagcataatttgggtagaagaggtcataagtagcccactaatcacatctctccatatggggccgaatccaactttttccaacacttcaagaaggaaggaccaagacaccgaatcgaaggccttggaaatgtccagc

SEQ ID NO: 168059 - DNA, 406 bp, Zea Mays
ccaccaccgactctagcgaaggtggtctggtccggctgaagtataccttcagattcagggagaaatttgatgagtcgaacgacgactggctgaagtgtatcgaagctacaagtgatgaactgcttggagcatattccaaggtggaagataatgcactgtccgcagcattcggaggtcggggaaaaaagagactgaacagagtttttgatgccatcagattcgtctaccccgattaccgctacccgctacggggacaagagaaaaagaggaaaactgctgcttcggccaccccagttgagcctgtgccgaagggcaaaaaggtgaaggttcttacccaccggccacgttatattgaaccggtcgtggtacctgagtttagcgagggggcctcttcagctgctgaaac

SEQ ID NO: 168060 - DNA, 1142 bp, Zea Mays
gcagtcagattgatgatgtccagattgtgagcaacgaaagcatctaatctccttgaccagtccttcctggattttagaatccctaccctgctgcatcccaaatccgaaaacagatctcccctctctgaacatggctgagagccttgttccttatcacgattttcttggtttttgcttcccctaccccctgtctcattcctaccaaaagaacgattacccccaaagccacccctggctggcacaaaattcccacgccctctccagaaaccacccctccgagaaatcttgttacctataaaacttcctagacgatgatgtccaatttcttgctgatcctgctcggtctgttcccctggggccctctagagcttggcccgtaggtcttcctccctgctaaactccgaatccagcaagtcatcatcttccatccaatccttagggggtcgcttctagctattccccctggttctcttctccacgccatccctccttccttaaccacctgagaaaaggatcgctcaaatggtgtcggtggctcaactctcttgatacgcctagcactttgccctagccggcgtacctcttctggtcttgcctggtatcctttacctgagagaatgttggtcctgggcacccatagccattttgagttaatgggcctccaggaatgcctgaacacctaggccagggagaggcccatacaaacgtgcttctcctccccaacttccaaacgaccatccccggtagaaccctcttccaccttggaattcgataggacatgttgtgcatccgtgcatgaatgatctatagcaactattggatttgccatccttctcacccttgagaaagtgatagccaaatcgtcatcaaccctgtcatcttctagcccaaactccataaccccaaccccctaacggcagacgtcgcgaacaagctgacaccccaaccgtgcacaaacaaggagacaacagaactcaatgaacttgccagctgcgaacttaccagtgggaatgacctttgcgccgcacgctgaagaccccagtgtggaaaggcagagcgctaccaccatcgaacttgcaagctgcgacgctgaatcccccttcgcctcgccggctcccttgttcgccctagctgcgatggcg

SEQ ID NO: 168061 - DNA, 702 bp, Zea Mays
aaatcgattataggaaatgattaggtctatttccgtttcataaatgctgctcaacacaaactaaccctcatataccataccagtcacctccatatcgcctactagcttcccctcttctctacaaacacattctaggcgtcgtcgatctcctttccttcccctttatttgcttggttggtccttgcccgctccatcggcactactgtgatgtataagacaagggctcactgatgctaactatatctagattctcgaagatctatcgtgcctcctccgttcttacgacacaaatatgcttcctccgatcttgatgaggcggcgacactaaggtccagcgtgatggtgcgggtctaacgagctcattgggccgatacaacatgatcaagtcctttgccatgtccagcgagcacaacagggcacaactatagctcactcccatgtcgttctaggctcggtaccatcatgtcgtgtttagaggggctcgtacgtgttgtactatgtcattcgattaagcatatgtagatgtcgtcgtgctactcttcaagacaaagcaacatgttagatcgacatgcataggcgtgcaaaatttgtgaaggatcaccatcgatgtcgcagaggataaggcaccgagaagtatccctatatctcttttgatcttaacgcctaattctctctagctcttcagcaatcagttacgtttgc

SEQ ID NO: 168062 - DNA, 662 bp, Zea Mays
tgtcgctggagaaaagcagagtaccttgacattcccctcaaggacagcattaaggggtggcgccttgagtggttcattgtggagaatcactgcaagtccctcccccctcggtcagggaggtagccagatgtccgcacaccgagctggatagaatctccgaccccttcggagataacagaggctaaagtactgcttgccgaggtcttcttgctgaagggtagatgtctgactgctgaggctgttgttgctgattttgttttcaagaacatctggcctttaaaggacagggcctaccctgcttatttgtacagcggtgttaacgattctacccgggtcacaaacagaaaaattcccacagaagatctgatgagccgactggacatgatcctgaggggtagagtttcaaatgctggtgctcctgtggcctattcagcctagaacctaccaccacttaggccattttctgagtttgtgtccaaccctcatgctcgtgatggtagcctgggtcttagagtgcgaccctcttctgaagacattgaggctctgattgccccacttcggagtcttctagaggatgagaagcagactcattttgatatgccagctagcactgatgacgtggagatagatgttgtgcttagtttgctggctggggaatcatc

SEQ ID NO: 168063 - DNA, 376 bp, Zea Mays
tcagatcgaggatcatccatgggtaaaactagacaactggcatatcgtatagaggccggccgggaacacatggtggcctatgatcagtaccatgaaggtaataataaggagtaatgatcaagtttactactcatatcgcattcatggcggtgaggactgaggccggggtgatcaagttaagtagtatgttaatgtgctggtcctgatcttgctcctggacgaaattataaccagatcatggtactagttgaccttagcaatgcaatataatgcgcacgttcagcttcccatcattcattccatgcgaagcacattccatgcaaaatcatttttgggcccagaatctcttcgcagctaacaagctggctggtgctga

SEQ ID NO: 168064 - DNA, 309 bp, Zea Mays
ttgaatatgagacaaagacgatggcttgagctcattaaagactatgaactggagatccattatcacccaagcaaagccaatgtggtagcagatgcactgagtcgtaagacctcctgccactgtcttatggcgaagacctccgagaacactttgtgtcaggagattgaaaaactaaacctggggatcatccaacaagggactctaaatcagctaaagcttgagtcaatcattttgcaaagaataattgatgctcaaaaggataatctgggtatgaaacacatacgagagaagataagagctggagtagcc

SEQ ID NO: 168065 - DNA, 409 bp, Zea Mays
ttgctgccttggcgaaagtacttatacttctccattttgctgattaagatgctctttgatgatttgcactcccttgtcactgagttgggccataataatctaatctgacaaggttggctcaatggagatgtgagacaagataacagaaggaatcacttcgatactcatcttgttcagctcgtcacacagggtattaatgcgagagtccatcatcatatagttgcattgtgacttccgacttagggcatcagctaccacattggctttcccgggtggtagtgtacttccaagtcgtagtctttgatcaattctagccatcttctctgcctcatattgagatcagcctgagtaaaatctgtacttgagggtcttgtggtctgtatagatgttgcagtgggttcccatcaag

SEQ ID NO: 168066 - DNA, 792 bp, Zea Mays
tacatattgttgtaatggttcgtctgatatgatctttacgtgcgcatagaagttgacatgtctagctagagtccgctgtcaattattgggccaagtaagagtacttgagccatgtctatatgtatgtgaacctatagggtgacacacttaagggcaaataagcctaattcagattagatccgaaattagatagggctttagggttactgatgggcctcaaagttagaagaccaccagaatgcctatataatgaggatcaaggtaccgattaaggaaacctaattcaccaccagtaaatcagcagtggcccgcccctcgcccttgcctagcctccatcgcgaacctagcagttcagaacacgacgtttcctccctgtacgtgtggatacctcgggggtgctgcatctagagcactaggacgaatagcgcgaggacgtgaaggtcaccggtgactgcacaacattgctcgacgcgttcgtctacatcgagatgtctttcgctggcctacgcgtctagtggtaatttcatgatctataaccacagtagtttctagttttatggggtcgaaaattttgttttgcgctagtgtagcctccccataatccttcacttttggtgtcgattcaccgagaagtgagctaggtacttctcctctacccattccacatttttttcgtgaaatcttcaaactgtcgctgctcgtcggtcgataaactctcaaaagctagcctcatgatgttgcttatgaacacttagggtgatccttggaaccggccattggagccgatttaag

SEQ ID NO: 168067 - DNA, 467 bp, Zea Mays
cttcggtcaatctcaatgcacttgagcttgctggaaagctcatccagggtgagagtctcatagttgggcgactcgatgatcgctgagaccttcacctcccaaacccatcgatctagagcatgtaacaacttcagtgctctctcatgatcatcatagggaagctatgccttattggcactcatcttgttgacaatcaactagaaccgagaaaacatattgtctatggtgtctccagctaactacacaaatttctcgtactcccactggtacatctcaaacagtctggtcttttcatgatcgttgttctcatggaatctcttgagggtggaccagatctagtgagccgtagccaaatgtccaactcgccaaaacttagcaagtgagaaacatgagaacaaagtgttgtgagctttgttgttcgaatcatgaaacttcatctcaatcagagcgatccgagcactcacagc

SEQ ID NO: 168068 - DNA, 686 bp, Zea Mays
ccagaagaggcactccctaagttctggaatgcacttgggttcttagttagggataatcttgacatcacaattcgacattggaaagatgtgtcagttgatgtcaagaatcaaatatggaataagctattaatgaggtttttctacttcggggttcagaagaactcatgaaggaatacacgatgaagtagcttgcaatcaattttcgaaactggaggtctgagatgaatacaaaatttgcaaagaaagacctagacccgtcaaaaaaatataaaatctcagaaggtcagtgagcagtatttctagagcaaaggagcagccctgaattcatatctctaagtgaggcaaattcagaactatctaagaagaacaagtatcaccaccacttaggcacaggtggttacaaacatcaagtttctaaatggagacaagaagacaccgagaagaaggtcgcagggttgtcgatgctttccgagcaaagaaagagttcaaagacctgatgtctcaaatgctatcaaatcctccaccagaattgatgcaacagttggcgagtgcgatgtttgttcaatagatgaccactccacagctgcaaataattctagcagctcaactgccaacttccaccgattgtacaaccatcccaagctctgtcatgtcaatgggaaataaggtccgttatctagttgatg

SEQ ID NO: 168069 - DNA, 550 bp, Zea Mays
ccgagccaagaaatcatattgtgcatccagggtgagtaggtatgcagtgaggtgcacgactgtggggtcatcctcaagcagttgcttcccttccaatgcacgcatcctggccatccaaactggacggtctctctgaaagggcggaaagaatctgagcggtgtgtcggccacttcttcttcatagatctgacacagggccctcaatgccttgccggcgacgacttggcaggtgtctttgaatctgtgcccagcaacagtgacactccattccacatggtgtggactggacctaatgtatatagtcacgacacacttctctgtgccatgctcgacgaattcacgaccatcatactctagctgactcctgatttcgaggcgaactgtgcatgctctcagtaacttggggaaaccatcttcattctggcacaagctggtttggcagcggacctccatctgacttctgagagaagaaaagggggaagcatttttgaaatgaagggatgagagcaagaatttttttaagaaaatagtttggactcaaaaacttttg

SEQ ID NO: 168070 - DNA, 937 bp, Zea Mays
gttggagtcagtgggggcattttggttgcatggagacacaatcttaaatctactaggcagagcagaattgataaccatagtgtgtcggttcagttttgtaaagagaatgggactgcatggtggctaacctgtgtgtatgggccgcaaggggatgatgagaagctgctatttatgcaagaattaagagatatcaggactgcttgtctagggccttgtatgttggctggggacttcaatctcatctacaggacctctgacaagaataccaatcatttcaacagagctatgatgaatagattcaaaagattaattgaagacctagccctgaaagaaattccctttcatgggagacaatatacttggtccgaccagcaagtgaatccagttcttgtcaagctagatagggtgttctgctcagtggactgggaaatactatttccaaatgtcctccttcaaagtactgcctcccaagattctgaccactgctatctcatcctgggacttacaaataacagaactggaagatggcgtttccattttgaggccttctggacgaaacttgatgattttcaggatattgttgtggatgtttggaactcagttcaggctactacttgccccttcaataccttggacagaaagctgaaagaaacgacaaaaaaattgcagacatggagtgatagaaaagttggacatgtgagatcccagcttgctttagccaaggaaattctgcataggttagggatggcccaggatggacgtattctcagcccaactgaattctggcttaagaacaagcttaaaaagcaatccttactgctctcttcctttaaacgtactatggcacatttgagggcaaggatttcttggctaagagatggagatgtatatacgaagctgttccatttacatgctcgtcatcgcaaaagaaaaattt

SEQ ID NO: 168071 - DNA, 477 bp, Zea Mays
cgactgaggcgcatgtcgatatgcacgactttaccgaggtaaagcaccctgttttaccacgacgtagtagctccttcctcaagaagctaccgataaccgaccccgcccggtctataaaaggagggtcaacgatgacacacacaatacacacacacacacacaaagagggacgaatgagagatagacgtgtgcatagagacgaacccacgacgagagacggacaaatgaccacacgctggaggactatggacgctgaggagcacgttaccatgacacccaaggcttagataggttgagatcactagattcgtagtcctgaggccactccacgcataagagacttgggagcctcctccatctctcgtccgcttataacccctactatgagcattgatcaacaaatgtaccgatagtgcgagcctccgaagactgtaggcatgttctgcccgaattagtataaatctcgcgcccactaag

SEQ ID NO: 168072 - DNA, 1007 bp, Zea Mays
cgatccacgagctccatcgtaagaaacaaagtggggtcattcttaaaatcgactttgaaaaagcctacgataaagtgaactgggcttttgtgcaacagactctacgtatgaagggatttttcagcgaatggtgtaattggattaattcaatcatgacaaggggtcatgttggaatcaaagtcaatgactagataggaggaaattttcagacttacacaggcttgagacaaggggatcctctttctccgattctgtttaacatagtagtggatatgctggctattctggttaacaaggcaaaaaatgatggacaatttgaaggtcttatcccgcacctggttgacggtggtttatccattctgcaatatgcagatgacaccttgttgtttctagatcatgacttggccaaggcatctaacttaaagcttttgttgttagcctttgaactagtgtcgggtttaaatattaattatcataagagtgagttgttttgttttggtcaggcggagaatgaggaagacagttatatttgcctatttggatgcaaaaaaggggtataccctttcaagtatcttggaatcccaatgcattttaggaaattaagtaatattgactggaaggtagtggaagacaaaattgaaaggaaattaagtagctggaaagggaaactgatgtcggttggtggtcgtctagttctgttaaattctgttctaacaagtttggtaatgttcatgttgtcttttttcgaggtcccaaagggagtcctagaaaaaatagactactttagatcacggttcttctggcaaggtagtgattacaaaaagaaatatagacttgctaaatgggaaattctttgccagccaaaagaagtagggggtttgggtattcagaatatagacgtccagaacaagtgtctgctaagtaaatggttgtttaaattgttgaatgaggagggtttgtggcaaactttgcttagaaaaaaatatctgagtagatacacgctcaca

SEQ ID NO: 168073 - DNA, 290 bp, Zea Mays
gcttgctctcggcttccccaaagtagcccagctttttcatcataaccatgtcgtctgctgtcatagtagatttcccaaattcaatgtggctaggtttcattgggctcagaatactgttgtcctcctcacttttgttctcacttcctccttcagccacaatctgttcaacttcagcattggaggtaccttcggcaatagcctcctctgatgcaacaagacccaatcgcctcatcacttctgatattggcactattttggtcgctttggtctcatctccctcacgagacacc

SEQ ID NO: 168074 - DNA, 346 bp, Zea Mays
gaatgtccataattgttgcccatagtgcctcggcaacattcttttcagtgtgcatcacgtcaatgttgtgtggaaggagcaggtcgtcataataggggagccgagtcaagccagacttatgtgtccacatatgctgctcaccatatcccacaaaaccaccttctgtattggtcacgagcccatttatatgttgacgaattttggcaccagtcatcgttgcaggtgggcggtctgtcactacaacacctttcataaagttcttgatgtctaggcggaatggatggtcatcaggaagaaattgtcgatgtttatcgaaggacgaatatttgccaccctttttcaacca

SEQ ID NO: 168075 - DNA, 473 bp, Zea Mays
aggtgcgacctctggatatcgcgcaccccaagccgtctgtgctccacaaggtattctctgaccacatccctcaccgccgggaaagtaatctcatggtcaggtaaaggttgaatgctgataatagcccagtcctcatgcaatggcgggaggcgcctagttactgacctgatcataatttcccggtgaaggaccaccgaagcgctgaagcccggtgggagaaagggttcaggatcaacgcgcctatacgccatcggagcaggaaccgaggatcaccaaccaacggacggagacggagcaggttggggttttggtgaggtgacgcccaaagaaagcgtcaaggactgaaggggtgtcgattcagattttttaatacctcccgggcgaactcctcgaagcaactgaatttgggcggtccaccgatcagagacaccacaggggtgcgaaaccaggtactgtgatcaggagaattttgg

SEQ ID NO: 168076 - DNA, 559 bp, Zea Mays
cgggtggttttgccacagctggtatcggagcaaattccaccacagagaaggacaataaacctgaataccaattttcaaaatctaaaacttgcctagaaactactacggatcgtcaggactagaccgctagacctaggacgaaaggccttaggcatagagggagaaataggtggctaactaattaggcctcgtgggcccgtacttatatttctaaggatgccctaaaaagcaccctatttttggagaggcaacgttacttccagcatgcatgcattatgaacacaaagaggaattaaaaacttgagctaacccactttctttagaaccatccgggctctctttttctttttccttccaccataatctttacctttgattcccttccacagatgaattcacccacccccgccaatggaggagacactcgtttcagttctgacttcctttctcgcgatggctttccttccatcttgtgggaagtgcttaactccgctggttaccctacgccccctttgtacacggtgcagttgtatgaggagcatcgggtacctcgttgtcg

SEQ ID NO: 168077 - DNA, 618 bp, Zea Mays
cttccatccctttttgtgggggtccttcactacttccagttgaagattcagaacatccatcctaacaccattctccacatagtgtgcttcatcacactatgcgaggcgttcatgggatcgatccatgctagaagctgcgacagtactactttagcgcacgagtgactccgggccgtggtgactagctatacgttcgttctgccaacattcaactccgcgtcggccggaagggagtacttcatgatcccgcttccctcctccgtgtgttacaaaagtgagtggttctatgccaagaatgtggttggtagtgccccgcctttcaccggccgtgagtcgatgtcgatggagaagtggcactacgacatggaggcactgttcaagagcaaggtagagcatcttatgaaggcggttgctacgttgaagcaacaggggatcaccagtgctcagctagtgcgcactttcatgcagcaatgagttcaacctctgatagcccgtcaaaggctaatgtatgagtactccattgttcatgaccctgacagtcattccaccaagctgctcgcattgtccaaaatcaaagcttgggtcacggtcatcacgacattgcagtcgagatccttc

SEQ ID NO: 168078 - DNA, 692 bp, Zea Mays
tgcacagaggcccctggctgtttgaaaaccccgtaaagaatcctttccactatttcactgtctcactgacatctgcactaaggcccctccctttctatttcttcacaaggtgagatccccgaccacggatggcggagcagtggctccggcgagcttatcccggccagaaaacgcaacagctcggcccctcctttgctcgacccctaattcaacccccagcgacacgaatccctcaactaattgcacaattccaggttgggaacactctgtccacgacaacggcgaaaaccgagaacaaacaaatgtgttcttggtgatctagggcggtctagttcaatccaatgagtctatgcgtaccagaggacttgagggaggctagaacattaatcaaggaggcttgaactaacctacagaagtctggtcacggcgaggtgttcacggggtgcagaaaaccgatttgggggaaaagaggaattagggagctatggtggctaatcggaggcaggagcaggtgctctggcttcgtgattacctaacggagctagtggtatgctcaatttatagtgtccaagggcagtggctcctaattttggaatggcgcgctggtggccgaagagaaggaagagtcaccggagtaggttatcgtggcagtcaccgtggcaaggcctccggcgatggatgggcttgcaaca

SEQ ID NO: 168079 - DNA, 682 bp, Zea Mays
gtgttacaatattttccatcaaaaggtggtattgaaaatttaattcttcctagagagtcatcattttcacgtacctcacgtcgtggaggtcgaccacccatgccatgacgattgtgtcgttggtgtcgtcgatgcctattagatcagtcatcatgctcggtgtccgccgaatactccatatcatcatctcttgttgtactagcaatggaaccgttaccgtcattatcaccttgttgcctaccttcacacccaaattgttccatcctatctaattgtgtaataattgctgcaagagaggtgttagtagcagcaagtgtttgttccaatgtggtcaatgtgttgttggcaacaatttgtgctgtttctaattgaccaatgcgctcattggttacttgaacatcttcgttgagagcatctgtgtgcaaccttactagacgttcaaaatgttgaatgatgcccgctgttcgtggagaatgtggaggccgcgcatttgcatcctctgccatggttagtgcaaaagagatacaaaaacaagtaatgcagcctagtagttgctaggatctggatggataaatactacctcactagcaagaaatcaagctcttacaaattctcaccacacaatacaggaggtgccgacaaacagcaagaacaacaacaacggtggcagctagcacaacct

SEQ ID NO: 168080 - DNA, 491 bp, Zea Mays
tcgctggcattttagaggaaatggccgagtgatgcatgtgatctccgcttttccgagttatgatctggcacttttgcgcctgacttatcgagccaactcatatttatgctgacatatccccttgagttccaaaccctaattctcgctttttcctccgccgcttcttgatttcctgagttcttgagcccgtccgcttcgcttgagagattgcaatggctcctaagaggaagagacagagtgatgatgttccaattatcccgccaatcgatcctaatagccaacttccatttgttggcaaccacatgtccattgtctctgagtctgacctcttacacctcgttgaaactagtgttcttccgccaaaggagatgtgttcatggcgaatctggcgtggggttacagttttgacagaggatacccacgaagctgtcgtcttcatgccctttctcatccgaggactagccctgccggcctctccctttttccgtggc

SEQ ID NO: 168081 - DNA, 719 bp, Zea Mays
ctggactgggcctcaaatttagagaaacccagggggctcgtggtaagaatctgcagacacagagcacaaccccagaggatggcgggttgaatcgctaaaaggtgaggggctcttttacaatttcggctaggcgaagggtacggtgcgatctgaaccgttggatcgcaagccgagcgcccagattagattgacaagtcaatgaaccggtataatccgccatacgttggattgaagatctacggtcagtattacccggacgcgcgctctaatccaagccgctagatctcgatcaaacgctcctctgctcttccacccaatcggtatgctatgctctaatctgtaccgtcgtccacggatccgacggtcacggacccgtcgtcctccttcgtgcccaggtagcggcggcgcgctcgcgccccgcggcggagcatggccgaagacacccggcccgattatcctgtacctcgcgcgcctaacccagcgatcctacgcaatgccggggccgaagcaaacctacggaggaaagactcaccaagaattgtaaagctgaatattgtgaccgcagcgcacgacggaagtcatccccggcgagcaattgaccgacaccatggttctccaccgagcccgaatactccgcgcccaaagtccgcatgatctagcgaatccccctgacccatcagcactagtgtgacggccacaagggcgtgaatcggtcgcgg

SEQ ID NO: 168082 - DNA, 633 bp, Zea Mays
gtagtactccctgtggtcgacacacaaatggagctggtctatcggtgtgagtgagtaggtaagcacaagaaatgctggtggaacctcaacaacctcctccaattttgtccagttcataaaggtaatcatgttctcattgaaaacaggcttgtacaaattgttcgaggctctgacccggaagtatgtgatgttgtagacgactccttcttttattagaggcttgaacttttgtatgactggtgggaatattgcagcatggataccgtttccctgcacaaagcagcgatggaggaaacaacaacataacaacaattaatctcataccagtaccagcttccctttaccaaatagataaccgtgcagatgttgtacctctttgtcaagcagcaccatatcacaatggagcaactttgcttcatcctgaggatcatagaaatcccataaacgagaaacacgagcgcatatggtcacagaagtgttcccacgctggagctccgggatcaacacgtctcccatctacaaggtaaaacaggaagaaaaaacataagagcaaggacatcggaacccatgcatgaaacagcatgtgcaaagcatgacaaaaaaacacggctctcgtaccaacctatacatagc

SEQ ID NO: 168083 - DNA, 636 bp, Zea Mays
attataatctcgcccgttttgaagaaatggcatccgggtgcattgatggtcattagcgttttgcctgtgccggtcgtgccctcactccgttcactctgttacttccctggccaccgtcttcgagtgtcttctattctcccttccttggtcgtcgtcttcctcatctctggctctctcatctctgttcgtcacgcactgcggtgcctgccctgcccttcaacatctgtcgcccttccccagtgatctacttccgccgagggtggatcctgtgccaagggccattcccgtgcctccgacgctggtgagatctcgtatcttcttctgtaaccctagggtttgtagctatggattccgacatggaatctgccgctgagctatgtgcccataagttctccgcggccgttgatgcagcccgtgacacattgagtgcttctgctgccgcctgtgtggtagctggtgatctctgtgccacaacatctgtaggtaaccatgtggtttctacgcttgatgttcttgaatccattgtggaggcagaaaaaagtgctatgtgttcttatcaacaggcgagtgcagctgtcgtttgtgctcaggagacattggtcgaatactatcaggtttgtattctgaaacttttac

SEQ ID NO: 168084 - DNA, 465 bp, Zea Mays
gtcgatgtattataatagtgattgcgttaaagtcgtttgaagtattttgaattcatgacgaagatggttgcattcgacataggaaaagagacaggttgtgcgataaaaaggctagattgattttataggtcgtatgaaaaacgttctattaagtgtatacgtcgagtatgttaaatggatcctatgtatgtagagtgtagtgtattggttaggcgaagaatttttgaatagacgagtatgaggcgtgcagttaagtcgagattgaagtgcaaatcctactcaatgtgatgggattcatggttatataggagttataattgttgatgtgacgagtagtttagcgaatgctcgtttgcgtggaggatgtatcgttaagacatgagtgtcggagttcatttatattagtggtcgcgccacattgattgaagtgtcccgagtacatgccataatatggttgtatgcgag

SEQ ID NO: 168085 - DNA, 487 bp, Zea Mays
aagaaaggagaaatacacctgttcacttgggccaaaactccaccacccggcccacttacctaatacgcccgcgcagcccaactccctccctgcggcaccgacaggcgggcccgcctcgccaggcgcactctcacacgtaccgcaccctcgcacgtgcgccgctggcgctaacaataggggggtccaccggtcagtttccgtactctccttgcgcgcctctcgttcgctgcgggtgggtcccaagggcggactcgttctacgctagcgctctctctctccgctcacatgtgccattgggtagttgggtcgggttgttagttgtctctccgcaacgaatccaccgcgcatggcggaggcatgctgttatccgcggtcaacttcggttcacctggccgctgacctcttacaaaataaagccgacctgcgcgcataatggccaagccaacctccgcgagccgcatccctgacctcgaacccccaatcccca

SEQ ID NO: 168086 - DNA, 912 bp, Zea Mays
ggctttaacatgctctgtccacgctgacagcgggcaagacggatggtcaaacgcgttcctggtgatctcggacttcccagcttaatcggatgggtcagcgagtaccaggagcaagcaagggtgctgaaacaagaaagcagagggcaggatcagacctgaattgagatggccacgatgaggtcacaaggcacggtgtttctacggtggtggaaacacagattgggggcaatgagcgattcgcggttgttggtggacaattgaagacaagcgtgggtgctatggatgggtgattaccctatggagctcacggtgggctcaatttatagcaggcatgagcggtggccggggaattggacgaagacgcgcggcggtcggagaaggagaaagttactggtgcagttgattcgtggagtataccatggtggactcaccagcgatgatcggatggctaacgtgagtcatggcggcacggttaaaggctggaggcatggcgcaaccgtggtgagtgtcgcggattccggtgacggccgtaaggccacgttgccggcgcaagtgggcaaaaggtagagcgaccccggtgacttgtgtttatctagggcaagatcttttcacgtcgagcataatccactagctcaagacatgaatcgcgacgaccggcggcgtgaatccggacgcgcagatcatcggcggcgagagactgaaccctgagatatttagtgtactgtaccatcagaattgcaattcagagcccctggcaatccaagtttggcattgattttctcctaaatttacatggcaagttgttgatcggccagtagcaaagttgttgtctaacgatccagctataaaccgactgtggtaaccatgctcaaacatccacgggatcatcttcaaaatggcccccaaagttca

SEQ ID NO: 168087 - DNA, 515 bp, Zea Mays
tgcggatggcagagagcaaggagacgtggtgacaggtacgatttcagttgattcgtttgtggcccatgctctttttgactctggcgctagctattcgtttgtttcggaggattttgtgtcgcgggctggtatttcggtgcagaggttgggtcacccaattttggttagttctgctaatggctccattagtagttgttcagtttgtcaggggtgttccatcattcttgctgatgaggtcttttcggccaatctggttgtgatttccttgggggcattcgatgttatcttgggtatggattggttatcccagtatcgcgtagttatatcctgtttttggaagacagtgttattgcaggcgccgtcaggtagggaggtggtattcttcggaagttcccctaagttcacgttatccttgttggcgcaattgcttccggatcgccggtccaggaagtcgggaatctttttctccatggtggtggagggtgaggctgccttgcgggtgcagggcatccggg

SEQ ID NO: 168088 - DNA, 493 bp, Zea Mays
ccgaccgaatccggcgggcgctctcgccattaccgcgggctcggttgtggcggccgagctcaatggctcacgcctatttctccggggggttgcgtcgcccgcgctcatcacttccattggtgtgtgggccctagtcgtcaggtccatctcccaccccaagttctgttggccgctgcaacaaaccgcgacgaattcggcgttgcccggtcgtgcaccactgcgcggactccgtccttgccgctataaatctaggaccaccctttgccaactccaccacggttcatcacgagaggaaaacctgcgacatgagccatggcggcaagcagagaagataaggagggaacgagagccaccgcaccttagggtctctccacattactagcgctccctagaatcttagccctgatgctttgttggatcgcaccagtactcacggtactctcgcttagctcaccgttggtctgggtggccggaatttctcgctggtggtcgg

SEQ ID NO: 168089 - DNA, 521 bp, Zea Mays
tgccgcttcaattcaacctgctcctttggggccattcgatacagagccttatgaatgggctacgtacccggaatcagcttaatctcaaaagttgcatcgcactccggaggaatgcatggaagctctgccagaaacacgttagcaaagtcacacaccacccggatgtcctgcacccacaaggcagcctcaccctccaccaccatggagaaaaagattctcgacttccaggatcggcgatccggaagcaattgcgccaacaaggataacgtgaacttaggggaacttcccaagaataccacctccctacctgacggcgcctgcaataacactatcttccaaaaataggatataattacgttatactgggataaccaatccatacccaagataacatcgaatgcccccaaggaaatcacaactagattggccaaaaaaacctcatcagcaataatgacggaacacccctgtcaaactgaacaactactaatggagccattagcagaactaaccaaaattgggtg

SEQ ID NO: 168090 - DNA, 1094 bp, Zea Mays
tgcgaacgagccctttcactatttaacacagtcactgacactttgctgaagagccctccaacttctaagtcttcacagggagaagtccacgacggcggtgggcgcagggacgctccggcgaggttctagaccggccgattggggctatggctgggttcttcgagcggcggacatgaaatcggggtcaccatgatcatttcccctaacttaattgcgtttataatcaactacggagctctggccacggtggtcgtgagcatcgcggcaagacaactgtgttcccggcgaccagaggactcttagttcaattcagtggctcggcaagcatcgtagacgcataagaaggcttaaacaagagagtagaggggaggagctaaccggagtatggctggcgacggtgaagcttgtttcacggtggcggaaagagatttgggggaaaacgcaaattcgagctcactggtggatgattgtggccgattagcggtggctagttagctgacgacctcacggagctagtcacgggctcaatttatagggaggacgggcggtggtgatcaattcagtcgagccgtgttggcggccggagctgaggaagaaggcggcgcggtgaattcgtggctatcgccgtggcaagctccccgtcgacgatgggacgggtatagggagtcatggcgacgcggtggaaagttaaagccacgcggcgcaaggctaggaggcggcggtcaccggcgttcttatcgatctccgccgcggtgatgcatgtacggtggccgaacttgtttatggccggagttatccacggcgaggatatttacgtgacccaaagtgctatccaaccaagccgagctcagatcacggcaaccgcagcacgaatcgcgacggtaggtcaccggcggtgagaactgttgcgctggcgatctgatccggtgcttttactgtaccatggcgaacacctattcagagaacgtgacagccagagttgagggtcgattttcttccaaatttctgtggcaacacaaaccaaattctgcagcaaagttatagatctactaaccagctacaagtttgtcatagatgccatgggcagattcatg

SEQ ID NO: 168091 - DNA, 765 bp, Zea Mays
cttggggagagcaaggtcttgctctcttttatgaaacccaacagctcagaaaggattaatgtctttgacatgatatggcaggaaattattcatgcagcctgctttcctttgaaggggtgtcttcatgctccattcattacgaagatgattgaggtcgtgacccaattcagatttgacaaaggcacccgacatcagtcatacacccctttctggattgatcccaacaatccagttggacgcctcaggaaagccccctccagttctcgtggtcatacatctgcgggtccgtctgctggtgctggtgctggtgctggtgctagtgctgctgctgctggtgcctcgcgcccttcccctggccgcggatctcccacaccacgtggtcgtggtcgtggtcgaggtcgtggccgtgggatgggtgcccgcctggcccacgggtttgcagctttcttctccatgtgccgaaatattgctgcagatgtctatgaggttgctcgacgtcagcgggagaccgacgacaacctacgtcgtcaagcttccgctttgggtactcccttcgcccctcgctctcctgatgtacctctccaccctcctcctccagatgtcaacgagtggtaccagcaggcatatggggtacctttttcaacagctgatgacgtcgaagaagaagaaacttattttgatgatccggagcagtttgtcccgcccccatatcacggggatccgggccaatcgtcctcttatcctccgccccaggacccgtctggc

SEQ ID NO: 168092 - DNA, 658 bp, Zea Mays
atttgatgctggaaacaatagctggagtgcatacttgagttgttcacctccaagagcaataaagagaatccctgcacccgctccttgcagctttagcgagccatcaaagtacattctccacacttcagcaatttttgggctatttgggacctggtgctcagtccattctgatatgaagtcgatcggtgcctgagtttttatcggcgtgcggggctagaactctatgtcgtgagctctgagctcacatgcccacttggctatccttccaatagcttctttgttgtggagaatatcacctatcggaaatcctatgactactatgactttgtggttgtcaaagtagtgttagagcttgcgagcggttagaagtaccgtgtaaagcagcttttggacttgaggataccttattttcgagggcctgaggacttcggtgatgaagtaaactggatgctgcactgggtatgcatgtccttcctccgcccgctcgactactaacatggtgcttaccacgtgagtcatgccggagatatataggagcagatcttctgttggctgaccatgcgtagcttggcacggcggcttgagtactggtggtgttgtcaagaacttcttcaatgccgctagagcctcctgtgcctctgtggtccactgaaacttg

SEQ ID NO: 168093 - DNA, 476 bp, Zea Mays
aatagttcataccaaaacataaaaaaaaaatctgtggctcacttggaagccatcttgattcttgatagtgctttcctctagagtcaaattgcaagttcctacacgaacacacgaattagttacagtatgataagtcaaaaggtccaacatatctggcatctcctccataaggtcaatggcatctattacataagcagggatcacgaataaggccttgaatagctcagaacaggtagctaatttgatgagcttcgtctttcacaagaagagcacttgaaacattaccttgctgagatgccctgactagcgctgagttaatatctgtgtgaactgcactatccaaagcctgcgccagtgaactctcaaacattttggactcagtgtccaaacacagtccattgccaactgaataaaaaaactcagcttttgagaaaccagtggcattatctctcttggtttccacccctaggtaacct

SEQ ID NO: 168094 - DNA, 2734 bp, Zea Mays
ttccgcattctgttcaaacaacgtcaagtttcagaccaagttcaaacaagacaagatttggcttcagacgacatatatgctgtattggttttgctagtattctatccagtttttttcatgggaaaaaagttaggttgttgtatatactgaataaaagaagatcatttgcattgcattacgccactaccccaatccaaatggcaacggccctaccgaaactgactaataatagagtgtttcttctgggttgctccattcacggactgacaggccatgggggcctcaggtaatctctagtcttagccaggccttcgccgtgtcatcaatttcacctctgttgcgtcctcttcaagttaacaggatactataagttagctctgtggcctaacgcacattcaccagaagtcttcacaagaacaagagcctccactgaaatgatggaacctgttggcatctcggaccacaatatcccgttcaaacagcttggaaaccagcttggtgaactcgtggcagtccccgcacaccctgaggttcttggctatccttataggcatgcctgggcgagtgctgatcaagccaaatgctattgcgatcctctcgctgtgcttatgtagcatatctatcttctcctcttcgctcgtatcgtgaaggacaaatcttgtgtcctccacgtacccaccttctctgcgcagcatttccgttatctcggaaagcttgagatggattgcctccgagtctcgatggcagtaatctcctgaggtgaaagtgtggatgttgttccctatctcaatccaactgcaagctggattttttctcaacccccgttctgccatcctggttctagtttccttggcattgttccacttgcccatctcagcaaaaacatttgatacaagaatgtagttgcctgggttgtcaggttccagctcgagaagcttattggctgcaaccacggcgaggccatagttcctgtggacacggcatgcgccgagcagcgcacaccacacagctgattttgggtccataggcatagtcttgatgaactcgtaagcctcctccgtctggcctgagcgtccaaggatatcaaccacacaggcatagtgctcctgccatggttttaacctgtacttgctcaccattatatccagatagtgtttaccctcctcgacgagcttcgaatgactacaagcatacaacagagcaagaaaagacacatgatcaggagtcagaccagtctgcagcattctcttgaaaagatcaatggcttgcttgccatgtccatgcatcccagtagcattaatcattgctgtccaaagaaccacatctttacatttagcccgttcgaatactctgatagcatagttcatgcttccgcaacctgaatacatgtccacaagggaactaacaacaggaccttctataggaaaattccttctgataaggaagccgtgaacctgttttccttttgtcagcgatgacaaaccagcaatagccaccagaatactgactagtgccacagaatcaggttgaatatttgccttttgcatctcagtaaataagaaaacagctccatttaaccgtccgttatttgtgcaacagtttatcatactagtccaactaacaatgtcctttttctctactctctgaaataaatttagtgaatggtcaaactctccacactccccatatatatctatcagtctattctccagtatcaaatcaagcaacccatttctaatggcgtaacaatgcacttgttttagcagcgagatgcttttcaaaccgcagcatgtttctaaaatacttccaatcatcatagaatccaccataatcccttctttctgcaactctagtatcatttccagtgcttcagaatgtcgtgaactctgagcaaaacaagcgaggattgttgtccatgatatgtgatctctaatgcccatgctttcaaatacctttgctgaacactctatggagccacactttatgtacatgtccatcaatgtattcccaacctgtaaatcggtatgaagcctctgctttatagcatacgcatgaaactctcggccattgtttagcctactcaaatgccccaatgcagaggacaagctcacaacacaggcatgatcaggctgaaaaccgtgttgaagcatttcaccaaaaaaatcaatggcctccgcatagaaactgttttggacgtagcaggacagcatcgaattccacgatatgtagtctttctcagcaatctgaccgaatactcggagagcactatccaccctgccatatttggcgtacatgacaagcaaagcgttgcactggatgttcaactcactgccgcatttgaggagcgctgcatgtaactcccttcccaaactcagcagacctagctccgcacaaacttggagcaccgcgacggacgtgtaagaattcatagggaacccggcactctgcatccctcggaacagcgccagagcttccaaggtcctcccgttctgcacgcatcctgatacaaccgagttccaggacgcgacgtcccttgcgtcctgctgcagccactcgaacaccctcagcgctgaatccaacaggccgcacttggcgtacatcccgataagcgcattggccacgagggtgctcttatcaagtccgaccttcaccgccagcccgtgcacctcgcccccgcagcgcccgtccccttccgcgccgcaagccttgaggacggacgcgagcgtgcacccgt

SEQ ID NO: 168095 - DNA, 838 bp, Zea Mays
attacctttaaaatttcttatacttcggcagcagaaggcgttgaaggagcttcctcttctacctcatccatctttggctcgggagttgcagtttttctcttcttcgaagtcgccaccttcggctcaggactggattttttcttcttcagagttttttcgtcctctttaaccatcctagcagcatgtctgctcagaacactaacaactctcttcctttttgccccttcggcacctttgttgagacgctcataatcagggtattcgaaattcagagcgtccattactcggttcaaccttcgttttggtcgggtaccgaaggctgcagtcatcaattgatgttttttttggtgtaattccacaaaacttcattgcacactgtcttaatcatttccagccactcttggcaaggctccttgaactgtttctcaaatttaaaacgataaggcagtcgcacgagctcaagtgccttctttgttccttttagcttcggcatgctaaattcactcaaggttggagacgttctgttagccaaatattcttgaactagatctctagtgctgatctattcagccaccaccctgaactctgctacagcttgttggcatggcgaccccgacgtcatgcggcacagaggcctagtcagtgcgaagcttagagtcatcggacacataaccatttgcatcagcttctctctcttcttctcatcggccttgaaataaaaccattcactcttccagccggttggccacttggtacaaaaactgaggactggagccttcatatctttgcgatatgcaaaattatagcaaccaaaattttcatggagcccgtcttctct

SEQ ID NO: 168096 - DNA, 637 bp, Zea Mays
aaagaactgcagggtgctatctaaaaattcccggatctcagtgtaaggttctttcaactgcttgggactgcgggtttattattaaattatccagggactctttaacaaaactagtgcgccgaaggggtatcgggtggttagagtcgtccgatcagaaagcaagggctcagattaaatcttttcctcgcctgaaccggtacacgatgattaccataggatcggaaatccacggccgttatttaatggggcgaaggggtatcgctacgatttaatctcgaccgtatattgcaagatctacggttcccaagtcatattccacctctcgtctgaaccgtggggcgagggaaaaccacgacagttgcgctattgctgtggtaggcgatctagcatcctggtggttcctactggcgtgtctagggaatatacaggaaataggaacggcgaatctatggataggaaatttaccggcgccaatacgtagaggaactcggccacggcgcaacaatccgactacgcactccttgtcgtgaatgattttccggccaccaggttccttgcagcgctcgggcgatggtgcaggctggtgatgactacaatggctccctgtggacgttcttctctcctctctttatacacg

SEQ ID NO: 168097 - DNA, 442 bp, Zea Mays
aaaaatttgtaccgtaatagagtctagctgaactctgactgggcgatattacacatatgctaggcacaccattaaagcagaagaatggagagatacagaacatgatgaaatgagcattgcattagacaatacaacatcatgggaaggcacaatcgaaattgcaagagtttgccaccaaattagctgaaacaacaggtgcctcgtacaaaaatatattttgcagagataagcagacagggaaagtgagagcatgagcagtgcacttgtcaggtaaatggttgctaaatggctacggtacggtaaggatgggctgtacataaagcaaattttcgaatcggcacatgggttgtaaatatcggagataactatgtgctatgcaggtaggatttaaaggggagaagagacgctaggttatgtcagccatgtacgtgagagcaagatt

SEQ ID NO: 168098 - DNA, 435 bp, Zea Mays
gaagattttgtgagcttaggagtgagataaatattttttattctcgaaacatggagtgaaatattgcacacattgcttatttgttatacctttgatcaacaagtgctcttttaattggtacaatttcaattgttcatatttgcttgtaccaaggttcaaatcatagaaaatcatctctggaccttacaagtccaagtgcataagttaaacaactattcaacacttgtatacacacattcagggggagggtggtctatagattgaacttttaggactaacaatgttttcaattttattatgtgtggtctcaaattgaaagggaaattgagattttgagcaaaggaaagcgcttccgctgcattttcggtatcaaagaccttttgcctcgttccatgcctcattgctattatttaacctctagttgtcttatcttat

SEQ ID NO: 168099 - DNA, 429 bp, Zea Mays
gacactttctgtcgcatgtgatttgcactaggagcaggatagcagatgaggtcaaacgaaacgatgatgcgcttgagatgggaaaatggctgctcgacacggttgagaacttgagatggcatacgagcaatcaagcaggggtcactaccacttccggctataaataagagataaataagagatgagaccattatctcatgagacagccatgcaatgtcgccaaggatttaggaacaaatagtttttttgtcattaacgacaacattgcgtcgtggtttagttggctatcacgtcagtctaacacattgaaggatctcctggctcaacatttttttcccttcccttaagtccgtgttaaagaaactgcatcatgcaacgctggaaattttgctaaacaaatgacggatttgcatcacacagattcacact

SEQ ID NO: 168100 - DNA, 500 bp, Zea Mays
ggccatttgcatgctgggggctggacatgatcggacccttcaagaaagctcagggaggctatactcacgtgctggttgccattgacaagttcaccaaatggatagagtacaagcccattgcctctttaacctcagccaaggcagtggagttcatacaagacataatattcaggtttgggataccaaatagcatcataactgacctggggtccaacttcactagctctgaattcttcgatttctgcgaacaacggagtatccagatcaagtacgcatcagtagcacatccaagagccaatggccaggtggaaagagccaatggaatgatactggaagcactcaggaagaaagtgttcgacaaaaatgaaaagcttgcaggaaagtggatcagagagctgccatatgtggtttggagcttgagaactcaacctagtcgagctctacatggaaatactctgttcttcatggtttatggttcagaagcagtgctacccgccgac

SEQ ID NO: 168101 - DNA, 671 bp, Zea Mays
gccgataggatctcaaatgaagtgatagctacctgaaaatctcacaagagagaagatccaagcaggataggagacgggcacacgggcagacgagatcactgaaatgacagaagaagtgagcacatatttgtcacatagtcataagtatatgaaatatgaataaatacatacaccgagagtgaagacacaaaaactgggcgatttggagaaacgagggtcaaatgactcgataacgacaaattgtgccataggaggtttgaaatttgaaaggaggcatgaaatgatgtgggattgagtcgatacttcacagataggtatatatgtgtgaagtgtgagcttggtttgaaattttgcggagaaaacgaatttttggcactcggctcagaaacgatcgctataaataggaaacagtggtgtattcggtgtctgggatatcggataggcgtgaaatttggcgtggaagttattggaggtgtcatgagggtgctggaaaaatctggggttgatttgagcaattttgagtggtttgggcatttcaccgagcacctggtgcgcaggtttgagtaataacggtgaaacgactattctaggtcatgaaccctcctaaagggagcacaacacctgcaggagagctgcttgaacatacatctagggaccctcacaagtacttt

SEQ ID NO: 168102 - DNA, 912 bp, Zea Mays
ggcaagagaagatattaaggaagttattatgcgccccatttggtcccgcttcggcctccgaaggccgaaggttgaaattgacgaagccgctgaagcatgttagaaggcatttggttctgtctgcttctttattggtacgagagatttggttcaagagcacataacatacagagtatgaccgcttataaagagctgggaaatgccgaaggagaccatcaccgaatctagtgaaggtgaactggtctggctgaagtacacattcagatacgaggataaattcgatgaaccgaacgatgactggctaaaatgcatcgaagttaccagtgatgaactgcttggatcattttccaaggcagaagacaatgcattatccacagccttcggaggccgggaaaaaagagattgaacagagtttttgatgccattggtttcgtctaccccgactaccgctatccactgcgaggtgagggaaagaagaggaaaactgctgcttcggccactccagacgagcctgcgtcgaagggcaaaaagttgaaggttcttacataccggccacgctatattgaatcggtcgtggtgcctgagtttggcggggaggctttttcagctgctgaaccaagagaacccattcctcctacatagaaggctgaagagctagctataatgccgaaggcaccttcggttgatctagctgagttgaagactgataaggataaggctgaagagtcaaatattggagaaacaaaagtgttagaaattttaagcccttcatcagaagtaacagcgccaaaggcacaaaaaagttctgccgcaactcccaagaggagaaggatggctaatgtactagatgtgttagaaacggtaaagactttgaactctactccttcaaggaaaactgccgaagcctcgaaa

SEQ ID NO: 168103 - DNA, 692 bp, Zea Mays
gttttgacccaagaatcctatagtgagtttgtagactgatgtttagtgaacaaattctgttaagaaaggttgctctgttcttaacaaaaatccagagataaagagggaagaaggtagtcggttcagacaagaactgaagatcaagcactgacaaatatctgatgaacgcgataagatcagcggcactgtggaattggatgagctcggatgaatcgatggggaattaatccgggatggataacttcaaacgtggtgcgattccatgaatccagtcgagcgtggccggagttagtcaccggcgtccaccgtgactcagttgattttcggtgcagtgtcatccatgcctcgatctccctcactatgtctctttcctatgtggtaagcatgcgctaacgaagttatccgtggccggagatcgctagccggactatcttggctataaatagcactatgaactacggcgagggatgcacacctccactcagtgagatgatccaagcccaaattcgcagcctctgccccctcctcccaaattgattgcgcacggtgaaactacagtctcttacggccatatagccccaatctccacccccaatttcacccagaatcgccgtgacaccattttctcccttttctctgtcaccagcaagccaaagttcaccgcgccccgtggctagcccactctagtaagg

SEQ ID NO: 168104 - DNA, 271 bp, Zea Mays
acccgacgatggcgttgtaggcacattcgaggttggccacctcgaagcggaggtacttggtgcggaagtgatcaggcgtgtcgaaggtcatgggtaggtacatgtgccctagtgggtactcccctgaatcctgatccatcatgatgccaaataagggattgtttgactcttgaagttatacaatggagatcccatgttcctaagtgtctttaggaaagtgacggtgacactgcttccattgttgacctgcaccctattaactcggctcctg

SEQ ID NO: 168105 - DNA, 1396 bp, Zea Mays
gccgaaccggcgggagcagccggaggcgtacatgctctacctcgagcttctcggtcggtacgcggtggctcctgtttacccggagcgcatggagaataaggatatgtaaggaccttactcggttactccacactggcgtccttcacttttggtttggtgtactctattcatgatgcaacttgcacacttgagaattgacaaattgcttattggatatcccggtttaaatctgcgctgtatttgactatttgctgatgcttttgggtgcgtgggcccagcttgatccggctgctgggaggttgcctggtcatttcgattagatgtatctgcgcaggtggaaactaggtagggtggaaacgactgcaaaattcttggtcttggtcttagaaagaaaaggtgcaccatttctaaccttgtgctgtgggccaaagactcaaaggcttcacaagtgtcatttaagctcctttcacattgggtggcttttcaaaagcaacccctacttttttggtataagccactgaataaatatttaaaacatacggttcaattgaccaaactatcttcaactataaattgttccatcaatctgcagctttctgataatggatttttaatctttaaagttctcatactgtggtcaatcacctgtaggcatgcgaaatttactgttagttatttgttaaaataatattttctatttgagtcatagccaaaaaccttacttcataagtgcatatcatataacacagcatagtttgtcaggaaattgcaaactattcctgtgtgtaccaacatcgtcaaagtgtcttattgaaatgtgtgcaaacaccaagggtttgagatgccacataccacttaggcgtctatttgtcaagtgtgtgattcttttccacatcaatgtatgctgtccgttaatgttatgagctactcccagttaatatttggtaaatatgatgcattagactgtacgttcttccaacttaggtagattctccatatagcacctgtaaacttgccataaagtcatgctcatatgtgcgcaattgaagcttttcagtccttttatccagctaatctctatcaattttttgagaaaaacacctttctgatattttaacattaactttagatatgggcatatggctttattttttactgattgttatattcatctgcaatgtactttgtatcgattgcctatgtggattagcatgtgatcaggcaagtcctgctttagtaccagaactattctaggcaacagaagatgtctgaaatattttattcagtgaacaaattttctgataccaacataatcctctcagcatactgaaggccttggctcccttgtctcaccgttcgccactaatgagattgacaacattgttcggagtatgcc

SEQ ID NO: 168106 - DNA, 900 bp, Zea Mays
gttgtgcatttagtttgaacaatcaaacttcaactcatatttgaaatcgaaattcgtgaatcaaaacaggaatacaaaagaaaaaggaagatgacatgttggctctcgggccaaattccccgtgtgacccattcccaatcccaccccgccgacccacttcgaacgcgaccacacacgcgttgttggcctccgcaaggtggcccccgctcgccaatgccttagcctcggccgcccgcgcgtcgagcatgctccctcgctctctcgctatcgtgtgggcccctaatgtcaactcgaccctcaaccgttcaaactcaaaccggatcacaaccaactctcatggtccacccgaatcctcaacaagattctgttaagagaatcacgcgtatctgcatcgtccacatctgcatataaacatcggaccacccgcccttgcatcctcgtcccattgagccagcacgttcacacccttgagccccatcatcgccactgagagatttgatgctgtcgtgtgtcgtcgcacgcgatataagcatacatcgttgcctcgcccttggaggttggacggggagcaccgctacggagtcacgatcattgttatggcgttgatggtgcgagcagccacccaatttttaaggtttgctcatcggacttcgaccactaccctagtgtcgttgcacatcgatgttgtggtgctaccctggtcgatgcatggtaagcaaacctcctccgagttcacatcttcctcctctgcttgtaggtcctgtctttgctcgattccgccccactcgttcaaccggtctgcttgctcaccagtgtggcccttccgcagcgccgtgggacgttgtggtcagcccgccacagcagtcatcgccgaagaggaaccctcctgtgtagttcgcc

SEQ ID NO: 168107 - DNA, 1401 bp, Zea Mays
ccactgcatcagagacaaaacttgatcggggatacgagcactgcaggatctcagttgggcagatacaccaccaagaacatcctatgaccatggaaagataagtaaaaaaactagttcgccagcaggaacagtaaaaaagcgaaagttgattcacctgaagattggagaggaacaggggaagacccaaagtaggaagagttgatgcatgactcggaggaacttcgaccccatcagcaggcagcaggctcctagcgtctggttcactggcttctaaagtgaccagaccaacgagagccgtagaaagatgtgtcaccgcatcctcctcggatcggactgggggcgatccaacgtggacgtccatagaagcagcagaggggaccctgccccaacaccctcgtgggctgggcccaccgcagcagccacctctagggctgaagattcctcagccacgtccataggagtcgggtgactcagataagtgttctcgcaaggaagaccgccctctaaggtcgacgaggcacgagaaaccaaccaggttgtctcttgcccggcagaatcatgcgggagaagaccatcatctgggacctctgaatagatggtgggaatgtcagcttcacgaggctctaatagaatgtcttcaaggatgacctcttccagcgcttagtcaaaataggatattgacaacccttgaaggatgacaagtgctcacaagtcttgcgcaggaatgtcgctgcccctgtggtgacgactattcttgcggattagtggaatttcttcttcctcctcttcttcctcatcaatcacaccgccagcagcctgagcatcatcactacctccaacattgtcctcggggatggtgcacgccaggcatgacaactgccggagtcgccttttcttcttcttctcctcgataggtgcagctggatggttcacttggcatgaacgcttccggtgggcaccttcaggtttctggatttcctcatcttcgccaaactcttgcccagtcgcaattgtcatcggcttagtgcgggctaagtcaaaagattctccgaccagcaggctaagaatggcatccatttcagcatcatcggtactggatggcatctcgaaatgagtttgtttctcaacctcgggaagattccgaaggggagcaatcaaggcctcaatgtcctctgcggagggccgcactctatggcccgagctaccatcttgagcaggaggattggagacaaagtcagagaagggactatgcggaggcaaattccatgcagagtaagataagggagcaccagcattcgaaaccctgcccctcagtgtcatgtcaagtcggcttaataggtcttcattgggaatttgcctgttagtgactcaggtagaatcattgatgctagtgtacaagta

SEQ ID NO: 168108 - DNA, 1014 bp, Zea Mays
agaaatcaagggcctcgatcaacttcgtcgattcaatgaaacagtgctcatccagaaccgtcgatcgagtgatccacgaccgagattctatgtggacgaaggggtatacataatctaatctaaatcgttgcttctcggatctgcggtcaatatcctaccgccatcccgatctaatcctagacgcccctaaccgatccaacggccaggaggccttctcctaaccccgcaccgggtcaaggcggcgcacacaggcagcacggcggcgcacgccggtgagatgtgcaaacgacttagttcacgatctcctaaaatggaagtcccaacccacagcggagacaaaggcgaaccctatgaacagatgcttacccgagatggaggcacataatctctcaacgatggaggcggccgcacccaaatcaatggcagaacctcgacttttggtaaggaattgtgcccaccgtgggccaaatccgcgcgagctgaggaagaacacggtgcccccgcctcgtggtggttatcccgtgccatccaaccggcaccgaacggaggtgtgagggcaggtcgacggtagacgcacagtcgatggcgcggctggggttagcttcaggtggccagggtgattctctcagccgcaacgaaccccggagactaggagcggacgaggtggggagggccttataccccgcggctagacctaatcttctcctggtgctgcggatccgaccaagaatcacggcagccatacctgcggagtccgtgctttgcggcatggtgaagacgacgtaccggccgcggtaccccacccagcggtgagggtgacctgggcgcacgcgatagcagagcctgaccagtgggccaccagccaaagaccgtgtgcacgcgagggagcagccaacaggaccactagtcggcgagagactagagttggcagtggctggacgttgtggggacctggctgcgcgagctgaggggaacgtgggctagcggggtgaatccgaagatgggctgaatgga

SEQ ID NO: 168109 - DNA, 1059 bp, Zea Mays
gagttgactggaccgggcgacaattaccagaaagatcagggcacttggcgtaagattcttaagacacagaactacatctgtatggacggcgggttgattctaatattgatcaggggttcttttgcatgatacgctagccataggggtatcctttaatctgggtcgttggatctggttttagtgcgcacgattagatcgcgaagcggtacacgcccctgaacgtccgatcaatggtgagcggccctgatttaattatttgatatacgatcgtggccctcggatcatgatcaacggtcgtgattcttttagacgtgggtattccagtttctaatcctagccgtccagtaagatctgacggcgcgcccaactttccccaacctgacacacgcgcacggcggcgccgcccacaaactacggtggagcttcaccggcaaaccatgcgccccatgctctagtgctcggtttctcaagattttaggtgctaaacgatgtgcgaggtgaagtcaatcgaagaggcagggtctgaccaggggtggcggcgcagagaacccccaacacgaccgactacggatccgcggcggggctaaggttcccgcgagcgattcacgtagctagggtgagcatctacctatgatcctcggtgttgtgtaacaaggggtaacgagcgggaggcaggacagtttcttaccggcaatggcgcggcacagagctccaattgcggaacaatggcgttagtggcggaatcgcacagcggcggatgagatccacgcggaattccacccagtcctcactgcaacgaacgctcccgcaccatgcacaacctccacccacgcaaattgaaccgcgaccgagagttccgtggcccgaatcgaagtctcctcgccggtcgacggtggcggctcaaacttccttcgctggcaaatccgtggctccctaggtagtctcaacgaaaggcgagagggtcgcagcaggaggttttatacccatggtccgagtgccctgtagcccaccatttcgccggtctggtagggaggtcgttgcgctcacccaggagttcca

SEQ ID NO: 168110 - DNA, 699 bp, Zea Mays
aaaaaagggaagactcctcgagggccgcgaacctcgcttctggccaacttgcacattcattccgcgcggtccattatcgctcccacacgctcgccggtgcgcgccgacatgtgggccccactggccattcacccagtcggattccgcgcacaagccgccgagcactcgctgtccccgtgaccccacccgtcatccacttaacgtgagcgactcaatccctctcgctgccgggtgggccctccccgtcagtttcgtcccctcaaccaccctcgtgaaggttacgaccgagcttgcggcgccacgatctccgcgggcctggcgcaagtccgattcttcctgggtataagaccttgcgtccgacgttccacactccatcctctcatcccctttttcccaaaccataagctgtgctgccgttgtcaagagaaaatcggttgccagcgcgcggcggaagctgctctactggtcatcaccatctcgccgtcgtcctagtccatgtggatgcgcgcgagacgtctaccacccatcactgaaggccgtgtaagacttgcccacacctagaatggtccggcactgccggaattgctcattggagctcggattgcgtcgtggatccgtacctcgttgcagccaagactcaccactgcccggacttcggtaatgatccttccatgttgtgcgtgatgttctgtactccgc

SEQ ID NO: 168111 - DNA, 686 bp, Zea Mays
ctcgattgggcgacgacacatcattgcataagcctctcttatgaagagaaagcatttccagcagaatccaccatcctctgctcatctcgctgatctatcggtaagttgcacccgcgacagaagtagaagcagcaaataatcgagctcgtccatagcagcattagtcaaacggggggcgcaagcgcagatcaaaattatgccttaaaaactccaaatgccgacaggttaggctgagtaacatgagagaacaaggaggaggggaaggagcagcaaagaggggaatcagagatccatctatccaaccgaaaggcagtggacttcacttgccatccccgacacaaaacgtaggtgcaatcgcggaaaaaggtcgacaactgaactgtaaatacgggcaaggtaagaaggagtgggagtcggcaccaaatccggatatatatatatgaacggccctgaacctgaagcaccaattaagccacggaacaataggaccattaagggccatgtcagcaaatctgagaaagaggcaaaggttttgggtaataaccatatttttgacacatatttttgacaccaccgagaccaacgcaatttttcggaagacaaacgttgtcccaagccacccaagacacttagaaccatgacagaggtcacccaccctctgtccaaaggaaggccctcctacgacg

SEQ ID NO: 168112 - DNA, 373 bp, Zea Mays
caagaaagagcttcgacaaaattaaaaattttcaacttcgtcaaaaatcaagaaattcaatcgtcagatggctagggtaagctcaacagctagggttactcgcgacggagaggaagccgaaggtgccgaaaccgctccaatttctgaattgatgcaacggtcagggctggtagtatcggaggatgcacctgccgctgaagctgagcaggttgatgctgaggaaattgaatctgaagatgattacagcgtcgtgccatctaaacccagccacctggagtttgggaaaaccaccattaccgaaggtgatatgtctaagctgatgaagttaggctatttcagtgaagcaaagaaggagctggttcgttttggcgga

SEQ ID NO: 168113 - DNA, 384 bp, Zea Mays
gccatacgcgagggcgatttagtacaaagataagagaagtgtttttaccttgattaacgcggtgcagaccacagtccaccgagcgaggcggagaacgaacgccggcgagcgattcccagcaggttcggtcgacgattcacccaggagaggccgggaagctttacggcaagctacgacggagctccggcaacacttttccgacgccgacccacgtcgaagcgctgcccttcgctcccctcctatcggtggctatggcggctgggttcgatcggctgtgatgggactcaggcgcgttagcagcagggtgagggattagtatgggggcgaggaggtcgcgaggcccgtcaaatagactccatggagtccgcggtcagctttgacggg

SEQ ID NO: 168114 - DNA, 752 bp, Zea Mays
tttgtcttggtattcagaatgatatccataaaggatatgatgaatctgtgatagattcgaaaaatttcagatcattaatgaccatcagtaatgaattgtcatttccaactggttatggttggagtcaggaagttttgcatgctcttgacttgtgatgaactgcatgtactgcatgtacaagttcccctatggttttagtacgtgggaatccatgaaagatttcccatgcgtacattgggtatgttcccaatctcaccaccgcagcgtacatgtatgggcacacagaaagctggggatctatgtgagaattcattctccgtcgatcattaagttttagaatctcttcatgagaatctacttacggctcgtacgcttgcttgaatcatgagcttttccaggcattagggggagatttcaagtaccaaaaagaatgccaggaaattataatgaatgcagtaagtattcaggctcaggatcacgtactaaaactgaacctttgggttcgaatgatttgcaagaagttgcaaattgactgccatgtgcatttactatgaggtgtcactcaaattaatcctatgaggaagtgccagaaagagtggttaaatggaacaccactcaactccctattacaataatattgtaaataagagggggagaagtatggtcacaaatcctaggattaatatgcttgcaagctaatgaaggctagaccttctgagatagtaaatgcagaccaactattcgttggtaac

SEQ ID NO: 168115 - DNA, 1441 bp, Zea Mays
ggcgaatgggcgagtaaaatttggtagtgctaacactggtgctgaagaaagggccgttttcagcagagaaaacgccaaggtgtgttcgtcagtccatacaaagatagtatgtttcttcaagaggttggtgaggggtttggcgatgacaccgaagttcttgacaaacttacggtagtatcctgccaaaccgaggaaccccggtaactcccttgcattctgaggtgttggccaagaagatactgcatccacttttgttgggtccgtagaaacaccatccttgctgatcacgtgacccaagtaagcaattttctgttttgcgaaggagcacttagacaatttaacttgccactggtcctggcgtaatagctgcagtacccaatcgaggtgcagaaggtgattgtcccatgtatcactgtagaccaaaatatcgtcgaagaacaccaacgcacatttcctgagaaggggtttcagagtgctgttcattgcaccctgaaaggtagcaggcgccccagtaagaccaaatgccatcacacaaaactcgaagtggccatgatgtgtctggaatgcggttttgtgctgatctcgtgggtccatccggatttggtgaaatccagctcgaagatccaaggttgaaaaccaagctgctccaaagagttcatccaagaattcctccataatgggtactggaaatttagccttagttgtgagtgcgttcagatggcgatagtccacacagaagcgataggagttgtccttcttcttgaccaaaatgacacaagaggaaaaggggcttttgctgtgttgaataaggcctgagccgagcatgtcgtcgatctgcttctcaatttctgttttaagaggaggggcataacggtacggtctcatttgcaccggccgagctccaggaatcaacggaatccggtgatcacaatccctgacaggaggaagaccttgcggcaccacaaactctgatgaatagcgatccaacaatgactgtaattctggtggaagtgaatgaataatatgttggtcggtgtctggaagttgtgaaaggctgcacaattgaaccaaagcactctgtccatctgaagcttgtactccatataacttgaccagcgaagaccccactgttaaagacaaccatttgtctgcccaatggacccacattgggctatgttcggataaccaatccatgccaatgatcatgtcaaatggttgaaggtcgagaatcttgagggtggaagtaaatcgatggccttgaatggaccagtctgcattgttgagttcagcacaacaagacagcttagagccattagccacttggaccagtaacggctgacagctgaccggcagcagtgggacatgaggtacgatggacgaactgatgaaggaaatggagctgccggaatccaacagaataagaacagatagtcccccgatc

SEQ ID NO: 168116 - DNA, 339 bp, Zea Mays
gcggtcctcgtagccggcccgggatcgatcgagtagcatagtacgtgtgcatggcgaaggctagcaccacggccggcgtggtcgtcacgctcctgtgcgtcgtcctcctcctgtcgtccgccgtgacgacgaccgaggccggcaggcatctggggacggggaggagggacgacggcgcggccgtgatggcgggggcggggcggccgctcggtaacaaggtaatacgggaggaggagatggaggcgtcgacgacggacggcgccaccggcgccgccggtgtcggcgagtccaagaggcggagccctggcggcccggatcctcagcaccactgaatcgaaa

SEQ ID NO: 168117 - DNA, 669 bp, Zea Mays
atcaccgtcgtcgtcgtccataggagagagcagtactgcaccaatagctgcggctggagttggtggtgggggacgagcctccagtacgtccatgcgtgtaacaagttcagcaactcgtcgatcaagctgctcataggttgtcgccgtagagtcctggtattctttaaaagcttcagtcatcgcgcgcatcatctccttcaattctagctgagagacacactcatcgtcgttaagcttaggtcccttctccttgtccatttggttctttggtcctgtcattgttagcacaaaacagagacaaaaaggcaacaaacaatgtgaaccctacaactatctctcatggtggtggtggtggtagaacacaagttatgaagcgtcttaccccactcttacaaggttcttaccagcactgcaggtggcaaacggtgaccagtgtgattgtccaacgagcgtgggtgtgattacaaaggagtacccattctgctcgagagaaagctagagctatgggaaggctgactaaatatatatatgtggcacacaagtcagtaacagataacaatgctgaataagtgttccaggtactcgtcctagttgctggcctagaaaatgtaatagaacagttggaccaagacacaagaaaggaggtacaagtatctaggtgcagcaagg

SEQ ID NO: 168118 - DNA, 611 bp, Zea Mays
gttctaacatgcctactgatctagtgcatgtaggttagattgtggaatttccgatcggtcttgtaatagtgtacctagcttatcaaatactgaagcttgtggtgcctcccaagctaggtgatgtggtattctatatggatactatgggtgtggtgtctctcctcaccacatgggtggataagcaggcgggtaggcaggtggatatgtagatgggtacatgggcgaatatgttggtggtggatatgtaagcagtggatgtggatgtggtgtcgtccatggtgtttgtggtgtgggtggaattagctggactaccttttgggtcgttttagtctgtcatggttcttttgcttgtctatctagtaaaggtgaatgaggtcactttgttagtcgatcccttggagcagccttcttattgacatatttagagataagctgatcaaatgtagggtcggcactaacgagccatccagatgcattggatgtgttttgcttccacatacctatctctggacatcgtggtctaaaggtccaggggcgctggtgtttttgttcatttgtggcccatccacggtgggtagtcggactgtctgccaggggtttggaccgtccga

SEQ ID NO: 168119 - DNA, 367 bp, Zea Mays
gcatttggtaggagggagattgtaggcaataatgaacaacggctaacacgagtacggagtagaacttctgctgaaaggagtgaatctgtctatcgacaaaccaagacgaacacttcttgggtcccatgcaaattctggatcaaaacggtccagtgactgccatgccttgccatctgatggatgcaccatgatatctgaatcttgtcttgacgatccctttccttatgccatctcattttcttcgttgtctcctgatttagaaacaagcgtttgagccgcggagtaataggcatgtaccagagctgcatgaccgggagttttgtagtgaccacagtgccatcctcatccaccaccactgcataacttc

SEQ ID NO: 168120 - DNA, 417 bp, Zea Mays
gggtgagtcactggtggccgcgcaacgtggcttttaccgtggcggcacctccggcgatcaccggacatgcgaagcacggttagccacgacgtggtaaagcgtctggacacgcgacagatgacggtgatggttcaacggcggtgagaatcttatccgagggatcggtgagcaaggggaaaggtacggcggctagccggagtggtgtccagctcaacggcggtgctgatccttctacccgagatgttatccacttgccacgagcacgaatctagacgccggcgacacgaatcacggcagagatatcgtcggcggtgagatctctacgctagcggtctgatcccaagtctggtactgtaccatggcgaatcccattcagatgaactgacagcccgatttgcagagctatttactcccaat

SEQ ID NO: 168121 - DNA, 483 bp, Zea Mays
cctcgccattaaggctcgcccaacctccgcgacaaccctgccactgtactcgagccgtcccctcacccccccgcctgaccgagccatctcaatcggcgttagcgccactcccgccatcatggcgagctcgccggtgctcgtcacctcctccatccccctccctcccccgagcgcctataaaaggacccgcccgagccccgtcttcaccacacagctccggccatctccactaccttcttccccgagcctatcgagctagcgccgcagtgcctccctcgtcgctccggtgagctccgttccccctctctagcgatcatctgtccaattaaactatgctcgaagctccgccacactctcacggtcacagggcgccactttccccctctattgtggctggcaactgcatcggcggcatcaccgtcgcggacactcgccaccgtaccgcggaccggccgccataggccaccactggtccaattcacc

SEQ ID NO: 168122 - DNA, 531 bp, Zea Mays
cttcagtagctatatttggctttcctctgatctccatcgatatctttcttctgtcttgatacattcattgcgtatactgtacggatgtgactgcttggaaaaatctattgaaacttcttggtcgtccccccaatgggtgtgaccgaggggcgtcttggtacaccgagcgtttagcaaaatgtccttgagtagtaacttgacgtgactgcggggtgtaatcatatcgtccaagcagttgaccttagtccaaatggtgtcgtgttacgcgaagcggcgtctgttgcctgacttacttccagacgatttgaattgcttattgaatacttgcgactgttcggtgatcctggtaggagatgagcagttgcctccggcctctataaatagactgcctgccttgttggtgtcttcacacatcttttgatcgtctgttgcttcttttcccacttttctcttctctgccaaccgaccatgggcaagaacaagaaaggtggaggttcatcgcaccgctccggcgataagcggaagcgtgag

SEQ ID NO: 168123 - DNA, 380 bp, Zea Mays
catgtgcaattttaccacgacgaagtgtcatcgggtggtcttagtggttcgatctaaattggatggtcccgattagatccgagttattctgaaccagtacatagccgaagccttcagatcatagatcaacgctcaatattcaaagaacccacgatctaccccaggccagaggatttgggatctacggtggagattcaagacgcgaaggggtaagttgtgaatctaatcccacacgcgcataccgaattcgacggtcacgattggaccacgccgaacgggtatctaagtcctaatctaggatgttggtaacagatcccacggtgaatccctaactcgcctggtttccaccgaagagtggtggcgcgcccctttcatgcggc

SEQ ID NO: 168124 - DNA, 638 bp, Zea Mays
ccccgtcgatgaccccccctcgccccgtctcctcgccataactcttgcgccagtgaagttaggcaccactccacccctcagctcactgtgctcgcagcctgcccgtgaggtctcatccccggcgctgtgcgccccccatcgccgtcgtggcatccctcgtcggcgccagctggcctttggccgcttcccgccctgggcgcctataaaaagaaccgctcgagctccgcctttccccacaccggcctcggccactccccctcctcttccccgagctcgattgagccagcgccgccgcgccctccctccgattcggtaagctccccttccttcctctggtagcctagcattcaattgggtaggctcgcgaggttcaccactccctcacgatcatgtcacacccttttccttccacctattgcctcggtagcctcaccggcgatcccccgccgcggacgcccgccacctcgccgtggaccggccatcccaagcaccctccagccaaattggccctaccaccatgatcccctatccccgcccgtgccttgccaccgctccatcgtcacagaatcgagaccccggcagagaaccgtcgcgggccctcaccggcggtcgagctccgaccgattcgcccccccgtc

SEQ ID NO: 168125 - DNA, 494 bp, Zea Mays
agctttcccaactttcagactttgttgaacaaggcaattggccttgaaaacaaaaggaaagagttgtttgatcacaagagaaagtacgaagggcagaccagcaggaatacccgtcagaacaactcccaaggttctcagttccgctccggaaatcagagtggaaacaacaactatcaagcacaacgctctggacaacaaggtcagaggagcaaccaatacccgaaccaacagaggaacaacactcagaccggtcaaagatctagtgtccaatagcagaattgtcaaggaagcgccgtgaacacatcggccaagaacaacaacacaactaccccactccaacctaatggttgtttcaagtgtggcaaacttggccaatatgccaacaactgcctaagacataatcaacagacaccctagaagaatagcaaccagaggactgaccagaacacacctgctcgtggatctacacagaacaagactccgcagaaccagag

SEQ ID NO: 168126 - DNA, 480 bp, Zea Mays
gatcggggtcgccggaacaccgcgccgccgtccctgggaagcgcaccactcgggtctgtacaggggtagaagatgggcccgtgatcgttgatcacgtaataaacggataagattagatcttgacttggagcattggcgaccgttggatctcggaattgcggctccgatctgatctggcgatggttgatcggtggtcgttgatctgcggagggacacgcgggattagatccttacgtaccctttcgcgcgttgtattgtgaccattggattcgatctgaacggctctggttacgcgcgcaatataacagtcatggtagttttctagaagagcccctgccctttttacaaatcaacccgccatcccgcgcggtgttctctgtgtctagggaatctttcaagttagcccctgatctttttggtatttggtgtgcagtccagaagatagtgaaagtagaaaattaattatagaaattgattttt

SEQ ID NO: 168127 - DNA, 1022 bp, Zea Mays
accgggccaccagtcaggttctagccacacgcgtgcttgactcgagtgtcactgccgggtgggacctcatccctgctcatcttctatccgcgctatgagttcgacgaactccgagatcccagttggactctgcctccttcattagcgcatggaaatcgcaacggccccgaggaatcgcaccggcagcgcgattggggcgggtcgttggtggctgaaaacgggtataaagcttttgcctccctctgtcgttgctccccttcccattgtgcttaaccaccgtgagatcggagtaccgcgccgccgcggagaacttcgttgccagcactgtaccaccttcggagtgtagcctggatagtctctgtgacgccgccgacggtgcccgtactcagggggggcgcgattgactgtgaccccatggaccaatcgctcgctgtcgtcgggtagacggggatttccgccgtgcgccgtggtcggatcgcccagaagcttaaatcggcggtatggctaccatttgcatattcgtcgtatctccctctccgttttgcacaagatcgcgctaggattaggactcctcggagcgttcacggttcgtagccggcgtgccgccgcaacagtgccgcatcacggccgggctcgagctggggaagaagccctctgagccgttcatctcagaccaagggtcaagattagaatgaggggcggtgtagtgtgggctgttgatctcactgtggacggctgcgattagatcctggccttccagcgcgggcgtgggatgttagccgtagatctcggatcctaggatcacagaagcataccggttcggtattaggtgatctaatctaggccatagaatttaaatcatgcggctacgatacaacgataccccttcgggctggcatatttacacttgaaaccctctggttctaataaaataacccgccgtccacaggggcagtgcgttgagtctggggagttttctcagataagcccctgcgcttcacagattttgacgcccagtccag

SEQ ID NO: 168128 - DNA, 730 bp, Zea Mays
cgaagtctcggcgcggtgctcaacaatttgcaccatcatgctgagtgagaaaacaagcaaaaacctaatgcctagcccctacctggcgcgccaaatgtcggagagggaattctctggccgggtggcagattgcactcaccctaaatcctaagatgaggaaggggcttaagtgttttgcctatcttgctaagcggtcatcaagcacatgaacacgcgaggatttagagtggatcaagccgccggagcgtaataccctactccactgtgtgttggattgttgtggaagcttgagctgtgtgtaagcttgaatgacttgcgtccaagtttccctgtctagtgcttgcattgtaacgttgtatgcctccccttttatagttcaacaggggcatgtacaagggttctaagccccgacacatgggcccagggacaaatagaaggatggaacttctgcttgccatgcccgtgtaatcttcgtgcgccctgacacctgagatatcggtgtgcagggggaaacttctcatataagggatgagtacagtgcaccacgtagcacgggcacactatttcgacaatggactggacaggtgcgccgtctgcagggtggccctagcgccacctgccagtggaaaggacatgatgcaataaatgccgtgggggcacatcatctgtcagaagggtggacaggcggcgtgtcctctccacaataaatgcggaggccgcgcggctcaga

SEQ ID NO: 168129 - DNA, 578 bp, Zea Mays
cgagaaccatgttcgcggtagcgttgaatcggccaagaccgagagctttcctaacatcaaaggatgcagaaacgcgaacctgaggggcatgaatggacctgtggatggctgaccacggcgagaggtcacacggcggcgtggctgatcgaattgtggaaaaactggaattcacgagctatagtggttactcgggagcgagaagtggtgttctggcttcgtaacaagatagcggaggaggcaggggcgtcaatttatatagaccagaagcggtggctccgaattttggatgatagcaggactcatttccccgacgagatcattaccgagatccatcgtggagcacatgcgttcaccgggtgacggtcacgacatagaggacgccatgaccatgacaacacagtgaatcaggcaactacgtgtctctcaccgagaatacggcgaacactggcgacgatatttcactgattgtgcaggcaagtgggcacgacggtgatccatcttaggcctatgttcacctcacccaagatcttttcacccgccatggttatccactccagactagcacgaatcttaccggc

SEQ ID NO: 168130 - DNA, 2054 bp, Zea Mays
cagccctgttaaagaaacatgccatttttgtgtggaccagtgaacatgacacggcatttcagacattgaaaaacgcactcacttcagctcctgtattatgtttgccagacttcatgtctccttttcttattgagaccgatgccagtgacttgggtgtaggcgcagtcctgatgcaaaaaggtcacccaattgcctttctcagtcgagcattgggcgtcaaatcccgcggcctttccacttatgagaaggagtacatggccataatacttgcagtccaacaatggcgggcttaccttcaacacaccgaatttgttatccttacggaccataaaagtttgggacagctcaatgaacaaaggcttcacactccatggcagcacaaagtttttaccaaattacttggattgcaatacaggattcagtatcgcccaggctcagagaaccgtgtggccgacgccttgtcccgttgtgctccagctgaagtccatgctgtctcagtagtggtaccacaatggttgttgaacatccaaaacagctacagccacgacccaacagctcaatctatgttggctaagcttgccatcgatccatccgttgtttccaattttactctaaccgaaggcatcctcagatacaaaggtcgtatttgggtgggagacgacacaaccattcagtcccgcattgtgtcagcattgcattcttcagcggtagggggtcactccggggttccagtaacttacagccgtgtcaagggattattcgcatggaccaatatgaagtccttcgtcaagaactttgtgcaacaatgtcaaatctgcttgcaggctaagcccgacagagctgcttaccccggcaagttgcagcccctaccagtaccgtcttctgcgtggcacaccgtgtcaatggactttgttgaaggccttcctcggtctggatcctccgactgtattttagtggtcgtggacaagtttacaaagtttggtcacttcattccactttcacacccttacactgccagttcagttgccaagctgtttatgaatcatgtctacagactccatgggcttccagtggcaatcatttcagatcgggacccggtgtttacaagcacattttggcaacacctattcaagtctgttggtgctgagctgaaattgagttcttcgtatcacccacaaaccgacgggcaaactgaacgggtaaaccaatgcttagagacatttcttcgttgttttgtcaacgcttgcccaaagaaatggattgattggctaccagcggctgaatattggtacaatacaagcctccactcttccttaggctgttcaccttttgaggttctctatggccgtcaaccaaggtccttgggcatttcttcagacagtgccatcccagcgtctgtttcggactggctccaggagcgctcccacatgcaggaactcatccatcaacacctcctgcgtgctcaggctcgcatgcagcgccaagcggacaaacacaggtctgaacgctcctttgctattgatgactgggtctacatgaaactccaaccatatgtgcaatcttctgtgctgccccgtgcccatcacaagctcagttttaaatattttggtccctaccgtgtgttggcccgagttggcaaggtagcttatcgtctggacttacctgtttccagtcgtattcaccctgttgtgcatgtttctcagctgaagctagctaaagggttcaagggcactgcttctacttccttgccttcgttgctaccagaattcagttaccctgtcaacatcctgcaaactcggggcatcaccaagggaactcgcctcgtccaacaggtactggtggaatgggccggtctgcctcgcgatttagctacctgggaagacaaggaagcgctccagcagtgttatcctggtgcacctgcttggggtcaagcaggacttcaagggatggggaatgtgagccctgctcccatgccagatgtgccgactcaacctgcacaagaggaagcccagcgtccaactcgtccacgtcgccaacgtcgtgccaatactcgg

SEQ ID NO: 168131 - DNA, 442 bp, Zea Mays
gattcaaatctgagagcacgaatatatatggattagtgtgtaaaaaaagaaatgaaaaaaagaaaatatccaaccgatcctcatctccacgccgcgcgccctccctcctcatttttttttcagccgtcgtctcctcgtcctctcgcatagcaaaaaaatatggccgtcgctgttttctctgttgctcgctcggccttcttctctctctccctcatcttcttcccccgcatggcaattcccttgctcgcccacggcgctcggccgcccatctccctgttgccgcttttccatggctgttgtggcctcccctgctggcagccgagctcctcccatctcctcccctgcttgcttcttctcgcgcgcactcctctgctcaccgagtcactctctgtccgcgccatggtgcttgcccggccgcgaccgtccatgatccctcgacgcc

SEQ ID NO: 168132 - DNA, 876 bp, Zea Mays
atggttagattctgcaacataccaggacccaagaacggtcgctaggaaggcgagtggaaggtcaggacagcgggtcaacggaggaggtgttcacggcggcgcggagagtggatttgggggaaattccaaattagggtgctacggtggatgatcggaggcggggagtggttcactgggttcataacaagaagacgaaataggccgaggcatcaatttatagaggacggccacgaggagggcgaatttggacggggaagcgcacgcggcgagaagggggaagagtcactggagtttgctaacgtggcgttcactgggttacggtctacagcggtcactgccgagtcttcacggcttgcgatgagtggtgagatgacttaaggcgtgtcacaaccgagctagatggcagcacaatggcgacggtcacgaagccacgtcgccggtgcaagtgggtacgacacagggaaaacagtgccccaagttcatcccctgcgcgagattttttagcctacatagttatctgcactccaccaggcacgaatcgcaatggtggcgaggatcatggcgtgggatcaccggcggcggtgcactgaacatggcgatcttcgtcaggttactgtaccatcacgaactcccttcagggcgcctgacagagcaagtttgagagcgttttactccaaaaatggagtaaaatcgtttagcacctggtcaagcttggtataacaaagttgtttactaatgttagagcatcaactttgccacagtgaccctgaccttatctccattgaattaaccatgaactgcttccaaagttaaccaaatgtcactgaacttaggttttcagagctaaggctatctgacaggccagtttcaagtctc

SEQ ID NO: 168133 - DNA, 411 bp, Zea Mays
cgccaggactacgggttgataccgcggaagtagaggggctcttatacaattctaccttggcgtcatgaccacatgcgatcccaaccgtccgatcaaacccgaacgaacacaatcacgactaacctaaattgaaccggtacgggttaagggtcgcaggatctaagatcgacggataaggttttatgaaacgcgatctgcattcagccttaggattcaatatcaacggtcatgattccattcaccgaaacggtaacctgccgctaatccgagccgtcggtaccaatccaacgccccccgtcatctcctaccctcggcgcgaccaaacggtggcgcggcggcgagcccaccgagacaaacgacctggcacccgagttgcaaatcccggatccccgtgacattgacaccaagccc

SEQ ID NO: 168134 - DNA, 295 bp, Zea Mays
cgatggtcttcgacattcgaccaatacaaagtcaccgcgaggcccagcgctagctaccctcgcgtgcgacactccgcgcaaaagtcgcctaagggtgcagccggatcagcacaacaagtgcgaaaaatcgaagtctccatgcaaaagtcgcctaagggtgcagccggaccaagcacaacaagtgcgaaaataactacaccaaactgtccgcgcaaagaccgactacatgcgcaccagaccgacataacaaatacaccagaccaagtgcgcatgccttcgtgagcatagccgaatg

SEQ ID NO: 168135 - DNA, 496 bp, Zea Mays
gtcgaagctggcaaaacacaacccaaagctgatactaagcaaatagaagttgaagctacaataacccagactgaaaccgaggcagggcccacagtgcctgctgaaacgaagcctaccacaaccgagcagggggccgaaggaataactccgggtgctaatatagcttttgagaaaagtgtggccaaagaagccgaatcccttactcccgaagcattctccgaaggtcttgattatattgttagacatgctttaggaaaaagactatccgaagaagaaatttctgaaaccaaacattatgctcgggaattgcagtatccgaagggggccctagtgtttaatggtacaaccgaagatgactttttgtactgcctcctggacaacaaagaattatccgtctaccgggagatggccagaagtatgggcttcccgaagctcgaagctggcctttgcgccatgacgaaggccgatctcgcagatagtcttgcatacaacagtc

SEQ ID NO: 168136 - DNA, 465 bp, Zea Mays
ggaaatggctggccgcggtggccggcgctcgggtggctcgggcgggtggcgcagagcacgccggagctaaggacagtgtctagtaagtgaaggtgagtgtggagtgaggtgaggcgcgtctgggggtggtcttaaaggcacgggcgagcatgaccaaggggtggctctgtcacgggctctgggtgtgcgcgggcgagcgctagtgcgcgctctagcgcctgggcacggcgtcgagcatgaggcagcgcagagagaggtcaagttcaagcgtggattggctccaaatatttgcgattatggacatgatgccgttgagagatctcttcccctgacattcctttgttgtttgtgtgtggaggcttatgggttttgctgactagagtcaaagatatggagtgatgaagtttggtttgtctcactgctgaactccgagaggaaatcccagatttgacgtgtctagggcac

SEQ ID NO: 168137 - DNA, 498 bp, Zea Mays
gtctggaaacttcaacattttcaaccatcgaaatacttcttttcgctcttccggctttagacagtatggagctcgtggtgtcctctcctttccattaggatttaatttgacctcaaggctagggcgatcgcaaagattagctaaatctttcctggcattgatgttgtcttttgttttacccttaatgtttagacacatgcttatgatgctttcagcaacattgcgctcttggtgcatcaaatctatgttgtgtggtaaaatcaataccttcgcatacggaagttcccagagaaaagaaatatgagtacaactgtgatcttgaccgtagccttcaaactcatgaccttctgcagccctttgaagggcacgatgttgtatcatgatatcttcccccattaaacgttttggtggaccgtgtttaacttttatgcctcttctaaatgactttgtatcatttcgaaacatgtgattggatggaagaaaccgtcgatgacaatc

SEQ ID NO: 168138 - DNA, 674 bp, Zea Mays
cgacagtgcagtacatatgaggttttctcgggccaggcgccacttccaaaacgttggcatgccatgtcatcacccggccgttatttctaaaacgcgggcatgccatgtcatcacccgaccgttatttctaaaacgcgggcgtgccacatcatcactcggccgttatttccaaaacggccgacgcgacccattttaactcagcggttatttctaaaaacgctgacgttaccagacttcacccggccattgtttccagagcggctggcgtggcccgttatcactcggctgttacctctaaaacgccaacgtcgccatcgatcactcggctgttacctctaaaacgccaacgtcgccatcgatcactcggctgtcacctctaaaacgccgatgtcaccatcagtcactcggttgttattcctaaagcggtggcatggctccgaaggattcggatgttacctctaaatcgtcgacatcaccagtaaccgctcggtcgttacttctaaaacaccgacgtggcccgctatcactcagccattacttcaaaaagcgccaacatcgccaataataactcggccgctaccaccaaagcactgacgtcgcaaataaagcagtctgaagcgtgacccgatgactccatgttgctactcaagcattgcagatagaaaacatcatcg

SEQ ID NO: 168139 - DNA, 390 bp, Zea Mays
ccgcgcgctcgatcgcgcatcatcgcctcgagcgcctcctcctgccgccgccgccgccgccgccgtggcccatgtccactccgcgttacaggtgtcgatggggttggcgaggaggccgaagcgctggaattcggagggaaattaaacgcaataaaggcgggggtgcagaggccgagctacgcaggtaaactacagggcgccaccaccagagaggcctcctcccttggggggtctctcaccaccccgccattaatgcccaaagttacactcctccaactgcctcccaattattactcctccacttcccccctgctccggttcgaaaccagcacgagcagcacccaaattccgcacctctcgagctcgcccgcggccacggtggcgccggag

SEQ ID NO: 168140 - DNA, 420 bp, Zea Mays
cacccacagatgtgacaggaagacatgagccattcgccaccatgatggacgaagggagagaggaagaaggagggcgaacagaggtgagtataccagggttgggagtggtgtggtaggtagcaccggtgtccgtgatccacttgggacccatcggtggagtcagagtgggagtctggaaggcagccagggcggccatgtcccaaccaactagcccagacggtggagcagccggcggcgtgggccacgacgaagtggcaggcgtcgaggtccagggcgacggagaggcgaaggcgaaccccggcggcgaggtgaaccccggctgcgcaccagcgaacatggccaccgggggacgagcctcagaacctagcccctagaacagccacatggagatgcgctctgaccacgggtggtggaaagtgg

SEQ ID NO: 168141 - DNA, 887 bp, Zea Mays
tttttgctgtcgagcactggcgtccctaccttcagcatggtgaatttatcatcaaaacagatcaccaaagcttgactcatttggatgatcagaggttgtctacaccatggcagcagaaagccttgactaaactgctggggttacagtataaaatccagtacaagcaaggcagtgaaaatcgggttgctgatgctctgtccagaagacccaatatggatcaagatacagccaatgctcatttgaacacagtatccatgtctactattacacccgactggttgctgcaggttactcaagggtatgatcaagacccgacggcaaagaaaatattaactcagctagctgtgggtggtcaactggcacactatacaatcacccaaggtgttattcggtacaaaggaaggatctggctgggaaataatcaagagatgcatcagaaggtgatgtcgacattacatgatagcgcagttggcggtcattctggatttccagttacctatcgaagaattaaatctaattttgcctggccaggaatgaagcaccaaatccgtgaatttgttcaagggtgtcagatctgtcaacaggctaaaccggaaagggttaaatacccaggattactattgccgcttccagtccctaaacaagcatggcaaacggttagccttgattttatttctggacttcctccaacaggcaaaggaaattgtattctggtggttgtggacaagctatccaagtatgcccactttatggttttgaaacaccctttcactgctttaacggtggctaaaacatttttgtccgaagtatacagactgcatgggttgccaacagctattatttcagaccgtgatcctatttttaccagtcgcttgtggcaagaactt

SEQ ID NO: 168142 - DNA, 598 bp, Zea Mays
ctccagcgtcgcgcttgccgtggtccgggatccttgcgccaccatcataggtatggattctcagtaaagtttcgcctggattctaggatggtgtaaagcttctcgtatggccggttgggccatgggtgtaccgcatcggctgtgcgccggtggaaccccgccgtgggtgtgccatctccaccgttctggtggtcgtggggtggaagacttccgtgagccgttgatccgatcacgtacgcgcgagatttgaccgatgtgtgtacccctccgttcttttgatccgaggcgttgatcggcgatccgacggattgggtcggtttaggcctcagtaaaatccgcgccgttggatctttatccatcggtgatggttgcatacccgtttggtggaatcccggtctaatctgagccacccatttaagatcagacggcccatatgagatcataccccttcgggccatccattttgcataagagcccttacgcttccccgaaaacaacccgcagtccatgtagtagtagtctgtgtctcggtaatcttacgacagagccccctgagttttccaggaattgacgcctagtccagagcgtatttaaaata

SEQ ID NO: 168143 - DNA, 775 bp, Zea Mays
cgtttaccaagatgagaaccaggctgaggtatccttcaccagaaattgggatccttcccttgaaggaaaagctgtccccttgaacatcgataagaggtgactgacgcacaagtttctcaattcagctatttcgtcagttcatttcaagcgtgttcaacagagcaagcgattctgtgcaggttcatcgttctccgtggctcatccgggttctacacctatggtatctatgagcataaggaaggatggcctgatttcggcttgggagagacgagggtggctttcaagctgcggaaagacatgtaagccatagttactgtttttcttcttgttcattgaatgtctgaaactctctaaatgctgctgtaatcgcaggtttcattacatggcattggctgacgacaggcagagaattatgccaatgcccgatgaccggttgcctcctcgaggacagccattagcataccctgaggctgtgctccttgtggacccaatcaaccctgaacttagaggggaggtaagcttccctgacagagataaatataatacatgtctgttatccattgtaagtgtctgagtgcattctgattctgaacgttgcttataatgtttgtcaaggttgacgacaagtaccagtactcttgcgaagaccagtacaacaatgtccatggttggatgtcattcgatcctccaattggcttctggcagatcactccaagtgatgagttcaggacaggaggacctctgaagcaaaacttgacttctcatgttggcccta

SEQ ID NO: 168144 - DNA, 421 bp, Zea Mays
taggggttattctataaatattcccaagactcagagcgctgtagctctggacggcgggttctattttgtaataacctagggtctcttacgcaatgttacagggccgaaggggtatccgcaaacctcggccgttggaccaccagccgagggctcggattagatctggagggcgccgaaacggtacgcttggtggaccatcggatcaacgatcgagggtatggattttatgaagccgaggtctattcctagccgttcatcaagcccgcaatggccacgatcctatgtactggaacggtatcccccgattgatcatggccgtcactcagcagatcaacggtccatggcatgctccctcatttcgaccaccagggcggcggcgctctagtgccgcacggcggagggcccgccggcgatagccgtg

SEQ ID NO: 168145 - DNA, 474 bp, Zea Mays
aaccaccacttcatcagcttccagaagaggaacattagtctcccctccagccctcacgattgagatatcatgaaagtacctccccctcattgcatcaatctgcccttgtttaatagttgatttcccaaagacaacatgactcggtctccatggccgatcttcggcatctacatttttgctttccacatcaaagctttcattatcgctagaattttcagatatcccagctaacacctcattgtcaatcttctccacgttggttttttccatggcttcataaaatctggccagcgctcggtcaatgatcttcttctcgtcagccatttagacaatgcttgatagaatgccaaagctcaaaattcaatcaaactcgacgaagtaaggaaggttaaaatggcaaacacaatacgagcaactcaaatagcacaaaaaatactcacaacacaaccttctatttatatactcagaacccca

SEQ ID NO: 168146 - DNA, 508 bp, Zea Mays
aaaagagagtaacgccagaatttggtgaatattggagaagaaaatttatacccccaaattcagggcgttatagaaggcactgcgaatgctttgtctcgcgaaggctgtcggcacttcgaagcttttgaccgaggcaatgaggaccttgaccgggaggtgttctaggtcaaagacgctgtactaaaccggtctgctggggcactgtatgatcggatgtgggggcgcatggtcgcgctgttgtcagggaaagggttggtcaagcgttggagcatgtgaaggcctttttctggtcgggggtagaaaattgtgtttaaatttgagatctctaatgctttgttgttttcttaccgcatgagttgtgggacgaggagattgagaaccttgctggcttggagtgttccctggccacccaggacggtggtgttgccgagatgggtgcgaaggagcgatcgtcccgtgcagaagctaaccacgtcgatcccagtgcggcgaggacttcgctccctac

SEQ ID NO: 168147 - DNA, 387 bp, Zea Mays
caaaaggcctcccaaagacagacactaatcgaccaacctgcctgccgagtgactcagcgaggcggcccaaaaggcctcccaaagacgaccaccaactcgccagtgaggcagagttgccaaccaacacgcttgccaagcaacatggtgagggaaagtcgtcgaccatccgcctgcatagcaacatggcgaaacagagttgtcgaccaaccctctggcaaggaggcccatagggaaaaggggctaacccagtaccactgagcaacatcggcatgataagacagaccatcaccaaaccacatccgggtcatgcgaactatgtcaaaggaacgtctatcaaacacgacctcaatacattctcaaatgtgcccccgctgaccggtgggacca

SEQ ID NO: 168148 - DNA, 490 bp, Zea Mays
gccgtttcagcgtgtctgctgacgcacccaccgtcaatccacctccggtcacgccaactgccatatctatcaccgcggccgactgacctgaggcccccacgcctggtggtttcgttgggccacgtgcgggtcgcctcgttgttgcttcattggtttaaaatattaccttttgtcttatgcagcggccccaaggaggcgcactacagacgcgcgtgcgatggttcgcactttccgcacctgaagtccggcacacaaagcatatgacttgtgggcccgggccccctgtcatagactggacttgtcttctgcaacggccccaaggaggcacactacagacgcgcgcggaggttcgctctttccgcacccgaagtccagcacacaaaccgtatgacttgtggacccaggccctcgtgtcatagactgggctgccatggtccttggtgcccgtcgggcgagatttcctatggcgattgaggggcgcgcggaaggg

SEQ ID NO: 168149 - DNA, 645 bp, Zea Mays
attttctctaaggttgatttgcatagcggttaccatcagattggaatgaaacttggtgatgaatggaaaacggcttttaaaacgaaatttggtttatatgaatggttggttatgccatttggattgactaatgctcctagcacctttatgcgtttaatgaacgaagttctacgatccttcataggtttgtttgttgttgtttattttgatgatatccttatttacagcaagtctatagaggagcattaataacatttgtgtgctgtttttgatgctttgtgtgctgctcgcttgtttggtaacatggaaaagtgcacattttgcatgcaacatgtctcatttattggttatgtggttacttcgcagggcattgaggtggatagcagcaaggttgaagccattcaggactggcctacaccaacgacggtcacccaaattcagagttttcttggacttgcaggattttaccgccgttttgtgcgtgattttagctccatcgctgcccctttgcacgaactcacaatgaaaggtgtgtcttttgcttgggaccccccacaagaagaggcgttcaacactttgaaagataagttaacccatgctccactcttacaattgcctgactttcagaaagtgtttgaacttgaa

SEQ ID NO: 168150 - DNA, 416 bp, Zea Mays
accgtttgtcctaggttgtagtatgagctagcagagagagacattaggatagctttgcttgagaaggctagctcagtgagtgcccctgcacctgcgcagtgtgcactttgtgagggtttgcagtctgctcttgagttctgcagacacgacaagacaagaatcgaggaagaaaacacataccttcgatctatcttgagttgggtgtcgtgcagtgatcctgagttgggcatgatggtcagtcagttcaagaggggaactggcggaccggggttaggctttgctgctaaggatgggagtgtcacttgctttgggaaggttggtgagggcagtggtttgacaccttcagagaaaccttcacccactcccaagcttatcaaaaccacccctgctaagcctatcacccctgtgagagatgg

SEQ ID NO: 168151 - DNA, 682 bp, Zea Mays
atgtgcacaattaggtcttgttgccccctgacaatcacgtaggatcagtttaatggcactggcatttttgcagcttactattacaacaaatgaaatgaatatgaaacttaaaatgttattgcaaatacagaagcctctctgtctactatagaaatatagaatgttcttcttacttattatctggctcgattagtggctaaagggaaatgaggtggtatgatgttgctcctaaaggatgttgtttgcatacaaataatctagaaattggttgatttagttctacaaagaagtgttttaattccatgagatagttgtaggtggtctttctattccttgccttcataattggtattcctttcctaatatttgtcttgctggcataacctctgcttggccgaatttctcaacctctactcatctttttttgacgcaaaacacaaaccaattcccttattattaccctttaattgactcgtatcacttgcttggttgtttgtccttgagatgttaattaagtcggaagtatctatcttagtgtggtgatatctatagatgatagtaattgaattccttatggtgacaattactcaccaccatttcatgtgttaccttctgtgtactacaccattgctgccctcactacatggcatacatttctttgtttcgtgttgtacaaatgaat

SEQ ID NO: 168152 - DNA, 623 bp, Zea Mays
tgccttcgtcactcgagggaaaaagaggttgaatagggttttcgatgttattggggttgtttaccctgattattgttttcctgtttgaaggcaagggggaaagagaaaagttgctgattcaaattattccagtgcggtgaaggcaaagaggggcaaggtcttaacacgtaggccgaagcctattgggaggtcgaagtgccaaagcttattgaaagtgcagaggctggcccattagtcacagaaacaactcctgcgatgctgatcgaagctagcgcaggcccgatcaaagagccagaatcagaaaaggtagcagaacaaccaaaggtgctgaccccaccagccgtaacagggctgtcgaagccatcgagcactacaacagcgactccaaggaaaagaagaatggctagcgttttagatgctgttttggaatctgtgaaagcaccagtttcttcttctgccaaagcatctggggaaacatctggagacacaaaagaagcaactatcgcaagtgcggctactgttctttctaaagacggaccttcagaagccgtgccaataggtctgttggaagaaagtgttcctgaaaaatctaaatctcccgctctcgaagcccctcctcatgg

SEQ ID NO: 168153 - DNA, 965 bp, Zea Mays
gtccggcgaggcacggacgtcgacggcttcgacggtgtggcgcggtcatggagccgagagtcgcccataaaccagagagaagtttcgacgaggcacacgacggtgagcacggctagcaaagccgagcgcacagcggcaaatagggcagcagaggctttggcacggggcgagctaggcgcatgggctggatagggtcgtcaaccacagggagctttagcgaaggagatgctggggagaggctcgacaccgatgatggctacagcacaggcacgggacggtggaaactcacgtgcgggcgagcggcgacgcatgcaatgagttgcgggctgcggcgaagcagcgagcaggaggtctagagcagtggtaggaaggtgggaaccggttcacgagagcgcggcaatgggatttataggcaaagataggaaggggagaggacaccgggcgccggtgggagagaagacaaggggctggccattaacggctaaaactagaaacgcttgacttagtggagaaggaatgaattgagcagtttgcggcgcggtaatggaggtagaagaggggccgattgtgctccactgcggagaccagtggtgcgaggcgaggacacgcagcaacttgcaagcagctcaagcggcatgggcggcggcggtgtcaacaactgcactaatgggttgcacaaggaggggttggaagctgatgcagagcagatcgcagggaacaagattgatgaagctgaagctggagcacatgacaacaagaagctgaggaggggtgatcggacaaggaagctaaatcccaagtactatggcgccaactggctgtaatagggctcacttagttttgattctcagtataaagagatacacttgctctattgtaaagtgacttttggctattggcaaacttgaacagaaagaaatagaaaatcacaaacctgctgccgagagaaatacagagagtgctta

SEQ ID NO: 168154 - DNA, 769 bp, Zea Mays
ttggcaaggtgatgaccataagaaaaaatataggttggcaagatgggatgtaatttgccaacctaaagagctaggcgggttaggcattttgaatttagagattcaaaataaatgtctcttaagtaaatagttgtataaacttctcaatgaagaaggaatgtggcaatcgttgctgagacagaaatatttggccaatcggactctttcccgagcacaacgtcgggcttcggattctcacttttggagtggccttatgaagattaaggatctattcatgagtaaaggtacctttcaggtaaatgatgggtcccaaacgcgtttttggggggacaattggcttgggttgggagcgctaaaattctgctttcctcttttgtataatcttgcaaggaggaagaattcaactgttgcttttgtcttctccatagtacccttaaacatatcattccctaggggattggtgcaccagttgagggctcaatggtttcaactagtgacgttggtggcgtatactaatttgactactaacagggattcattcagatgggacttgactgctaatgggttgttctatgttcagtccctgtatcaggaaattcttaacaatgggacggttagggataacaaggacctttggaagcttaagatacctctgaaaataaaggtttttatgtggtacctcaaaagaggtgtaactttaacaaaggataacttggccaagaggaattggcctggtaatcagacctgttgcttttgtagtagactggag

SEQ ID NO: 168155 - DNA, 671 bp, Zea Mays
tgatgacattgtcctcaccgcctcctcaacacacctcctgcggcaggtcatctcagccctccagcaggagtttgccatgaaggatttgggcaaactccatcacttcctcgggatgcaggttcagcgcagtgtcgatggtatggtactctctcagcgccagtacatgattgacatcttggatcgtgctgggatggccgagtgcaaaccttgcacaacgcccgtggataccacccccaaggtctctgctaacccgtctgactaccggagtctgccggtgccttgcagtatctgaccttcacacgacccgacatcgcctacgccgtgcaacaggtttgcctttacatgcacgaccctcgagagccccacctggctgctctcaagcgcatccttcgctacattcggggtactctacacctgggtcttcatcttcgaccgtcgacccaagatgacttggtggtttattctgatactgactaggctggctatcccgatacgcgcaagtccacctcgggctatgctgtgttccttggtgacaacctggtctcctggtcctccaagcgtcagaacaccgtgtcccgctccagcgctgaggccgagtaccgcgccgtcgctaatggtgttgctgaggcttcttggctccgacagcttcttcatgtgctccacattccgct

SEQ ID NO: 168156 - DNA, 579 bp, Zea Mays
catcttcgttgcacctggtatgaggaaatcctccaagtattttccatatgtgggaatttggatgtgcggtttacacacccagtatcactgcctcaacgaataactatgggacctcatagaaagttgtgcatctatgtgggataccaatccccatcaattgtcaaacacctagagcccttaataggggacttatacacaacccgctttgttggttgcatctttaacgaggaccattttccgacattagggagagaattcaagtatcttaatgaatgacagaaaatcaactaggatgataaatctgtcatctccttagaccctcgaacccaggaaatgaacctcaagttcataaaattatagaattgtaacattttgctaataatatgcctgatgcgtttattgattataatggtgtcacaaaatccttgaatcatgctactaatgcgcccaaccgagtggaggtactagaaaaaccattcaaccaccttctcaaccgaagagggtgagggatgctaagcaggataatgtttctactaagcgtccaaggaaagaaaggaatatatgatcctccaaatcagt

SEQ ID NO: 168157 - DNA, 660 bp, Zea Mays
cgaatctgcactcctcggcccaatccctcgtccacctaactccatgcgccgacaggaggaccctacgtggtcagccactctgcttcctacgcggattccttcccagccaccgaccagtgggccccgcgggcgtgggaaatcatctgcgccctggcaggtggacccggtggccagactcttcttcctctccgcgctaaaattccgctcacgccgcgcgatgaactgactgcgcggatccttctccctcccgtgaacctcgtcgtattgttgcaacaagtgccgatgacgtcgggccggtttcggggctgcatgcggctatttaaacagagcttttcccctcatccaccccgtaccaccgcccgggcaatcgttcaccagtgtgtgcggagaggaagaagtcgctggtgaactgcgctcacgggatcaagctcggctgcaacgcaagacctctgggtcatcgctgggagtctcactgcatcaccggtggtgcgcccgcgactgttggggcgaaatcgtctactggagcagcaatttgtcaccggagacatagatgatcgccgctccgcacctcgccatggctgactcccgtggttgccttgcatatcggtgagtcgcatcccctgtgctcgcctcattttcctcttcgggtagctataaacg

SEQ ID NO: 168158 - DNA, 378 bp, Zea Mays
gatccacatgacaagacaatacgcccaggggctggcaaggaactgaagataacaaaagagacggttcgtcttattttgggattgccaagtgctggagggggcagggagtttactgattggtatggtgaagtggatgctgctgcaaaactgagacgtgatctcaaaatttgtaaagaagagtttgatgttgtcaaggttcaggacaagatagtgcttggcaatgatgatgagttatcaatcatatgctttttctgtttttattcaatcgacttctttttccatctgctttatggggcattacgaacaatgaggtactaatgacttcaaacatggcccggatggctgatattgactggtgtcaactagtttatactgatt

SEQ ID NO: 168159 - DNA, 725 bp, Zea Mays
gaaattcaggttttcagtgtaacagagccatctttggggttgaattgaaccttgatctagtgatcaaatgagttcaatcactatagtcgaaatgtagatggtatatagctctccaactttgctgcagagcatggagtatgttcccattgggatttgtgagcaaatcatgcctgaatatcgactgtcaggctaactgaatcccaatccaatggtatagtagcctgataaagatcagactgccagcgctgctcgctcgtcgccggtgacctccctgcgcaaggattcgtgctgccgccgcccggattcacgctggagattaacggataacatcacgggatggggaaatcttcgccgccggtgagctggactccactccggtgaccccccccgtgctttccctctaccctgcggcttgagccgataagctcgccggtgaaccgccgttctctggtcttgcgccgcgtgtcccaaccttgccatcgcatcgccgtgactccctctagcttcctgtcgaccatcggaattactgccacgacactgcacacgtattcaccgcacccgcgttcatcttcacctccggccgccgcgttgttcgctcaaattgagtgccaccgacgaagctgcctataaattgagctcgtgactagcttcgcaacatcattgcgcacccccacatctagtattgctcccagccgatcaccagcaagctccaatttcatattccc

SEQ ID NO: 168160 - DNA, 434 bp, Zea Mays
aggagaagctccagcccattctctgtgccctgcagaagctacaagccaaaggccttaccgctgcgggggtcgtcgcccctatccaccgccggagggtgctcccattggcagagcggcagttgcggctttcggaaatgaagccgggggttgatttggagggttcacggatgtcctcgacccccctctccaccgacgacctcctcagacggatagcgggcacggtagggaggctagacgctggcgtccttaaccagcccccgatgcgtcccgaccacaggtatgtgtccctagtaagtgtccgacccttcttctgttttctctgtcgtgtttcttacgtctttagcccttacccttgggatttttgttcatccctaggggttgaggaattttaaaacctcccggccaccggtcccggaggacgagacgggccgaac

SEQ ID NO: 168161 - DNA, 296 bp, Zea Mays
gtggcaagcacaaagcgaactattctttcgccttttactaaagaataccgtgtgcttgccacaattacagcatacatttatttttggaggtgttgtctcttgttgagagagccccaacaatgctaaattaaattttacatggtttgctattaaattttatatgatttatcgagctctagcattggtggtttatatcctttggttttgaaggtctttctttaacaatgctaaataaattacattttatatgctttcgaaattgctgcttgtgattggagtacgcaacacgtctgttt

SEQ ID NO: 168162 - DNA, 857 bp, Zea Mays
gttgataggccatctctccaactcgcctaaaaactctgaatggtccaataaaacgaggggacaatctgcccttgactttaaatctcctcattccatgaagtggtgacatcttgaggtacacatgatcaccttcctcaaactccagtggtcttcttctattatcagcgtagctctcttgcttggtctaagctaccctcgagttctccgtgattatacaggcttgttcttctgcctcttgaataagttcaggtccaaagaactgtcttcctccagtctgtcctaatatagaggagtcctacacttcttgccatatagagcctcgaatggtgacattttcagcctagcctagtaactattattatatgagaactcagcataaggtatactcttgtcccaactactaccgtgctgaaggccacaagctctcaacatgtcctccaatacttgattagtcctttcagtctgaggatggtaggccgaactaaatttcaactttgtatccatattctcaagaaaactttttccaaaatctgaagatagactgtgatcctccatccgaaacgatcttcttcggtacaccatgtagagacccagttcaagccatatatactctgccaattgagatcccttataagtagtcttaaccggaatgaaatgagccacttgggtcagtctatccacaataacccatatagaaccatatcctttcgaggtgcgaggcaatccagtaatgaagtccataccaatcccttcccacttccactcaagtatctttagtgggtgcaatagtctagctggcctctggtgtttagccttaactctttgacacacatcacacatagccacatgtgcagcta

SEQ ID NO: 168163 - DNA, 327 bp, Zea Mays
acgagttgacataagtgatttatcctggttcgggctacgaagggtccaacttctagcagaggaggaatgaggcttatattactcgcaccaaagtgctcacagtaggggttacaagcatgacgggagaggagaggaccccaagtccctgggagtgattgaggcaagtgccaataccgaatgaaggaggaaactgccaagtgttcgccctgtcctccccttcgtggagctatggattgtcctgtttataggcccagggagagtcgccttgtagacgggagccaactacatgctgtgaaggggtgtcttcatgacatgtagacaatatat

SEQ ID NO: 168164 - DNA, 724 bp, Zea Mays
ctctgatgaagggctcaaaatttctagcacttttatttcttcaatatttgactctttagccttaccctcactagccttcgtctcaactagctcagctgaaggtagcttcggcattgtagctggatcttcagtcctctgtgcaggaggaacaatttcttttcctttggcggccgaggaggccccttcgccaaattcaggtatcacagccggttcgatgtaacgcgaccggtgagtcagaaccttcatcttctttctcttcggctcagccgtgatggccgaagcagcaacctttccagcaccagcaatcttcctttttacccttgccctcacagcgggtaacaatagtcagggtatacgaagccaatagcatcaaataccctgttcaaccttttcttattccgacccccgaaggctgcggacaaggcattgtcttcctttttggagtatgctccaagcagttcatcacttgtagcttcgatacacttcagccaatcatcatttggttcatcaaacttatccccaaacctgaatgtacacttcagccggaccaaatcaccttcgctagagttagtgatggtctccttcgacatttcccagccttctacaagcggccacaccctgaaggctatatgttcttgaattaaatcccttgtcccaataaaagagcaaacagtgctgaacgccctctgacacgcttcagcggcgtcatcaatttcgaccttcg

SEQ ID NO: 168165 - DNA, 822 bp, Zea Mays
tgactgcttggaataactaatgggaaggcttcactgacctaaggcgacctaggaacaaccctaaactaacatgaaccctactgggagtcgcttgtccacgatcacggcggacaccgagcatgggagcacacgttcccgcggattggggatggtctagttcgatcgggtgggttgatgagcatcacgaatgcatacaggtactgaaacagaaccgctgagagcatgatcagacctggaagtggctggccacggcgagggtgcttttacggcggcggtaaactgatttgggggaaaacggcgattctccggctaggggagctaatcggagacaggagtggtggctatggcttcgcaatttagagacgaaggtcggagctcggttgatttgagcgaagggagcgaggatgtggtgaatttatagccgcggtgagtcactgccgcggccatggtgataaccatcgccggcattagctggcgatcaactgcggcgtcaagcgatagctgttctcacgggtttgccacgtccccgccgcgacagtaacacagtcacatccgcgcggcgtggatgaacggaggggagcggtgccgatgaccggatatggctggaatgagaagtggccgcgtggcagccggagttattgctctccaccgcggcgaccttacccggagcaaaaagatcttcgcacggagatgctcgccgcccgattatcccgaccccggcgcgaatcacggcgcggttaggtcgccggcggtgaggacagccgcgctggcggtctgatccccaacagtcactgtaccatggcgcatcttcatcaatcgccc

SEQ ID NO: 168166 - DNA, 601 bp, Zea Mays
ggatatcacaacgtacctcagtctcatcacgatcgcagaagcgaggtggaggaataggtggagcagaagcgggagcacgagaagtggaatctagtgtggtggagaaagtgggcgcattaggtgtggtggaaggctcaagaggggcaggagctgacatagtggaggaaggaggagtggtgactgggtctgagggatcgaatcgagcaggggtggagcgagccagagacgagaggcgatggactcggaaggcaatctgatcggaggcaatcctcaacgagcatccttgctctgcctgatctgctgctactgcggcggcaactgttgcacgagtggctatgtccaactgtctcttttcttgccccctgctgctcaagatatactgccttgcccttgtcatgtctgaaagggcgaggagggttctgatcatctcctcccctgacggtgtgacattatttgtcttcaccatcctgcactgatcaatgacacgctacacgataatgaggaaaggtaagcaagtgcaatagagcagcaggtaagtaaatatgtagaatggattagctacctgggtacgtctcgagagagaataactaggcaggagagg

SEQ ID NO: 168167 - DNA, 602 bp, Zea Mays
ccaccaccaaatcacgctattgtttgcatcgctggtcgaatcttgcggtgaccggagctcagggagggtccgtcgcatgggcatctcgccgggagcactgctctaggcttggttgacggtcgcggggcgcataactactgccgccttccctgggatcgtagcccactctaatttctcccacgctccaaccctttcgaccgccgccgccgtaggaaaccatgtgccgccgccattacagctgggaaaactgccaccgccgcgggacctcgcctgggtcgtcggtccagcctcggcaaccggtttgagacggagagaagggcacgtagaaggtatacgtgggcaacagcgggcacgaaatcgggcggccagatgccaattcgtcaccggtggttgaaatccgccatgaatctacccttcggcgcggtcagggacctcgacaccactattccggtgaaattctcctccctattaaattgccttcgtctctaggtcatgctacacctatcgaatttgagtttggagccctggagcatagcattgccttcctccggcggggtcgccgccgtggccaacgcgggggccgtcgcggcgttgggggaaga

SEQ ID NO: 168168 - DNA, 1171 bp, Zea Mays
ggggtatcggccagttccgatcgttggattagaaacctacggaacagattagatctacggctccttgaaccggtacccaatgatggccgcaggatccgagatccacggatgtagtacgtccacgtgtttgtcttaatcctatccgcccgatcaaagttctgcggcacgaatttaattcattcaaaggggtatgctaggtttaatctcggccgcctgattactcatccatggcacagattttaaattcctaagatctatttgcattcatttgatatcgcatcaacgaccagcacgtaccctggtcgaacaggtaaactcaactgaatcctagtcgtccaaacaggatctaacggtccaacttcacctatcctgtgatctaatcaacgcttttggatccaaatccaacggtcaccattcattagactctacacaaatcctgtctgcatgatctaaactggatggcctggatcgactgaccgaagcggtacgctccagtacgatctgaaccgtccatcgccctttttacggtgggaaggactctcttccagcccggcacacggctgaccgcagaagacacaccacggtggcgccatgaacagtggatcacgcgcgagcgccaacgaacactaaacctagcacgactatgcgcaaaacggagagggaaggacaacgggtagtaaggaggtaatcgcaccgcagattagtcgcacagatgtccagaccacggcgcacggcggaacgcccaggactccacagcgtcggcgagcaattaaggaatggtcggacgtcttccgccctcccgaggtggttgcgcacaagcggcacaaccaggcgaagctccccagtcgaaccacagggccacggctgcagtgcagcgctcggtcgacggtggcggatctcgcctcctgcgaacgtagcactggcggcggtgattttctggtcgcgatgagggctgacgagatgggcgggatagcgcaacagggcgtggacctgatctttatagagttgcgccgcaagggaatccgcaggttgaccacaacggccacgcaagctccgctcccgacgccgtcggactcggcaaggttgctggcgagagagggaggtggcgcctgacagccagggcccacacgcagcgagaacgcaagatctgcgacgcgcgcgcgtagaagcc

SEQ ID NO: 168169 - DNA, 979 bp, Zea Mays
gactacgacccctcgccaccagccgttgggcagattcctgagggaaccaaacaccataaccacgcaaggacagagaacttggtagccgccgagagccacagcggctactccgcccgcgtgccatcgaagggctttaaccgaaaagctggggtgcgcaggatcgtgccggcattagagagcatggagtggaccaccggttcagcaccgtcatggattcaacgctgggatattcctccaccgcgagaccgcgtagcaccatgggctgagaactgcaccccaattccaacggtaaggaacacctcgtactaatttcttttcccgtcacttcttcgtgttgcgctagtagctgtggggaatgggcgctcggaagaatgatggtgctcgctccggcaagttgcgcagtcccgccagtttgatggggagcggctgtattgagtggaagcgtgtggtccttcaggtcgcgtggctgatatactgccgtcgtgatctgtgcgccgtggaccgtttcctgtgctcgatgtcggccgaaatttgtttggggattgagtttgggaagtcgtcaatcccggcgagggccgagtgaatcggggtatggcgttcgtgagggccggattcacgctctccggcgagggcgccgtcgttcgggtgtgctggcgcggccctgtagtgcgccgggggggaagaaggcgcctctgccgtttgatctgaacggacgatagagattagatgtggctcacccattcggcttgggcgactactatccgtccgatcaagatcggatgatggacatcgctttaggattcattaaaccggcgccatccgatcgttgatccaatgatcagcggtgcatacctgttcgcatagggagaggatctaatcctatgcgtcaatctctaatcggacgatcccaggcgctgcataccccttcgccgtgtacatttattaaagagcccctctgttttcggaaaaccaacccgca

SEQ ID NO: 168170 - DNA, 1127 bp, Zea Mays
gacagaaggtcgcgaatctcaagtgctattacgacacactcagaaggagttagagtgtaaatttagatccgttggaaagaactaaagataagctttccagattgtatttaaacatttgaatcgtacatgtaacacaacatataggactgttttcttccagtgctcagatctaggaagatggattcatggaggcagaaatgactgcggaaatatgaaaagatttggtggattttgtggtgactaaaacgtgaccagaactcaaaactctaaagaatgaaccactaagaaccagcaactagcccaaacaatgcaattgaaaactcaacaagcaaagaactaagcaaaacagccaaagctcaaacttgttcggattttcagatctagcctgttttttttgtagttttctggactgtaggtaaggggatgggtagaatctctcaccgaaaaaaccttgctctgattaccacattatggaacccgctggggtttgctcccgacctttcaatgagagtgggggataacgcaatttgaggagtatcgacgttgtgctgcccgactacaacaccaagggctgcgctgcgccttagcgatagttacactgcctccaatttgcgttgttcttgctgtgccaagaacaaccttgaacctacaagcaaatcaaagaacaagcaagaacaagtggacaagcaaacaaccacacagaccttgcccaaaggagaaatctgatacacacgaagttggggttctgaatccgagaaaatcgggtggtctaatcgacacacgcgtttgcctgcaagtagcagcaactaaacttacaaccaaacaaaacccaagtctcaaatggtggctgctggtggtttatataggtgggggagcaaccaagaggcgtggaggggtttaaaccctaacttagaatgggcccctagtggtctaaacaagatacaagggcctcagcccaagattgggtctaagcccaagactagaagactgaatgtcattttggcaattctgcttaactcctttggaatttcgtcttgaggttgaatccatctgaaagtagagttcaggagctttccaacaagtactcatgggcttcaaacaatatttggagctaagagttatggcct

SEQ ID NO: 168171 - DNA, 283 bp, Zea Mays
gaagtccaggtggctaggcttgcttggtattgcgatattgtgatcatcttcagaatcagtctcttcaatatctgcttgttctgcttcggcagcaggggtgttctctgatgtcaccaacccacttcgcctcattgcttccgaaatagggacagtttccgcagcttcagcttcgtctccttcgcgctcagctctagcagtagagcgcactctggccatttgattttgaatatcttgaaaattgctcagaaattaataacctctctcccgaagcccttcttctgac

SEQ ID NO: 168172 - DNA, 544 bp, Zea Mays
gtttgtgattgatctgttgcacaagtcctcgttcagaggggagagggttctggtattttgccacaacgtggccccgatagccttcctggtcacgctcatagagatcgtctttggatggcgccttgggcaggaagtcctggtgctgcagggagaccaagaactgcatgtgcggtcagatgtcatggataaattcaacagcgacagaagagggaagaggaaggtgctgattgcttcaactacagcctgtgccgagggtatcagtctcaccggcgcgtccagactggtgatgcttgattcggagtggaaccattccaagacaaggcaggcaatcgcgagggcgttccggcctggccaggagaggatggtgtttgtctaccttcttgtggcgtctgggacatgggaggaagataaatacaacagtaacaggaggaaagcttggatcgcaaaaatggtcttctttggccgtcatttcgatgacccattgcaaaaccgtgtgaccgaaatcgatgacgaggttctcaaggagcttgctgatgaagatgag

SEQ ID NO: 168173 - DNA, 474 bp, Zea Mays
ggacgcgtggggggccggccgggcctagtcgctgctgcgagtgcaagcaaggcagattggggtggtccatggtgcccgctctacactgcactgcatgcatgtgcgacgaaagggtgggattgggaatgacagcagggaatggaaggggaaggaaggcaaaggtaccgaggttgaagaagctaagaaggctgcagtgcagaggggggccaggccagtggcggtatcatcacgacgaaaccaaggtaaaagcaggagcggggcccagccggatcgttagttgcagtcatctgtacgtatcagtgggcactgggcagtggccgatccaatccgatccgatccactagatgactagagagctactagtagtctctcgctctatcgccatctgtgatctgtacctttcgcttccgccgcgcctaggtgtcggcgcattccattgagtttatgtccaactaggaaacggggttaaactct

SEQ ID NO: 168174 - DNA, 831 bp, Zea Mays
cttttgtaaaacgacttcggcgaaggggtaccgaacgatcctagccgtttgatcggctgcatacggtcaggattagattccatctaactctaatcagaacactacgcagaccctaggatcaaaatccaacgaaccagatctaaccacaaacggtgcgctagaatccaatctagtgcacccattcggatcaaacggtcatcattccgttttaacccgattgaaccctgcccacagatatctgatccaacggccatatactcatcttccccagtcgaacgcccagccgcggcagctagcagggcgcacggtggcgtcacgccggaggagcacccccaacactcggcccgaggccgactcggcacacaaaccccctaccgtcgatcacagtagcgcgacgcagggaactaattcgagctaatttgtgaggtcttacccaggaataatggcgcggaggtctttggccacggcacggggtgaattgcgacgatgccctctccttcgatgctccgcgatgaaccgaccgaattccaacggaatcccgcgctggatccactgtctcgagcgagcccgcacgtgaagccttatggcggcggcgcaacgcgtggttgcggtggtgtggtggagttcctcgcccatccctctcttctcaatttctctctctgccgcctgcaacaagaacacggtgcttttactagtgtggttcagggtcagattttggtgtggccaagggaggcgaggtgcgtgcataaatacccaagcagggggatttggtccactacatgcctcggcgaggaacaacggctgatgagcaaaatccggccaacaacccgg

SEQ ID NO: 168175 - DNA, 941 bp, Zea Mays
aataggtgtgaccgtgcaccagctgatcccaatgggtgtgaccttgttgaagctgatcccaatgggtgtaatcgtgccgaagctgatcccaatgggtgtaaccgtgttgaaattgatcccaatgggtgtgaccgtgcaccggccattgtccgtatttttgatgaggacgaagaagaggaagaagaagttccactgattcgtaagaatagccagcgttacagaggtagtaggggggatagtgatattccttctccagctctgtctgctcttgtcagccttcaagagttgtccataacggattttgatcaggcccttgaggatgtcgttcctgaggatatgctatcggagccgactgctaacgacatgatggatgtttgctctgaaattccagacgtgggattagaggtatcccgagcagtgtctcgtgcatcatcgactttggaaggcagtctccgatgtcaagaagttggttaggattgcccgactcccctggaggtgactgaggatccttcagccttagaggtggttgttgcagaaaacccaaccctcgagggtggtgctggcagttacccagcccccgagggtgtcaccggtagtgatccggctctggtgggtagcacgagctgcgacccagcctccgagggtgttgccggtagtgatccggctctagtgggtggcgcgagctgcaacctagcccccgagggtgtccaagtgagctctccttcccacacctccatggatgtccatgtcgggtcgtctccaccacgatctgatggggtgatggcgatgcatgcttctttgactttgagcaagcgtgtcgccttggaggtcggcgagccagatgcaagaattctgatatccgctggcggggctgagtcaacccctgacaatgttcttcaaattgttccggttgatcttccttcgtcgagctacgacgcagc

SEQ ID NO: 168176 - DNA, 703 bp, Zea Mays
gcaaattttagatttgaccaaattacaaagttttagttcatcaaattactaacaaatcatagtaagagactttggccatttggtttctttaaaattcccaaatcagcccttgaactatgatccctttgagaaattcagatttctgaattctgaatttcagacccctttccaaggatcaactgcgttctctgtttttcgaaactcaaaaccaggagatccaaatatcaaacttgtgccaaattcccttgaacacgccctgaaaaagtttgaactcaaaccaaattcatttgacacagttttggcgcagtttgacctcgggaccagacattctgacactggcaccttggtgacgctacaactccctctccctagcctgaaaccgcgcgacgtcaatacacaaaagacaaagcaaggtcaggtgaacaaatccttcacagcaatcttgcccaaattcgtgaagatttgcacccaatcaacgctagaacttgggcagaggcaacggttccacgtgttcgaccatggctgacacctccggttcacgcccgttcgcgcacccgcgcctcccagtgcacgcccacgcgcgctcaccggtccacggccgcccgtgcaccgcgccgtgcctataaagccgccccaagcctcggccattcctccccgcgtactctcaagtcttgcccaagtcagagatcaccggaaattgccc

SEQ ID NO: 168177 - DNA, 569 bp, Zea Mays
ttatgattatgttacctttagtagagtagtactgcatacatctgcacatggtcttgggggttgtagctgtaccctcttaagctctcccgtccaaaagtttcagtcggcgatcggcgtgtagcgggctgcgcaaaaaaaaggttcagaaaaagtgagatctgcactatggagaggagaccaactggtggatttaagcatgccgttccgacaaacaactaaaccggccacttggatgatccgctttcatctccagctgtccttcattgaagcctctgtccatgtgggtgacagccacacactttcagttaattagcctaaaagctcgaaatcagcactgctctacgcaccctgttggcgtggtcaggtcaagtagccttggcgattacgaatccgttaattcttagcgtgcgattcagcaattcagggtgaagaagccattcttttacggtaggaagggagtgcttttggcatctcatatgccccatctctctgtcccaacaaaagaaagtgcagtcagttttcatcgttgattcaagtttatagaaaatagtatcagtatttatatttac

SEQ ID NO: 168178 - DNA, 309 bp, Zea Mays
cagagagcgaaggatctggcccgtaggattagcatcgtatggttaagatgaagggtggggacttcattaaatctccaccgtagatctaggaatgcagggtcggatggctatcgtgtatgctgcgggtccgatctaatcagagccactaatttcaaatccgatgaacgagaatcaatcataccgcttcagtcgccactcttgcaaaagagaccttctatttgtagtaaaacaacccgcggttcagggcaggtgtagtctgggtctgggaagattttatggtttagcccctgcactatttggtataaatgc

SEQ ID NO: 168179 - DNA, 587 bp, Zea Mays
gcaaggagaccccagctgcatgttgcacaagggtcgggtcataccgaagttcagtctcaagggactcattaccatgctcatgagcttctcccttttcttctcatcggccttcacataaaaccactcgtctgtccacccggtcagccatttagtgcggtagccaatcgcgggggcattggtatcctttcggtatgcaaagttatagcacccgcaattcttgtgcagaccattggcttttgccttcatctgataatgaagctcgtgcactcgacagaacccttcgacattgacactctttccttggcttcgaagagcacaaatatacgcgttgagcctaacaatggcattgggggtcagctggtgtatgtagatttcgaacttcttcaaaacctcaccgatcatctcataaagggggaagtcctgccctgaagaagcttttgaagactacgacttcatccttttttggctcgggaatcgtcagctctccagcaaaatgaactagttcatcatcattttcccccaaagtatcctacttttttcattaaaactagatcctctgcctttactgtggattttccgaactcgac

SEQ ID NO: 168180 - DNA, 466 bp, Zea Mays
cagcaagcagagcaagcttgacaagcgtcgaacagcaagggtgcgagtagagaacagactgcaggggcgaggctcgacgcacagctcagcattggcggcagcggcgaagatctttggcgcagggcgagctaggtgcaggggttgttctctggtgacgacaacagcggacggcaagggtggcgacgagctggttacgcgagcagcaagcaggaagttggaggtgcgaggagacaagcaatcggctctacgaggcgcggtgatgtttttatagaggcgagcagggaaaacggacattagggaataggaatcgaaggggtcaaccattattagagatggcggtagtggccggcactagcagggagaggaaacggtggctcgaaggagggaggggaacgaccggtgaggtggtacgctccataacgcagatggacatacacgaggtctggctagcgggagaagcaagacg

SEQ ID NO: 168181 - DNA, 325 bp, Zea Mays
gtttgtcctaatcttaggctaatgattaccctactgcgtgtaactagtcttgttaatttttgcagttcagattgtgcagatcgggcctagattcaggtagataggtttgagtaatgggtagaggtttttttgcccagccctagaggcaggggttatggacttcttcgctaaagaagatccttgcctagacgctacttttgactttggctccattttacctattggctcaagtgctgctactgctggctgtgcagacgcattcatgggcactgctgattggtgggatgttccactatccgcttatgcactagcatttcttgctagg

SEQ ID NO: 168182 - DNA, 496 bp, Zea Mays
aatcaatgcaaaatgcacatgcttgcacagcaggggcggtctttcttctttccattgtgcacttcggatcggttcgtcgtcgtgtgtgtggtggcgtcgttgccatctggtaggtatacgtggcgctgttgtcgcagcttgctgccacgaacgagaacctgcactggcactgcacaccgtgcgtccgtcggtccatgcctgcatagagctagtaaaaggctactactagtctgccagtagcccagtactaccacttatcgatcgctactcgcggtcagtcaatagggggaggcaaggagaatgaaaagcttccaaggcctggcgccctggctcacggcacttcgtttcatgcccacaaagtgtgttggacccgccaaagtgccaaaggatcagaactcccgatcgagtgtgggaatcgccccatcatgcacacagcacacccccagtccccagataatagcgaagaatcagttgcagaatacgacagggaatccag

SEQ ID NO: 168183 - DNA, 620 bp, Zea Mays
gtcgagttacgctgggccacgtcggcgttttagaggtaatagccgagttacgctggaccacgtcagcgttttagaagtaactgccgagttaggacagatactggtggtgctttagaggtaacagccgagtggtgcttgaagacgtcggtgttttagagatagcagctgagttatgacagacactatcggttttttagaggtaaccgtcgagttacgctgggccacgtcgacgttttagaggtaacaaccgagttatgttggaccacatcggcattttagaagtaactaccgagctaggacagatactggcggcgctttagaggtaacagtcgagtggtgcttgatgttgtcggcgtttcagaggtaacgaccgagttatgtcggaaatcttgtttttcgagtgatgacttggcactttttagaaacggtgcccaacccgggaaaaccccatttatatcacgttgtcgcacgcctctgagttctgatccctaacttcacatttccgcctcaagccactcctctgtttccccctgatttcgcttctgttcaatccgccggcgagattgcgatggcgcccaagcggaagaaccagaattctattgcggtagtcattcctccca

SEQ ID NO: 168184 - DNA, 472 bp, Zea Mays
ggtttattctgtaaaatctaccagactcagactacttccgcgaggacggcgcattgattctacaaaagacgaggggcttctttgtaacactgttcggctgaaggggtatgagggctttctagccgttcgatctaacactggcggaccagattagaactccaatattatcaatcggtacacgcttactaccgtcggattcaacatctacggctgatcatctaccacggtgcgatctgatctactccctccgatctggttacaacggcccagatcaaaaggtatcatggctgattcttaacggtccgatctagatcgagggtccggattcaatctcgaaagggtatgcctaggatccgatctcagccgtacactctacatcctacggctcgcactgattcacccccaacccactctttttcctcggcatgcatagcggcgacaccgtccagcatggcggcgccatggctaggac

SEQ ID NO: 168185 - DNA, 595 bp, Zea Mays
cggaggcggaggtggaatcccaaaatcatcatcatcattatcgagaactgctgcgccctgagtctcaaactgatggaaaactatatcctctacgtgaatgtctgtcgctggatcaggtactgacactggatcctcaagggctagacaataagagccaaagaggaggcgagaggcctcaagggtgccctggaactgcggtggctggatcagctgtgcgaagatatagctgatatagtgagcatatggcagctgttgccgggcacgaagaccatccaatacggtgtcctctatctcacaaatgaggaagtcaacaacatcaaactctgaatgagagatcagggcaccgaggagccagagctggatatgagtacaacctccttgtaactcatccgccacaaaagcgtccgtctcatgagctgatataggtacttggccgctgtagtgaaatcttccggagaacgtcgtgagccatctgagaagggcggtcgggacaaggccacaacgtgagctgtagctggagcaactccgccgtgagggcgacgaggaggatcagaggtaccgtagcacaagctatgaagacgagtcaatgactcgt

SEQ ID NO: 168186 - DNA, 444 bp, Zea Mays
taacgtgtgcacaagatcgctgcacggttaatgtataattaattaaccaaccttgtcgactttacgtgaggaataataataacgcgcgcaaaacacgcgacgcgaaataggtacacacgacacgcggggcagacaaacagtctcgtgggggtagacgctatgtctaggggtagacgagggcctaggcgatggtgtgggtgcggcaacgtgcacgcgagcacgacacggtgtcgcggtacgcaaagcacaatcaacggtgggacaagggctaacggacgtgtgcacgcagagctagccgagagcagacaggcatagacaggaaaccattctcaccgtggggtggtgttcagacgacaagacacgtgcccgacgatggcgaggtcgctgctgtgcgatagagactcggacgtggtgagtacgcagcaccgaacacatggttccgat

SEQ ID NO: 168187 - DNA, 324 bp, Zea Mays
actgacgacaaccttcgtcgtcaagcttcctctttgggtactcccttcgccccccggtcgcctgacgtgcctctccatcctcctcccccggagatcaacgagtggtaccagcaggcatacggggtgccttttatgacagcagacgacgtcgacgaagaagaagcttattttgatgatcgtgagcagtttgtctcgcctccgtatcacggggatccgggccaatcatcctctcaccctccgccccaggatccttctggcagtgctcctcccccagatcagtctggggaagaacactttgcctctcacctggcgcaccacctcttt

SEQ ID NO: 168188 - DNA, 327 bp, Zea Mays
tggtgagccggctcgagatgatactcagaggcaaggtgtcgaacgtcggcgctcctgttgcatactcggcttggaatttgcctccttcccaggcttttactagttttgtgtcaaatcctccttctggtgatagcggtttgggtcttagagtgcgaccctctcccgaagaagttagtactttggttgccccgctcggagaaattcctgacgacgagaggcaggttcattttgaggtgcctttgaatccaagtgatgcagagataagtgttatgctggatatgttagctgaggattcttctgatgccgctcctgctgaaacattggtgg

SEQ ID NO: 168189 - DNA, 663 bp, Zea Mays
gggcggtgttgcctacgcgcttgggaaacgtggtgaggtggcggagcggcctcgagttcgctttatgacgggtgggccctcgcgtcccctcgactcccgtccgatggcagaaccgtgcaccaacactattgtggacgcctacactactgtcttaagaagcagtatagatatatttcactatataatctatcagtttaaattttacaaaaccttcccaaccaaattaccacacacataacattcattaaatccaccaaacaaattgtatctagacttagcacaccatgaaaaccaatggcttaaatcgctagataaccctctctcccttaatcacttaaatctaatgaacgatattatttggatcatccttcatccctccccactccatcatctccccgcgccccctacacctcactcgcgtcgccgtcgccgccgttaatttctcgtctcattgggatcgtagcgttagcacgagctatatgttattatatacaaatgcgggagcaacctagctcaaccaagacgtctacatcgttgttttctccttcaccgtcctatcagacatcaccgacacactgcgggaaagctcggttgtctgataaaaccaaaattaaaaaatagttgttgccaagaatcaaacatgggacatccgtgtaatcgttc

SEQ ID NO: 168190 - DNA, 832 bp, Zea Mays
ccaaattagaaaacctcaaaaatttcccatcccaaaactctaaccctaagatgagaaaggacctacctggttcctgttcacggccgcaaatggcatgacgagccgtcgcgtgtggacaccgtcgtcctgtctaacgagtgtgggcaaccgcgggtcgccatgtcggccacagcgcgacacgactcatcgtgaatggatctggcagagcacgacatgggccctgagctttgtccattgttgctcttgttggacccagagctgatatgatgctcctgacattggtgtgtgtgcactcaccgtcgtaagaaacccctcggtgaagccctttgatggagccgcacacggcttacacgcatgcagcgccggcgagagggcccgtgagggcaccgacgagagggcccatgagaacggcggccaactcggctgatcatgagcgaggcggggaggacgtaggctctccctgggcatcatgcgagtggggttaggggtgggggtgggaggtgattatcagggcaccataccaagggaaggcggcgtaccatcgcttgggcatcgcgcgagctagggggtggggcgattttccccttgtccctatgggagtaggctttggtgagctccgcatgatccacgacctcgaccttcctctgcacggcgacccatgccttctccttgtgtagcgctgtcgccttcggattttggaaaccaccgtcgtgtgggacccgaacagggaggaaggcatgcagagagcggttcctgcggatggagtgcatgctagtgcgaatggaagtgccgagtgcacatgcgaggatggaagggggtcgcggaggagggg

SEQ ID NO: 168191 - DNA, 572 bp, Zea Mays
gaagacccgacgtgaacatccatggaagtatgagaaagagaactcgctcggacaccctcgggggctgggtcatagctcgcgctgccccccccccccccaccccgagccggatcatcaccggcaacaccctcgggggctgggtaaacgcaagcatcatccttggggaccgagttctctgtaacagccacctctaaggctgaaggactttcaaccacttccatgggaacgaagcaatccagattggcctctcgactcttaagaccacgctccaaggtcgatgaggcacgagacgctgctcgggataactctaacccggcatcaggcacatcagcgcaaacttccatcattccaccatctgcgggctcggacaacagatcttcagggactatgtcttcaagagtctgatcagaatttgccagagacaattcctgcagacaaacgagagcagacaaagctagagaaggaacaccactactctccccgctggctatgtagcgccgactgttcttccgaattaaggggatttcctcctcctcttcctcatcctcatcaataatacggacagtacaccc

SEQ ID NO: 168192 - DNA, 821 bp, Zea Mays
ctccgcgcggcccactacggatggctctcgcgcgcgcttccggtgacttggtcacactgccgcgtggggtcccgctgccagccatcgccgcttgtcccgctcgcgcttcgtttcacggactcacaggcccgccatgtcagtcgtccccttgccggctcgcaacagactccgcgcgcgtcgcgcgggatcgccgcggaagcctcgccggtcagcgtcgtaatctgcggatcgagtaccccgtgccgtgcgcctataagacccggtgggtccgccgccatagccttaaacccacctcggtagccagctgagagaaaggggagggggcagagcacgagagatccaccgtcaccgtcgacagccgcaatcgcttccctgcgtgtccgtcggaggtgatcggaaacctcctctgggcgctccggagttggattgtcggtctggcaccaggaattcctcgccaagcgctgtccgtcgccgtgtaatcgccgtagtaccgcctgcgccgtggccaagctcgccatctccgccctgacctctggtaagtgcactagtccactcgttacatccgtggggccgtgtaaccccaataggacagcagtagggtcgatgggtagtcgtagattgctcgccggatttttgtatgcgccgctgggccgccattcgtggtgggaagctcctcagcgtcgaccgatttactggtccggcctccagattgttcctaattgtcgccagctcggtgtagcacctgcccgtggtaaggattgtgcgttaaggcgtcggattgcctctctccggcgagagggcgccgtgatgtcgggcggcgc

SEQ ID NO: 168193 - DNA, 991 bp, Zea Mays
ccaacagcaggattcatttgtcagttatctttcgacccttttgtagcatgtccccatttctttattgtattggcactgtcatgaatgaaaaatggtataacaatggactaaaacatttaattccaattgagaaatgctcaaatttagtggggggaagtccattctgaccaagtccaattcaattaattgctgatcctttttaaaagaatagaatagaatcacagttttgggctttcactagcatgctccactggatcggattggtgaactctggttcccatgatcccatcgaccttcaccttctgctagataatcacgctgactaggctcgagtttgcctcgacgctctcttggaccgtgtgggaagagctctcaaggacatctgcattctgcaagaatcagtgtatctgttttgtctgtccatgattcaattgggttgcatgacggagaagtggcccttgacgtggtcatggcgcgcagagtgcaatctcctgcatgcccatgattctacgcactattacaaatatgattaagccataaacaagctgcctccttagctctgcaaaacggatccttccgagtggttttgtcagtatatgccagctgttcttcagaactcacatgactgatttccagtctcccatcgctaacacactccttactcctctcatgataaactggatttttactcagctattgagcagatctgttgtcaattcggaggttgaatttcttcacttcagtgcccaacagatcccctataagtctgcacagccacactccctgacagcctgtcgttgctgctgctatatattctgattcacaagaggacaatgatactaccctctgcttttgagatgaccaggtgataatgtttttgcctagaaagaaaacaacacatgtggtgctctttcacttctcaaggtccccagcatgatcactatctgaaaacctagaagttcaatttcagctcccttgacatacttacagc

SEQ ID NO: 168194 - DNA, 1082 bp, Zea Mays
gagcaatctaaagatatgcacttactcacaacttgaaataccaatttcttgacttacagaggtacccaagtcctgattgctccatttcttgcttatcttctcttttccacctagagactatacaagatcgctcaagaaacagttagtcaaaagacacaagttatgtgtgctccccctcaagttgtgcatcaagtatttgaatgaattgtactttgcacattctagcttccttagaggggatcacaacataccttggtcaaggcatactctcctacttttatcacccaaagatgccaatttgaatatcaaatgaaacgccacttaacaccaattgaaggctaaatgaaaggttgactaaatacaacaatgcacacctcagcggcatctaagccgattgaatactcacaggaagtctaacatttacgcaacttggacatgcttcatacttaactatcattgcatataccaattgaagatcaacacaatcatgtatataaagcgaaatatctaagcatgtcataattaagaaggtttcttaggtgcacaaaagaaacaacattttaaaggcataaattacctaagccaagatattaccaattgaaatgcaagaacacagctatgatcactatcaatggaacttcaagatattcaataaaactgcacagttccattttccatacctttgcctttatgagagcacttgttatcaccaattcagggctccttttgcttatgcacctcatagcttaaaagggcacgacatggatttgaaattcacacagtaccaaaccagagtaatcatgtgaacatggactaaataaaatgtcataattgcacataacatgacttaaaagagttacaggtttatccatatacaccaagagagttaatcgttgtggatataacaaatgaaagagctaccaatgaatgatttcaaaagatatatcctatagagcaccagccatgattaagcaaccatcattatgatccataaagcataactactctaaggacaggtagcacaacaagccaacttaagagcaatactaaattgcaattatgtacttaaaatacacgggtac

SEQ ID NO: 168195 - DNA, 790 bp, Zea Mays
gaacggcgatctaatttggtccgaccacggtgagcgcgcggatgaaccaaagaaccacgcattcccggcgattggcggcggtctagttcaatcgggttggtcaatgatcatcacagacgcatgagaatgcttaaacgagggagcagacatcatggactaaccggaattgtgctggccacggtgaggttgttttcacggtgttcttgagcagatttgggggaagttcaaaattcgcgctccctggtgaatgattgaggatggttcttggtggctgggtgtgtgatgatcttgcggagctcacgatggcttcaatttatagggagcgaccgcgagcacaacgaatttgagcggcggatcgtgatctgtaaaacggggtgagtcactagtggccgcgcaacgtggcttttaccgtggcggcacctctggcgatcaccggaacatgcgaagcacggttagccacaacgtggtaaagcgtctggacacgcggcggacggcggtgatggttcaacggcggtgagaatcttatccgagggatcggtgagcaaggggaaaggtacggcggctagccggagtggtgtccagctcaacggcggtgctgatccttctacccgagatgttatccacttgccacgagcacgaatctagacgcaggcgacacgaatcgcggcggagatatcgtcgacggtgagatctctgcgctggcggcctgatcccaagtctggtactgtaccatggcgaatcccattcagatgaactgacagcccgatttgcagagctatttactcccaat

SEQ ID NO: 168196 - DNA, 630 bp, Zea Mays
cttttaagggcgattgagtaaacgttaatgtcgactccgggcactagtggaactgctggtgaatctcaagatgtagctgctgctgcatctagaacagttgaagcatctcaagtggaagcaacagcagtcgcagtggcttctcgtcgtttaacacgtgcacgtgctgctgctgctgctgctgcactagcatctgcacccccatccgattctggtgctgcaggtacagaagatacaatagaaattgaggatgatgttactattggtagtaagagaaagccaaaattaaaatcatgggtttgggaagagtttgacagacttcaaataaatgggatttggaaggcaaagtgcaaatggtgtaagaaatatttaggaggggaaacaagaaatggtacaagtcatttaagtggtcaccttgagatttgcccggatagatctgttagaaaagggttaaaacaatcatctcttaaactgactgcaaatccacatgatgggatagtaactttagagaaatacacatttgatcaagatgttgctagaaaagagcttgcattaatgattattgtccatgagtatcctttggctatggtagaccatgttggatttcgcaagttttgtgctacactgcaacca

SEQ ID NO: 168197 - DNA, 1091 bp, Zea Mays
cgggggagccggggcacagcgaggcgtccacctcgggtctgctggcgccgccgcaccagcaggaagggcaggaggccgagtcgtcgtccgggggcaggaggcgagggtgcaaggtggcgccggagcccaaggagctggaggaggggaccgccgcgctcccgtcgatgcccggctcgccgagcttcaggtactactgccagaagaagacggcggccgtcgataggatcgtggctgatgccatcgacgccgatgacaccgtcaggatcagaggtacttcaacttaattcgcacaccgcgacgcgcgacttgctcttcacttccatgcttgccgtctcgtgagctccattgacgctgacacttcccgaaccatccttctccccatctcctcctctgcagcgacggcgcgacagctgagcaataggagcgaaatcacggcaaacaaggcacaggactccaacgaggtacatgatccatatccttcatggcatcgtgcatgagctctcctattgacatctgaacattaaacgttgcttatgcttatgcacttgcattgcagctgtggtatacagaatatactacatctgctaatttctgataccttaattgatatgcaggtctctcaacctaaaggggggaccaaatggcttaggttcagtggcttgtcgatcgtcgctgccgcttggcacaagcacaacttgttcagccgccaaagaagcaagccttcgccgcctcctgctgccgcttcagatgcaagctcccaaccctgatcaggcagcgctatatgggatcttctacattttactacgtctcagcttataaaaacacacacgcatggctcattcagtcatcgtttatgatgcatcgatgctggctttgcatcattcgctgatattttttcagccttggttagtccctgtaagctaaagctgattctgtaaatggtgcaaattagtgttaagaaaggagggcaatctggaaatccatccaagctttgcgtcatttggttatgtgtactgttgaattctgcgtggtcatgtagcagaaatgtttccgcaagatgcatgtttgttttagggactaatttttagtcc

SEQ ID NO: 168198 - DNA, 839 bp, Zea Mays
cttatccagtcctgtgaacacattaaagcctccaaaatttcaggagtaagcctgctgcgatgctcactaagaatccgcccactagtgctaaaagctaactctgatgcaactgtgctgaccggaatagccaatatgtcacgtgctatctttctaagtgtaggataacgggttccagccaccttccaccagtctaggatctggaagttctcagttgaaaaatgaaccaaatcatcctccaagtatctatctagctcagttttaactcttgtcatcgctggccttcgactagcaacatgtgcactaattgttgacaacaaactagtgtcaagtagaggagttgatgactctgttgtatcttcaccctcttccatttcatagtacttcatcaaatcacataaagactctttcacttcatcaacttttagcacacactgatcactattttgacctatcaaagtctcaaagaacccaaggagataatcaaccttaaacctaggatctaaaatagttgctattcccattggtccttgaatatccttccaatatttttcaaatttttctatcatcttttttgacatctcttctatgataggatttccacattcagacactgtgtaattttcaccttagcctcacaaattttaaggagttgaatatttgcagtcacataatctgttctagagaagaccttggtaatctcattaaacatcttgagtctatcaaccacttgtctcgcaaaatcccactcttccttatttggtgcacaatcataaagtttttcaacacgagtggcacggttaaaaataggctcatatggaatagcaatagagagcatcttg

SEQ ID NO: 168199 - DNA, 605 bp, Zea Mays
tgggcgtcgtgttcaggggatgaagaaggcggaacgtacgactgtgttagtggggtcaccggaggcagtttcaaatttgcttccttgtttatttggaaaggctggagatcgagcaaatctgcaggaatcgctcacatcttcatttctggatacaaggagccatagtccgtatgtgtatggtaggcgtagatttgggagagcccaatagctgaaactcagctctgggattccttacagacctacgccagggctggcttccctttttgcacgtacgggcacatgggtgactagtgcccgggcaattcattcaactctcaggaagtcagccaccatctcatacgtggacgcagcgaggcatgcaatggtgcttggcggtgatcagggaggccggggctgtggtagaggccatcaccaatccgggggtgcaggcgggtatgcttcaggtcatcaacaacacggtggagtaggtggctttgtcgctagtcagggacagggatccagctatggccaaggcggaaatcagccaatgttccaccccggttatggaggaggtgaccggtcattgatgcgtcggggaggaggtcgtggacgtcacagcttttggc

SEQ ID NO: 168200 - DNA, 553 bp, Zea Mays
agatcgattacgcggcgcacccggacttgattcgaagcgtaactaggtgataaacaatgcagaggaggtatcaaatcgatctaaggggcattaccgatggctgggaggctgggtgaagctgtccacgcggcccagcgggttcatggcgtcgctacgcgacggcgagaaattcccccgccagcacgcactccttcgttcagcaatggtcctgcacatctcccacatggtttgccgccccatctggaactcccaccgaggcaacatcgcagcgaatgagcaagacaatggtggcggtgaatggcgcgcgacgccgaggtcgggtgctccctgttcgcgagctccaaaggttctttgtgaccccacccagtccacacaggttgatggccctttgtgaccccaccctaggacctgaacgacacgaattgccgcatgcgacggtagcggcgtcccactttctctctctcccactttctccctctcctggtgaactcgatgagatctcagctgggcgtgagggcagaacgagtcacgggaaggcctatttatccccagg

SEQ ID NO: 168201 - DNA, 388 bp, Zea Mays
acgaaacgtcgggccaccgcgcagggcgagccgtgcctggccacgctgcgttgccgggggcagggtgggagctcgggtacgaccgcgttgaggctgccgaggggctgctgtgcatgggtgtgagacaaggcgaggggagtggaggaaccccaagttcccggttgcatgcagatcgcaaattatgcgcaggagagaaaataggaagtgggaagttctttcctctatttttctcaaccgcacaagatgcaccagcgcaaggaaaatttgcatgcgttcatgcgcgaggtggggcttcgcagggacgggcgcctcgccatgctctggtgatgcggggcgcggggctggcgagctgggctgcgcttgcacaggcccagaagagggaggggaa

SEQ ID NO: 168202 - DNA, 626 bp, Zea Mays
ggggtgttggatgcgcacatggagaaggtggtggtcaggcagaagggggaggagtggcaattctccaagcttagaacattgtcgttccagatcgtgaccacccctccacgcttgccacaggtgtcaatggagcgaaaacaatttagattacgggggaggaagtgttttgctttcattgcggagaggtcgcagagcttagattcttgaatacacacaatagtgggggtagaagaggactgggtacccctaaccacggtgcatttctgaggatcaccaaggccacgaacattccagcacatgatagaatatataggaggaacgaggattagtcattagaaacaaaacaagcactagtacaataccaaagttttgtataaggcatttatgatcctccacacaaggggagagcaatagggagggatcacagctgataacataagcgagggggagactcagccctagcggcagagagaagggtctagcatgatcacacattcggtgaacaagggcctcaccggtggatgtaaacttcggaccaagcttcatttcgccatccatgacaccacgcccaccgcatcgacggacttgcaccctagcctagtagcaagggcaagcttgcgaagcac

SEQ ID NO: 168203 - DNA, 651 bp, Zea Mays
gtccaagactcaggctatcactgaactggaccgcgggttgattcgctaaaagctgaggggcgcttatgtaaaacgagccagcgaaggggtatcgctcgcccaggaccgtccgatcaggactcgacgacccagattagacccacattacattgaactggtatgcgatctgggcagttggatccgtgatccacgatccacattcaccgagttcgcgatctaatcgccaccctttgatctaacgccaacgacacggatcgcgctggcgaagaggtatctgatctcgaccgtctattttctaatccatggacgccctggcgtcttcaacctcacgctgcccatgcacagacgccatgccctcccagaactctctctcccgttggtcaaccgacatgcacaccgctcggacctgtacacgccaccgccgttctccggcagcgcaccaatcttggtctgtatctaaacttcgctcagggctactgctcctccacagactgtgcaaaatccatagaatggagaaaggatgaaattcctaggtagttactcaccgacaatcccgtggcgcggacacccaacaccggacgcgcttgattccgcggcgtaaccccggcaccgacgagcaatccggtccccgcacagcactgcagtctagta

SEQ ID NO: 168204 - DNA, 493 bp, Zea Mays
agctcctcgctgcggacgtatgtggcaccacctctggtggctagaggaaagggccgaagttggccacccgatccccgtgttcaccccaaatccaatgatccgatatttaacctgagcctaaccctaaccgccccccagatctgacatcctagacaccgcacccgtgctagcactcacaaatctaccctgggctccacctgccagccgtccgagccctgctccgtgtcctcggccgaggcgagaacccatcaaccaaatgagccccatgcagtgtcctcggtccaagccccgtgctgcatcctcggtcgaagcaagaacccatcagtcgtccaagcctcgcgccacgtcctcgatcgagcgagaatttgttagccatccaagccccgtgtcgtgcacttggccgaggcaagaatccccatcgtctatccccatctccctttcttccctatgctcggcgtgggtgtgcccgccctcaccgagcctcgccctcgcc

SEQ ID NO: 168205 - DNA, 447 bp, Zea Mays
gaagaacaagtccgcataatccgggagaattcgagggtagctcagaccaggcaaaagatctatgctgataatagaagaagaccactagagtttgaggaaggtgatcatgtgtacctcaaggtgtcaccacttcatggaatgaggagattcaaagtcaaaggcaaattatcccctcgctttattggaccattcagaatctttaggcgagttggagagatggcataccaactcgagctacctgataatctatctgatgtgcatgatgtattccacgtgtctcaacttaagaagtgcctctgtgtccctgaggaacaattacctatgaaagagctcaatgttcagggtgatttgacttatacaaaatatcctatcaagattcttgacactttgactcgagttacaagaaataaagttataaagatgtgtaaagtgcaatggagtcatcat

SEQ ID NO: 168206 - DNA, 510 bp, Zea Mays
cccacctccacctcctgccactaccacgttgggcccacttaactggcctcccccttctaccacaccgagtcactcgcgcgtggggcccggtggtcatctccctctccccatatccaaacagaatcacgcagggaatcgcaaccacctccgaatcgaactccaaaccatgtaatgtaacctcttggccttctgccagctgcaccccgagtctgtccccgccattcttataagtatgtgggcatggcttcgctccctaccatcgccagggacgcttcatctgtgatcacggagagagaccaagaccccccctttcccccaccattgtttcctgttgggtggccagtcgggcgaagaattagaagctttacagtgttgtgggatcatgcctggagccccattgggtgaagccggtcagcagtggcggacccagaaattggctaagacccgggccaaagcgaccataaactctaatagtagcatataaagaaaaattgtacggcgaaacatcgt

SEQ ID NO: 168207 - DNA, 544 bp, Zea Mays
agacttgcccctcttgtgggctggacctccagtgttgcccctcctcacgtcctggccacgaggctgatcaacacccgaagacttttgcgactccatggtatactagtgttgcatctccacacccagtgtctgctccactgtagtacggaagtccaccaacggaaaggctcccaaggcatgcctgatagaaggtttcagaccctgacggaactggctcgccttctccatctcattataagccacatgagggacaaaacggaccatcttgttgaagcccacttcatactctgtgatagacttcttctcttgcttgtaggactgcaaatcaatcttcattttctccaggaaggtgaccaggtagaacctcctctcaaactgcctgataaaacatcccaggacaggactcctggtgaagaggagtgagctacctgcacgcccctccaccaaatctgagcttctcccttcagcagctgtgtgccaaagcgaacacgatcaccatacacaatctcgaagacattcatcttatcctccacgtaagttagcc

SEQ ID NO: 168208 - DNA, 549 bp, Zea Mays
gggacttcatgaactattggaaatcatgtgctccccaatataccgagctttgtttcaggagggtcttttcccctcgtgcctcccttaaataaaagtcctgcgcctgacccaccgcatggacgtgcttgtccacacagctgcagacgttgaggagcagccagagacgcttaggacgtactagaaggattgtgtagatagggcaaggtctttgactagacgagatgtgagctaggaggggcagggactgccacacgtttaaggctactgttcttttctctctctcttgaaacaaatttgcaccgtacacgccgcactcttgccatgccaagataaaagcagtggtgcaacgacgaaggcaaagcatttgcaaagatgacgaggaatagcatctcttctttacctcatgtgccgccgcctcctctttacgcgtccgatccacccgccttagctgagatgacgagactagacgcgggctggaagtggaagggaaggacggacgggagctgcaacgccccaatggtgttccaccctgcttcggaaatttgagtg

SEQ ID NO: 168209 - DNA, 324 bp, Zea Mays
aggtggcagattccaagcagagtaggcaacatgagcaccaacatttgatactttgcctctcaagatcatgtctagccggctcaccaaatccttagcaggaattctcctattagtaacccgagtggagtcggtaacaccactgtacaagtaagccgggtatgctctgtccttcagggactggatgttcttaaaaacaaaatcagcaaccacagcttcggcggtcagacctctttccttcagcagacagacttcagcaagcagaaccttagcctctgttacttccagggcagtaggagactcaatccaacttggagtgcgcacatc

SEQ ID NO: 168210 - DNA, 437 bp, Zea Mays
agaccacccgcatcacaggggatctgggagaaaaataggaactcacgctcgtcgccttcctccaagcaaatgccgacgtcttcgcttgggagccgtcgcaaatgccggggatccccagggaggtgatcgagcaccagctaaaggtttacccggacgccaagccagtaagccagaagccacgaagatagtccgtggaatggcaggacttcatccgagaagaggtctggaagctgttgcacgctggctttattgaagaggttcatcaccccatgtggctggccaacccagtcgtcatgccaaaggccaacaggaagcttcggatgtgcatcgactacaccagcctaaataaggcatgccctaaggacccgtatccactaccgcgtatagatcagattgtggactctacttcggggtgcgacctcttatccttcttggac

SEQ ID NO: 168211 - DNA, 562 bp, Zea Mays
cgtgaagaccatctgccgtggcctttgtctgatagtgcaactcatgcacgcggcagaaagcttcggcatcagggctcattccttggcttcgaagggcccagaaaaatatgccaagcctaacaatggcgttaggggtcagctgatgaagatatatttcgaaattttttaggacttccccaatcatctcgttcagaggaaatcgcagtcctgctctgaagaagctcttaaaaaccactacttcatcattcttcggtgctggggtagtctcttctccggtaaatcggacaagtttgctttcaccttccccaaagtagcccaatttcatcttcaggggcatgtcatcttcggaaacagtagatttctcaaaatctaaatgactggtctttgttgggatcaaaatattgtaatcttcttcactttcatcaacattttcttcttcaacaatagtctgttcagtttcggcatcaggagcaccttcgtcaatagctcccactgtcacaactagacctaatcgttccatgacttctgaaattggtgctatcccagtgacctcggtttcttc

SEQ ID NO: 168212 - DNA, 599 bp, Zea Mays
gttgactattacaaactacaaaagaaaacaaaaaatcttcgcctcatgtagtcgtggatggttgcatgcgttcgtcagatacgacatgatttcattgttgacgagctaacaaatatctctttattgctggtttggtcagctctgtgccgaaccagacatatatttcaattcacacgcacttttgcgagttaaagccatgtcgtgccgctaagttttaataacttaacatatgactgttgcttatttctttgggtagtaggcacccgagtcatataatacaacacatacatgaataaccaagaagattagcttagtcaacatttatttctttaatggataacatgttatgttgtatatttatatggtttacctcgaggattatatttgattatcttatcggattatataatatcacgaatggagatgagatgtcttgaaatgtatgtttatgaatgcacttgacatatggtgtgagatttctttgagccaagtcaaatcataatatttaagttcttgatggaggatcgatattgggcatagttaagttgtttgtccaaattaattggaagaaatgacgattgatgaaggtgaccaagtgt

SEQ ID NO: 168213 - DNA, 1043 bp, Zea Mays
gtagcgttctgggggtgaggtcggggagaagtgggaggatgtggcgaacacgctggtaccattggtttggccggaggtggtcggagttgtgctggccacgtgcaggggcggacgaggtcatcgacggcaaggggcttggcctgtacacggtggtagagtttgattggattgcttagggagcttcactaggtgatgtagaggctgtgcgcgcaaagaatcgaagaatggtgcaccggcttacctgggccatttacttcggcgggcaaaggaagtctggtgagggcgatcaggtgtctccagcggggtatcacttggtttgagggcttgggaagtctcaccagactctgggaggctggatgagtagctggcttgggcagggatggaccggagcagcccgtccatggtggtcgagttcggtcgtctctggcgggcggcggagctctctgttttcaagcggttctccggtggcccagtgcaagcgagagttagggggctacgaggaaggatgtccgagggaccgggtgacttatataagcgtgggtgccgcgagggcatgcgggcggactgagcatgcgcgggggtgagggcacgcgggttgggcgagctctagcctgccgaccatggtcgaacaagtggtggcgttgcgtttgcccttgttcttgtgtgtgtagtcacttgtccgggcctgctctttccttgggccagtgcacaagacctcttcacctcccctcaagctaccgattttgtgtggtggttaagggattttgcctactggaaccagagatatggcacacttaagtggggtctgtctcacagcccaaatccgagacaaatcttaggtgttgtcgtgtcaaatcttcaagtttcgatgccatcttcagatatgttgtagacgggttagtttattacaactttgtcaatgggagcccatggttttcaattagaaatttccatgaacgcgagtgatctttgcaaaggggctgaaatccgaattaggggaaatcctgatttttctttgagctccctacttgagtgaccttttt

SEQ ID NO: 168214 - DNA, 442 bp, Zea Mays
ccgggtatcagcatagatcttctgtcttgattgtgcaattctcaaattctctcttatcattcgcacttgttcttctacctcttgcataagtttaggcccaaagaaccgcttttcaccagtttgatcccagtatagaggagtcctgcattttttaccatatagagcctcaaacggtgacatcttcaaactggcctcgtagctattattataagagaactccgcatatggtaagctcttatcccaacttccaccatgttaaagagcacaagctcttaacatatcctccatcacttggttagtcctctgtgtctgcccatcagtttggggatggtaggccgaactaaaattcaactgtatatccaagctctcatgcaacctcttccaaaaccaagaagtaaattgtgatcctcggtccgacacgatcttcttaggcactccatgt

SEQ ID NO: 168215 - DNA, 677 bp, Zea Mays
ctggtgtcaacacgtgtgcgaccatcagggctacgacaacacaacaagccttcgtaataagcgcaacaggcacaattatggctcggtaatcggggtacacgataagtccacgcaacgtgcgcaacaggagcaattgtggctcaatgatcacggcagacagacagtgcctacagggcatacgaaaaatacgcgactcagcgatggcggttcgactcaaggggagctgtccgattaaacgagagtgctacatagcaatcacatgacacagccaagttcgtacgacgcaaatattgcgtcgtgttgccagggcgcatccaatgccataactcagtcgattaacaatgtagcatgatcacgcctgtccgagtacccactatacaatttaatcgctcagcgtgagcctaaaagctcaacgcaactcaaatatttagagcaatttcagtatgcacaatatatcattcacatgtattttgtaatatttttctgctaattatttactacgagaataaaagcagaaaaaagaaatactataattaatacatggacataacacatcaggtgtaaaagatatttttccatatttaagcacgtatttttctactaattatttgcgactggaataattaattaaagtagaaaaaatgctcaaacaaccatttgcaagagatgctaaccgt

SEQ ID NO: 168216 - DNA, 355 bp, Zea Mays
gccaaagacaatgaagactcacctctacgagggtgggcaaaggataactaaaaaaccgtaggatgcttagagtaggaattgaattgcgacctttttaatcggcgtgcacgaacagttttgtgttggaatcgtttggcaaggcgatttccaaatcggtgtcgcagacagtgcgctttccaaatcggcgacggagatcatgcacgaaattggcagaccaagcacgaaaaaatgtaagaacggacctgttttatacacacggaagaataacatgtataaacagaccatagattatatatcttgcgcacatagtttaagatagaaacaataacattgttaaacagtcagtacacttctt

SEQ ID NO: 168217 - DNA, 731 bp, Zea Mays
ttgcaaagctatcgaaagagcctccaaagtagcttcaaacagccggttaaactatatcatgctacacaagtttcagaatatacactcacactgatgcttcagctccaaatcagatagatcagtagtcactggacagcaggagaacaggagtgctaattggctaggttctcctgctggctgctgcatcttgattttgatcttctgtagactgtacccagggcgaaagatggagagaatgccgaatgtatatatatcattcggaaaaaaaaactcaatggcaatcacaatcttatttcttgccgcaagcgtgtatagttttcctgcgttctcaagagctctcttgaaaggtcttgattttccaaaaacctcttggaaagtagcctctatccaccatatccaccaccatcttgcggccaccgtcatgtcatctgccctcttatgcacacacattacacttactacagtattatatcttgattaggcaagcattcctctcctttgctcattgtctcgaacaaatccaaggcattctcgatctatccttcctcaaatgaataccttaaagaacattgtatgtccgaacattaggctcacaaccttccctcttcatcgtatcctagcatggggtgtaggtaaccacatttcgaatgtaaccctttctgatcatatcatcaaacaccgccaccgcttcctccacattgcccttcttacaggttgcctgaattaacgtg

SEQ ID NO: 168218 - DNA, 366 bp, Zea Mays
ctcgttggcttcacaactaagggacgaagagctgtgcttggttgatttggatgaagggggatgagagcatggtgaatttataggcctagtgagccaccgtggcggccatggtgataaccatcaccggacttagctggcgaccagcggtgacgtcgggcgctgccctttcttatgagtttgccacgtcccgtcgcgacagtaacgcggtcaaataggtgagggcgtggatgaatggagaggagcggcgccggtgaccaggcacggccggaaggatcagtggtcacgtggcggccggaattattaccctccaccgcggcgatcttacccggatcaggagtatcgtcgcgaggagatgctcgccgagcg

SEQ ID NO: 168219 - DNA, 763 bp, Zea Mays
gaagaaggctttcacggtgtcaagaggcccaatgacatcatcggtgctgaagtcgagatgccgacgagcttgctaggatgaccaccactatgaggaatcttcatgcttatagattaccttgtgattgtcctaacgaaaatctaggggagtggcatgtattgaagggtcatggtcccctagatcctagggaggcatgtgttatgatgcctctagggtgtggcgtactctacaaggagctcaaactaaagtgtgatctaaggggtcagtaacatgtgaccctaccatgtcatgtcctctagctagcagtaatggaagacaagactgagcatgattacaatgtcgtctatgtcatggctcgcgattagtgttgctagatgaggtgtcagaggtgagtactccattgagtggatgtaccggtgacaccatagttgcatagcacaacaaaaacacaccaaatttaagaaagaaataagcctacttggcacaccaaatgtcaccgtgatacaacaccagggtatcgtaagtacccaaacgagagataaagtctatagataaagcaaggggcatacgatggaggcaccctaatggtgggtgcagcctaattaccaagacatgagcagtttatagaggtttggttgattcctctttgagtatggtggatttatggacataaaggcgatgaaaattacaagcttagatatcaaccgagcgctatgacctcttagctattccttcccatttggtttcggtgatagtttttggc

SEQ ID NO: 168220 - DNA, 1133 bp, Zea Mays
ctgaaatctaaccttctcatcaaaatcaactgtgttcacctagttccaaggctcaaatctgcaaggaccaaataacaaattggcgccaaattaccttaggcatgccctgacaaaatttggagacaaaccccgaccgtttgatatgatcttggcatggatttgcctcggaacgcaacagctagacactaacgactcggtgacgcgacaactctctctacacgaacgaaaacctctcggctcccacacaaaaacaacaaagcataccccagggaacatatcttacaatatgatcttgcccaaattcgcgaagatatgaagcctatgggtgttggaacaggagcagaagtaatgtgccacatgctcgaccgtgactgacgcgccggtgcatgcctgcccgcgcgcctgcaccgagccacacccacccgcgcgccagcaccggtccacgcttgaccgtgcaccgcacccacgcctataagagcagcacggcctcggtcgtactccctccacaccgcacccaactccctagagccagcccgtagctccggtgacctccccatgacccgccaccaccgccagagctcggccaccatggccagaccctttctcgacaacctccaatcaatccagtgcctcggctaggatccctagagccccgtagagctccccgaagcaagaaaccgaacactacctcatcggaaacgctattccaccctcgccggagttgtttcccccgccagcacgtgtggccacgactaaccggtaagacatagttcaattactcgcgcccatgtattccctgacacccagtgaagctcgttgcatggtttaatcgaatcctatcgccgtggttaggccggaacactcgccgccgacgagctcccccgcctgcgcacgaggtccgaccgactccgactaccgccagtgacgtgccgaccatcgacgtgaccgtcgtgacctccccagcctccgtggacacttaaccagagctagatcgccgtcggtaagccccgtcgtcttttcctccgtcgtggttactgttcctgtaaggttaggaccgcggtatagatttaggttaaccctagggggttaggaccaagggccaatctgtgagagaaaggggaacaatagaacca

SEQ ID NO: 168221 - DNA, 437 bp, Zea Mays
ttctactttggcagagatcaaatccaagacctaacgagggtttcccctcaaccaatttcaagaatgggcaactggttgactctggccacggcgaccgtagaccatgcagacagatgaacgtgttcccggcgattggtggactcctagttcaattgggtgggtcggcgagcatcacggggttatgaaagcactcaaacgagaaagcagagaggatgaactgaccgggattgtgctggccgcagtaaggtcgttttcacggtggcggagactgtaattgggggaaatgagcgattctcggtcccaggtggataatctggggcaaggtttggtgcaatcgatgcgtgattatcctacggagccgtgggggcactcaatttatagtgaggttaagcggtggcgtctaatttttcgcagagagaccagcggccgagacgaag

SEQ ID NO: 168222 - DNA, 900 bp, Zea Mays
gcggccatcaaggagaccttccgcctgcagccgaccacgcctttctccctaccacgggtcgcagctgacgagtgggaggtcgccggctatcgcatccctagggcgcccaactgctggtgaacctgtggggaatctcacacgcggatgtgggcgtcaagggcagcgacctcgggctcatccccttcggcgcggggcgaaggatctgcactggctcagctagggggtgcagcgggccacttcgttggtgctccgaccagggcctagctactcctatcagcctatactatatgaggatatatataacgccgtaggtaagaattcggactgaatgatgcagcagcctgaatagctctggatgccattggttttaaatgatagcttgagctgaataatctgatagcatgaatagctgtggcaagtagtgcttgactgaatgatatcgttaggtgcagcagaaccaaacatgctgctggtctgctttttcgtttacttttttcttcctactgcaactaataagtcattagttgtattgttgcgagtatgaattgttatttaagataatggaacatcggaagcaacacatacggaataaggttcagaaaaggaataaggatcatttgtacaatttcagagaaacacgcttgaataaggttcatgttgcaaaccataataatatttcagttcaggttcagttggtgctaccaattaaaaatttaaaatactgctgtgtacattcaattcctatcgcagatgcatatggcagatgccagatggtgggaaatagttgtctgcgccagcaaacatgtgccaaaacactcacgctggcgccaaaaacaactaattagattaattaaagggcacactgttggaggttgccgtttggtttcggctctattttct

SEQ ID NO: 168223 - DNA, 567 bp, Zea Mays
gacatattgccgactgttcttctgagtcaaagggacctcatcttcttcctccccatcgttttcatcagcaacacagacaacacccccattgggatcagcggcagatggagcaccccaattgggatcagcgatagatgaatcacacccattgggatcagcgtcagtaaattcaggcacaggcacttcctcagcagcgggaaccgaaggaccaccatcccgatccaaactagatactcgccgaagacgtctctttttctttttctgctcatcagcaggagaatcaagttgattggctcggcaagggcgtttcgggcgaacactgacaggtctctgaatatccaaggttgtaccagcttccgggagaggcgccaccaccaatgtcccaacaggagcagcatcagaagagtcctcggccagcatatcaagcatagcacttatctctgcatcactaggatccaaaggcacctcaaagtggacctgtcgttcatcatcaggaatttctccgagcgaagcaaccaaagcgctaacttcttcggcagagggtcgcactctaaggcccaaaccgcc

SEQ ID NO: 168224 - DNA, 409 bp, Zea Mays
ggagcgtccacgcgatgcagatcggtcttccagggagagattaggagcggcagatcgagggggagtaaatcgcgtgtacggggactccagggagcgtcgacgcgatgcagagagtgagagcagcacatcaggtacttccatggaggtgaagcggatggggggagtggatcgcgcgggtcgacattccagagagaaattgggcgcggcagattgggtacttgcatggaggtgaggcagatcggggggattggatcgcgcggatcgaccttccagggagagataggtccgcgcgatttgggggcgcaggggcgcggaccttccatccgcatttgcacgtcacctcacctgcgggccaacgtttggtggtggtgcgggtccatcggcgacgtggtgggcgctcgaagacgac

SEQ ID NO: 168225 - DNA, 940 bp, Zea Mays
cgccgatttttctttttgtttacattgttgatgattgctagttgtttcttcagctttgactcaacggtgctctgatactgaggagagatgcgcccgaaaccaagcggagcttgatcaagtaactatgttccttgatggtgcccgtgccatgaactcctccctgcagtcgaagttggacttagagaagaaagcccatgaggtaacttgttgggagcttcaagttgcttattccatgttgtcgacctattatcaatggttctcccatccgtaggaggagatgctaaaatttcttgattcccagaacaaccttgataagttgtacaaggatgcctccagttctcttactactttagagaggagtcaccagttcattatggaggagctggagcgcaagagaaatgaattgaaactatcctaggatgaggtgtcggcgctcaacgagtctctgaattccaaagatgcttccatcaaagatcttcatgcctcgaagaagcttgttgttggaattggccgatgcgtggtcaagctaactcaaatagtgggagaacgaaaacagtttgatgcatgctaacacagtgtattagaacaacaatgtttttttcgtccccaacaatggtgttgtacgagggtatttataggtaaccaggggacggttccaccttgtcaaatacggttatgcccctagttacctacattatccctagaatattcacctcctaggggttatcgcgggtcattacagcgtgattaagtactcccacagacggacacaccatcaactttgcccacatagtggcttacaagtgggaccctgcagcacagggtagttttacagggccccccattacaataacgcgtgggtagcgacacgtagccttcgcgctccatgcgcccagccttcggcagccgtggaggccttcgtcattcccggctgcgacgg

SEQ ID NO: 168226 - DNA, 1033 bp, Zea Mays
caaaatgaggggaggagagagaaaagatccaccgctgccgtgtgcatctgtgccgtgaggaagagtggaaggtgctcgcgaggccgtcattgaatggatcttagaagccccgccgcgccctgaggatagtgtctgggagcttgttatggaggtttggcgtccggggtcaagtgtgtgctcgtcggagtccaagaaccatggcagagaggcgccatcacgtggagcggagcccctgcgctgccatcctccggtaaaatcacctccgaatctccgccctcatcactaggttgtgtagccgtcctgcatacttgacctaggtagcgctcttgatgggaatcgttcatcggagggggggtgttgccgcggtgccgcaccgtaccatggcgggaccgagactcacgacaatctaaaggtgaaattgtctcccctctgttcgccatattctccgcttagtgtagcagctcgtcgtgtcacgaatcgggtcaccgaggcggggatggcactgctcgccggagcaccgcgccgccgtccctgggaacgcgttgctcggggctacgtcaggatagaagacggtgttctaaccgttagatctctatccgatggttaggatccgatctggacgcatcccttcgtgcacctaatctgaaccgttagattgattgtcgacgatcgtgatcgcgcagatgatactctcttcgggatcgatcgtgagtcgttggatgggatcgggcggtccagaacccttcttacctctttaaaaccaccaccgtcggatcgtgatcctagggttgtgagcgcctaccggtttggtgtgatggctatctaatctggaccttcagattttgatcggacggctctgatgctccggtaccccttcgaccaaccctttttacataagggcccctagatttattcagaataaacccgtagcccactcaggtgcaccactgagtcttggattcttttgcgctatagcccctggagtttctgataataatgcgccaagttcagagaccaataaaaatagaaaatt

SEQ ID NO: 168227 - DNA, 514 bp, Zea Mays
ggggaggagacctcgtctagatctacaaggaccaccaagtgatgcgacgttgttgcccatagtgtttagggtagggaagggaagacgcggggataataagtgagcacatttgtgattttgtggtggtaaaggggaaagatggcgacgacatgggagctaggagaatcagccctttgcaagtacatgtggtagacttgtgaagttgcgaagcatagacatgggtgtagtaggagactaggggatgaagtttgagcgaagtcatggcattttatatgtgggtgagaaggtctttagtcaacattttcttaatcagatcatgttgtgatgccattacaagctctaagtggagcccaaacatgacctaggaattggatcaggcaaacacgagcatgatagatatgaaagcatctagttttagtgactaatgacaacactaaattattggctatgagtaataataattggctatatagtttttgtgcccctattgatggtattcaattattgattttag

SEQ ID NO: 168228 - DNA, 493 bp, Zea Mays
tgggaggtgaagaggcggggtaggcagagcaaacggcagaagtgcgcacagtctgttctagagaaccaacggaagaagagcaagggcgagagagaagagaaggcacggtgagccccacgtgcaggtgcatggagatgccttttttgagagagcatcaaaggcttctgcctcttagacgtaaagacagacctagacgagacgacgctcagaagtccaacgaacaggagcagaacctcgagatcagagcctcgtcgctaagacaagttttagttagaactcttctttgtagccatcttcactgggagcctctcctccttctctcatcttgtttgtaaccctactatgagttttgatcatcaatggtatcggtagtgcaagctaccaatgactagatgtagagacgttctgcctagtataaatcttgtgtccaccatatccaccgttcgaagtccgaaatacatatattaaatttacttgtcgaagcgagtgttga

SEQ ID NO: 168229 - DNA, 868 bp, Zea Mays
gtttgcctcaataggccctttaggtgtaattactaccataggtgttttcatgttttgcagtggtaattcattggtggtagcaaatcgagcagacataaatgaatgcgtagctccagaatcaaataataatgctgctggaattgcattaatgtaaaacataccgatagcgacgtctgcaccgtctgtcatggcctcagcactgacttgattcaccctgacaatgttgaatcccttgctaggagtctgttgtttgttctgagctgatgtactagtattccccgccggacaagcattagcatagtgcccaacctgactgcacttgaagcatgtagggcctatcttctgtcatgtaggcctcgtcggggtgctagtgggggtagtctgatgagtgggaggtgtccgtggagacccctgtggagtgtactgagctgggcatggtcctcctcctgaacgagtcggtgtaccctgtggcagaacatagcgaggtcgaacactgctgctaccctgcccctgggtaatggccttcctcttcaaatctcccaattgaacacgcttgtgttcaatagcaagagccttatccagcagtctatgaaatgattgaaatgtgtgagcaactagtgcataatgtaggggcccattgagtccttctgtgaagtgctcttgtttcctttcatcatctgccacctcattaggagcatatcttgacaactggatgaacttgtcacggtactcgctgacagacatgttgccttgcttcaatgacataaactccttcttgatcttcatcaatccagcaggaatgtggtagtttctgaactgagttgtgaatttcgcccaagtaatagtgtcagcagcatcatgggcagca

SEQ ID NO: 168230 - DNA, 382 bp, Zea Mays
cacaacgattacatgaaagcgaacaacacaaattactatcgacctcactatcttacaaattccatgtgtggctctcactgcgtgtctggtggcggcaccccacggcaccggcacaaaggagttgagatttgcggatgtgggcccatgcacgactgcctagaggcgagcgaagggagggcgacacacatcccagtttctacttgggtctgttaaggacatgcttagtagctccaaaaaagttgtcgttgcataagaagtattagaaaattaaaatagttaaccgaagatgttgtggtttatgtgatttcagtgtcaaagatggcgaacaatcttttgtattcgcaaaatgaagaagggccacatccttcagccacaaattgat

SEQ ID NO: 168231 - DNA, 582 bp, Zea Mays
ctcggttgggtagcttgagaactggtgaggtggtcaagaatttcttaggtgcctctaatgcttcctgagcctcgagagtccactagaatctgtccaccttcttgagtaatttgtagaatagaattcctctctcgccgagccatgagatgaaatgacttagtgttgtcatgcgaccagtaagcttctagaccttcttctatgatcatggtggctccatcctcaaaatggcttcaaccttctctgggttggactcgattccttggtgactgacgatgaatccgagcagcttcctggctagtaccccgaatacacatttctctagattaagtttccagcggtagcgcctcaagatgttgaaaacctgctggagatcgacaagttttctgggttcacgattttgatcaccatgtcgtcaatgtaggcttccatcctcttgccccagtggtcggctaagcatgtttggatagctcgttgataagtcgctccaacgtttttgaggccgaacgacatggaggtagagctgaatgccccaaagggcatgatgaatgcagtcttatctttatcttccttcgctagattgat

SEQ ID NO: 168232 - DNA, 812 bp, Zea Mays
ccctgctggaccgaatcttggcccaaacccgcggcctccccttcccacgcgcccgcgctcctcctctttcggcccatcttcggcctgcctccgcgcgcgctagctcgctccacaccccgcctccctctcgctggcaaggcgtccccacccgtcagccgccctctctctcgcgcgctcgctccctctggcagaatggccccgctggtcagttgcttcgtcgtccttccgccgtcccctcaccgaagtcacctccgaccgtcgcctccgtcctcccctccgtcatttcgtcgcacagggaagtttggcaccgctccgtcctcccccccttgaccagcgtcctcgtcggtaccgccccgccgtggtgtcccctcggcggcgctgtgcggcattaatggtggcactgtgtagctcgccggagccaagaagctccaccgcccccccttccctcgcgcgcctataaaaggctcgccccgagctccttcttcctcgcaccagcctcggtcatccctctcctcccctcccccgagcacaattcgcgaagcgccggcgtcgtcctcctctccggtgagtcctttcctcctcctccctctccttctccgttggtccggcaagaaattaagtgagccgagcagctccctcacgtggccacaaacccgaagcaccaccttccagcccccgtcccccacccagagcccaccggcggcgatccccgtcacggaactccaccccctccccgtgggcagccccctcccaaccctctccggccaaattgagcctaacgttagaatcgccagcctccgcccgtgctaaac

SEQ ID NO: 168233 - DNA, 826 bp, Zea Mays
ttaagaaccccttagccactattcatcgtctcactgacaatcacacataggtccctcggcttttgtttcttctccaatcagacccatggccacggcgcgctcgccgtcgatcaccccccgacttgtactggccatgaccggcggcgactatcccaattagctacggggtgagcatttccaacccaagatgactcaggaacaaccttcaattttggtttgtacacttagagaacgtcctacccacgcgcacggcgggaaccgtgacgtcgagcccgcgttcccattcaatcacgcctgaattggtcaaatggctgctacgatgagcttcacgggtatacagagatgctaaaacaacactcgagaagtgcagagccataccagagtggtccggccatggagcgcggagaacttgtgctcgctggtgacagagaagggggaaaatggcgccgcgacggctctgggtggaattgggaggtgagattggggctacacggccgtaaagaactatagtttcaccgtgcacactcaatttgggaagaggtggcagaggcagtgcgagttttgggcttcaatcaaactcactggtggagatgtgaatacctcgccgtggtccatggtgctatttatagccatggcggtccggctaacgatcagcgaccatggaaggctttgttcacgcatggcaaccacgtatagaagaggcacagtaaggggaaatcgaggcatgggtgacaccacggcggaagtgaccgagccacggcgaccgccggtgggatatctccggccatgcacgactgagctcgcgggatggtgccacgtccaaagt

SEQ ID NO: 168234 - DNA, 718 bp, Zea Mays
tgacagatgcctatggatttctgaataggtctcctagacctcgatctgaggtgattcacactttgtgcacctcaaaatagtgccttagcttgcgcgaagccatgatgactgcatattctatcttttgtaactcattcatgttgcatttagaggtggtgagcacttcggagacaaaatacactgggcattggtgggtcttgccttctctgcacctttcttgtaccagggttgcgctgggtgatgttgcaatgtagagtagtaggggtagagctgggtctaggatggttagtgtcgcgagatcagataaatattattttaaggactcaaaggccgcagcttgctctgggccctaggtgaagtccttggctccgtgtagcgtttttaggaaaggaaggcttcactcgacagattgtgagatgaatctgttcagtgcagctagtcttcctgtcagccgttggatatctttggttgattgtggtgggtccatgtccatgatagcctagattttgcttgggtttgcttcaatccctctgtgcgatacaaagtaaccaagtatcttgccttatcggactccaaatatgcacttctccgggttcaagcgaagtttggcctcacgcatgttagagaatgtttctgcaaggtcggatagatggtcttctttgttttgctcgcaacgactatgccatcaagatatgtgaaaacgttgtggcccatctgg

SEQ ID NO: 168235 - DNA, 372 bp, Zea Mays
ggtgctaaataatgcagaggaggtatcgaatcgatccaaggggcattatcgatggctgagaggctgggtgaagctgtccatgcggcacggcgggttcatggcgtcgctgcgcgacggcgagaaattcccccgccagcacgcactccttcgttcggcaacggtcccacacatttcccacatagtttgccgccccatctggaactcccaccgaggtgacatcgccagcgaatgcgcaggtcaacggtggcaatgaatggcccacggcgccgaggtcgggtgctccctgtttgcgagctccaaaggttctcggatcgagggctcgcgcgcacgtagtccacgcaggttgatggccattcgcgaccccaccctggg

SEQ ID NO: 168236 - DNA, 780 bp, Zea Mays
ggcgtgacctctccattcccattcaacgatgtcttcgagagactttaataccttgcgaagactctcctaccatcccgacactttgtttcgataccccaatcttttttcacccccgctgttcaccaggggctaccccgcccgaagtcgacggcgcctcaaggggggcgaccctcaaaggagactcgactgcagttaaatctagcgtcgcaaaataatctaaatcatcttccaaacattcgtcatgtatccaagcaaacgggctccccaacttttcaccttccgaagaccacaacccaacatcagattcaccagacacatttgcatccaccaaaatatcatcattcacgttatcatcacggttcgcatgtgcaggcccagacgccggaacctgtgcaacaaccaatcttctgtatcatgcacaaagcgaacactgtcaggctattcctattacattctttcaacctgctcagaagcacctactgttgcaggaccctcagctccgccttcttggagcaatgattgcccctccgctcctgcctccactacaacatccttccggaccaccaagctctcgaggccgacgagctcccttacctcttcttcccccatcgcctacgaagacagcacaataacatttcagacaatgaacacacataacacattcgccaagcccaaaacatacttgtaccagcgctcggttggccctctcccagacaacaccgcggccatgagggccccacatcctattgtaaagtgcccccacagattgcttcaacacgt

SEQ ID NO: 168237 - DNA, 502 bp, Zea Mays
gtggagttcagcacctcgaggatttcctcggttcacgtgcaggagatgcagcagcttgggtactttggtaacggtgttgggcgggttccgggcaccgaggagattccccgagcctgagggcgaattagttgtgttggaggcgttctttcttgccggccttcgcctctcggcacatcatttcgtggtggaggttttgtggagatttggtgtgcaggtccaccagttgacgcctaacgccgtggttgccctggcgaagtatttgtgggcggttgcgtcatacggcggtcagtcgtctatggaagtcttcgccaagaactattgtctgcactgcaaaagaagaaaataggaaacaagattgctcaatttggatcgtgcaccttcacaccgaggactgggaagacttcgacagaagttgtggaaagagtttcttgtgctcgcaacaagtggggcaattggtgggactattggttttatgtttctggtgaggaagttgacgatctcc

SEQ ID NO: 168238 - DNA, 1513 bp, Zea Mays
ccgcgcacaagattaccgagaaaggcaggggttactatgcaaaagaccttaagactcaaaacttcaggcgcgggactgcgggttaatttatatctttcgcgggggctcattcgcaaagcaacaaccgcgaaggggtatcagcaggccagagccgtccgattaaaaggtgacgacgcggattagatcatggctttaaacgaaccggtatgcgactacaaccgcacgatcgcgatctaacgtacaggattcattggaccgaaacgttatcccctggtttaatccggcccgttcatcagtcaatcaatggcccacagtaattccttccccagatctaatccccctcatccattcacgatcgaacgacagggagcctttcttcctcccagagaccgaacaacgcggcgcgaagtgcccagcggctgcgaccggcccttcttccccaacccgctggccgagagcggtgacgccccggggctctgcgtcccgctcccgccgatgcaagatgcctgatgccatggtgggaggttctttccccaaacacgaacatgctccaaagaaagtgggatggagggcagagtcgagtgaacatacctctcaaccagcgatgacaagcagcatagagccacccatggcggtccaaactcaaccgagcagagaatgatccgatgagcaaattcctgcgcccataacgcccccgagcacagccggcgagtatgccccatggatcccagcatccccgtggccatggatcgacggtgacaaaagcgaagatgaaccatccacggcgcagagaggcgtggttgacagtccaaactccaatgaggttctagctatattgatgatccctcatgagccaaaaaccccattcatacgtggtgcagaattgtagatcggacaatcatcttaacccgaagtagacaccaaggagcacttctagcacgattatcttcctggcggctccaagctttctctcccatctcctcagcccgagtcccctagcttccgctctcttggtgttcatggggggtaggcatggtggccagggaggtgttcgcggcgaatgttctttttatatccagaacgcgaggccgaggtaggaaaacgggggagggcgttgaggtagaggcgagatccacgggtggtaggtcagcgaagtcagttgggaaaatgagccacgacacggcggattcggtcagccgttcctcaaatcacgtgtggcggcggagatctcggtcatggctgttgcggaggtgcgggatgacacgcgggtcccagcagcagtggcgtgcgcgagatgaacgcgactgacagacgaggtcccatattccagtgaccaggtctgaccgcgcataggagtgtcatagacaggccggtcccacataacagggtcgcggcacgcagaggctagtgggccacgcggacgagggagcgaggtgggccagaagcggaaatgagcccaggcacgtttacacttctctttttattttatttttttcttttaattttctgtttt

SEQ ID NO: 168239 - DNA, 772 bp, Zea Mays
gaagtactcttaatttgagctggttattcgactactagggtacagtggtcaccccaaatcatgtgaatgcaagtatgccacatcgacttaaggtgcctccaacttaatccgactgctccgttagtagggcatagtgatcaccctaagtcaagtaagcgtgagcatgtcgcaccgacttaagccgtccccgacttaagccaattgctccattagtagcgcatagtggtcaccctaagtcaagtaagcatgagcatgtcgcaccgacttaagtcgtctccgacataagccgattgctccgttggcagggtatagtggtcaccctaatttaagtaagcatgagcatgtcgcaccgactaagccgtctctgacttaagtcgattgctccattagcagggtatagtggtcaccctaagtcaagtaagcgtgagcatgtcgcactgacttaagccatctccgacttaagccgattgctccattagtagggcatagtggtcaccctaagtcaagtcatgccgatttcaagttaagcccaatcaaagtcagttgtaaatcaagagtctgaatgcctttggaaaatgaaagctttattgatgatgaaatcttcgggttacagagtacaatattccttcaagagttttttgaggccttgctaagggtagaactttctaaggtgttctatgttccacgagttccccacttctgtgtcgtccatctgagtaagccgatatgatcccgaccgtgtgacctctgatacgatgaacggtccttccca

SEQ ID NO: 168240 - DNA, 912 bp, Zea Mays
agaccgtcggtgtggtcttttttcgacgtaatttttgcgggggatttttggcgtgtatattacatggctccacctcattaaaaacctcacccccccgggaggaaaagagtgcgggccggaataaagctgttttgcgaattacaagggcaagctggccctgaggagtcaaacaaaaaatttgcggagattgtcaatgttccaagagtgctctaggtcttcgccgaatggcattgtgagcctgtacgcgctgggggacgcctttgtcttgacgatgaaagggccctcccactttggctctagcttgccccgggactctgtccgagctgtccggacgagtatgaggtctccttcgctgaattccctcgggatgactgtgtggtcgcgccatgctttcgtttgagattagtatttgtttagagcctgtagggcgaagacgcggtcgccgtcgatgaggtccttcgaagtaggctcgtctacgtcggggacggcggacgtgactgtccgtgacccatgttttatttcttgcggggtcatggcctccaatccgtatagaaggcggaaaggggtgaacccagtcgccctgcacttagtcgtgttcagcgcccagaccgcttcaggtaacaggtcggcccacttgcctttcttgtcgtcgaggagcattttcttgacggctgtgaaaattttaccattggcacgttccatgactccgttagattgcgggtggtacactgaggcgaaggcaagcttggtgccaatggagaagcagaaatccttgaaatcttggctgtcaaattgcttgcaattgtcaactgtgagctcggacgggactccgaagcggcaaacaatgttttgccagaagaacttctgggcagtcttcgatgttatcgtggatacaaccctcgcctcgatcca

SEQ ID NO: 168241 - DNA, 708 bp, Zea Mays
aaagaaaaaactcgctgcctaggccgatttttccctttcgtggcccatttccaaagctccaccaccgccagtctcctgcattctcgcttgggcccaaagcttcctggcgagcccagtttccttccccgtggtcccatggcgtctgcatcactgtctgatgggccactactgccagatcctccctcgcacccgttcactgacgaataggccctggtggctagttccctttcctttcccgtgaccgctcgcgcgccttgatcactcattgactcgtgggaccgggatgtcggtcgtcctcctcccagcgacgtggtggggatgatgcagctggggatctcggagttctgttgcaatagactccaagtccacctccctctcctcggctggtgcgttactcccatcggtataagtccccaggctctcctcctctcgcccgggtgcgcaggccgaaccagcacatgccaccatgatccatgttcgccatggtggagagagaaatgatgtcgctgttatgccgttgtgctggcagaacagattgagagggagagggaaaaccacatgtcgcgccgtcgctcgggttaacttagtaccgtgaggaatgctttcgttgactgaaccgtgcgtgtggatggccgggaacctcacgccgttgaggagcttcgccgttgtgcaatggcatgccgtggctagggtacctgagggcatgat

SEQ ID NO: 168242 - DNA, 1236 bp, Zea Mays
tggggagcagtcctggtttttagccagccaggggaagagtagggtttttgggttggaactgaagtctgaataccggctgcgtccggcgatctggtgagagagagttaggattgatctctgtaatagcgaattcccacctgtactctggaaaccccagttaaatttgatcttcgtgagaggaggagagtatcgggaatggtgctcgttatctcagatttggttcctggtgtgttctggcggtggagagtttattctgcagtgtcaagggtcttacaaattggtatcagattctggtcgcaatccttgcggatcctccggagtatcttctccgtccgcagtacaagactcgcctgcaacgtgatcttcaaaacatggagcaaagcgtgggggatctcaaggcgctgctgcaagcgttgaaactgcaaaacgagtctatcaagcaatccttggatgccaatacaacagtggtgagagatctttctatctggaaacctcagattgaaactgaggtgttgaatcttcgtcaagatgtgggatctctgtcggataaattggatgaattgatggcgagtaaagaggagcacaccactactcagaaggtgttcgacaccggggctctgcagtctaggtttttaccatcaacctctatgggtttatctctgcaccaggcgagtccaggaaatcacgatcttcaccttgcatctctgcaccggagcgatggacttggggtggtaaccaccctgactccacctccggtcaaaggtacatctaaaatcccatcacctgatgtctttcattcccctgtgattcatgcgcaagatccttattgggtgtcttatcagtcacgtttagccgcaaccttaccccaacttaattttccctcatttgacggacatcatcctaaaatgtggaaggctaaaagtgagaattattttgatgtgtacaccataccccgggagctttgggttaaaattgcaacaatgcattttgtggggtcggcggtgttttggttacagtcatctgatccggtgttacgtgtggcaccgtggccggagttttgtgctgtagtgtgtgctcgctttgagcgagatcaacacaactctcttatgagaatttttttccacattacacaaagtgatacaattactgaatacgtcgaacagtttgataccctcatgcaccaaattcttgcacatgatcctcaatttagtatttctgccattgtgaatagattca

SEQ ID NO: 168243 - DNA, 564 bp, Zea Mays
aatctgtgcaatgatctcatcattccaatcaaaagtgaaagtcatgatgtctttcatattcttattctcacaagccctcacggccaaggacatttccctatcaccaatgttttcacaaccactctagtttatatgacgttgatgcaagatgggttgatttttcttgggaaaaataacaatgttgtagaaatccacatgcagcaaaatccagaagagattaccttcgatgcgaatgtctcgcctgcgaagagctagattttggaagcgcatgtcctgaagaagtgtcgagcctccactggcactgaaataagtgatctcctcattcacagatcttctggctttgaacttatgtagaatcaaacccctgacaatgggagcatctagaggaggaagatcagtaacatcgtatttaccaccttcatcatcgcttgaaggttcccaggcatgtggatttgcagcagggcgagagcgactagaaggagttcgagccgtacgcccgcgaccactctatgacccagaggcctcaactcccatcacaacatttacatagcctcttcctcgctt

SEQ ID NO: 168244 - DNA, 417 bp, Zea Mays
ctgcaaatgtagaaccaagttttaaattcaaatataaaggaggtacatgtgctatgtgctaaaaacaaggggtgatctaaatgcattccttgtccattacctgtccatttgtgaaatataacaaatgcaacccttggaacagttatatgattcatcactaaacataaacaaactgaaacaaaaccagccaccaaaacttgtttacatgaccaattgactaccagatgttttcgaggaagctgaggccaacaaggccttttatcaaggtctcctaacggacaaaatattatatgtgatgccaataagttctgacaaattttatgggatggctttctacttatagatgcacaccatcttcttgcctccagtttttcattagcttgaaaatttattgagaaaataagaaaagagtttcac

SEQ ID NO: 168245 - DNA, 664 bp, Zea Mays
cacccgcgacccgggacacctctcggttcgccccctccccctctgtttctctcggtccacgctcaccggttctctctctgccccgccgcagctgcgccgtcgtcaacctgtgtcctcgccgtgccccagacgctattcgagagtccccgagcctcctctcaaggtaactgatctaaccccgcccctaatttccccaggtatgcccttaatcgcatgcgattgctcactggagtattccccggtccgccaaggactccccctccgtcgtctggccgcctcagcctcgttcatggaaccccgtccttgccataacgcttgtcaggtcatccccaacctctccggctacccagaccaacccctagcgccataggagccccgatgtgcctcgcctccagcgacgacgccgcgcttggctgaccggagaaggcaaagcccctagcgcccatcctaatcgtccagttttgatctgatggcccagatttgcagataacggttcgcgcggttcgtggaactagagccatcaatatgtgatccagtggccagcgcgccccatgccctcggcattctgctgacccatgggccccacgtgtcagcgtcttagccccccctgagcccacctgtcagtgctcgccgcacgtccgtgctcgcgctggatctaatctcg

SEQ ID NO: 168246 - DNA, 430 bp, Zea Mays
gtcatggtcctccaagcgacagcacacggtctcacggtccagcgccgaggccgagtatcgcgctgttgcaaacggtgtcgctgaagcgacttggctacgatagttgcttctcgagcttcagcaccctcctcgccgtgccactttggtctattgtgacagcattagtgttgtatatctttccagcaatcctgtgcaacatcagcaggcaaaacatgttgagatcgatctccacttcgttcgagagaaggtcgccctcggtcacgttcgagttctccatgtcccggtctagcctaactgttagcgatcctccagattagactgcggaagggtgttagcatgatgtaattaggccttgatttgtggatgtaattatgctatctaccgtaggcttgcatgccacctatgcgcgtatatatgtactcctattccc

SEQ ID NO: 168247 - DNA, 461 bp, Zea Mays
gtgacttgtggataacggtgaacaagtaaagatcgtggcgcccggatcaacttgggtccggccgcggctaggttccccgtaccacttgctcacctgccgatcgggataaacctcgccgccattggccgatcactgccgtgcgccatgtgctaagcactttaccacatcgcagtagctcggcttgcgatagttactcatcgccggtgaagtcgccacgacggaagacacgaatccactgcgccagtaatctcccctctctccggctgccagcactcctctgccaaattgagcgccaccaccattgcgttctataaattgcagcctcctggagctccgctaggtaactgcgcgtccagtaaaccaactcttacctccaatcgttccccacaactccccaatttggaatttcccccaatttggtcaagaacaccgtgtgtttgggctcgccgcggtcagcccgt

SEQ ID NO: 168248 - DNA, 914 bp, Zea Mays
tgctgctgttgttcttgtagtggtatcagtcttggtggcttcctgggccttggcaccaccgaccgcctcgaacacctcactcaggatgtcttgtttcaccttgtcgatgatgatctgaatcttgcctgttgtagcttcggcagtggcttcttgctcctgggcgtcctggggctgcctcgtgctgttgttgttgctgctgctgctcacacttgggaacacatcttgcaggatgcgagcgtactgggcaacgttgtgaatgatcccttgccccttggctgctcctttgtttacttgatccatatgctctttgagactcttggctgcattctggagtatgacatcgtagtgatcttccaatgccttccattggatcttctcgtccgttttgtccgcagcagcagatgacatgagcagcaggacgaggagctcaggtaatgcatggtttttgttcctgatcttctctttcgtgatgtggtcttccttccgctttggtttgctcaggtacggctgcagcttctggttgttgtccttcacgttttcaatcaggttcttgatctcttgaatcttatccatcgctttcagtttttcaatctcattcttgatttcttcaatccttctccttttttcctcgcggatgggccgccacccctgtgatttggcatcagcctgagtcttctgctgcttgagctcgatctccctcaggatgtagtagaggacattcttgggccccagcgccctccatctgtgcaacgatgggatgtcgagcaagatggtgttcttgacatgcttctccgccacagccgaagcttgccgtgcaatagcaacagactcctccttgggcaccagaaaggcgccgcaccgggtgtcatggcggccttggtcgtcaggtgcgctccactgtggctgtgctcgga

SEQ ID NO: 168249 - DNA, 623 bp, Zea Mays
tttagatctgatggtctaagatatgacatgaaagggtatgttacgaggtgcgctggatcgacaatcaacggtcacgattcaaatacccgaaggggtatacacccgactgatccggagcgttcgtggctgatccaacggccgatcacaacaacacatcacaaccccccatcaaggatccaatggccactagttttcttcccctccaaccccgagcagaggcaccgccaccaggcaacaccggcgagccacccatcctgcccatccggttaaacaaatttgaacccaggcacaacctacgcagagagaagattacggcaagcctggcggatgcttttcttaccgaacactgtggtgacaaagacgctgcccacgcttcacacatggtgatcattccaacacatataccaattgaaaaacgacaatgtcatacatacaaaaaccaatatctaagcgcaccatgatcacaaagaaattttcttgggtacaccaaatgaaaggaaacaacatattaaagcataaagcacctaagccaagatattactaattgaaaggcaagagcacaactatgatcacaattaatggaacttcaagatattcaatgaatttgcatagttccattctcc

SEQ ID NO: 168250 - DNA, 349 bp, Zea Mays
gaggctcgtcccccaccaccaactccagccccatctcactctcctgtggacgacgacgatgatgtttatgcaccgctgccacaacgcttcgcacgtaatcgacaaggtatgggaggtaatggtagatgtcgtcatcataatcctcaaccagaccatgatccatttgctaagattaatttctctattccatcgttcatgggttcttatgatgctgaagcttacttagactgggagatgacggtagaacaaaaatttaattcccatcttgttcatgagcagcatagggttagacaagccactagtgaatttagagattttgctatcatttggtggaatgaactagttaaca

SEQ ID NO: 168251 - DNA, 771 bp, Zea Mays
agaattattaattatcatccacagttccagattcagtgccataggcatagagcaaagtattaggcgtatatcaaagtactacgcatagagcaaggtattaggcatcatagacataagactggtctgctcaaatctttgcaaggtgctaccttagccaaagcacacggtgtttaggctccatcttcacaaagccatcaccttgccttttgttgtccaataggtaggtaaggcaagtcatcaagtcctcatcagtgaaacctggaatactcatgcaaatttgatacagatcagggtggacatttatggtctggactacaacaggtgcttggacagcttcagccaatttgttcacagctccagtaagccctgtcataatccccaactcttcatcattgagtctccttttctttccatatgatccataggaactaccagcaccagcaccactatgagaagggttggcaccagcagaaccagaggcagtagtaccaacaagacatggttcttcaaatgcaccagcaccttcagtgatatctgagatggtgccaaggggctcatttgaggccatggcatacttgcgagtagcttgcccagctccaaatataatatgcatctgcacatagttttcaattggcacattgaggaattcatcatcttttgggttgtcttttgtatggcccagcaagtgttcatcatcaaggatgattatgaatgtattctcatcccaatgagcaccgcttaggtccttgagcctacaaaccctgatccatt

SEQ ID NO: 168252 - DNA, 595 bp, Zea Mays
tttgattttatgtagtcaaatatatgggccgttctatatctcgtcagtgaaggaaagatcgccaccgttctatacctcgccacctctgatttgaattaacttcatcacctaataatgtcgttgtcgtccaaacctcaaaggtataagctacatttctaatacatctatagccagtggctagagttttgttatcatgtatgactttctattagacctaatggtggtaccacatcttaaccctagattttaaaaatcttcaattagggatgaactcgagcaaaactccccaaagatttagatccatccaataggaagcaagcagaagaacagattgagctatcgccagatttcccctaaccctaaccctagctacccatcctgagcatacagaagaaaaatgggggtaagacttacctggtcgatgatgaccatagaataaagtagaatggtcatcggtcttgcatgcgaagacgcacgcgggccatagggcaccactgagaggtcactcgacgacaacaggcttaccctcgggtaagagcgcgcacatcgacgaggggttcctaggaagagccaaactctgtcgtgcccaccctcg

SEQ ID NO: 168253 - DNA, 912 bp, Zea Mays
ccccccccggcacacacgcagactcgctgctggtcgaagaccagaaaactcaggcagaagcgaaccgtacaacaactcatcaatccctagccagatctgaaaagaaccaccccgactccactgccataagaacgaccccaatcagcgctagcattcttattcgcctgcaccgttgttcccagcaaacgcaagagctgagagcacgaattgtatcatctagaagcacatcgatcaatattcccgtaggctacacacagaattaacctacataacctaaattacacaaacttaaccataaactgcgataaaaaaatcccctctccacccagacacccacaagaacacactacacacggtaaaccctcaaatccacaaccccaggtctggtctctagcagatccaaggaatgatggaagaataaatccccacagatccaattacccaaacgaatcctgacaccaaaccaaatagcacgagatgtagcgcatgctgcgcataccacccccacgggtgattggcgaaacagggttctttcagatgaaaaaatcgggaaatgatagcgcgagaaggaaacgtctactaatcgggaagcgcgaacctgaacaagcgggaaaggaaaccgcggcggaggagggagaggacgacgggattcaggagccgagactcgagaccacgcaccttgtagagaggacgagcggcgaggggaacggcgggcagcggcggcggtttgctcgggcgagctcgtgcggttgcgccgcgcggggctattatactagcagcgacgctggggacgcggggctccgaggccgagggcggggagggacgcgtggctgtattggattggttcgattcgtagcggctcagatcgtgaaggtataccgccggggctggagaatatgctacgctgggcgg

SEQ ID NO: 168254 - DNA, 837 bp, Zea Mays
gaaaaagaaaaagaaaaacaaacctgtgttgggcccaatcttcagccggccttcccacttctctcctcctcgccagcccactgctccctgccgttctcaccgtcctgtggggcccacatgtcagcagcctcaaccggtgtccgcgcgcgtctatccatgtcacggacacatggggcctcgatggcagccgctcgctgtccacgcggttgagcacactggggcgcgggtcgctgactgatggggctgccttgccaacttcgtctccgctccctgaacggatccgcgcactcttcgcctcgcgttcgtcactcccgcggagtccgcgctggcatcgatcgcaggtcgtatccccacctactcccacgactttcccgcgctgcgtggccgtgagtctgcaggtgggcccccatcaacaacctgcggctcgtcgctacttcaaatcgccgtgctcgaccgtgatcgccgccgcagattccggtagccattggaacaaccccctctcctctcggccggaccctgggggggataaatatgggcttacctctccgctctcctctcatctcttttgcgccacacataaacattagagcgccgccgcagggaaaacatcgccgtcgcacctctgtaccggtgccactgccgttcgggcctcgatttggcaggggaaagtactaacgacacgcgtgtgatctagccatagcttcgcgtagtgtgtggtcggccgaacaccgccgcaatttctcgccagtggtgaagttgcaccaccgtccgcctggtgtcgtggataggaggaaccactccaaggattccggtgaggaccatctgcactgctaatcc

SEQ ID NO: 168255 - DNA, 705 bp, Zea Mays
aagagacattattcaaagtcctattgttacaagttttggttataaaaactgacgtgctacataaacttcgaagcccaggctaacatagtttctttcaatgatgtttgcacatatattggaacgtcggatcttgttcagaaatttttagcttttaagacatggccactagtggttgaattggaaatgtcgaagatgtctgaatgagacgcttcggacgctgagtctaagttggttaggcttcgttacaagtatagatttgaagatgagtttggagagcctagtaatgggtggctagattatgttgacgcgagatgtaatgagatacttggtaactacaacaagcatgtagccgaagctttacaactgacttttggggctcgaaaaaggtgtcgattgaaccgtgtctctgatgttatcggcttcttttatcctgactatcccatcatgattcaggactcaaagaagaagaaaaagaaaataactactaggcggagcaaagttctaaaggtgcaagctgaatcaactcctcgagcttcgaaagaaattctggtaaattggcttctttggtttttggtatactagttatgaatttatttttttttgttttgaatatttttaggctgcacccgaagccagggtagcagctaagattgaaggactccctcctatgggagtcgaagacgcaaaaattggagaagatttcgc

SEQ ID NO: 168256 - DNA, 459 bp, Zea Mays
cggagcagccgcatcggcgcgtcgttctggcgagtcatcgaaattgtcgtgagatggcgttggtgagacgacgacagctaggaggagcgagtgcaggaagcaaggtagcgatagatgacggcaagcgacacccattgtcgtgttgcaacggcgcggtgagactctaatgagttagcgagggacagatgacaccacggtcccaccaacaacttgcccatctgctggtgcggactaggaggcaaaatatcaacgttgtctgcaggatcccgacgagtcgacgagctgatgagtgatgagaaggtaaggtgcgctgcaacgggcgggttagatgaccgaagaccgaagaagcgagtgagccacgactgggcttgcgctagggaagagaatcaaatggctcagataaagagtggactgagcagtgaagcgtcgatagaaaaatagatcaaaacctagttttaa

SEQ ID NO: 168257 - DNA, 805 bp, Zea Mays
tcctcctcttcgatccaagagaagggcccggacttccgcaacaacttgaagaagggcagcgccctctcagccagcctcgaaatgaagcgtctaagggcgactaatgaccccgtacgcttctggatgtccttgatacgggtcggaggcctcattgcctcgatcgctttgatcttctctgggtttgcttcaatgcccggtacgaaaccaggaaccccagtaacttcccagcggagacaccaaagacgcatttgtccgggttcagcttcgtgcgggttgcccgcagcttgtcgaagacgagggttaagtcttccactagggtcgaccctctcttagtcttgaccatgatgtcatcgacgtagacttccactttgtccctaattaggtccccgaaagtcttactcatcgtccgcacgaatgttggcaaggcgtttttcagaccgtaaggcatcacaacatagcagtaaagcccgtccattgttacaaaagcggtatgcttcctatcttctctcgacatctggatttgatggaaaccagagtaagcatttaagaatgacaataggtcgcacccggaggtagaatccacgatttgatctatacgtggaagtggatacgggtccttgggacaggccttattcaggctggtgtagtcgatgcacatccgaagcttcccattcgccttggggacgatgactgggttggccagccacactgggtgatgaacctcttcgatgaagccaacgtctagcagcttccagacctcctttcggatgaagtactgctgttcaacggattgcctgtgagattt

SEQ ID NO: 168258 - DNA, 817 bp, Zea Mays
cttctttgtaaagcgacgcgattaaagcggtatcggccagcctgggccgttggatcagtttcgcacagctgcgattagatttgttaatttgtggaaccggtatcctatgttgaccgcatgatttaagatccacgatcgacgatagtgcatgacaccaccatccccgcaccgcttgatcacaaaccgacggcatggatttaatataacgaaggggtatccctcgattagatcgcaaccgtatactggcgaatctacagcccgtagccattgtctttccccagccgctcctgcacgatggcaccgatcgcccgcggtggcgcgtcatgccggagatccgcctcccccactcctggcgactattcactgctctagctagcgcaaaaatgaagcgattacggttaggagtcacgtgaagggctcgctcgacacggttcgccacgaaggtacctggccacggaaaggggtgaagccgcaacggaacaccacatcggcgagtaattaacgacgatcctatggtctaacacccgatccgaccaatcgtactcactatggcaaccaaaatggataaatagacaggggctccatactggtggtgaggtcgcgtagtaccacccacggaggtgcgtcttccacggagaacaggtacgacggtgaggaattccgcccgccttgctcagtttcaccacccgcccacgattctcactcctttgacaagactgggcgaccccgtccaggctccagacagcgtcggcgacgagccagaagcgcggcggcgcacacgatcgcactctcactctctattttatctatgcggcgc

SEQ ID NO: 168259 - DNA, 683 bp, Zea Mays
tatggtaccccagactacaagacccgcatagatttagatccatagatcgatggagtcggagtctataataatgcttaattcagtgtcttagtctagtcagtcttagttagagttagtttgctcattatatgttgaaatgcttgttatgatggacatgtaatgaagttggatctttgtaatgattgtcaccaaggtgtgggtatcccctgcaacttggtgtagttattaataaagtcagttatttagttgggtaatccatttatttccactttcctctttatctcagaagctgtcactgaagatgatcaattgtttagtgctttgtagatttccgtatatcttttcttatgctgaaagactacagagtcagatctaatatgtgtgtgatttctagagatgtccgagaacaggcgcagaggtgcgaggcgtgctcagccagaacagcaggcaccccaggaggatgcagcccaacaatagcagttgccaccgctacccccgatgacagttgagaagatgttcatgatgcagacttaggcagttcaggcaattggtcagaccttagcagcgatgcagcaggtgcagcaacaaccacccccaccatagcctccagtgcaagtttagatgccacaagtgtccagagacaagcgagcagagttcatgaggggccatccccctgtctttgc

SEQ ID NO: 168260 - DNA, 373 bp, Zea Mays
cttgtattggtaacatttatgtataaaacagttagaagggcctctattttgaattttgtcacgtgcccttaaaattggaccgccaccggatccttctgtggttgctcgtcgctggcttctgtaatccgtcttcgttatgtgcgttccaggcatttgcgcggagaaagtattcgaggatttcagaactatggcaaagtgccaacctcagtcgtggcgtccgagtggtgcccgtaggtagtaatagcgatcggtagaattgaccgtatttgtatgtgacatggacagttcttctctgctaattttcacgacacgaatctcgattgcaaggcagtcgggaccatgctgtactgtactgtagtgtagtgtaggcaag

SEQ ID NO: 168261 - DNA, 911 bp, Zea Mays
ctacatcatgtgctgattgatggtggggctgggcttaacgtcatcagccatgttgcgttcaagcagctgcagatcccaggatcccgactgggaccctctcgcccattctccggagtgggccctcaaccggtgtatcctttgggagcatagcactcccggttacattcgggactgaggaaaacttccacactgagaacgtccagttcgacgttgtggaggttaacctccctttcaatgccatcattagcaggccggccctataccggtttatggtgattgcccattacgggtacttggtccgcaagatgccatcccctgctagggtcctcaccgtgtgggatgaccgctccgctgcacttgcagtgtcgagaagttgcacgccctggcggcagaagccgctcgcccggatgatgaggggaaggatcctttgacttcctgtaccaagacgcctgccaaggtgcctaaggtgcaaccatccggagtagacagcgtccccgtcaagaccatctggctcagcggggattcctcccagaccactcgcatcgcgggcgatctggtggagaaataggaaatcacgctcatcgccttcctccaagcaaatgccgacgtattcgcatgggaaccgtcacagatgcctaggatccccatgcaggtgatcgagcaccatctgaagatccaccctgacgccaaaccggtgagtcagaagcctcggagacagtccatcgagcggtaggatttcatccgtaaggaggtccggaagctgctggacgctggcttcatcgaagaggtccatcacccagtatggctggccagtctagtcatcgttcccaaggctaatgggaagcttcggatgtgcatcgactacaccaacctcaataaggcatgtcccaaggacccatatccacttccac

SEQ ID NO: 168262 - DNA, 406 bp, Zea Mays
tggattttgtggttggcttacctcgttctcctcaaggcagggatgctatatgggtggtagtggatcgcttaactaagtctacgcactttattcccatgaagaccacaaattcagcttcagagttggttcccttgtatatgaaagaagtaatcaggcttcacggggtgcctaagtccattgttttagatcgagactccaaatttgtatccaaattctgggagagtcttcatagtgctttgggtaccaagctctctcttagtgttgcttttcaccctcaaactgatggttagtcggagtgaactatccaaaccttggaagatatgttgcgtgcttgtgttatgtcttggaagggtagctgggaggatcatctcgccttggttgagttcgcttataacaacagctacca

SEQ ID NO: 168263 - DNA, 1011 bp, Zea Mays
gccgtgctgcccacggcacgagccagattcatggcgacgaaaaatgctctgatgaggaattctccatccacagttggtcatttcccacacgggcgccacgagtgtattcccagggatcgagcgaagctctcgggcccgacagggagtccccagtgatgacatcatcgcattcacgacagcaacccgatccccatatgcggcggcccatggcgacgaacccttcgaaccccctgacctcttcctatctcacagtattgttggtgatacacagcttcatgcgatggctttaaaggtgagggtgattggattacatagtcggggatgaacttgccgtcgcatagctcagattaaggccaaatcggccggcggagatctcggttgggcgactccaagatagttagactagctaggagttagttgggagtcttgcgcacgcaatgatgcctgagagagatggctggcatgcagggcccaagcaccagcgagtgatggaggcgcaggatccatggcagaagtccgcaacggccacggcgtgaggttgatgttgaccgcgtgggcccaacctgtcaatggcaaaaggcacgcagaccgtgtagtcgggacttgtccagtggggcccacctatcatccacgaagcgcgacggggcaatgcaatgttgaggagcgcgcatgtggtgccagagattctccaaatttattcatatatcacttagcacaattacaaatcttgaaaggggcaacactttgacattttttttcgtgacacataccgatccttctagctaaatgatatattattcttccttgtcagatgtaccaatcttcagggctggaggtcggttgtcttcaactactattctttctcctgatggggtttccaaacacatggttctctcagtatgttggattactgccttagttctttgtaaccaattctttccaagaatcacatcctttcccattgattctatcactataagatcagctagaaaatctatcccattgatttta

SEQ ID NO: 168264 - DNA, 572 bp, Zea Mays
ggatccaccattggtctattttcattcaagtgtcatcccctatgcatcatcaaggggaaggcctttacgtagctcgatggcgagacgaaccacgatgacagtgtctggtaccttgatattgggaccaccaaccacatgccatgctatgaggacgtctttatcgtcattggccatgaggacaaggtgttgcacctagataagacgttttacgaacttcgtcatgcaccttgtgcatggaatgccatgttcaacaagatgttggtggcgctcggctttagacacaacacattagaacaagttgtctatgctcgtggaaaaggcgcttcttgacaactggtggggtctatgttgacgacctcatcatcaccaagaacgacacaccgcgatcccaaagtttaagcagaagacaaatgacatgttaaagatgagcggtttaatcagctggttattgaggtgcatgaggaggacgatagtatcatttgatcaattatgtgaactacatataaagctagccattatcaagatcggcaatgagttcaggccttagagggtgaaatgttagcaaggctgcc

SEQ ID NO: 168265 - DNA, 537 bp, Zea Mays
gttgacgacactgtccgtgacacgacgctcttctcgagtgttttgtcgaagactacgcaagtgcggcagtgcgaggatagcaaggattgtgacgtgagtaggggcctagagcgtgcgacgccatgagtgggaggccctagccaatgccatgaccagtagcactgaagatagggtagggaactcgagggtgaagggccaggtgtgcaccggtggggttgatggccggctagacattttatcgcacgcagcgggcgtggatggcgtgctgcgctgggtgcacgagcagaggagggaggagctgcacgttgggaagaagattcaagagcagtgtgcgtccgatgtagaaggagacctaggcggctacatcatagtggaggtcgaccgatgaaggaacaggggcacgttggcgatgaggtcccagacctgctctccccatgccagggggaggaggtcatgcgccaaggggccaggtggaggtgagctcggtgatggttggaggaaattctcatcgtccttggatgggaggagcaggggcat

SEQ ID NO: 168266 - DNA, 648 bp, Zea Mays
gtgtcgcgtagccgtcgagggacctcagtcgccggtgaggagccagccgtctacggcacggcagcatggacgatgaccttcatccggccgctgtggaggaggagcaccggctagaagatcattacaaagccgaggatgcccgagccctgtttggcggtagtgctgccatcaacatcgacaacgatgatgatgtccctggtgccgccgccggtggtcagacaggcacaggctccacgagctcgacaccgaccgcggcgaccggcaccagttctagtaagcgtcctcccagatctaaagtttggcaagactttgatgaactgactcacctcgtcaatggtaagagggtaaggtatggcgtcatttgtaagtactgcaaggttactttaagtggtaaatctagttctggaactggtcacttgcttcgtcataattgcttagctaagagagaacaacaacgtgctggtatagttcaatccgtgcttaagtataattctgatggttccttgaaacattgggagtattctccttctgttgcacatactgaactctgtcggttgatagctaaagaggacctacctctatggtttgtagagtctgatgcatttcaagagtacattagtaatgcccataatcctaaatttgttaagt

SEQ ID NO: 168267 - DNA, 1073 bp, Zea Mays
ataactcaataaatgatgaggcacataagcactaacctagggttcttggatgcgagcatcgtgtgggcattgatgttgtttttgcgtgagaaatgcttccttgaaaaaattgtaatctccttcactgcaaatgcctctgcaatgcagccctttaccctggccttgtttcgcactgtatggtagctcccagagaaaggagacgtgcatccagttgtgttctttatcgtacccttcgaacccacctccttctgtcgattttaggtcatgatgttgtctcatgatatcttcacatgtttgttgcttcggaggcccatctctaaccctcttgcctttccaaaatgactttgtatcttttctaaaaggatgattggcgggaaggaaacgttgatgcacatcaaaaaatgtttattttttccatgatttaacatatatgcttgcgactcactcatacatatcagacaacacagcctaccatggacacaccacccacaccaaatgccacatgccaatagatcatgaattgaccatagatatgtcgctcatagattaaatctacaattcagatggctatcataagcctccaccccatgctacaacactttctactctttgatcaacggttgcataaatacattgatttttggacacggattcttagggctcaaataaccagagcaagaaacgtgacctcttctttcatgcatttggtaggagggagattgtagggcatcatgaaaatcggacaacacgagtatggagtggaacatctgctgaaaggagtgaatttgtccgtcaacagaccaagacgaacacttctagggtcccttacaaattctggatcaaaacggtcaagtgcctgccatgcctcgccatctgatggatgcaccatgatattcagatcttggtcctgatgactcccttccttatgacatctaatttgcttagctgtctcttgatttagaaacaattgtttaagccgcaaagtaataggcatgtactgcatttgcttgaccgggaatttttgcagtgcatggaatcggtgtcattctcgtgatccctccaaaacaacatga

SEQ ID NO: 168268 - DNA, 535 bp, Zea Mays
ccctctccccggagcctatgccgacggcatagcgccggtttaaccctcaccgcgacgggtattgcttgccagagtaaccttggattcgcccgagggtccccctccaccgtctacccatcttagtcctgttctcggcacccagaccttgccatagtgcttgccgagtcctccccaacctctctggctacccagaccaacccctagtgtcctagaagccccggtctgcctcgcctccggtgactgcgccgctgtgtccgctgagagcgccacccctagctgaccagaggagactaaacccctcgtgccgaatccgaaccgcccagtcttgatctgacgacctgaagtcatggataacggttcgcgtggtttatggaaccaaagccatcgatctacaatccagtggccaacgcgccccatgtcctcttcatactgctgacccatgggccccgtgtatcagtgcctcaacccacccgagcccacctgtcaagagcctgcgccctcgctcgctattctaatctggacctttgctcggaga

SEQ ID NO: 168269 - DNA, 612 bp, Zea Mays
gcgcgacagtagtgaccatctagcgctggttgaattagggtttagtgcttggtatcgccgggcagtgatgttcgccggcgtatatcgcggtggcgaggtgcgccgccgcgctcggccatcggtggggtgaagacgacccctcggtcgttcatcctagatcggacgtggaggattagatcccgtgcggtgaaatggcggccgtaggatcttagatgggcggagcagatttaatcacgcatacccccctgggcgatccaatctggaccgtccgattgataatgagcgtcttagattagacataacttaccccttcgtttatttaaatctgagccatccaatctagatccatcggccaggattcaaggaaaccccttcggcctgcaccttttgctaaagagaccctagggttaaaggatatcaacccgccgtccaaagagtggagcgctgtgcctgggaaattttatgcgagcagcccctgcgtttatcagaaatcgaggcccagtccagaggattagaaaatcagagaaattaattaagaaatagatttttatgtgtagaaataatcctagaatttgtataattcatagaaaatgcataggaactccaaattgg

SEQ ID NO: 168270 - DNA, 582 bp, Zea Mays
gataagggtattccctcctcaaggagtcctcactctcctaggtagcttcctcttctccttctctgctccactgaactttacagagcttcacctctgaggtgcgggtccttcggacagccgaatcaagaatctttactggtttctcccggtactgaagatctttctgaatctgcactgcctcttcttcgatgtgactttctggtgcttggaggcatttgcggagctgggatacgtgaaatacattatggatgtcagacatggactctggtagttcaagacggtatgctgcgggccccactctgccaatgatgggatagggaccgacgaatcgcggtgcgagttttcctttcgcttggaacctcctgacaccacgcatcggggagaccttgaggtagacgaagtctccttcttcaaatctgagctctctccgcctattgtccgcataactcttctgccgactctgagcttcaagtaatctcctgcgaatcagggcaactttctcttctgcctctttgacaaaggcaggtccttctagtgctttttcccctacgttggaccacatgagaggtgtctagcattttc

SEQ ID NO: 168271 - DNA, 491 bp, Zea Mays
tgtggtcgcgccatgcttttgtttgagcttggtatttgtttagggcctatagggcgaagacacgatctccgtcgatgaggtccttcgaagtaggctcgtctacatcggggacggctgaagtgattgtccgtggtgacccatgttttatttcttgcggggtcatggcctccgatccatatagcaggcggaaaagggtgaacctagtcgccctgcactcagtcgtgttcagcgcccagaccgcttcaggtaacaggtcggcccacttgcccttcttgtcgtcgaggaacatcttcttgacggctgtgaaaattttaccattggcgtgctccacgacgccgttggattgtgggtggtacactgaggcaaaggcaagcttggtgccaatggagaagcagaaatctctgaagtcttggctgtcaaattgcttgccattgtcaactgtgagctcagacgggactccgaaccggcaaacaatgttttgccagaagaat

SEQ ID NO: 168272 - DNA, 675 bp, Zea Mays
gacacgacatgacttacttctgtcaatggggttttgtcaaactgtggtgcaccagatacgggagtatcatgtttaacagtattttgtccttcctgaaaaacaataaaattattaatataaatgtaatcaaacataggttataactaatattaacataatatgatgaaggtataaatactgacagtatttatgtgtggtgttaatttagaaacagcaagcttgtcggttgtgggagcctagtgaataaagtaaataaaaacatgcatatatattattgttacttgcataaattgtaattgaaagtataataactgtgaataaagtaaaacaaacatttgattttggagtcttgtcaaatatagggacatccataactgaatttttttcacaaacgtttccactgacaatctgtaatggaaacatatgaaatttgagtaaacaataacttgtatgctatatttaatatatgatttatatataaagtttgtatgaaaaaacttacctgttctgatactttgatatcatcagtaggaacatgtatttcctgatcgtgttgctgattatcaggggttgaaacaggtggagtggaacaggtggagtggatactggagcatttgttggaggcattgaggtagtggggggatatctacatttggaaaatataataataaatta

SEQ ID NO: 168273 - DNA, 1201 bp, Zea Mays
aatacatcgatagatgtttatatgagaagtgtattggttttatgcatgtgatcggtgatggtgatagtcgatgcaaatcagggtatgattagtcctgttggagtcactatgctgttgatgtcttgtgcgtaatatggggacacgtatgtgtgtgtgttccgtggtgtattatagtggtggtggcgtaagatatttgattgaggtgtgcgggtatatgccgtgatatggttatactcgcaacggggaaagatgtatgtattgtgacacgacgcttaggtcgctattatataatcgtgtgaaggatgctcgtgatggttgtgtgattaaggagtggtgtagtggcaagcaagaagtaattttaatttttcaaacgattagtggatagtatctatcggtgttgtcatgatttttgttgtatggcaatgtgatgcttcgctttgtcaatcatcacattccatgcccctttggataaataaatgtcttgttgattggttagaggtcttatacgagtgttatcgcagtccaataattattggaggcaagtagcgttcacaagtcggtccttgttaaaattgaagaacaatccgctaagacatacacataagtgctttaggtccctcagtagccaatgtaagtcttacagagttttatgccaggtgttaatgcctctatgttagacccattaaaatatggtgttttaagtgacttgtgtgttgtccagtttaagttgagaaaaggttaagaaacattaattaacctgctcccacccatgttttgagttgcaatgtctaaatgggttgctaagtcttatgctgtgattagccaactaatgttaagtaggagtcaattgcgttaagtgattgttatgtatatgttgtgtctcggatttcgataataaaaggttggtcgacgaatatgttgtacagcggcctagactgttgctctggttagcagacttgttagatggttttggttaagctcgtggtcacggcgatttgcttgttgtagtctaaatgcgtatggttatgatcgcggatgaaaagtagtagtgctcatgtgatgtctaagttgaaatgcaaattattgggggaaaagcgcttcgatattggttattgtagagaatgcgttgttaattgagtatggtacttctagtattcgaaatgacacgaataaaaatattagtgagtctacttgttagttc

SEQ ID NO: 168274 - DNA, 555 bp, Zea Mays
cacagaagaacagtgaaacagaattctaagttatcagacgacagaccatgttttaacactaggacatgggcgggcggacagcacttctatcagaaactgaaaagaaaagggttggtagcatgcagccatacaaatgaaagcaagatagtgatcctgctgtgaacgaacccaaactcctgttcctttcctataggctagccatgagatatacaatggataacaaacttggtggcgtaagtgtcaacatcaaacccacgagaaactagctgagcaccttccgcactggaacagtgcaaagggattataaaaatcaacgatttgagttctctgggccaaaagaaagcaggcgtgcaatgcatacatttgagctggaacaattgagtccagttgatgctgctacgcaacaataagcagcagtaatgataatgccctcaggtttgaagtgcggaatttaaggcgtgaaggtgtgacagctgaaagggccataaataaaacttcgcataaattcgttccactaggaaacgtccgtgtgaagcgttaagccatcctggaaac

SEQ ID NO: 168275 - DNA, 518 bp, Zea Mays
tgtcacggtcactctggataggctcaccgaagttagcccccccacgaccttgcgccacgtgcctcgatgctttaaccatgccgtcgtgagttatcttagcccattcggtgatcgcaggtgagcttgccacggtaaatgccaccaatcgcttgcaccagtgcaccttctccccgaccgccaccgcgcgagctcaaattcacgggccaacactcaagtgccctataaattgagcacgccatgagctccgtagggtaattacccatccaaagcaccaacacttgcctccaattgttcaccagagcccacaaattgctcacttcccccaaatcgggtttccgccaccgtaaaaaggtcctcgtcgtggctagctcgtttcaggttcgatcttgtccgttgctctcttgtttcagcacccttacatccccctgatgctcctcgactcgtttaattaagctagactaccctagatcgtcgggaacacttctgttcatccgttgttcgcactgtctccgtggaca

SEQ ID NO: 168276 - DNA, 1114 bp, Zea Mays
gatgaatttgattcccagccatttctcgaagaaaacaagttttatcggcagtggcattaactaaggcagcgatagcctctgccagcgtgggaggtacatgcggcgggttcagagtttcctccccaccatgggaagttctagccccatcctgagcacgagttctggacgacatctgaagaagaaaaacatacttgattattgcatgccatgattacacaacctctgttacattattccaaacttgttctaattatacatactcaacttatacaactcacttttccttatttagattacataaggaaacaacatactactacactaatctattcatccgcgtccttggctgctcccgctccactgctaacttcaggagaacgatcattcgcgatgttcatggaaggaggggctccaaagagatccaactccccataaggtcctccgccagctgctcatgatgcaccagctcccatcgccgcaacctctggtggcacattccgatgcaactggtcatacaacacgtgcacttcctcgtgcagagtattattatacgctttcagattttctagggctacacttagctcttccacccaggctcgggcagtcgcctcacaatctcaggctatagatcgtgaatttacaacccagtcaatagccatatcccgctccacaatctcccgctgcaaacgatcaacctatgctgacaactcagcgatgcggcgactatcacgtgtgtgctccctgcttccatggcgcagttccatcattaaacgttcaactctgacctctagatcccctatgggatcattactgctactactgctccccttatgccgaggagccaactggtgccgaggtacaccctgaggcccggtcgcctttcgttgggtagtcttggtgcgtgccttgtctctataagaggggaatattacttagtgttgtttaaatatgatgcatgcataacctacgattatggaatcaaccacttgttgatcccatacctcctatgtataacctattatttggcacttttttacccgacttcaaaagataagttgctataagaaaggatcaaggtaagaatgaaagaatgttcaaaaggtaagtattttaa

SEQ ID NO: 168277 - DNA, 367 bp, Zea Mays
ccacactcaaggcagccaacaaagctcacaatctttaggaatgcaacaaacctcttacatgccaccagctccaagaggcagaggaggaagaagcttcagaggaaggttcagcactcaacctaggagattgttctgcttattctgtgaggaggataagggacacacaacaaggacatgccaagtcacgatccaaaagcagaaggagatagctgaagtcgaagcacgatagaatcagtcgaagcaggtcttgcatactgcctcatgctattcgccatatatccctgagtatgtgggcaaccagcaacccacgacatcagttgctttggtaagtcattctcaagctgcatgggctcagctaccaccacca

SEQ ID NO: 168278 - DNA, 1453 bp, Zea Mays
cgagcctacttcgaaggacctcatcgatggtgaccgtgtcttcgccctacatgctctaaacaaataccaagctcaaacaaaagcatggcgcgaccaaatagtcatcccgagggaattcagcgaaggagacctcgtactcgtccggacagctcgggcagagtcccggggcaagctagaaccaaagtgggagggccctttcatcgtcaagacgaaggcgtcccccaacgcgtacaggctcacaacgccatccggtgaagacttagaacattcttggaacattgacaatcttcgcaaattttttgtttgactcctcagggccagctcgcccttgtaactcgcaaaacagttttattccggctcgcactcttttcctcctgggggtgaggtttttaacgaggcggagccatgtaatatacacgcaaaaaatcccccgcaaaaattacgtcgaaaaagaccgcatcgacggtcttcagcattcgaccaatacaaaagtcaccgcgaggggcagcgctggctaccctcgcatgcgacactccgcgcaaaagtagcctaagggtgcagccagactagcacaacaagtgcgtaaaattgaagtcttcatcaaaagactatccgcgcaaaagtcgcctaagggtgcagccggactagcacaacaagtgcgtaaaatcgaagtcttcatcaaaagactatccgtgcaaaagtcgcctaagggtgcagccggactagcacaacaagtgcgaaaaatcgaagtcttcctcaaaagactattcgtgcaaaagtcgcctaaaggtgcagccggactagcacaacgagtgcgcaaaatcgaagacacattacatccgtgcaaaagtctttgtcgaaaactatccgcgcaaagaccgactataggcgcagccggaccgacataataaacgtgctagaccaagtgtgcaacgcccctatggacatagccggatgcgcgaaagcacacaacctcatcatacaaattatagttacatacgtacaacgagggcatcacaccttacattggttcaaccttcgggatgatacccatctccctatagttaaacaacattatcctcagctcctcaccctcaaaaagacttcgcaactcctcatcacctacactcgccccaaccggcgaggacaacaattcccgcttgccagccctgcccacacgaagccagccaccatccacctcactcactctacgcttcgccaccgcccttcgccgcctacacccagcactcggaccaggcaaaacttcagcatccgtaacacacagagaagcctccgccgcagccacatccgaggccgcaaagtaatccaagccctcatccgaagactcttccgtccacacaaccgaactcccagagtcatcaaactccgaaaacttagacacagactcatccgattcatttccagcgaccacggtcgaagccgccataaaatt

SEQ ID NO: 168279 - DNA, 707 bp, Zea Mays
cggggtctctgcgtaatactctttaagaagggatggatggagggttggtttgttataaacttgagggctcatctgcaaatttacaaggccgaagaggtatggttgtatcatagccacatgatctgatctgagcggccaagattagatcaagtcgattttctaaccggtacgcaaccggaaccgtccgatttaaaatcgagggctacgatcacattggccgaaagagttcttttatctttaatcctaaccactcgatcctttcctaatggttatgatctattccccgaaccagtatctagtcgatcaaatctcagtcgttgaataggatccaacggccatcgtgcaaccctaccccgctcgcaccacaccggccgcgaacagcggcggcaccagcttccctatggcggcgccatgccggcttaaccccaatccggattccgtgcccataattccacaccgagatgttctacacggcctacaggttcccgcgaattcatagggagaacccttactgacgaaagtggcgtaggatcggtgatttcccatgtggtgcggatgacggcgcaatataatctccggtgaagaattgagggtactccaagcatccccggccttgatgaagccacaggcagccaccacatgacctagcgcttctccagggatacacgtcaaggtcccggcgatggctcgccgcgagttagacagtg

SEQ ID NO: 168280 - DNA, 829 bp, Zea Mays
caggttcatctgactgaaatcgccatggtacagtaactgtaaaggatcagaccgccagcgcggcagtccctcaccgccgacggctctctccgtcgtgatttgtgtcgccggcgtcgagattagtgcctaggtgttggatagcgctgcggggtaaaagaatcttcgccgccggtgagctggactccaccccggccagccgcgatacccctccccttgctcaccgcccgtggataaagctgctcaccgtcgtcaagccttcgtcgttgcccacctcgtggctccgcctttacaccacgtcgccgtgactctctgggaccgtcccatcgtcgccggtgaggttgccacgacattagccacgaattcacgtgcgctagtgccttcttctacctccgaccgtcgcgcgtccttctccaaattcctggccaccgtcgatgccctctataaattgatggcgcgggcagctgcgctacctcatcgtgaaaccagagcccccactcccaccctcaatcgtcctccaaagctcaccaatttcaaacttcccccaaatcagccaaagaacaccgtgaaactaagttcaccgtggtcagccctccacaggtcagcccctgtcccctgcttcctcgtttgagtactctcatggctctgtgatgcttaccaaaccctcaatttgcacggagtagccttaaatcgccgggaacaccttcatccgtccgccatgctctcggtcaccgtggccaaagctcattagttggtcattcgtgcaattaagttaggggaaacgttctccaggtagtgaatttggtttaggtcgaggctgagcacccatctt

SEQ ID NO: 168281 - DNA, 701 bp, Zea Mays
ggtgcagaaggttacccagtccacgtgctccggcggggtcacgaactccggcgagcgcaattacactgttccggtggggctggtcctcggctcaagctcaggcaagcttcacggccttctggggaagctatccgaggccttggatcgagcggaggtgggcgagaaaggggttggccacggtggttgcccccgggcggctctagcgggtcgcggggaggtcgtcggagctgcgggcgagctcgggagagttaggcgtgctacagaggaggcaacggggaagatggccgtgcactagggtgggctttatagccgtggcgcgggtgtgggcacggggcggccgagggcgcgtgggggttcacgtgaggcgtgctctggacgcgcccccaagtgtcagcccacgtcgaacacgtgggggtttacttctaccagggtttaacggccgatttggttgacttagcgtgcagatcttagcaaaacccccatgtacggtctcttctctgcaccaaatcctacctttttgaggtgagttccaagcaaagatatggtcggggtagagagatatgggggtgagaagtcggctctgtccgagctgtccacaccgagacaaaagccatgccaagtcgtgtcaaatggcttagggttgggttcaaacttttccagggtgttctaggggtctttgggcgccattttgtcaattgggc

SEQ ID NO: 168282 - DNA, 354 bp, Zea Mays
cctgtagcaagttggggaagtgccccgtctcgaacattgatgtgtaatgttcgacaacaggaccaaaccccatgaagttgtcctgctgggcgtagtcagcttcctcgttgatgtgtccgtcttctccattgtcttcgtcgtcgtcatcctcgtcattgccgtctccggagtcgtcggggtcgtcgcctccaggtgcaggtgcttggaaggctggtgcagacgatgctgacatcgatgacccagctgcgaaggccagcgactcggccaacggggtgggggtcggcagctgctcctccgagctgtcctccaggttgattacgttctccactcggacgggaggtagattcgctggag

SEQ ID NO: 168283 - DNA, 501 bp, Zea Mays
gttctcggagttgaatacccgtacctaagtgcaatcagagcgctaatgtatctagcaaatagcacgagaccagatattgcatttgccgtgaatctgttagcaagatacagtgcagaacccaccaaaaggcattggaaagggatcaaggacatcttccgttacctacaaggaagtaaggtcttggtttgttttatcgaaaaaatcaagatctgaatcttatcaggtacgctgatgctggatacctgtctgatccacattcaggcaaatctgaaactggatatgtatttctttgtggaggaactgcaatttcatggaagtcatcaaaacaaactttggtctcgacttcaacgaaccactcaaaaattattgcattatatgaagcctcgcgtgaatgtgcatggcttcgaagaatgatcaaccatatccaatctgcatgtgggttgaatattgagcaaacacccacaatcatttatgaagataatgcagcttgtgtcgcacaag

SEQ ID NO: 168284 - DNA, 606 bp, Zea Mays
cagtcacctgtcaagcttactgtcaagcttatgttactactatcaagctgttaagatggtaaattgtgacaccttgaatcaagctatcaagctgtccatgttgctatctttgtgcatgttactctgtcaagttgttaagatggtaaattgtgtatatttttcaagctatcaagctgatatatgcctatgatactgtcatgttaaattgtgtaacctgtcaagctgtttgtacttttttttgtgctggtaaattgtgtaagctgtcaagcttgaatcaagctgtccatgttactatctctgtccctgttgctatctctttccatgttgctatatctgtcaagttggtaaattttgtaaattttcaacctatttactggtaaattgtgtaaattttttaagaattcatttgtccctatcaagctgttaaatataatcaaaaaacacgcccagttctgtccatttagctggtaaattgtgtaaatttttaagctgtttaaatatagacaacagatctctgtaagctgtttaaagatagacaacatattctttttttaaatttttaagctgtttaatcaaaagacatgtccacatctctgtatacacgcc

SEQ ID NO: 168285 - DNA, 742 bp, Zea Mays
ccgagggttaggcttcaacattcctttcccatagggacatgcgatccatggtggctcccaacttccgatgaggaattgcgacagcgccagagatcgttccaatcccatgacgcaatgccaaccatccaacaggccggtgattcaccctatctcccagccaagcaccgaagccaatcaacgactcacaatcgatggcagcacggagcggcttcctctgtgctctcccccatggcggctctgagctctcacggtcgtgcggcgttagcaggacgagatgcagaggagtatggggagctaacttaagtacccgagaggatcatgtagtggcccgagaaaaaggggaagagggttgagggagatgcaagattcacgggcgggagatcggcgaagtctgttggcaagacgctcctgacgactcggccccaccgcacagcgaccggaagacgaccctgatgacccagccccaccagtcagcggttcaatgggtctaaggcaagcgagcaagggagagttggagagcggggaaagaagatctacatggtttgtggggtttgactgacgaagtggtcccacctggcagtgtctccgagaggagccaacccaagtgcagatgggtggccggccgaggggccccacacgtaagcgaggcgcgcaggtgagtggatctgggcagggggcctcgcaatgcagtggcacatggaggggaagcgcgcagtgggtggcagacactgggccgagccag

SEQ ID NO: 168286 - DNA, 434 bp, Zea Mays
aacaaatattacaccttatcttagccaaaaggccgacaaaggtatgagttgaaaaaggagcccgaactttttttataggttgttcagtctctcgtcctccttcagctaacgaggtggtgctatgtgggagcgttgagctgtgtgtggcttcctgtcgagttaggattgggtggtttctcaaggccaatccgcggtaacgacccattgttaggtggggaagaggaatagacctatgcgcgtcatacgtgacacacgatgcacgaaactggtgctttaatatagtagagatagagatgtaatgaattggccttttatttgtacctttatttaacaccatacatcaaggatcaactttgatcccttaccttcttgcctggtgatagataaagtcacaagggacatatgtagtgccagttgatgaaagtcaggcagga

SEQ ID NO: 168287 - DNA, 876 bp, Zea Mays
cacatttttggcttcaactgacagtgctatgctgacagccctgctataggtaatgtccagacacgtagccattttgcgctggagtctatcatttaatcccctcatgaagcaaattttctttttcaagtctgtgtccacctgatcgatggcatattgggagaggtggttaaatttgttgagatactgcatcacagaatctcccccttgcttcagacggatgaattcttccagcttcatctgtagcactccttccgaaacataatgttccctaaatgccagtttgaactcttcccacgtgacctgatgtcccacaggctgaatggtagaaaattttgcccaccaagtgctggcggggcctctcaactgttgggcgacaaataggggcttctgtgtctcagtgcatcggattaacccgaacttttgtttcatcacctgcacccattcatcagcttccaagggttcctccgccttgacaaagagcggtggatgggtctcggagaactctagatatgtggtgtctcatggtccctgaggttgaccccttcctctgtgttgctaaaattgatttcccgccatttcacgcaagaagcgcgtgttgtcggcggtagcgttgaccaaggcagcgataagtagcgttgaccaaggcagcgataacctcggccagtgtaggaggtacatatggcaggttgggactgtcctccccgccgcaggaagttcccgccccatcatgaggatgagttcgcgatggcatctaaagaagaaaaacatcctgaattattacatgctaaacacacaccatctttattacattgttgaactgtaataattatacatactcggtacacaacttgacttccttatttattttacataagt

SEQ ID NO: 168288 - DNA, 606 bp, Zea Mays
ccgtcctcggtaagctctcgatttctcaccctcgacctagtactttccttagttgatgtcgcgccgtcgccaattgcgtgcggattggggcgaattcggccttttgggtcgggaatttgcctggcgccacccgtatcgtggtcagtagggttagaccgtgtggtgattggagcagtcattccccgtgggttcgccatagtcttagcttcgtggggagcgaacttccttctgagttggggtagccggggctcgccgggattttcccggccatggtgtccgccgcgggctcgcgctcgccgccgggctgggtcatcggagcggaggaacgcgcaggtgccgtctgtcggttgatcgatggtggagattagaattaggcttaccccttcgcgagatcaaatgtggaccgtttgatgagatcgtgcggttctagtggaaaaccgattcaataaaatcgtgccgttgattcctgatctagtggtaggtgcttcataccgattcacgcggaacctagatctaatcagagccctcaatttctgatcgggcggctcagtttcgcccgtaccccttcacttaaccggttcgcagaagagaccctggaaaccctag

SEQ ID NO: 168289 - DNA, 595 bp, Zea Mays
ttgattgtcggaccctatgaataaggtcgctagaccatcgtggatgagttcaacggtctagaaaatcacattagagagctctagggtgcgttatattggttcgttgaagggggtagaccatacagtgcaaatcgttactgtagtacatatggttcttcctacaatagcatcaaaccttataagagggttttcgttggaccaatgggtcttgatccaacactatctacgatgtggctagaaaggttttcaagagcatcaaaatagtttgaagatgagccttggaccacacgctcggtgtagtacacttcaactatgtcttccatataaagtatatagttacccttgtgactcattggaccaaatagaaaggtcgaacagtggggtatccggcgatcaaacgctcatggattttgtaagagctagttggtcgattgagggttacaaatacatctcaaacttgtccattccagcactcctgcctattttaagagttgactcatttgaagtgtgaggaagagactttgcctagtgaggcattaaagagttgataattgcttgattagtgtcacacccgaaatttaaagacaaaggcaag

SEQ ID NO: 168290 - DNA, 651 bp, Zea Mays
cttaacatgagttggctaacgccgtataagacttagcaaaccattttaaacattgtaactcgaaacatgggttgaagcaggttaattagtttttcttaaccatttctccactcgaattagttaacacacaagtcgcttaaaacaccatattttaggagggctaacatagagacattaaaacatggcataaaactccataagacttacactggctactgaaagacctaaagcacccatgtgcacatgttaccagactgttcttcaattttagcaaggattgactcatgaacgctactcgcctccaataattattgggctgcgataacgctcatataagacctctagtcgatcaacaagacatttatttatccaaaggaaatggaatgcaattatttgacaaggcaaggcatcgacccgccatacaacagaaagcatgacgacaccgacagatgctatcaactaatcgttttaaaaatattaaacttacttctcgctttatcactacaccaccctttagccacatgaccatcgggagcatccttcacacgattatacaatagcaacctaaatgtcgggtcacacaatacatacatctatcctcgtcgcgagaataaccatattacggcatatactcgcacacctcaatcaatt

SEQ ID NO: 168291 - DNA, 550 bp, Zea Mays
caaatggcaagggtacgctccactgccagggttacacgtgacggagaagaagccgaagctgctgaaaccgctccaatttccgaagtgacgaaacggtcggggctggtagcgccagaggatgtttctgatgaaggtgcacctgccgctgaagctgagcaagttggtgctgaagaaggtgaatctgaagatgattatagtgacgtgtcatctaaacccagccacctagagtttgggaggtccactgttactgaagatgatatgactaagttgatgaagttaggctatttcagtgaagccaaaaaggaactaattcgctttggcggagaggaaattactccgaagccagaaaaggatgaagtggtagtctttaaaagcttctttaaagcaggattaagatttcctttgaatgagatgattgcggatgttttggggaagtttgggatttatctccatcagctaactcctaacgctatcgttaggcttagcgtctacatctgggctctccgaagccaaggggcagaaccacttgccgaaggcttttgccgggcac

SEQ ID NO: 168292 - DNA, 418 bp, Zea Mays
gttgtttttaaatccaaataagttctttgaacttcaaaaaatgatccaacaaaaagggaggttggtaagctgagggaagcattcaatgaggtgctatggaagatggttgaagattatgaccttcaagctataatcagtaaacaagctgatgagtatatgaatatggctggccatgccttctcatcgccattagcaattagagaatagcaaaaaaagagccccaataagttccattacctcattaatcatttaagttttgtatggctggcaacactaattcaacttctcttctcttttttagtttgttggtgggatgcatatggtggccttgcatttgagattcaatcctttgcaaagcgcattgttagcctttgttgttccgcttccggatgtgagcgcaattggagcacttttgaat

SEQ ID NO: 168293 - DNA, 624 bp, Zea Mays
atcgtgatccttttagaagacacaacgggcctcaccaccttatgaccagattggcttgcaaagtgaggagtcccacgaaaaaagtactcagagtcatctgaacccaatacgcccccatacatcattcatgcattttaccttcttcgttttaaataatgaactcaaagagaggtgctttttggatcttcggcataggacccttcgaagcagatttaacgatttgagctcgttatagaaaataaactaatcaaatgtttgaaagatggattactccgcttcaagaacaggatttggcttggcaacaacactagtgttcatcacagggtaatggctctgctcttcttctcccccgggtggccaagttgaagaaactatttttgtgcaaatgcatgaaaaaggatatgtatacattcctttgtcacccggttgtgacatctgttagaaagcaccttccgttttctggcagctactatacctctccaagatgacaaaaaacatttcttagaaggttttgtacttgtaacaagtatgttttcatataacatatgtttaaactttgtggtcctcaaccaattaaatgataaaatacatattgaaagttccctatgcccgggaataggatct

SEQ ID NO: 168294 - DNA, 350 bp, Zea Mays
ggcagccttgagcaggttcatatcaaggctaggagaaaaaggcttaccattctacaaattgctcaagaaggtagacaagttccaatggaccacagaagcacaggaagctctcgatgcactaaagaagttcttgaccatgccaccactactaaagccgccatgtcgagccatgccagatcagccggcagaagatctgctgttatacatctcctacacgactcacgtggtaagcaccacgctagtagtcaagcggacagaggaagggcacacatatccagtacagcatccggtctacttcatcagtgaagttctgggaccctctaaaaagaagtatcctcaagttcaaaaac

SEQ ID NO: 168295 - DNA, 681 bp, Zea Mays
cggctggcgaggcatgcgggatgcgaagcaagtgaagtgcgcaggggaaacggctccctagccgcgtccgccatggggctgcacgaggaataagatcgccgaggggaggggaggaaagaagtgacatgaggaggggaggagggctcacctgcacacgaaggattccaagtgacggcgggctctggctgctgcgtggggagggacagaggagggcgccggcacttatgcgcatgcacacatggacattagttccattttatgcgcacgcacgacacaaaggtgcgggcagggtcaagaggagaggcggttttggaaaggatgattatgacgtgtggggccgatagatcaatgaaacggttgagcaagggggtatgcttgtgctgctgacgggcgggactcaagtcaggaacagtttcaggtgatttcgtgcgcgcgacatggcacacaaccgagctgaaccgggagtgaggagttgtcgcgcgaggatgaaaagagaggtggttcacgatgataaggtgtgtgtatatatatagaaagaagagggcgcgaaagtcagttgcacgatttcaccacggctcgcgatgggaggcaagacgaggagaggctgttgaggctttgtccaagtcagacgcgtgcacgcgaaatagacaacttttagagtagataaagctgacacttggg

SEQ ID NO: 168296 - DNA, 1315 bp, Zea Mays
tctctctcttgaattgatgagcgaacgaaacactcagacagatgctgtgccgtgctgcagtgcgcccgtagcagcacagacactctgccgcacgcacctgcgcttgtcgcttcccctcttgctatatctcctgctgcttttgctaaagccggaaaccaaaaagaaagttgagcttttcgtcacaattttgctttacttattaagtgctagtccgttttgtttatacgaccttactattagcttctagcccggattcaaagtgctacagtgcgttttcactaacaacatttaggattatagcacatcaaatttgactagtgttacaaaaatatatattagcatcatacatatttagttaaagttaaaaatatttaatttgtatgaaaaacaagagtgacactctctatgggataggccgagtacgcaccatgcatgattactactattaggctatctccagcagcgttacctattctaccttctatttcaaactttacttcgtaaacagtataatttgtaatgcaaaacaatgttttatacggtcatatacacggttcgctagccacagcctaaggccaactccaatagactgttctgtactgcagacgacaatgtttacatagtaaagtttgaaatactgattgaagtacgtagtttgctggagatagcataagcctccttgataaggctctttcaaaggctcctccaacaactccttaaaaaatctatgaaacgggggctattccgctagcttctcgttgaaaatagcaaggagctgcttccaagaaacgagcaaagtcgggggctcgaaaagaggcttctaaggctccctcccatcctccattcctcccctctctcatgggttccatgttggctgaaggtgctgcatttcgtactaaatagggtgctcatcccgaaactttttgtgaaaacaagaacatagctattttcacacaagagccaaaaccagagttggagttgttgacacaaaagtctaactaaaggcgggcaaacatgcatacctggtattccgcggtgtgttggtcttgcatatattcaattttcctattaagttcacaatgtttacattttattatttactaggtaggtgctcgtgtatggttaccgtttctatatatcatataggtagaccttgattaaatgtgatagttatttagacacagctgatccatttaatattgttacgacctgatacgacactatttgaaataggcccatgttggactagcccgcaagtgccgatccagcctgatacgattatattaagatatatatatttacaatgtatatcctt

SEQ ID NO: 168297 - DNA, 877 bp, Zea Mays
ttcacctttgtgctggcgccaaaaccacttggacccaataacaaagagtggccaaattacccaaggcacacccctgagaaatttgaaaacaaaccaaggtcgtttgacacggtttgacatcatttttgtcgctggtgaacagtgcggacatacaagacttggcgcccacatatcttgtaagctagggcagatcttccattggaacttacacaaactagctagccctaggtgccaggaagaaatcttgcacaagacctttggcgagattcgcacggttgtgacctctacaggcgcaagaacttgggcagatgaacacgacacgtgttcgacgcgcccaggcaatgccagagcacgccctcagcgctcagcccccgcgcgcagcccctcgccgtgccaaccccgcccacgcccgcggctataaaaccctcctcagtctcgactgtacacccccgcgcgtccctgacccagcccgagcacgagttcaccggcgtttgcccagagaacctcgtgccagcggccgcgcaagccacgaccaccgtagaccggctaaactagccatcctccgccccgtctgatctttgggttagcttctacggacctcagcgaagctccccgagccgaggatcgaacaatacctaaccggagacgccagatcgacgttgccggacttcaaccggtcggcgccgcacgtagaccgagctccccggtaagccatccatcaattccttgtacctatagcatccttagcatctcgtgaagctccctgtgccatttgattgagccctaccgtcgtgagcaggccgggagcgcacgccgccgatgagcccgatcgcctgcgcacgtggccagccctactccgaccatcaccgtcgatgat

SEQ ID NO: 168298 - DNA, 703 bp, Zea Mays
gccgtgggtacggcagcgcgagagggcgggccggtggggcggggggagggggaggcggggtggtgttggtccgggcgtccggctggctggagctggactggctccctctcttctctctcctcctccgagagggagggaagagagtgagggagggaggtggcgaaggagagggacagcagcgggactcgctgttgcctttaaaaacaacttcctctctcttcttccactccctccttcctgcactgtgggcgtgtgatacgagctgcaggctgcagcccaccaccaccagcacggtcacgaagcaggcagcatccctgtatggctgtggctgtctcctcgcgcacgcacacgagccggcctagctagccgcgcccgcgcccgcgccacgccgcgccaccgccacctttcgcttccatctgctgccttgtggggattccctgcttgcttggtttggctggtaggtatgagggagcgtctccactcgccacctgccgagggctttttgtagacgccagggacgggcggagggaggctgcgcaagcttgtgggcttgtggcggcaccgcgcgcaacatcatcagattttatctcctacatttctcttttctgcaacgggttttctcctaaattcttccgctccctacctcagccataaaatattattttacctaactaacaaataatgcgcgcgcacgacatttcag

SEQ ID NO: 168299 - DNA, 569 bp, Zea Mays
cacatcaaacagttcttcttttggcaggagccctgcctgaatctagcccgggcatcacggagcctcttgcttctcctcaggtcagattccacaacagcaaattttggcgtggaggaggccaggtccgacgggacagaggtgtcgtcagcagattcctcagaaatgaccgaatcaagaaacttgtcatcaggtcacttcctggggatgacaaaagggtgtgtctcagtctctggctccaacaaagctgaaggaatatctgaagacaggaatttttttgaccaactaaaggaatcttcgtgcatcaagttggataagaaaaaaggtgcccatttcttgggaacctgcaccgaggtcaccgagctatcagccagggcaaaatagctcgcccagatcctatagaactgagcattccttttcctttctaagtggctcagcaaaacaggatccgattgccagtcatgcgaaaacataaagttcaacctcacgttgttgtgcccattaacattaggttccaccggctgggcatcaggaatagctatatccccaggcacaagagggacatcctaaaa

SEQ ID NO: 168300 - DNA, 1056 bp, Zea Mays
tttcgaattcaaacagcaggtttgaatttaaacaataaaatagaggaagaatttaaaataaaacaaaaaaaggaaaaaaaagagtctggtgcttactgggctcggttttccccttttggcccaacagggagcaacccgcgcagcccaacatcaccccgagcatctctcgccatcctgctggcgtgtgggtccattttgctagtcctgcgctagtctctgttgcactgtcttgtgggccctttggccagagtcgcccacctcgccacgaccgcgtggaccgagtccgtcgccggtgatggcgggctccctcaacgacctcgccccgggcgctacgtggaatcacggtccttaaagcgtggacacagacccccccctcacccctgtgttcgtagttcaccactccgcaaggaaatcgccaccgccattactgccgtgagtggacgtgagggacctcgtcgggataagtgtgccgcgtggaacgagttggtcggggagcttcgcctcggctcggcaattgattccgcggcagcggcatcgggttgggagcgtccggcgccggcgaatttctcaccagagtgcgtccgcggcggagaacaacacctcttcgtggccaaggcactgcgggtcgcaattgtcggtgagcagctgtccgaactcttccctttagcttgtgcatcgtgtagcgccgattgaattcgagtttaggtcacgctagcgtcgtatcgtcgtgtgccggcaatggtgccgcggcggcgctcggatttctgtcgcccgccgccggtgaacgagggtgtagggtagaagccatgcgggccgttgatcgttaacggacggccggattagaatcgggcgattactcctgggcgatttgattaggaccgttggatcggatcggacgatcgacacgtgcatcggacatcattaaatcgtaaacgtagatccaggatttgagggcccagagtgaataccggttcgtttgaacagacttctaatcctcatcgtcggatgttgatcggacgattgttagcgcgagataccccttcggcttgcgctttg

SEQ ID NO: 168301 - DNA, 658 bp, Zea Mays
agaccaatttatcttccgagttcttatgccttgaaaatgatgatacatatggtgaaacatccggagatgacccagcaggaggtaaggtatcctggaggcagcgattgttagtgtgaatcatagagggtttggaatcataagtggaccaaagaggagcctatgaaggcgacttagagggaaggagaggatagggtgtagggggagaggggggaggtggagaagaaaaacataatggagataggaagggtggatataggatgggggctgccagggctacaaccctgctatgggctaaaaactataggagcaggtcctcagactagtctaaatgctctcctctacaacctaccacgcacaagccatgtctgcatctgacacacacacaccatagcaccagcttcatccatgtatgtgtcctaaccctatccacacgatgtttggtgtccatgctccccgttagtcgtcactatctgtctagcggttgctcttcgtctcctccattgcacgaccatggtagtcatccactcccacactcatgcctaggatctaggtcgatatgcaacaatggctagttggctatgttgcccattgcaaggtaccagttgtctaccgccaggccaccatgccaaagttggtcggttgtgagctaccactaccc

SEQ ID NO: 168302 - DNA, 394 bp, Zea Mays
aaaaaacccaactttgataaattgatgaagatatatttcaaaagtttttagaacttcgaccaatatcttatccagggggaaccgaagtctggctttcatgaagcttctgaaaaccaccacttcattagcttcgggaagaggaacgatactctcccctccagccctcacaatagaaatatcacgaaagtatctgcctttcatcgcttcgatttgcccttgcttaatagtcgactttccaaaaacaacatggcttggcctccatggccgattttcgacatcttcattttcactttttatgtcaaaactctcactatcgttggagttttcagataacccagccaacatctcattggtgattttctccgtgttggtcttctccatagcttcgtaaaac

SEQ ID NO: 168303 - DNA, 1345 bp, Zea Mays
cccaaagatagcagagttagaataggagtcggttacggtagttgtacccgagttagacaccatgtcatgttgtaatcctgatgcagtattctggcctacatatactcaatccccctctcttttttttctctcgaacacataggagatctgagcatcattatattaagaagaagaatgggcacaaaaagccccagttacaaacacacctataaaacacacacgccaacgcatgcccccccaaaacacatgaaacacgaagcaacaaccaaaagacccaaaagaaactaatgaacatccagaggagctgttaggaaagatatcccttttgctcctactgcctcccatagatgtctgtcctcaccagcttggatcagtgcagtcacgatactaggtgagataccatcaaacacacatttgtttatatgattacagatggtccatgccccaaaataatcaggctgtttaatctccctgtcaattgttcacccaccgaatcattgactctgtgccaccattccaagaaactaaacatggctgtttggggggctagagaatgaagaccaaattgcttgagccaacggaaccaaaattgccttgagaagacacaggacactagaagaggatcaagagtctcgtcctcttggtcgcacaacaagcaactttctaggtgctccatccccctgcgggataagcgatgagcgatctgctgtccagcatttgttgtgtgccactaaccacataaagaaccgacatttagaaggtgacaattctttaaaggaacccaatccgaagtacacccggtggacgacacttgagaaacaagtcctcgatttcctcatgacctccatgactcaagaagtcatgactcaagtttcaacctccgatatcctccaagaggtgtggtctgagctccaaaagaccaacgtgtcgtagtctagggcaaagactatgaacacaaggatcgccctagcaacaaacagaaaaagtaacatggctatgctagaatatgttaccaaaataaagtctcttgcagatgaaatgtcatctcaaggaagaacatagatgaagagtacaaccaggtaatctctactctagtggcccgtgttgagcaggtcaccatggctgaagccacctcctaacttcttagcttcgacgtcaggatggatgtacttcatggaggtcatcaagcttctgctaatgctgttggtcgagcgaatgaacacaacaaacgcagtcgtggtaatagccaagggtgtggtggtcctcctagtgatcatggccattagggcaaggtgtgtcgttctcctcgtctaatagacgcccacaagctcgacgcactaacaag

SEQ ID NO: 168304 - DNA, 1155 bp, Zea Mays
caaccgggagagccggggcatcaactgatcccatcttcaccaaatcctgatcaacagcctgaacagacatgaggttgtcatccacgtgcccagaacgactgcgctgacctagtcgcaaatgaattggaacctgaacggaaggcgtagggcaccccagccgccccacatgatgctcatgatcactatcttcgtcgactaagcccgaatggggtggcaaaggagaatccacaccggaagctgaaattccatcagaatgaagaaccaccatagaaacagggaacaccaacgtgcgaggagcctaactcccgtcctctccaaagataaccggctcttcagcatggagatccaccaccgtcggtagcagctcaggcgatcggcaccagactttcagtctgagaacagacatgtcttcctccccgactgagctaggaaatagtccatgaatcaaacagaaagcaccaagcacagcctcagcagcctcaattccccagagatgtgcaggaattccacgaagctcaacgccaaagggcaccagcggcagcgactgaccacttccaatagcgaaagcctgatgagaccaccttcgaatatgcaacctgagcggaggggcatggagagattgcccccaaccacctaatcagccacgacaactgaggggaagaagacgaggaaagaatttggcgcagcacgacgtatgcagagtgaccctgcttcaaggcaaaacctcgaggcaatcgcatcacgcacctccacggcgtagccagaatcctctcggcctacaacactgacgatcagtgcacgatggagttcctccttagcctgatcaattcttccacaacgctcgacaaagcataccgacctagccaggccgaaggcaggcgaaggaggcaactgtcccccagcgcccgacttcctcttcctctgaccacgatgagttctcttcttcgcaccttcaccagcagcagtaggaccagacccgcccccagccacacccagaccgcagccaatcttctccgaagacttcatagccataggccgccacaccagattgcgtctggggatgggaggggccgtccgccggcgcgggcacacgcccacacggtgccctggcaaccggcagaaaaaataccgcacacgatctcagcactccgccgc

SEQ ID NO: 168305 - DNA, 387 bp, Zea Mays
cttaaaggacagggcctaccctgcttatttgtacagcggtgtcaacgattctacccgggtcacaaacagaaaaattcccactaaagatctgatgagctgactgaacatgatcctaaggggtagagtttcaaatgctggtgctcctgtggcctattctgcctggaacctgccaccacttaggccattttctgagtttgtgtccaaccctcctgctcgtgatggtagcctgggtcttagagtgtgaccctctcctgaggacattgaggctcttattgccccactctagagtcttccagaggatgagaagcagactcattttgagatgccagctagcactgacgacgcggagatagatgttgtgcttagtttgctggctggggaatcgtc

SEQ ID NO: 168306 - DNA, 296 bp, Zea Mays
caaagactgggggatggcccctcatgaactctgcccgcttgtctctgggcatttgtggcatctggacttgcactggaggctgagacggtggtggctgctgctgcacctgttgcttggctgctaaggtctgaccaattgtctagactgcttgggtctgcatcaagaacattggctcaatggtcatcggtggtggcagtggcaaatgctgctgcggggctgcctcctcttggggtgcctgctgttctggctgagcacgcctcgcacctctgcgcctgttctcagacatctgtagaaat

SEQ ID NO: 168307 - DNA, 613 bp, Zea Mays
cggagataacagaggccaaggtgctgcttcctagatctgctcgctaaaggatgggggtctaactactgaagctgtagttgctaacttcgtattcaagagcattcaacacttaaaggacagggtttaccccgcttacttatatagcggtgtgtacgattctacctgggtcacgaacagaaggattcccactgaagatttgctaagttgactggacatgatcctgaggggcagggtttcaaatgctggtgctcctgtggcctattctgcatggaacctgccgccacttaggccattctctgagtttgtatccagccctcctgctcgtgacggtagcctgggtcatagagtgcgaccctctcctgatgatattgagaatttgattgctccactttggagtcttcttgaggatgagaggcagactcactttgagatgccagctagcactcatgacgctgagatagatgctgtgcttagcctgcttgctggggaatcatccgactctacccgcaccgagccgatggccatcacaactgggcaagaatttggtgaagaggtggaaactccgaaacccgaaggtgcccgcccaaagcgtccacaccgagtgaaccgcccg

SEQ ID NO: 168308 - DNA, 425 bp, Zea Mays
cttcgggatgaagggaatcgaggggaaaattagtttatttctacctaaatctagctctcattgattgcagataattaaatccaagaagcagatagtcgttctatttgacatgtggaaacaggtaaaaactagtgaactttacagtctcgagaatatattaatacaatccaccgatggtgtacaacatattcaatgaaacattttatatgtacaaacctaaacggctagcgtaattgtacaacgacacacattaaagaagtttgccaaaataacgaacaatgaaactaaacatttaacagccctgtagaattgtgatgctcatgttattcagcgatcttcgcgcgtgtactgacttgactgaccagtttcataattcctagtagtaaaatatacaggttctttggggtaggaagtggggttgtttc

SEQ ID NO: 168309 - DNA, 2926 bp, Zea Mays
aacaaaacaccactcctcaaagccattgctccagcaaacggcaaccggcatcacccactgctctcaacgctaccacgcacaaaagagctggtcgcccaccaagaaacaatgttcccaagccaatccagcgcaagagcagtcggctggcggcaaaagctaacggaaatttcgtggatatgactaataaggcggtcaggttgaaggaactgagggataccctacaaggctgctctacagcggtgaagggggaagtccagaaaaaaggtttgctcagtcgttcaatggcgccgatctccataccagctcttcgcaggcttgttcgcgcggcaggattggggtgctcagctgcgaatgctgttggggtggtgccgctcgccaaggaatgatagtctgcacctttgttgctcatggtgcagtgggcacgtcagtctgcacctctctgtgtgtcccgtgggggtctgtattcggttcttttgtgttcagcctgctctgtgcgttcaccgggctttgcttctcagttgtcccagtgtctgtgtgctttagcatgatggtgtctgtgtgttctaaaaatgagtagcgtcaagagtctgtctgtgttgtcgtggaatgttcgtggtcttggcgactcggaaaaatgtgaacttgttcgtgcagctattgcctctttgtctcccactgtagcgtgcctacaggaaaccaaaacccaagaaatttctaagttcaaagctcgatcctttcttccaccaaaacttgctgatacattcctagacatcccttctactggcactaggggaggcttaatcacggcttgggacactgacgtcctggagctcagttcttttgttactcgccaatatgctttaacctgtcactttcttttagccaacacaaactctgaaatcaccataacaaatgtttatgcgccgtctgaccatagggatacaacaacttttcttgacatcctgggggaaatccactcaaacattgtgggaccttggtttatcattggagacttcaatcttatcagggatgcctcagaaaaaaataggggcagaaccaatcgacatctctgtaacctgtttaatgacactatccatgaccttgggcttctcgagctgcctctgctagactgcctcttcacctggacaaacaaacgccgcaccccaaccctggcacgcctggatcgtgccttcacaaatgagaacttcaccacttgctatccatcggcctctcttagctcttcagtcagaactacgtccgaccataaaccaattatagcaaaaatagctactacaattccaaaatctacaacctttagatttgaaaaagcttggctaaaaaacccgaatttcctaccggacattctaaacgcctggcagcctatcacccattcgactgatgctgctgcttgcctcgcgagctgcctcaagaacaccagagctgcagcgaaggtttggtctaggcgtaatagggcgccccctttctttgtacaaaactgcaaattcattattatgatgttggacttcctggaagagtacaggacgctatctgaagctgaaatgcaggtcagggaattatgccaaactcgtctccaacaacacatcagagcgacggctgcatattggaaacagcgagggaaacagaaggcgatcagggaaggggatgcaaacaccgcgttccaccatgctcaggcaactcaaagattgaggcggaatcatattggcaagatcacgcacagggagcaggaactgttcagtcatgagtcaaagatagcagcagtcacagactatttctctgggattatgggggaagcaggaaactccacatggaacttcaacatacatgaactctacaatggaagacagcttgcgtctgaaagtctaacagccccctttacagatagagaagcactacaagcaatccgatcaatgaataagctgagtgcaccagggccggatggttttggacccatcttctactcgtgtgcatggacgactgtcaggacacaggttatggatctgctcaatgcctttcagcagggggaagctgaactggaaagaatcaatcgagcatacatggttttactgccaaagaagccgggatgtacaacagtggactccttccgccccatcaaccttcaaaactgcagcgtcaagattattaccaagattatgactacaagattgcaacaggacatctgctcactcatagacttggatcaaactggtttcatccaaggccgctcgatcactgaaaattttgtctatgcaatggagttaatacaatgttgccacaagagaaagactccggccctagtaatcaagctagactttgcaaaggcttttgataccgttaattgggacgggttgctcacagtcctgagagcaaggggtttcaatcagaaatggcagagatggatattgcagctgctagcatcttccaaaacctcggtattgcttaatggagtacctggaccatggttcgcgtgcaagagaggtctgagacagggagatccgctgtcaccatacctcttcttacttgtggcagatgtcctacagagcttgatcaagcacagcaggggtgttagacatccgctaattgatgaccgaccatgcccagtgctacaatacgcggatgacaccctaatattattgcgtgcagacctagaagatgtcaagacacttaagaaaaatttagatgacttctctgatgcgactgggctgaagatcaacttctcaaaaagcaccgcagttccgatgaacattgatgaacaacacctccctctcatgattgccacccttggttgcaggctggagggtttccctcagacatacctgggactaccgctgtccccaaacaagcttcgtctatcgtcttttgccccacatattgccaaggcagataattacctagcaggatggcaagc

SEQ ID NO: 168310 - DNA, 834 bp, Zea Mays
gcgaagcgtagagtgagtgaggtggatggtggtcggcttcgtgtggacagggctggcaagcgggaattgttgtcctctccggttggggcgagtgtaggtgagggggagttgcgaagtctttttgagggtgaggagcttaggataatgttgtttaactatagggagatgggtatcatcccgaaggttgaaccaatgtaaggtgtgatgccctcgctgtacgtatgtaactataatttgtatgatccggccgtgtccataggggacttgtgcacttggtctagcacatttattatgtcggttcggctgcacctatagtcggtttttgcgcggatagtttttcgacgaagatttttgcacggatgtaacgtgccttcgattttgcgcactcgttgtgctagtccggctgcacccttaggcgacttttgcacggatagtcttttgaggaagacttcgattttacgcacttgaagggctagtccggctgcacccttaggcgacttttgcgcggagtgtcgcacacgagggtagccagcgctgcccctcgcagtgacttttgtattggtcgaatgctgaagaccgtcgatgcggtctttttcgacgtaatttttgcgggggatttttcgcgtgtatattacatggctccgcctcgttaaaaacctcaccccctgggaggaaaagagtgcgggatggaataaaactgttttgcgaattacaagggcgagctagccctgaggagtcaaacaaaaaatttgcgaagattgtcaatgttccaagaatgctctaagtcttcgccggatggcgttgtgagcctgtacacgctgggggacgccttcg

SEQ ID NO: 168311 - DNA, 492 bp, Zea Mays
tgctctgccttctctgctgcgtctcgcactcgagacgctgcccccctccccaacctgctccgccccctccgcgtggacgtcgtctcccgtcgtccttgcctcaccgattccctactccgttccaccgggcgtccccggggtccgcacccaagacgcctccccgttgtcctcgcttcctccctccaacgcctgttgcctgtctcactccacgacatggatttggaatggtgaatccctcactgaggccccgaatcccgcaaccaatgccgccttcttctccccctcccctctgcacgacattgcctccccagccggcggctgaggtgcagcgccaagtggccaagtggcgccgccaatcccccatgtgatcacatccctactcggcaacaacctcctttctcgcaccgctgacaccgcgcatcatccacatccacgcctctgtgccagtagcagcaccgtcggctcccgctgccagatccaggtatccagcca

SEQ ID NO: 168312 - DNA, 501 bp, Zea Mays
caagactcggtttacccatgtagtggactgcgggttcattacttgattctgcaggggttcatatgctaaactgtcatggcgaaggggtatgggcggctttggcccgcccgatcgagaacctacggcggtgattagatttagatcttatcgaatcgttacgaatcgagagctattggatctagatccaacggccaatatcctacgatcccgagatccgaccctaaccctctgatcatgatcctaccgttgaggtggatctagcaaagggatacgcgcgtcgtctaatcgctgcccttccccacggatctgacagtccgagcgcgtcttcttcctcagcctcaccacggtgaacaaagcgcccagagcagctgcgcagctcgtcggagacacccgctccgaatgtgtcgactcaccaatccgctccccgaccatctatgcacgagccgtgacactagtgaatcttgtgcaggttacataccgaggttttatgggtagttgtcg

SEQ ID NO: 168313 - DNA, 955 bp, Zea Mays
gccctatcctctaagccccaaaccaaacaaaattaattgtgggatcatcctctaaatcttataacatgtttggatttctcgccatgttgtctcacttagcctcagctaaactagtgttgccagcaaaggtgagacctaagaagacatgttcctgagacaatgggatcgaggaacgagaacacagaatgctatttttcgaactatgaaacaaaagggtgtatgccttttgtgttgtcccatcgtagcttggaatgtgaacaatgtgattctagaacaaaaatacggaacaatgcaaccaaataaaggaattaatttcctttttctctgtcgtgtgattaatttgttttcctcacacctcacctccttttccaccggcaccagccgtcagcaccaccactgacctacaacccaaagtagttttcgcaccctatcgagacagaggtggtgttccatccatcaatcagcatagtcaaacctacctgcaacccacaacacttcgcaccttatcgagaaaaagatggagttaatcgatcaatatagtcaaccttccacccatcaatcgatatagttgaccttccacccattaattggtacgtcgtctcaaccttccacctatcacccatcaatcgataggtcgcccctccctgttcccgttttttgttgggggtcaccatcaatcgacatgtcgtctcaaccttccacctattacccaacagactatggtcagcagatcgtgcatatggtcgtgcgaaacattatttttgcactgtcgactgcactatttacataatggagttcgaaatagaaggtgagatgattaaagctgctggaactagcctcaatcgataggtcacccaaccctgttccagttttctattcgggtcaaggaatgacgaaaggaggaacaccttcaaaattcctggcttctaaggctatctccagcaacttaatcgtc

SEQ ID NO: 168314 - DNA, 682 bp, Zea Mays
ctttcactaacccacccatacggtttcccatcgttgctggtatgatgacatccgaattgagtagccaggcttgcagtttaggacccctctacgaaagcagggggaccggtagcctgggggccagttctagagaatggatactcgttccctagggtggtccggagctgtgtagctgcttagcttggttccgtaccctaagcctgcacgctccaccactctgcgataggtatcctagtatttggaactatagccctgtgggtctgggaacctggggtccggttctagaggatggacgcacgtctcctggggtggtccggagccgtgtagtcgcttagcttggttccgtaccctaagcctgtacgctccaccactctgcgatgagtgtcctagtatctggagctgttattcagggggtccggacacacggcttggcttcctggactaaatcctgcaggtcctgttgcgtgaatcaaaggatggctgataccagacgattgatcctatgggtgtgctactaacgctccatagccgaagctgtgtacaggtccaggtcccagtcgaggatacctcctgggagccgggtcaccaactcttttcttaggtatgctggtatccagcctcgacacgtcgagcctacatcccaggggggccaagtactaggagaggagttggtaacgccaca

SEQ ID NO: 168315 - DNA, 622 bp, Zea Mays
aatccccagtcatgcctatcaaatgtgctggcctcaaccttgataaatttattgctggcttccttgcttcaagaacgagcttccctattaaatacattgggatccctttgacggttgcaaggctcaaaaaagttgacttctagtttctactcgataaggttagcagcaagttaacatgctggcaaggtcgtaatttcacttgtcttggtcaaatccgtgttattttctcagcctgttcacacacttacgaccattaatgtaccagaggaggttctcgaagaaattgacaaatttaggaagcaattcctttaaacagggaatgagaacctcattagtgctaagtgaaaggttaactggccgatggtggagaggccattggatcttggggggcttgacatccttgacatccactgatttacgagggctctatggcttcgttggctatggcaagaatgagaggatccaaatgccccttgggcaggactaggaactcctcgcaacgatagtgataaactcctctttatagtagctatgaaaatcgtaattggtgatggtgtcaagacctccttctagcattgcgcttgggtcaagggtcgacgacccaaggacattgcgcctggca

SEQ ID NO: 168316 - DNA, 438 bp, Zea Mays
aagaaactgtgccttgtcggagcatagttggtgagagttgctgttctaggtagttgaactgaaactctgaaagagacatgcaactagtttcaggtcaggttttcttgcttggttggaccagcactggatatacgtactcttacttcactagtgctcatgtttgtctgaagacatgtcgtcggttgggttgggtatccatgccatgttttacctgtgctttgcaagtgatttcaggcttccgttcttcaggccgcggcatgcttcaacccaatctgataggtttaccactgaataattgttgttcatgccttggttttattaaactagtaacctaggggaaagagaaagaaggacaagggaaactggaactgcctgtcatacatgttcagggaattacggattatgcctggatgttgcacacttgcaagttcagtggga

SEQ ID NO: 168317 - DNA, 1304 bp, Zea Mays
tggaggtgtgggaaggagagctcacttggacaccctcgggggctgggttgtagctcgcgccacccaccagagccggatcattaccggcaacaccctcgggggctgtgttgtagctcgcgctacccaccagagccggatcactaccagcgacaccctcggggtctaggttttctgcaacagccacttctaaggctgaaggatcctcagccacctccatgggagtcgggcaatcctgaccaacttcttgacatcgaagactgccttccaaagtcgacgatgcgtgagacactgctcgagatacctctaatcccacgtctggaatttcagagaaaacatccatcatgtcgccagcagtcggctccgacagcatatcttcaggaacgacatcctcaagggcctgatcaaaatctgttatggacaattcttgaaggctgacaagagcagacagagctggagaaggaatatcactatcccccctactacctctgtaacaccggctattcttacgaattagcagaacttcttcttcctcttcttcgtcctcataaaaaatacggacaatagtcggtgcacggtcacacccattgggatcggcttctgcacggtcacacccattggggtcagcttctgcacggtcacacccattggggtcagcttctgcacgattacacccattgggatcagctttagcatggtcacacccattgggatcaacctcaggaaggacctctgctggtacttcttcacaaacaggagcagaagggccagcatcctggtccaagcatgacagtcgccgaagccgcctcttcttcttctcctcaacaggcgtagttggacggctaacttggcgaggacgctttgggcgagtaccctcaggccttcgggtgttcattgttttgttaagctcttgttaagctcttgtccaaccgtaacagccatcggttcagcatgggccaagtcagaagattctccagccaacatattgagtacaacatctatttctgcatcattcggacttgtcggcatctcaaagtgaacttgcctctcatcattgggaagatcacgaagaggagcaactagaacctcaatgtcttcaggagagggtcgcactctaagacctagaccactatcacttgcaggagggttggacacgaaattgaaaatgaccgaggaggtggcagattccaagcagaataagcaacatgagcaccaacatttgatactttgccccttaggatcatgtctagtcagctcactagatcctcagtaggaattttcttgttggtgacccgagttgagtcagt

SEQ ID NO: 168318 - DNA, 809 bp, Zea Mays
tttcggtttcaatttgcagtgttgaagccttggcagttttctctggagtagagcttgaagcctttattgtctccagtacatctaatacactagccatccttcttatttttggagttaccacaagacctttttgtgtcttcggcactgttactcccgccgaagggcttaaaatttgtaacatctttgttccttcagtctttggatctttagcctttgcctcagcctgcttgactgagggtgccttcggcgtgttagccggttcttcagctttctgcataggagggatcggctcctttggttcagcagccgaagaactctctccgccaaactcgggcatcgcggccgattcaatgtaacgcggccggtgcgtaaggactttcaattttttgctcttcgacgcaggatcatctggtttggccgaaacaacaatcttgggtgaagcagcaacttttctcttctttcctcgtccccgcagcgggtagctataatcggggtaaacaaaactgatagcatcaaaaactctattcaatctcttttttccccgacctccgaaggctgtagatagagcattatcttctgccttggagtatgatccaagcagttcatcacttgtggcttcgatgcatttcaaccagtcatcgtttggttcatcgaatttttccccatatctgaaggtatacttcagccggaccagttcaccttcgttagacttggtgatggtttccttcggcatttcccagctctctacaagtggccatactctgaaagctatatgttcttggaccaaatctctcgtaccaataaaaaag

SEQ ID NO: 168319 - DNA, 687 bp, Zea Mays
gttgtctaacccattggaaaaagttgataatacggatgataccatctttggataaaaatcaagattattgtgaggaatttggagaaatggtgtctcaagagttaaatttctatgattggagaattgagttactttcttgtacttcaaattaagcaaatgaacaatggtacatttgtgagttaaggcatgtacatcaaggatatagcgaagaggtatgacatgtatgaaacaaagccagtgcacacaccaatgggcactaatcgttatttggatcttgattcaactagtgatgtggttgatcaaaagctataccagttaatgatcgggagccaactctatgtgaccgcatcatgacttctccttcgatgggggctagctatgaccggtcatgacgtgtgtgcttgtgaagaagaatctaggaaaatataaagttccatgtgagagagaagtaaaggggaaagaaagtatggaaaatcacattgttttgaagctaggttttcaaggcaagattaattaggatgctaggggaaaatagttaggccccgttttgatttttcatatttaggcaattgaaatctactttaagtactagactgtctaggttaagaatttgatatcctaaaattttgaatagattaaatataagttgttttagatttatgagatgagagatagaaaaagatcata

SEQ ID NO: 168320 - DNA, 537 bp, Zea Mays
ccaaaatcatcatcatcatcatcgtcagggacagttgtgccctgggtctcgaactggtggaatgccgcatcctcatcctatgtgcctagcactggatccgatactggcactgggtcctcaggggctagacgataggattcaaacaggaggcgtgaggcctcgagggtgccttggaactaaggcgaccggatcagctacacgaagatgtgacataggtaatgtgcatacggcagctgtcggcgagcacgaagaccatccaacacggtgtcctcaatctcacagataagaaaatcaactacgtcaaactctgagtgagagattaaggcaccaaggagctagagatgaatgtgaatggtggcctctctataacccatccggggcagtagtgtccgtctcatgatctgatagagatactttgctgctggagtgaaatctgttagagagggtcgcgacccatctgtgaagggcggtctgaacagggctgcgacatgagcagtggctggaacgactccgctgtgagggtgtcgaggaggatca

SEQ ID NO: 168321 - DNA, 1052 bp, Zea Mays
tccatggtgactccattgcactttgcatatctttataaccttatttctcgtgacacgagtcagtgtatcaagaatctttatagggtactcaacataagtcaggtcatcttgaacagtaaggtcctccattggtatctgctcctaggtaccctgaggcacttctttagttgggacacgtgaaagacatcatgtacatctgacaggtgatcgggtagttctagttgatatgcaacttctcccactctctttaagatcaagaaaggtccgatgaagcgaggggacaactttcctttaactttaaatctcctcataccccggatcggtgacaccttcagatacatgtgatcaccctccttaaactccagtagtcttctctgggtatcaacatagctcttctgtctagactgtgcaattctcgaattctctcttatcattcgcacttgttcttctgcctcttgaataagttcaggtccaaagaactatctttctccagtctgatcccaatatagaggagtcctgcacttcctgccatataaagcctcaaatggtgacatcttcagactggcctggtaactattattataagagaactcagcataaggtagactcttgcccaactactaccatgctgaagggcacaagctctcaacatgtccttcaatacttgattagtcctttcagtctgaccatcagtctgaggatggtaggccaaactaaaattcaacttcatatccatattctcatgaaaacttttccaaaatctggaggtaaactgtgatcctctatccgaaacgatcttcttcggtacaccatgttgagacacaatccgagccatatatactctaccaattgagatcccttataagtagttttgaccggaatgaaatgagcaactttggtcagtccatccataataacccatatagaatcatatcctttcgaggtgcgaggcaatccagtaatgaagtccataccaatctcttcccacttccactcgggtatctttagtggatgcagtagtctagctggcctctggtgttcagccttaactc

SEQ ID NO: 168322 - DNA, 1293 bp, Zea Mays
tgtaagggagaataaagggaggaattgtctcctttgaatgtatgtgcatctccatttgtcatcacatgtgactggtcatgtttaaaaatgagtaaaacttcactatgacacaaataaaccattgcatcattttggatttttgtttgtgcattaaaagcaataataaaatgaataaaatgtaatgataatgggatgaggatttagaataaaccctaaatcgagaattgatttttaaatagaaaagaaggaacaaatattatgagacaccaaaataaatccataaataaataaattgaccccacattgatatattcaaattgaatgattaatttgggtacaaaattcaaggtcatacttgagattcaaattgggaatttaaaataggagaagaagaaaattagagaaaagagaaaggaattttaacctaaacgggccgcagccacctattttggcccactatacctttcacacccgcgcggcctggctctggtgatggcgccgacacctagggcctccctgtcagtcaccttcacccgcgctcccgatttccctctcgccgcccggtggggccctgttgacagggttatcttctccgctgcacgcgcgctcgctcccgcattctcgcgtgacactgcgacctaggccccacctgtcatcccgtccatcgcatcgataacctcctgtgcgagtcgcgcggcgggttttgctccacctcggcgtgagctgacgctccacgggtccgcacctctagggataaaagcggatcttccttccttgaccacgcctctctcgtcccttcctaccccgtattcccctccccacgtcagccactgtaccatcgccgcggctgttcttctcgctgccgtgaggattcggccctggtgcactttggtgcccttctgttggccgtagagtttcgcctggggccggtgtagcgtgctgcggtgtatcggaccaagaagcccagggtggccacgggaatttctcgccggtaacgcgtcgccgccgcgcgtcgtggccagagtcttccacgacataaaccaccgtaagtagtgcttctatgagtttgtggcacttagggcatcattatttacttaggaattcgatgtttgggagctggacacccagtgcggcgctcgccggtgagccatccgccgtgaggtttgggcgccgtcgtgcttgtgcctgggttggggggagacgaaatcgtcatcgtccgatcctctatggagggtcaagattagagctaaataccccttcgcgtaggagtagatcctggccgttggcgccaga

SEQ ID NO: 168323 - DNA, 465 bp, Zea Mays
cccccctcctgaggcccatctggggggctataggtgttgccgagggtgaatcctccatggtgggctcgacggtcaccctcctgccgttgcagtcgcagcccccgaacatgtcgtcctcaggcgtcatggtcgtaggcggtatgctggacgaggtggcgttgaccactgaggctgctggtctccaggctctatcgttgttggcagttgacccttcctcttctaggaccttgctgcccccttctggaggggtctctagaaatcttcctcccttcctccttaagggtacgataggggaggaaatggaggtgaaggaatggtaactgatcgacgcggcctacgttcgagccgataggagtctggggatggtggaagacatcctttgtatcttcaaggaggcaattcacttgcccagtcggcaatgatgagggacataattcctcctagcaaggtgagtgtttatccccg

SEQ ID NO: 168324 - DNA, 578 bp, Zea Mays
cctatagacccgggatgcgactagttagcaaggatagctttcttgccccagccagctcccacttctttcgctcttgatcagccatcctaacagcaagatccacatgggtctgtttctatcgaagacacagctattccgatgtttccactgagtccatgctcctaaaattaccagggagtttactgcttcccctgccactccatgtgattggccagccaactccaccagcccataaagatgcatcaacaagctgagaggccatgctttggagattaacttgagatagtagcttaaaccagaaatctcgggcgaacaaacccaatcagcatatggtcaagtgtttcctgctcctgatcacacaaagggcagctcgcaaggtgatccatgcctctcttttgcaacctgtcagctgcccaaagccttcgatgagcgaccagccacataaagaacttggtctttggaggagcctaggttttccaaattctgtggtacggctcaaaagttgtcgacccaaggaaatgaccctcataggctgcctttgctgagtacttcccattggcggcgagacgaaaaaaaat

SEQ ID NO: 168325 - DNA, 511 bp, Zea Mays
cttgctgaggttcggacctactcggtggctccggacttatacgtataggggtccggtgtccttctgtgggggtccggacttactgggatgtgttgtcttcccttgccacgtggcgccctttggcctgcccatgtggtggggttaggcgccgtcctccgcgtggcctggggacgtcgcatgggtgcggcgtcttcatgccgtagaagagggtacccctgatttagggtaccgacagtggcccctgggtccgcctcaggggaggatgcgagcctgcaggtgggaccagagtctgattggcagttggaccgctgctcctgcgtgcttgttgctgcaattactgtcggcccacctatggccatgccaactgctacgcctattcccacggctgactggcccgtgaccatcgtacttaatgtcattgttgggccatgcgcgggggtgcctcgagtcgctgcactggttctgaaaaatttaccttttcagactcccgtgacggcctcgagaagacgtg

SEQ ID NO: 168326 - DNA, 384 bp, Zea Mays
ggaagatgaaaaaagattgcattcatcacaccttttggggctttctgctatacctccatgtcgttcggtctcaaaaatgttggagcaacttactaaagggtgatgagaacataacccgcacagatatgaccatgttaatggctcctgctacaaagacattgaggaacaaagaagttgattggggaccaagtaatgatatttccaacatttccaacaaagcaagcacatcatcaaatttaaagatatacttgggtgaggagcacacactagagtcgaggacgactctattacaaggagaggatgatgaggacatcactgccatcaatacaccacaccagcgacccccttcaccatttaatcatggaccagtgaaacgagtccgtg

SEQ ID NO: 168327 - DNA, 422 bp, Zea Mays
aatacctcttttcttgtttcttgtgtatgatgccagttttctagtcgaggttaattggagtaaatgttgtactttagtcctatttagtacccatgtgagagactagtctctacttctctactaattattaagacattagtgtagaccacacacatgcccccacctctctcctccccactgcggcttctgaaacagtaactaccgcctgtcgcatcccagcatgacatggcccccacgtgcacgcttcgcgcagccctcgccaaccaaccatcgacctcccctcaccacttcttcctcctgcaactgtcgactccgatctagacaccgacgcccgagtgcctagaccccaaatcgcgctctatcccctccccacttcttcctcccacaaccaccggtagacgttgcacgaggtcctattcttc

SEQ ID NO: 168328 - DNA, 668 bp, Zea Mays
cggtaagggagccgaacaagttcgtgctttttgcccccatccttcttcttgggcatctgccagccactagaggtcggaaatactctatttgccaataattcttgcaccagattcctagtgctgacttcagccgctaccactctaaactctacttcggctacttggcatggggagccaagctgcatatggcacaaaggccttgtcattccgaagctcaatgtaagtgaactcatgaccatagtcatcagcttctccctctttttctcgtctgtcttcatataaaaccattcacttttccaaccagttggccacttagtacggtagctaagaaccggtgccttcgtatcctttcgatacgcaaaattgtagcaaccaaaattctcatgaaggccatctgccctggccttcgtctggtaatgcagctcgtgcacccgacagaaagctttggcattaggactcatcccctggcttcggagggcccagatgtagacactaagtctaacaattgcattgggtgtcagttgatgaaggtatatttcaaaattcttcaaaacctctcctattatcatatagagggaaccaaagccctgctctgaagaagcttttaaacacaacttcatcatccttcaactctggaaccacttcctcgtcagcaaaacgaacaagtt

SEQ ID NO: 168329 - DNA, 462 bp, Zea Mays
cgtctggccagtgagggtgagcacggggtgaggtgaggtgcgcccaggggaggttttaaaggcgcgggcaagcgagaccgaggggaggttctgacaagcgctcggggcgtgcgcgggcgagcgctagtgcgcgctctggcgtctggcacaacgtcgagcacgaggcagcgcagagagaggtcatgttcaagcgcggattggctccaaatctttgagattatggccatgatcccgttgagagatctcttcccctgacattcctttgtcgtttgtgtgtggaggcttgcaggttttgctaactggatcaagagatttggagagtgaagttgggtttgtctcactaccgagcacagagagaagatcttgggtttgacgtgtccagagcacgcgtcccgatgccatcttctggtatgaggtagagaggttagttaggcacatttttgtcaatgggagcattaggat

SEQ ID NO: 168330 - DNA, 460 bp, Zea Mays
gcgagcattctctgaggtacttccgaactctttttctaaagtgtccccaaattccttgagaaggtcatcaaggctagctagggacatatcctcgatgtcgaacaaattctctatcctggcgagaggtggtgctggaggggctttcttcttccgctcagcctggcctccttggtttttggtcttcttttggatttcctttatgggggcgagcttctttagcttcttatcgtaatccatcttcagggttcggtaggcttcgtgggtgttggcctcctcgccttctgctatatcgagacactcttggagggatgtcttatccttcttaagttccttgacccgttgctctaagctttccacccgggagtttaggtgggtgcagtgggagaaaaggtcatcgtagtggttatcgagagtgtggaggtatccggccatgtagacaatggtgcggtcatcctcggta

SEQ ID NO: 168331 - DNA, 503 bp, Zea Mays
agacgtcgacctacttaagaacgtcggcaccgacattcttaaacatgttaagtatgtcgatttttataggtcaacgtacataaggctaagtacgtcggtcgctgccaagccgacagtctttaataattaagtatgtcggtcaacacctagccaatggtctttaaaaattaagtatgtctgacaccacccagccgacggtctttaataattcagtacatcgaccacctgacgttcttaaattattaagtacatcggttgtgccctgattgatgtacttaattgtttttagtataccatggctgaattctcctcttctattttcttccgtgctctgtattctctgtccactatgaagacttagctgtcgtgctcgtgctctctctagccatcaacgctgtcattatacgaccgtcgccgttgtattcttcctccacgccgacgccttcaccaccatgcccacaccactgtcatggtcgcccacatgccgacaccatcattcgtgc

SEQ ID NO: 168332 - DNA, 769 bp, Zea Mays
taggtccccttttgttatggatgacattcgaatcgtaagggactagacccatgggaaaggaccacgttcacgggggtggtctggagccggagtacccacttagcgtggtcccgtaccttaagcctacactctccgccaccctataacagccattcgagtaccaagttcttgactcctagaagttcagaactcgccctaacaaaaggactgatttccgaaactaagctcaataggatctcgttgcatacctaggaactcatgaatgcaataggacgtagttcctgtgggtatgctactaatcgcctattttgaagccatgtgtagggacaccctttgttcggatcactaggcataggggtcctaggctcgatgccttgagcaacaatgataatcaacatgcccaaagcaaagcataggtctggccccacctgcgggttcgccgcctcaccctagttcatctcaagctctcaccaatacaacacactttggagtagggtattacgcgccgatggctagaaccactctaagtctttgtgtcttcttatgttcgtctgtcttatctagctagccctaggctacccctgttcttaggattaggcgggcaccctccaccactcagctagagttttctctccgacagtttttatttttcttctcaccccaaacttttttgttgtgtttctacggtatctagaactacatgaccaattttggcacatttctcgaagtgtttgctatattttaaaattttattttgtttaatcgaatt

SEQ ID NO: 168333 - DNA, 446 bp, Zea Mays
ccggacggtccgcagtgcaaaggaacaagatagctctgaagtggtcagacttcggacccctctggtggatcacggacggtccgccctcaagggcccggacggtcagcgcatctaagactttgcatttttcaaacgcgcttttgaaagaatttttaactcaagaaatttgaagcgttgttagtcctcatgcaaatgcaaccactagatgctctatgaggcactaagttttacacagatcaaagtcattgacccctcttaatagtacggctatctagccctactaatccggtcaagtatcttctctaaactcctcaagaccggcaaaaacgaaacctatattatacctttgccttcatttgatccacaaccaatgcttatgattctccaatatttcctgttctatgtggtccaaccctgcattcttatttctccaagaatcgttagcc

SEQ ID NO: 168334 - DNA, 554 bp, Zea Mays
gcaagcatgatcagatgattaggctaagatccatgtcctgcgcatagcagatagttcaagtatcacccgcggacggtccatgatcacccagaggcgtcagtaaccccgaaccttcaagccacgacgacccaaaataggtacatggaaacataatatatctaaagtagctagtcagattattaataccagtcctactttgatcaactcctttctaaatatttcaacaaaaaggccgctttgagggatcgacaaacaaagcgacctcattcgcccataagaaacacggtcgacgacaacggcccaagaggtagtttagctggttccacccacaccaccggtgccatggatagcaccacatgtttatccaccaaatccatatccaccaccatgttcactcatatacccatctacatatatatggatatacacatatatatcaccaacatattcatccatatacccatctacatattcacatgcctacctgcctgcttatccacccatgtggggagaagtgacaccacacccatagtatccatgtagaataccacatc

SEQ ID NO: 168335 - DNA, 956 bp, Zea Mays
tgaagatgctttccacaccatgaggcaacatccgtccacagcaccagtgttagcgcaacccgacaacaacaagccatttgacgcgtaacgtgatgcctctcgccctggtctgggttgtggtttgatgcaagacaagtgggtcattgcctacgcatcaagggcactcaggcctcatgagcaaattatcccactcaggcctctggcactggactgggttgtggttcatgcattgaagttgtggagacactatttaaagggaacccactgcaacatctacacagatcataaggcctcaagtatatctttactcaggctgatctcaacatgaggtacagaagatggctagagcttatcaaggactacgacctggaggtacactaccacccagagaaagccaatgtagtggctgatgccttaagtcggaagtgataatgcaactgtgttgagcaagatgaaaatcgaagtgattccttctagtgctttgtctcacctttccattgagccaactttgcaagaccagataatcatggcccaactcagtgaaaagggagtgcaaattattaaggagaacctccatcagaagacaaagaagtataagtgtttccgccaagatgggaagggtatattgtggtttgaagacagattggtggttcctaaaagcaaggatctcaagaggaaaatcttgaatgaggctcatctctccaaattctccatgcatccaaaaagcaccaagatgtaccatgatctgaagcccttgtattggtggactagaatgaagaaggaaatagcccagtatgtgtcggaatgtgacacatgtcagaggataaaggcaagccacttaaaatcagttggtgccttgcaacccctatcaataccttcatggaaatgggatgacatcagcatagattttattgtgggtctacccaacacctctcggcatcatgattcgatttggg

SEQ ID NO: 168336 - DNA, 452 bp, Zea Mays
ctggaccacttgcctctcgcgcccgaggaggacctcgtggaggtgaacgcacgctggacgacatcctcgacgccccgtgcccgtatcacaaagacatgcgccacactcttcggaactgccgggacttcaagcactccgtcggacacggccgacccttccaacctctaccacttcccccgccgaggggaggaccggacgaaccacgacaacctcatcagcaggaggagggagaaggaggagccttcccgcgcgtcgatagggaggtcaacgtcatcttcggcggacatgggtcgcaggagaacaaaagacaacaaaaactcaacgaccgccagatactggtggcgaccaccggtcctcccgccccataccggtggtcggagcaccccatcactttcactcgggaggatcaatggcttaacttcgaccatccaggcaaatatccgctcctcgtc

SEQ ID NO: 168337 - DNA, 621 bp, Zea Mays
gtcaggtaggctcgggtacgtgaccaagcctttggccctggcctcgactctcagcagaaatcaggcgtctctatcgggcagaagtcaacaacaagtacaagacccatgctccaagccataccatctacaggggctcggcttcacctcctcaccgcacacggccaacccaggagatcctagcaaccctccttgaggctataaatagggcagtccacagcttcaggaaggcaggcgaacacttcacgattctcacctccaccaccatattggcacttgcctcaatcaaccctagggacttgggatccttccctctcccgattagcttgtactccctattgcaagcacataggtgcaagtaatataagtctcatcctccctctgctagaagtagggccttctcccgcccgaaccagataaacgacttgtgtcaccttgcatcatccatctaggccagggcacgcaacactatttcactagttggtgagaccctcaggtcgagacaccgataggtagcatctcgggtcgagtcatggactgaccgaggcgtgagattgtgttgtgcaaccaagtcgcttggcttgtggtgtgcaggtgtggaggataggtacggtggttgacgtt

SEQ ID NO: 168338 - DNA, 497 bp, Zea Mays
cgagaattggtcagagccgagaacgatgctgcacgcaggttttatgcggagatcaccggtccgcaactaactcctagaatcacgacgaactcacgaccatccagagtcggcgctgcgcgggagagatctccatgccatagcatggtgcgactggttactgggcccggatgacagcgccccctgtggagccacgctccgctgacaccaacggcccacacgtcggcgcagagggcgagcagaagcgctcgaacgagaagagtgaagggtgactgacgtcgagaccccacatggcagctacaacaagggatgagagtgggctggcgcagaggggttttcctagtgggccaaatggaggatctgagcccaggtgagtgatctttcccttttcttttgtttttattttctcttttccttttagatttccaaattcaaatttgaatccaattgtagttgtaaacttatactcattttaaatgtacaaattgaacctaaatatg

SEQ ID NO: 168339 - DNA, 486 bp, Zea Mays
tagaaatctgaaataggaaaaactaaatggaaaagaataaaggaagcctgcgcttgggccatttttccctggcccggccccactttctccacgcgccagcccaccgccccgcggatcctttccccctgttcggcccacgctacctccttttcctttttaccagtgacacttacacgcgggtcctacttgtcagcctctgtccactcctgccgtttgcgcgcgcacactcgctgcctgtggaccccacgcgtcaggggcgtccctatcctctagtttgttccgcaaccgaaggcgcggagctcgcccgcgttgactggatccaccgcatggatgtgctcccgcccgagatcctcgcggcgcgctcgaccggcgaagtccgcgactcaatcttcaaccaccctgccgagtttctcgccgcggcatgctcaccagtcatgcggctatggatcgagacccctcgccccataagtacgagccccacgagcc

SEQ ID NO: 168340 - DNA, 383 bp, Zea Mays
ctcagactacaaagtctttccagttctctctgttctaacaaattatggaacacataattatgcacaagaattgcttacgcaagatgatgcatttagccttccaagtacacaagattctccagcaatatcgtttggtagattctcatcgtccaccaatcaaaaaattggagtaagcacgtcctatctaatattaactgcaactatttattggcatttgtgttatacaacctgatcatatttatctttcagcgacgcgacaaactcgcatattcccacacactacgcgatactgaggtgactttgatacaacaataaatttagcttcttcgtattttacagaatacataattgtgtgatattgctgctaagacagagattggaac

SEQ ID NO: 168341 - DNA, 705 bp, Zea Mays
agcacacaaggatgctaaaacaaggtcaagaaaggcatgatcggacttgtggattgctgaccgcgatgagctcacacacgcggtgttctggaccgatttgggggaaatcccaaattggagctctctggtgaataatccgagacacgagtaggtgcgttggatgcttgaatacatagcggagccgatagcacgctgagtttatagggttcgagggtggtggcccgtgaattggagatggcgcggtggcagccggagagggaagaagttactggcacaagcaattcgtggatgttaccgtggcaagttcttgggcgaccaatgggctatgtattgtgattaattgcgacgtggtgagatggccaacggcgtgtcacgaccgcgaggaacggcgatacgaagtgagggtcgcgcggccacgtcgccggtaaccggataagcgacagagcgttcactgtgcttcaagttcatccacggcgagatctttttacctgggaattgttatctacgcttaacagagcgtgaatcgcggcgctggtgcaaattcgaacgcaaggtagccggcggcgaggggggagctgaacctgagatattttgggtaggcactgtactatcgagatccttatcagagtgcctgacagagagaattgcagtgccccgatctcagatttttgtgtgggaatttgttaacctctctgtaacaaattg

SEQ ID NO: 168342 - DNA, 800 bp, Zea Mays
gatgagtcactgacaattcccagaaaggacccccgggttctactcttttacaccgaccaacccacgacgatgaacagacctcgccgcactccggcgagcttattccggccagacgacgctacggctggagctcccgtgcgacaggggcgcaattaaacctttgccgaacacttcccctccatcaatttcaccaagggggcactgaatggatcagttcacaatgaccgggcagatgggcaaggggatgaacgtgttccgaccaaacgacagcgaggacgaccgaattgaggctggggaaaggttcacgagttcaccagggtctacggacacactttggtttgggcagaacaagaactgaagagcgggtcgacggtgagggggtagtcatggcggtgttttacagagcaagggtgcgttccggtgatgggcttcggccgaatttcaattggttggcatggagagcaataggagatcaaaggcaaactagaacaagaagcaatttcataaacactgacccgaagagcgctgaccacggtggagtcccttgcggcggagcaagaacagaggaggagggaatttgggggctacgtgggttttccggtggaattaagtcagttgcctaagagcttgtgcgcgcgatgcaacgaagaagcagtgcccggactcaatttatagccagcaagccggagatggatgaaatccccgagctgtgactgagctggcgagcacacctacgcggcagagccacggcgaaagtccagtggccgccgtttaaccgggtagcgccacctcaatgcttt

SEQ ID NO: 168343 - DNA, 414 bp, Zea Mays
gtcgacagagagggcgtcgcggcggcgttctacggagcagaggaatgttccggtggtgggactctggcaaacttcaattggtcggcttcgagagcaacagaaggttgaagacaagctaaaacaggacgcaatttggtaggtactaacccgacgagtgctggccacggaggagtccttcacgacagcgcaaagaacagggcggaatggatttgtggactttgtgaattcttctagtgaaattgagttgattgctcaagtgcctgggtgcgtgatgtggtgaagaaacagggtctgggctcaatttataggccgatggctggagttggatgaggtttacggcggtgtaaccgcgttggcgagctcacccgcgcgggcagagccacggcgatggtccggtggctgccgactaaccgc

SEQ ID NO: 168344 - DNA, 604 bp, Zea Mays
tggtagctcaggcactttttgttgttcctagcccaagaatgtgatatttccaatatattgtttgatagcatctcgcattgatcatcattagaagggcatagcacccaagaaaggtaaaaggctgccctctgaacaagactgacgtcacttattgattcagcagttggctctttggataatgtttctgataaagaatcgtgtgagccttctctgtagaaaagtaaagcagttgcaaaactgaaccaaacaggaaaactaataatcatgtacctgcagaagcacaattatagcaggtgcagttaacttctgtcagacaaatgctaaacatctagttgtgttgcatatttaaaaacacattaccaatcccttcaatggttgtagttgtaagtttttttgtgaagagcatctagttcttgtgttatccaaatcaatcaaggcactgatataagaaattaggtccaaaaaagctttacaagataagggtccagttagtattgcaagcaagtttctttgatggcttaggaagtaagcatgtgaaaagggaaatctctgccccaaatctatggatattcctcatggcataggcttgagaagaatgtctagt

SEQ ID NO: 168345 - DNA, 2625 bp, Zea Mays
cctgtttaaccgggcctacatgtgggcagttggacttgcaatttggtctgttagggttagaataggagtaccagtgcacccaaaaacgccagcaagcacctgccttaaagctgcgctttcagagttggagccctgcctgccaaacaggctcttattaggctctcttaaggattttggatgcactttattaaagttgcgcgcatgacatgactccatttcactattctgtgctacaacacaaaactattgtttttttcacttgtccagtctcacagtatgcacatcagattggtaaaaggaaaatctaagcaacattattccactagtgaaagcaaagttttgaggatatggtccatgctaggtcttttggtcctctcctcttccacgcatgacactgctatctctaacatcgtggctgcttgtaagtagttgaattctccattcagtctgcagtcaacaaattccatgagccatgatggatctttggctgccaatttctctttaagaatctcagcagagcatcgaatagacatttcctccaccccctcgccttcaattacccaactggaaacccgaacccctttcactaactcgaggagcactacaccatagctgtaaacatcagccttccctgttattggaagatttagagcccactctggtgcaatgtaccctctagtcccatgcacccttgacagcatctgtgctcctgttcctcgacttagtaatttaaccaatccaaaatctgcaatttttggttcaaattctttatctaacagtatgttctctggttcgacatcacagtgcacaatccattcatgatggagatatgccagtccttttgccactccaagtgcgatattgtacctttggctccattggagcacataagttaagtcctgataatcaaccagatatctgtctaatgaaccattttcaacaaactcggaaaccaatagcttgtgagtttgctcagcacaaaacccccaaattcttaccagattcatatgatatattcttccaatgatgctgagctcagatctgaactcttgttctccttgcatcatatcacttagcttcttcactgcgacctcccttccatcatcaaggactcccttgtaaactgctcctgatgtgccacttccgagctcttcttggaaactcttggttgccctctgtaactccttgtagctgaaccttcggaactgactggaaatgatcatgtaaccttcgtccataatttctggtcttctctcccatttgtaaacaatccaactaccaactatgattaagatcacttcaataacgagcaatgtcaatgcagaagatagaaagtatccaaacttgaaactggaattggcacccacgaacatttgtgataaggggtatgcttccttttcagtaactttgcaagcatgtcttaatccaggagccaattctggtgaagaccatactgcctcttgagttttcagatagatatcattgtaaggatctgggaagtccctgccattgaaaagaaaggcctttggataacattcgcctgttcccttccggtaaccaaaagcttggcagtccgtatcgttcaagcacatgttcctgcacatcaaccatggcaccagtttggaatagtttaagtcatagccccataagtctgttccggtaagcttcctaaatgaaaagggtgtggtattagtcttgcgcctgcaccctttgctccagtcacttggttcaaccatctcaaatccttcaaggcaagaacatgactctagctctggtctgtatctgcacaggctgtttgctccacacagtccatgtattttgcacagttgagggaatgccatccaagagactgaccaattgccactggtcatgtttaggctatacaacctaaggttaccgtcatagtctagggtcaatctcctcatcgtctcatcaccaagatcagaagcttcaaacttaagctggtcacttgccacaaaccgtcctgtctggtcaagaaccccatacctggtactattataggtagtcctaccattatcccatggcatgtggaatggatctggccaatatatgctactagtctcaggaccgttgtaaataagagttaggatattgttagtggcgaagtagaaggcatagaaacctgaatagagcaaacccctagcagaagcagataccaacctagtatctctagtcatcggctgccatggtagaagtgtatcagttggtgagtcgaagcttctccagaggtgacgcccatctgtatccatgacaacaaggttgccgctatcgagaagcatcgcacgatcactgccggacgcggttgtgttggtgctccatatgaccatgccattatagtccacaaggatcaaggcccccttcttgtggaagatgagcctggagcccctgccattgagtggcgcatcacggttagccgtccaggagacagtcttgccagatgcccacgagaaccagatagaaaaggtgaaggcgttggtggccaccttgtagaagccgcaggtgaaggcaccattgggcgacactaggatgggggtggttacatcctgggtggagatggaggagcctctagcaaggtagctgtggtcgtatgcagcagaaacagag

SEQ ID NO: 168346 - DNA, 888 bp, Zea Mays
gagataccctaagacaacccaacaacagacacactctaggataacagccccacctaacgtgtcccctcgactagggcggtccatgactaaagcagtcccaccttgtaacctcgaccaggttgaacgtatctagagctcccttgacattgtcaccccaaccaggtaggacccagccatagcgatcccgaccaggttggccctaacctcggtcatcccaagtcatcctgacttagtcgctccgaccagatcggccctgaccccagccgtttactcaccttgagcagccctgacctggtcactcgaaccagaccggcatcaacctcagtcgctcttagctgggccagcctaggtcgtacactcctgataagactctacagtaccacaacctagagataacatgaacctctgaaaaaggcaggtacaatatgaaggactccgaagacactcgtgtctaaccacgcgtctctctgaaggacaataaggacttgagtcatggcaggcttcgccacacatgtaaggcagattgacaccccaaacaagacataagcaaaaatagggaacttcaaggtgaaccacccatacgactcctaaagggatgccaccttacaaagccttggactcccctctgcaagacccaactgccccctagttcggttaggacaggagtgataggacattagagctggacatgccaacgttgacatgccttcggaagcacaagagacaacatacaacccaaaggcaggaaatgccacaccccatcaatttcttcatgtaacaatggctacccgatccctcaaccatataaaggggatgaggcctcctaaaggaactcgagcgaacttggcctacaagccaacttaacattcaggcattccttcacccgat

SEQ ID NO: 168347 - DNA, 526 bp, Zea Mays
ccttctccgtggatgatacgaaggatccttcagctgaagcaaccttgatgggcgggaaattttacaatgatgtctgggtgaatggtggccgagagatggcccatgagattattaaaaagagtgaaaaagacacacacgacgcccgggcagaaacaaagcgagctgaagaagctacagaacgcgaaagacgtataggtattatgttttggttttgagcttcggtacttctttttgtggcttcgtactaatcaattttacctacttcagctgaactatctccgccaccggaaccgtacgatcccctagctgatccagaaatgaaagaggcgttggacattataaatatggcggactccattatcgacgaagttgtcgataaacttttaaatgaagttgcggaaaaagttctcagagaagaatagacttcattgtaataatattttgaaatgctcgatgcatgggacaatggaataaacattaagcttctattgtaacaagactgtaatatttgatgtatgtaactttg

SEQ ID NO: 168348 - DNA, 439 bp, Zea Mays
ttaagctcatgcatgttactgatagcctgctagagggctacaaaatcttttatttcgtcttctcgtatgcatggcagacataactgaatccaactattggctctaagagcatggaaaactgagatgtttttcttccttgctttcttgaacagatttggtgctatattcttaggcgcctggccatggatccaactagatttccaaaaacttgttgttctcccattatcaacgttgaccaccgtggatgcattgaaaagttcttcatctattttgtcgcatggcgattgcagaccaatccatgccttatccctgtccttccaacgcatccacaaccatatgattcttaaagcccttgcgaagcgttctaggttcagaatgcccagaccccccttgttctttggctgacatgttgtagaccagttgatcaaacagtgaccac

SEQ ID NO: 168349 - DNA, 295 bp, Zea Mays
aaaagaataaaggggctacttgggccggaaggaaccaattcggcccacacgcacacgcgcggcccgctcaccagcccttacgcgcgcgctcgccatccctcactgccgcgcgggtcccaccgtccagtcgtatctcgcgcgcgctcggtctctctgatccgcgggacccgcatgtcagccgcgtacccacctccccttttcttcgctcgccgttgcgcgatgtccgccgcgagaacgccggcgttgaccgccctcggactttgcccgcgctgaataaaagcacactcgttccttt

SEQ ID NO: 168350 - DNA, 773 bp, Zea Mays
gtgatactaacggtccccaggaacgaggtaccccaaatagacccattacttgtagtatcccaacaagggtgagaggccacaggagtaaaatcgagccaaccaactcccgccgagcagtcgtgcgaggcggatggatcgaccaactcctagcaagcaactaggcgaggcaaagacataaagactcgtgatggagttcagtgcgcttgtggaccccgactcaatgaccctctatcacacaccgggcagagactcacacacgcctaaacccgtcgagcatgaaaatatggtgggcgctcatggcctacgctagccatgatgggacacattgccacctaacgtcatcccaactgacaccatggcatgccgagcgaacatcgaggagtcagcacagatgagacgggggcacccccatgtacgaccttcaacatatctgacactgcgatatgggacccaccaaaggccacgacagggagcatcgtcccctttgtatttgcagagtcccccaaatgggacgcgacagagcaacacaccataccgcacgtgccctcacgcacgtgtcagaagacgacgtcaccagaaggactcttgtagatggcgggccccactctcatccattttagccaacccatccctctgaaagccttctcccttgaactataaaaggggtcggctgaacaggaaccaagacagaggaaagggcaatagcattcagtagaagttttctccttcctcgttctctcactctcaattgtaccccttgtaacacatttcgc

SEQ ID NO: 168351 - DNA, 494 bp, Zea Mays
cagacctgctcttccagagcccacactttcccctccaaacgcttccttttctcctctgcctcgagctcaagctcatccagcagcctgttctgccttgcccacatctcctccctgaaggcgaggtcctcctcctgccaggtgagatcagttgcccatttcgccagggaagcttccttcgccttgaggctttcctcggcgcgagcaatgccgctcgccctgtcggcaagttcctgctgtagcttctgcagcttcaccttagtcgcagcctgtttgtcctgctgtttctccagcaccgtattataagctttcagcttattatggagcgctgtgatggcttcctccctttggtctaagcgtgcctccttcttggccaaacttttctccttctgggtcacctcttcctctcgatcagacatgttccggatgtcctccttgaagtcctcgcgctcctgctcaaactcggcccgctctgaggcaaattggcaggacaccgc

SEQ ID NO: 168352 - DNA, 1049 bp, Zea Mays
ttcagcaggatcacacccattggggtcagcagcagtcgggtcacacccattggggtcagcttcagcaaattcaggcactggcacttcctcagcaataggaacagaaggaccggcaccctgatccaagctagacactcgacgaagacgtctcttcttctttttctgcccctcagcaggagaagtgggttgatcggctcgacgagaacacttcgggcgaacactgacagacctctaagcatccaaagctttgctggcctcagggatgggcgccaccactagtgttttagcaggagtggcgtcagaagaatcctcagctaacatatccagcatggcacttatctctgtgtcacttggattcaaaggcacctcaaaatgaacctgcctctcgtcgtcaggaatttcttcgagtgaggcaaccaaagcactaacttcttcaggagagggtcgcactctaaggcccaaaccgctatcaccagcaggaggatttgacacgaaactggtaaaagcctgggaaggaggcagattccaggccgagtatgcaacaggagcgccgatgttcgacaccttgcctctgagaatgatttcgagctggctcaccaagtccacggcaggaattcttctgttggttacccgggtggaatcagccaagcctcggtacagataggtcgcatatgctttgtctttcagtggctgaatgttcttgaaaacaaagtcagcgaccaaagcttctgcagtcagacccctttctttcaacaaaccaacttcagctaacagagcccctgcctcagccacttcctggtctgtgggggattcggtctagctcgaagtgcgaacatccggctgtctccgtgaccgtggggggagggaattcccatgattctccacgatcaaccattctagacgccatcccttgatgttgtccttgagtgggatgtcgaggtagtcagtcttcctcccacggcgcatctccaagctcacgcccccaccagctggtgctgccctccggccatcccaggccgacagtggtacaaatacatccaaaggccaaa

SEQ ID NO: 168353 - DNA, 455 bp, Zea Mays
ttggaacgaatctcgccaaaaagttgcagccttttgaaaattaatattatcttcttagcaaagctgagaataataggttaacgcagctatcttcatacaaatccgacctatctacaagttcaataccgcatattaataacgcaacaaatgcatagtatcaacagaagggaaaatgcccatgtcagagaattctagactataagcttttatactgcaagagcattaacgaagacaattttcagaacattcaacgttgcattggtaaccttggaaaggaaaataaatacatctactaccagcagttctaaaatcctaagaagacaaatactatcttaaagtagggcacacccgcgctaacctttttattcataatgaacaacccataatcagacattgatgccatgcaaatgtagaaaaaaataaatatagttcagatgtatatatatgcacacaat

SEQ ID NO: 168354 - DNA, 1216 bp, Zea Mays
gcataatctttccgctagcaaccttcttctgccaatggaggcaataattcttgacaaagacttcaaccgagggctctccaccatacatagttgcttcccacataaactttgccagttccaccatggcgttcggtgtgacatggtgaatttgaacttcaaaacgctgtagcacttcgacaacaaaccgatgcacaggaaagtgaagggcagcagtgaagaatgcctcaaaaacaaccagctcccccttcgactctaggagctctttggctcccagagtgcgccccacaccatccccaaaataccccaagcgttgcatcttatacacgcagctcgagtaagtccttgacatcccaaactccaccatgtgccctggcaatagctccactaccaccgttgaatcactaattgtcttctccgacgacggcgcactcgacggtgcagttgcggcagacgacgacgagaaagaagatgacattacgtatttgcttcaagcgggccagttcaccagcgacaagaagtggaatgcatgcagtaggtttcccagttgaagaagccaaggtttctttgcgctagcgtgtaaacgatttcccacctcggtcgggaccagtctttataggtccgataaagcgcctcgagaagccaactgccccatagtaaaacttcacctcccaatggtcatatttcaaccctcccccccgaggaccacttcaacctgacaagggtagtgttcggccatctcccgaaaaagactttgggggttggagcgaaggccgacctccccctcggtcagacccttaacatccatcgaacaggttttgtcataggtacaggaaatgaagggtactttgaccggtaccatgcaagaaacgaagggtacttcgaccggtactgtgtaggaagtgaagggtacttcaactggtatcagaattgaggtctctgaccagagctgccggagacgtcggagcgaagggttgtactgtttaaaaactggctcgttatagtctcgcgaaggtgtccccatcagcttggatagttctgcacgacgacagtcttgacgaggtcggaggctcgtcttcgtaggacaaagggtgtcgcgcgtgggtgaaggccatgccgctcgatggtggggcccatgctgccctctgtcgtcatttagggcccatttgtaatcccctcctcggggtaggttctgtagtctgtttaatcagactgtact

SEQ ID NO: 168355 - DNA, 626 bp, Zea Mays
cagcatcataaactccagcgagacgaataaccacgtcgacgagcgaggtagcaggcgcaccatgagcaggaagaagtacacggacagagaaagctcggcgtggttgagtcgacaacgtgggcacgacttcgggcggcgtcacgcacaacggtaggacgtagggagctcgactgcatcaagtaacctccgatcagccagacgacaaagacagacagggaaacgacgacgtcgcgatggcgcggaggagtcaccggcgtgcagcacacggagcggatgaggtgaaagcaggcgacgtttgacacgggcagcagacggcggtgctctccagtgatggcagctcgagcacggcgggcggcacgacaagctacacagagcgacggctggcgcgagtagcagcaataggggcacgacgataaatcgcagaatcagaggtcggaggggagcgaggagcagagcaagtgaggaaggggaaggcgagctcgcaggcgcactacttatgggcgtccggaggagggaagacgagtaggcgatggtgcttcagtgtggccgacgactcttccgtgccagcaggcacaattacttggagaagaaatagacgaagttaatggagaggaagagaaacggac

SEQ ID NO: 168356 - DNA, 962 bp, Zea Mays
gttcttataagaaatgtggagaaaatctcaacccaagttggactgtcaggctgttatggtctgaattttcagactgacagtgacattggatcatctttggaaacagtttatgactaatctagtaagaatttgcccatggctgctgtaccaaagatgaagatggtataatagacaacaactttgctgcagaacctcggataggttgccatggaaatttgagagaaaatcaagctcaaactatggctgtcaggcgactgaatcaagttttagccatggtacagtgctctgttgaagatcagaccgccagcgtcaaaaatctcaccgccgacgacctcttcgccgggattcgtgccgcgggcgtgtggagttcgctcaccatgaaaagatctagtcacggatgtgtatgaactactgtggcctcgctgttccctgcccctcgcaccggcgacgtggtcgtatggccgtcatcggagttgtcgtgcttcaccacggttgtgccacgctccgagcttttcaccacgtcgtcactagccacaccagctcagcggtaaccgccgtagctcctcaaccggtgatcaccggaggaagcgccacggtgaaggccacctatcccttgctccagtatccctgtcccctccggccgccagcacaaccttgcgaaattggacacccaccgtcgatgggatctataaattgagcctccccttggcttcgctatgtattccacccagctactgcacccacctacatcccaaaccccccactagagaacactaatttcggattctccccaaacctgttcgaatacaccgcgaagaacacctcgccgcggccagcgcaaatcaggtccgatactatcatcctcagtcttgttataacattctcatgtgcccttgatgctctccaaaccatccaattgaactagaccgccatgaatcgacgggaacacattcatctgcccg

SEQ ID NO: 168357 - DNA, 533 bp, Zea Mays
cgtcaactaccagatcaatgacactggtccccagatcgagctgccaggactgagatcaaatctcagccgtttaaaccgagatcgacgatctcccccctgtcttattctcacgatggttagcaggcggcggcgcttctatccccgcggtggaggacctaccggagtcggccaagccaccaccccagagccatgccccccaatccgattggtcctacacggtctacagagggagacgaatcagttgagaagatccctaccaggtttcgtgaagcagatacgggtgaccacgtcgttgtacgaggccgcgatgatgtgtctgtcctccgagcaaatcactagggttcgacgaagttctctgccaaagagcccgagcgatggtacgccacggttccgcccacggcggcgctacacttcccctggttcgacggtggaggttctccgttctccctctctctatttctggcggggcgcttcctactgggatggggtgaggagaataggtcacggggctagatttatagcctggggcgagg

SEQ ID NO: 168358 - DNA, 360 bp, Zea Mays
gtagctttcaccagatggaaactaaacacaggaggacttcatcatgagatcagatgaatatactaaatgccaaaatttgcagctaactgtaactaaatttatggagaaattccaacgttgctatgaaatttgacctcggcacttatttcacaatttatttataaaagaaggtttaagcatgaagagtcaataaaaagcaccaaactgagtcttttgtgctcaattgaaacgagtagagccaggtgttgaatccttccctcccacccaaacagaaaggtgcgtatatttttaccatagaaacagtgtgcatctgtaaactaaataaagctgaacagaagcggtgtctattaaaaaaaataa

SEQ ID NO: 168359 - DNA, 1008 bp, Zea Mays
aaaaattaatggatagtgtgttagtcttctatccaatcgaagaggtaatacaaatatttttttgcatatgttaatccaatttgaataagtaatacaaactaggagtcggtgagaaatctattatgatatcttctaattatcatgttttttgttgcaggtgttttttacatggggtgtacaagaaaaatccgagcatgggatgtttgtcaagtaatacaaactaggagtgggtgagaaatctgtttgtctgtcaagtctgtttgaaatagctcatctgatctgatctactagaatgccttgtcatgcaggttctgatggcggatttcttcatggctgaccagctaaccagccaggtaaactatgctcagccgtacactaggcatgcatggagagctagccattgtacttattactttgcggctcaaaatgtcttgttttgcagatcccactgctaagacacctcgagttcacggggtgctacttcatggctaaaactttcagaactcacgcgtatggaagttgtaccagcggctcccaattcaagaacctggcatacgtgctctctttcctgccatactactggtgagcaatgcaggtagactgacattgaacgaatctagcagatctatctgctcatcagactaactaaaatggtctactgttgcatgctagtgtctgagaaggtacttggaagaaggccacgacattaaccagcttgctaatgccggcaagtacgtatcaacgatggtgttttaaaccagaaagtgtcccgtggcacggaaatccatgggagctctgacttttggttggggtgaaagagtgggcagagatgctgtgttgtttatttcgagcatgggaattttttttcttctgcaaaaatccagggggcctcaacttttttgaacagagaagcatcaacaaaatgagattgggagcacatatgagtataccttttcaatttctttgcctcttttatcttcctctgtcatcatcatgtactttgtatcc

SEQ ID NO: 168360 - DNA, 322 bp, Zea Mays
gaataactagtgtttctcggatttacactacgtgacatgatttgattggtcgaaagctaaccatacgatggaccacacagagcgtccaggaacctcagccgcagaaaatcccaggattcagtgtggggacagttaaatctcgcatgagcgctagaatgcgaaacgtgaactcgtgagccaaccaaacggcaacacatggccatgtggggacgttactcaagcatatcacatgcacgtgatgagaagatcatgtggagagcaattaacgacatgttggtgggcccatgacgatttcttctttctagtttccaacctgtgtgcg

SEQ ID NO: 168361 - DNA, 404 bp, Zea Mays
catttgccatggtaccgtaccaggctggggatcagattgccagcgtagcagcttcaccgccgacgaccgatctccgccacgattcgtgtcgtcgtcgtttcaatttgtgctcggggcaagtggataacacccggagtacgtcaccggggataaactaggccagtaaacaactccggccgccgtaccaagttcaccgcggtggaatccgataagtatgtcgatgaccgccgtcttccggccttgcaccgcgtgtctaagcctcgccaccgcatcgccgtgactcactttagctccccgttgatcgccggagtgaatgccacggcaggggacactaattcacgcacgccagtgctcttctccacctccgactgccgcgcgtccccactcaaattcccggccaccgc

SEQ ID NO: 168362 - DNA, 1115 bp, Zea Mays
cacagctttcaaccacagctttgaataattttgaacacgagagagagaaaatgagacaccgaaatatcggcaccaacgtacgtacgcttcggaacagataaacggtctccaacagaagaaatgctaaaaaacgaaagggaacacagttcgaaacctgatcagttggtggattaccaaccgaagaaacaaacggtgttggagctggtgcgagctgtctaattttcttcaggtgaccactggtagttttctggatgaccagattttgacaacaacaaaaaaacgcgcacaaataccagtagcagtcgcacacaaagaatgcgacttgcgacttgtcagacacggtgagaaattgaacggccaaccccagcctataggcaacgaggcccaactttttctagaactagaacgggccagattatgagcaacagaacagaacgccaaaggaatgaatcggggaagacagcaacgccgcgcacgaccagctggaagcaaaagaagagggggaaaaaaaagatcgaatgttacagagcagcgggcgatcaccgtaaaatcgaccactccccttccgaaaggatcggatgaaatgaaacggagccgccatggaacgaaggaagcgaacggacctggcggggcgcagagagaaaggccccgggttgagccgaggagatcgccggcgtaacgtaactgcggcgcaggggagtccggatgccggaagcagggggcagacgtctgccggcaggtcgcagtggcggcgtcctccctagtccctactggtgtggagggagtctggagtctggacaggacggaagggctaggaaggaaggaaggaggcgtgtgaaacggaacgggggctggcgccttgcttgcggagggaaggcgaagcaggagcagctggacctggacgcggtcactgccgctgccgcgtggtgggtgacattagcacacgtgttcccgtgcgtcggccagccctgcctctgaccaacggactccccttcgagttggacttgtttttagctcggcggcgtaggagtaggaggtaggcttcccattgcttttcattctcatcatggatgtgttctgtgttgtctgctttgcttccttctgcttctatcact

SEQ ID NO: 168363 - DNA, 849 bp, Zea Mays
gacgccgatgacaccgtcaggatcagaggtacttcaacttaattcgcacaccgcgacgcgcgacttgctcttcacttccatgcttgccgtctcgtgagctccattgacgctgacacttcccgaaccatccttctccccatctcctcctctgcagcgacggcgcgacagctgagcaataggagcgaaatcacggcaaacaaggcacaggactccaacgaggtacatgatccatatccttcatggcatcgtgcatgagctctcctattgacatctgaacattaaacgttgcttatgcttatgcacttgcattgcagctgtggtatacagaatatactacatctgctaatttctgataccttaattgatatgcaggtctctcaacctaaaggggggaccaaatggcttaggttcagtggcttgtcgatcgtcgctgccgcttggcacaagcacaacttgttcagccgccaaagaagcaagccttcgccgcctcctgctgccgcttcagatgcaagctcccaaccctgatcaggcagcgctatatgggatcttctacattttactacgtctcagcttataaaaacacacacgcatggctcattcagtcatcgtttatgatgcatcgatgctggctttgcatcattcgctgatattttttcagccttggttagtccctgtaagctaaagctgattctgtaaatggtgcaaattagtgttaagaaaggagggcaatctggaaatccatccaagctttgcgtcatttggttatgtgtactgttgaattctgcgtggtcatgtagcagaaatgtttccgcaagatgcatgtttgttttagggactaatttttagtcc

SEQ ID NO: 168364 - DNA, 582 bp, Zea Mays
atcatcaacagctatatcttcctcgtcatcataatcctcatctttattatcttcgtcgtctgaatttccaggaggtacattataggtgtcacatggctgcattttgacaaccaagtgccaacctttgatcagattgtctttgacaaaaaagacttgagaagcttggctagctaatacaaatggctcatttgtccgaagtagacatttaaagttgacactaacaagtccataaacatccttctttatccctcttttttattgaatacgtcaacccacttgcaacgaaataatggcacacgtcttcccccaagaaattgaagctctattatctctgttaatatgccataatattctacattctcactaattgtactgccctctgccgaaacaacaactccgctgttctgtgtgcatcgatttttgtcacgactctctatgcgaaatctgaatccattcatatcataacctccaaaacatgtattgttttgcaaagggcccctagataaggatagaaggtcttccatttgctcacttttatcatggtcatacaaattatgtatctgcaaagaaggcacataaatt

SEQ ID NO: 168365 - DNA, 590 bp, Zea Mays
gattgattctggaagcacacattcctttgtcagtcaacttttgcttgctaagttaaagtcagtatcacttataaagactggggtgtcggttaaagtggccaatgggggtgttatgaagtgttctacaacatggcctcaagcggaatggtgcattcagggtttatggtttcaacatgaactgaaagtgttgcccattcacacttatgatctgatcttgggcatggattggttagagattcatagtcctatgaaggtgcactggcgttataagtggctttccattacttatcaggagtcttcagtcatgttgtatggatcgggttctagccactgggatgatttattgattcatgttgcttcggttgaccataatgaaagggaaactccagtttcagcattgtcacctgatattgcagcattgttggatcagttccctcaggtggtttcagctcctgcaacattaccaccccctcacccctgtgatcatgcaattccactggtggcgggagctaaacctgtgagtgtgagaccctacagatacccaccggcattgaaggatgaaattgaacgtcaggtcaactctatgttgc

SEQ ID NO: 168366 - DNA, 474 bp, Zea Mays
ggaagaaggtagattagggtttcaaacctagattaggatttttgggatgctacaaacctaccccacttaaaggaatctcgccctcgagattcagacggggctcaagaaaaggtaagggtattccttcctgagagagtcctcactttcccaggtggcttcctcttctccatctctgctccactgaaccttacagagtctcacttccgaattgcgggtccttctgactgctgagttgagaatcttcactggcttttcccggtactggagatctttttgaatctgaattgtctctgcctcgatacgggtttctggtaattttaggcatttgcggagttgagacacatggaacacattgtgaatatctgacatggattctggtagctcaagacggtatgccacgggtcctattcgggaaatgacagggtaaggaccgacgaaacggggtgctagttttcctctcatctggaacctttt

SEQ ID NO: 168367 - DNA, 764 bp, Zea Mays
tgtcagagggctttcagcactgtttgctccttcattggcacaagagatttgattcaagaacatatagcctttagggtatggccacttgtggaaagctgggaaatgacgaaggaaaccaccacagattctagttatggtggtctggtccgactgaaaaataccttcagatttagggagaagtttgatgagccaaacgatgattggctaaagtgtattgaagctaccagcgatgagttgcttggagcttactccaagcccgaagataatgctatgtccgcagccttcggaggtcgagggaagaaaagactgaacatgatttttgatgcgatcgacttcatataccccgattatcgttacccactgcgaggacaagagaaaaagaggaagattgctgcttcggtcaccccaactgagcctgtactgaagagcaaaaaggtgaaggttctgacccaccggccgcgttacattgaaccagatgtggtgcctaaatttggcgcagggtccactccagcagccaaggcaacacagtctgcttcgattacacatagcgccgaagagccgaccgtaatgccgaagacgcatacagtcaaggcagtcgaagataaggttgataaggctgaagggtcaaaggctgaaaaaataatgcaagtgccaaaaattatgagccctccgacagaggcaacactgccgaaggtgcaaaaggcttctgctacaactcccaagaggaggagaatggccaacatgctagatgttgtgctggaaac

SEQ ID NO: 168368 - DNA, 675 bp, Zea Mays
gcttgctgcgacattttgtcgaacatgtcgagggctcgttgcggaggaagagacggtgtggccgctgcagctccgcgaactaggcgagggtacacaggggagatgctcgggtatcggccagggacgagttgtaggcatccttggaactagggaagcgcggtcgttgatggtgaagatggtggtcgaggaggaaccgttgtggccggagatgcagagcgcctaagggagcgaactgggtgccatggagggggctcggctagagctcggccagcagaaagtcgaacgccatggctgggagagatgttgtgcttcccggggaagctgctcgtaggggagctcgtggcaaggcgccatgggaagagaggccatgtgagggagatagccagcgtaggaggagccgagagagataaggctagatgggagaggaacaaggtgtggcgactatgggagaagcagctggcggaggtacgaggaagatgagaaggttgtgcagatgggaagggtggatgcaaaggggaaacgagggattttcccaattgagacttatttatacttggaaattagggttatggtttctagtgtgctcaaatgggcgggaacggacttggctcaaaaacccaaacgagatctgcaacttaatttatttaattttattttatggcattcgattatgca

SEQ ID NO: 168369 - DNA, 442 bp, Zea Mays
cttgaagtatggccgtatgctgtgttgtcctggcctcctgggctcctggcgacatgtgctggacagctagagtgtataagtgtatttgttgttgtgctatgtatacgtgtatttgctggtgtgctagatatagctatatggttctatggataatcaatgttggtctgtatttggtgccgtactgccgtgtgatgtatttgtgtgcacttgtattctcatggggtgctttatatatttgtaatttgtggactattgtcactactagcatgtgtattgctgtttttttctgacttccaattatatttttgctgaacatgctatattgctatgtaatggaaaacccgacggggacccgaaacccacccgaaacccgatgggtgcgggtgcggctgcgggcgggtttggtcacatttcgcgggtgcggtcgcgggcgggtttttgc

SEQ ID NO: 168370 - DNA, 948 bp, Zea Mays
gggaaccaaacgctcttgaaaattggccccagtgctgctagtcttgttttcctttactctggaacggttccagatggaatgataggtttacttgtgctaacattgatcacctgggatagtttgtagcctcaatccatgcaaaacgacaatgccttagtcttttacaattttgcatgtacatatcggctatagggtgtctaccgatctagagtatatatgatcctatttttacataagtttaaacagtaagttacaagttcagtgaaagatagttcactctaaactctgaaggacaaactccaggaagttaaactgtagttttatttcagtttcagcgctggtagtgtggcatctgtatttctgtttttttcttgatcaggttctgctgcattgctatgaatggtgtgagttgcatggagttgaatataagccaattgctgacgtggcgttttatttcaaaatctatacatcgatctgatttctcatgagtttagccccgttttgaaacatagtgttggtctgtagtttgcattgttattaaaacgtcgtttaaacgagaaaacgtgtttaaaagttggaatgtccgaacgttttaggtttagggcgtagaacgtccgttttgagtgtttaaacgacgtttaagcgtccagatagcgttgtagggcgttttagaggttctacccgtcctgggcctttagcattttctaggtcactttcctgggcactggccagcgccggacgcggtgccctcactccctcagccagccgccgctctgctctcctctctcctctcctcagccacagccagccgtcgctctgctctcctctcctcagccacagccagccgccgctctcctctcctctctcctctcctctcctcagccatgcagccagccgctgctctctggcgcccacagcagcccagccggcagccgctgctctcctcag

SEQ ID NO: 168371 - DNA, 895 bp, Zea Mays
tggactgcgagttgatttgtgacaagttcagggactctttaacaattttccaggctgaagcagtatggaatgatcacagccatccgatcggatccgaaggtccacgttagatcgcggcctcagtgaagcagtatgtaaggctagccgtcggatcaatcattaacgtgccagattcaaaatatcctaacattgattctcatcctatcgatccagattggacggtgctcgttgcactccccgaaccagtatcttctatctaatctgggccattcatcccgatacgaacgacataggcatcatactccccacgacgcaccgacacggtgccgccgccagccagtgcggcagcgccatggccggagtgtagccaatcaacgtctatgtgcactatcaatcgatctaagcctcgctacgcgacaagaaggacaatcggaacatactaatcaggcactcaccaacggtagcggcggaggtgatgttgcccaccatgtcgcacgttccccgcggtggtcctccaccaccgatgagcaattgccgatggctcagtcgattcaatgctttgttcggtcacagtcaagcttctacaacgtctaacgatacccttggaccccttcctaaagctctggcggcatccacggctctaggtgccgacggcggatctccctcacccgcaatgcttattgttcttcatttagggcaatagagagaagaggaggaactcctggagcttttatcaggcggagagggggaaggagccaagaccagggtcctgggaaaggtggctccgtcatgcatggaggcagttgcgcctgcctggtgcgcagctccgcggagacgacatcctcgggcgagtggggcccgtgagtcatcggcaaccgaggtagcacacgcgcca

SEQ ID NO: 168372 - DNA, 604 bp, Zea Mays
cacatctaatgatgaaaagttttgaaaacacatccactgcatcctatagtgtacgtaccatctatcaagtcttatggcaaaagttttaaaaactcatccattgcatcccacaatggaccatccactgcatctcacagaggaccatccaccacatagcacagtggacacatcacaagtcacatggtgaagttttagagcttttgaaatccaaaacactagtctgtgaggacactaaggtcgctcttgaccatgagcacaactgattaaccagttttgtgatagtcttcaaagattgtacaactttacccgcaagtcatggtacccacattcctaagtttgcaagaccattcacctcttccttgtaggtgtttcaaggttcactacgagacctttacaaaggatctcccatgcatattagactataacagaatacctagggcgatctcttgtaatctctctccaccatagtcctcacatgtaggccctctaggacatcccacccaaggcctagttaagcgaaagtggggccaaagaggcctcctccattcctatctgccatagttaatgactacacagtttcccctaattacttggtcaagaccag

SEQ ID NO: 168373 - DNA, 330 bp, Zea Mays
tgatctcattataggcatggattggttagaggctcatagccctatggtagtgcattggtcacagaagtggcttcgcatatccttgccaacatctatggtaacactgagtggtttggcttcatcagtgctccacagctcagttattcaggtctgcagtttgttggagttaccagacaaagaacaattgattcttcagggccttcctgcagatattcaggaccttattcagcactatgcgccagtctttgaattacccactggcatgcctcctgccagagattgtgaccaccagattgagttgttaccaggcgctagtccggtccagatgcg

SEQ ID NO: 168374 - DNA, 628 bp, Zea Mays
ttcaaggcagttgcgccggcatgaagaacattatccaactcaggacctagaattggctgttgtggttcatgccctgaaaatatggcgtcattatctgctggggaatatctgtcatatctatacagatcataaaagtttgaagtacatctttacccagttagagctaaatatgagacagaggagatggcttgagcttattaacgactatgagttagaaattcactatcacccaggcaaagctaatgtagtggtagatgcactaagtcgcaaggcttcctgtcactgtcttatgatgaagacttctgacattacactatgccaagaaatggaaaagctaaacctgggaatgattcaacatggaacttcaaatcaattaaagcttaagtcagttcttctgcaaagaataattgatgcacaaaggaaagatgagggtatgaaacacattcatgagaaaatggaggccggtcaagccagctgcttcaaaaaagatgatcaaggcgttgtatggtttaacaaccgcatagttgtgcccaagaatgatgagatcccccagcaaattctagatgaagcacatcttagtcgctattctattcatcccggaagcactaagatgtatcatgatctaaaa

SEQ ID NO: 168375 - DNA, 323 bp, Zea Mays
cgtctctcaagctctgcagccttttcagctgcttttattgactctcgagtgtcgtgaatatctttttcgtttttctttattatttcatgggccattcctcggccgccattttcccatatgtcagtgaaatttttccagctattaagcttgcttcggccgaggggtccttcgtatcatcaatgcagagggcagcttcggcctgagccaaggttttaacatgctcacaacctgacttctccaaaatagctgcaattcccctcacaccagagaaggcacatacatccccgcggtcacttagaatttcttcaaaggcttcggtctcc

SEQ ID NO: 168376 - DNA, 738 bp, Zea Mays
gggatcaacagcggattgggtacacccattggggtcagcgtcggtaaatccagtcgcaggcacttcttcagtagcaggaactgaggtaccagcgtcctgatcaaaactggatactcgccagaggcgtcttcttttcttcttctgctcatcagcaaaaggatcaggctgattggttcggcaagggcgcctcgggcgagtactgtcaggcttccgaacatccaaagtcgtatcagcctctgggaggggcgccactaccaacgtcccagcaggagcaacgtcggatgaatcctcagctagcaaatcaagcatagcacttatctctgcgtcactagggttcaggggcacctcaaaatgaacctgccgttcgtcatcaggaatctccccaagcgaggcaaccaaagcactaacttcttcataagagggtcgcactctaaggcccaaattaccatcagtaatgggtggattcgacacgaaaagggtgaaggctttgggaggaggcaagttccaggccgagtacgccactggagcaccagcatttgacactttgcccctgaggatcatttcaagtcggctcaccaagtctgcagaaggaattctcctgttggtaacccgagttgagtcggctagccctcgatacagataagctggataggccctgtctttcagtggctgaatattcttgaaaacaaaatcagtaaccacagcttcagcagtcagacccctctctttcagcagtcc

SEQ ID NO: 168377 - DNA, 635 bp, Zea Mays
gcttattcgttttgtcggagaagaaaccactccagaaccgaaggacgacgaagtagtggttttcaaaagctttttcagggcaggattaaggtttcctttgaacgagatgattggagaagttttggataattttgagatttttcttcatcaggtgacccctaatgccatcgttaggctcaacattttcatctgggcccttcgaagccaagggatggacccaaatgctgaagctttttgccgagtgcatgagctgcattaccaaacgaaggccagagaagacgggctacatgaaaattttggttgttataacttcgcgtatcgcaaggatacgaaggctccggtcctcagctatcgcaccaagcgtccaactggctggaagagcgagtggttttatatcaaggccgatgagaagaagagggagaagttgaagatgatggtcatgagcccactgagtttaagcttcgggatgaccagacccttgtgcaacatgaagccagggtcaccatgccaactggccgtagcagaattcagagtggtggctaaacatatcagcaccagggatctagtgcaagaatacttggccaacagggtatctccaatgttgagtgaatggagtatgccgaagcttaaaggaa

SEQ ID NO: 168378 - DNA, 471 bp, Zea Mays
ggacggcacacgcgaggcgagactgcctgcacttgcaatctgcatgcatggaatccgaaaggcggccagatgcccgaggcccgagcgtatgtgatcgaacgaagcgtgcgtgcagcggcgacgcgacgacgtgtgagaggatcgtgtgagaggatcggatcagatcgtgaggcgatctgctctagaagaagcgtgtctcatgcatgtcagagagtggcaggcgctgagaatcgaacaagggaacgggaggggactgtacgtacaaatactacacgatggttggttcgtactggtgcagtctgatcgatccatgtctgccggcattattggcacctgacagctcagatcagctggagctggtcattctcgtgcatggcagatggatactcctacaccaggtgacttctcaaaaaaatgcaatgttgcaccctcctttccaaagacacagaccaaatgttctgcaaacctaca

SEQ ID NO: 168379 - DNA, 417 bp, Zea Mays
gaattattagggttattgatgcgtgtggagcctgatataggtactggtgagagttgtggcacaagtgctggcgatgacatccaggtacgcacatcgtgttattatgaatacaccattattaaatgtcgataatgatccatgtatgtaatttaaatgatataggtcgaagcgtatgaaatagaagacttagttatagataatttacgcaatttagatgatgggaacgaggtatgcaacagaattttataatgtattatttatgctgctctacaacatttgtgtcttcactggagtttgtgttatttcacaggaaattgtaatagggtctaatacaaatgaatgcaatgctaacgatgatcaatgtaatatgccgatattaacattggaacataacactgatatgcgtctggttgatag

SEQ ID NO: 168380 - DNA, 1113 bp, Zea Mays
gtcaggtacacgtgtgaatttgaacggagagagtgtgggaaagtgggtcgacgggagcgcgctctcagatgtgttctgcggcggcgaggtcatgttctcgacgctctatcgcagtaatattcaatcggttgggccgatgagctatgttaacattcaaggatgctaaaacatggcacgaaggggtatgaacgaacctgggaacaattggtcgcggtcgggtgcctcacggcggcgtaaatgaccaagatggggaaaactggaatttgtgagctctggtgggtaattggaagtgagaaagggtgcgctaggagcgtaaccagaaggcggagcagggagggcctttaatttatagtagctacgtgagtgtgtcgtgaatttgggatcagatgatctcacggccggaagggggtgagtcaccggagcgcaactgtcgtggcgctcggtgaggtaaggctccaaacggtaaatggactatccacaacgacctattgcgacgtggtaatgtctccaagcacgtggcatcctcgcggcgagcggcggacgccaacgatgacatcccggccggtggcgaagcaagtggttatggtggccagctcacaagtttatccgtagtcatgatcttttcacttccccggtaatatccgcgttgatccatgcacgaatcttcacggcgagctcgaatcgcagcgctcgatcaccggcgatgaggtacactgcacctaggatcttcttcagtgcactataccatggcgatgttcattcagcgcgcctgatagagcgatttgagagtcatttatcttcgaatttcattcaacaaactaccaagccgactacagaaaagttgttgtccatcataccagctacaattttgttatagggttcttgttcatacctccactcgatcaagcacaattcagctctaaagttgatatgatgccattgtcagcctaaccttcaggccaacatacaactgataactcaacttccaggccattttactccaatttttgtacaactatagggctcactcccttaatcaaacttggactactttaatagctctacaaatttgctgtagtgactgatggcaaaatccccatagatcaagtgata

SEQ ID NO: 168381 - DNA, 763 bp, Zea Mays
tgggatgccgccgcggtcgtgaccggttgggcgtcgcctggcatcggcgtgtaaccacggtgaggctccaggttgtgggacagttcatccagtcgtcggcgtgcgtgtgggtattcactggtgagcgcaatttctcgccgtagttgaagggccgccgcgggaccgcactctgccgcagaccgaccgcctgggtgcgccattgccggtaagccatccctttgttgtattcgtcttaatcccatctccctgtttctggtatcggtgttcagatttgggacacctgcgctccggttggccgtacgccggtgtgaccaccaccgtggttgaccaggccgcccccttccgtataccgtaaattcctctgagcatacacataaattggctcgctagataggttcgctgagttgtggtctaggtgtgggaggcgttaattggattttggtacaccgtgcagctcgacggccgttgccggcgatgtctgccaccgcgggcgctctggcgccgccgcgctcttggtgttgggagagtagtccacgccggtgttagcgtggtccgttgatttttctgttgacggctaagatttgatctagaataccggttcgacgtaatcggctcagggcgtcgatatacggtagaacggctcggatcactccgcgctatcaattgatgtggaccattggttagtgatccgatggcccagaatgcgtaaagcctagtagtctaatcctggcgcttcgtttgggatcgaacggtggatagcgtt

SEQ ID NO: 168382 - DNA, 413 bp, Zea Mays
gggcgaatgccagtgcgcgctctggcgcctggcacggcgtcgagcacgaggcagcacagagagaggtcgagttcaagcgtggattggctccaaatctttgagattatggccatgatcctgttgagagatcatttcctctggcattcctttgtcatttgtgtgtggaggcttgcaggttttgctgactggatcaagagatagagaggggagaaatcaggtttgtctcactgccgcgcataaagagaagatcgtgggtttgacatgtccaaggcacgtgtcccgatgccatcttctgacatgagatagaggggttagttaggcacaattttgtcaatggggtcattaggatttgagctagggatcaaggtgaacacgctcggtctttggctcaagggctgaaattcagaattctg

SEQ ID NO: 168383 - DNA, 793 bp, Zea Mays
aaacacgtggtctattcgacagtttcttgcatggaaatggagatcagcaaaatgatcatataaaccctgaatattctgcctgcgatgctcgtcagaatgtaaaacgatgccacttggttacagtagacatcatctcaatttgcaatgcattcaggcttaaatcaacatcatctccacatcatgttcttggaccagtgcacccccatcacatcttgattttatatcacaatcggttccatgtaggcatatgcgtcgtgtcagcattccagccaatgtttccatagtttaagtgctcgtctaatcagcacttttagattattatgccacatgaatgatcctgactggcttctgtttccattgcaattatgggtcaactctgaactgcaacgttttctttttctgataaaaaggctggagatttgtatcccgatccgatttctgatctcagatccaggctttccggccatatccccttccttttttttccttgcaagagcatttttttcttggccgtcaccattcacaagcatcttaggacctaatcatgaacaactatgaactgattacagattgtaattgtacaaatggtacttgtctcattatctgtatgataaggctgccatgcaagtcctgacggtgacaggtggcgaattctattttactgttacaagcattttattgtatttattagaaaagctcaggatatggttgctattgttaaaaaaattaggtatttttatgcttaatttaatctagaaaaacagtagtgaaaggattaagatgcacattagag

SEQ ID NO: 168384 - DNA, 819 bp, Zea Mays
gttggacggcgggttgatttggtgtaatagcgagggttcttatgtaaaatgggcgcggccgaggggaaacacttgatctgagccgtcagatcaaaacagacgacccagattagatccccaacgaatgaaccggtactcgacctcagcggtcggatctaacacctacggtccagatttgatttcacgacgagttactctaacacctaatcctggccactacacacgagatcaacggccccgcgtactccttcaacctccgacccaagccacggcggcgcagcccgccggtgcggccatggccgatgccccgttgccctattctgcgatctaacgagtgctaccctatgagaaggccaaggagaaaggtgtggagaggatcatacctgttcccggtgcggcgatagccctgctcacggtggcccacagatccgagaggaagaagggacgccggcgagaaatccccaggtgaggaggccgacattgcccatatcgacgtaagtgatggactccccatgcctaggcgaccatccgcgcctaggttgcgcacaccgagcgtcggtgggggtatggaaccttggcggcaacccctgcgacccgaatccggcgagacccacacaccacgacgtcggttgtccctggccaccgacatcgatgtctaccgcaccagcgccccccggtgagatccctcccgagcgaacagcagaggccatgcggcttcacatgcaggcatcgacgcatgtactctctcttcctcttgattctctctgcttccacgcggctacgatgacacaacggtcggcggaggttggtgtcacactc

SEQ ID NO: 168385 - DNA, 459 bp, Zea Mays
cattaatgatgatgagtccagaggagactgaagcaaaaaggttggaagaagaggctaaaaaaagagcaatgattcgtggtgacaaggaagaagaggatccactaatcacaaaaagtgagatgagaaatgagatgaggagtatgattcaggaactcatggggttaggtatgattggccccaagactttgcctatatcatctgaattaaaattggaactcattccaaatgatgtgaagctagaagggagcaagaattacttgagttggtctaggagagtgcgagtgctcttaggaggtaaaggagtggagcactatttggaagaaggttgtgttgaacctgttgataggctcagccctgaatggagggtttggtataccaccaactcgattattgtggcgtggttgttagcatccatgtcttcgtctgtgagtaagatggttgaagccatgcgcactgctg

SEQ ID NO: 168386 - DNA, 731 bp, Zea Mays
attttccaaggtgcaacattagcaataagtctatcgatttctgatatggttgtaccgaggggaccaccactattttcagcttgttggggaccttcgtcagttatagcaggagcaatctcctttcgaatcgctggaggaggggtgtcaaggatagccctcatcacattcatcatctgacgcttcttttgagcgttccctctgccgggtgctgaagggtccttatctgcctcttcttcggcacttctctcaacatttttcttctatggctgtaataagcttgttagatctgatcctagaggacttagcattaggaaaggtaagggtgcagtcattacctctagaatttatgtcacactaatggaaaccgccgaaggtgtcttttctaaatgctttggcggagaaggtctctcttcttctccacggtcagatgacatagcctttcttttctttggtgtcgaaggctctggtgtcagcttcaggttctttgtcaaccttttcttcttgcccgcttcaatagacctctgcgcttgccttgtcaacacacttacaaccctttttcttttcaaccccccggcttcttcgtcaagtgtttcatagtcagggaattcgaagcccagggcatccatcaccctatttagtctccatttctctcacgtgccaaaggcggttgtcatcaatcgatcttccttcttcgtataattccaagaatttcattgcacatcttctctatt

SEQ ID NO: 168387 - DNA, 626 bp, Zea Mays
tgcacttcagctatcattcccagcattaaataatgcagcataatatgaagcactgatccacggattgaacatcgccatgtcactaggcgttaagaggttgatggtatatggagattcactagtggtcataagccaggtaaataaggactgggattgctcgactgattccatgggcaagtactgtacaaccgtccaaaaattagaagacaagtttgaagggttggaattccatcacgtggaaagagaccgcaacgcagcagcagacgcgttgtcgaaactatgatccagtcgggcctaggtcccacctagaatttcgtccaggaagtatcacgcccaagtattccctcggattagacagaagaatgcaacaccttaagccaaccagaatcgaaccctaatgactagagagagcctatcatcaggtacataaagaatgaggaggaaccggatgataaggctgcagcagaacgcatcccaagacagtcggcccactacaccctcataggggcgcactgtacacaaggggtgcgacgggagtcctcatgaattgcatttcctcaactactgggaagcagccattggatgaaatccatgctggacagtgcagagtacacgcagcatccaga

SEQ ID NO: 168388 - DNA, 1200 bp, Zea Mays
tcccgctgactgatggacccctcctgtcagcgctgaccgctcgttcgcgagttctctctctctgcccgcggaccccacctgtcagccccctcctcttccctaatctcccgcccgctccctccgtcgtggatgagcccatgacagtgcgtttcccggccacgacccccgcgcctgagcccttttctacagcccacgcccactcactcactcccctcgcttagtcgcgccccagccgaacgccctcgcgctctctctcgctctgcacgcacccaggaagttccaccgccactcgccgtggtttctcgcccgttctgcgatcgtcgttgagcccccaccgtgtccgctgcctcggtgagttccgcctcatcgtcagcagccctggacaccccttggtttgccccaactccctctggttcgcccagtccgcactcaccggagttttccgcgtgcagtcggagctccgccaccatcgacccaaggcatccctgcatctccaccgttgctacggtgctccagtgtttcctatcgaggtgagcaacctccccgcgccccctatttctttgcttattgccctggtcttcgcgcgattgctcgcgggagtagatccgctgccattgggccaccccatcacgttctgcgccctctggtgcccccgcgccggcgttgtgcccacggtcatgttcgccatgtcgccctgaacgcgcctgagtccttccccatgtccctagagccgtgccgtggctgttcccctcgtctccggcgagatcttgccgcgaggtcgagcaccgccgccgcacttaggacagaccaacctgaccgcactggccgttggatctcggatgtccatccgagatccgacggtcaggatttaattagaatcgatctaacctcaaccgtccgatacaaagccagccgcccagatccgctcccctcacccgcgctttgccgctaggctcggccggtaaggccacctcgctctaggccgctgatagccctgacacgctagtcaatccgcgcaagcacgtgcgcgcgtccgctcggccagatctgatctcggccattgctcgtagatccaatggctaagaataccccgtaccccttcacgcgatagtttttgctaaagagacccccagttctcgggtaatagaaccggtcgtccttaggttttatgcgcaggcccctaaacacttataaacagac

SEQ ID NO: 168389 - DNA, 796 bp, Zea Mays
cacttgccagcgatgtggccgagcggccatcgcctgggtgtacgctggtcgtcgtgattgcgccacatcatgacccttttaccatgtcgttactagccgtaatagctcaccagtgacagccgtagctccttagccagtgactgccacggtagctcatgtcagaggccttctcctttctctggcctccagcacgccttctccaaattggacgccaccgctgatggattctataaattgatgccctagtgagctccactaggttattacgcacccagtgcaccagctcccgcctctgatcatccaccatagcctctcaatttcccttttcccccaaatcgggtttccgcgccaccgtgaacgcctcgccgtggccagctctctgcaggttagttcaagcttctctgcttgatgttctagcctccctcaagcctcctgctactcgtagacccatttgattaagctagacctcactgaatcactaagaacacatcgatttatctctggttctcaccgccgtcgtgaacagacgaattctgggccggatttgtgcaattaacggagggcttagggccgccaggggtaggaataggtgtcaaccgaattagggtgtcagtcgttgcgcatcctggccgatataggctcaccagagggcgtgttcaccgtcgttcgtcgtcggggacccggttctgcgaagaaacataagtgcaggagtctctgtgcaaatgttagagagacaatgaatagtgcacaagggttcttaaccggttattcaaacaaccgaggtcctctgtgcaag

SEQ ID NO: 168390 - DNA, 327 bp, Zea Mays
ggatgagcagaagtgttcccggcgatctagggcagtctagattaatcaaacgagtcaaggagcatcaaggcatgtaagggtgctgaaacaagagagcagaggacaagatcggaccaaaaacgagctagccacggcgaggacctttttacgatggcggaaacccgatttggggaaagtgagcaattcgggggctcagttgaacaattggagggacgaacgggtggattggatgcttgaatacctaacggagccgagggcgtgctcaatttatagggctcttgagtggtggccagtgaatttgagctcgcgcggtggcggtcggagagg

SEQ ID NO: 168391 - DNA, 587 bp, Zea Mays
agctattgagagtaaaaatagtttagtccccaataattcttaatatttagagagtagttcaattttaactctagttttggtaagcccatttcctttttccttgagttatgtgcactagtgaatgatcagatcaagactctgtctccctgatggtatgcctctcactagcggtggtgagtgccaacggtctacaacaactccatcaaacttaacaagttggaactaatcacagctccatcagacatttcataggagctattaatcaggttagcaccttatacctaatcgctacatccaacaatgtacgaagaggcaaaccttgagctaccgtgtcagactggtgacacatctagcttggtggcaggttgaatgtcgaatggcgaggagttcaactgcaaaggagaaggcttagtcgtctagtagcgcgtcagagctgtattggtggtggggttgtgggtggggtagcaggtctaccctgtcagacctggttggcgatgaggtcgagggcggaggagaaggctagtcgacgaacctgtgtgagattaatgaaccgacaatgaacgagaagcttgtgtcacgcgcgctga

SEQ ID NO: 168392 - DNA, 588 bp, Zea Mays
ctgttcggaaacaagggagaaaaaggaaaactactgcttcagcatcctctattgcgtcgaaggcgaagaaagtgaagaaggtcttggcatgtagactgagacacattgagacagccgatgtgccaaggcttattgaaggtgcagagactgccccatctgccacagaatcaggtcctgtcatgccaattgaaactagtacagatccgaccaaagtgtgaatcatctaggccccttggtgatgttttggtaattaatgacaactgcttgtgggctaacggttcttggagaaataagaatgcagggttggaccacatagaacaggaaatcttggagattcataagcattggttgtggatcaagtgaaggcaaaggtataacataggtttcgtttttgccggtcttgaggagtttagagaagatacttgaccggattagtaggctagatagtcgtactattaagaggggtcaatgactttgatctgtgtaaaacttagtgcctcatagagcatctagtggttgcatttgcatgaggactaacaacgcttcaaatttcatgagttaaaattctttcaaaagcttgtttgaaaa

SEQ ID NO: 168393 - DNA, 612 bp, Zea Mays
aactgaccagctctccgatgaccaactcactgtcgagcaactcgactaggcaaagatctgagtccagcgctactgatctatgtgagatacgatgggacgcaccaccatcaagccacgtccggacatacacacaacatgctgaatgggcatcggggtctctacagtaattagagtacccggatcacaaccctaaagtgtctagacacttgagtaagaaagggttatactcaaatacgctcccaatcttacgaaggcacgagggatctatgtcacgactcgcgaggccaccctcagccgagagacgcagtcacgacacgctcgaggccccccctccgggggcgggatatgcagtcacgactcgcctgaggccaacctcggatgggagacacggtcacgactcacccgaggctaaccttaggcgggagacgtagtcacggctcactcgaggctaacctcgggcggaatacgcagtcacggctcgctcgaggacaacctcgggcggaagatgtattcacgcctcgcacaatgccaacctcgggcaagagagttagtcacggctcgcctgaggccaaactctacaaaactctagatttttcaatctaggactctgga

SEQ ID NO: 168394 - DNA, 323 bp, Zea Mays
aacccatctgtggccagcgcaacacgtacattacgagcctcttcggctttctcacggtgaatagcatcaaagtgtttccatgcttcaccatcagatgcgtgcaccatcttgtcaggattgtatcgttttccattttgtgccatgtcatctgtttcgtggattcctctgtcatgtacagacgctggatcctcggaatgaacggaaggtgtcgtagaattgtcaaggggatgtcgagctgcctcttctatccatcaccagagtctacctccatgaacctagacgatttacacttgggatagtactttgcctccgcgtattctttc

SEQ ID NO: 168395 - DNA, 713 bp, Zea Mays
cttatgcgtgacccagatatggggaccttacgagcataaatcagtcacacagaaccaacgcacggtaacttggaacaaaaagagatggagcgaatgacagaagcggcggcaagggtggagggaagtttcacgacgccttgactagaacccatttcaggtcacctgttggagatttagattttttttttcttatccactttaagagcatgtgggtacctatacaccattttagatctctatatagattttttttcttatccactttaagagcatgtgggtacctatacaccattttagatctctatattttaggtccactgttggagtcggccttagctgagctaattgggagaatagtttgatagaaccttaattgtgggtcgacaccacatgtccatgcctcccattctcccaagcccatgtgtcgtgccgtcaaaagggtccgaaccccgaggcctcgtgcatgcatttcttcttattaagtcgttgcggcttcgaggccaatcaatgtatccacgtcgttccaaatatcaccgccgttcatttaaaaaatcaaagttgtccatgtgtcctgtgtcactctagcctccactctcgttctaaagcacagtgcccgttctaaagcacagtgatgcttctgtgtgtgaccgcacatccaagagccaagggtgcaataaaaaaataaaaaatctcggccacatctgtaacaccgc

SEQ ID NO: 168396 - DNA, 479 bp, Zea Mays
aaagaatgaagaggaactgaatgataaagccgcagtagaacgcatcgcaaggcagtcagctcactacaccctcattggggatgcactgtacagaaggggcgcaacaggagtcctcatgaagtgcattcctttggctactgggaagcaactgctagatgagatccatgccggacagtgcgggctacacgcagcatccaggactctggttgggaaggtcttcaggtctggtttctactggccgacaacaaagagtgatgcagccgagttagtccagaggtgtgaagcttgccaattcttatcaaagcagcaacatttaccagcatagcaactgtagaccatacccataacatggccatttgcatgctggggactggacatgattggacccttcaagaaagctcagggaggatacactcacatgctggtcgccattgacaaatttaccaaatggatagaatacaaacccattgcttctctga

SEQ ID NO: 168397 - DNA, 490 bp, Zea Mays
actaagactttcatcaatatgggcttatccaagaagtccttgaggcccagtccaatgcctttctatgacatcatcccctgccggtctactacaccacatggctagataactttgctcgttacctttggcaccaaatccaatttctgcatcgagttcctccatttagaggtggcgaatattgacgctgcccaccacgccatcatatggtgcttagggctcacaaaaatcatggaaatccctcattacacgtacctagtcctcaagatgttggatcctaagggggtgatcaccatcaaaggtaatatgagataatcctacacctgcgataacgaaggatgcagcatggccgaatccgaggtggtgcgacccaaatgcgatagcctgaagtaggaccttatgttgtgttccctaaataccgaaagaatagagaatctcacgcctccacagaaaaagtaatgactctacaaagtcctcccacaccaagcagatt

SEQ ID NO: 168398 - DNA, 700 bp, Zea Mays
cccgtacagagattatggttggggctttggggaattctttgtcggacattcgcagggtcgcctgcaccgtgggtgaagggagtcatgatccaattcaacgttaacatccgccttatggctggggctttggggaattctttgtagaacatgtccggtgatgggttaatgcaccagggcgtcggatcggcttgctccggtgagctttgccaccgtggggcaggccatcgccgccgctgggcgacgtgtgggggaagagatatcacatgtcactggtccacaaaccgatggctaggatttagccatgcatacctcttcgacgtggtggctgcgaaccaatggatcgttgttgaacgattctgattagatccctagcataccctttcgccctaggatcttggtcgttaatctgctaaacggacgggttgtattagatctcatttcataacgtcgtgactgtaggattaggatcttgcggccttagttgcataccggttagggctacggtcgatctaatcagtgccaccggtttcaaatcgaacggctggtggttagtcgattcccctcggccgagaataattgcatcatagtcctctcgtttgtttaataaacccacatctgtagcagttcaaaagttattgcaacttagtcctagaatttatgttttccaccttgatctatttagaaattgtgtctgccatcc

SEQ ID NO: 168399 - DNA, 576 bp, Zea Mays
atctagtctaaaaactcattactgtcatgttatttttcagaagctattaccattgcagttcgcaacgtttatctagaaattgttgctcttccattgatttagcttagtaggtacttcaatgcaatatgttcaaaggagttgagtgctgaagatttaaagcagttgagcacctcgattcctgaaatcctttatcgtcttgagatgattttcccactagccttttttgatataatgattcatttgctgattcatctagctgaagaggctaaacttggatagaacaaagcgcaccctggaagctcgatagctgagggatatatccaattgagagatatctacgtactcttaaaggctatgtatagaacaaagcgcaccctagaagctcgatagctgagggatatatattagaggagtgcatgccattttgcagtcgcttcttgcaagacgtggaaaccaagcataattaggtagaccgtcatgaagctactgctatgaatgaaccaccatctagcctaagcatatttgccaacattgactacactaagaaaggattcaccgtcgagtcactttctagga

SEQ ID NO: 168400 - DNA, 819 bp, Zea Mays
ggcatgtagaactagaagatgttggagaagttagctatcaacaatgtgttggatgtgggtggccttctctccctaatggacaagtgcgcccaagccactgagggtcaagcgtggcatgcttcccatgctacccagttgtggttggtggatgccatccccatctagattgatgcctagaagaagaataaaagaaaggcctcgtggctctatgagaccatagctataagaaatgatgttatcccatgtagagataagtggcctcgcttggggaacaaaacagatagtcatgacttgacctagtgctaggtaattaaagacttggttgagcgtgtctagcaacaccctaaccagcggcatcatggcatgtagtcgtagaagaataaacacaacaatgagacctatgttgttaaggcccttctctagaggtagtaaggatgaccttgacttcaaggaacctgagcacaccatcaccatgatttataaagccaccaatgagttgtgctccaccacaccattaagcttctacaatacaaggcacatgtcacgattccatgcccccacaaatttgggcacctcagatgatttgaaactcctatcacctatgattgctccaattatcctcataacatggtagatataggaattcttcatcgtatggtacccctaccatcaacaacatatagttcagacatgtcttggttgatgatagggcagacctcaacattttgttgatgtacgccttcaataatatggatatatctcatgccaagcttttggttgcgtgccattcatagggtctccttgggtatgttcctcttt

SEQ ID NO: 168401 - DNA, 861 bp, Zea Mays
cttgaatttgcatttaagtggaattcaaaattcaaattcaaatgaattaggaataaagaagaaagcagaaaaaaggaaaaggaaaaattccctgcgcttgggccagcatttgaccacttcggcccatttctgattctcaccccgcgcggccttctactcaactttccccacggcgctgatgactgggcccctttgggcagtctcaggtggcacactctggttgatttccctcgcttccatgtgggtccagggagtcggattcatctgcttccctccaacaaactcagccgagcgcatatagatacgggattcaacgcttacgaccgattcttccgtgtcccaacaaacctggccgaaatattcgctaatcgagtgttagctaccacgatttctctcttagccgactactggaggggctaggtaagcagtactgttagcccaatctcaactaccgtggctgagatggtcacccgataatggtgccctggggcgcggacatggtgcggcttgtttataaactccgagcgccgcgaagcccgcccctccctcgtcgatctgctcggtcatccaccttctaactccacctccgcatagagtgccgctgcaggcagatcttagcagtcgccgcgcgagctagagcccctggctgtagcggccatccattcccatctccatcactctgcaatcagggattcagtcgcgataggtctgtgagatcacgacaaggcttctgtgggcatccgagggcaaggcgaagccgaattcctcatcggaaatcaagatttggggctgtgccgccatctcccgtgggcgtgcgccctcgcagcagctaggccggtgagtaaccttccacgatcctcg

SEQ ID NO: 168402 - DNA, 518 bp, Zea Mays
gccgaaggtccgccacctcagcgctccgttgggcgaggcgctcattggcctcggtaagcgcggcccgctgggatcgcagtgactcccaaacgttgctttcatggtggatgaatagcgacttggctgtgctcacgtccgcaagctcctgaggaaggaaaacaaggtgtcacaaagaacgccctggtcacgcaaggtgtacgtctaaatccttacctggaaaaccctgggaacgtccctggaaaggatttccatggtcgaccgaagcgacctcatcgccgcctcggtatactcacggaaactatcccgagacttctcctccaactcatcgttgagggagaggaggggctctgaggtgtcgcggctccagaaccggagcggctgcccacaccactcattgggattgagctgcgcaggggtaaggccgctgctccccagggaaggccacggttctgtgcgcccctccaccgaggcgtcgggtccccgtgcagtcgatgcatcgggtaccaccgtcgtcgacg

SEQ ID NO: 168403 - DNA, 1045 bp, Zea Mays
acaggaaccgaagcgccgccaggtatgtttccccgtcaccgtctcttccatgcacttactgctccgccaatgccaagtatgtttcccagtaagtgcttgagctcctgctttatttatacaatagagtaccgtagtttccttgctgcttaccgcagtttccttgttgctcacttgctagattccttaccagcaatcctatttctagtgaatcctattcatttgctctacaatggggaggaagagggtagctggtagaaaagctttttgtagtagtaggacagatgattccaacaatcctatttctagtgaattctcccctaccattgaagtccctgggtctcgacctgtttgtagtccctccttacgagtactaacagattgtggtggcactgagcctgtatctggttttagttccttttcattactagtactagtagatggtagtagaggggctgagtctggttctagttccttaccagcagatggggatattggtgttgatgtgccagtaaagggtgctaaaccatctgtttcttgggcagaatgctggaagcatatggataagcgggagattatcgaggatggtataaaaagttatattgctatatgtcactattgtaaaaatgagttgagtgcagattctgctggtggcactgggcatttgaatcgacacttcaaagcttgtttaaaaaaggcagggcaaacttttggtgcaggtatgcaaactcaactaaactttgctgcggacggcattgtaagtacttgggtttacaatccacaattagctcgtgaagaaattattgctcagtatcagaaacaacttgttgttcttaaagaaaattttaaaaaagttcagttttcgtttgctttaacttcagatatttggacttcatcacatcaaaagactagttacatttctgttgttgcacactatttggataattcatattgtcttcataagagtgttataggttttagagtgatgtatgattcacatactagtactgcaattgctaatcatattcttgaggtggttaatgatttt

SEQ ID NO: 168404 - DNA, 349 bp, Zea Mays
cggtgctgaagatttgggttacggtgagttagattcagctagggtggaatagcaccagggtacctttatgctatcctactgttaatcaatctccattgatgttttcgctggttgactattttgcacctccgcagtcagcaccatctttctctcgctagcagcctttgtcagatttgtttcatcgccttcgtgccttggagatcgactatattggtgcaagtggccataccaaggcccctgcttgtggagctatcgatatgctcccgtcgctcttgattttgtcaggattatttgggttgttgtaaaacctatcctaagcatggttgcatcaaaattcactcgtgcggtg

SEQ ID NO: 168405 - DNA, 928 bp, Zea Mays
gtgttgaagcacaacgtgggtgaggtttcgcgaagtggtagcaccgtcgtatggggatggagcggggtcatcttcgagtagaccggattggtaaacgagaactgttgtcctcgccgattgggacgagcataggtgagggggatctgcgaaatctttttgagggtgaggaattgagaataatgttgtttaattatagggagttgggtatcatcccaaaggttgagccgatgtagtatatggtgccctcgctatgtgtatgtaactggaacttgtattgtaatgtgacctgttggtcgtttgtcgcatgcttgtgctgatctggctgcacccgtaggcgacttttgtgcggagtgtcgattgacgtacttgttgcgcttacccggcggcacccttaggcgatttttgcacggagtatcttttcgatggcgcgcttattgtgcttgtccggctgcacccttgggcgtcttttgcgcggagtgtctttttagaaaagacttcgattaacgcacttgttgtgctattccggctgcacccgtaggcgacttttgcatggagtgtctttttgagaaaaagacttcgattgacacacttgttgtgctattccggctgcacccttaggcatcttttgcacggagtgtctttttaataaaagacttcgattaacgcacttgttgtgctgttccggctgcacccataggcgacttttgcacggtgtgtctttttgagaaaaagacttcgattgacgcacttgttgtgctattccggctgcacccttaggcgtcttttgcgcggagtgtcgcacgcgagggtagtctacgctacctatcgcggtgacttcggtgtggtcgaatgccgaagaccgtcgatgcggtctttttcgacacgttgcgtctgagttttgtttttgcgggggcttttgctggtatat

SEQ ID NO: 168406 - DNA, 1258 bp, Zea Mays
ccggagtggatgcgtttctttcttttaaaaccctcgaacagttgtaaataaagcatgccttttgaaaaatggtctcgacatcgaacacggtaaacaggggagggacctcggttgaaccccggttctctctccctatttcctccttttctcgtttccctttggtgactttcagaacaggaagcgtaccatgatccaattgagatgggacgaacgaacaacagactcgacagaagtaactagcaggaattcccattgcaaaaccaactatgttactttttctcttctataatcaaatgcttcgagtctttcctacccttcattcgaagagtcttacgcgaaacactacaccacaccgctctttcttcttcgggataccctagacgggaagggggcctcaggacaaacctcagggaaatcattgagcagggtgaattcacccctgtcttagctagaagtggacctatggggagggcaatgcgaacggagggacctgccggggaggctagtcgtgattgtgaacaactatgcctcgaaggctacgataatggtcgctagtggaaccgagggacatgaaaacttgcgacatatgttatttttagatggaatgtattatgcttttgggactagtgccacatatgatttctttttagagttgtccttcatttatatgaaaccacaagttaatactattggttagcgtgttcattgtattaatgcatactctaacaggatctcagttatatgaaccacaagttaatattgtcggttagagttgtccttcatttatatgaaaccacaagttaatactattccttattgcataaatcatgaaaacatccacaggtagcatgaccaggttacatacaaacaaccaccttcctacaactaattaacaagtggagtggctaagtaaccttaccacaatacttgggcaaacgcgactagctgcttggagtccttaggcgaaggcgaggaagatctccattggcggtagggagtggcggcggtgtctatgaacaggtgaagcagaggttctctggaggcggcaacatggagaggtgaagcacgaggttctctagccatatatatagggcacatatcagtataaaatctttctccacactggttctaaagttctttttaagtaccagttggtaaattaaaccagtactaaatcctttacattagtactggttgcagctaccaaccggtactaaagcttcttgtgctcgaaccaaaagattagaccattattagg

SEQ ID NO: 168407 - DNA, 533 bp, Zea Mays
ctaacaaaactagtatacattgaaaaaaggattaactgtgtacatgccactcaacttttacaaaattagacgggtagttcattttgatgccatggagtggcatgaaaatgaactagttttcaaaaatttcaaaaaattgagtggcatgtttccaactaacccttaggctgtccgcagtgggcagctagaaaagctcccctaagttttacagttggctgaagtcctgcaatggtttaccctacgcctcactctacactctctctaactcttccaacgccgaatgcatcactctcacctgcgctaaaccagggacggaggcagttggatgcgggaccgaagcagaggtgggcccagggcaggacgacacagttggatgcgggtggggatacgaaagtatggtaaaaatatgatataatatgtagtagttggtataaggtagatatatagggttgttggtgacttgttctcaaatactgcgaatcaagaacaaggcaacacaattgttaagcattaaggaccttcgtcctccgaag

SEQ ID NO: 168408 - DNA, 537 bp, Zea Mays
gctttgttccaggcagactggtagagggtactgtactcgactggccgggtaggacagtaacttatgacatgcatgttggctttcgcagtaaagctagcatacgagtctggttggcgctgtgaaattattgcgtgtctccgccacggcgtacgtgcaataaatttctatatattaaagcagggaggaatggcgagctctgaagatatccacgtcacctctagaattttcagtcgttcgattagatttgaacgacgtctagaacctctctgcgcgtgtcgccacagaaacggtccctgaacagccacgcgatggttcgcgacggcaaacgaaggccagggaagagggaaaaaaaagaacagtccatgaaagcgccggtagatatcccctcctcccctagctgagtaagagtaaccacgccgcagcgcccccgtctggccgtctccacagccacgagtccaccgcgtccatcctgttccggctcctcgctccaccgctccgacctccgagtctcgctgtctccgcgaccgtgagtcttcg

SEQ ID NO: 168409 - DNA, 381 bp, Zea Mays
gcggtagcgacaggaagtgccacaagcaagcacagcttccatgtcggcaggtgtaggcctgctgcttgtcgtcgttgtcccggatcgttccgggcagcacagagcctgcacggcagcaggatcagcattagaagctggggtatatgcgacatcgctttggctttcgggatgtgctgtggggcgacaggatggatcgtatagtgggttgcttagttgcttaatgatcatacatgcagccaagttaagccttcaacctgagtactagtatctactaatccagtcggtcaacgcgcgtttgttgggttctttaactcagtgttgtcgttttcattccaagcgtcagaattacctacccacgcaccgtgtaaagagggcaagcaa

SEQ ID NO: 168410 - DNA, 575 bp, Zea Mays
ggtgagcttcacctgagcttggcgcaccgggaacccgcagtggtttcccctttcctcaactccactgccaggtccgcgctcaacctctcccctgcgcaggtcggagctcgccgccgctgcgattcttcgacgtccggccaaccagagccccctcacgccatgccaaggtgccccaagcgccgtctctgggtaagtgacctttccctatctctcttgtgtgccaattccgcttaaccgtgggaaatttcggctcgctagagtcgcccctcgtcggcgccgcgtcttcatggtgtccggccacttcaacccctccccgatcctgaactcaggcctaaagcacccccaccctctccccggagcctacgtcggccgaagagcgtcagattaactcccaccacgacgggtattgctcgccggagtagccttgggtttgcccgagggtccccctccgccgtctacccatcccagtcccgtgctcgccacccaaacctcgtcatagtgcttgtcgagttctccacaaccactccggctacctagaccaacccccagtgccctagaagctccagtctgcctcg

SEQ ID NO: 168411 - DNA, 688 bp, Zea Mays
ctaacggtatttcccgcccagagatggttactgaagcaaattgacaaaattagatgagggtttctttggaaaggcgaggaaccaaaagtaatgagtggtggcatttgccttgtgaactggccaacggtttcacgccctaaaaatattggtggtcttggagtggtagacctggaacgttttgctcgagctcttcgaatccgttggatgtggttccaatggagagaccgggacatggcctggacggggcttgacacccatgtaccaaagaagatagagacttttttcatgcttcaacttcagtgacagttggcaatgggacccttgcttctttctggttctccaattggattactggcacgacggcgcgtctcattgcccccaatctcttcattaaggcaaagcgcaaaaacattaaggtacaaaaggccctgctcgacaatacatggatttctcttatttctctggtttctggggaaactgaaataattgaatttgtgagactttgggaagccatccatgaagtccatataaatattgaggaagtagacaaaatcatatggcgaatactctaccaagagtgcttacctggctcagttccacgggagttttgccaagctcaaactttctccagtttggaaggcgaagacggagcctaaatgtcggttctttgcatggaccctcctccata

SEQ ID NO: 168412 - DNA, 423 bp, Zea Mays
ggagagtgcgtaatgatgctggtgaatctttgacgggactatggtcttattaccactgtatgcctgtaaccctgcgcggggtaggtatgtgcattgaatgtggcagtaccccattagccttcgggcttgctttgtccttatcatctgagattggttcgggtgaggcggacatggcggtcctagggcgagggtgcctcgggcgaggcagagaccctcctgagcatgtgacctactcgagactaggctcgggcgagtcggagattttgggaggccctcgtggggagctcggtcgggacggagtttgtggggatggccctcgacacggacctcgggtgagccggagtttgtgaggatggccctcgacatggacctcggtcgggtgtgtactttaagggtgtctctacgattttaagcgcgttttta

SEQ ID NO: 168413 - DNA, 843 bp, Zea Mays
cgcccaagacctcgctcgatggtcgctcaaaacactgcctcgcccgagcctgtcctcgggcaaaggcaacactcgggtcgagaaaatccttgtctcaaccaaggtcccctctttcacggaataaagtttctacctcgcccgagcccatctaagataggaggacagccccgaacacagcctcagtcaaaggtcacgggaaccgtggagacatgtgcatttaatgtgaatacctaccccacgtgacgtttgagtcaaatagggaccaatggatcgtggtcccatacgcattcaccaactacgatgacgcatgaccgggaataacggccactccccccccacgccgactattgtgctcaaacaactccggatgtgatgtgcgcacgtcagagcatggtctcaccttcgggagggaacttcacctcgcctgaagtcagcctcggctcgaagaaactctgcctcgcctgagctcagcttcggccgaccgcctcgacaacaactcctcccgaatcctataggaggccactctgaaaactatgctaaccctccctgtacgattgcatgccccatggaaggctcgaccaaggcctcaggaggaacctctgtctcgcccgtgccgagcctcgacctagataacatcgaccaaaggatgccaccaactcctccatgaaggctactgacgacgggatggctacagaacagatgtcaagtctcctttatgccatacagaaagaattactatgcacttttcaccatacttatcactatttcaacaactacgactcggacaacacctccatcatacaagcccgggtacacatccgagcctcagatcctagcctcggc

SEQ ID NO: 168414 - DNA, 358 bp, Zea Mays
ataggatcctcatccatgtgatcctgtaccaggagaagatgaataagatttttagaaaatgctctatgcgcgtctgtttctaacctccatgatggatcttcttccatccaagtcttacgacgctacatcttagcgtatatgttgccactttttgagctcttcctccaccaataatcgacaaccccgtacgtacaccatcaacgacacccacctttgtcatcaccacactatcattgaatgagccaacacaagccttcatgagtgtctgatatcaccaggggccactccaagctagttgggaccttgctcaacgcaaatgggatcctcgaccctactccttagagtacatcaacatcac

SEQ ID NO: 168415 - DNA, 774 bp, Zea Mays
aactttggtgcagaaggatgatgatgttgccatggaaaatttggagaaaacctgccctaaacctcggctgtcaggctaactgaaaaagcttccaatggtacagtaccaaaatatcaacagaagcagatccccctcgccaccggtgacctcgcgcgtagattcgcgccgatgaggtgattcgtgcccacttaagcctggataacgccgcggggtaaaaagatcgtcactactgttgggctatgtgtactaattcggctagccgccgtgctcctttctgctttgtgacccgtccggataagtcaccggagttggctgcccgtcgaccgaacgccacgtgcctcaacaattaccacgtcgcaatcaccagtgttatgcacgtccgatgatcgctagggaggccgccaaggtgaaggccacgaatcaccatgcccgtgacttatttcttctctgaccgccaccacgctcaatccaagttcactagccaccgcttagcaatcctataaattgatggccgagtctgttgtgtgatgttatcacgaagccaaagcacccagtcccaccttcaattagtcactatagccgtagaatttctttcttcccccaattctgtcgactacaccgccgtgaaccgcctcctcgtggttagctgctcccaggtccgccctcgctcttgttgctcgtgttttagcgccctcacgtgctcgtgattgttatccacgcaacccagggagcttgaccttacgtatgcaaccggaacatcttgatcggtgctcg

SEQ ID NO: 168416 - DNA, 613 bp, Zea Mays
aagggagaatttcattggaacaaggaagctactacagcttttaatgcactgaagacagctatgagcactactccggtgttggcattaccagatttcagtctaccatttgttgtggaaactgatgcatgtgatgagggattaggagcagttttgatgcaacaagggaggcccatagcattctgagtaaagctctgggaataaagaaccaacagctatctatctatgagaaggaatttcttgctctcataatggctgtggacaaatggagaccatatttgcaaagaactgagttcgagattaggactgatcacaaggctctcagttttttgggggatcaagagttacattctgagttgcagaggaaagcaatgaccaagttgatgggtctgcaattttgagtggtctataagcagggcaaggacaacgtagtggctgatgcgttgtctagaatggctcatgtgatggccatgacttcggttagtgaagtacaaccaatgtggattcaagaagtgttgaactcgtgcactacagacaacgaggcacaagaatggttagccaagttaagcattcaaagtccagacgaaatgggatatcggttgcagtggggattgat

SEQ ID NO: 168417 - DNA, 426 bp, Zea Mays
gtggcttttgtcctcactaaagaacaaacaaaatggtttccttagggatgcattgaacctgccattgaaccttcgacctccccttcccctctcggagcaggcggacggaacgtgtcgtgagaaggctgctgctaagagcttgcttgttgttggcctggttgaccctgagattgggttgtcttttcttcacactgcaccgggttaggaatgcttcagacatgccttgggtggaatcttcacttgaagcccctggcacctttggtgtatatgtgtaactcctcccttctttggcgaaagtagttgtctgctcttatgtactcatccatcttttgcgataacttttcaagagaaagcggaggcttccttacgaaatattgggttgttggtcctggcctgagccccttgaccatggcttcaatgacggtg

SEQ ID NO: 168418 - DNA, 442 bp, Zea Mays
ccttactaagttcaaccatctctctcaatatgccatagaacaagtcaatacaaacttaaagaagaagaactgtttcatgagaggtctgaatgataggctgcagtggaaaatggccacctgtttagatctcactttcaacaggcccatgagtacaacaatctcagtggaggcaaagaactcgggggcaagtgaagacaaaaaggtttggacgtgaaggaggtgagggatcctctcagggatccgaaaagcgatcaagtctagtgattcgttccttcaatccaaatcgttcttttttctcgcccatcctcctatccttttaagcagccgatcttcattcatccaactgtcgcccctactcaaaccattcagccgggtgcccctggtactcgttttccagccttacccagctcatctaacatttgcttcaactgtggaaagccta

SEQ ID NO: 168419 - DNA, 891 bp, Zea Mays
gttggtcggcagccccgcctcgctggttgctcggttggcaggttggtcggcagccccgcctcgctaggttgctaggcggacaggttggtcggcttggcgggccgtcacatggaggccttttggaccttcgcgccgagctgcttagcaggcagaccgggcggttagtgggccgtctttggaaggcctttgggtctttttgagtactgtgggggatggatatccccgggtccacgtctgagccacctagcaggagccctcctgaggcgtcttgtggtggaccggataaaggaaaccaacagaggtaaacatgttctaatacgaaagaggcacacgtccgagttagatgttacaagagcacgggtatgtcaagcggggttggttgcgcccacctgacaggctaaaccgtcggcgataactcgagcgcgagaacgtaagaattccccgagatcaaggaagattgttcgctataaatcaggagataagaaaaagggattgtgatcgtcatctgtacggagggctatccttggttgtgtatataaggccaggaggcaccccttccattttcatctcaccctcagtccaccattctcatagtccatagcttgtaaactcgcctcaataccaaaaaccatcataggacgtagggtattacgcctctcgagcgactcgaacctactcaagcttatgtgtttctcccatcgtgctaccgcatgaaccatcgagtcacaatcaacgacgtcgtcctacccaaaagcactgtgagggtaaccccggggtgtgcggtcgggtaacaaacaccgacagttgttgcgccaggtaggggtgcgtcgttgatcaacgccgactctatggccatcgtcttcaagagcatgatcaccttcagcacaggag

SEQ ID NO: 168420 - DNA, 653 bp, Zea Mays
gtcgggtccgtcagccgtagtagtggaagcaggctcgactggggtgaccgatggagttggctcgagagcaacccaatcagcatagtcgtgctcctcctccacaaagatggttttgtcccatctaatctagacctgcaagctcaaagacaggggatggacaaggtacagtctcatcgaatgtaacctcacaagtatccataatatggttagtctctatgttaagaacacgataagcatgagaatgtaatgcataacctagaaaaaccccatcagaagactgtgactcaaacatgtccagattaccctattttagcacaaagcatatgcagccaaataccctgaaatgactgaccttgggtggccatccaaatcgcagctcataagaagttttgttcagaaaatcccgaagaaagatgtgattggacacatggctagcagtgttgatcgcttcggcccaaaaacgcctaggagtcctatgctcatcaagcatcatcctggccatctcaacaagggtccgatttttgtgttcaacaataccattctactggggcacatacagagaggaaaattgatgctcgagtcccaaagaagcacaaaaggttgcaaattgagtatttttgaattctgtgccattgtcactgcgtataactctc

SEQ ID NO: 168421 - DNA, 342 bp, Zea Mays
aaagaagcttttgaagaccactacttcatcctttcctggctttggagtaatctcctccccgccaaaacgaaccaattccttctttgcttcactaaaatatcccaaattcatcagcttagacatatcaccttaggaaatggtggatttcccaaactccaggtggctgggtttagttggcacggcgttgtaatcatcttcagattcaattttcttagcatcagcctgctcggcttcagtggcaggtgcatcctccaatactactagccctgaacgcttcatcacttcagagattggagcggtttcggcaccttcggcttcctctccgtcgcgagtaaccctagc

SEQ ID NO: 168422 - DNA, 475 bp, Zea Mays
aggtagcactgcctccgaactatagaccatgaagaaaggagtatttccatgcagagctcgactaggttgagttcttaagctccaaaccacatacggcaactctctaatccattttcctgcaaacttttcattcttgtcaaagactttcttccttagtgcttccagtatcattccattagccctttctacctgaccgttagcccttggatgtgatactgatgcatatttaatctggatgcttcattgttcacagaaatcaaagaattcagagctagtgaaattggatcctaggtcggttatgatgctattcggtatcccaaacctgaatattatatcttgtatgaactccactgccttggctgaagtcaaagaagctatgggtttgtattctatccatttggtgaatttgtcaatggcgaccaacacgtgagtgtatcctccctgagctttcttgaagggtccaatcatgtccaat

SEQ ID NO: 168423 - DNA, 788 bp, Zea Mays
tttgtttctgcccttgttcaaacgcctgctggtcgaccaaacgtgcaaatcttgccaaaaatcatgtgtagagtctcttcactatgccaagggctatctgtcttatgtgagttccaagtgaagatatggtcgggtgtggaagatatggtggcaccaagtcaggtctgactgaaatgttcagcccaagacaaaaccgatgtcaattcatgtcaaacggttttggtttgagttcaaattttaccagagtgttcctagggtattttggcgctcctttgtcaattggaccatgttgatttggagtttgcaactaagtgaacacatgtgatctttagaagagggctgaaatagactttgtgggacctttcttttgtgcttccgatatgtgtgatcattttggggattttgtgggacctttttgggaaaaactccttactatttcttgtaagtatttaaatatgctacaactttggtgaatgggtcaagtcatgatttggtgatttatatagttctaccactaatcctttcttgttgctataatagcttaaggagggtagtcctagggtttgagcatttttctcaattgggagtgcatgaaaagggctaggatatgccttctagtatgatcaacacttggttaagacattgctccttaaattttgtgcctctttctcaaactaaaacacaagtgataataggtcacaggtgtatgtgttgagcaaaggccctgagtaacacatggggtgttacatcgttgctgtcgatgggcactccggacaatacggttgtgc

SEQ ID NO: 168424 - DNA, 724 bp, Zea Mays
aagaatgaacttgaatcacttttatacccctgagataccaaaaacccccattggaaccctagaaaaccctaaatccaaaccctaggggcctatgtgcaaaaacagtgcacatttggactaaagtataaaaactataatgttaaagcatataaagtcacatggttcacatttgggaagatttacaagccaaaccctaagttttggggctaattgcaaaaagtaccacttgacctctatatagcctaagtctgaaatcagtgtgattgcttcaactttgagcctttgtatctttcaaattctagggtttttgccctagggaaccacatcaaagttgtagaccaatcataggagaacaattttgcttaatagtgtgagctcagttgttgtgaagaatttggagataatcaccctcaaagtcaggctgtcaggacatcttaagtctgaatttccagtaacagtgaaattaggcagactttgaacctgattttgagttggattcggtaactattttatggtaagctccatggcaaagttgaagattaactgtaggtctataactttggtacagagagctagcctggtcacctcacaaaatcaggagtaaatcgagctccaagatgctctgtcaggtcgactgactgaagaaacgccatggtacagtgctcggatgtggatcagactgccagcgttgtgtgctcaccgccggcgacctctctgcgcgaag

SEQ ID NO: 168425 - DNA, 1109 bp, Zea Mays
ctcgatgcatgcccagttcataaagagcggactacgcgctgcgcacgccgtgcgcatgacacgcgtttagtccgccaccacctgttgagtggcgtgagttcagaaggtcatgtttagacttagcatcttttaaatactgcaataaaaaacagaaaagctgcactgtctttcgcagcaccaatccacttccactctccacgttcatgtcttgccagagctcgacattggcgttcactgtgctcagcgccggtttactctcatccatttggtcctcatggtttgggcgtgtttgtaaagccagagttgttgcgtcgttgggatgtgatgtggctcggcaacaatgacacaatatgcctgttcttgctagtgacaatgtggttgctatgggtgagggatcggcaaccttggtttgagctgaggttcatcgttggaagtcagagctgctcttcacttacatgtggagcttggcaacgacgaccggtggactccgttagtgtgaccctgctaaacttggtgtgcatgccggttcgcttttcattaaaattagtactgccagcccctaaccataatatgtgccttgaatggacacaaacatcaattaaaacactaacaatttactgattatttcagtggcgctcttgtacaaatgtcccatatttattttttcttgactgaacgattgttattcttttggaagtttctatgagtcaagtaaaaattaaatatgggacatttgtaccctccgacagaggtatggaataccattagcaattaccctccgacaaggctcccggtccggatggttttaggggtcaatctataaagtttgttggcctattattaaggatgatattatgcctgcagtggctgctatttggaggaaagattttagaaatctcagatttcttaatacagcctttattgctcttttgcctaagcaggatggagctgtttttgctaaggattttagatctattagcctcattcatagttttgccaagctacttaccaaggtgcttgctaacaggctacaaaattacatggagaaactgatatccaaaaaagtgctttcatcaaagggcgcttcatcctagataatttcatgctgg

SEQ ID NO: 168426 - DNA, 772 bp, Zea Mays
cctagccccttagggtcttcagtatatatgcttcatctctaggaccatgttgttaacagtacaagattcagagccctcccttctatcctgttgctgcatgtcttgtactggaaattttttatgaccagcagggacctgatcataaggaggtttgcctgggatgaaggaagtagatggcgaccacacgctcatgatagggttacttgaagcatttaaggatgaaggttgaaacagccttgccttgtgtggttggggctgaacgtactatggaacataaggtgaacaacatgaagatgtactaaacacctcctttggctaagagggttgagtagctggcaaagcaatctctttctacttgttgatagtgtggtgacaggttcttgttgtgtggcctttatcctcactacaaaacggcttccttggaggcacatggaacctgccaaccaagcttgttcctccacttcctcctctcgcagctggcaggcggaaaacgctctgaaagggctgctgctgagaacatgcttgctactggcctgactgcccgtgagactgggtcgtcttttctttgccctgtgctgggttgtgaatgctttggacatatctaggatggaatcttcctccaaagcccctgacggctttgttgttcttgtgcatttcttcccttctttagcagaaaacattatcagcccttatgtactcattcatcttttgcagcaacttctcaagggagtgcggaggtttcctagtgaagtaatgagctattgtgcctagc

SEQ ID NO: 168427 - DNA, 699 bp, Zea Mays
tatccgtagcctgcgtagtatcggcgtgcagcggaagcttcactggcaacgtacgagtgatgatgagcacaatgcatgccgtagcacgggcgtactgcctgccaccggagcggatgggcacgccgcctgcaggatggcctggtcgccggccgtcagcaggtcgaacagggcacattaaatgctgaggcggcacatcgcttgtcagtggagtagacagggcgtatttaatgctgaggcggcacatcacctgccagcttgacaggcggcatgcctcctccgcaataaatgcgcggcctagaggccttacgtctggctctgcccactggcttacgtcacaggaagtaggctgtgtggcagcatcgggtctccacctgagcggggagtgggagcgctcgcggtatggtccggacacgtgttagcaccgtacccccgcctggccttgattaaggcctgggtattcttttccttggagtcccgggaccctactatgagtggtccggaccctcctgaggggtccgggacccgtcctagggatctggtttgtacctgtggaggttttgaatcccgccaggaagtccggtctgtgtatctaggggttcgacacttcccgtaggggtctggacccaccgttgacaccgtaggggtccgacacttcccggagctacccacgtggtggggttgggcgttgtttgccgcacg

SEQ ID NO: 168428 - DNA, 437 bp, Zea Mays
cgcactgacgcacactggtgttccggatactttggatggtggggttcagctactacagagatgacgaagggcggcgaccactgctttttatttgcagggttggttcctgtgtgctggatggagggagcagagaccaaactaactaacctgcctttgccgtaaaagcctccaataattgagggggggcatccaatccaatccaatccaacccctcttttcattcttttggccagccaaagcccatgacgagaggagcccctgccccaccacacacacacgctatgtacgatggctgatgagccgatcgccgtcactgtcgccacactcacctgtttattaacctctgctactgagtaatggctgtccttgtcgtcctgtcctgtcctgccaatcaagctaagggtagagatgcatacttggccggatagcgccaccgc

SEQ ID NO: 168429 - DNA, 520 bp, Zea Mays
gcacgtactgcgcgtggggcaaagctttgccctgaaggcacatcgtctcaactcaaagatgaggtcgagctcgtttgacttgctgtccaatatacgtatgagtagtcgcccacgcatgcaaggctccccgatacctttcggtcttccattgacgtcccgccgtgtaccatcgctctggcccacgatctcggatcggacgacgcatctgcaattgcaaccaacgagagtgcgcgcgagatcgtctcctccctccgattccatgcgtgcgtgcacttcctctctacgctagctcagcgaggaccacgagtagatgggacggtcctcctcctccctcctctcatccgattcattattccgctctggcacgcgccttccatcatctgcagacatgatcgacagaggagaggagggcggagcaacgtgctagctagcttattctatcacagatatatgcatgcatggttggtacgtagcatcatgtatatacgagcattttttttactttagattttttttctag

SEQ ID NO: 168430 - DNA, 546 bp, Zea Mays
aaatatctaaacactttggatactattcttttgtgatgtggtcaaaagcattactttattgttgtgtagtaaattgaataggagctttgtggtttgtgctaggcctgaaaggtcaggccactctagttgattccttgcaatttagcaaagcgaaatatttttgcctttcatctgttgtgtatcacattattataacataatctgatcagcatccttgacataagccacaagtattatgttgtttagttgtgatgtctgatatagacctctacatatgcatctgcaatttgcctttcatgccttttatactgatcaagcactcttgggcaatggggctggggttaccatggtgtttctgtttaccttaacagtgtttggtgttggcacatgttgcacacacccaggcaaggaccatttcatgaagtcagaggctgggcaaaatggcaatgccaaactaagctcatctgccaatctctacaactgaagttaccccagcagtctactttctgtttggctaaaccaatggctgctttatacaaaagttgc

SEQ ID NO: 168431 - DNA, 452 bp, Zea Mays
caaccgttgtctaaatggctgaacagaagaagattgctgaccctgcattggccgggttttatgaagctatggagaagacaaatacagagaagattaccaatgagatgctggctggattatctgaagattccggcgatagtgaaagttttgacttagaaagtgtaaacaaaggtgccgaagatcggccctagcgatcgagtcataccatcttcgggaaatcaaccatcaaacagagtcaaattgatgcaatgaaaggaagatacttccgcgatatttctatcgtgagggctagaggagatagcaatgcccctgtgcccgaagcagacgaagttgttgtcaacatgagttttatgaaagtagggcttcgattccccctgaacaaatttttagttgaagttttgaagacttttgagatttaccttcatcagatcacccccaaagctatcattaga

SEQ ID NO: 168432 - DNA, 652 bp, Zea Mays
gacatgcatgcatccactgacctgcaacatggaatggagttatcattgttaaattcgcatagaatgaaagaagtattgtcagatttattgaactacatccagacagaacatatctctgaaaataaccaaacttacttgtcactgaaaattcttgtccttggcgtatttattctgtgcttttgccgcaccctgttctcttttcaaactcataaaatctgacgtagtttcttcaaaatggcactggctttgcatcgtttcttctctttgatctgcctctacttggtccagtcgtcccagatcttggactttcgttgttctcttgctcatcttcattgttgtctgaaagattaaatgttttaccatgatcttgttgcagttcagtccctagaccctgcctgccactttttaccaacctttgatgtgaggatcttttcttctgccgatcacgttgtacatgctaacgagaagaatgtttctccattccttgagtttgtatatatagtttcggttgtcccatccatgtgttctaggctcatcagatctcaatggatgaccttgttcctcaccatcagatgtcaaagcatgggatgctacattgtttggtactatccatggacttttcatagtgaagtctatacgtctgatcttatcc

SEQ ID NO: 168433 - DNA, 619 bp, Zea Mays
caagaacgagaagggaatgagcagacctggggaaggctggccgcggtgaggtgagttcacggtggcggagagtggatttggggggaattggaaattcgcgcgtgctggtggatgatcgagggtgggagcgggtgctatagcttcacggcgacatggcgcagttacgggcgaggtcaatttatagagccctcaagcggtggtggccaatttggtcgagcaacgctggcagtcggagatggggaagaacctggcgcggtgagttcgtggctaacggcgtggcaagctcaccggcgatgatttgacggctgtaagaagccacggcgacgcggtggaaagcaaagccacgcggcgcaaggccgggaggcggtggtcaccagcgaagcaatccgctccagccgcaaagcgggaggggcagccacagtgagtcaccggagttatccccagggggtggcttttacctggcgaccttatcgggttattggcaacgcgaatccaacagcggtggcgcgaatcacggcgaggggcaatcaacggcgacggccaccggcgacgagcaagggatgggatctttttcagtttaacacttactgtaccatggcgtcccatttcagttaacctg

SEQ ID NO: 168434 - DNA, 371 bp, Zea Mays
gatcattgaagattgatagtttgagttgataagaattgaatggactctctcaagcatcccaaggcttcatatcatctccttctcctgcaaagcttgtcaatcatattttggtacccatcgcttgatgggtccatcatggttagtcaacaaagatctaggaacccaaaagtcctttgtgttagcactaggtaaactcattacctttctagcacaagttgcaattttgggttgcctagttacatgagaatcaattgacaagttaggagtgggataatcaccaatgggacaatccttgcattgatgtcccttcttccggcatgtgtagcataggcgtttttcaagttttgaaactttcttctttccttgtttgt

SEQ ID NO: 168435 - DNA, 281 bp, Zea Mays
aaggcaactaattcatcatatgtgagaacgatgaattcttcatcgctatcactatcattgctataatcatagttttataccgttcgatcaccttttgccataagacatgagtgtgtagtggatgatggcagtgatggtggtagagaagaaaagtcaatagcaagtgcgaccatcttgtcttcatcgtcactagcgcatgaagatgagttacttgtgaagtcaatgttggtaagccaatcagcaacaatataggcataagcaggggcggatctccacccggg

SEQ ID NO: 168436 - DNA, 558 bp, Zea Mays
cacccttctccaagagtctagtcagaggcttagcaatgctggaaaaatttggtacgaagcgccgataatatccagcgagccccaagaaacttcggattttagatgcactagagggtctcttccactccaccacagccacaacattcttgggatcaaccgcaatgccctgttgattaatcacttgccccaggaaagccacttcggacagccaaaaggcacacttcttcaacttgccatagaactgattcttccttagggcacccagaatgagacggagatgctgctcatgctcggcctcgatctttgaataaaccagaatatcatccaggaacacgaccacaaagtcatctaggaattgatgcaacatcctattcattgcttccataaaagcagcaggggcattagttaagccaaaagacatgactatgaactcataatgcccatacctggtgcaaaaagcgatcttctcaatatcctcctcacgaatcctcaattgatgataacccgagttcaaatcaattttggagaacacctgggcacccctcaactgttcaaaga

SEQ ID NO: 168437 - DNA, 770 bp, Zea Mays
acttcacgaaaattcacccacactatgttttccgaccacccttcaccgcctacacccggtactcgcacgaggaacatccccagcaccctctgccgcagctacatccaacgcaacaaaataatccaagccttcatccgaggactcctccgtccatggaaatgagctctcagattcaccatcagactcaaaacattcagacacagaaccaaacaaactatcatcggtaggcgctacggtcgaagtctccaccgcaaaatcagtattgccagtagcggttgcttgcgcgggcccaaacgtcggaacctgcgcagcaccgagattcagtatcacacagacaaaagtttacacttacaatccctaacccctattccgccacctacgaaggcccggccaccgccgcagggtcttcggcagctggttcgaccaccgccttcggggcatcctcacccgtcgtcgtaggggctggcgcggggtcttctccagctccagtcggcgcgggggtcgccgaggggccctcacccgcatcggacggcggcgccagctccacccttgaggcctccggcagcgtgccctcgggcagcatgctgtctagatcgccaagatcctccacatcctcgtcatgcgccatctgcagcaataacacagtcattcagcaaaaaccacacacccacacatataaccacacaaagtaagactttacctgatccattgcacggtcagacctctcccggaccgtcttttggccgtgaggaccccacatcctgtcgaag

SEQ ID NO: 168438 - DNA, 1387 bp, Zea Mays
ccgggaagaaggaagaaaaaaaaggtaggtcgtttcttgtccaaggtccacatacaacctacctgtgttgatctgtttgtgagatcaggaacctgcagcaaggatggaagtcgcccctcttgccaagccgatggcccatccatctgctccctttatataggagcaagtcttaaagaaatggagctcatgcactctgatgacctaatctatgtgtgaacagtaactggagatagatgatacctctctctctccagacttctcagttcccaaggaaaaagctagctaatccttgcaggatcagtacatacatattgcagacatggcccttctgttgtagtacttctctaatcctagtactgaccagaccaagacctcaaatcaaacgaagaaaaatttacccagaagccagacttgcaagatcgagagcgccaaaaaaaaaacaagagaacaacaagttctgatttttccaaagaaaagagagaagcagctaaaaacagtcttttgaactcaacaagctagcccaaaaaaagaggcagaaaactgattacctggccgagcgaaagcgccgacgaggacccatacgccgcggcgctgttccggacgatcatcggcggcatgtgcctcgccgggatcatcatttctccctctcagaacctctcgaaccctaattcctgccgcctcagtagcttctttccatttgttcactggcacatgcgtagtatctatctcccgcctcacggacaaagaacaggcggcgccaatcctattcctatatggagatgtataccttgcctgccaagtaacaacacgaccaacaacagatctagcgatcgacaaggtagcccagacaaccttcgctgcgagctgacgactggcagtgagatctagcagaagagctacatatgttcgtgtgcctatgcaaaaatagaactccgatcgatctctggctgcatgcagctctcaaggcgtgcgtgcagcaaaaactttgcaagctcagaagggtagctagcaggaggtggcgagataagccgggaggagactagcttgagaagctataggcggccatggaaggggaggcgaggaggaggaggaagaggaggagaggaaaggggaacgggcggaggtggaagagaatgtggagaagggaggaaggagttattgcgaacgagttgaggtggtgcaatccacatttatgagagggcgtatcgtaattgctagccaggagagagagagagagagcgagcgagcgagcgagagagagcgagacgggtgcataatttccatttttttattatttctatttctacaacattggtatagtactacttggagaaacatgcacaatgtcaatacgtcatatgtgttttgtatttatcggacgtcgtca

SEQ ID NO: 168439 - DNA, 1001 bp, Zea Mays
cgaggggggagtggccgcgggtgtgggccgggaattggcccagccagggggggagaaaggtttctccttttttatttttattttccaatttctatttctatttttatatccttttcttttgaacaattaattaactagataatcttaggtgctaaaaatataatctaagtgaggtgcttctaatcaaacaaagtgtatgcatatgatgagaaaacctagggaagattagggagagataaataggggggttagattagggttccaaacctcgggttggaaatctgggatgttacaaacctaccccacttaaaggaatctcgccctcgagattcagacggggctcaagaaaaggtaagggtattccctcctcagagagtcctcactttcccaggtagcttcctcttctccttctctgctccactgaactttacaaagtcttacttctgagttgcgggtctttcagactgctgagtcaagaatctttattggcttttcccggtactggagatctttttgaatctgaattgtctctgcctcaatgtggttttctggtacttgcaggcacttatggagctgggacacatgaaacacattgtgaatatctgacatggattctggtaattcaaggcggtatgctgcgggtcccactctgccaatgacgggataggggccgacgaatcgcggtgctagctttcctttcatttggaaccttttgaccccacgcatcggggagaccttgaggtatatgaagtctccttcctcaaatctgagttctctccgtctattgtctgcataacttttctgtcgactctgagcttcaagtaacctcttgcggatcagggcaactttctcttcggcctctttaaaaaggcgggtccttccagtgtcctttcccctacattggaccacattaggggggtctggcactttcgtccatacaatgcttcgaacggtgacatcttgatactggcctgatggctgttgttatatgagaattcggc

SEQ ID NO: 168440 - DNA, 387 bp, Zea Mays
agtggtcagctatcgctctaaatggccgacgggctagaaatctgaatggttttatgttaagattgatgagaaaaaggagaagctagtacagagcccgctggagttaaccttcgggctgactaggcctcagtgcaacatgacgtcgggggcaccatgcccagatgctgtgtataagtttagagttgtatctgaacacattggaactagggattgagttcaagaatacctagccaatcgagtattcccaacactgagggatggggtatgccgaagcttgaaaaagagaagaagaagaatgaactggttcggctgccatatcatttcaaattcaagaaacacttcaaagaaccctgccaagaatggttgaatacaattgaagttatgtgc

SEQ ID NO: 168441 - DNA, 474 bp, Zea Mays
tccctaataactaatcataaccaaaacacaacttatcatggactaaacggtcttttactctttaagtcggtcctgcccttcgtctcaaggttttgtcatgctgaagctccctggattgtagcttcggcttgtaccctcgtgttgtgtcagttcgcatatcacactgctgaaggtgtttttgcttggaggaccttcggtgaagaagaagacccccaacaggtaggccatttggtcctagggcatggaccatccatgagtgcgcagaaaggagcagtttgcccataatggctagttttgtttgggggctataaatagtagttgtgcttgtgtgagacacctatcttggccattctaagcacacattgagcacacttgagtcttccaaatattctcattcacaatcttagcttgggattacattctagtgagtgattgagtgattctagtgcgttgcatcatcgagttgatcttgat

SEQ ID NO: 168442 - DNA, 693 bp, Zea Mays
gattttataattctctggacggggcctcaatttccagaaaacgcaggggctacggtgcaagactccacagactcagtgaatagcgccccgggacggcgggttggtttattagaaatccaggggcttttatgcaaaacgctcagcgcgaaggggtatgatggattcgtggccgcaggatagaaatcggacggcccaaattaaaagtcggcatcataactgaatcggtacgcgatgtccgcaggatcaaagatccacggtggtaaacccccctgggcgaaacactatgccccggatggatccagcccgatcatcagtcgatcaacggcccacggtgactctctcccagatctaaacccatccctacatcctgaatccaacggaccagatgactctgttctctaccgacgccagagcgtgacggcgccgcccacacgcgcggcggggccatcgccggagtacgccaaatcgaggccacgatgctccccgcacgcaacaaggccctgattcacaatgaggagggtgattagaatacgatggagctactcaccgcagctggagggcaatggagggagctggccacggagaagagcggacccgcggcggacttcagtcttcggtgagcaatcgccgcggcttgggacgagcttccttcacacggactccactatcagcttccccggactcaggcgcgcg

SEQ ID NO: 168443 - DNA, 373 bp, Zea Mays
ttcatcactagatgacatggtgacgatcctccctgtccttgtccttagtgaagggaatagaagaagtgagggatgtaaggactaatgggttggtgagtctggtggcattagcaattgaaatgaggccaggagggcatgaggtcggaatggcctcatcagtgttttctgccaaaaactgattagatggagctgcctgctttgtcactctattctttaatggtttcttttcgtgcaggtatccgttggcttttcagtaagaattttttcataagactgagatactgtatatcagtatatgctcggacttagagctaaagatccagaaatgaggaagcaattcttcaagctttaccatgatacagttttgtaaaca

SEQ ID NO: 168444 - DNA, 440 bp, Zea Mays
gacaatgctcggcaactagtctagtgaggcccacacgttagttggagaaacgaggagagcaaacgcatgaatcgaccatcccagcgtgcatggcacaggatcagttcccccctgcggcccacatgtcattgagggcagcagatgtcatcgctgacgtcaggatgacacagggtgattttttattactttttcttcgacaaccggattgaacaataaataaaaaagagcatgagagaaggatcgtgggttggcttcctaggacttaggccgagcgacatggttggagtaggctaaacgtgaggcacatgcaggtgagttatctcttttgtttttttttgtttccttttattttcctttcttatttcaaatccaaatcaaaccaagtttaaatcctaaatttcaaatttatgcacaagcaaaactccagcatggggtgcaag

SEQ ID NO: 168445 - DNA, 294 bp, Zea Mays
ctacacgcgaaggtgaggtagtgggttcgattccaaccgatcacgtagtcatgagttttacacggaaatcgataggatactacggaccctagtctttagagcgccccagggcctagtggcctttagttcacttggtggatcttcatgagacttagagacgtagctattcctttaaagtaccttgatgtcaccctagtctttagagcgcccagggcctagtggcctttagttctcttggtggatcttcatgagacttagcgacgttgctattcctttaaagtaccttgatgtcaa

SEQ ID NO: 168446 - DNA, 322 bp, Zea Mays
ctcgagcttcgtgccattgttttctcggagagaccgagaacctggtgttctgctggtactttcactgttaacccgccattgctgacgcacatgcccaaaggagattgtcccgaagctctaattggctggagcaggggcatgggagcacggctgcacgggcatggactgacggacgtgatggtccaacggtttcctctttctcgaattgaaagatgcccccggcctgccaagagcaccactgcttcgctggaaaagggcacaatttcagacccctcgtggatgcagtttgacaggttagcaacaccacagggatgcccgcggt

SEQ ID NO: 168447 - DNA, 516 bp, Zea Mays
agttacgacatcataaacctgcgtaaaacttgcataaatggctgttacgcccacgatcagcgcgcccacgatcctataatgaagcggataatggatatgcaccgtgaatatcgcgtccacgataatggatatgcgcatgggcaaaaggaaatatgcataagcttccaaaaaaggtagacaatacgaatcatttgttagggcgtgcctggctgaagggcgtaatctgatctggaagatggcggcgccactgggtaaagagtcaatcagtgagcatacgacgccgacttcagttcatcgaacaaatccatgcttggatattgtaacaatggtgcaggaaggacaacaaggagggaaccggtttacctcggatgcaagtgcgcatatgcaaacagctactgccgtaggggcaattactccaccagtagctttgagggccccgggggttgatgatcagaccacatttgaggcatcgaggttgacagtaaatcaaggaggacagcaccttaatattatacg

SEQ ID NO: 168448 - DNA, 687 bp, Zea Mays
actgacaggaccatccgtccgaacgccttttgcagggcggattgcgaacaccgaccggattcatgtgttctttctcttgtgaagagaccgcaagagctgccgatgcacaggtgactagtggtagtagagtctggcagttgtctagtagaccgatctggccaaaacaggtgaggcggtggcagcatcgataacaggtggtgacgatacaagccgaatgaactcgccggagccatgattgcatgcatgaccgtggctaagcatgaaacgctgcgctgcatcctgcgactggtaccgtcagacaacggcgtcgcttgtccgatcgtactagttcatagcgactcgcacgcagcaacgacaggcacaaagtacttttgggcagtagcggcgcagcccagtgttgactcttgagcagttgaaccgccctcctggtaacggcacgccgctaccagcctaccaacaacttgtaagaaaaaaaaagcgtccccgcccaggtgggccaacaacttgtcgagagaagggagccatttccgacgcggccagccgctacctcctagacccctcatcatgtcacgtacggaacgcagtccaaatcttttcatcttgacgaaaggaacgcccattagtgtccaaaaaacaagcgacgcatcattatcgtatccatggccccgtcggcccgtcggattaaac

SEQ ID NO: 168449 - DNA, 1862 bp, Zea Mays
ctgctctactatctaccacggcgtagaggccgcccggttgtcgggagatgaccacgacaaacaccctaaatacgacaagggaaacgagggttttctagaggttcgggcagccaagatgtaataccctaagacctcctttggtggattggattgcaagagattggctacgtcctaatacagaaggctagttagagacaagagtgaaaatatgtggggtcgtctaagaagacaagccctagagtaacttgggcgtgttcggttctgttgtgttaaatctagttttcctccttaagggaggccccctctcccttttatagaccaagggagtgagggtcacatctggtaggtggggccaaccctggcgcatgtcccatgctgcatttatggaaaccatgctgatgtcagcctgatgtcctgtggaaatgtcagtggcgttgtaggtacatgccctacctgtaccggatatcccgagtgccatgtcgagcatgtgcctgtatgccgaaaacctagaacatggcaggaggagcaggctctacatgccaccacatgagacctgagagttgtatcgtacgtcacgaatgaccggggtggttagacatcgtgatgtataaagtagatgtcccatgatgtgatagaccatgacgagtatcgctcatgttgccatagtggtcgtgccagggcgcgccctatagcgtgcatgtcgccacagtgccacgctggcgccactccccagattactagggcctgacatccagagagtggacatgatgttaacacagttgcacttgccatgtcgaacaggagcattatgtcttctaactccaactccttgactgaccatggcatggacggctagccaggcggcgagtttgaagccctcccattgaccatggttgtcgcgggccccgagacacgtggcgtgtcgggagcccgacaagctagggtatgctggagcccggatgtagtggggccatgagccctgcttggtggtcagcgtaacggttgtctggaggagcccatcatgggatcgagagtccacctagaggggtctgggggcccaagagcagatgaagtaaggtgaaaaaggaccgctagggggtccggagcccttctcgaagggggcctgaggcccctagtgataccttgagaacaggtgaggtgcaagataatcagtacagtttggataccccgagtccacaagatagaattctccttgaggtggatgtggaaatttatttccatacttctcaattgcatctttgaaaactgtcacgtcatgaactgaacccagccaactagccacaacaaaagtaaacctcatatcaaaagcacatatagccaacacattttgagaagtgtacccatgtcttccagtatgttgaactactttgcttgtcggtaccacaacagggatatgtgtgccataaattgccccaatgtaattgtctgaggtatggtgcaaatctaggtaattgcagcctttgatagacacttataaacttaggatctaccggtctaatgatatctactaccagtttgctcacattgttgagaactttgtcgaatttcctactgcatctttcaagtgatctagtaaatcgatcttcatcttgtcttactgattgaggagcaccacaaatccataaaaacagacctaaagcctctattgatgacatccttttagtgcttttcagcctatttgaatccaccagcaagctatgtaatttttcaaacactatcctgctcatcctaaacatgttgtagcaactagttctgtttgctagtgttttcattacccatccatgaccagtttctactggaatcctataatctgctttgttcatgtaggtctcatagtgaaa

SEQ ID NO: 168450 - DNA, 702 bp, Zea Mays
ccaagtctgaagataatgcactatctgcggccttcgggagccgaaaaaagaaaaggctaaatagagtttttgatgctattggatttgtgtaccctgattatcgctacccgccacgggggcaaaaaagtaagggtgcaacttctgagaaggctactgcttcggctgctccaagcgagtccgcaccgaagaggaaaaaattgaaggtccttactcaccgaccgcgctacattgaaccagccatagtgcctgaatttgacggtgagacttcttcagctattgaagccaaaggacttgctcttacgcagaggattgaagagccggctgcaatgccgaagattgacaaaattgaagaatcgagaatcgaaggggcaaaaacattagaagttctaagcccttcggcaggagtggaggtaccgaagacacaaaaaggtctagcagcgacccccaagagaaaaaggatggctagtgtactagatgtgctggagacaataaaagcttcaagctctactccagggaaaattgccaaggcttcgaaagtgcagattgaaacccagacaaagctgaccgaagccgaagctacaatgagccaggacgacgtcgaagctgggccttcagagcccgccaaggagaaatccttggaaaccggagaaaaggcagcggaagaagaagctatagaacagattctgcctgaaaaagctgcca

SEQ ID NO: 168451 - DNA, 900 bp, Zea Mays
ggcaggcagaccatgcacagaatcggctgcatgcgtgcgtgattgcagtacggccactgcatgcacagcagcaggccgtgtgcagctgtctggagttcctttttttaatatgtatacaaggtcggcgtttgttcccagttttcctgtagtgttaggataaacccaaaacgaataattcatgtgaacggagggagtatataaatacctcacaagggctcaagagtcattcttcattacaatagcctcactgaatgggccctagttgagccgttaccagggttacagggccatcagatcctcaaaggcgaaggctaaactgcatcctggtccaagggccctccatcacatagcccttgaagttttcccaaaaggccctcggagtggctttagtcacgttctaggccctttgcttgtcccgtcccgtcatcttttgcatgtagcctttggctcgaaaggctttgctgttgtcgtcgaggtcgagcaaaggtcccatggagccttcgcggttggtcctagttgcgtctctttggggggcctttatttgcgagccaaccaccggaggtctcaactcccaaatatacctgcgtgactgatagggatggccgccaccgcgcctaaccagcagactctagaagcaaatgtatcttacaaagttattttgcaaaaaaagaagttttttttgcaacatgcatatacctctatcagttgaggctataagtggaagctgaagttaagcaaatagtttgaaatgacctttcatcatggttagcaacagcaagcgacaccaccatgcttgttttcccaacagcatatcgtattttgagtaatcaaatcaggagtactgggggcagcgagattgttgggatcactcaaaatctaagatttataacattcttgtcg

SEQ ID NO: 168452 - DNA, 537 bp, Zea Mays
aaaatatatcttcagatatataggcgagtttgatgagccaaacgatgagtggttgagtagtattgaggcaaccaatgacgaattgcttggggcctatacaagggtcaaagatgatgcaatgaccttggccttcgaaggtcgaggcaagaaaaggttgaatagagtttttgacgtcattggtttcgtatacccagattatagctatccctcacgaaagcagggaaagaaaagaaaagctgctacttcggccatttctgttgtgccgaagggcaaaaagatcaaggttttaacgcatcggcctagatacattgaaacgccatagtgacgaagcttggtgaagggacatcttccacttctgaggcagaacagcctgctcctgccagccccagggaagaactggctgaattgccgaaggttcctgcaactgggtcagtcaaaacaccaaaacatggtgccgaagccaaaggaaaggcggccaaagagccagagctaggggaaacggtagggctgccaaaaatcttgagcccgccagtggag

SEQ ID NO: 168453 - DNA, 769 bp, Zea Mays
tgcgccgaggtccctgggtttacaccgaatcaaacttcgcagatctacccttacgccactattcacttgagtcgctggcttttcacttaaccccctggatttctctccctctcacccgcagtccctcccttaactgaaacagtagccgcggaaaaagaaagggtggcgcggcttaccggcggcgagggcggtccggcgaggtggtcggtgatgttcaggaggtcgcgacggtcacgtcgatgtgcgggtcggcgtcagaggtggtcggagctcccctggccacgaacacaggcggcggggatcgacggcggcgcctgctccggccaaaccacggcgggagagttcaattaatgggcacgaggagcttcacgggatgacacagaggccatgcgctcaacgaatcgggaaatggtgaaggggtttacccggtccacgtgcgccggcgagttcttgaactccggtgagcgcgatttgacttctccggtgacgcgggccctcggttcaagcttgagcaaggctcacggtcttaccaggaagctacctggggcttgaatcgaacggagggggactggagaggggttggccactgcggtggttcttggtcggcactggcgggctgcggggaggtcgccggaggcaatggctggctcgggcgagtctggcgcaatacggaggaggtaacggggaaggcaaccgagcgccggggtgggttttataggcgcggacgcggccggggcgccggctcaaccgtttggcgcgacgcgggcac

SEQ ID NO: 168454 - DNA, 624 bp, Zea Mays
agccattaaacttttagtatcaaggtttctgaaggagggttcggatgtaacagagtggatgagtgttcctaagggcgcaattgtgtcgtcggtgcagtctcatcgcctaggctatcagtggtagttgggtaggttgtcgttttttataatggacgcaagttccagccttttgcactttcatactgtcggtgttttgaacctcgctttgacaagtaaatttactgtgcatgtttcgggctccaaaaggtgtgtgcggtgggcgcaagatttatactagttcaagcacaacgtccctagttacagtcatcggtagcttgcgctatcggcaccactgatgatcgaaactcatagtatgggttacaagtgggcgagaaagggaggagaggctcccaagtctcatattgaggtggaagtggaaccgtaagacaagggtaaaaccaaacgttcttatccgcggtaaagccacgcgtcctgtaataccccatttgtaatttgcaagagctaataccaaagggagaaacaagttcactttatctatgtgggagtttgaactttttgtgccatcacatgtgaacaccatattttaaaacagataattataaagtaaatgctactaaatcattg

SEQ ID NO: 168455 - DNA, 819 bp, Zea Mays
tctgacaacaatgatgcgcgagtcgatgaatacaataggatctggtgagatggatacaccaaatatattacaatcgcacgcaagttcaatgcttataagtatgtttatgatttgaattcactgacgatgatattgtgttcaggagaaatgaagatttgatgttaatgtaaagattttttatgttgtacacagctagattcgattgatcctagtttaattcctaggattggaatggtgttccgagatgttgatgatgcttatgttttctataaatgatatgcatatgaggtcgaatttcctttgaaaaggtataaggaaaagacaaactgcaaatggttgaattgctccagagaggggagatgtgcagaaagaaaacatggtaaccctagagtctggaacaaatacacaggtcgaacacagtgcaaagcaggaataaagcttaggagaatttatgatgatgaaaaaaagtgtcatatctgttaggattgatctagttaaccttgagcataatcatgattttgtaacccaaaaaactgaaaaacaacacctctgctgtaacaagatgcgtgatccggaatttatggaatttgtttgatcaatgcatgacagtagggtaccacaacactgtattgtggatatgatttcagatatgcatgatggcccataaaatgttcctattacgacacaagatttgaaaaacatgtaagagttgttacatcaaatctgagttttgttttcattgacggatggcattatcattttgatattagattgtgatgcaaaggaataatttgttttgtataatgatcaggaaacaac

SEQ ID NO: 168456 - DNA, 918 bp, Zea Mays
aagacactccgtgcaaaagacgcctaagggtgcagccggaataagcacaacaagtgcgtgagtcgaagtcttttcttaaaaagacactccgtgcaaaagacgcctaagggtgcagccggaatagcacaacaagtgcgtcaatcgaagtcttttcttaaaaagacactccgtgcaaaagacgcctaagggtgcagccggaatagcgaagttttctattaaaagacactccgcgcaaaagacgtctaaggttgcagccggacaagcacaataagcgcgccatcgaagtcttttccgaacagacactccgtgcaaaagtcgccttagggtgccgccggataagcgcaacaagcacgtcaatcgacactccgcgtaaaaagtcgcctacgggtgcagccggatcagcacaggcatgcgaaaacggccaacatgccacattacaatacaagttgcagttacatacacacagcgagggcaccttatactacatcggctcaaccttcgggatgatacccagttccctataattaaacaacattattctcaattcctcaccctcaaatagatttcacagatccccctcacctatgctcgtcccaatcagcggggacaacggttctcgtttaccaatccggtccacacgaagacggtctcgctccatcccaatacgacggtgcctaccacttcgtgaaacctcacccacgctatgctttgacaccacccttcgccgcctgtacttggtcctcgcactaggaagatcagccgcctcgccaacctccacacgcggcgaggactccgccgcggccacatctaatgcagcaaaaaaaatccaagccttcatctgaggactcttcagtccaggaaaacgaactctcagactctccatcagactcaaaacactcagatccagaaccagacaaa

SEQ ID NO: 168457 - DNA, 840 bp, Zea Mays
gacatggcggggctaaagcagcagtccatctgctacgatgaccattgttgggaagtagaagctctattctctgggccacacaccggaggattgccaaccatgtcttccatatcgaaaagctcaaagtcacttcttaatttacacacaagctcgttctgactatattgggacactatatgttgggaatcatactctttgcaatactgattcacatgaaattcttgaagcctatgcttgacaaaacataaattgaaagtctgattttgctctgctgtaaccgaaacaacgaattgatttttttaattatatgtcttgcaaaggatgttgccaacttttgccgcatgttgcagtgagctgagcctcaaatgggagagtgggagacctctttaggctccaagggtgtgcatgagatagatgtgtggtccgagttccaaaatcccacgagtgacgtcgtctcttgtgcgacgttcaggagcagcttcagtgaagggagaaggatcttccagttgcaaatcagagcaggcacaaaacattgtaaatacgacaaacatgatgcatatcccagcctacaggtgagctcgcacaaaattttattttagaacttgggggatatacattgagatggacctgccagaacaactagcatatctaggaaacaccagccactgctgtcaattgagcagaagaaaaatagtaatatgttttttacttttaaagaacaaccattagctattatgacatgctattcattgagttccttttgcctgccctttacatataccatcatttacttacagcaaatgtctcaaaatggagaggctcaggacagctaggcctcat

SEQ ID NO: 168458 - DNA, 664 bp, Zea Mays
gacgaccatgagcgacgtgaatacgcccatcccaagctccaacgacgacacgtacacagtcgacatgatgaccgagaacaacaagaagcagagcctagtaacatcacaattgcggttggcaaggtcaaacatcgaagtgcctatcaaagttgacatctaaggacaacatggcgtccgaggcgcgagaagggcaacaacatggagcgtcgacttggcttacatgcgtgagaagatgcccgctatgaccttgctaaggaggtttgcttggtggcacgacatcgtcaccaccaccgatgcggctagcgagtctagctatagagtattggagtctcgaccgcgaactctcaccaatggttggcaacatgcacattttctccacgtgcatgtggataaaaactctatatggtgcggattagatgagagtttatatctgcgggcatggtgcgggtttgattctcaatctgaaaggtaaaattcacatcgttcagctggtgtgtcttcgtatgcatgattctcgtgaacctcacttcgcgttgatcaaacttatactttggtacatcaacgtactctacctcacggtctccatcttcatgcctcgttaacgaacaccttgacaatctatttgtgaagctgcccagactcatggcattctacttaaagtttc

SEQ ID NO: 168459 - DNA, 960 bp, Zea Mays
caacaaagtagcaactgcttagtaatgcttcgcttgaaggacaatagtggcgttgaggcacccatatccttcgtctgtgtaggtcttgtactcttgtagcagtctctttcttcttcctagagtacattttgaggagccagggaaggagtcccaagaatagcatcagcagaacagggggcggcatcaccaggtcaacagcggcaggctcatcaacaggacaaggatcgctctggacaagcgctgcggccggaactgtggcgccctcagatgtcacgctggccagaagagaaaccgtaccaaaggctcaacagcagcaggttcatcgacagggctcgggggtcgccctggacaatcactgtcgccggagccatggccaccaaaggagacgaatcaatagagacagtccctgtcacagccaaatcatcaccatttcttccccacacggcttcagacggagtctgggagactaccacacgtccatagccagagaggatgaaaggtgtgggggggcggtgccacctcggtcccgatgcgatgcttcggactttgagcccaaacggtcgaagattgatctccttccccgaggttcaccatcgtcttccctgcctccataatcatcactgccacgaggaggagagcgggaacggttacacctcctctgtcttgaaaaaccaccatctactctggaatcatgagaagggatcaaccgatcactcctcaacatcgagaaactaccgttaggttccacaattcaaaggtctgataaacaaggccaagccttccttcttcagtgctaactcccgtaggttccacaatccaaaggtctctggaagcaggggatggatgccgggtcaaagcactatccagaacaacgaaacacgtcaagatttcggagctccagggtaccaggatggacttcatggacccaaacactctgattcagaagctgctgaactgttg

SEQ ID NO: 168460 - DNA, 496 bp, Zea Mays
tcgttaggtcttgaattcggtctctgccaaagtagggcgccggtcatcgagtaaatcagccggtgtaagctcgccggagctcggcccagcgccgttcgccgtcggggactgcaagctgtgaagagatagaagtgcgagggccttttcgcaaatgtcagtgaccaagttaaatagtgtgcaggactcttccttagttattcaaaccgatgggggggtttctgcaaaactggtagtgcgggcgcgcgcaggcacgttttcaccactggatgggccgacttgggtcggttccggtccagcactgttcctgcctttttctttttccttttctatcagagctaaagaaattctagaaaattacagaaaaatgctaaaaatatcaaaccaattttgctaggcttctagttttctatagtatttaataaaaatagtttcatggtttttacttccaatagggaattttgggacatttaaaatagccaaaatccatacttctgga

SEQ ID NO: 168461 - DNA, 519 bp, Zea Mays
cgcgagcagggaaacttgttggcgaggtggaaagggctcgaacaaacgacgatgtacaacagcagggcgctcgatgaggtcgcagagaagcaggggagctccaggcgacggtgaatcggcagcagggcactgggtatacttcagcgcagtggcttcgtgggctcaagaatgactacgacaaaagaagaagagacaggcagggaatggtgttgtgcgctagacaggactacaggagaggagctggagccagtggcgcttatatagccacaaaggaggggctcgacgaacggcagcgttgaccgccgcttaatcaccaataaattaatgtccacgccataacgtcgggaggaaatgtcacgggaaacggtaatgggcgaggagaacgggaaatggccgagcgtgggtgtgcgctgcgtgcagctcgggcgacgtgtttcctttatgaagaaacggcgacaacgttcgctgtatttttatttttcaaacgtacagaatagtgacggctgagttatagtatag

SEQ ID NO: 168462 - DNA, 346 bp, Zea Mays
gtcgggtcgggccgggcggcccgaatgtacacctatagctaaaggtaatcgggtactctaaccaccgatagggagctggggcactggtggttgccatcagttcctgtcggtcgttgagcttttgctgccttctgttctcctgcgacccgtgtcctctgaagatgacgttgacctccccgtcgacacgcgggaatgctccaccccttcccccttcctgttgctgaggcatcctaggcttgccaggacctcctcgcggtgggggaggtggtagaggctagaacggtcggccattcccgacggaatgcttgaagtctctacagttccacagggtgtggcacatatcctg

SEQ ID NO: 168463 - DNA, 385 bp, Zea Mays
tggtattccaatgaaaattgaagcctatcttaggttgtccacttatccatgctagccatccaagtcttttcttgatctcgatgcatgtaaaagttaatgacatgtgaacaaccttttttagtgggggaagaacatgtggtctttggtgtgccatccacattagtagatgcttcgtacaaggtggttggttccatggttgcattccttcttctgccttcttgcttctctatgtagactcaagcttggtttccttgaggatcaaggactcatgatgacataacatttggatgtactatcgtattttgaaggcaaaacctaggagggtttcaatgaattgactccatgatcacgaggacatgtcatcttaacatttcttgactttgag

SEQ ID NO: 168464 - DNA, 569 bp, Zea Mays
agaacgatcccgcccctctctctgttttcactccaatggcggcggcaaaatgcagcgcagaacagtggcggacgcgagggcaagaatgaggggaggaaagaacggcgcccgacttttaataccgttgctcgggctcccaaacgcacggtggggatagcgcggacgcggcagcgttctattacgccagcgcgcggctttcgcggggatgaagaccgaacgtgggaggcccacaagcagtgagtgaggggccgagaggtcacagttgtgcgggtccaccactcagtgagacgcgcgccccctttcctggcacccagcagctgatcaacggggcccgcttggcagcgagaccaagtttcttgccaagtgcgcgtgagagcgggatgacaagggtggcccacttgtcggcaccaccaccaggcggctggacgggccgcacggtgtgttttggttactgggccgaaatgaagaacttgagcccaggcgcaacagttcctgttttctttttctaatcttattttcctttcattttcccattcaaattagctccaaattcaaatccaaatgttttg

SEQ ID NO: 168465 - DNA, 956 bp, Zea Mays
cgggggatttaattcaagagcacatatccttcagggtgtggccacttgtggagagctgggatatgccaaaggaaactactgccgaatccagtgaaggtggcctggttcgattgaaatataccttcaggtttagagagaagtttgatgaatcaaatgatgactggttgaaatgtattgaagctaccagtgacgagctgcttggggcatattccaagcgcagccttcaagggtcggggcaagaaaagattgaatagggtatttgatgcaattggcttcgtataccctgattatcactacccactacaaaggcaaggaaataagaggaagattgccgctttggccaccacagctgtgtcgaagggcaaaaaagtgaaggttctgacccaccggccgcgatatattgaaccggtcgtagtgcctgaatttggggaagggacctcttcaactatcgaaacaaaacaagctgctccgattgcgcagagcgccgaagagccgattgtagtgccgaaggtgcctacagtcgggccagccgaagccaaagatggtgcggccgaagaaccaaaagtggaaaagatagtgaaaatgccagaaattctgagcccaccagcaagggcagaattgctgaaggtgcaaaaagctgctgccgcaactcccaagaggaggaggatggccagcatactagacgctgtcatggagaccacgaaggccttgacccttgcaactaccaagaaagctgccgaagttatcaacgtccaggccggagctgaagctagatcttcagtgtctattgagatgaaggctgccgcgcctgaggataaaactgagcaacaaacttcagataccggcatggtggtggggcaaggtataacagaagaagcaagatctcgtgcccccgaagcttcgtccgaagatgctgattacattattcgacatgcttcggggaaaaaattgtccaa

SEQ ID NO: 168466 - DNA, 837 bp, Zea Mays
attgttagacacaaaccaatgcaggctggtgatgaggatgatgactttatgccattatcgaagaagcgtaactttgatgacagtcctccaaaagtcttgaagaagatagttacaaagcggaggaaagtagtggatcccccccacaggttagaatagatggtcaatggcaatatatcattttctgcgtgaaattatgttgttttgagatttgatttaaacattgagttgcgattatgcggatgtaaatgtttacgctattcattgtatacattttttcagcagaggcttaatgtgagatgcaatccccaacacgttatagtaagcatccagattttaaatgacagacagcgccaagctattgcacggagggggttcaccagtattcttgatatgagagttgacgcacttggcaatagatctcatttagcttggctgatggaaaagcttgaccataatgacatgacaattcgagccggcccagggaaggagctcaaaattacaaaggagacggtgcaccttattttggggttaccaaatgctggtggaggaacgacattaggcattgatgaagctgttgctgcaaacaatttaagggctgaacttggtttatcaaaagaagaatttgcaacagttgcagctcttcaagatcatctgaggaaagggtttgacgatgatctaagcatcagatccttcttcctgatactgttcaataggttgttgttccctactgccagctggggaataactaatcatgaggttcttttaactgaggaaatggatcgtttccacgagatggactggtgccagctaatattcaatgatttatgccaagttgcc

SEQ ID NO: 168467 - DNA, 307 bp, Zea Mays
gccaccgaagaaatcttcagcgctaggggctgcattgcagccactggatgtcaaccaagaaacactacgcgaagctagaagccaaaagaggaaggctacaagtccaacgcctcaggaggaggagttggaccaagaaatcagggacctcgaagcaatccatcagcaggtccagaggaagaaggagaagatgcttcgtcttgctgatcttcaaaagaagatcgatgaggccgctgaggaaatgtgtcatctcacccaagatgaccaggaccgaagacctcaacgcagagagcttcgtcaggacaattcc

SEQ ID NO: 168468 - DNA, 784 bp, Zea Mays
ctatgttgagggagaagcagtcgcatgggtgccacatcagggaggagtccgacatgctagaagaggcggcacatcaatgacacggatagaaaaaagggagtgaaacagtgacaacagaaaaagaggcagtgaaacagtggcaacatagaatgagaggttgtatagagccccatgaataagagcttgaggatgaaatttaggggtctcttacttttgagggcattagtagaagtttcactagagtggatttgatagagtaggggtctgatctttcgataagttgtttgggtggagatttcgatgttgttgatccgaagttatccaacaacgcaagaaaatcctgtaatcagtacaccacaaccctattggttactaactcgcgtacacacgaattagtctcgcaaagaaggcttatcttgctaatgcaaatgagaacacatgcaacaagaaagtaattgggacgaatacatgttgaagaaggacaaggattacatcgatagacttgggatggttcgccgtgacttttgggtaaatattctagttctatctgttctttttctgaacattcttattttatgacttctgagtacatgttctttatcttgtagctacgttatcggttgcctaaaggcatggattgtatggcacatgttggacgtgtgttccaaaggaatgcacaaaagctagtgaaggatgcactatactatgcaaggattcaagcaacagatctttattttcaagttcattctgatgaagaaggtcccttgaccaagaagcaagtgtc

SEQ ID NO: 168469 - DNA, 656 bp, Zea Mays
gcttcgtcaactgccttgagccataagcaatcactctgccttcctgcatcaacacacagccaagaccaattcgagaagcatccgtataaactgtgaaacgcttaccactctcaggcaaagctaggataggggcatccaccaacttgttcttcaatgtctgatagctgacctcgcaatcgctggactagacgaagagaacacccttctccaagagtctagtcaaaggcttagcaatgctggaaaaatttggtacgaagcgccgataatatccagcgagccccaagaaactttggatttcggagacactagagggtctcttccactccaccacagccgcaacattcttgggatcaaccgcaatgccctgctgattaatcacatgccccaggaaagccactttggacagccaaaaggcacacttcttcaacttgccataaaactgattcttcctaagggcacctagaaagagacggagatgctactcatgctcagcctcgatctttgaataaatttgaatatcatccaggaacacgaccacaaagtcgtccaagaactcatgcaacatcctattcattgcttccataaaccagtaggggcattagttaagccaaaagacatgactatgaactcataatgcccatacctggtgcaaaaag

SEQ ID NO: 168470 - DNA, 519 bp, Zea Mays
tctaaattcttcggcttttacgatatggtcgagtccttttaatctatagcaagtaggagaaagaattactcatgtggcccaatccctaaccctaagactatgtctagatacggaaaggtcctcgcatgcatttttatgtgtccacgttccactattcaccttccaacagagagcgaatgaggacgcacaaaataagcgcttgggctctcggcaccccatatctacaggtttctctctcctccataggtctatgtacgcatcccatgcatgttcaccgaaagcgatctcttttttgcgtatgcgcatccatccttaattccacaaactctaaccaaaagatcataaatcatactcacccaagcaaataaagaaagaagaaaaagctcagcgcccttaccttgaccgtcggtcagagacacagcaccgaccctagcgagggtcaagtggtgcccttgatttgggcccctaggtgagtggggccttatctcaagtaccagcccaccaaataaagtttacgca

SEQ ID NO: 168471 - DNA, 971 bp, Zea Mays
tgaaacttaagataatttgactgagtcgatcaaattccttgctggtaaccatcagagagactcacgcagtaagtattcagatattttagcagatacacgtcgccttttctcggcccctcagttagatgttacagaacataaggttaaggccttgaatgtgtccatacttcaaatcggcaataaactcatccagcggcaaacggatgactggctgtcatattcaggatcaaaacaagcgtacttattatcggaggagtctccagcatgaaaagcttcgctgtctagtggagtctctaggatgatgtgaccacacgtccacattcaatgaaccggtaaagaagaaagaaaaaaatgggaaatgacactccactatacgaagtgcaggtggttgtgctgtgcgtattaatttgtaacacttttgtcactcatccagttaacatgtcgagtaccgaggaacaccaacgtatcaacaagttgtttttttttttggtggggtggggggtcaacttgtgaaatcagtcccaaaactatgtgctagccatggaaactaactgcagaacatttgacaggacacccaaacttacggtttagcaaatgctactctgactgaatcgagaaatgcacagagctaaagtacaatggagacggcagaattgaaggcatgcagtgctgaactgatgatgaagcaaagatcatacttacagacccaaaaaaaaaggcggcagcgtcccaagcgtccggccaatctgagttgatcagggacacaggccaagaacagagaaatgttagtgcgctacttgccttggtccaggctgctggctctggctggtctctggtcgctaacctctgctggagacaagacaaggccatgggggcggcgaggaaggccggtagatataagagcgagctgggagggagggagcaggcgaccagtggagcaagtagcgggagcggcagagcacgcgggcgcg

SEQ ID NO: 168472 - DNA, 815 bp, Zea Mays
tggacctcgaggagctaatatggaaggcattgatccttgtgaactagccctcagtgttgctaaataatggccaaacctatgacacttgataattgagtctggattcctcttgcaaacaatacccatgtgttgatcgatgccacaattattagaaacactagagagaaaaatgactaatgaatcatgttgcttcccacacttgaaaattagcccatgtactagtacaatatgcatgactaagatcccataatacgtgatgtaaaatagtgtccgcatatttgcttgggcttgtaaaactaagacaactaagaatgttgatttggcttgaacttcttggctagaggttgctgagaatattctccacccttagtttgatctctcctttgtgcacctttagtgttaccaccattcctagttctattctactagacactagtgagctaaatctctgactccatccctctagcctcctccactatagtcagataggtaattagtgtattccttccctttacgtccatataatacataataaggcctttgaaaaaattacaggacttctcatactcattgctaacaactgttgcacaaagcggactatattgctgaattctctaccatacttatccacaatcttgcttccttgctgaatataattcaaagcattgctcgttctatcttggaaagaatctagataatagttggaaatatttatcaagtgatgtcacctcatgaagaaggccaagcctcacaaacaccactcctggtctggaacaaattaagaaaaccccctcattatgagtcaactaacacta

SEQ ID NO: 168473 - DNA, 577 bp, Zea Mays
cgttggtgaagtttatgtgggcagcgactacatatggcgatgagcctttggttgaggtcttcactaagaactattgtctgcactggaagaagaaagttgctggtggcaagattatgcagtttggttcgtgcacattcattttgaggactaggaagacttcgggtgaagttgtggaactcgttccgtgtgcaaagaacaagtgggggaactggtgggatttttggttttatgtgacattgaaggacgtcgaaggtgttccatggctgcctccgtccatactgtgctcgcaatgttacatcgccttcccttagtttaaactgaaaaaaggagatgtaaacgaagatgtccttcgtcgtgcttccaaggcgagtagcgaacgtgacttggtggatgagtttattgtttacggagtgtggcctcttgcacacggctgggaggtggatgaggtgaagctgcgctcaatgccttttttgaaggaccgaatggtgttgagtcctacctcaccattgagctatggggttgagacactgcgacttttgtcagggaggtggaggcagaagatgtaaaaattgtaggg

SEQ ID NO: 168474 - DNA, 759 bp, Zea Mays
gttgaggtgggggtggctgctgctgcacctgctgcatcactgctagagtctgaccaattgcttggactgcttgtgtctgcatcaggaacatctgctcaatggtcatcggtggtggtggcggcaactgctgctgctgggctgcatccacctggggtgcctgctgttctggctgagcacgccttgcacctctgcgcctgttctcagacatctatagaaattacacacatatcaaatctgactctgcagtctttcagcataagaaaagatgtatggaaaatcttcataatactgaataatttatcatcttcaccgacaacttctcacataaagaggaaagtggaaataaagggattacccaactaaataactgactttattaataactacaccaagttgcaggggatacccacaccttgatgacaatcattacaaagatccaacttcattacatgttcatcatgacaagcattccaacaaatgataagcaaactaactctaactaagactgactagactaagacactaaattaagcattattacagactccaactccatcaatctatggatccaaatctatccgggtcctgcagtcaggggtaccatagtcaaagcgaacacagggcggtgaacggtaagggtgctgaatcccgacaggggtgggagaaccaccatctagatagtggcgtgcagcgcactcagcacgcaattccgcaacctccgcccgaaccttgcccaactcgtcaagggtgtggtccagg

SEQ ID NO: 168475 - DNA, 1463 bp, Zea Mays
ctgggacagagagatagcacgtttaagctgcgacacgtggaacaccggatgcaccatggatccctgtggaagcttgagtttgtaggccactgatcccacgcgctgcaacaccggaaagggaccaaagaatttgaacgacaacttgtgatttgccctgggagcaatggaagtctgaatatatggttgcagtttgaggtacacaaggtctccaacagcaaactgcctctcactcctacccttgtctgcttgttgcttcatacgaacttgggctcgcagcaggtgctgtttgaccactcggagcatcacttctctgttggacagccaggtggacaggtctggatcagttatagtgtcagcaggcgcaataccaaagtgtcgtggtggtcgaccatacagcacctcgaatggggagcggcccagagcagaatgaaatgttgtgttgtaccagaattctgccattggtagccaatgatgccacttgtgaggacaagagttaacaaagcagcgcaaagaagtctcgaggcattggttgaccctttcagtttggccatctgtttgggatgatacgaagtgttcatacgcaattgcgtgcctgataatttgaaaagttcttgccaaaaggagctggtgaatatacgatcacgatcagagactatcgctgctggcatactgtgaagcttgtacactgaggacaagaacactttggcgaccttggatgctgtgaatggatgaagaagaggtagaaagtgtgcaaacttggaatatttgtccactaccaccaaaatgcaattcgcacgagcagcacggggtaaaccttctatgaagtcaagagtaatgacttgccaggcttggtttggcactggtaacggctgtagcaatctaggatacttggatctgtcgggcttggactgttgacatacagtgcattgcgccacaaaatcctggacatgctgcttcatgtgtggccaggcgaatagctggtggatacgtcggtaagtgacaaggaatcccgagtgaccaccgatttcactggagtgaaaggcctgaagtaccttgagctgcagagaagtattggtgcccaaccagattctccccttgtatctgataaccccattttgcagttgataaggagtagaagacgactggtgtaatgccagctcagacaacaagcgcttagcctgggaatcctaatgataccctgcgaccacctctgtgagctattgtgggttgctgtacgagataaggttgcaatccaaggtgtcatggggacggcgggaaagagcatctgcggctccattttcaagcccttttttgtagacaactttgtactggagccccaaaagtctagtgaagaccttctgctgccaaggggtgtgcaatttctgctcggacagatgggataggctatgatggtctgtataaatgaggaactcagcatgctggaggtatgaccgccactggtc

SEQ ID NO: 168476 - DNA, 639 bp, Zea Mays
cggtgaaccagcaggacaagcgtggcctcctctgcagcggcacaatccggcacttcaggagatcgccgaccacgtgcattgatgtcaagccacccgtagccaagaccttgatcctatccaatacgggcaggaactctggcgagagggatggcttggtcctccattgcatgcggtcgagcgttggcccatcgctcggcaggatgaggcggtcattagcctcggtgctggcaatcacccaatcgctgccccagtttttccacctcgcaccgccaaaggtggggatgtagactacggccggatctggcctcgtctggaagtagtaggcaccgatgttgtccctggtcttcccggacttgaccagtatgaagaagtagaggaagagggaagtgcaagggccacacctacgaacatctcgcagaggtggacgaagattgctgcttggaggatggagtggggcgtgaggtgttgaaggtgaagcctgaactcctctagcagcaacaggaagaagggcgaaatcggcagcgccaacccataggagatgtaggaggtgaacagcacgaactccccgacggcaagatcgccaagggggatagcgtcggcacggattcttctggcgagccctagcgcactccatccaag

SEQ ID NO: 168477 - DNA, 654 bp, Zea Mays
cttcgctttggaccaggtgtatgtccaacgcgaacgatcgatctgcctgcccgacgtcttccggcgcattggtgagtgagtggtgacccgacccctgtttggctgtttgccattaggttgatgagatctgatcaggtgtcccggccggccgggttcggcggctagctctcttccggacccccgattggcagctagtagctcaggcacccgcacccatatgctgggggctgggcaatgcaatgcaatgctcccatgcccagcgccaccgcctgctgtcctcagatacggacggcatgactgcatgagtcaaacgtgggcgggcatgcacggaacggatcctatgtgacgtgcgtgcctgctggcccgctgcaagatcccatttccaatgcggagccgttgcgtgtcctgcaaaagcgcgcgcgtctagacgttggaagaaggatcgtttggtggccccgcgcgccgtagtcacgcttacgttgtcgctttctagtttctactaccgcaccgcacccatcaacaacgctaacaccgctgttgtacttccttacggctagtgcatacgtacggttggagcactccgccatgcatccggccttttgacaacctcagagcagcagccagcaagccagacatcattacgagcaactccac

SEQ ID NO: 168478 - DNA, 1214 bp, Zea Mays
gaggcttccattgcagaggcatacattctagaggaggtgtcaaacttaacaacaacttactatggtgacaaactatcgagcgtgcataatccaccccctcgttacaatgatggtggcaatgaatcgaacctcagcatatttcgaggccaactcggaagcgcaagtggctcgaccaccaagaccctgccacatgaagagtggcggcatatcatgctatatgtattgaccaaccttgaagaggtgacgccatacatggaacaatttcttcatgaattttggcgtcgatcaagggacccaactccacaggaatatgatactcttcttagaaagggtgcgagaaatggattgcccaatttcattacctggttcaaacgtaaggtacgtacttagtttgtcaaagagatctgtctatgaactcaatttagcgtcttttaacttgtgaatacttgcagggccaaagagatccgtctatgagtgccgagttgagacaagtagccaacgactttgcttatagggtcaagaaatattctaggtatgacgtcaatggatattgttttcgcataacaaactacaaccaaagtcagcccaatcggaaaacgacgtgttctggagtctttacgcatggccttgacgatgtcgattattttggacgaatcgaagaaatatatgaactcaatttttatggttccaaacctcttactctagtgatattcaaatgtcactggtttgaccctcaagtgacgagatgaagacattctaatcttaggatagtcgaaattcgacaagattccaccttaccaggagacgatgtctatatcgtggcccaataggccacacaagtgtattatctcccatatgcgtgccaaacgaaagaacatcttaagggttgggatgttgtgtataaggtatcgccgcatggaagattacctgttcctaacattgaagattataacttagacccggacacatatgatggagagttcttccaagaagatgggctagaagggcaatttgagatagacttaatcgaagctatcggaatggacgtagatattgaaatggttgttgatgatgaggatgatgaggtgcaaaatgagaatgacttagtaatccttgaaggcaatgacattaatgacgaacttgcgccttcagatggtgtttactatgaaatggttgatagtgatggtgagagttatgatccggctaaccccgac

SEQ ID NO: 168479 - DNA, 587 bp, Zea Mays
gctctcacagtggggcaaccagccaacaagatcctctttgccatcgaatgtgggaaagagaaggttgtggtgggagggttttgccgtggtaggtaagcggtatggtggggttcagaaaagcccgggattggcgatggggagtgtgggaagggtatctaatggatgggtatgggcatggtagatgtgggtggcagcaaggctgaggttgtcggtggaaggttggttgaggtggatcggagtggagcggctgtggtggtgatcggcgctgatggttatgggtggcgcgacggggtttgacaagggaggtatcccaccataacctggcatgccatatgggatggaagtagggctggtggatgctgggggcggtggtggtgttggcggcctactgatcatttgagtgatggcggtggtgagatcggcaagggccttcgtcatggtgtcgatcttttgctctagcgccgcgttggcagaattggtcgcgacagcagatgcgacatcgctggtgttgtcgtcgttgcctagcatctctgataccagattgttggagctgcagcttctctgataccacgacgtttgggcaccat

SEQ ID NO: 168480 - DNA, 461 bp, Zea Mays
cctctgtgctctctgctctctgattctctggcgaccaccctctcctctctgatcaccggcgtccaccgtctccggccatgctctggcgacctccagccgctgcgctcgtcccttctccctctggtgagcagccttgccttcactcatctctcttctctctgattcagcccagtgaagccccctcttccaccctttttgtgccaaattccaaatcctgtgaatcccagtgaatccatgttgtgcaatgtgttcctttgtggccattgagtgtccttgcaggttcctagctccttcgggagggttttcccaccccaaatagtcttttcaccgaaaccctagaacttcgcacgtcacgtgctcggtgaaatgcccaaaccagccaaaaatgctccaattgaacccaaatttttcaggcaccttcacaacacctccagtaacatattcgcaaaatttcacgccca

SEQ ID NO: 168481 - DNA, 311 bp, Zea Mays
tggtcccccctctccttttgttctctcggtcccctctatttcttgttccttttcttcttactcgcaacactccaaggtccctggttcctatcctccttttcttctcttggtcccctccatcttattctcttgttggtccccactctcttgtttttgcttttgtgaaaggcaaacagctactgccacctgaatggaaccacaaaagtaagtcaaaatcaatctttttccatcaaatcatctggttttatttggcaactaaattttggtgcaagttcttttatgagcaagtaaacaccaaacttagaactgca

SEQ ID NO: 168482 - DNA, 879 bp, Zea Mays
ccttctgtgtgtccatctggcatgcaagaaatatctgctgctttagagtatgtgggagagaaatggtcttcacaaacaccggtcaccaagggtagatgtcatcaacaaggtaatactcttagttgcactcatgaccattcaccgcgaagttcacatttgaagcttcacttttgaacatgttagtgaacaacaatgactaactaagcatgttgatggcgttgtttgaccatgccacccaaaaaagatatgccaaatccgcaagtcatatgaggaaactgcctcgagcatgatggtctggtatccaatgtcgctccttacaaactattctctccatccagtggagcagttctttcacttgcaatgcaagtaatcgatactccatatcatacaagaaaacctcctttcctcccccttagataatagccacttgagattatcaataatgggacgacaactgaaccacctcttcaaaatagtttgaggaaatctaagacaaaactttttcctattttgatgtatacatcaatagagtcagcaatgctgccgtacacaagcatgcgtagggaaaatgtgtacttctggtgggaggagaaatagttatgtttgagtgtatcagttctaaaagtgaagtagaggggtacctaacctctccaagttttgaaggaataggctccttcgcctgcttcacaacctcggtcaatgtagctccgacactgagcccttcgactcctcgttgtggtagacttggaggcaaggtctctcgcttgctccattaaagtttgtcgtagcacctcgatcaccttatattcggtcatctcaatgttagaactcgacaaagacatctcaataatattgtactcgaatgaaacgagggtgaga

SEQ ID NO: 168483 - DNA, 480 bp, Zea Mays
cagctcatcagctttcaggaatggctttagcatggtgggacactttcagtgaagccgtcagagatgctacctgggcagatttcgaagcagccttccgtgagcaccacgtaccccaggggatagttcaactcaaggaggatgagttccgggagctaactcaaggcgggagaacagtcagtgagtatgtgcacaagttcacagagctggccagctacgcgcccgaggatgtcagcaccgagtccagaaagatggcccgtttcctgagaggattaagacccaagcttaagaccatccttgccagccaagacttccacagcttctctcacctctccaacaaagctattcaagtggaaagagcaaaagaggaagaaaaagggcacatcaagaggaaattccaagtcctccgagcacaacagcaagaacgtcaccagagagctcgaccctttgggcttccacccaggggtccaagtttcaataaac

SEQ ID NO: 168484 - DNA, 636 bp, Zea Mays
gtcagctgcaatgttaaacaataaaggcgaaaaggggtcaccctgtctaacccctttatgagtaggaaaaaatgggccaatcataccattagttctaatggcaactttcccacctctcactgttttcatcacccaatcactccatttgtccccaaaacccttcagctggagcatattgtataaaaaatgccagttaactttgtcataagccttctcaaaatcaattttgagaataatcccattttgctttttccttttaacttcatgaactacctcatgtaaagcaactacatagtccagaatatatttccctttgacaaaaccaaattgatttttactaatgattttttgaatgcaattagataacctattattaagtgctttggtaattattttgtaaacgacattcaataaacaaataggtctaaactttgtaatttccatagcattatccactttaggaattaaagtgatcagaccataattgagtctttcaatatccaaaattcctttactaaagtcatcacacaagttccaaatctcttttttaatgatgtcccaaaaatcctgaaaaaattcagctggaagaccatcaggacctggtgcactattatgttttaggtcaaaaacaacctt

SEQ ID NO: 168485 - DNA, 512 bp, Zea Mays
ggagcacgccgagttgttcgacggtggagccttcacgaacacctggtcgatgacggaccacgcatcatgcgaaccatctgtcttgtgtgccaccaaactcatcgcagccgtaccagctcgctgaagtttcggtcgagcaatgatcaaaaggtcggtcgtcggaaggctcatatctagtagtatgatatatttatagcccctgagttgttgctggatcgtgccaaggtcgacgtggcgtgacaactggacaaggatcgttggagtcaggacatgaacatcctcgcctcatccaataagcaatatacagcagcatgggaagtccgcaaagttcgcaacaaaaagattcaacaaacagatacacacatgatgacacgacgattgatcaaagcagacatttgagttcccgactaagctacgacatgcatgaaggttgttatggctaaaaaacaagtcaattgaaaagcatccccataactaaatgatttaggttacgagagttctcgaactatagg

SEQ ID NO: 168486 - DNA, 648 bp, Zea Mays
gtccgaatgggggttgctgacttgctgctcttcaggtggctggtccagatggggctgctgaggttgctgaacaggaggaacatcaacaatccattggtctcacactgcaccgtccatgaatccccaataaagccatcagcgtctgaaaaaacaatgaactgcgggacctcctccagagacgtgacccgcaccctgagcaaagtcctataaatattgcgtctgtcctcttcccacagaatcaatctgccaaaggagccaatagccacctgcaggtgctctgaagaacggtaatccagagggaatcccaacaacataagccagcattcccgattaaaataaagggctctatggttccaagcatcattatgccgctgaacagtgaaggaagcatcaagatactgttgcggaccgagcataacaaggttgtctctttcaagaatgctgctaaactgaaccaaaacctgccccaggtgcgaccgctggatatcacgcaccccaagccgacggtgttccacaaggtattctctaaccacatccctcaccgccgggaaagtaatctcatggtcaggtaaaggttgaatgttgataatagcccagtcctcatgcaatggcggaagacgccgagaaactgacctggccataatttcc

SEQ ID NO: 168487 - DNA, 905 bp, Zea Mays
gaccaggggctcgggcgaagccttcgggccgcacacggggatccaattggggccgagcacgagggacgacggtggctgtgtatggcaatggcgacttcgacgatagatggccacggtgcgagtgggatgaaggggagaagaggaggggatgcggctgggtcttatgtgcgcgcggaacggaagctaacctcttgaagccggaagacccgggaaggtggttgaggtcacggcggcgccgtccacgcggttcggttgagctcgcccgcgagtctcgcggggaagacggagtcacacggcggtccagagactgcacggtggcccccaatgtcagtgacgcgcaaggcgcagcggaagaaacggagcgcgagcgggactagtgggttgcggctgacaaccgggtcccatgtgccagagaatgtcgagagggagaggctgacgagagggccccacccgtcggcgcggatgcgacttgggctggcgtgcgtgagttaggtgggccgaattgggataccgaggcccagtttggggacttcattttttttatttttctttcacattttcctttctccatttccaagttaaatttgaatttcgaatttgaattcaaacatgtgataaatttattcttaatcatattgtaaaattaagtagtatcaattctgaaaatatagtttctctttgtattatatactctccttttattctatcttcttttccttttcttgattatttctcattctcaaatcttccaaatagatattaaatcttcaattttgtgacattaatttattttcttattgtggctattatttttactagatgcacatacaacaaaaccaacatgatgcacggttattctcaatattattaattgtttacttgcttttcgatgtggtgctctcata

SEQ ID NO: 168488 - DNA, 338 bp, Zea Mays
gtaggacatgagaaccatcacgatagacgggagcaactccagctcatcttgcaaccaccctagaaagcggagccccacctcctcccccgattcatcaaagggagcggtctgtgtgctaaggtcactatacgcatccacgaaaagcgtgtgcgcccgttcaaccccagcgcgggtggaggactccgtcctttcgcgatggccacgaatatcctttagctctagctctaggtcggcggtgcgcttgtggcagcttgggcctccgcacgagcggcctgagccttcgtgtgggctttttccgcatcctcctcatcagcaagtcggcggccgaggtcctcctt

SEQ ID NO: 168489 - DNA, 412 bp, Zea Mays
ttattgtttatttctaaatactcaggtacgtatggtctgttggttagctataaatttctagagcacgtgggacgcaagttcgagtgctcactctgcatattttttatataattattgtttatttttaaacactacgatacgtgtggtccggtggtagatgcgcggacgggatcgagtgctgagcaggcgcactagctgtctgcgctggcactggggtccacacctcagtagctgaggtaacgctgtgtggcgctgggcgtggagcacaagggtacgacgccgaggcgaggcgcgtgggataggagaaccagtcgagacacatgaggtgagcctagagtgtcggcgtggaaggtaaagtcgtggtaacaccaggtgcccacattattggtgtgttttgtttgtggagtcaccc

SEQ ID NO: 168490 - DNA, 464 bp, Zea Mays
caaagtcatcgatgggtggtggacgaagagcttggaacagctcacaacaaatatggtcggacatagcaccgtatgacttggacggaagactgatagaatctagatggctagaagatgtgaatagcctgtaaaaattctttacaagactacaaaacactagagcaaagtttgagcagtataaaagtgatgttaatgcaacttcttgctctagctctatttctcaacgagcaagcctcttaaacaattctttttttctcgaacacgtgggagaaccacgtatcaatatattaagaagataagaaaaaagtctagaaaagacccaatacaaaggtgccaagaaagcaccctaggaaataaaaaccaaaaatcaaactacagccaaacctgcctaagagcagcagccccaccaagaccccataacaaggcctcatcatggatggacagcaaaattgcgtgaatgtttg

SEQ ID NO: 168491 - DNA, 570 bp, Zea Mays
cgcccacgggcgcaaccggaccaacacaagcgtacaaatacggccaacaggccgcatcaccatacaaattacaattacatacacacggcgagggcatcacaaattacatcggctcaaccttcgggatgatacccatctccctgtaatgaaacaacattatcctcaattcctcaccctcaaaaaacttccgaagatccccctcgcctatgcccaccccaatcggcgaggacaacaattctcgtttaccaacccggtctactcggagacggccacgctccatccccaaaatcgtgaaaattcacccacactatgttttcccaccacccttcgccgcctacacctagtactcgcaccaggaagatcctcagcaccctccacacgcggcgaagtctccgccacagccacatccaacacaacaaaataatccaagccttcatccgaggactcctccatccaaggaaacgaactcccaaattcaccattggactcaaaacactcagacatagaacaaaacaaattatcatcggcaggcactacggttgaggccgccacaaaatcagtatagtcagc

SEQ ID NO: 168492 - DNA, 486 bp, Zea Mays
gcttgaatagagaggtggtgacatgccgaagtagtcatcgcttcctctatgtttataagtcgagtcaaaatgcggggtactagtggtacgctaggcaggcggtgtccaaataaattaacctgtcgatgtggtagctgtcgtgcgtgatttattgttagtgagtagtttgaattacgagttatatgaggattatgttagaaactagtatgcggcgtgtagctgtgctcatgatgtgaataatatatcagtaggtattgttggtgtcattagcaagtgtgatgaattcggttgtgcgataaattttgaagggcgaagaacatgtgtagtgtgtcgatcaagttaaccgataggttccgtaaatatgcttgtgatgcttttatgtgcatgataagatcgatgtcttgctttgtcaattattgcattccatttctattggataaataaatattttgttggttgattagaggtcttatatgagcgttatcg

SEQ ID NO: 168493 - DNA, 518 bp, Zea Mays
cttgatcacatagaacacaattttcaggttgaacatctcttccactaaaatcatagcaatgtaatgcaaactgactggggaggtgagtatcaaaggttaaacttgttcttcaccaaaatagggatcacacactatgtaaaatgctctcatgcgcaccagcaaaacagttcagctaagagaaaacacagacatattgtggaggctatctgttctagttcatgcatccatgccactcaaattctggcatgaagtttttgctactgcaacatatcttatcaaccgccctccctcaaaactcttagattactcaacacctctagaacgacaggttaaacaattcccagattattccttttttatggtgtttgggtgtgcttacgggcctaatttgtgcccatacaatactcgcaagcttacttttaggtctatgcaatgtgtcttccttggatacaacaacacgcataaaggttacaagtgtcaaaaggtattcattggccgcataaacatctctcgtgata

SEQ ID NO: 168494 - DNA, 1424 bp, Zea Mays
tagaattccataatatctacatttgtagaggtaaatgtagtgtgatggttttgaaatttcgacgtggggcatagaagttgccctaagatgggtaattgcaaacgtgccaagcgcgtcgtgccaatttaagtcagtgccaacttaaaccgaccacttcattagtagggcatagtggccaccccgagttaaagaagcgtgagcatgtcacaccgccttaagtcattgccgacttaagaagattgctccgttagtagggcatagtggtcaccccgagttaagtaagcgtgagcatgtcgcactgccttaagtcattgccgacttaagtcgattgctccgttagtagggcatagtggccaccccaagttgagtaagtgtgagcatgtcgcaccgccttaagtcattgctgacttaagccggttgctccgttagtagggcatagtggccacctcgagttaagtaagcgtgagcatgtcgcaccgccttaagtcattgccgacttaagccgattgctccgttagtagggcatagtggtcaccccgagttaagtaagcatgagcatgtcgcaccgccttaagtcattgccgacttaagccgattgctccgttagtagggcatagtggtcaccccgagttaagtaagcatgagcatgtcgcaccgccttaagtcattgccgacttaagccgattgctccgttagtagggcatagtggtcaccccgagttaagtaagtataccaattgacagcgaacaatctgagtgcctttgaaacctttttattgatgatatatttctcgatttacagaatacatcgtcgttccgagagcttctgggatgtagcaggggtaaaacttcctgaggtgttctatgttccatgagttcccaatttccgtgtcgtccatctgagtgaggcgatatgatcccggccgagtgacttctgttactatgaatggtccttcccatagaggtgacaatttatgtcgtccctcccccgttagaattcgacagaggacgagatctcccactgcgaaggatcgatgccgtatggccttatcatgatagcgccttagagtttgctgataccgtgctaattaaatcaccgtattcagtcgctcttcttcgagtacatcaacatcctccagcctagtagcttcagcttctgctatgttttcaaagattaacctcggtgccccaaacttgagatcagcaggtagcaccgccttcgaaccgtaaaccataaagaagggagtatttccatgcagagctcggctaggatgagttctcaggctccaaaccacatacggcagctctctgatccattttcctgcgaacttctcattcttgtcgaagactttctttctgagtgcttctaatatcatcctgttgactctttctacttgcccgttggctcttgggtgcgccaccgag

SEQ ID NO: 168495 - DNA, 784 bp, Zea Mays
cgccttcgaggtgggtgtatcgagagggaggacaagaggagtagagtagagaaccataggtcggtggaggagccggagcgacaatcatcggacaaaagagcactagtgcgtgcgaaaggaccaaggacagaggcacggagcaccaaaagcttcgcaagacgctaagagtagagagatcgagaggagaggcatgagaaaaaggagcgagcggctcggcatgttacggtttatgtttagtggctaggaagttgggaaccgggggaggtgggttgggcggctaggcctttgtgccctcggcctctacatgtatgcctatattggtccgagtcagttataaggcatagttaatagggttaattgtatacatgccactcaaattgggtagtgcccaactagctcaataggctgagatcactatcaagcatgacacgtcgtccgtgtcgagctaggcctaggcccacagtgacctgtgctaggccgggctagtgtcgggccaaaaaaacgggctttgtgacacgctaatgggccatgtgctttctggacatctataacctgaaatgtggcatagtcgaacttgcggatgttaagctctttgaggctacctccagtagattccctattccatcccctatttcatcctctattgcaaacaatgtcatccatgtcccatattttacactacctgctagatgttggagacagtctgacgccaaaaagcgcagtgagccgcctctcgtagtctctcgactcttgggcgttgagcatgatgctagcatactcaagc

SEQ ID NO: 168496 - DNA, 633 bp, Zea Mays
tcgcaggcgcgctccaggcgctccacggcggcgcggtcgtggtcgctggcgccgtcgaactcgcgcaccgtcacgtcctcctcctcctcctccgctgccgccgctgacaccaccaccaccattgagacgagtgcgcaactgctcgacctgccacgtacgtacgtgacgagctcgctggccaggtactctctctgtcactcgtgtctctgactctctgtatatatatataggtgcgaatctggcggcgggcggttcagctcctcctccggagtgggggtagtggagtgagtgccaggtaattataccgaggtcgaggagaaactgcgccggagcaggaggaaggaaagaaactgatggattggaattggaacagagagagaggcaggcggggaaacgagacgacgcctcccgttgcttgatggagacgaggctatagtgtactagtgcctctatcctctagctgagtgggggttgtgccatagcccatagcataggattgctacgttacgtaccagctagcggtagtgcagtgcggtactttggtggcaatggcaacgcacaacctcgaggtgggctccacaggaagtggtcgcccgggcccagcgcccccgcttgtgcgtgcttgtctcttcc

SEQ ID NO: 168497 - DNA, 1005 bp, Zea Mays
cattgatctaactttcccactatcaaaatatttgtaaatagcatagtggcctttcacgtacaaattttatatgctcccaatataatccaaaatattttataatgagcttcaaagttcaagaggtcataaactactttagcaaatcatttatcatcatgtcaagaagccatcttaacaatggtactcttcattacatccaaaatcaattcgatcttaggatcaattaaaatctaaccttctcatagacttttaaggattccaaccaactagactcacaattgtagatctcttcaattgcaagcaacaacctgaagaaccattaacacaatactttaggagatttacctcaatcaaatcacaattacccaatatatcagatgaagccacgaaggctagatgcataaatcttcatccgtgaatccctacaatgaaggaaagacacacaaagcttcacctacaaagactacatcctggcgcaagagcaagcatgtcaagattaacattcacaagaactgataaatagggaaggatgaatgaacagaaaaatgatcaactaccctcttcaatgaacaaactattgtaatatatttggttaaaggtagaaaagtcttcttctataaattacgaaggtagggaccctaataaatatccaaacctatactatacatggacatgaacaaaattatgcaatattagtttaatctcatcatttacactcaagaagtaactacagataggtcactaacgtatgaacttggtgtaaatctgaccccatacgtcggccggaagtaactgtagaggattcgtttctggcagccaataggttaagccctgggaaccgtagcgaaccacaccatggtgacaagcaagcaaaaattcagcaacaacaaagccaataagtgagggatggggttgtgcggtgatacactggcggtgctgagaccatcgataacacgacacagctccccatacaaagagtgagtggtgttgaaatataatataaga

SEQ ID NO: 168498 - DNA, 568 bp, Zea Mays
caaacaaacatcccaaagtcgaatgggggcgctgttaaacgattggaattggctaaccaagcatggcaagcattcgcattcacatgatcctcgacggctcgacctcgacgccggtcgccggctgccccactacttctacggggccacggtcctgagttggccccaccaagcagtgagtcactccatgcgccgcgcgcttctttgccggctcgttcaaccttcccgccaaaagaatggaaattccccaatctccaccagaaaaacacagaggcaacccgcacacagatctgacacctaaccactctccctccgccaccgccatgacggccggcgctggcgagccccgccgtatagtcctcctcctagacctcgataccttcctccccacttccagctcaagcacccccgctgccgcctcctacctcgccgaagtcctgcccgccgccacctccctgctcgccgcctgccggtccccggcgtccctctccgcggggcgcctcttcttctcctccctctccccgatcctctcctcctccctcctccctaggccgctcccggccgcccccac

SEQ ID NO: 168499 - DNA, 334 bp, Zea Mays
gcttgctcaacaacagccgtcgattgctcttttccgcgcatgcttgcccaagtcaagcacgtgtgacagagatcggtcaggccagtgcaagaaataattaaaaggtgcgaagcacagctgggcttgtttaccagcagtaagcgggagctttttcgtccctaaagtgcgatgccagccacaacttcacatggttatccatccaagtgttccgtcagtgttgttgccattaccattgccattgccagccaaccaatactagtattattttgcgctatctacctccgtctcacacctgcctgccatcgctcacccttcaaagtacgggaggctttca

SEQ ID NO: 168500 - DNA, 647 bp, Zea Mays
gctatgcattgtttctgtaccttcaccttaaaaaaaacaaaacaccatgtattgccaggctgatagagttgaaatgcaaatgataaggttgcggtcggatcaatagacatatacaatactttgttcatctattgccaaactggaaagtttgaacatttttatccatgtaccctgactctgaccgggagaggtgacctgttcactgattcggtcccaagtgtgcttgaaactctggcggattttgcccatcaaattgaaacagcgtattgagacggcaaaacatctgtcaaatttgaattttatcgcggagcctactgctcaaagaagcacatacaacgtcgaaaatagaaacacatagtattattgttctaaaatctgatacatggtctttggagtattattttcgttgtttttagtggtggttcattcaatattgctaggcatacttgtgtacttgctatgcattatttttgtaccttcgccttaaaaaaagacaaaacaccatgtattgacagactgataggtcaaaataaatcataagggttgaaataaatgacttcgtttatctattgccagactctaaggtgtgaacatttttatccagcaccctgaccagcgtgacctaatggtgtgtttggttggttgta

SEQ ID NO: 168501 - DNA, 534 bp, Zea Mays
gcagcggagacccgagaggtagaaagagaggggaggctggagttgtaattctgggacgggattgacaatggtggcgcgagtgaaggagagcggcagcggagacccgagaggtagggagagaggggaggctggggttgtaattctgttgtaattttgtacacgtgacgtgcgtacggcgtcatcaggcaggcaggtagccggtttcgacgtggacgtacgtccacatcaattcttgtgtggcaccgttggcgccctgtacgtacgtaccttcctctagctagcgatgttcaacgtgcatccttgtcgtatggcatcatgataaaccgttaatgcgtatggtgcaccggccggcctttacgtcgtaccttgtcatgcattgtcccgcacctagctagctattagctagtcgctgaattcatggagagtaggcatgtgctgctagctgcttgtcctcctactgcaccactcgtcattacatgctgccgctgtgtccgatcgatccatccgtccgtgtagccgtcgtatacatgtact

SEQ ID NO: 168502 - DNA, 467 bp, Zea Mays
ttacctataatcatggcgcgttcggtagcttgcttagcttcctcacgggcgtcgtgagattctttctcattctttttaatggcttcatcagccatctcacgaccacccttcatccacacatcggagtagaatttgccgcccaatgtagaagcctcagctaaagggtccttagtattgtcagctgagagaatagattctggctgggccacgaccttgacatgttcacacctagcattttctagaattgccgcaacccctcgggcaccggaaaaagcacaaaaatctccgtggtcgctaaggatctcatcaaaagcttcgcctttttcaccaatccattggataactccttcggggtcgccgcgaataaatttttgttctgaggaatacgcccccaccttcgcaaagctatcttttagcttcttcgcgcaatccaatgatctctcatagcacctctccctggaatcacg

SEQ ID NO: 168503 - DNA, 443 bp, Zea Mays
tgacagagcaccagtgagtcgtcacgaagtggaagacatcgccgaatgggtatgtaaaggtcttatcttcgattggattggggtggtcagcgcgaactactttcctcgacgtctgggacatgcattggagagggggacttgcgtggcctgtttgagggggaagagttgaggatgatgttgttcaattttcgtgaggcgggtcttattccaaaggaggagcctatgtgacatttttgttgccctcgttgctcagttgcgatattgagtgaaaatgttgccctccccctcttcgcaatatagttgtgagggttaaagccgtgatttgtattattgcatgatggtgccgttgagcccttcgttttatttgtgattgcgtgttgtatgttgtgcctattgcaagttggcttcgatttgtaatcgcgttcgtgtcgtaggggactccc

SEQ ID NO: 168504 - DNA, 309 bp, Zea Mays
tgcgcagctgatgatactcttgtgcttagctagccagtccatccctaggattacatcaattccttgggatggcaagatggttaagtctgccaggaacactaccccacttaagagaattctgacttgggagcacctgagtttgcacaggaggtctgatcccggggttcgggtgaccaaagggatagccaggggtgtagaggggatgccatgattttccacaaacttagcggctataaaagaatgggatgctcccgaatcaaaaagcacagtagcgggagtaaattcaacaaggaactcaccgagcactac

SEQ ID NO: 168505 - DNA, 675 bp, Zea Mays
gagcagcattgctgactgaagcagcgtaagtggacagcagcgtcaatgactcatgtgctgagagagtcctgaatactctatctccttcatccattaccctgatatgcagacgggtgatatagtagtaggcccgagggggctcaaaaacccgtcgtgtgtcataaagaggtcatacatagatgcctagctcatgtaacacattctgcaacaaatttggtcacttatagcctgtcttgaacatcaaagtgtagtgctcagcaatagaccacatcccatcgtatccaccatcttggtctggttcattgttgttgttgtcttggttatcttcttcatcatcattgccttcatcatcacctgaatcatcatgatcatcaccaacaagggcaggggcttgggcgattggcacatgtggtgctaaagaagaagctccagcaacaaaggcatgaagtgctggtaacggggtgggtgtcgccagaaactcctcagaatagtcctccacaatcacattccctccaacagggtggtacagctcctcaggatcttcttccaccacaactggctaaaaaggagcctgatgaggtgggggaatgcgaagggtgccgacgcgagaggtcaggagagtgtggaccatctacaagaagaaattgtaaccttagttgaagtaaaagagacaag

SEQ ID NO: 168506 - DNA, 451 bp, Zea Mays
ggaagaaagagaggaagaaacttctcgtgttcctcgccggaggcgttcaaagattcaggaggacttgagtgacctcactccttccgaaaatgtcgtcaaacttcatggcttagatatgtctccattcgatgttttcctcaaggaagccatcccagagaccatgtcgagtgagctgctggaggtacatgttgtggatgttagtgtgtgtcgggtgagcgagcccccgagcattggttgcccctccttgtgatccatgggcggaggccgaggagaacatgagttctagagatgcaacacttccagttgccttgttgtctgttgggctacatgtcgacctgtcgcttggtgatcagtttatagtggacaaagtgttgattgaagaaagacacggaaatgtgtcgatccctctccagccccgaggatacgaggatagaggtgctgcctaccgagg

SEQ ID NO: 168507 - DNA, 351 bp, Zea Mays
taactatagggagatgggtattatcccgaaggttgaaccaatgtaaggtgtgatgccctcgctgtacgtatgtaactataatttgtatgaagaggctgtatgccttcactgatccggtcgtgcactgggtctagcgcgtttattatgtcggtcaggcggcacctgtagtcggtcgttgcatgggtacttttttgagagagacttcgattttgcgcgcttgttgtgctagtccggctgcacccttaggcgactttcgcacggatagtcttttgagggagacttcgattttgcgcactttgttgtgctagtccggctgcacccttaggcgacttttgcacggatagtcttttg

SEQ ID NO: 168508 - DNA, 696 bp, Zea Mays
cttgaatcattctagcactttaccatttcttagagttaaattaattaaatgaggactaacaagtagacttacaaattttatccaaatcatttagtgcactaaaattacaacaaccaattaacaacgtattcttcacgataattacccaacgatttgcgttttcaattagacctcacatgagcactactactttttacccgtgcccataaccatacccatttagaccacaacaagcaattcaccatggctacaagcttaactaaagtcatctaacgattcggctaactagagcaacaatataggccgctatacatcacacacgtcggctagtctgttattatcgaaatccgagacacaacatgtatagaaaaatcacttaatgcaatcgactcctgcttaacacgagttggctaatgacgtgactatttcccaattaccaacatacaccacctttcgccatttttggataacctgcgccacacacagctattgtaatacatctcaagttcattcaaccccatcagtagagcactagcacatttcagaaaatttcctgagactacgacaacaaggcattgatctcatcatgcacatcaaagcatcacaagcgtttttacggaacctatcggttaacttgatcgacacactacccatgttccttgcctttcaaattttatcgcccaataggaatcatcc

SEQ ID NO: 168509 - DNA, 778 bp, Zea Mays
gttgccaccaatcgagcgcgctagtaaccttcttcttctctagccgtcgtgcgtctctctcaaattcactggccactgctcaagcctgttataaattgtcgaccccgcctgctccgctaagtagttgtgcaaccagtaaagcaactcgtgcctcgaatcatccactagagctccccaatttgggattcccccaaatcactcaagaacaccgagcggtgtgatctctccatggttagctcaccacaggtccgctcataccctctgctcttttgtttcaacgtctttgtgtgcccctgatgctccccgaccccgccaattaagctaggaccccttagatcaccgggaacgcgttggtttggccgttgatcacacagtcaccgtggacagagcgtgttcgagctcagatagtgaaattggttgaggggaaacgcttattagggcttgaattaggtctgcgccgaagtagagcaccggtcgttgtgtgaatcggccgatgtaggctcaccggagcttggccctgcgttgttcgccgtcgtggacatcgggctgtgaagaaatagaactagggggatgtttttgtaaagtgtcagtgactctaggaatagtactgtgaccccgcttcaagttattcaaaacgtcgggggcctattcgcaaagtcaataccacgggcgcgggcgcgtgcgcttccgcctgaagatgggccgacttgggccagttccggtccagaacagttcatgcctttttctttttctttttctgccagggttaaagaatttc

SEQ ID NO: 168510 - DNA, 435 bp, Zea Mays
gtgggatcgtcgccgttctagtgtggcgtggttcggacgggggttcgccaaaccgtgggaaaaccttgcacacactcagaccacggagatcgtcaccgaattggcggggattgctagtcgtagtacaacctccgccgaggaattgcacctctgcgtggccaggactgctgccgccataatcaaaggtgaatacccctcacctcgttcgtctagttgtgcgcagcgagtagtgcgtgtccgtagtagcggcggggcattcctgtggccggatgaccttgccggagatgttatccgctatagcataacgccgcctcggggtaacgtatgggagcacgtcgaggacgatggccgctggccgttggctggccaaggtacggccgtgatctgatccgcgaacaacccatcgttcgaagaaaaccctaaccgtagatctgt

SEQ ID NO: 168511 - DNA, 783 bp, Zea Mays
ctccgttagtagggtatagtggtcaccctgagttaagtaagcgtgagcatgttgcaccgtcttaagtcatcgccgacttaagccgattgctccattagtagggtacagtggtcaccctgagttaagtaagcgtgagcatgttgcaccgtcttaagtcaccaccgacttaagctggttgctccgttaatagggtatagtggtcaccccgagttaagtaagtgtgagcatgttgcaccgtcttaagtcatcgccgacttaagccgattgctccgttagtagggtatagtggtcaccctgatttgagcaagaacgcaaaacgaagaattctcgaagcctctttattgatgatgtgtttcccggtttacagaatacattgtcgccccaatagcttttgaaatgtagctaaggataaaacttcctgagatgttctatgttccatgagttcccgacttctgtgccatccatctgtgtgagtcgatatgatctaggccgagtgacttcagctactatgaatggtccttcccatagaggtgacaatttgtgccgccctcccccgttagaattcggcggaggatgagatctcccactgcgaaggatcgatgccgtatggccttatcgtgatagcgcctcagagtttgctgatactgtgctgattgaatcaccgtgtttagtcgttcttctacgagtacatcaacatcctccagcctagtagcctcagcttctactatgtttttaaagatcaaccttggtgccccaaacttgagatcagcaggtagcactgcc

SEQ ID NO: 168512 - DNA, 669 bp, Zea Mays
cggatacttgaaacagaaccccaactctatcaaatccatgagcgtctgcttgttatcttgttcttgcttgttctcgattgcttgcaggttcaaggttgttcttggcacgtcaagagcagcaacaacaggagccggtgtaactatcgctaaggcacaacacccttgtggttgttgtagtcggatagcacaacgttgaagtccaccccaaatcatagttatcaggagatggtgtgcatgttgctcaaggcgccacaccatcttggttgtggtagtcggacagccaacatcggcctccaacaaaattttcacatccatcatctctcatcgaaagatcgggctcccttctaccgttgggtttatcagttacacctccccgtcacatcaggttactatttcaagactacacgatggacgtctttcgctgggcagacacctattgagtacgtccattgggtgtaccatccggattttccgagattttctgaagtggtgagacctgcaacatatacgcaatgaatatacaacgacaagagagaagatcggtcaaatgggaggaagtccagattctaccaagcacaagtccaatctacagaggcattgaagtccacggccgagtgtcgtccagccaggttccctctttttcgactgaccgactccaactcgtcatcg

SEQ ID NO: 168513 - DNA, 710 bp, Zea Mays
ggcagcaatttttctgtcgagaccgggggtggggtcttatggatagccctcatcacagccatcatgcgacgtttcttctgaccaccctcatttcccctagtcgccgaagtagtcttcttctcctcttccgcacctttttcaacccctttttcctttgactgcaataagctagtcagatctgaccctaggggacttagcatagcaaacagtaagggttcaatcattacctttaggatttctgtaacgccgatagaagaggacgaagaggtgccagcaatcttgtctggtggatcttgtaccttcgccttgataggggccaaagttgaggactttctctttttgggagccgaaagcttcagatccgctgaattttttgtttcttggaagcagccctctgtttgtctttttcaatttatcgcattgcttgccttttcaaaatgcttacaattctctttttctttgctcccccagcttcttcatcaagcctttcatagtccggatactcaaagccaagggtgtccattacccggttcagccttcgtttctgccgagtaccgaaggcagctgtcatcaattgatcctttttcttcgtatagttcccaaggatctcattgcacattttctctatcatttccaaccattaggcacagcggtcgctgaaagtgttctaaaacttgaaccggtatggcaatcgaacaagctcaaatttt

SEQ ID NO: 168514 - DNA, 580 bp, Zea Mays
tgcttcttctttgccaccatagggcccactccaccggaaccctgtgtgttctctcttgagatcgacagggcttccatgaatgtaggatagggcaaatgccagggctcactccacatgccagatataattcctctccattggtctataaaaatgagggggaggcctcccttagaggcatgacaccaagaacacaacggaacacacatggactactctagggcctatctttttagacagcttcatacattttcactcttaggctctagctagcctcgacttagccaaactcatgcaaaccaatccactaaaggaggacgtagggtgttacgtcttagcgatcgaacctccagaaaacctttgtctcctttgtcgtgcttaggacattagttatcttccaataacctaactaggcccctacgccatggtaggaagtagagcaacacaccaagagcctattgccaaatctttacggtagcattatccttgtaccctcggctataaaccgacgacaacattcatcagtcaacactcaatagtcaacttgtagaattgtggttgtagacttgcagcagcccagcac

SEQ ID NO: 168515 - DNA, 854 bp, Zea Mays
gtttttgcgggggatttttgcaggtatattacatggctccgcctcgttaaaaacctcaccccccgagaggaaaagagtgtgggccggaataatactgtttggtggattacaagggcgcgtgggccctgagggtttaaataaaaaatttgcggagattgtcaatattccaggaatgctctaggtcttcgccggatggcgttgttagcctatacgcgctggggggacgccttcgacttgacgatgaatggaccctcccactttggctccagcttgccccgtgactctgtccgggtggttcggacgagtacgaggtccccttcgttgaattctcttggggcgactgcgtggtcgcgccaggccttcgtttgagcttggtatttgttgagggcctgcaaggcgaggacgcggtctccgtcgatgaggtctttggaggttgattcgtctatgtcggggacggctgatgcgcttgtgcgaggtgacccatgttttatttcttgtggggtcatggcctccgatccatatagcagacaaaaaggagtgaatccagttgcccgacattcagtcgtgtttagtgcctagattacttcaggtagctggtcggcccatttacccttcctgtcgtcgagaagccttttcttgatggcagtgaaaatcttgccgttggcgcgctcgatgacgccgttagattgtgggtggtataccgaggcgaaggcaagcttagtgccgatggagaagcagaagtccctaaagtcctggttgtcaaactgtttgccattgtcgactatgagctcggacgggactccgaatcggcaaacaatgttttgccagaagaacttctgggcagtcttcgacgt

SEQ ID NO: 168516 - DNA, 1027 bp, Zea Mays
tcttattgggacaaaataaatccaagtgtccccggcctttacagaaatgatagcttaaggtcggcgggcccagcagcccaacaggcccgcgagcacgcatggggcgccattgaaggttgcgggggcgagaccagttggaattcaaattttgaaatttagaacggtcgggaattccacctccaagaactgcacaagtaggattagagcccgagaaccgaggagacccaaccctccgcctagaggaagaaggccacgttcccatagccagaaagttcagacgattgaacacagaaattctggggcgaggccgaagaagcccagcaaggggcctccaattactacgaacctgagcaggattaagggaaggagggttcaaacgattgaacaccgaaaatccggcccgagccagacgctgaacaccactaggggacttaacattgttgcgaatcggaacaacattggcaccggtgagagggagcttaacaatatccgcataggaaagattcttcctgccccggaccttcaaccaagaagccgcttcctcatccgaaaaaagcttgaattcatgcttccagttgggtccaccgtgattccaaaggttgaagaaagctctgaattccttacgctcaatgcatccagagttgtaaatatggaaacccacagccatcgaagaaaccgaaaaccgaaaaccccggtcagccagctgaagcacctcaaagcccgcggcgaacccaccaagggcagcctgaagaagatgaccaaccgagaccgaattcaacttgaagatgcatctgccaaaagagaccaccaaccagaaggacgaccgaagactggggcgagcagagcaaactgaagatgccaggagacccctgagggagtcctcgaaggccagccccggccgaaagtccaggagagagaagtccatggttgaagaacgagaagaccggggggaggaaggagcgaggagcaaaaggacctgagctaggagccgacgagggacgacgcgatcataccgcctcggaattca

SEQ ID NO: 168517 - DNA, 849 bp, Zea Mays
gccgcaccaagacccaggctacgaaggccaggggtctacgtagcttgaataatggtgactgggccccacgctacccacgccatccgctgtaaagaatacgagacgactagacaacccccagatgctcacagacgcacgtgacttcaccaaggtagaacactcggttttaccatcgtccggtgacttcttctcgaggaagacatcgatgcctgaccccctccttaacctataaaaggaggacggacaccggagatagaggacgaacggacggttcgctgaaaggaagaggaagaccgaagcccatcgccagccaagacttagttaggactccagctctgtagccctttacctcctccgcacaagaaacttaggagcctctcttccctctctcgcgcacttgtaacccttgctacgagcattgattagcaaaggtgctagtagcgcgagtcgtcgaagactggatatagggacgttctgtctgaaccagtatagatcttgcgctcaccgtccggagcccagaacacgcacacaaatttacttgtcggagataggttcgaaacaccgacactccctaacactacatggtttttaggcaaaggtaaaagttcaaggcataaaaggcaaaggtataatttaagatatttttattttactggttaagacataataaagtgtgtaatcttgtttagaatagatggatgtactactaagacaaagttatggttcatttgatagagctctgctccatgattctttagctttgagagttgattctccaatagagtgattccaaacaattctctagtagaagtgaatatatgtgatgaaattgtttaataaattttctat

SEQ ID NO: 168518 - DNA, 672 bp, Zea Mays
ggcgtgcctcggtgactctccgtgccgtcaatggggattcatccgggacatccgtgcggtggtacgggcgaccgtggggagaaggcgcgagctcgggtctgcacggcttgaagtttcaccatggtgagttttccttccctacctgttggtcatggtcacgtatggttcgagcgggatcgtccgggcggaagttagggctcggatggcgagcacggaactgctcgctggtgcggctatggtgttcggccgtgggggactagctgggaaagaaaagagagaagagagaggggaccagtgaggttgaagacgatctttggggcgtggatttcaggattaacggcttagattgaaggtacctgccggttggatcctaacccttggatcgtgatcgcatggctcagattggtttgggtatcataaaatcgagagcgttcaaataacatccgatggtcggcgttgcataccgtttcgttataagatacgatctaatccccatcgtccgctgtcgatccgacgtctcagattggcagataccctttcgctcagacacaattgcataaggacccccgagagaaacagaaatcaacccgccgtccttgcgccagtagtctgagtctcggtaatctttatagtttagtccctgcacttcccagaaaatgatgcctagtccag

SEQ ID NO: 168519 - DNA, 742 bp, Zea Mays
agatccaattattcctctatataaagggtggaggtctggacccgttactagttggttcttgagttaatcccgcaggttttgctaataaatctcgctagaaatatgaatccctaactgattttgcacacgcgcggaccgttcggcctcagggccgaccgcccctgtcatttttttgtgctcaacatatgcccatgcctttttgtggaggttgacgaaccaaaagcatatgtactgccagcgcctttcaataaacagtagttctcacaagtcacctttgttcccgaagtgagaattaagctcgatgcaagtcactggcttttcaatccaatagggtgatcgttcaattgaacgtcaatgcataaaggctgttttggattgcatctttctcggccatgaccatcaatagatcacaaggtatataatggaagtgcccccaacctgaataggcaaagggactatgcaagtaccatgggttcattgtcataccgttccaccatttgaacaggataatatatcgacgatgagtaagcgaatgcaaagtatcctggcattagtggatgaataggtgatgcttgctgcatcgcctttctgaccgttttattcatccgttttgttttagcgggtgaccggggtttctttgttggccgatcacgtagaacagccttcttgctaacatatttggagagcaattgatcaaaattagggccagctttgaccagccgaccatgtgcgttatgtttgc

SEQ ID NO: 168520 - DNA, 307 bp, Zea Mays
atgcaaaagagtgtcatgaaatatttaacaaaataatatcatcagcaatgtcattttagagtagagtcgcgtgtttattgctttcatcagtgcatttggatcaagatatgttatcttcattgtcgactggtcaaaacctaaggtgtttcataaaaataactatgaagaggaagtaagggattgcagtcctctcaagcccctccaatactcttgctcccaaacaagaccttaattataattatacttgtgtgtatcccacgaacaccatcgtccacgacaacacattccggtgcggcatactgtcgaa

SEQ ID NO: 168521 - DNA, 323 bp, Zea Mays
aaattgagcccgaatcctgcttcttcaccacatcacgcacacaaggacttgagcaatcgactcaatttcaccagaagaactcacacagtccacaaatccattccgccctgttcttcgcgctgccgtgaaggactcctccgtggccagcactcatcgggttagtacctaccaaattgcttcctgttgtagcttgtcttcaaccttctattgctcttggagccggccaattaaactttaccgaagcctacactccagaacaccaaatcgtttcgtagaacgccgccgcgacgccctctctgtcgacccgctttttctactcttgc

SEQ ID NO: 168522 - DNA, 789 bp, Zea Mays
cggaggtagtgctaccaactgatctcaagtttggagcaccaaggctgatttttgaaaacatagccgaagcagaagccactagactggaggatattgatatattggaagaagaacgattgaatacagtaattcagtcagctaggtaccagcaaactctgaggcgctatcacgataaagccataagacatcgatctttcgcagtgggagacttggtccttcgccgaattctaacaggggacggacgacacaaattatcgccactatgggaaggaccattcgtagtagcagaagtcactcggcctggatcatatcgacttactcaaatgtacggcacagaaatagggaactcatggaatatagaacatctcaggaagttttacccttagctagatttcaaaagctatcggggcagcattgtattctgtaattggaaaatacaccatcaataaaaagacttcattctcaaaggcactcgagctatttattgtcaatctgcatgcttactcgactcagggtgaccactataccctactaacggagcaatcggcttaagtcggcgatgacttaaggcggtgtgacatgctcacgcttacttcactcagggtgaccactataccctactaacggggcaatcgacttaagtcggcgatgacttaaggcggtgtgacatgcccacgcttacttaacttagggtgaccactataccctactaacggagcaatcgacttaagtcggcgatgacttaaggcggtgtgacatgctcacgcttacttaactcaaggtgaccac

SEQ ID NO: 168523 - DNA, 291 bp, Zea Mays
gatttgttagagcaggagcaatctgtaacaaagattggccatgtatccatttatctgtccagaagagagtgtttgccccatttccaacaatagaacaaacagaagctacgaagagggttgtagcaaatctgtgcacctttatttcaaaatcagcccaaggcctatctggttcagttttctggagccaaaaccatctcaaatttaaagaccatcccatcacttctaaattatgaattcccaacccaccaagggagatgggtcgacagaccttggaccacccaacaacacaat

SEQ ID NO: 168524 - DNA, 416 bp, Zea Mays
ctacaacgcagcgagctgcagagcgatcgcgacgacgctacgcaagagctgtcctgcgcgcaaacaaaagaagaggaaaggagggaggagaaggaggaagggagaacgagccgggagagggagttggggaggccgagggtgcccatttataggcgagggagcagcccagagtgcggacacaaggcaaccatagcagacgcaagctctgtgcatggcggccacgcattccccttgcagcaatctgtcaaacacatggcgggtgctacagtgccgaccttggataacgagttttggccttttctgtttggattcggatcttggtcactgtaggagatattttacttgatctatactctacaaatcttgtaagggcttgagctcattcgtgcatcggttagagagatactgacccccga

SEQ ID NO: 168525 - DNA, 450 bp, Zea Mays
tgaggcaacaatacacggactctatctatgcatgaaaataccaggccctcaaggtgtaattacagtatatggagaccaccaagcagccaggaacatagaaagagacttcgtcccaggacagcgcaacatgcattgcctaacaacagagcgcgaagacaacaatagtccttgcccaactaaacacaaaaaagtcaatgcacaattgcagagtaacgagggaaccaagacagcccccttgaccccgcaactcccaagcaaatcgtcttaatcagcgaagacctctcaccaaacgaagaagcaagacttctctcctgccttaatcacaacaaggacgtctttgcatggtctactttagacctagtcagggttagccgcacaatcattgagcacagtctaggcatcgacccctctgtgcgcccaaggaagcagcggttacggaaaatgtccgac

SEQ ID NO: 168526 - DNA, 519 bp, Zea Mays
cttctaagtccaaaatcaccccttttccaaagatcaaacatgttcaccttgatcccaaactcaaaaccacttggcccaagtgacaaagtggcgccaaaatacctctagaacaccctggaaaagtttgaacccaaccctaagtcgtgtgactcgacttggcatagcttttgtcttggtttggacagctaggacaaaggcaacttctgacccctatatctccctaccccgaccgtatccttgcttgggactcacatcaaaaaggtaggatttggtgtagggaagagactgtacacgggtgttttgccaagatctgcatgctaaggtactccaatcggccgttgaactatggcagaagcaaacacacacgtgttcgaccatagctccccagtgcccggctatcttccccgttgcatcctctgtaccacgccaaactccccagagctcgcccatagctccggcgacctccacgcgacctgccagagccgcccgagggcaaccaccgtggccgaaccatttccc

SEQ ID NO: 168527 - DNA, 279 bp, Zea Mays
cggttccgcaaggtagtccagcatccaatccacccgctcgtgcctccaattactcaccagagagccccaatttgggatttcccccaaatcggtccgaaacaccgcgcatagtgacctcgccgtggctagctcgttccaggtccgttcatgctctctgctctcccgtttcagtacccttatgttctcctgatgctcctcgacccgttcaattaagctagaccgcgctagatcgtcgagaacacctgtgttcatccgtagttcgcgctgtcaccgtggaca

SEQ ID NO: 168528 - DNA, 635 bp, Zea Mays
ggacaaagagggcctagtcgccaggtccacatgttaggctccctagatggtagtgttcccagtgcaattaggcattgtccggtactatactataattgcctcgttacataacatattccaggagtgtagtaggtgatcgggggcataaatgtatttagatccacgccctcacagtttccctataaataccctcgtcctatagctagatgggacacccttgacgagatgttttcacactatgtgacatccgttttgttgtgccacctaactcacctgctctcgagtgcttgcatccatgtgtcgagacccctaggcccacatgatagacctaacaacaggtacttaacgcattcctccacactagctctactgaccacaccccactacggtgcccctccacctcaggtgccccctctttagcgtcagtcaccacttccacctcttctttcgctctcgaggacccctgcctcgctgacttggtccccatggggctgtggctgggcttagcagtccctcattgtctcgttcagcaccatggcactgatagcccacccctccatgctagatgaggtggcggactctagtgtctcataccacaccaccactaatgctgacatgttatctcactctcatcc

SEQ ID NO: 168529 - DNA, 485 bp, Zea Mays
cacgtggcctcgctcggtctggtcattttcaaacgctaattggctcgcgatcttctcgtaactctcccaaatccctgcacacgatttcttcgttgtcgtttactctttgtttctcttacatcacttgagtggacttgatctcggattcacgagatacgagggggcgaagttgggtttgtcgctcggctgaaaaccaagactaaagtcgggtcaacatgtgtcaaacggtttttgtttgatttaaaactttaccagtgtatgttcaaggtaatttggcgtcactttcatatttgggttttgtagatttgagttttggaaaacagagaacacgactgaacttcataaaggggtaaaagtttagttctgaattttttgagcttcctttttgaaagtttagcttgaggggcctttttgagaattttgcaaagctccactgatcaaactttcttactacattttgtagtttatttagtgcactttaactt

SEQ ID NO: 168530 - DNA, 747 bp, Zea Mays
agcccatgacacggattattctattcatcctgggagtaccaagatgtatcaggatttgaagcagaagtactggtggtgtggactgaagagagatgtggctacacatacgacgatgtgcgatgtgtgtcaaagagttaaggctgaacaccagaggccagctggactactgcatccactaaagatacccgaatggaagtgagaagagattggtatggacttcaatactagattgcctcgcaccccaagaggatatgattcgatatgggttattgtggatagactgaccaaagtggctcatttcattccggtcaagacaacttataaaggttcttagctagcagagttatatatggctcggattgtgtgtttacatggagtaccaaagaagatcatgtctgattgaggttcacagtttacctcaagattttggagaagctttcatgagaatatgaatacaaagttgaacttcagtacaacttatcaccctcaaactgatggacagatcgaaaggactaatcaagtattggaagacatgttgagagcttgtgcccttcagcatggtagtagtagagacaagagtctaccttatgctgagttctcatataataataattactaggccagtctgaagatgttaccgtttgagactctatatggcaggaagtgcaggactcctctattttggaccagactagaggaagacagttctttgggcctgaacttattcaagaggcagaagaacaagtc

SEQ ID NO: 168531 - DNA, 591 bp, Zea Mays
gaccaaaacacccccgctcgtggatctgcacagaacaagactccgcagaaccagagtagaggaagggtcaatcatgtcacagcagaatcagtgtctgaggatgctgacgtggtgtatggtatgttccttgttaactccatacccgcatcagttttatttgactctagagcatcacattcatttataaccgagtcatttgtggaaaaacataacataccaaagtacccccttaagaagatgttacacattagttcaccaggaggtgacatgaaggccacacactcatgcccccatgttaatctcaagattcaaggaatagatttttcagtcaacctagtggtcctaggatccaacggtattgatgtgattcttggatgcaactggttgaaaagttgtgatggagtgatacagtgtgccaacggaacaattacgttgacaagtcctcaaggtgaaagagttcaagttagcacagacatgtcaacaaatgaaaaagggaagacagtgataaatcacttggaagaaaagcccttggaaaatatcaaagtagtgtgtgagtacccatacgtatttccggaggaattaccaggtatg

SEQ ID NO: 168532 - DNA, 325 bp, Zea Mays
ctcatctacttcctggaatggccttagcttggtgggatactttcaatgctgccatcagagatgctacctggacagagtttgaaactactttccgagagcaccatgtgccctaagggatcgttcagctcaaggaagatgaattccgggaactaactcaagatggaagatcggtcagtgaatacgtgcacaaaatcacagaattggcccgctatgcgccggatgacgtcagcaccgaagtcaagaagatggcccgctttttgaaggggctcagaccagaagtcaagaccatcctagccagccaagatttcctcagcttctcgcacct

SEQ ID NO: 168533 - DNA, 613 bp, Zea Mays
caaacacactcccaaccttacaaaagttcgaggaacctagtagcaactcgcccaaggccaaccctgggcggcaaccgcagtcacgaatcacacaaggccaatctcgggcgagatacgtagtcacgactcgtccgatgacaaccctagacaagcaacacattcctgacttgttcgagggcgtctcgggcgacgctcctagagctacccgcttcggccaaccactccgatcctagaacatgtgtccgtacgttcacctgccccactgagggtgccaaagtcaataaaggacgacacgactacagtctaatctactgttaccgcccacaacgatggtcatggcgagaatacggggcattgttcccccactccaccaaggtttcaaccacgtagactacatgttacatctaatctcggcctcggtctcggcctcggccttgggagaaatctctgcctcgcccgagcccggccttggccaactgccctagcagaggagcacgcgcattaaatgccacttactctcccgcgaacctcacaaaagaccatgccaagtactgtttcaaccactctgactcgacacacttgggaaaacgtctcatctgcgctctgtgcagac

SEQ ID NO: 168534 - DNA, 660 bp, Zea Mays
ctcacctgctacggcgggcggtggagatatctgcgcgacgaggtgggcaagtggtggactggcggtgggcggcggaggtggcgacgagacctagggtttttgcgactcacgatcttgggacctgttgctgtgcggctgctgccaagtatcaggataggagtgtcctattcgtatacgtatacgacatacacgagttattgggcatgctgacatgctagtgcaattgagcgattgggccaaggcgagaataatcgagcgagttgcactctacagtgtgtacctcataaatgggtcaatttcgtgcttttacgggctttttcgtgccgggtcagctcaaacctgacccacacgtgcgggccgtgtcgggcccaacaggccgacatttaaggccgactcaggcctgtcttcaggtcgtgctagcccgacccaaaatattacgtgccgcgccgtgctttgggctaataatttcgggttgtgctcatgctagcccaaacagcccgacccaaattcccagcagtcaggaggacgccagacttaattatggatggcaggatctgtgaatcaggaatcaatcggacgggtgacaaattctggatgatgtggccacaagggctttgcagttacgacctcaggttagtggtttaatataaaaactcgctc

SEQ ID NO: 168535 - DNA, 655 bp, Zea Mays
gccggattctggtagtgcatgtctcggtttcagagttcacaaataacatcgaagatacaatgcaccctccggtgaagattattcccacgggtgcgcattctagtgatcatgtgccatagtatactcctctgatgagagcagcataataccttgtgcatgtatcactgtgctttgtactccgcccgaatatgtctggtccatgtagaagtcgtacttcacgaccatgagtccaccaacatttagtagtactctcctcccattggtagacccacctcatgcgttgttgagtcttttcaccgaacgaataattcacatatggaataaggggtgaagacggaccttgcctttcacttccagtatcaagggtccaatacacttgttgtaggccttggtgtcccatccctgtgaatgtggtcctacgctccttaggtgtgtcatgatcttggtcttgtctacagtattcgtaataggacacccctacatagctatgaaaatatggttagatactaatcactaatttattaagaaccaaatttaacggtaccaatgaaatgtattagaggcgccatcttagactcagcaccacaccactaccactagggctagaaaaaagctcgaggctcgtgagctgagccaagccaggtttttgagctcg

SEQ ID NO: 168536 - DNA, 652 bp, Zea Mays
ctaacaccacaggcgagataccccgaaacggtatacccagtctaatccacgccgtcggtgtaagatccaacggtcgtcgtgtctcttcccacctccagccagagacggcggcgctggcacagcccatggcggagccatcgccggagccgcgcaatccaacgccaaggcgcgtaatacatcgatccgagactcgcaacgcaacgtggaggaaatcacaaacatggtaggtaggatacttaccaacgacagaggcgaataggggggctgcccacggcgtactatagcccagccgccgtatccaaccctggcaacgaactctggccaactcgactagtttctcgacccgccaccgaagcgtacaggttgagcgtgatctggtgatgatccattgataggcgccatggacgaaacgccctcctaatttcccttcgacgtcagcagccctggcgacgagttccctacgcaggcgcgaggatttatacgtccagagccgcagtggtcggttggttgttgcaccaaccgcagcgaatcggtcggagaacctcctgtaatcgcggagcgcacgatgcggcggcggcaaatatagcggtgttgcaacggatcccagtagagcgcacagggcattcttaatctctctccctcaccgctctgc

SEQ ID NO: 168537 - DNA, 490 bp, Zea Mays
aacttcgttaggtaatcacgcatctagcgcactcacccgtacctcaaataatccaccagcaagcttcaatttcgcatttcccccaatctgtttaagaacaccgcgtgttctgacctcgccgtggtccgctccaatcaggtccgattttgctaattgtgtccttattttagaacccatgcttgtccttgatactcaccgactcacccaattgaactagcaaccctctggtcgtcgggaacatgattgtctagccgcaacgctcacggtcaccgtggccagggccaaccaggcactcatttgtgaaattaagtgaggggaagtgttcggtaggggttcaattgtgtccctgtctcccgtgagctccagccatggcgtcgtccgaccggaatgggctcgccggagcgcggcaagggctgttcctcgtcgtggaccttactctgtaaaggaatagaaaccaggggtcctttctggaaactgtcagtgactcccg

SEQ ID NO: 168538 - DNA, 876 bp, Zea Mays
gtcgacagcttcgtcaatagcctcattagcaatcttaatcttatagagcgcctccttcacggatggatcggttttaggatcatatggctctggagggggagacagttcagctgcatgctacaaaaatttacaaagctaagttataaagggtatacctataagtttggcccgctcagcagcttcttcggctctttaagcctcttctaaggcgtcatgagactctttctcattctttctaatggcttcatcagcaatttctcagccacccatcagccatacttcgaaataaaacttcccacccaaggtagtagctttggctaaagggtttctaacatcgtcagctgagaaggcaagatctggctgagctacagccttggcatgatcacaaccaaccttctccaaaatggacacggccccacgggcaccgatgaaagcacaaaaatccataagggtcaccacagatgaatttttgctctgaagagaatgcacaaacttttgaaaagctgctcttcagattcttggcgcattccatagccatatcgtaacatctttctttagttgcacgaagctcatcaacatttcttttgcccttgatcgttcaatttcacaaatttcatgtttcgttagctccacatcaaacttttagttgcttcggcaactttcttgtctagcccttgcactttgactttgtgggcctctgcttgagcagatagcttagcttcattggatttcagtctctcgactaaagatagcagaatcttgtcttttgcgagagcttcgttcctcaaggttataacctccgatcggaggtttccatgtgctatttgacaactctcatcttctacatccttttgagccttcagagccttgcttaga

SEQ ID NO: 168539 - DNA, 522 bp, Zea Mays
taacaaagtccctcttgggaagttggttctaggtttacccgagagctctctgtgtgtactagacatccgacatgcctccctagacaattcaatacctattggacatcccactgccccaccacagagtctagtgaggagcagagccgaacatgaggtcttgttcatcgtgtgcaggcctagggttcatttgtaattggcttgaaaaggcacccataaggaggatcatcgtctaatcattgcatcgtgttgtttccttctttgtcttgctcgtaatgctcatggagttgtgttgtgacctctagagcaagaaccaggagtagagcaagaatgtggagcatggccccgaatcgacagggagggtgccaagcaccgctggttaggagggagggggtcatgtgctctgtcagacaatgtcctagtgtcgctggttaggaggaaggggtggagcgatgacttcactagcctcaccacattcacacgctgctcttggtctagtttcatagcacacgtgctagggatgcg

SEQ ID NO: 168540 - DNA, 636 bp, Zea Mays
ggaggtcaaccaccagatgaactgacggactagtgagaggacaaaccaacgaaaggaggaaggacacattgatgaagacccgaagactagagccccccgccaggctaagacttagttatgactccaactatgtagcccttagctccacctcatccacacaagagacttgggagcttctactccctaaacccctacttgatcaacaaaggtgtcgataacgtgagccaccgaagactagatgtagggtcgttctgcctgaaccgatataaatcttatgcccaccacacacaccgtctagagcctagaacacacacaaatttacttgtcggagctaggtttgaaacactaatagttggtgcgctaggtacgagcttgcacgttcttgacgaacccttcaggctccagatggcctataatggcgacaacgtatcctaggcccccagagcgaccatccgcttcgagagtctcgacttcatcgtcaacaacaggggaatgatggttagggccctagaagacctagttccctcgacgagcgactcactcgacattgctggggggtctcgacaacctctggctcagccccccacaaggaagtgacgagcagcgaggcgcgctgcaacgcgccttcaccaaaat

SEQ ID NO: 168541 - DNA, 1159 bp, Zea Mays
ggccagatattcgtgctacagttttgcttcaacgtccatcgtctttggattctgcttgtgctctggctctcttgcaggaggaggtggcggtcccggacaagcgttgggaggggaggcgtctggacgtttcacaggctggcaaagcattcagcaagccggcgttgcctgtgtctttccagcctcggctgaatacgtcccccgctggtgtggaggaggctaagaaagttgaaccgcctcgacagtgcacctttgaagacaaattggcggtgcttcgagcatatcgtcgcgctaggggattatgccagaggtgtgctgaaaaatggtctcgcgaccatcagtgcccccaaactgtgcaactgcatgtgctgcaagaggtgtgggatttatatccagtggatgaaactgaactatctgaagatccagatctgactgaagatacttccgagctggcttgtttggctatatctctggctgcagcccgtggcatggaatcgaagcagacgataaaatttcagggactcattcaaggcaattctgtccgtcttttggttgattcaggcagttctcattcgttcatttcgtctcacgtggctacataattatcaggaatttcagatatgccatgttccatgatggtccaagtggtcgatggcaaccggttgatctattccaggcagctgttgggagctcgttggtctgtacagcagtgcactttcacaactgattttcgtattctggacttctcagcttatgatgtgatcatcggtatggactagttatgtgccaatagtcctatgaaggttcattgggagcacaagtggatgattattccctatcaacgatccccggtgttgttatatggactgtcagccatgattcctccagggtcggtagtggagttggctatggtggacactactccgattcagtttgagcagctggatcttccatcggctatgaaagccttattatctgaattttcttctgtttttgcccctccaattgggatgccaccttctcgagaatgtgaccacaccattcctttagtgcatggggcaactcctgtcaaaattcgtccatatcggtacccaccagccattaaagatgaaattgaacgtcaaatatcagagatgcttcaggctggtatagtgcaccacag

SEQ ID NO: 168542 - DNA, 857 bp, Zea Mays
ccaagttggactgaatcccccacagacttggagataacagaggccaaggttctacttgccgaaattggtttgttgaagaagagaggtctgactgctgaagctgtagttgcagactttgtttttaagaacattcagccaatgaaggacagagcgtacccgacttatttgtatagtggtgtcactaattcaacccgggttaccaacaagaggattcctgctgtggatttggtaagccgactggatatgattcttagaggcaaagtatcgaatattggtgctcctgttgcatattctgcctggaatctgccaccttccaagacttttttcaattttgtgtccaatcctcctgctagtgatagtggcttgggtcttagagtgcgaccctctcctgaagaagtcgaggctttggttgcttcacttggtgatctccccaatgatgagaggcaagttcactttgagatgcctataaacccaagcgatgcagagataagtgctatgctggacatgttggctggggattcttctgactcagtccctgctgaaactatagctgttgcaaccatcctagagcctggaaaaaccttgaattctgaaaaatctgatagtgctcgcccaaagcaccttcgctcggctaatcatccaactgctcctgccgaggcgaagaagaagaaaaagagacggcttcgacgagtgtcgtgtttggaccaggaagctggcccttctgctcctgctgctgaagaagtgccagtggaactttctactagagctgatcccaatgggtgtgaccctgctgacgctgacctcaatgggtgtgacctcaatgatgctgaacccactggatgtgatcttgctcgagc

SEQ ID NO: 168543 - DNA, 746 bp, Zea Mays
gggccactgaagggcctcccgatgacttgcctatcaaggcatgccctcgggccgcaaccaagctagatgagcttgacccagggaggcgaagaccagatgactgagtcatgcgctaatgcctcgggtagggaggttgagcgctcaatcctgggaggcggagaccgaatgatcgagtcatgctctgctatatcgggcatggaggttgagcgtacccgaagtgctagatactcaaatataactaggatgaagtgcaactgaattccagataagctagaaggtgtgtcactttaaaaggaggattcaggtagagtcatagtcatcatgacttgtaaagggatagccctctcgtcgtctatataaggccgagggggtgtccctatcatctcatctctcagctcatcacatctcagcttggctcagaccatcttagataatctcttatcagatctcagctcgtcaccacctcatagctcattagccctctaatagcaaccacaccaccactagatcgtcaagagaacccactctacaccgtccacaactcatttgtaacccatgaacaccagtgatacttaaatacccagcatcggcaagaagtagggtgttacgcattctagcggcccgaacctgtatgaacccttgtgtgatccgatgtgcatctgcatgtaacatcgagttgcaatcaatgacgtcgtcctgttcaaaagcatcatgtgggaatctgaaagtcgcctagacggggatga

SEQ ID NO: 168544 - DNA, 756 bp, Zea Mays
acattggacttcgaaaattctattcgaaataatagataagtactacctttgtccactagaatccattatacttgtggatggaggtactagtgttttgtctatagttctaaacttggtgtgcataatcaacatcatcaataccctaaagtagtaacagttttcacaattcacaaaagcaaaatgaaattgaaatgcagaaaaaatgcaaccatgcacctcatgctacggatatgattatccgtgggtcaggagcagtatctgacctcactattgcataatataacactatttgttgcaaacagatacacttaaaaaggttgaaccagttgctattgatggtttcctaagatcgacatggaaccctagtaagactataaatctagaactaatcatgtgggatcaacccactactgcaagcctaacaatgaagcaaactgagctgggtgtaaaatattctacacaggatagaaaggctagtgctttcaagacacattgacaaaatatattgatttgttagttgtaaaacatggaatagtatctaagacttcactggatcaaaacatctaaaggctagaaaagatgactacaactctagaactgaacatgtgcgatcaaaccactactgtcagcccaatgatggactgaatggagctgggtgtaacacatttcatgtaggacaaaaaatagtgctctcaagatgcatgtccaaaaagtagattaataatgagttgggtacatggcattctgcaacatctt

SEQ ID NO: 168545 - DNA, 422 bp, Zea Mays
cgatttgggggaagtaccgaattcacgggctacggtggctaatcgggggccagagttggtgttcaggcttcgtaacaagctaacggagcaggccgcaaactcaatttatagcgtccgcaagcgatggcttcgaattcggggaagataagctggcggccggagaggaggtgagtcaccggagcaaaactactgtggcgctcaccggggcaatgtctcaggcgacagatgggctatctactatgatctactgcgacgtggtaatgcctccaaatacatggcatccttgcggcaagcggcaaactccagcgatggtcatcttgatcggtcgcggggcaagtgggtacggtggccagctcacggtctcatccgtggtcaagatcttttcacccgccacggttatccacttcacacatgcacgaatc

SEQ ID NO: 168546 - DNA, 861 bp, Zea Mays
atctttgtgtttggtaaaccaatccattcctaagatcacatcaattccttgggatggcaagatggttaagtctgccaagaacactaccccacttaaaaggattctgacttgggagcatttgtgctggcatagaaggtctaaccctggggttcgggtgaccaagggaatctctagaggggtagagggaatgccatgcttttccacaaaactagtggctataaaagaatgggatgctcctgaattgaaaagtacagtagcgggagtaaattcaataaggaactcaccgagcactactcccagagcttgctgagcctcctgagcatcgacgtgatttactcatgcccttccttaatattgggtcttgttctgctggctgatggaggagggtgccttgggggcggatgctgaggtattcttggggccattcaccgagttggagtaagcaggtcctaatggcttcagctggggacagttgttcttgaagtgactgggatctccgcagtgccaacacgcattcgccggtggttggttgcttgcaactgagggggcatgaaaggtgctctgactctactgactgaaccgtgatggggtgggtccagttggtctactgaagcttggtcccttgggtggaaatccaaaggatcgagttttctggtgccgatcttgctgttgagctcggaggacttggaatttcctcttgagatggcttttttcttcctcctttgccctttccacttgcatggctttgttggagaggtgcgagaaactgaggaagtcttggctggccaggatggtcttgagttctggtctgagccccttcaggaagcgggccatcttcttgacttcagtgctgacgtcatc

SEQ ID NO: 168547 - DNA, 374 bp, Zea Mays
ggaacaaatatatcgttagtgatgggtttgtgtatagagctaacaagctatgcattccagctagctccgtctgtttgttgttgttacaggaagcacatggaggtggcttaatgggacattttggagcaaagaaaatggaggacatacttgctggtcatttcttttggcccaagatgagaagagatgtggcgagattggttgctcgttgcacgacatgtcaaaaggcgaagtcacggttaaatccacacggtttgtatttgcctctacccgttcctagtgctccttaggaagatatttctatggattttgtgctgatattgcctaggactaggaagggacgtgatagtgtgtttgtagttgttgatagattttct

SEQ ID NO: 168548 - DNA, 560 bp, Zea Mays
cagaagaggaagctcccggagtgaaattaacagaagaaccccactgagccgccgggtgaggcagacgcggagctccaaactgagacggcataggagtagtcagtgcaggagtaggtgcagccagatactgaggaaaaccctgcatcggcatgaactgagaagtcccaggcacataaaactgctgtggaggaagtggaactgaaaactgctgctcaacacttgacatcatgttgatagtgccctgagaagaggaggaagtcaccggctcccatctgagcttcccattaggattcctcctacacaccacatccttgtggtcctgactgcagatagaacacctgccactccactagcactctgcacggtgatgcgcatcaccacaacggaaacacaccagccctagcccgggcttaggaacagcccgaaacctctgagtacttcctcccgaagtacccaagtcagaagatttgccacggtaaggatggtggcgctgatgctgagacttgcccctcttgtgggctagacctccagtgttgcccctcctcgcatcctggccacga

SEQ ID NO: 168549 - DNA, 519 bp, Zea Mays
tggaggtggcggcaaaggctgcgacgcgactagcccgtcgttggtccactagaagacgcttcagaggcccacatgtcaatgtaatgtatgggtgtattatttagtgtgtgtcgtgtgcagggagcatggtgttgtaatattcttcgaatatagttggtcgacgggggtaggaccatactttggaccacctacccccccccccccccgacggtcctataaataccctcggcctgtagatggacgggacatgcataacgagacgttatagttcccactcaacgccttgtccctctctcttgttcattgctttttgtctctgagtgtttggcccaccaaaccacgtgttggtacccaacatttggcacccaccgtttgtgcgatgaagactaaccccatgatgcctcctaagaaaaacacctgacccagttgaccagttgatggcgacgacctagttcacccgaagacggcgaggtccacaccgctagctcagacgatctcccaccaaaccgaaaatctggc

SEQ ID NO: 168550 - DNA, 452 bp, Zea Mays
aagctcgtgtgggttcctatcctcctaatatgtcaaactaacccatcaaccttgagtggtagatgcaacgctggatgcaggtgaaggggcactccggagggagccgcatttgggccgaaagttggctctaattcctcgggatcctcctctccctcgcttcctgcctcgtttgcctccatgtcctggtggtgcacctctaggtggtcgttggcttcttcaagttcctcctacacatcatggagctggatctctaggatattgatggtgttatcccggatctccacctgctgctctagagtcacgatgcgctggctcaaatgttccacatgtaggtctttttccaccaattctaaagacaagtcgaccacgaagtcctctcgactgtcgagagtgatcttcgtagtctgggcgagatcagtgaggtgtgccatggcgtcgctctgcagggcctg

SEQ ID NO: 168551 - DNA, 384 bp, Zea Mays
ggacgcaaagctctgcagccacgctatccacgacagctgaaaaaactgtagccgtcagattcttgatttacggtctttaccatagtgagggcctgaggggaactacagtttctaaaggctcctcgaatatgccagatcaaacatcgatgtggcattttatatgtctcactcatagtctgcctcgccggttccgcccctctcaccttggcctctccaccgtccgcccttgcttcatagtgccagcaacgactccatccaccccctagcatagtagctgatgcatacgtctagatcccaggagtttcctaaatgcgcatgaggttgccccacctcccgagaagcgtcgttgatccgctcgcccgcctgcggaacaggtgacgaccc

SEQ ID NO: 168552 - DNA, 602 bp, Zea Mays
gcaaaactggctcgtcggaagggtattgggcaattctgaccgtcagatctaaattctacgcgcccgattagatccgcaattctgtgaactagaacacaacaagtaccgcccgatctaggatcatcggcccagatttaatgttggccgaatcaatacggatcgcccgattcaacacaaacgcctaggatcaatatttcccgaaccggtattctatatctaatcagggccgcacatctcgtatccaatggtgcacacccatcctctcccccaacccaattgagcagcggcgtaccggccggagtacggcggcgccatcgccggtgtgcgccaaccggccctaacaaggccctaaactctaatgcgacaagccctaaacgaagtggagatgaccgtggattgatgtagcgctttcttaccgaggattggtgttctggtgatgttggccgcggtgccaggcggatccgcggcggatttgtggctccgacgagcaattacgggtcgcacgaccgtcgattctgcccgcaaacaccacagatggctttgctctagcacggcgcaggaccccaacccgatcctaggttttggacgacgacggggaagag

SEQ ID NO: 168553 - DNA, 564 bp, Zea Mays
cccaaatagaatcgtggtgtcgggaggtattgggcaatcccacaatgaaatccatgcaaatatcctcccatttccaggatggtatgggaaggggctgtaaggtgcctgctaccttcaaatgactggccttgactctctggcaagtgtcgcaatcagatatatacttcgcaatttccctcttcattctggtccaccagtacaaggatctgaggtcataatacatcttgttactgcccgggtgcatggagaatttggaaaggtgagcttcatccaatattttctttttgagctcgggattcttgggaacaaccaatcgatctccaaaccatagaatccctttgctgtcctgacggaagcatttgtatttacccaccttctgttcaatcatttccttaatgacttggacacccttgtcaccaatctgcgccatgactatttgctcatgtaaggtgggctccactgaaatataactcaaagcaccggaggaaatgacttctaggttcagcttgcacaactcatcacatagtgtggtgattcttgcatccatattcatacaattgcact

SEQ ID NO: 168554 - DNA, 580 bp, Zea Mays
ttcccacaattgaagcagccagttaaggaactagggagggtggggaaacgagcactaggggcactcggctgatttgttgaagtgggggcagtggcagggcagatggagacaggctctttaaatgggtaggagggtggacgaggtgaagaacagttttgattgaaaggtcggattaccaaccttggtcgcttttcaggcccctggttggacctgtcacctccgaatcccttcgacttccctgagcgtgtgttcttagcttctactgccagcacgatgctgacaacctactgtatgtgagatcaaggcaggtggccatttttctttgaagccggttgttgaggcctctcataaagcaattcttctttttcaggtcagtatttacctgaccaattgcatattgggacaaatgattgaatttgttgagatactgcaagacagtatctcctcctttcttgagtcgcatgaattcctcctatttcatgtgcagcactccttctggaatatagtgctcacgaaacgctaatttaaattcgtcccatgtgacctgatgtccggcaggctgaatggccacataatttcc

SEQ ID NO: 168555 - DNA, 753 bp, Zea Mays
gaaccaaccatgagatcaagattgatgagcttttagagacatgagagaaccaaggacaacaatcaaatccattgaaccaaatggatatgccatttagagataagttgataaaacaagcgtcatgatcctcagagaagggggtatgagaatgaccagaaatgagagatttaggcaaatcaacatccgatacttgagaacagtttagagcagataaccagataatggggcagaatcaataggggatcctgagattcggatgataaagccaacatgattcacaagaaaaaggattaccagatccaggtgaaaagagaggtagtcgcatgagatcgcttaggacgagcactagaaaggttacgaagattcaggataggatctatggaaagaaacatggccttgatagggtttgcgcaactagacaccaaacgatttttctgacacaacaagtgcacaaggagacttgggttggtctagcggtcaagctgtgggggtctataagatgtgtaggtgcatcaccaatagtgcaacacacaagggctagaaaacaccaacacaataatgaaatttttttaagaggtttcacttgctaaattcaaggttgtttggaggggtcttctcatgagcaggatggacaacattttttttcttgcaaaaagggttgaacaattacaataccacctagctagcaagacaagagaaacacatagcacgacctaacaagacttaccaatctgacacgaggtaaggcatttc

SEQ ID NO: 168556 - DNA, 707 bp, Zea Mays
gcaccactaccaatgccccagcaggagcagcatcagaagagtcctcagccagcaaatcaagcatagcgcttatctctgcatcactagggttcaggggcacctcaaaatggacctgtcgttcatcatcaggaatctccccgagcgaggcaaccaaggcactaacttcttcagcagagggtcgcactctaaggcccaaactgccatcagtgacaggtggattcgacacaaaaagggtgaaggctttgggaggaggcaggttccaggccgagtatgccactggggcaccaacatttgcactttgcctctaaggatcatctcaagtcggctcaccaagtctgcagagggaattcttctgttggtaacccgagttgagtcggctaggcctcgatacagataagcctggtatgccatgtctttcaacggctgaatattcttgaagacaaaatcagcaaccacagcttcagcagtcagacccctctctttcagcaatccaacttcagccagcaaaacacctgcctcagctacctcctgatctgtgggagactcagtccagcttggggtgcgaacatccggctgtcttcccgaccgggggggagagagttcccataattctcaactatgaaccactacaagcgccatcccttgatactatctttgagaggaatttcgagatactcagtcttcctcccgcggcgcatctctaagct

SEQ ID NO: 168557 - DNA, 337 bp, Zea Mays
gtgaattctaccgcagtggcgctcatgccgtagttctccctcactgtaccttctaccgatgtggtcgacatgcgctagtgatgttgtccgtggccgtgtggtgatcgtcggaccgccacggctataaataaccattgggttcacggcgaagggtgatcatcgcaaacacagtgactagatcgaagtcaaatttgcaccgccctctccatcttctcccaaatcgtttgcgcacggtgaaagcacagcttcttacggccgagtagcctcaatccccaaccccaatttcaaccagagccaccgcgacgccgttttcccccaaattggtccgccgcatcgc

SEQ ID NO: 168558 - DNA, 1207 bp, Zea Mays
gttggtgtgggcgccgtactcatgcagaaaggccatcccctcgcatttcttagtaaggccttgggccctaaatcgcgcggattgtccacctatgaaaaagaatacctcgctgttatcttggctgtccagcaatggagatcctatttacagcaccatgaatttgttatcctgactgaccataaaagcctcacgcagttgaataaacaacgccttcatacaccttggcagcataaggtgttcaccaagctgctgggattacaataccggatccagtatcgcccaggtactgaaaatcgtgttgctgatgctctatctcgccgtatagatcctgaatgtcacgctgtttcagtggttgttccccagtggttgttggatgtccagagcagttatagtcaagacactgaggctcagtcgttgctgtccaagttggcaatagctcctagtgctgtgcctcattttactctggtccatggactcctgaaatacaaaggacgcatctgggtgggcgctgatgaccaacttaaaactcggatcctgacagcccttcattgctcccctgttggtggtcactctggggcacctgttacatatcgtcgagttaagagtatgtttgcttgggccaaactgcgacaatcagtccatgaatttgtgaaacagtgccagatttgtttgcaagcaaaaccggacaggtctgcttatccgggcaagctccaacccttgccggtaccacacacagcttggcacacagtttcattggacttcgttgaaggcctccctcgctccggcactgctgattgcatcctagtggtggtcgacaagtttaccaagtttgcccatttccttccattatcccatccttacaccgctgcttctgtcgcacagttattcctgtctcaagtgtaccgtcttcatgggttccctatggctgttatatcagatcgtgacccagtctttactagccagttttggcagtcactgttcaagttagcaggtgctgagcttcgcatgagttcatcttatcacccccaatccgatggtcaaacggaacgagtcaatcagtgcctcgaaacattcctacgctgctttgtaagtgcctgtcctaaaaagtggtctgcgtggcttccctcggctgaattctggtacaatacaagcttccactcatccctgggctcttcaccctttgaagtactctatggtcgcaaaccgc

SEQ ID NO: 168559 - DNA, 523 bp, Zea Mays
agatgatgaagaagaggatgaaatccctctgattcggaagaacagccggcgttacatagctagtggggaaagtagtggtgttccttctcctgccttgtttgccctcattggtctgcaagaattatctatggcgaactttgatcaaactcttgaagacatggttccagaagatctattgtcggagccggcagatggtggcgcgatggatgtttgtgctgatgtgcccaatgtccggttggggtcatctcgggcagcgtcccacgcctcatcgaccttggagcgcggtcttgggggtcaggaggctggtctggattgcactgctcccatggaagtgactgagggaccttcagccttagaggtggctgctgcagagaactcggccctcaaggatggtgctggcgcttacccagcccctgagggtgttgccggagatgatccggcttggatgggtaatgcgagctgtgacccagcccccgagggtgtccgagtgggttctgcctcccacacttccatggatgttcac

SEQ ID NO: 168560 - DNA, 1282 bp, Zea Mays
gtcttttcttgcagagctggtcttgggacggactagcccaaagaagcgcctgttcttgagctgcacaaacaaggcataggacaggcacagatctttgagacaagcagctgagttggcattcagacgatcccatatctggtcgatggtgacgagtccacctccacccagacggtagcagactgcatactcgtagcccttcacgctccgagggtcagagtcagtctcagtcgtagcctttctcgcacttgctccctccttctgtgtgcgacgacgacggatcttggttgggatgagatgaatcggcttctgctttctgtataccagatatactacaataaaagattcccaggccttcgtcactaaagcgaaataaaagagggcgacgacacagcttgaacttgctctgggtttcttgtgatgccggctcaggcccagggctgccttcaaggtataagtatttggattaaggagcagaaggaacatgatgtagtagaagacgtacttaatggtggtgactacagcctccatgcacttgttgttgacgctatcacagaaatcatagtactgtacggcggtggtgcccgatgaggccatgatgagaaaaacagcccagacgggatacgacgagttcttgatcggggaggactgcatcgtaccaagggtgtagatgatgagagcctccatgagtttggaagacgcccccaggacagtattgacgaaggagttacgacaccggtaccgccgcctgaagaagcccaagaagagctggagaagcagcagcgcagcggccactagcaccagaccttccacctgggcgatcgtcctccttgggtgcttcagccaaggggacagagcctgcattgccctcgtcatgtttactactccatcttggttggagcccggcggatcctgatccatggaggaggatggatggatagcgagatgaatgaattgaaggtgttgctgttgctcttttgaaggaattgggtggtgtttgtcttggaagctgtgcgtgtgtatagtgtgctggcggcttcttcgtccgacttaaacgctactcgttttatttcaagttgaaggtgtggtccgatcactctggattaccacgcagctttaggccccatcgattactttggattggtccctgcgttctttttccttcatttctgcaagatacctcgcgtaccccggtggctagatccaatacgacagtgtggagctccgaatatatatgtttccttctcgaataaattctccaaaagaatttatgcttcaaaagcat

SEQ ID NO: 168561 - DNA, 721 bp, Zea Mays
tacagagtcagcggagggagtatcgatattccttctccagctctgtctgctcttgttggtctgcaagaattatccatagcaaattttgattaggctctcgaggatgttgttcctgaagatttgctgtccgagccaactgatggtgatatgatggacgtctgctctgacattccagatgtgagattagaggtatcccgggcagcgtctcgtgcatcatcgaccttggaaggcggtcttcggagccaagaggttggtcaaggtcgttcaattcccatagaggtgactgagaatccttcagccttagaggtggttgttgcagagaacccagtcctcaagggtggtgccagcggttgcccagcccccgagggtgttgccggtaatgatcctgcttgggtgggtagcgcaagctgcaacccagcccccgagggtgttgccggtgatgatccggctccgatgggcagtacgggctgcaacccagcccttgagggtgtccgagcgggctccccttctcatacctccatggatgtccacatcgggtcttctccaccacattctggtggcgtactagtagcgcatgcttcaagtgagggagtcgccttagaggtcggcgcaccgaatgctggagttctgatgcctgttagtggtgttgaattaatccctggtgatgttcttcagattgccccggttgatattccttcatcgagccaccacctagcttctc

SEQ ID NO: 168562 - DNA, 581 bp, Zea Mays
ttttcttgctcgacacgatggttcagatcgtcgagcaccgtgacttgtctcccgaggacttcctgatggaggaaggggtagcatcttctgtgccacggggctcttaccgccctgcacctggtgctgctgctatgcacactgcgcagtagcacacgcccccgcagacatccagggctccgtcgggggctgctcatggtggggcgttgtctgcagccagggagttactacgcaacccaccaagttccacggcctcgccggggggccatgagacagtggcgcaaagatgttgaccgtctcctcagcatggcacattctagctcggccaggcccaggcctcggtcattccggcgtcaacgcgaggcgtcggcatctgtgcgctcacccttagtgaggggtgcacggactgacgacctgcgggcagaactcaaccgccgatgtgtgggcgaggatgctcgaatctctctggagaagactgacgatctgcgggcagagctcaaccgtaggagtgcgggcgaggatgcccaagtctcactggagagggcgcgtgagcgccgacaaaacttcgagggtcgcaacctcga

SEQ ID NO: 168563 - DNA, 723 bp, Zea Mays
attttataaaagaacagggacccttttgaaaagatgcagccgcgaaggggtacggttaattctcggccgtccgatcaaaaacaatgttccagattagatctgttattgaattcaaccggtatgcgatctaagccctcagatccagaatcagcggttgatagacgtccccgctgtgatctattcccagcccaccgatctgttctcaacggtcctggtttaattaagcgaaggggtaccctgtgttataatcttggccatcgagtctaggatcaacggtgatcgacacatctcccctcccagaactaccagcacggcggcgcctaagcgcccgcgacggcgcacgccggtgagacgtgcaattggcgcattagtcgccccaaaccccgattggatggatgctacaagaagaggggtcgatggcgagttagggagacgtgatcataccggtgcttaagcggtggtgaggatcgaccacaatgggatgcggactgcggcagacacggggcaccggtgagcaatcaccagtggttcggtgatccaccccacccgagaaggctacaagaatgttcctgacgacagggcgaaactccttggtcagccagcggggcaccaacggtggtggtggcatgttaccccgacggcggcatccattttctctccctcttctcgctcttggtgctcggttacggcagcgcgatgccagagcacaagcatcgacgccca

SEQ ID NO: 168564 - DNA, 551 bp, Zea Mays
gccgtgaacccaacgcgccgccgccggtccctctcctccccgcatcgtcgtcttcgcaggtacgggctacctcctccgcgaactcctccatcccgaccgtctgttctcctcctacaccacatctcattcccgtcttggctagggttcgcgcacccacgtcggcgcctcagacccgtcgcgaaggaacctctcccccctgtcttcgtcttcgcaggtacgagctctctcctccatacggaccctctcattcaccaccgcaggtgcggtcgttccttgacccttcactgtcgctagggttgccgcacccacaccggcaccgctgctccgtcgtgaaggttcctctgctccccccccccccccgtcgtgtcgtcatcttcgcatgtacggtgtagctcgcctcgatcccgaccctcgccgccccctcctctcgtgttgctagggttcgtcttgccccgtttactatttgtttaggcttcatccatggccggctaatttccagttaattcagtacatcataacgggtatggatcgacgtactaactaattttttg

SEQ ID NO: 168565 - DNA, 401 bp, Zea Mays
ttcaagcttaactagttttctacgttgactaccatcaattctatatttttcagtcatcttttcaatgttggctttagttgaagcatgaagtttcaaaataaagtcagcacgcttcttagcatcactatgtacttgctcggtagtaggtagaggcaaaagatcaataggagcacgagggttaaagccatacactacctaaaaaggacttaccttggtcgtggagtgttccgcccgattatatgcaaactccacatgcggcaaacacccttcccacattttcaagtttttcttcaatattgctcgtagcattgcagacaatgttctattcacaacttccgtttgtccatcagtttggggatgacaagtagtagaaaacaacaattttgtccccaatttgttcc

SEQ ID NO: 168566 - DNA, 826 bp, Zea Mays
tgcctgttaatggaaattcgtctcgttctgaagctgagtcttggtcatcagacgggggtgattttgggagcccgtttttgtggattgaggagtcttctgatgaagatttagattattttgctgcattggatgtggtcgcgacagagtccttggcgcggcctgaagtgcgtgaagggtctgctcccccgtctggggcgatagccgaagagcaccgtggtgaaaggtggtgtcgaagcacaatgttggtgagatgtcacgaagtgagaggcgtcgacggatggggatggaacgaccccgtcttcgactagaccggggcggtcaacgagatttgctatcctcgacgtacgggacatgtattggggagggggatctgcggaatctttttgagggcgaggagttgaagatgatgttgtttaacttccgagaggcagaccttattccaaaggctgagccgatgtagcatggttgctgccttcgctctcgtgttgcggtagtgagtgaaaatgttgccctccctcggctcgcaatagagagggagggcaacaagacatgatttgtattatttatgcaatgtggtcggtgggcccctcgctgtgtgtatgtaaactatgatgacaccgcgtgctgcgcttgttgtgaggttgtcccgacttgtaatcgtgctggcgtggcgcgtaaatgggatggggacctcgctttccacggcgatgttggacgcttatgacgcgtacctggctgcacccttatgtggtttttgttcgaccgtgtcagatagtagagactttgcacctttaaggtgatcgtaatagactttgcaccattaggg

SEQ ID NO: 168567 - DNA, 703 bp, Zea Mays
atctctatagcagaattgtagctagtatgtagggctacaagtttgttatagatggattggcatgttcttgcacaaaaattcaagatctaggcgttgcaactttgtctgacaggcgctctaaatcgcgttttaaatggtacagtgtccagattagaacaccagttcagataactcaccgccggtgaccgtgcgcccgaattcgcgcccgccgtggtgattcgtgccaagcgcagttggataacgccggagggtaagaaatatcgcaccatagatgaactctggccactattctaccccggccgccgtacccgcctgagtcatgacccctttggataggctcaccgaagttagccacctcgcaaccttgcaccacgtgcctcggtgctttaatcacatgccgcagtgagtcaccttagcccacccgatcgtcgctagtgagcccgccacggtaaatgccaccaattacttgcgccagagcacccccttctctccggccaccgcgcgtcttttcccgaattagtcaccaccgctcatggatcctataaattgagcctaccatcggttccgcaaggtagtccagcatccaatccacccgctcgtgcctccaattactcaccagagagccctaatttgggatttcccccaaatcggtctgaaacaacgcgcatagtgacctcgccatgactagcttgttccaggtctg

SEQ ID NO: 168568 - DNA, 447 bp, Zea Mays
cctaaggtcagcacctagagcgggtcggcggctttctccaccaccgctgccacctcctcgactacgggggcagtccccatctcactctgacacctgagcctcgggcaagggcgttgacaccccaaacctgggcacgggcacatccgcaccgctggacgggcccgctgaggctgactcaaactagagcctgacctcagggctagagcccaaccggacctccatcccctcctcatcgtcgtcgttgtcatcatcatctatgctgggagagggctccagcggcaccccctcactctcatgcgcgtagcggtgcttctccaacatgtcgtgggcccacttcttctcagcgtccttcttcctcttctgttcctcgacagccaaccggcatgccctctggccggccatgtcttctaggactggaggccgggcggttcggtacctccacagccc

SEQ ID NO: 168569 - DNA, 898 bp, Zea Mays
ccgagacacagcaaaaccaggccatggactgcgggttgaatctctaaacttataaggggttttctgcaaagtggttacgcgaaggggtatcgcggcatgcgagccgcacaatctaaatcggacgcgcgggattagatggagttccatatgaaccggtatgaaactacggtcgtccgattaaagatcgatggtcagggttttatgaagtgagatctaataggggtcgaacagatcgcatccaacggtccgaattggctcggaacaatgcctcacgctggatcaaatctgaaccattcgtccagatccgagggtcacacgctcatcttctagatctaatcctggccacacgtctacaatccaacgacactgatgccatccagccgaaccggtatctctagatctaattgaggccgtccatgcgatgatctacggcgagggctactatccccaatctcggtcacggtacccggcggcgcccaggtccgacggtggagaccatgccggagttacggtcaacaggagcctcgatctcgaatcccccacatacacccgtgattaacaaagagcaaggagagacgaacacaataagccacataccaacggtggagagtgtcggcgcgagtggcccgacggtgaatggcggttcggctggaggagcaagtctgcggcgagctattcgtcgggttaaggtgacgcccacgcccgattgccagcccgcgcaggatccccggtcactggtgaacgtccttgacccctccctggttcctgagccacaccaatcgatggaataggcaggcggcggcggaccgagctccgcccacggtgcccaacaattccacggcggcctgaatcgtaatccgggacggtgagagcacggtccccatccctgatcaccggc

SEQ ID NO: 168570 - DNA, 720 bp, Zea Mays
ctctcggaagaacgccgccgttcaccgtgcccgcgcacccgttccaccattcgcctcggtgagttttgcctcggtgcccacaacttgagatgcgcctcagcttaccctctccctctctggttccctctgcccgtgctcaccagagtttccctcgtgccgccgaaaagccgccgccgtcgacccaagcccttgtcgtgtccctgccatcgttcaagggtcccggagtcttctctcgatgtaagcaacccagaccttcccctatttttcccttgtgtgccctcggccatgcgcgattgctcgctggagtagtgttgcgccaccgtcgagccgcctcgccatgaaatgccccctccagcgcctttgtgtcgatgccatgcccctagccgagttcgtcgcgctcccctgaattccctgagccattcaagatgtcccagcatgtttcgccctcgtctccggttgaccttcgccacagacgcgagtagcgccacctctggcggccgaggaacccggacgttagatcccaagcgttcatctgagaccgggtggcccgaatctaattaaacctagtctaatactaaccatctgattcggatccggccgctcaggttcgctccctcacccacgctctgcccctaggccctaccggtcagtgcctacacccatggcgctgggcctgactagtcagcccgcctcctgttggggacttgttctcaaatgcta

SEQ ID NO: 168571 - DNA, 508 bp, Zea Mays
tacctttgtccatgacctggaaacgttagcagctagcaaaataactctgatgttttctttgaaatgtaataccgtctccttatgatttaggattcattcccttaagctttaaatgaataaagctactacatcagagatagtattgacttggagttgggtgcttccatactggtgtacatttggatcttagggttagggtggcgttttttggctgggccttgtgtttggaatatcctaatgaaactagcttgctaaggacgactagagtgtactggcacgaaaaataactaaacctttaaagtgtgagtttcgtcgcgcgttgtccccctccccacgcgaccaagcgagtgtcgtccatgttttatggcagaatacttactgttgattcattgatacatctctttctcactttgttgcgcgtccaccactccattctggtcatactcgtgtaagcatatatgtggtgtcttcattatgacactggaggtccagcttaggattagttctg

SEQ ID NO: 168572 - DNA, 538 bp, Zea Mays
attaattatctggactgggcgttattttctggtaagctcaggggccttctcgcaaaactcccacagacacagtgaaccccgaggggagaactgcaggttcatttgtattaaactgagggactcttatgctaaatcatcacagcgaagaggtatctgctgatctcagtcgcacgctctcacacctacggactagattagatctacatttattaaaccggtacgctacgaggaccacccgatgttgaatctacggcgcggatcgtatctttacccggagtcatccgatccatccgatcggatctgaacggacccggttcactccgtgctaatcgctactcttggacgatcacagccgctcagatttgatccgacagctctggttccccaacccgaaccggtacccggtgtctaatccaagccatccgaaagggatcggacggcgccagcgttctcttcctcgcctgccagcgtccgacggcggcgccgccctggtgtttgaaatcgcgccggcgagcatacccaatccggtccctccgag

SEQ ID NO: 168573 - DNA, 707 bp, Zea Mays
ccctaagttaattgcacggatggcgacctacaccgccctgcccacgggaacagcggaggcatcggatagaatcgcgtgttccccgtgatctacggcggtttagttcaatctacaaggtcgaggagtttgagaagagcttagggatgctagaacgagcaacagcgcaacatgagttgacctgaatcgggccggccgcggtgagctcgatcccgcggtgcttcagaacatagttggggaaaatttgaaattggagcacccggttgcaggattgggggtgatactggacggtggggtacgtgatgaggttgcggagctaacggcgggctcgatttatagcttccaggaacggtggcgctcgaattgaggatggcgcggtggcggccggagaagggaggcgagctcaatccggggaaaagtggctttcaccgtggcagcgattccggtgatcgccgggcatgcaaccggtgagtcaccgcgaggaagttccgcgctgagacacgtggtgcgcgacggcggtagcttatcggtgacgaggtcattcaaccggcggtgagctggggcggtgaagtgtggcggtcttagccgtagccaagcttgagtagatcagacgccgagatctttactgggttgtgcttatccatggcgacggcgcacgaatcacggcaagcggtgatcaacggcgacgggccaccggcgacgagcagagg

SEQ ID NO: 168574 - DNA, 534 bp, Zea Mays
ctgatgcatatttgatatggatgcttctttgttcgcagaaatcaaagaattccgagctagtgaaattggatcccaggtcagttataatgttattcagtattccgaacctgaatattatatcttgtatgaattccacttccttagctgaagtcagagaagcgatgggtttgtactctatccatttagtgaatttgtcaatggcaaccagcacgtttgtgtatcctccttgagctttcttgaatggtccaatcatgtccagtccccagcatgcaaatggccatgttacgggtatggtctgcaattgctgtgctggtaaatgctgctgctttgataagtattggcacgcttcacacctctggactagctcggctgcatcactctttgctgtcggccagtagaaaccagacctgaagaccttcccaactggagtcctggatgctgcgtgtatcccgcattgcccggcgtggatctcatctagtagttgcttcctagtagccgaaagaatgcacttcaagaggactcctgttgtgcccc

SEQ ID NO: 168575 - DNA, 427 bp, Zea Mays
aggaggaagaatgttggttagagatctatgactggaaatgatggagagcccattgttgttgcatcgtcagtctgtggtcagagaggggaagattttggcatggtggatcatcatcgtctccaactgcagctttagcaattaggaggaaaactgaaagtagtataactatctgtacttagttatatacagggattgagggagatcgtgccttaagtgctctagatcaaattgatgttgcctccgctttcacatcaagccaccaaacgatgctggctttcttcgtccgggcgttgtcgtgacacctactgcgtgattggttgtctgtatggccacggccatactcgctgcgtgcgttgaccacacgagagcgcatgattggcttcctgcgcgcctacaagatgggctgcacgcgtaggtgcgatgcatg

SEQ ID NO: 168576 - DNA, 316 bp, Zea Mays
atgtttaaaaatgtgatgtaccttgatagagaagaccaggatactgtgtaagctacatgtggctccagttcctttgatcaagagcaacaattcatcctcgactccttgagctgcatttaagatcaagggtaccagtagatgaatatgtatttacccttttgagcaatggataaaagtttataaatagaacactgggaaggaatcatactgcacatatatttcaaaaggttcagattctaccttttgtcactcccattcttcctatggtgtcatcatttgccttttgttgctctaattatatatgatgtcactgtca

SEQ ID NO: 168577 - DNA, 565 bp, Zea Mays
agttatatggaaatggttttttaatgagtagagggatatataggggaaagtatagggggaacggttgcgggacgagtgaatatagggaatggaatcttgctgacgtggctgcatagtaacatttagggggaaaaatttagggtgaacggttgcggacagtctcaacgcactgcccctgtggacggcgggttgataccctttaatctggaggttctatttgtaaaagcgctcggctgaagctatgaccatcaatcctagccgcacgatcgaattacagcggatgagattagatggtgaaggggtatgaaccggtaatcaataggaatcacccgattagaattctacggcttggatttaaaaacacccgcaatcgccacggctcgcccgatcgcgatcgaacgaacagattgcatccccagtgaagagttattacggatgtaatcaccaccgtcggtgtgtggatcgacggtcccagttcaatacggcaaaaacgttatgcgccatttgatctcagccgcccgtcacaaatcctacgacacccggcattcctgcatactaatccaac

SEQ ID NO: 168578 - DNA, 981 bp, Zea Mays
attatttagagtaccatcaaaacattgatattcttctaatacctgttggacaacgagctgagaatcaccaaatgccttcacatgttttactcccctacaatttaaaagctccaagccgaacaaaagagcctcatattcagcttgattattagtgcagtaagttttcaatcggctagagaagtcgaaagatacattacttggtgaaacaagcacgatgtcaattccttgcccttcattgcaaaccgatccatcaaaatataaagtccagggagtaacagtgaggtatgatatgtctagtttatgagtatcattaatccgatgttctacaataaaatctgctacgacctggcctttcatagatttcaatggttcataggccaagtcatactctataagtgcataagcccatttaccaatcctaccactcataatcgggttttgcaacatgtatttaatcacatcggtttgactggcaacggtgcaatgactagacagtaaataacatctacacttggtacatgcataaaataggcacaagcataacttttcgataaaagtgtaccttgtttcagcatccaccagcctccgacttaggtaggtcaccacatgctcctttcctccagtcacttgcgtcagaacagccccaataaccttatcttcagctgcaatgtacaatctgaacgatactcctacttgtggtgcttttaatacgggagccgaagacaaatactttctgatgagatcaaacacttcctgttgttctgccccaagtgaattcggcatcatttttaagccgaatgataggggtgaaggcatcaatcttcccggctaggttagaaataaacctccacaaataatttatcttgccgagaaaacttctgtacttcgaccttacaggttggaggtcacacattccgaatagatttgattcggtcagggtctatctctatgccatgttcatgaatgatgaatcctaaaaac

SEQ ID NO: 168579 - DNA, 414 bp, Zea Mays
aataaaaagaaaaaaagggaatggagacatacctgtgttgctgccgctcggtccagctttggtgttaagcgtagcccacatttcttttttttccttcttctctcctgcccctagaaaaatcacttttttaatcaatgatgtcaccatgacattgtgactgatgtcatccttgaccaaatgacatgtggggtccgactaccagaattgattagtttagtatttatttattccccttgctggacttaacgtcagctatgtggtcatccatgaatttttcgtgtcgctgctcccatgggccctagcgtcgggtctctccatccccgtacttctcgcacctgaatgtcacgggatcaagaatgccgccaatcgaggttcgttgagtcataaccgctctaggtttttttacgatttttg

SEQ ID NO: 168580 - DNA, 428 bp, Zea Mays
ggaaaatcaccatataactagcttttgatgaagcaaatgatgataactgcttggcaagaatgaaataggactggtgtccgcctaggatccgtcttcaacaatagataatactactctcatacgaaggagtcatcatgactagggagaatgcaacaggtctccataagatctttatatttttatcacaaattatcatcactagtagtttataggtcaataattatggatcttccggcgccaaggaccaatgacatattaatgcccaatttcacttcaagctctgtggtgatgtgggatttcatagttatttgtctactcttctcacttctggtagatcagaggtagataatggtaagcatgccaatgggtggaattcagtgtagtttggctacataaaccccatgtatgtatccattcaggaccgacct

SEQ ID NO: 168581 - DNA, 607 bp, Zea Mays
ccttctcttaggagttgtggcagaactcttttctgcctttagcgctgttgtttctgttgaaggacttaaaattcccggcatctttgttacttcttcagtttttgactcttcaactttatctttgacaaccttcgtttcaactagctcaaccgaaggtgccttcggcattatagccggctcttcagcctcctgtgtgggaggaacagattcccttggttcagcagctaaagatgtctccccgccatatttaggcaccacagccggttcaatataacgcggccggtgggtaagaacctttaacttttcgcccttcggcacaggctcgtctggagtggccaaagtagcagcttttctcttctttccatgacctcgcagcagatagcggtagtcggggtaaacaaagccaatggcatcaaaaactctgttcaatctcttttttccccggcctccgaaggctgtgaataatgcattgtcttctgccttggaatatgatccaagcagttcatcacttgtaacttcgatgcattttagccagtcatcgtttggttcatcgaatttatccccatatctgaatgtgtacttcagccggaccagttcaccttcacta

SEQ ID NO: 168582 - DNA, 376 bp, Zea Mays
gtaggtacaataatatattatgtaggataaaatgtgggtaggtcagggcaagaatagcctagggcaagacagtttatggtgagaaaggactccttgttgggtggtcatgcctgtgatgatcgagtttgacttctctcctttcttgacgaggttgatccttttccttttccaatcttgctctttggtgtctctatccgggattgggacaagaggttaagatagatctattatgtaggtcaagttgttggatatggccgagttgatctagatcaccaatttaggcttaagtgtatggacttatcctttgtaccagcattaagtaaccctcactagattagatcatattagattagctcagatctagattagattggat

SEQ ID NO: 168583 - DNA, 315 bp, Zea Mays
gtgccctgttccgcgcgtacagctcccataggaagtcactgccgccgctcgagagagagaatccacgctaggaaagagcttgcgccgccgccatcaattcactggaccgccgtcgattaccgccaaagcaccgtcggagggaccacgacctgtgtccgggagcttcctcaagccgttgcgggcgtctctggtggaattctggcgctcgcgggcaaacgggtctcggtgattgctcatcggagtcgctttttcccaccaggcttgcgtcgcgccgtggtccgcccgcctgtgcgcataatcctcggtatggttccc

SEQ ID NO: 168584 - DNA, 761 bp, Zea Mays
gcgatcataactatacgcatttagactacaacaagtaattcataataactacgagcttaacccaagtcatctaacaagtcgattaaccaaaggaatggtatagcccgccatacgacatacacgtcggcttgcctattattaacgcagtccgagacaccacatgtatatatatcacaatcacttacgccattgactcttacttaacatgagttggctaatgccgtataagacttagcaaaccattttagacatcgtaactcaaaatatgggttggagtcgattaatcagtgtttcttaaccgttgctcaacttaaattggataacacacgagtcacctaaaacgctatattttaggagaccttacatgtcgagcatcaattttataacataagtgactcaacctctatcacgcttgtccgaatctattggctaacatttccggaacaccctgtctatccttcacctttctaatcatattgcacgacataaaatatttcgatacgcattcaccccataagtaacatcatcacacttgactctgacttaaccgtagaggaagcgatgactacttcggcatgtcaccacctctctacaggccaaatcaatattaaccacatcgatcgagtcttatatcacgtaatacttataatttattatctcaaatacaaccatatcccggcatgtacttgggacacttcggttcaacttacgcaatcactactacaacgcacttcggcacacatgtttgataacccaccttt

SEQ ID NO: 168585 - DNA, 589 bp, Zea Mays
taatttttgggagcaccatttatgattaactttgccttagatattatataattaccctctactactactgcatggatttgcttgactcatcttactggctgttattgcgcattcttgcattttctttgtaaagtaaatattctgatcaaactcgagccatgaacagtactgcaaatgggtgtggtgagggactatttgtctgtttgattgggatctgccaggcattgatcatgaccctaggcagatgaaattgtgcgcctgggagcactgcctgtgcctggcaggtttcctagggatcccaagcaaacagccactgaaagtatatattcatgtcgaaatgtttgcttgcgttcactataatatgcctggcaggtttcctagggatcccaagcaaacagccactgaaagtatatattcatgtcgaaatgtttgcttgcgtttactataatatggctccctatcaaatctaaattacatttagaatgtcctgataaataagaggtgtcaggattgctatccttgtatatggaagctgaaacttgcagtatgcatggctggatggtttgaaatatagtttgtggtcttcttt

SEQ ID NO: 168586 - DNA, 497 bp, Zea Mays
ccaccagagcgctccaatttagaatttccaccaaatcagtcagaatcccgccgtgaaggtctctcaccatggccagcttgcctcaggtagattcatgtccctctattaaatgttctagcatctctagggtctcttgtagcttgtagactcgattgattgaactagaccatactggattgccctgaacaccataggttcttctcggtttccgccgtcatcgtgagcaggtgtgctccggtccggattagtgaaattggttgagggattagtgtcgcagagggtggaattcggtgttggccaagttagggctttggtctttgagcatatcggccagtacgggctcgccggagggcgtgctcaccgtcgttcgcgatcgaggactcaagttgtgaagagaaagaattctaggggccttagtgcatatgtcagtgagacaggggaaatagtgtaaaggattctttgccagtattttaaatcaccagggacctctgcgcaag

SEQ ID NO: 168587 - DNA, 320 bp, Zea Mays
cgagtatgtaggagggtacgaataagcgaaaggttgaggaggaacattgatgataagagctttagtgataggaggaggagcgtctatcttaggaggttcagtggtaagaggggcatcaacggatggctggtatggaaatgaaggaggaggatagagatgtgaaaatagaggttatggaatcaaggaatggggacaagcaggaacgtcctcctatcgatgatggacgggagaaatatcattgaagaagacatgactcacacctgcatgggtctcgggatgttgtgaagattgcgtagtgaacaagtcgatgaacgtaccaa

SEQ ID NO: 168588 - DNA, 672 bp, Zea Mays
cggggaatagaagcaaatccagagaagattcaggccatcataagaatggaagcgccacggtcgcagaaaaagctgcaaaggctcactgggtgcatggcagtgctgagcagattcatatcaaggctaggcgagaaatgaatgtcattctataaatttctcaagaaggtggacaaatttcagtggaccacagaagcgcaggaggctctagaggcactgaagaaattgttgaccactccgccagtactgaagccaccacgccgagctatgcccggccagccagtagaagatttgctgctatatatctcctgcacgactcacgtggtaagcacccattagtagtcgagcgggcgaaagaggggcacacatacccagtgcaacattcggtttacttcatcagcgaagtcctcggaccctcaaagataaggtatcctcaagttcagaagctgttgtacgtggtacttctaaccgctcgcaagctccagcactactttgacgaccacaaagtcatagtagtcacaggatttccaataggcgatattcttcacaacaaggaagctattgggagaataggcaagtgggcgtgcgagcttggagctcatgatatagaattctgaccccgcacgacgatgaaaactcaggcactggttgacttcatatcagaatggactgagc

SEQ ID NO: 168589 - DNA, 319 bp, Zea Mays
tgctgctagctgctaggtggatttagaaacatcgttccgcgatttgccctaggagtagattgttgatcgattgttggtgattgcaattggttgtacccctaatatataggggtgtctggacctattcttagacgtctccaaatagcaaccgtatgtttagagggataaactaatgcgaaaaagaattagttgtgcatgattcaatctaaccctaaaccctgaaacgacccggcatgccaatgacacaaatggtgcttaacatatgttatattgacataaacccctgttttggctttcacttcctccgttctaagtttcc

SEQ ID NO: 168590 - DNA, 511 bp, Zea Mays
ggtcgattgaacccccaacttcgatcaaatcaaatctacctatcgtttttaccttatgcattaggagtagctctagtttagccccctctacctcaaatctctgtctctcttcggctctacgtcgactagaggcatcttagatggcatgctgacactaaaacacactctaggatctctcctcccgatggagtccctcccgagaggtaagatctagatctgttgtgaaaaagaccatgtgcgccattgagccctaggtgtggaccatccggacatacgcagatgaggagctgattctgcaccagatcgcagaccgttcatgccttcatagagagcactatcagacgatccgttctagcgtttggcgtctagatcggcgccaacagtaatttcttgcctcaccatgcccatcgaggccttgactttgatgtctatagtgagcttggcgcagttgatgcagccgaagcactcttatacaaggcagttagagtattaagtgcgggtagcctaatcc

SEQ ID NO: 168591 - DNA, 1000 bp, Zea Mays
gtggagtactaacacatgattaataaacaggaagaaccaaaaacattggaacatctatgattgtcttaccgagtaaaggattgtagacgcacattggcaccccacaacaatgtcccctgaaccaacatcataacacagaacacaatcactgacacacatgttggaccaaagtgaagttcatcaacatacctttccaagtcgggatgcacgaacacaaacacgtggaccgaatatgtgaccaagataacaattcctcgttacaaaagataagaacacaattacgaattgaggtggtacttgtttgtttgaatcgtatgatgcacaccatccctagaacaaatgggatcgaatcactaaacgatgcacgtaaggtgcaaaccctaaacactgacgcatctatggtggaaaacctagaaacgacgtataggcaacatgggggggttgcagatgacgacgaaatgtggcagaccatacctttgtaggagccaacgacagctgagcggacacctgcgactgcctcatcatgtctgcaggagctgcaaccaagtctgacgtgacatgaatcaacgaggtgggatgcgcctaaggatgaaatggagaaggtagggggaatccggacgcgggcgagatggggaggaacgtcgtggtcaaaagcagagagcgagggggatgggaaatggaggagacggaagggcgggtcaggatgccagagaaatggaggagagcatacctgcgaagacgacgacacagcctcagcggatggtggcatcagagggtggggttgaaaccctaaatggcagcacgagtggtcataggatgccgatgacttctttaagatgaggggactttggtcgcttctttcaaaccgttgtggggtgcgagaactgatccggcgagaactagaagtagaggcctcgagtctgcacatcgcgcccaaaaaacgccaatagtaaaaaagaataatgagtataaaagacgttaggaaattaatgtatgtgga

SEQ ID NO: 168592 - DNA, 476 bp, Zea Mays
gaagatttgcagctggtcttcaacagcctgaggcgataccggtggaagctcaatccagaaaaatgtgtctttggagtaccaacatggaagttgcttggattcattgtcagccaccgaggaattgaagctaacccggaaaaaatcgaggctatcatgagaatggaagcaccacgatcacagaagaaagtgcaaaggcttactggatgcatggcatcattgagcaggttcatatcaaggctaggagaaaaaggcttaccattctacaaattgctcaagaaggtgtacaagttccaatggaccacagaagcacaggaagccctcgatgcactaaagaagattctgaccacaccaccagtactgaagccgccacaccgagccatgccagatcagccggtagaagatctgttgttatacatctcctgcatgactcacgtggtgagcaccgcattaatagtcgagcgggcagaggaagggca

SEQ ID NO: 168593 - DNA, 1186 bp, Zea Mays
cgactggacaacatcgaggacagaacctccaaatcctccaaaattaatgatagacctgggaaaaaataaaactttatttacaattcatctaattatacttaattggaatttgaataactaatacatacatgctcggatctagttttcgtgacaaaatgaacttaagtaggttgcgtgcacagtcttcacgtgacacgtggggaggttcagcgactgcagctttagaggaactatcccttgcaacaaggtcagtagttgcctaatatatgaatatatgttagtaaacaattgcataaatatgtgtgttttagtgtatatataggaaaaatatgagaatataaaacgacatgtcttacatctgtcagtggggttttatcgaattgaggtgcaccagatacaggagtatcatgtgtaagagatttttgtccttcctgtaaccaataaaattattaatataaacgtaatgaaacatatgttataattaatattagcataatatgatgaaggtgtaaatacttacactatttatatctggtgttaactcaggagcagcaggcttgtcggttgtgggagcctggtgaattaaaaaaataaagcatgcatatatattactgttacttgcatacattgtaaatgaaataataataattgtgatataaggaagtcaaacatttgattttggagtcttgtcaaatataggggcatccataacctcatcttttttgcagacgttcccactgacaatctgtaatggaaacaactgagatttgagtaaacagtaacttgtatgctaaatataatatatgcattgtatatatagtttgtatgagaaaacttacatcatctgatattttgatatgatcagtaggaacatggatttcctgatcatgttgatgtttatcaggtgttggaacaggtggtgaggatactggagcatttgttggaggcattgaggtagtgggggggttatctacatttggaacatataataataaagtagttgttactgaaatataactgcaatataaatgtatcgttataaaaaatgtttaaacatacacatttgcaaactacatcaatatactattaggatgcataaataaaatacagttttcaaaaatgaaatcaactgaaaaatgtgttgctgcttgtatgagtataaattaatgcataagttgtatataca

SEQ ID NO: 168594 - DNA, 969 bp, Zea Mays
tgtacaaccagcaggacatcaaattacttgggctgaatttaaggaagcttttagagcacattatattccagatggagtcctgcaaatgaaactggaggaatttttaaggcttaagcaaggtcctgacacggtgatgcaatatcttgtgaagttcaatcacttgtcccagtatgttgttgatcatgtgaacactgacggtaaaaagcgagattgtttcatgcggggtttgagttttaaactgcagaagaaaatggcaacttgttatgacttgacatttaatagagcagtcagtgtggtgattgcagtagaagacaaggggcgggtgcaccaaaatgcaaaaaggatgtggaaaggatctagaactggatcttcctaagatccagccaagcatcaaaaggtaatcatcagaacagctggctctaccaacactccctatcgttcagccacttaccctgctaaaactcctatctacattcgtcccaccaatatgcaacgccaatcactacctacaaataaccaagctccccgtttgcctgctcccactggcaccaaatatccttgctataactgtgggaaagcagggcatttcattaaagattgtccctacccccgccaaaacaactcaaatttctagaaaccagcaggaaataattctcaaaatcagaacaagaatacttctggcaacagtgcaaaaggaagggacaacagaaaattcgggcgagtattttatacttaagtggatgtgactccagagggaaatcctgtgcttatgggtatgtttcttgttgcccatcatcctgccaaagtactttttgatactggtgcatctcatacattcattagtagaacttttgcggtgaattatgatgttccaattcaaaaaacaaatatgggagttattgtaaaatctcctgggggaaagttaggcacaaaggaggtagcctttcatgtgccagtagaattgggtgg

SEQ ID NO: 168595 - DNA, 821 bp, Zea Mays
cttcaccgtggagcacgagcgggtggggatcgctggacctgctcgggcttcggggcggcggacaccgccgcgggctgggaagcgaccactgcggacccgcaccaagccatggatggggttgtccgcatgttcatcctggtaagaacactcctacctaattcgttccggcctcttctacacgtagcaccattcggttttggggattgcactctagggcgcatcatcatctactccggcgaagtgcgacgccgcgggagctctgctccaccgtgtcgtccagcgttcaagtagggggaggcagggagcgcgcgccagccattgattctagtgcgggcggtacggattaaaacgtagattacccccttgtcttgatgggttgtgcgccgtagatctaggatcgtagggccactggcacgcgtaatatattaaccgtagatcttggatcggacgaatgcgatagcgtaccggttcattacagtatggttctaatcatgaccgctgattcagaatccatcggtcgagatcaagtcctaccccttcgccgcaacattttgcacaatagcccctcgggaatcatagattagaacccgccgtcctggtggcattgttcactgagtctagaataatttaccagagagcccctgcagttctctgtattttaggcccggtccagagacttgggaaaataagaaataatcacagaaattgattcataatgcataaataaatggtaaaaacttgtttgatctgtagtaaatccatatgaactccaaattagttaattccagttcctaaatttttataataatattgtctaccca

SEQ ID NO: 168596 - DNA, 740 bp, Zea Mays
attgagcgtgcttttgggtccgtaatgtagtcaagcacccaagccaccaagccgtgcctccaattgctcaccagtcaccagagctcgtcaatttcagatttcccccaaatcagccaaaataccgccgcgtgaacacctcgccatggccacccttctgcaggtcagttcaagctttcttaattggtgttctagctttcctcatgtcccctgaagctcaccgacccattcgattgaactagaccgccttaaattgcctagaacaccttggattatcctcggtttcagccgtcgtcgtgagcaggcgtgctccggtccggattagtgaaattagctaagggattagtgttggggagggttgaattaagtgacaaacaaaggagaagtctagccgttgcattttccggccggtatgggctcgccagagtcgctgctctgccgcccacggtcgaggatctcaggttgtaaagaaacagaaaggggaggggcctttgcacagatgtcagtgagacagagaaacagtagagaggattctttactggtatttcaaatgaccagggatccctatgcaaaatggacactgcagcgcgcgcgggcgcgtttcgcctgtctcaggccggctcgggcattcatactttctctttttctttttcttctagaattagacaatttctagaaaattgcagaaaaatgctaaaaatgcaagaccaattttgctaagttcctaattttccgtagcattt

SEQ ID NO: 168597 - DNA, 418 bp, Zea Mays
gctggccgacctcttcttcttgggctttttacatttggaccactagtctggtcactttgctcatttttgccactaaatttacatcgtgctcagtttgacccctcgctcgtgaagttttgctcagttttgccatcgtcatccttttccgtccatgtgagccgtcactgaatcatgggacccgcggacccatgtggaacccacatgcaggaaccaatttatccccaaattgaatcgattttgatcaattccctactgccctcgctgttgttgctacatccggcatcgccccgctggccgctgctccggcctggtgccgctctgcctgctctcgcctggcgctgctctgctctgctctgccaggtcgtcgcgcttcactgcccagcttcgttgctaccccacaccgacgaccatcgcggcc

SEQ ID NO: 168598 - DNA, 1063 bp, Zea Mays
ccttgaacacgcgcgagagctcctggctgaacgccatggcctcctgctggccgatgccatccaggggacggcggccgccgagcaatgcctggagctgggtggtgagatggtaaccgccggcgagcacgtcgaacagcttcgcgtcttgatcagttgccatcgtcggttctcagacgacggccaaaggattctcgggtcgggtgtatagtagtagtaggagtggagaggggtttctgattctgtggtatctagcttccggtctcgctgaatcgagtatttatgcagacagaccgctgactgcgatcaacctagcttatatttacatattctttttgttttccctcggagatcgctcaggtttgagcttgactgactagctcaaactcctttttcattaatctaagttgatcactaatgtcagcggggtcttttataatctgatgatgccggtcttctgactggcggaacaaatggacagattatgtaggtagagagaggttgactgctctgtgccgtatcattgtacatgcatgcagcagaaatttcggtctctgctttctcgggtctgagtctgactcaattgtcacaaaaaagaaaagaaaagaaaaaaaaaggtgagtctgatttgagagccggtagtactatgatatacgctaatagagtagaagtattatctgctactcctatgcctgattaggttgctgcaacgagtttccaagttcagtcccacaagagacgtcggacagacagggacagggacgctacggcaggcactcggtagcaatcaagaagagcccgcggcatgtcatgcaacacatggcgggcgggcacaggcacagggtcaaggcgactgcaccgcgtatgggaatgggatggggccatgattgaccctgctgtaaaacaccgtgcacgatgcaggtcaaatccacatgctcagctgaatctttctactagctgtagttaccaacgtgatgatggtgatcctcacagtcaaggagagtgatctctgcacttgaattgcattttttttttaccctgttcccacgaagcagcgaggtcttgc

SEQ ID NO: 168599 - DNA, 734 bp, Zea Mays
ggaggataggaatgtcaggggcttttggacctctagcgaactcaagggccatccggagctatcatgattgttgagccatctgaaaccgatatggcatatcattatattttttgtcattgtatagtgtgggtgaactagtttcgctattcgaatagggtaccgaaggagttaataattgcaatagacttataccatacaaagtaatgtgtatatgttataatgattactccatattttatttgcaactcttgctattatatgtcggcgtggggaaccatggagacatgcgcatttaatgcgacaattcgaatacctatccacgtgatgccgcagttaaacaggactgacgtcaagtctgatttacaccatacggggagagttaccatccacttttcaccatacttatcactatttcaacaactacgacttggacaacacctccatcatacatgcttgggtacgtgtctgagcccctgatcctgccatcgtctctttgctcggttaagatccaaatacaaggaccagacgtcctcctcttgatccaagtcatttacaagtacaaaagccattctgtcggccataccggctacaggggctcaggctcgcctcctctcccacatacacgacaaaccgtggcgctcatgggagccctattataaaaggaggagcccagggcttcaaaacgaagtaggaggacacttcacaggtttttcacctccacgactgatattggc

SEQ ID NO: 168600 - DNA, 329 bp, Zea Mays
tgaactatcttctatttcaaggcacactcgacataattttcatgaagtcttccatctgagacaaggaatttactctgacatgcctatttctaaagttttggagataatgaaatccaccaacttggatgtaagtggaatatagtgattctttctgaaatgtgcgtgagataatgtcagcccaaattctgatctttttattctttgcatcatgtggaaccaattttacagaatgcccctactcagtcacttttgagttttgtgaatgccatccttgatcggatcattgaaaatgagaatggagaaattccttatgtaggctactcaaaagc

SEQ ID NO: 168601 - DNA, 748 bp, Zea Mays
cgagccgcatcggacaacgatgggttcgtcttcacgcgccgaactagagtgcggtggcactgccagtccccacaacggagagatggccggagttcagctacaccatgcaaaagggccctagattttaatctaaattgtgcaatatgtagtgaaggacatggcgaacgcagggtaacggttcctcaccggcagggacgatgtacagaggcctgaccatggagaatcgtggtctacggtagattcaatctccaacgagaaatataccgagctctgaccgtccacggcccctgaactccacatggaggtgcccgcagacccttgacgaaatgacgagacacctcgagcacagattcgccctgacgacagcggctttatctctccttctcggcagtgctctctctcacgacaaaattgggattttctgggtctggcgatgcgaggcgagtgaggtgctgggttttgatgggaaacggggtgcggtccaacgcctcatgccacgcggatcggacggtagttcaccagctggtgccaggaagtttggcttctgttgcaacgcctagctcgggttatgatgacggggatgagagatgacggctaggccccaccagcagagatgatgtgcaatcaggtgactggctcaagagtcaagagccccacatgccaggtaacacgggcgcgcaggtgcgaccactgtgggccaagatcaggggcgcaagcaggccgtaggcgtggtcttggtgggccgaaa

SEQ ID NO: 168602 - DNA, 747 bp, Zea Mays
tctgcttaggcactgtttggtcaattagaggtgtgctccgtgtttttgtttgtgcactagcaatatttatcttcttttactacacgcctcctagatttcagtcgtctggacatcaattcagtcaactgcagttaggggtggtgcgatttttcctggtgagatagaacagttggctgtgcaagcgactgaaattttaccaaaaacaggcatatggtatatttgcatttaccctttcttgcattcttcttggccacttctaatataattctcttatttactcatgatgttcttccggtgtgtttaagtgggcattacacatgctcataattttcattgatttggagggcaacatctttagcaaaagaagccatgtgattgtttttgttgacagacatgttgttttgcgttactataaactaaatgccatggtcatatgtggatgtctcaactacaattgttgctttttgctgtggtgctactgctactaaattgggattgacatgacttgagttagttgcgtagcaatagccacaggaacatatggtcaattagaattagctgcttagcatggttacgtctgttccttccctagtatcattctgcatgcttttgatcgggacacaaaactgtttactaatgggacatgttcctattatatcatacaatgcgtgacagaggaagtatttatgcataaaattgctacacctctgtttctcattgtttgcagattgaattgcttcatggttt

SEQ ID NO: 168603 - DNA, 963 bp, Zea Mays
aaaaatgtctggatctagtttattagatgccatcctctcgggttggttaagacacaaatgagataccgagctttgataccacttgtagggttgagatagtggacaatggactaggggagtgaaaagtatttttaaaaaacataaacctttagtgtagcagaattaaacttgtcggtctagttaggactatacccccactctctattactagcaccttgtacatatcttagttaaacaactaaggtgttagactagatagagctcacctacacaattatacctggcaaggtcacacaaacctatgcaactagtactcaaacaatttgggagctcctacacacactagtgagcaaagtgcagcaagcctaagcacactagcactactcaacttagcaaatgtacacaagctagattagtgaggtaaacaacttaactacataagtcaagtaaagttatgaagctacacaagcttacaagcaaaaaagaagaactacttcactacataagtaaactagttacaagaacaacaataagaaatagctcaaatatgaacaagaatgaataagctagtgttagatagttgcaaaccaataggaatacaaatgttgacatgatgttttttgttgagattcggtggtttgccaaccgcttactctatgttgagacaagcccaaggttatagttgaccctttttaccaatggtgactcttaagtcacactctcccacgtggaatgcatacacttgagctttagcacttgatatggctgaccacttaatgcttttccaaccttactttactagtgttgctctttgtatctcctgtgggtgagcacaatactctatataatgccttcttcccagtcacacacaacttcacgtgggtttccatggagccacaacctccaagccatctaagaggtggcagcctccacgacttaacaagcaacactggctgcaactcg

SEQ ID NO: 168604 - DNA, 287 bp, Zea Mays
ttgctcaaatttattgtcagccaccggggaattgaagccaatccaaaaaagatcgagactatcatgaggatggaagcaccacgatcacagaagaaagtacaaagacttaccggatgtacggccgctctgagcagattcatatccaggctgggagagaaaggcttaccattctataagttgctcaagaaggtagacaaattccagtggacttcagaagcacaagaagctctagatgcgctgaaaaaattcttgacaacaccaccagtgctaaaactgccgtgccgagc

SEQ ID NO: 168605 - DNA, 747 bp, Zea Mays
agaaggggatatgatttaggacgatccaacttggttcaatccgactaacttgtaaagagcatacatagatgtgaactagagaccgatagtctagaactctcaccataaccaaatacaaagggggagataagggggtcaaggtgctcagttaacgcgactcaaacctctctaaattgtccagatgttgctaaccaggctacacctaggatcagagtacatccatcctatgctccatgctctattcgtaacttttcctctcgtttgggtatgtccgatacctcagtgtcgtaccatgatgacatttggcatgccaggtagtggtaatcatctttcttggattttagtgcacaatgctatattgtgtatccatggagatgctatactgcccactcaatagagcaatcatcttcaacacctgctccaacaactctaatcatgagccacgacatagacgacgtcacaatccagatcagtcttgtcctttgctacctccattgagaggacatgccctggtggggatgatgtggtgctgttctcgcaaaccttgcatcgaccaatgctcattctgaaaaacaaacgccctaggagcatcacactacatgcactcatgggtaatgggtagcacgaccatccaacacattccactcccctagcatcgtattaggaccatggcgaggcaacatccaagcatgaaggttcctcctagcaattgtcatcccatcgagctcgttggtgcctcgactttgg

SEQ ID NO: 168606 - DNA, 600 bp, Zea Mays
gtccagccaggcctgggcagatatttgaccaccaaagcaccgtgaagtccttgctggacacgggagacgcgacgaacacaaccgcacggacggatcatggatcgatcactcgcgctgggtgccacaggtcctccggtgtggggcatcattcacgcggcgccgaaccaccacaccagctgtgccaaaaacgacgagcattaccgtcgcctcccctcgccgagctacaagtggccggccggactggccattcttccggcgagccataccatgtctggcatggcgttctagatacaccaccaactttttgtcatcccaccccacatccacatgtgcgtgcagtggacctttttctttctttctttccatcacataccctttttggttggcgcggcacatactagcaatggggggtgaaaatcggatcgctttggacaaacaagtgacaatccgcgtgactgattgtaacatctgctcccacaagttggctcataaacaagatcaaccagccttaacaacaaataaatcgacccggccccccacaatgggcgtcgctttcctccaattctaatttgaccacacccagttgcccccaaccaccac

SEQ ID NO: 168607 - DNA, 620 bp, Zea Mays
catggagttgcccgaacgcagcgatctccgaagcagaacgtggtctctgtggatggactcgtatggagttgcccactagggcgagcgtggcatccaaggacagacccatatggagttgcccagaggcggtgcccgtcggagcaaggcctgaatgcgcgcacgcgcagcagtgtactacagcccctaatccctcgagtgttccgtgaggatttctctggggtttaccattccctaggcaaagattgggacttgcctcctgttgacctttcctaattcggccctttgagttgttcgctgacgcctgctagttctttgttatgcacgcgtctcccccgaaagccatcccccgaaagggctttcaggcccttttgatgagagggttgtcttcatcgacctagtcatcgtgagggaaggggtcgtcgagctacaaacgggttatccaagtaagatctgaccaccctatatagtgtctagtcttggcgagcagtcccactgggggctggacccgttggggcatctcatttagtccttccttattctattccatattgccctccggtcaatctggccgaccggaggggggcatagccaccctgtcagtcgggttgccgcaagagaat

SEQ ID NO: 168608 - DNA, 567 bp, Zea Mays
gtgattcctcattgactggaaacacttgaggaatgagcatacggactcgttgttcttgcgcctgacggatttgaggtcccatggctgtgtaggcctgtcagagaacgattggaaattagcgacgaactagtcgtagaaattggcccagttgtcaacatactggtgaggaaggtggcaaggccactagagcgcgtcttgccccaacatgattgggagatacactgtcatgatgtcctccgtcaccttggtggcttgggcaaccgtggagtaaatgaccagccagccagccacttgcttagcctcgtacatgtctacgttggagaccttgaagttggacggccactagaccgcatgcaatcgagggggtgaaggctgagacccttaacatgcaccaggctcctgggtgctcaccccgtgtgtggtcattgcatcggtcccatggcggcgactgtgttacgcattatgcagcctctcaagagccgagcattgtggtgacgggctattcatcgaggcagcagcgaagtctgcctagcctatggctcctcatattggggagccatggtcccg

SEQ ID NO: 168609 - DNA, 591 bp, Zea Mays
acgagccgtaacagtttcggcaaccttttttgcaggagcaggagtaaatgcccttgtcgtctccatgacagcgactagcacgctagccattcttctcctcttgggagttgctgcgggagcctttgcaaccttcgtcaactctgcctctcctggcgggctcaagatctttggcagctctggctctagctctttggttgccttctctttggtttcggcatcgtgttttggcgtttcggctggaccggctacaggaacctttggcaatttagtcagcttttccccaaggatggtgggagcaggttgatctgcttcgacagtgagagatgtcccttcaccaagcttcggcactgtggccgtctcaatgtatctcggcctgtgtgttaagaccttaatctttttacccttcggcacaacagagatggccgaagtggtaattttccttttctttccctgctttcgcgagggatagaaataatcagggtatacgaaaccaatgacgtcaaaaactctactcaatcttttcttgcctctgccttcgaaggccaatgccattgcatcatctttggcccttgtgtaggccccaagcaattc

SEQ ID NO: 168610 - DNA, 458 bp, Zea Mays
gggcaccggaagctgatctgctccacacggcagaggcgctgattgggcgctgcagcattcggagtggctacaacggggcaacgggagctctgattcaggtatctatggcgcacaatgagcagtgcgagggagaggtcaccgacttaggtgggcaagggagggagaagagaacctgtgagaaacgagccgctcgggagtcgttaggttcgattgattttgcggagccatcagatgcagtatcttcaaggaatattcttaaattcgagtgactctattctacttagaatcgaaccaaacaagctcaatactggaatagaatggttgtcctggtatacttttgaaccaaacactacctaactaactctacctctctcaaccctttaagcacacattcactcaatctagctggtcatccaccccacaagtccatcgccatccacccaccccctacaatttag

SEQ ID NO: 168611 - DNA, 646 bp, Zea Mays
tcaaataatatattcctagttttcttcctgggtggacctggacgcggcgcgctcagcggcccgtcggacgtccctggcacgtcgtcttcgggtgtaggggagaccccacatgacatctctcccccctcgacgaccagctcgtcctcgagctgaaaggacgagtacttggtggtgaagtcgcccaggtcttcccatgtagctgtagaaactggctcacccttccagctcaccagcacctgttgcacgccacgcaagctacgcggtagcgcaccacacgctctggggcaggcaccaacaccccattgtgcacctcgggcagtggaggaggaaagtccgacgacgtgcccacccatatttttaaagaggccgacatggaagacgtcatggagcttggcttgggccggtagttccagccgtacaactacctcattgatcatctctgagatgcggtatggaccgaagaagcgtggctggagcttccccttcggcgtctgggacaaagaagtaatcgaccgactgcgcagccgcagcaggacccagtcacccacgacatatgtgaccggtctgtgggacttgtcgtagtggcgcttctgcactgcttgagcttgttccaggcggttgtggacctcggccaggaactcctcgc

SEQ ID NO: 168612 - DNA, 690 bp, Zea Mays
tagagaaaatagagctctaagatgatctgtcaggcgactggatcaggattttcccatggtacagtgactgcagaagatacccctctttcccctccgccgcagatgacccacacgccatgattcacgccgtcgttgggatttgtgtccgctggcggggagataactttggtgaagtaaagatctcgcggggaggagtggataggatcacacatctgagcttatcgccgtgattcttgtcactgcgacgtgggcggtctgcctgtgccaccgtggaaacgccggtgaccgccgccctccggccttgtgccacgtgtttaccctttccaccgcatcgccacaacttacccctactcaccgttgatcgccggagcaactgccacgcctctggacacgtattcaccgcgcccaaggttcttccctatctccggccgccgcacatcttcattcaaattagcggccaccgcccgctagcactataaattgaccccgccccgaactccgtagggtagtaagctgtccagccaccacgaatcagccacggtcgttcactggaatccgcgaatttggaattctccccaaaactgtttccgccaccgtagaactcaaccccgccgtggtcagcccaattcgggtcagctcctctcctctgctcccttgtttaagcattcacatacgtctgtgatactcgcc

SEQ ID NO: 168613 - DNA, 563 bp, Zea Mays
gatcttctagcgtattcttcatcgcctccaccgcttgggaacccgaagccgcctacgtcgtctgggctacatgtgctgcctgcgtcgtcgcctggaaatggtggacccactcctccagtgttcgctcctcctccagtttcttctccttctccttcgcctcgagctcgtgctcggccaacaacttttcctgcctttcccacatctcctccctctaggcgaggtccttctcctgccagacgagatccgtcgcccgctcctccagggaggcatccttcgccttgaggttttcctcgccaagagagatgttgctagccctgtcatcaagctcttgccgcagcttttgcagagccgcctcagtcgtggtctgctcatcccgctgcttctccagcatcacattataggctttcagcttctcatggaattccgtgatgaccgcctccctctggtccaagtgctctttcttcttgaccagactcctctcctctcgggtcacctcccgctcccgctcgaacaccttctccaggtcttccttgaggtcctcacgctcctgctcaagcttggac

SEQ ID NO: 168614 - DNA, 1081 bp, Zea Mays
ctgaaatatagggtttttgcccaaagtgaccacaacaagtttgtagcccaattataggaaaacaactttgtttaaggattcaagccatggtcttatgagaaatttggagaaaaacccaatcaaagatggactgtcaggctgatacagtctgaacttcagatagacagtgacttggatctaggtttgagagccatttcgactaagatccagagagaatctacctagggttgctataacaaagttgtagagttattaaagaggaacaactttgttatgggtgtttgggtttggtaccacatggaattgggagaaattagagctccaaagtactctgtcagctgctctgaataagtgttcgccatggtacagtaaaaataccggatcagaccgccagcgcggctgtcttcaccgtcgacgaccgatcttcgccgtgattcgcgccaccactgtgtgattcacgtcaccgatgacccgataagaccgccaggtaaaagccaccctctggggataactccggtgactcaccgtgactgcctttctactttgcggctgtagccgataagctcaccgtcgaccgccgcctctcggccgtgtgtcgcgtcgctcaactcttccaccgcgtcgccgtgacccgctactgctgtcaaatcggcgccggtgagcttgccacggcgttagccacgaattcaccgcgccgccttcttcctcatctccggccgccagcacggctcggctaaattgatcaccaccgctcgcgggctctataaattgaccgtgcccccagctccgccatgtatccaagcacctactgcacccacctgcatctcaaatccctcacccgcaagaacgaatttcggattctccccaatccggttctaaaacaccgtgaactcaaccccgccgtggtcagcccaactccggttagctcctcccctctgctctcttgtttaagcattcttatgcgtctacgatgcttgccgagccactgaattgaactgagagtcctctggtcgccgggaacacgaccgtatagccgccatgattacggccaccgtggccagagctacgtagttggttttag

SEQ ID NO: 168615 - DNA, 852 bp, Zea Mays
caatatgattatgagatagttgtcggtgttcactttctgatgcaggctagcaaagcacgttgtaagcacatattgtattttaaaacctttttatatatgttgcttgtatcctatttgaacgttttttactgaacaaagtgtagtaatagttaatgtttgtttttgcaaacaccactgcaataagaaggcactgtatctcagattttgcttgatgaattatctgaagcaatcattgggagttttggattggctaaacttcattgactaaccggaaccatatgctattgcagtttaggcactattgggcatgctgctcctcacaacacggtcaacctgacagacctcgtgaaaatttgatgtttatattgttatttcctattcgaattgatcgttggttctaaaatcttggacgataggcatggacagctgctatgctacaatgcactgcatttttaatagtctatttatgtgacttgtatctctccaaaatgtctgttgtatgggctaacgtcatgatgttttttcctaatagactagctactacccataaggtctgctacatcaaaatttcaattcatggaatatatacaccctacaaagtgatgttttattaaattcatttttcaatttaatacattcacaggcaaggcaatttgagttggaaagagacattaccttcgataatactaagtccgctaattcatcgaaggtgagaatgcaataaatttcttcaacatacataatcataattgtttatctttacattggtgtctccgacatacagagtatgaccaaggaagcaacttataattctttaaacgaagaagcatctaagcaacaggtacttctaac

SEQ ID NO: 168616 - DNA, 471 bp, Zea Mays
ggaaggtgcagtaagagagggagttgaagtattggatagggtaccggcgttggaggtcatgtgggaggtagcaccggtgtcgaagtaccagtcagtctgctgaggcagagtcaaggacacagtactgaaagcggatgcaagggactgagcgtcccaagagggagtggccgactgtgccagcatgccgtagggagactggggggcgcttccctgcagagggtcggtctgtagagtgtgctgcaatggggcgtctccctgtccttgaagagcaccatgaacgtattgctgggtctgatgggccagcagcgcctggtgaggagcgatggagactggagcagcgtagaaagcctgctgttgctgggccgtcggaggcagcagggcctggtgctgcgccaggagaccttgctgctgctgtggggtcggcgtccgtgggccgggccacatctggatggccccagtccaaggattttg

SEQ ID NO: 168617 - DNA, 429 bp, Zea Mays
tttgaaagcatcgacgagagcttaccggtgagaagacagcaaggaggatggctgtcgtcgctgcttcgcgccgccacgccgtcacttcgcgccgccatgctgtcacatggcgccgtcgtctcttcgcctcctccgccgccagcgttacagattggattcggagtgcaccagaccaggattaatgccggacagtagtggaagaaaaaaagtccaaaccaggctaattcgaaaccagtccatttctttccagacctaaacgaacatcttttagatggacgacccaatttgaaaccagaccatttctttcccctggaaccaggcccgaaaagagacaaaccggccaaaacgaacgcgcccttaggagtcacatgtcgggtacaaatcatcacgcgtcctaatgcggctttccccctctcatttgcatcctcc

SEQ ID NO: 168618 - DNA, 596 bp, Zea Mays
gttctggactaggcgactattttcagaaagatcaggggcctcggcgcaactaaacctaagactcagggcactgtagaggtggacgacgggttatttttagataaacagagggactctttagtgtaattgccgtcgcgaaggggtatcgtctaacccccggccaccagatccgaaaccgacggtgggatcagatcgagcgcaataatgaaccggtatcgtgcaggagccccaggattgcatatggatggctcagatcttatggtggccaaagcatcgtggatcgcccgatcgaacatcgatggatgcgattcaaccgagcgaaagggtatctcctatctaatcagagccgcacgcgccagatccaacagtccgtggtcgactcctcttcctcccagaccgagccacggcggcgcgcccaacctcccggcggcagagcacgccagcgacccctcttagcggttctgagcgccaaactacgattacctaggtgctaagcgaaattgagagtgcggcggacatagggaagtgcttattaccgacaatggcgaggtggaggagccgcgccacggcgagaggcggaaggacggtacgaacac

SEQ ID NO: 168619 - DNA, 385 bp, Zea Mays
ctggagtttgacaagtgctcccgtccgccccacgtctgggtctgtgtacacgtcgtcgcgattcctggtacgaatccctcccatggcttcgtgttgatgcccgctttgtatagatgtgtcccacatcgagaatcagtcgccggcgatgttccgccatatgggggcagcggcgccaccagtcaaaccaagaggggtgaggaagaactgcgtatgccgttgatcattgagcgaacggctatgattgacccgctcgtaccggttcgacggtgtcgatccgattcgtccttctctgatcgggcgcatgagattcgttatgggcaacataacatccgggtggttgatctaggatcctagggccagaaatgcataccagttcgtgggggaa

SEQ ID NO: 168620 - DNA, 834 bp, Zea Mays
cgaacatgtcggcatttgcctggaggaacgcgacgagcgcgagttcctatttctcctccaaatcacccgtaatgcgagtggtctggggggaacccgcgcagagccggatggccttgacggggacgtcgtcggctccggatggccgcaccttcggcaccttcgtaggtgccttggtaccggaggtcgaggggtttctccctccgtcgtccgggtgagcagcttctgccgctagggcgtgcagcttttccacagccgcaagcgtagcggcacggtcgccccgcacggtgaggaccccggccggagacggcatcttgaggaccaaatacccgtaatgggcaatggccatgaaccggtacagggccgacctgccgatgatggcgttgaaggggaggttaacctccgcgatgtcgaactgaacgttctccgtgcggaagttctcctcggtcccgaatgttaccgggagtgcgatgctcccgaggggatacaccggttgtgggcccactccggagaatgggcgagagggtcctagccgggaccctgggatctgcagctgcttgaatgcagcatgactgatgacgttgaggccggcccctccgtcaatcagaacttggtgcggccgcatattggcgatgacaggggcggtgatgagcggcagtatgctggccccaccatgttcatggggcagtcggatgccccgaaggagatggttgtgctccgccaccactggtgtggggctgcctttgggaccactggggtcgccgacaggacctcgcggcgcagggacttgaagttcctgcggggaggtgagctcccagctcccgtcgtacatgacgt

SEQ ID NO: 168621 - DNA, 726 bp, Zea Mays
caaagcttggttgattgtgtttatttccacatccttggctgcaagaatgtcaagagttgctggtgtcatctccttcagatattctcaaggcaacaagtagtggttgtgttgctttaaggcaactttcaactttattccaaaatggggctgacaagacaatattttctgcttgttgtcgttctgtgctagtagaaaaatgacaagcatgccattcttcacaataaaataaagctctcagtccattcctatgcctatacgtgcttgccaatgtaaggaaggagatagcaaatcgagtcacagctggccgcactggatccccacctatcttctctctgatttggtcaagaagtgtcccgtgcttgtagatgaaccttgacaacttctttgccatattgatacaagtactaaaatcttttatcttaccaatgtcttcaacatcaaatccaagcagtgggcatcacaaggtgtccaaaaaaatggggcatcctgtccacatgaatcctacgtgctaccttgatgttggcctcaatatctatgacaatctggaccacatactccttcccaatcgtgttgatttgttctccaataaatctgccaacatttgaccattagctacctcacttgaagcatcaacagactcaagaaagaaggtccctgctagactattggcaaaagaaatttatgtgacgctacctcatatcagtccaccatcagacataagactgc

SEQ ID NO: 168622 - DNA, 1114 bp, Zea Mays
gaaggtgttcccggtgatccatggcggcttagttcaatcaaaggggtcagggagcatgaggagagcctagggacgctagaacaggcaacggtgcagcttgaactacctgagttgagctggccgcgacaaacggatcttcacggtggcggagaaaggatttgggggaaacaaggaattcgggcacaccggtgatcgattgctagcaattcttggtggctgggtagctgatgaccttgcggagctagtcacgggctcaatttatagggagaacgggcggtggccgcgaatttggacgagacgcgcggcggtcggaggtggagaagaatactggcgcgcgtgaattggtgtcccatgccgtggcaacctcaccggcgttgattagacagcagtggggagttacggcgacgcggcggtcaccggtgagcttatctgctccagtcgtagggtagagggggaagcacgcgggggggggggggggtcaccggagtggagcccagctcaccggcggtgaagattcgcttaccctgcgacgttatccgtctaccagagcacgaatctggacgccgttgacgcgaatcgcggcggggaatcgtcggcagtgagggttactgaaacagatgcagtcaggctactgtaccatgaagaggatcttcagaacgcctgacagagcaagtttagatcaaattttctttaaattttctatggaaacatccccaagtctctgcttcaaagttgtaatgctacataccagctacaaatttgttacaggaatcatgcttaaactcgcactggatcggaattgaattggcttttaaacttggatccaagtcactgttagtctgaaattcagacagtattagcctgacagcctgacttcaggcttgattatctctaatattttcttaacaactatgctcacacctttaagcaaagttgttctccttagtttggtctacaattttgatgtggtgccctagggcaaaaaccctatattttaaaagttgcaaggctccaaagttgagctcatcaatctgaaattcagacttaggctgaaatcacaactaggggcctttttgcaaatgaatccaaatcttagggtttggcttccaaattc

SEQ ID NO: 168623 - DNA, 679 bp, Zea Mays
tgtacgtgcggaagcacgtcggaacacaagagagttatacaagtttgggccaccggaatgcgtaataccctacgtcctgttggtgttgagtattgagtttgctgatggtgttcgagttacaaatgagtagtgtgtggcgatggaagaattatccctatcaatctaatggtggcacagttgctacgagagggatgatgagatcgttctgtaggggtaccccctcagccttatataggtgaccggagggatattcctttacaagccatgaagtctatctaattcaatctgagtctatcttcgacgttgcaggtgctcctgctcatccggagcttgatcgcctttcctccgagtttcaaactctttagatacatgtgaaatgtgtgtgcgaagcatcaacactctttttgtgtcagtcgcgcatagatagcgctcttgtgccgtactttatgggaccatttctgttttggttgtcacccttcttggtcagactcgttcagcctggacgcggtccaaaagtacgccttgctaggcgaacttccgggggacaatcaggtagcccatggaacatttttgtgcttataagaacccatggtatatctatctcccacatactgattcacattgttgcttatagttcttatattggtcataatgcaggctattaaaggctctactagat

SEQ ID NO: 168624 - DNA, 470 bp, Zea Mays
cacatgatcactagcccaaggcaaaccgagtggggaaggacttaccagatgtttggcaacagagagtagatgtccacgcaccacatagatccacggccaagtccgagcggcggcgagaaattacgggcaccctaatggctcccgcactccctggctgccaccaccgtgagcgcaataccacgatgaaggtcccgacccaatctaggcgccaactatctcacagaagggatttccccccgtgggggcttcctccacgaacaccttgcttcttccgcccaaccgatggtgtgtttggataggtgctttctagaattgggatggaaggagaagcaccaaccgtgtgcttttatgggacaataggggcgggtttggctggtccgcagcatgcgcgcggccgcgccatgctcagaattccgttggggaagaagatcccccatacggggcggcccacagtcagcgacggacgcgcg

SEQ ID NO: 168625 - DNA, 600 bp, Zea Mays
aaaatagggacctatgcgctaaaacaaaggacaacgggttgatttcctgaaaccagggggctcttaagcaaaattcacacgcgaaggggtacggggtaatctcagccatcagatcagagatcaacggcccagattagatcacgagggcgagactgacaagcatggccagggcgtcagcaggtcagggcgggctgaccagctgggcccagaggtagagacgcggggaagggggaggagagggaggcggtcagatctagatcggaaggctgtgattagatccgctcgggttagctctaaactgtccgatctcggacgaacgatcgggatctaacgtccaagggtgggcatgggcgcgacggtgccgctcggtcccgtggcgagagttcgttggagacgagaaggctggccacgacgaggctcccggggcttggggactagcctgggcgcaatcagggcgatctggtgggttcagataggggcctcacgccggcgcgggagcaccagagggcgctacacacggcgaggcgggctaacggcggcgcggggcaactccggcgaacaatcgcgtgctaaacagggcagcaatgaccaaattaaggg

SEQ ID NO: 168626 - DNA, 752 bp, Zea Mays
tttgttataaaatttactcaaagcaatggttagtgataggtgtgacagttctaggaaaaaatgtactagtggtgcgacggttctaggtgcaactatgctactatcacaaaatagagcacctcatgaacataattcataatctacaagaagaaaagtatattgagtaaattactagtgttcccagtagtggactatttcatcacttatcctaggatggacgctctagcacaagtagataaggagtaaaccctagaaatacatctaagagaagttagagcacaaaaacaatagaaagaacacaagaacaatgcatttatctcgtggtttagattgctaccaaagcttttactccatgttgttgaggaaaccaccaaagctaaaccctatcctcttctcaagtcaagggaacaagtctccagcttgagagtttttactagaattttacaaactttccagagcacccataagtggttttagtgcttcgatgggtaacacctagccgactaaaagatcttactccaagagtaacaaatgcaggactctagcttgaatgcaaatgaagtgctctatgagttggagctcagtttggccagctctagtgaattttggaagccaatctctcaaagaatcactatggattgatggagagaggttgaaagccttcaatggtcagagagaggtatctaaaattggtgagagtgaatgtctgaactaaccattgggaggtggaagaaagggtatatatacctgtc

SEQ ID NO: 168627 - DNA, 516 bp, Zea Mays
gttctatgttccaggagttcccgacttctgtgccatccatctgagtgagacgatacgatccgggccgagtgacttctgttaccatgaagggtccttcccataagggcgataacttgtgccgtccctcccccgttagaattcggcggaggacgagatctcctattgagaaggatcgttgtcgcacagccttatcatgatagcgccttagagtctgctggtaccgtgctgattggattaccgtacttagtcgttcttcttcaagtacgcaatgtcctccagcctggtggcctcggcttctgctatgttttcgaagatcaaccttggcgccccgaacttgagatcggcgggtagcactgcctctgacccatagaccatgaagaaaggagtgtttccatgcaaagctcggctgggttgggttcttaggctccaaacgacatagggcaattctcttatccactttccagcgaaattttcattcttgtcgaagacctttttcctgagtgcctccagtatcat

SEQ ID NO: 168628 - DNA, 744 bp, Zea Mays
ctgcgtgtcgcatccacgaactgcggccggcgcgccaccgtgggatcgggcctctgcgtcagccggaacatcaaggtttgcaccgacctcttctctggagttgttagaaggcagtaaaagtagcgccacgcagaaacctcggcgtgtgcctccggaatttcacaacggagcaccgccggccgccctaaatcgcgaagcaccgtggaccgggggtctgcgttgggtggcgattgaaattgaggggtgaaataggcttggggcatcgtcaatttcgtgtgggtcgagcgaatttgtggttggagcaagggtcggccggaattttgggtactccggtgaaccaccgacgtgtgcggcgtcgggtatgcgcgggtttgagctggatgtgaacgatggcgcgttggccgttgatcttttcagcagcggttacgattagatgctagggcatcggttcgatggggtcaatctggtccgtctgtttccgatcgagcgcgcgggattcacagagggaaacatagaatccggaccactgatcttaaatcgtgcggtcggcatgggatattggtttatttacatctaagatctaatctgggtcgcacacttgtgatccgacggatgtagactcccgataccccttcggcttggccgattggcaaataagcccctgaaaattttagaaaccaacccgccatcctgtgcgggtgccctctgtgactagggatttttgttgattggcccctgttttcc

SEQ ID NO: 168629 - DNA, 499 bp, Zea Mays
gacggacggtcggacggacacgtggctcgataacaggacgcagggagcagcatacgggcagtaaaaattcagacagctggagccgctctgccctgtctgttgtagccttgctgcggtggatgtctggatgacaaccgttgagaagcgaaggatcaagcgtgatctcacccatccacatcactaatcctgaagagaatcacaaacaaaagatcaatggaagacattaaataaaaatcaaggactattagtgaacagtaatagacgcctattcccaatctctcttgcacatgtaaactccccaaggaaagccattgccagtctgttcccctgtacaaatacgtacaccatccatcaataaaaagttaacattgttttcttaacaccaaaatcatcatcttaaacaaccgcgatttcaacacattatcagcacgctccaaaactgaattccacgacaatcaacgaaacaataacaaagagacgtcaactaaagccaatccat

SEQ ID NO: 168630 - DNA, 625 bp, Zea Mays
tcgcgtgcaacccctatgctccgtcctcgaactcgtgcgtcccactcgcggccgcgctgccgcggctccctgtgaccgcactgggtgggccgctcctccccgttgaccgcacaccctgggcacctttatcaccggtaagaattcctctgctgaattcgtgatcacctacgcatcgcgtagctaggttttgtgatagagtcggagcattgggtcactcgatagccatacgcagcaatggtagcggtcgtgaggtccctgtgcgccgccgtcctggccagtcgtgtgggggagatgatggagcaccgtccgatcgtacacgagtggctaagattagttggaggataccgcttcgcccgatcgcgatctggggcgttgatcttgcatcgggcggtcagcgggcatcgcacgactcattaaatgtgggccgtcagatctagatccgagggtccgcgctacattccgtttggtggggctcgggatttaatctggatcgtccaccttacatcgtacggtcccaggcgttccataccccttcggccgaagccttttgcataagaaaccccgaccaatacagaaatcaacctgcagtcctgcgtgggttgagtctgagtcacaggcatttttg

SEQ ID NO: 168631 - DNA, 816 bp, Zea Mays
tttttatcaatttccgaaggttgtttatcaataggctctgaaggcctggcttcggcactagcttggttcactgcaccttgaacttcgggcggtcttgtttcagcttcgacttgtattttcgaagcctcggcaattttccctaaaggaatagaacttgaagcctttaccgtctccagcacatctagcacactggccatcctttttctcttgggggtcgtcgcaagacctttttgtgccttcgacactgtcacttctgccgaagggcttaaaacttctaatgtttttgccccttcgactcttgtctcctcaatattatcagtcttcggctcaactaatttggctgagggtgccttcgacattgcagccggctcttcaatcttctgtgtgggaggagcagattctttcgcttcagtaaccgaagaggtttccctgccaaactcagcactatggccgtttcaatgtagcacggtcgatgggtaaggaccttcaattttttcctcttcggcgcaggttcgcttggagtagccgaagcagcaacctttccagaagctacaccctttcttttttgcccccgtggcgggtagcgatagtcaggatacacaaatccaatagcatcaaaaactctatttaatcttttctttcttcggctcccgaaggccgcagatagtgcattatcttcagacttggaatatgctccaagtaactcatcgctagtattttcaacacacttcagccagtcatcatctggctcgacaaactggtctccaaacctgaaggtatatttcaatcgaatcagaccaccttcgctagggttag

SEQ ID NO: 168632 - DNA, 448 bp, Zea Mays
cccgagtacaccaaaacgtagtcgaggaaacgaattaacgcgaggtgcactttaccaggcttgaggcaatggaggagacttgtccctgaagtaaaatggctctgtggcggactcccctgtcctgcgagaaatcgctgcccaaccatagctttctactccaaatttcttgccgcaaaacgttcctcgagattccgctctgtcctctagcccgaccctggattccggacgacgtcgaggtggaagttctacatcggcggctatttcctcacctgtggcgaccctctttctgcttcacaggcccaatggtgccctactatttcgaagacgacatgaatcgcccccgtgtgacccgacgaagctccttggccagatcacgcactctgattgcggacgccggtgggagttccatggtggtgtccgccacccgccccaccatgcgcactctcgg

SEQ ID NO: 168633 - DNA, 336 bp, Zea Mays
atcacttcgggacgagcttggctggcaggtggttgagcgaaggaagaagacccagcgtgtgcatcttcctcgtcgagggtcccttgtggatctccgaggcaggtgcttcaactgtttttcttcctcccatcttgctgcagcgtgtcgacgttccacccgatgctttcgatgctttgacttcgggcatcaggtgagctcttgccccacgagacctgtggcacgtacgaggcagtgtggcggattgaagcaagaaaagaaggtagacagaatccctgtctggcagcggttgactaggatggtgggggacgttcctctaaggaaggatggtcagggctc

SEQ ID NO: 168634 - DNA, 394 bp, Zea Mays
ctgagagcggctgatcacggtggggtcacacacggtggcgtagacggccaatttggcggaagaacgaaattctccggctatggtggctaatcgaggatgagggttggtgctctggcttcgtaacaatctagcggagctatttgtgcactcaattgatagtatccgtgagcggtggctccgaatttggaagagggaagctggcgaccgaagagaggggtgagtcaccggtgcaaactaccgtggcgttcaccgggaaaaaggttacggctgtcacttgtttatcctccacaacacacgacaacgtggtagaatagcttaaggcgtgtcgtgaccgaggtaaatggtggcacgacgacgacggtcgtgtggccacgtcgccggtgcaagtgggtac

SEQ ID NO: 168635 - DNA, 272 bp, Zea Mays
gcgcttggcggtgcccttctggctactaattgtgagtcaaggttggtgccatgggtggtggtggaggtagcggggtccatgctgcttgagagtgacttgccgaagcaaccgatgttgtgggctgctggttgcccacatactcgggaatgtatggagaatagcatgaagtagtatgcaggacctgcttcggctgattctgccttgcttcagctatctctttttgcttctggatcatgacttggcacgtccttgttgtatgtcctttattgtca

SEQ ID NO: 168636 - DNA, 296 bp, Zea Mays
tctatttgttgctgcaacatttcgagctctgactggaaagcatacacagttactacgtactccatggcacatccacagttgtcagccaagaatacgtagaaatacatacatatggctctgcttgaaacatgaagcggtgctctgctaagctgcttccatctcgctttatggcttgtcgcgcaccagcttcgcttctaaccacctttaatttgcccacataatcacatatataatagtacgtacgtactacccgttgtcgttgcttgcttcgtactcctcctacctacgactacgac

SEQ ID NO: 168637 - DNA, 505 bp, Zea Mays
cactaaacgacaagtttagtttggcttttgtgcgttttatagaatattgaggcattacactatatgggcattcctccccctaatgccgagatgttttaaaagcaaacagataaaatcctcaaccataatcatccagttgtggccaatgtatgctattgtggtgatttatttgggaaatcttacgcactttacagatcgggcttttatgcagtgagctttggacttagattaatgtagtggcatgaatactacatattttttgttcaacatgaagggttagtctcaacatccagcgagacacgcaacaacaagttgcttcgtggttacaattctgcaaacttattgttattattaccaaatgcacagtcaatcattaagatttggactaacatgcacaacactattttatccataaggcttcttcaggggctcatgaataccatttgtcatttggagtcattaattgacttcatatcagcaagtaaaatgaccatcagggtctaac

SEQ ID NO: 168638 - DNA, 578 bp, Zea Mays
caccgggccacatactgagctatttctttcttcatccctctccaccagtatctggttttgaggtctaggtacatcttggtagtccctagatggatggagtaggctgagctgtgagcttcttcgagcaggacctctcgtgcttccccttttggtacacacagacgatttttgaaccaaagggctccttgttcatctgtcctgaggtccgggagttgttccttgcgggccctttccacaagtttttctgtctctgggtctaggcgttgagatttgcatatgaggtcttccagcattggtctgacttcgagactgtcgctgtttcccagacatgtatttagttgagctgattctttcttccaatcttctaaaaagttggccccctttattccgaatggtttttgactgagggcgtctgctaccacgttggcctttccggggtgataatgaatttccaggtcataatccttgatcagctccagccatcttcgctgacggaggttgagatctggttgagtgaatatatacctcagactcttgtgatcggtgaaaatgtgacatttgtttcgattaggtaatgc

SEQ ID NO: 168639 - DNA, 416 bp, Zea Mays
gcctggcgcggtagtgagaaacaaaaaatgcagggggtaagacttgcctcgattaaggtcatcgtttcgactcctgtgggagccgcctttttagttgtaattattttcagataaaagaagttactcgaatctagctattttgtcgtttgcggattttgtcgggaaagcttgcggaacacgaatgtttcaatgtgcctaatgtggttccccctgcattattccagagagaagttactggaatctagctattttaccgtttgtggattttgtcgggaaagcttgcggaacacgaatgtttcaatgtgcctaatgtggttctttttacattctaatctaggaagtcagttattcggtttaaacttctttatttgtaggcaaagcaattattattacataccattcagttttcaaccccc

SEQ ID NO: 168640 - DNA, 753 bp, Zea Mays
agtggaacctgcgggagtggacgtcgtggcgggattatagtaacagagcggacgacttgcgtgcacgacaggccaggaagctcgagagcacagacgccggtggcagccgccggttgtcgctgtcggtgaagctgactcggcaggagatcgacgccgacttcgccaagatcaccggcagcaaggcgccgcgccggcccacgaagcggagcaagaccgtccagcgcaaaatcgaggtgcgtggtctcaccgctcaggcagcaatgccggtcatctcgatcgatctcctaaccgccgtcgcaggatgatccatgactccatatgagttcgtttcgttggtcgggtttgttggttgctgatcatgcgcttcgttctcttgtggcgcagacgctttgcccagggagttcgctggtgtaggtgaccctcgaccggtacaaggtgaacgaggtacgtgcatctgaaaaaattccatatttattatttcgctgtagtttgttgcttgggaggcctgggatgagacgacgattgatctgactcttgttcctgtgggtgcagaaaggaagattttgatttcttctaagtcacgcgagtaagaaagggagaagaggaagaggaggagatggattttacaacggaggagattgatcgagcaatgtctgcctcctcatctcgtgatgcatcaatgcttaccacaaggtacttcctcttaaccataaggaattaaatgtgtgatttcactatgttgtttgtgcgtat

SEQ ID NO: 168641 - DNA, 611 bp, Zea Mays
caagtatctaaaggtaattcctcccatgactggagagtaagtttcttcatagtcaactccagggcgctgagtgaaaccttgagcgactagccttgctttgtaccttgatatttcattattttcatttctcttgcagacaaatacccacttataacctacagggtgtatgtgggatggtgtgcgtcttacgggcccaaacacctctcttttgtctagagaaattaattccgcggtaattgcctttttccatttatcccaatccggtcttttcttgcactctgcgatagatgccggttctgggtcatgatgaatgattgaggcaactttctttgcgaaatatatgtctacgttggttgttgctctattcatgcattctccagttaatacatagtttatggccatttcatcatgggatgcttcttgcatttcttcttgcgtttccctgctgcttcttattgcgggagcgagttcctttagtttttcattgcctttgtgtgcgcacatgtttgggttggcggtttcttcaacgggaaggttcaagtccggaatgcttttcttcatgtgttccttcccggtgccaggtctcgtctggctccccttcttgttttggg

SEQ ID NO: 168642 - DNA, 556 bp, Zea Mays
aacattacatattgtggcagataatcatagtcaaacacaagttgtggcagacacatgatctggcacataatcgaagtcataagtaatttcacatgtcattaattttagtgactctactcatgaacatacgtgtactccatggaagcacaaagaagtgtgagaaaataagtgattcagtgttttggcttatattggtgcatactcatatagtgcgaaagggtaacattgcacataaatggcacaaatacattgtcttcagtttaaaaacaccaagaacagtccaatgaacaccactggggaaatataattgctgccatgcctaatgttagggttacttttgttcgtgtatttgcatcacgtggaacataaagtttggtataccaggcgcctaaatcggaggatgaacaacttcctaagttcatacctcgaactgtagtgtggatctgctaaactcctatgggcttggcaacaaaaattacgaattttgaacacagcttcagtgctaatgtacatttatcctcactgaagttttcgtttgacggggtagaagatgcta

SEQ ID NO: 168643 - DNA, 484 bp, Zea Mays
caaaccttggaagacatgttgtgtgcttgtgttctgtcttggaagggtagctgggaggatcatctcgccttggctgagttctcttataacaacagctatcaggctagcatcaagatggcaccatatgaggccttatatggcaggcggtgtatctcccctttgtgctaggagactttgggagagagatctctggttggtcctgattaggttcagtacacatctaagaaggttcgggagattcgtcaggatattttggacgctcagagccgttataagagttatgctgatgtgaggaggcgggacttggaatttgtagtgagtgatcaagtccttctcagggtatcacctactagaggagtcgttcggttcgatgtctccgggaagcttagcccgagatacattggaccgttctctatcttggcccgggttggcagcttggcttatcggttgcaattgccagaatccatggaaggggtgcacccgg

SEQ ID NO: 168644 - DNA, 852 bp, Zea Mays
tgaactccactgccttggcgaagttagggttgcaatcagcttgtactctatccactttgtaaacttgttaatagccaccagcacatgggtgtaccctcccttggcctttttgaaaggtccgatcatatccaacccctagcacgcgaagggccaggtaaccagaatagtttgcagttgttgggctggtaaatgctactgtcgagacaagaactggcacgcttcgcatctttggactaagttatctgcatctttcttcgttgtcgaccaatagaaacccgctctgaaagccttccctactagagtccttgacactgcatgtactccacactgccctgcgtgaaattcttctagcaaatgcatcccaatagctgagtggatgtatttcatgaggactctagcacccctctcttgtatagtgctccccctatgacaacatagtgggtcgactgcttcgcaatgcactcgacaacggccttgtcgtctggttccacctcatttttgatgtatttgataattggttctctccagtcattcgggtctagcttcacctgctccattgccttgcattcctttattggccatgcgtgatgctcggctgccatatttactggacaaagatgccgggtggagcttgtgcctgacttgatcctagctttgaccgagtatctattgctgtgttgcgatctctttctatgtagtgaaattctaggccttcgaatttatcttcgatcttcctgaccgcagcgtagttgttacccattgattcggaggagcagtcccagtctttgttgacttggctgatgacaactagggagtctccgtataccatcagtctcttgacgccgatacaac

SEQ ID NO: 168645 - DNA, 611 bp, Zea Mays
gatgtcgcaataacttgaccgcgaacctaggggttctttcaccagctcaggatctttgctggtatctctctccctgaccgttatctaaggagccctggaaccattagtgagagtagaccgagagggggagagcggagggagaaagcaaccaccgttggaggccaccattgtcgcccttcatccacgccgtcgctcagggtcgtacaggaggatagggagattcaccagaagccactaaagtcgtatgtcgcttgatagggtgtgggtggtagctgggtggcgtggaattgcttgccatagctcgagcgccgccgtcgagctgctgctctgcgctagggccccagtcgtcgtaatgcgtggtaagagttcccccgtgtgctttgtgatcttcttggcttcgactaacacctttaggatggggtgtggggcactggaacgctatatgatggctcaccggagaatcgcatcaccgcgaaggtcactgctcagccgtccagcgtgggcaaacaaaggtgatgagtgggatagttgtatcttcagccgacggttgagattagattctggataccctttcatcattttaaatcttagtcctcgattggggaaccagg

SEQ ID NO: 168646 - DNA, 392 bp, Zea Mays
gcacggactgccagtgacgagtcttcacccccgcgatgacgatccagcgatcctccaactcctgagttcattcccttccctgttctcacttctcgatctactctattattgcttgatttctttgctccccactgatgcatcggtcatgaactgatacatacaagacagtgggatgtgggagggaattcttttgattcacttggtggtattggcgttctcaaaatggctaacccctctgccttgatctctcccccttgatgagcctgaattgcaagctgtcttttggtttgggtgatttgcagcatgatggatcttgtggacgagaattaagcaaatgaggaaataggaactggatgcgagcctgaatgccttttgttactttcctatatttg

SEQ ID NO: 168647 - DNA, 446 bp, Zea Mays
cttcaattcttggaaggcttgttccgcctcttcggtccaggaaaatgggcctgatttccgcaggagcttgaagaagggcagtgccctctcagccaacctcgaaatgaagcggctaagggctgccagtgaccccgtaagcttctggatgtccttaatacgggtgggaggcctcatcacctcaatagccttgattttctccgggttagcttcaatgccccggtatgaaaccaggaaccccagcaacttctcctgcggagacaccgaagatgcatttcttcgggtttagcttggtgtgggttgcccgtagcttgccgaaaaccagggtcaggtcttccactatagtcgacccctccctagtcttgaccatgatgtcatcgacgtagatctccaccttgtcctgaatcaggtccccgaaggtcttactcatcgcccaaacaaatgttggc

SEQ ID NO: 168648 - DNA, 462 bp, Zea Mays
acgcattggaaaaaatctccttggactccagcctaaggttgaaagtgtaaaaactgggaaaaattattgatgtttcgggcagttacttggctatgtaaattccataccttttcaaaatatcctaaacattcttttctgtttctgcaacatacatgtttatcagttctggacctttgacgctacgaaagttcagtgagtattcaggctttcgcaagtaaaacctagaagtccaacggacattcattttagcgattccatgtctttaggatgcacttgttatcggatgtctcctatgagacagaatgcacttgttatggtaactaaacaaaaaaatataatttaattcgtgtgaaactttttcaaacctaccttccctgttcccggaggtccatatacccagacacctaatcgcttgcgcaatttagaagaaatcatgcgattatacgtcaaagggagctgaaa

SEQ ID NO: 168649 - DNA, 3645 bp, Zea Mays
gaattagttttcattataattagtgggcaacccaatcacaacaggaatcagggaaatcctcatcgaccaaattaactctggtcggcttttggacaagccgacgggagttaggtaattcactgcggccaggctgtcaaccgacaggaattaattaattcccgtaggctggaggtacagggattgtgagtgccttctctaatgaagattgggcaggtaacttagatgatagactctaaataggaggctttgcagtatatcttggcagaaatctagtatcttggagtgctcgaaagagcccacagtctccagatgaagcattgaagttgaatataaagccatagctaatgccatggtaaagttgatgtgagtatagtcactttcacagaactaaaggttccttatcctcctgttgcaaggatctgatgtgatgacattggagccacctatcttacagcaaatccaaagttccatggccatatgaaacatgatgagatttatttccatttagtgagacatagtagctaagaaattttggaggtcagaattatatctataaaagaccaagttatagatggctttactaaggcactgactattgaaaagttggttttcattcttaacatgtgcaagttatgtttgaggggtgatgttagaatatgctatccataggcaacaacaaccttagttgtccaagatcctcttaggctagattagaaaccgaatctggttagaggtaaagataaaactaaacaggacggcatgcgtccagtttaattagagacggacacttagactcagttgggatgctgtaaccgaatacggtttctcttgtaataggcagctcctgcctgtacaaatatacaaccccattgatcctagagattgaggcaagcaatttaatatctcggtaccatgtttctttcaaagagttcaagactacaaagactcaaaggagaaaacaaacctctagagaaggaaaatgtggaaatcccttcaaagttgatattttgtttctgctagctgctaacacctatacaaaaagactcaaaagatgtaaggccagcattgaagatttgaatatgttaaaggtggagagaaagataaaaaaaatagaacagtgtactcacttgaagtcgaggctgtcgagccatacaaactgactttagcctgttttgagcaatagaaaggaactggtgcaacaagaatggcaagtggaagatgttaatctatgtcaaaataagtaaattaactgctaagatcaagtcagtgatagcagaatacctccaagttaggaagttcaggaaggctagcaagtgaagttatttgatttccagcaagatacagttgctacatggtatggtgcacaaaaataagtgcatgtgagccttctataatctcgattaatatgatggggatagcgcaaacctggaggacaacacagttcccaagaggctcaaacccagggagcttaaaatcattaaaactcaaatcaagaacctgcaaacattaccacaaacataagctatagtagtgtagaatactagaataaacaagcaatttgaccagacatggtgtgggaaaaaacagaaagataggcccacaataaataaataagataagacaacacaaggcatacctttacccccttgagaatctcaatgccctccaaacttgataaaaggttgtccctcagatacacaaactagaaataaaatgctagtcagtagacattccaggttattgcacattggcaacttatgcaggttctggttctctacttcatggcttcatgcataggacttcctaggctttgcgactttgcaaggtaaaatcagcagccatgtgttgttcagttataaccaaagaccacaaagcagaaagaactaggaaacataagagaggaaaggagggtggataaagattacctcaagagcatgtgataacctcagctgcttgagactacgaactcgatgacctcttgaatccagcctctgcagtacagaaaaaaaggtgttgagcagataaaacccaccaaatcatgttgttacctggaatgttaaaagaaatgaaaacgaatcgcactaaccacttcatcgctagccttcaaatccacctgtggcagcatcatgaatctcgaatcacggctatctgcggttgagctcttccgccgattagacgcagcagatgatgcttgagtacccagtttccttgctgcattgcttgtgacggaacgtggcgatggcacagaagcattggaggacactctcctggtgctgccactgctgccattggagctctctgtctttgactggaccttcttcagtgttgaagttggggatgccttaacagcaggcttcctggccaaatcggcacctgtcctctcgaccaaggatgttttcttctccactgctggttttgagccagcagcgggagctgacaccagtttagtcttcctcgcgccatccgacagcgtaggactagacttcttagcagcagctgagctcccattgtcctgttgcttcccagcagtccccgtgctgcttcttctcgtcgccgaactggcgttcagcgacgaggtagacttcatcaaggaagaccggggcacacccacctccgccggagccgaaccatcagctcgctttttaatggacgaagcagtccccaaggcgaacctgcccgtgggcgccactggccgtggcttcgccggtttagcctccgccggcttcaaggcctctgatggagtttccattcccctccagcaacaatatgaacctcaagatattcgctcaaatccgtcctggtcaagcccggagtctctcggtcatagaagcatgggcgttggtgacctgattgcgaggaaaggtaagaaaaaaaatagttagaacacctgagttagtggcctagaggtgaagtagtattggacaggcactcatcaatcatgaatcatgcaacaaccgcacggcacggcttccagcaatgaggcgcttgtctctagcatgtactaaccgccagcaaaagtgtcaacgcttatcacggggttggaactggaacgaatgatggggggccggccgtgcaagcacgatggtaccagggcccgttaagcccccgtacaaaaaagataaaaggccgcacaaaacctagttcagtacatgaagctaagacagctgagcagtgggcggcagttttggtcggaattcaaaacggaactgcacactggtgactggagccccaactccagccaagcgaactcgatgggactgggaggggggggggggggggggggactgggggggagctcaaatcaggcccggagaaaatatgatatgctttgcggcgattctaaacccgatctcccaccccggccggctgcataacaaacctggggcatttcgccgcgactgtggaaccggagaaactccgccagaacccacgccgcaacctcgccgagcaacagtggctcaggggggggggggggtgggggaacgcggctccgagcccacccgaaacgaaacaaatagaaacgccgggattcggagaagagaacccaccaccagtgagtttaaccgcgcggcgagcacgtgggggtggctcacctccccggtgccggccggcgagcggatcccaccagcctcggtacggccggac

SEQ ID NO: 168650 - DNA, 576 bp, Zea Mays
gtcggggtcgagcgcttggcgtcgtcgcagtggcggaacatagagcaggcagctgctccgtcgatggcgcgcagaggcgaacagtggcgccgtgcaggtaagcgacgaggcacggaggttgaacagcagggaacgatgcagtgacttcatatggctagcacgcaaggagagtcgagaggagaatttgaggcggggcatggactcaacgtggcattagccatgatttataggtcacacagagagtaacggacgctagaatggtagtaattggagaggagaaattgcggccattaatagctggaagaatagcaggcgtttaatggagagggaagagaggatagaatcatcgtggcaagtggaggaggaggtgactagtcgcggcaggagctcaggcgataggaggcgagcggacagcggcggctcgcgcttgcagtagggagagaggcggcgaagcgcgaccgttcgtgtgagaggaataaaaaagaagaacagtctagagtggggcccacatgtcatacattggaagagagagggataggtgcgtgacgcatgggcagatgggctggtggctgttgg

SEQ ID NO: 168651 - DNA, 749 bp, Zea Mays
ttccataatagtgtctaatacgctggccatccttctcctttttggagtcactgcaggattttttgacatcttcgccagctccgcctcttgcgatgggctcagaatcttcggttgctctgtcgaccaccttggttctggtttttcggccgtttttttcgtagtttcggcaggtggcttcggcacttcggccgttttggttttctcctgttatgtcatcaccatcggtttcggaacttcggccaattgtccctcagctttggtaagaacggggtactctggctcaacagcagaagaaggcccctcggcaagcttcgacactttggccgtttcaatgtacctgggccggcgtgtcaaaactttaaccttttttcccttcggcgtggcagaaatagccgaagcagcagcctttctcttcttttcctgctttcgcaagggataacaatagtctaggtacataaagccaataacatcaaagactctgttcaatctctttttgcctcgccttccgaaggccactgttagggcatcgtctttggccctcgtgtagccaccaagcaactcgtcactagtttcctcaatgcagtctagccagtcatcgttcggctcatcaaattggtatctgtatctgaaggtgtactttaggtaaactagaccatcctggctagatccggtagtagcttccttcggcatttcccagccacttccaaggggccacactctatacgcaatgtgttcctgaactaagtccc

SEQ ID NO: 168652 - DNA, 500 bp, Zea Mays
agtacccgacgtcgacgagccaacttccaaagacctcattgacggagaccgtgtctttgccctgcaggccctcgccaaatatcaagcccaaccgaaggcctggcgcgaccacgcagtcatcccaagagaattcaatgaaggggacctcgtacttgtccgcacaacccggacagagtcacggggtaagctggaaccaaagtgggaaggaccatttatcgtcaagacgaagtcatctcccagcgcgtacagattaacgacacaatctggtgaagacctggaacattcctggaatatagataatcttcgcaaattttttgtttaaatcctcagggccatcacgcccttgtaattcaccaaacattattattccggcccacactcttttcctcctagggggtgagttttttaatgaggcggagccatgtaatatacaagcaaaaatccctcgcaaaaaactaagccaatgtcgaaaagaccgcatcgacggtcttcggcattcg

SEQ ID NO: 168653 - DNA, 411 bp, Zea Mays
tttggctcagagggtgttgctgggtcgtcgaacgcggcgtgggtgatccagatcaaaatgggataccggtccgtgctattgtgatccgggacgtcggggtcacaatcaacaaacgcgatgaagactggatttgtgttgtctgatctaatctagacggcgtagattagaccaatggagaccccttcactttagtagatcgtgaccatagatggtgaatctaacggttcaggcacgcgcatatccttttggtcagccgcttttacatatgagcccctctattttcgatgaatcagcccgccatccacccaaagacatagaataatacgcataggtcccaaaatttacaccgggctccctggaaaactctaaaataatatcgccaacccaggaatcgttgtatagtaataaaac

SEQ ID NO: 168654 - DNA, 290 bp, Zea Mays
ttgtcgtttgtgtgtggaggattatgggtttcactgactggatcaagagatatggagggatgaagttgggtttgtctcactgctgaactccgagaggaaatcccgagtttgacgtgtctagggcacgaatctcaatgccatcttcacatatgttgcagaggggttagtttagaacaaatttgtcattgggcacttaaggatttgaggtagggattaaggtgaacgcgctcaagttctaggtgaaggctgaaatttagaaatctgaatttcagatttttcctagagagctt

SEQ ID NO: 168655 - DNA, 883 bp, Zea Mays
gcgaagggcaactgactgttgggatcaatggggagaatgactgcgacggatgaactcgaagctttccgcttgggcgccatttcaacctcgccggcgaacggagcagaagcgatattgcaggagagcagagaaagcctggatgcaaaaagctaagcaaaacctagggaacggagcgtggaggcgtgctacaacacagtacgtatggggttttcccaggccaggtgccgtttccaaaaagtgccaggtcatcacccagcggttatttctaaaacgctggcgtgccatgtcatcactcagctgctatttctaaaaacgctggcgtgccatgtcatcactcggctgttatttccaaaacagccgacacggctcaaattgactcagctgtttgtttctaaaaacgttgacattatctggcttcactcggctattaccttcaaagtggccgacgtggtctaattatcactcggctgttacctctaaagcaccgacgtcgccagtaatcgttcggctattacctctaaaacgccgaagtcgccagtaactgctcggtcgttatttctaaaacatcgacgcaacccccattaccactcggccgttacctctaaaacgccgacgtcgccagtaaccgctcggtcgttatttctaaaacactgacgcggcccgttaccactcggccatcacctttaaaaggcctcgacatcgctgataatcactcggccaccactactaaagcgctggcatcgtgaagaaggcagtctgaggcacggctcaacaattctaagttgctacttaagcgttacaaaacaacctctgcagtaggcatcaatacaaacgacgatcaacaagaaggcggaataatacgcacaagaggggtcgaaaccat

SEQ ID NO: 168656 - DNA, 907 bp, Zea Mays
ggcatctccaaacaattgaagaatgttaagagtaaggtctatatctgcaggtgttgggcataaggaaaggaccacatcatcagcatacatggagactcgatggagccttttttctactagaaagctgctgaagcaaaccatcattttctgcctttgaaaacatgtagacaagaacatccataactaaaatggatagcatggatgagagggggtctccctgatggagtcccgtttgacgcttaatatggcgacttggaaatccattcaatagaatctgagtagaggaggtagccagtagcccacatatcaaatccctccaaatctgcccaaaacccagcttattcataacctcaatcagaaaaggccaagagatagaatcaaaagcttttgtaatatctaattttagcagcaagctggccttgttttgttgatgaagcagcctggaggtttgttggaccagcatgaaattgtcttgaataatctcccttttataaatgcgctcttattaggtgacaccatcacattgagcttgctggccaatctattagcaagaattttggtgaccaacttggcaaaactatgcaccaaaatgataggcctaaaacctttaatattatcaactccatcttttttggggatcaaggtgatataggcggtattaaggcacccaaaattggtaaatttcctaccccaaacaacagagatggcatccataatatcaggcttaataattgtcctgcaaaccttgtagaacgttcctgtgaatccatcagggtctggagccttatctgaaggaaggcatttgatggcatcccatacttcttgttttgaaaagggggcttccagatcggccagatcataactaggtattccaagagcctccaactcaatcgcctgttccctatcc

SEQ ID NO: 168657 - DNA, 518 bp, Zea Mays
cgagaagagaagctagggatgcatatggacctttctttctgttgtagtcgacatgcatgtggatcttgccaaatgccgacgaagattccctgccttcgtggaaactgtgcgatgcctagttcttgtcgttggaagctaaaccttatgttgtttagtaatgtcaaatcctggaccttccgtcttaacagttgtagtgcgttgaagtttcccaaatcttaagcattatttcttgtcggtgccagatgttacggttgcatgcaccaaccaccatccaattttagttttgtagttatatgtcactctataaccccaacattttaaactttgtagaacacacttaacctaatcacccccacacatataacctctactaaatccaccaaacaaaccgcactcagacttaacactcaatcaatattaatgatttaggtcactggataacttagtctctgctactcagttaaatccaataaacaatattatttgaatcatccattatcactcaccgtcctcgtgac

SEQ ID NO: 168658 - DNA, 487 bp, Zea Mays
gcttatttgtggcaggccagtccgagcatatataaatcgggccgagccgggctcttacccggtaaaaaaaggggcttctcgtgcttcctgtaggtggagtgtccgtccggcgggtgatttccccgctccgccctagccttacgcgcgtgcggactagagtggacagagcgaccgaagcgagtcacgccgcggtctgcttggccgtctaccgcacgctcgcggtgtgcgatggcgatggcgagtcgccgacgcgttcggtgtctcgagctgtgaggccccctgcgcgagcgggtggttccacgctaccgccctgcgcacgcacacgcgttctcacgaggatcagagacgagccgtggcccgtggccgttgctgttcaactgtgtcgcagttaccaaattcgaagagcacgccgcaaccactacgtcgaaacgagcggcagcggacaaggttggacgaactcctggcctgggtgacagacgacagcgac

SEQ ID NO: 168659 - DNA, 381 bp, Zea Mays
actatggctgtcaggcttactgaagaagtacgcgccatggtacagtgactcagacagatcagaacgacagcacgacagtccctcaccgacgacgaccgatctccgctgagattcacgccgccgccgttgcgattcacgtcgccggtgaccagatatggccgctcggtaaaagccatgcgctggacggcactccggtgaacctccccagtacttcccctctgctttgcggctggagcgataggctcgccggtgaaccgccgcctcccggccgtgcgccgcgtggctctcactttccaccgcaccgccacgacttaccctcgctccccgttgatcgccggaacaactgccacgccactggacacgaattcaccgcgcccgcct

SEQ ID NO: 168660 - DNA, 725 bp, Zea Mays
agctgatccacccctcttccgttggaaactaaaaatccagaaagtaggaatggagcctcttcattctcctctactcctcaaccaaacacaccataagtgagagagtgtaagagaggaagagagttttggaaggcatgacctagaagcgatggaagaaggcatctcctcagcactgatgccaagcctagccacatatgcaaagggatagaagctgatgtcatcgacattgatgttgaattagatacatgtgtggtcgatatgcagtggacgatccaatttcaattagtgaccggacaaataaaaaggatacatgcagaaccatatcagaattgatgttgccatatggcgattagactgtctagatgaaggtgtcctccttcaatgcatatgatagaatctcgccatggatcaaacaatctaagtatcataggagggatcgatgggtagatatgatgtgggttggtggctatttttagcatgaagttatggcggggatgttcgacgatggtgatggaggacacctaaacgcatggtcggggaacaacttggtctgatcgccactagagcagtgcaatgataggtcacaaccatacatagctaacaccattgcaacataggaacggggaattgttcaacaacgaagatctaaatggaagaggttggtgatgagagaaggtaggggatttttgttgtgctgcatgttataacaacgataagggcattat

SEQ ID NO: 168661 - DNA, 664 bp, Zea Mays
caagagttcaacctattatacaatagtacaccctacaatacactactctacttttattacaccattattcctgctttccattactcttggcggcctcatcgtcaggtgtgggagtccagacgtcaaccaacctcaaagaaggagggggctcaaaaaggtctaactccccacccagcgcgcgtcccgcaacgtgagatggtccggcttctgcctcagcagggtgtgcaggcacactagggtgtaattgtgagtatagtatatggacttcctcatgcaacgtattgcagtagacctgcaggttatcaacagttgagctaagttctttaattcgggcctgagcccttgcttccttagcacacattagcaaatgagactgtacggcccagtcaagtgctaagtctcgatcagcaagctgatcctgcagatgtcggatgtcccttcttagttcattgatcctatctccgtcggcgacccaagcatcggtcctgtgttgaagtgctgcttgaagtcgactcactcgggcttcaaggtctccgatggggtcattacttccactgctgctgctttcatgtcagggagccagttgatgccgaggcaccccaattggtcccgtagacttgcgtgccgttagccttgtgcgtggcggcatccttctaagggggaa

SEQ ID NO: 168662 - DNA, 590 bp, Zea Mays
agaagaaactagtacacggaagggataaaattgtgataaaatttaataaaagatattttctgcatttagttaacgtagacagggagacaaatctaatttttaaggtttaaaagaggcaaagatgtgttggatgaaaacaatatcaggtatataatttagaccgaattcgatttggtgaacaatcgcaggaccagataaatttctaccagttattaatatccaatcatttggatttgttcaggcaggatataaacagatcgaaataaaacgacatttgggttatgcatattattttcttgactttgaaatagtaaaccgaatcggctaacaattattacggattcggttagttcgggttcagtttatttaaacagcctgcccctagtagtgtctctaccgaatttgtagagattgctcgaacaagagcgaaataattaggggacgtttctaatttgccttaatcgatgaattttaaatttgcattcgttttagttaaatttagacgaattttcaccgccatccgaacattcgactaatatctctacgccttatatttcttggacatgaacgcggtcgaaattataaactcg

SEQ ID NO: 168663 - DNA, 808 bp, Zea Mays
gaaatggaagaaaaatggacctgaagttggatggtcagtcaactccaatgctgaaatttgactatcaatgaactgggatgaactttgagatcgattttgcataggattcattggatgtttgatcgaggttgctataacaaaagtaaagacggtttatagaagaacaactttgctacagacagattagtgggttgtcacacgaaaattagagaatgaggccttgcaagttgctctgtcagaacgactgagttagatcgcgatggtacagtagactgaacaagatcacgggttcggtgcatctgtcgccgccggtgatctccgcgccacgattcacactggccgccgcgattcgtgcctgtgtgaagtggataaccgtggcaggtgaaaagatctggggtgaggagaacgtaggcctgagctggatcatcgtcgtgcccacttgccgtgtggtcagtgaaatatcgtcgtcggtgttcaccgtgatcgcagtgagagacacgtagtcgcctatttcaccgtactatcgtggtcgtggcaagcaatcagttaccatccctgaaccattcccctctcgcgcgccacggtgagcaggccaccgtagaaatatccaggacacggtgaactcgatcccaatccaaaatttgtgataagctcagttgggatctataaattggaggcacccccctgctccgcctccttgttacgcatccaacccaccccaagctagcctctctcatgcaccgtagcccccggtcaccggatttcccccaaattggtcatctgcgccgccgtgagacgtcgcgccgtg

SEQ ID NO: 168664 - DNA, 819 bp, Zea Mays
tggggctagtgtgtttccgctgtggtgatgcatatcgccgtgcagagtgcaagtggagtggcaggtgttctatctgcagtcaggaccacaaggatgtggtgtgtaggaggaatcctaatgggaagctcagatgggagccggtgacttcctcctcttctcagggcactatcaacatgatgtcaagtgctgagcagcaattttcagttcctcttcctccgcaacaactttatgtgcctgggacttttcagttcgtgctgatgtagggttttcctcagtatcaggccgagcctactcctgcaccgtctactcctatgacgtctcagtttggagctccgcgtctgccttacccggcagctcagtggggttcttctgttaatttcactccaggagcttcctcttctgcgggtatttctggagcttatctgctacccgctgtggatggcagacagcaaggagacgtggtgacaggtacgatttcagttgattcgtttgcggcccatgctctttttgactctggcgctagctattcgtttgtttcggaggattttgtgtcgcgggctggtctttcggtgcagaggttgggtcacccaattttggttagttctgctaatggctccattagtagctgtttagtttgtcaggggtgttccgtcattcttgctgatgaggtcttttctgccaatctggtggtgatttccatgggggcattcgatgttatcttgggtatggattggttatcccagtattgcgcagttatatcctgtttttggaagacagtgttattgcaggcgccgtcgggtaaggaggtggtattcatgg

SEQ ID NO: 168665 - DNA, 290 bp, Zea Mays
cttgagatccattaccaccccggaaaggccaacgtggtagcagacgccctcagccgaaaacctttcgggataaaggggaccaactttttagaagattggaaggaggagtcagctcagctaaatgcatgtctgggagacaacggtagcctggaagtcaagccaatactagaagatctcatatgcaaggctcaacgcctggacgcagagacagccagacttatggaaagagctcgcaaggagcaacttccggatcttaggacagatgaacaaggagttctttggttcaagaa

SEQ ID NO: 168666 - DNA, 609 bp, Zea Mays
ttattgaaaacgaaatcttaaaatatgtggttatgaacgcttgacatgggggatccactttgtagtggatgaatgcaagtggatcctcgaattgcgcgcccttttggtataaaatggcccgatatccatgcgtttgggcatggcatttactcatgctacccctgctttctttgccttcgaagctttcttcgactttcctgctttctcacaagtttcatgctttgcgagcttcgttgtttgagaacttcgtttcttgagtgatggtggaggacaaatcgagtaccgagctagccattgtggtgctctcggatgctgctgagagagttgcgaccaatgaagctattgaagattacctttcactactttgagtccgctagggccagacctcaaaagtatgttgctcactatgaagggaaaagatgacaatgatgtgatagttaaagcttcagctgctatggtgccacaataaattactctgaaattgacagagaaaggccctcgaatgaagtcacttatgctggtggtgtttgggactccatctgaggaaggcaacaaaagtccaagcttggaggtagatgctgaagccactgttgctgcttctataaaaaa

SEQ ID NO: 168667 - DNA, 535 bp, Zea Mays
gaatcattgttagtggatacccaatgaaatttagggaatttttgtcatgttagagagcctttggttcaatccacagctataccatttatgatgtatcatgctataatgttgccaagagcagtgtggcttgatgacatcactgtgtaaatatgatggattgcttctttggaactatgctatataaaagatctttttttttctagcttgacttctagcattggttgaggcatgagcatgggtgactgagcatgtaatgctgaatgttctgatactgatatcagaacatgaatttgtttaacaaaatattatatcctaaacttctgtttccacagcgtggtccggtacagaattgattccacagcgtgatccggtacagaattgattccgaaggtcttggaaatcagcggcgagcgcagcctcatcgacaacttcttcttctactaccacgtgtaataatcacgatacacaagtttccctcgaatttatattctatgttttcatttgtttcatgattgttagtttgtcgatcttattt

SEQ ID NO: 168668 - DNA, 577 bp, Zea Mays
cacatggcgcggagtgccatggccggagtcatcaataggcgggggctgagggcaggtcagccggcggcgattgctcggggagcttgcctccttggcgcaacacggtcctgggcacacacctgtgacgacagagaagggagggaagacgagtgagggagacagaaaagaggagagaggaacgacggttctcacccacagtggagctcggtcgagtagctccgggcacgacaagcacacggacggcggacgcggtggtcccgaggctcgacaaaagcgtggacggcgacgctccttggcgaactttggcgaggcacatcgagtgcaggggagaggggttagctgggtgctgtggggaaatgaggcgagtagggggaggggtttatgccctagcttgcggtcgtggccactttctgcgcggacgtgggcacgacgggcgcggatggcgattgcggtgaggaagggggagctgacaagtgggcccagctgggatgccgcgcgtgtctgggggaagggaggggcacgctgacgtgctggacccgttggacagcggatccgaggccgcggacgcgtgcggacg

SEQ ID NO: 168669 - DNA, 599 bp, Zea Mays
gttttacgttaagaatgatttaaaggcaagggaagacatcaaagaaattattcagcgacccatctggtctcgcttcggccttcggaggccgaaggtggaaattgatagcaatgtcaaagcatgtcagagggcttttagcactgtgtgtgccttcattggtacacatgatctgattcaagagcttatatccttcagggtatggccacttatggaaagctgggatattacgaaggagaccaccgccgattctagtgagggtggtctggtctgactgaagtacaccttcagattcagggagaagtttgatgaaccaaacaacgactggctgaagtgtatcgaagctaccagtgatgagctacttggagcatactccaaagccgaagataatgctctgtccgcagcctttagaggtcggggcaagaaaaaattaaacatggtatttgatgctattggcttcgtataccctgattaccgctacccactgcgagggcaagagaaaaagaggaagattgccgcttcggtcaccccagctgagcctgtgtcgaagagcaaaaaggtgaaggttctgacccaccggccgcgttatattgagccggccg

SEQ ID NO: 168670 - DNA, 731 bp, Zea Mays
accataaaaataatttattttacacaagtcaaagtatacacaccttcatactattgtaagcaagactgtctgcaagttgatctttcgacattgcagataggtcaagttcaagattcagatatcctatattgtccatcatttcccagcagacatgtatttctttatggtctggaagacagtaaaggaagtcatcttcgtcattgccaccatataccaaggaccctcgggggtacttcagatccctggcataatgttgcacttcggcaacctgctcctctgatagttgttttcccgaggcatgtcgaacaatgaattctagctccttaaggagtgcttcaggagcaggagatttaggtttctcaagaacactctctttctctggtgctatcggtgcagtttctgaaggtccagcttcagcaggagcgttggctacgctcgcaacagcaattttccttgcatctttagtctacgcgttgtgagcttcagcaaaggcaggagctgatgtatttatggactccaaaacaacgtctagcacgctagccattcttctcttccttagagtcactgcgggaatgcttgatggcttcgataatcgtattgtccctggcggactcaacaccttcaactaatctattgccttgtctaatttcggctcttcggccgggtttgtactaaccccgactggcacaacatgacctggttctgtcgcaggagcaacccctgcacgttca

SEQ ID NO: 168671 - DNA, 1035 bp, Zea Mays
ggatgacttgtcgtaatgacttcgtatggcgcacttgtagtgtatatccggttgcacccgtaggcggcttttgcgggaatttgtcttttagtaaagacttcgtttcgtgcacttgttgtgcttgtctggctgcacccttaggcggcttttgctcggatgtcttttagtaaaaacttcgtatcatgcacttgttgtgcttgtccggctgcacccttaggcggcttttgcacagatgtcttttagtaaagacttcgtatcgtgctcttgttgtgtttgtccggctgcacccttaggtggtttttgcacggatttgtcgcacgcgagggtagtctatgctacctgtcacggtaacttcgtatatatcgaatgttgaagaccgtcgtagcggtctttttcgacacttatggtaatgatgtatggagtttttttgtgggggcttttcgttggtatattacatggcgccgcctcgttaaaaatgtcaccccccgggaggaaaagagtgcgggcctaaataacattgtttgaagaattacaaaggcgcttgggccttgggtcttaaatgaaaatttttcggagattatcgatgttccatgagtgttctaagtgttcgccggatgacgttgctagcctgtaagcactaggggatgcctttgtcttgactatgtacgacccttcccacgtcggctctagcttgccccgggactctgttcggatggtccttatgagtacgaggtccccttcgctgaattctcttgggacgactatgttgtcacaccatgctttggtctagacctgatacttgttgagggcctgcagggcaaggacacggtctccgtcgatgagatctttggaagttggttcgtcgacttcggggacgactaacttgtttgttcggggggtccgtgttttaattcttgcggcgtcattgcttcagatccatacatcaagtggaagggtgtgaacccggttgctcggcactctgtcgtattcagggcccatacaacttcaggtaattggtcggcccatttgcccttt

SEQ ID NO: 168672 - DNA, 618 bp, Zea Mays
gagctcttggatgaaacaatggttctatgtcaagaatgatctgagcggaagggaagatgtggagggtattatccagtgtcccatacggtcacgcttcggcatcagaaggtaattaattgcaagtggaaacgaagtgcaagcgtgtttaatggccttcaattctgtgtgcacttacattggtaccaggaatttggtataggagcatattgcttacaaggtatggccactcgtgaatgactaggaaatgccaaaggagactgttgccggctccagtgaaggtgatctggtttacttaaggtacacctatcgtttcagaaatcagtttgatgagccaaatgatgactgacttgaggctgtcgaagctaccagtgacgagtcgttgggagcttacacgaaggtagaatatgaagctatgacattgccttcggtgctcgcggaaaaaggaggttgaatagagtttttgatgttattggatttttatcctgattattgctttcctgcccgaaaacaagggttgaaaaggaaaatggcagcctcctcctcttccaccgtgcctaagccgaagaaagttaaagttttgactcacaggccgaggccacattctataaaaagaacagc

SEQ ID NO: 168673 - DNA, 1013 bp, Zea Mays
caaaatatgttgtgttgactaaaccaccacacttagtggagaatttgtcgaatgtcaaccaaaacgctaagttgacaaaggaacgatgagtcgcaatgaagtgttataagggaatccaagcgctgctggagacgaagagatctttcactgtctcaatagagggatccttgacctaggtggtcccactatctaaggggcatggaggtagcacacaaggaaggacatggacactggccggcgcgaggtcaaggaggggctcaagcataggggtgcaatgaactaagggtgctggttgcaaggaagggagaatgatgtagctatgagacatacaacagttgtaggaggaatagcagcaacacggtcgcgtgtgggggtgcgtgggtgtgaggagtagaacagggcacatgagaactagtggcgcagacaacgcgaatgttagtaagcagtggcgccatgacggccaacaaccatgagggggtgtggctcggtgaggagccgatgatggatgcaagaatcacaacgacacaagggtttcgtggagaggacgacgtacgaagggaggagttgttaagagtgagggaaaaggagtggggcccatgatagagaagttttaaaaacgcggataaaagggtcactggacactccggaggagcacatgacaacacactagatatctgtatagtagaaactgtaaacaccgatcgtgtctggtgcattatatacggtgtatactggatgccaccatgacttcatgaagaagcacaacaagcagacatcattggacaatgtccggcaagacatccgacgcataaaaaaggtactgaaacaaattgtttttcactctagactttgcaccaaaccaattcccaaccattttcaagatataaatgaacactacctcggattagtattagcatcatctcccaaatccttgatttttcaaatattttgcactaggctagacaatttttagtgaaattagacaaaaagagaggttggcttgtgatttgtcc

SEQ ID NO: 168674 - DNA, 464 bp, Zea Mays
ctggcccgaagcgcgaagagggcgaatcgtcacacagggagcgtgcaaccgccctgcggttacacgtctttccaccttcgccgtagccagcggtcaagaaggcgaaccgccgcacaaggagcgcgcaaccgtcctgcggttactcgaccttccatcttcaccacaaccagcggtcaaggagatgaaccgccgcacaagaagcatgcaaccgccccgcggttgcgcgccccctcagcttcgctgcaaccggtggcccaacctctggcatgggggcccgggcccacatgtcatacatccggcgcgccggttcttgggtgcaggaaaaccgcaccgccgctcgtgccaataccgtgccttctcgaggccgtcacagaaggctaaggagataaattttcaaaaccgatgcagcgactcgaggcaccccgcgcatggcccaacaaagacattaagtacggaggtcacgg

SEQ ID NO: 168675 - DNA, 279 bp, Zea Mays
caagtgctcatcagagccctgtactcctatattgttgcacgtcaactggagtcagcgagcgcagagcaaacggagctcgacgttgaggagacgttgccgaagaggaagctaggtgagggcgagcagatcaagaggcatatggaagtcggcgttaccatcaggtgatggttcacccatgggcgatggcatcatggggacaacccaggctagtcggcgaaccagtgtcattgcctcattggtgcaagggtcaggggcgctagagctatggacgagagcggg

SEQ ID NO: 168676 - DNA, 893 bp, Zea Mays
atttggtcctgcttcggcctccgaaggccgaaggttgaaattgacgaagccgccgaagcatgccagaaggcatttggtactgtctacattttcattggtacaagagatttaatccaagagcatatagccttcagaatatggccgcttgtagagaactgggatatgccgaaggaaactgtcgccgaatctagtgaaggtgagctggtccggctgaagtacaccttcagatatggggataagtttgacgaaccaaacgatgactggttaaaatgcatcgaagtgacaagtgatgaactgcttggatcatattccaaggcagaagataatgcattgtccacagccttcggagatcgaggaaaaaatagattgaatagagtttttgacgctattggcttcgtctatcccgactatcgttacccgctgtgggggcaagggaagaaaaggaaagctactgctgtggccgcctcggccgaacctatgccgaaggctacaagcaaaaagatgaaggtccttacccaccggccacgctatattgaaccgaccgtggtgcctgagtttggcggggagacttcttcagctgctgaaccaaaagagcccattcctcctatgcaaaaggctgaagaaccggctataatgccgaaggtaccctcagctgagctagctgagtcgaagactgataaagataaggccggagcaaaaattgaaggaacaaaaatgttagaaattttaagcccttcgtcagaagtaacagtgccgaaggcacaaaaaagttttgcggcaactcctaagagaagaaggatggctaatgtactagatgtgctagaaacagtaaagactttgaactcgactccttcaaagaaaattgccgaagccacgaaggctcgaactgaagt

SEQ ID NO: 168677 - DNA, 578 bp, Zea Mays
agatggtagacaacctcttgtataaatttaagaagttttctagaaaaactgttctccaacgattttataaatcaggttcctaaatttacaaactctataaaaaccaattttatccctactttatccccaagtcaacgttagtgttaagtccatcatgaaaagtatactccaaccactgactcacatcgttcacatcgtcccaccgctaagatgaccatatatcttatcatcaacgtcttgatgtcatcaccgccagacaacctcttatgtcgaggcgccgttagagcacctctgtgctgccttcacatccttgccacgactatctgttcttacatggataactctgatctcccaagacatcataaaattgatactaatttctaccaccagttcaattaaaactagaaagcggacctaattttttagggacaacataaaaaattagtaccaataaatagagaactgtgatatttttttacttcttaaagtgttttgacaacttcttagatctataataacttagagcatcttcaagagactagctaaatagcttgtcaagctaaattttaattacttaa

SEQ ID NO: 168678 - DNA, 799 bp, Zea Mays
cctcgagtgcctcttgagggatctcgccgacaagggccgccttgtctttcttttcggcgagggctgtcttcgtcgtgtcatccagggaggtggtggccttcgaagtcgctttcttgggagccatcacatgattggtttgttgaagcatgaacggtggctgccaaatgttggaaccgactgacacgtggtcgagtaggcccaaacaatgggaagcaggaatgctcaggtgctcaacaaaacaatgggcaaggaacaatagtgtctcgttatgcgtgtcctgtcaatgtacaatgtaggggtatttataggtaacgaagtgggtgggcatgaccttctaagtacgattatgccctcggttacctgctcctccccagaatattcccccttgggggtcattacatgtaattacaatgaagttaagcacatcctgattaaatataccacaaagcctaccccaggatgggcttacaaaatgggcccaaatggccagcgaggcatcacgtgagcccattccacagaccacacagacagggagtggcggtcttcgctcgggggcgctgggtcttcgaaccttgccaagacttgtactcagagttgcctaagcgggtggtgacaatgagcgaagtcttgaagagccccgctttaagcaacaagtcccttcgcttccaagccttcgtcagttctccgaccgaggctttgccttcggtacgggttgaagtaccctttgcctcctgtgtctgatggaacctgctcaatttatattaaagcagtccgaacgagggggcggacgaccttcgtt

SEQ ID NO: 168679 - DNA, 378 bp, Zea Mays
gtcttgtctgacccttcgtcagacaccgattcatggtgagatcagatggacaacatcatcatttgctggatctccgacaccttcgtcctaagctgcgccagatcaccatggagcgcgatggcatgacacaccacctctagctcgctcttgagaactagtttctcaggaatcttgagactgcaccctctagctcgacggcaccttccacacctacctctagggcgacgtccccatcagtgattactggtgcaggctgaaggggatggccaactccctagctaactttggcgcccccgtcgactctcggatcctcgtactcaacgttcttcgggacctaaacaagaaatttgagcatattggtgccatcatgttacgcta

SEQ ID NO: 168680 - DNA, 638 bp, Zea Mays
gaggaagttaccattcatgccagtcagattcgtcagttgtttggttcaatgagtcatcgactcgtctgcacagcatgtgctatggcacctctgaccctcctcgtcgccctcacggcggagttgctcctggtacagctcatatcgaggctttgttctgaccgcccatctcagatgggtcgcggtgttctccggtagacttcaccacagcggccaggtttctctatcagctcatgagatggacgcttctgccatggatgggttacagggaggatgccactcatattcagctttggctccttggtgccctagtttctcactcagagtttgatgtcgtggattttctcatttgtgagatcgaggacatcgtattggatggtctccatgctcgtcgatagctgccttatgctcactatctgtgtcacatctttgctcagctgattcggcccccacagttccagggtactcttgaggcctctcgcctcctctttgggtcctaccgtccagctccagaggatcctgtgtcggcacctactccaatgcttgatactcaggccgaggataccacctttcaccagttcgagactcagcgcgcaacagtccctgatgatgatgatgatgcctttggggttccacctccg

SEQ ID NO: 168681 - DNA, 367 bp, Zea Mays
taaccctgggtcacctcgatctcttccgccccgctgttgcaagatagcaccacgtcgccggaaaacacagtgaccgtcagatcggacaagcaagcgacgtcgtccgttcgattgcgaatcgatgggggtcacctcgtacttgcgacttgcaaacgcgctcagattttccctacgcggctacgcccgcgagctcttccactctcagctcccgtcccgaagccgcacccccgccagcggcggcgctcccgctcccgctcctccctgctcggcgattcggcgcggcgccgccacgcctccacctcacgcggccccgccctctcggcgctgctctctggcccctggcggcacgcccttccctcctccgttc

SEQ ID NO: 168682 - DNA, 446 bp, Zea Mays
tatatgtacgtgcgttgcaacaggaataactgtgcacacataggccattgtttagtaatgctagtaagaatcaactcaataatcataataaatatcgaagtatgccagttttattgaaagagatccaagcaatcccgacacatgtttgtatataaatatttacgaattcacatgtaccatgaagttggacagtcaaaggttacatatgcagacgacgcacaccgtgttgcttgctgtttatagcgatgacgcagaatcccaactctcatccaggtgttcaccagcatcatcatgctctattcatgtcagcgtgcatgttgtagccctgcacgagcatgacgaaggacatcatattctgctctggcattccgacaaacaacctacaccatattgagagtctagtattttcgcacaggctccagaaataccaaggcataatgaaattg

SEQ ID NO: 168683 - DNA, 529 bp, Zea Mays
acgagggataggaggaaccggtccaaggtcttctactttatagtcacggagaaacggcccaaggcgcccgcaacgaactccacgattggcgcaaatgctccgagctccgtggaagccgtgaccgagaaggaggagaccggctgcctgatgcctggttactgggccccgcaaatcggtgagtccgcgcgccagactcgcagtcatcgcgcagttggcttagcccgcacggatttcggcggctgtcgcaacgctccgaggaagaaggattgttatcctgaccgccagggaccacatggcagcggaacctgagaggagtaacggttggggccaccggttagaaccagcttagtacgcacgacccccagggactgacggcgcgggcccgcctgtcggcgcgccagccagccgggctgagggaccgttgggccgaaagcaggtctagtcagcccgtgtcgcattttctccttttctcttttttttcttttctttcccaaactcaacttgaattcgaattttaaattcaaaattt

SEQ ID NO: 168684 - DNA, 740 bp, Zea Mays
acacaattgccggccaatagaaaccttgacgtatgactttagcaacaagggcccttggtcccgaatgtgatccacatataccactgtggacttcatggagaagttctatgccttcggcttcagttatgcatttcaacatgggttgacatgggttgacttatcccctttttgtagagatgtccgttgactatagcgaagtctctgcttctgtgttttaatcttttggcttcgctttggtcagaggggtggtagtggccttgaagataaagggtgattggtgcccactagtcttcggccattatcaaattgactatccgatgcccatcgacgtcttgtgttatttgcagatcctcggggtttcgtacggctggtgtgccgactatgggataaaatacatcggatggcaagggtttgcccttcgctgctgctttagctaatgtgtcgacttcttcgttcttgttccgctcaatatgttgtaatgtgaaacctttgaattgtttttctaggcttcgaatagcggcgagatactgcattaatatgagctctttggcggagtaatgtttttcaatctggccggcgacgaccttggaatcagttttgataatgcaggtggtcactctgagggctcacagtttgagaagtcctaagatgactgcttcgtattcagcgatgttgttcgtgcacttctctgattctagtgcaaagcagagacatgcgacatatctgtattttagtccggt

SEQ ID NO: 168685 - DNA, 428 bp, Zea Mays
gctcagataacacgtatgtcgtcaaaggttcagatgactgcaccggacccaccagtgcttctgattttcgtcacagcttgctacgtgtcaatgcgttcagagtaagctttatatcatcaattagtgcttgttctctgggcggtgtggtacttgtattgctagcgactgtggcagaggcgtagacgcgtagtgatactgtgccgcatgaccgactgggctcgtgcaggaaccttggttctgtttatacgcatattgagccttttgtggagtgtttcatgggccatgttttcgtgtggtgggctaaatttaagcaacaagtccacaaagcatcagctcaatctgagatggctaccaacctgagagttttcgttcacctgacctgatggtgcagtggtagcggtaattgcgtcgtgcagtggtaacgcagc

SEQ ID NO: 168686 - DNA, 649 bp, Zea Mays
cgacgacggtgaggtggccgcgggagaacgggacctcgggtatcaatcacccgagggggacctgaaggatgtcttcactagggactctgactctagtgacgacaacgaccaccgcaagaagctgtacgtcatgtacggtgggagctgggagctcacctcccgtaggaacgtcaagtccctgcggcgagacgtcctttcggcggtcccgagggtcccgaaggctgcttcacatcagcggtggaggagcaccaccatctccttcggggcatccgactgccccgacaacatggcagggcccggtatactacctctcatcatcgcccctgtcatcgccaacatgcggctgcaccatgttctgattgacggaggggccggcctcaacgtcatcagtcatgctgcattcaagcagctgcagatcccggggtcctggctgggaccctctcgcccattctccggagtgggcccacaaccggtgtatccccttgggagcatcacactcccggtaacattcgggaccgaggagaacttccgcatggagaacgtccagttcgatgtcgcggaggttaacctccccttcaacgccatcatcggcaggctggccctataccggttcatggccattgcccattacaggtatttggtcctcaag

SEQ ID NO: 168687 - DNA, 684 bp, Zea Mays
cgtgggaggaaaactaaataccttgacatcccacttaaggatagcattaaaggatggtgcttagagtggttcattgtggaaaaccatggcaagtccctccccctcggttagggagacagccggatgttcgtgctccaagttggattgagtcccccacagacttggagtaacagaagccaaggttctgcttgctgaaatttgtttgttgaaggagagaggtctgactactgaagctgtggttgcagactttgtttttaagaatattcagcaactgaaggacagagcatacccgactaatttgtatagtggtgtcaccaactcaacctgggttaccaatgagaggattcctgttgtggacttggtgagccgactggaaatgatccttagaggcaaagtatgaaatagtggtgctcctgttgcatattctgcttggaatctgccaccttccaagtccttttttgattttgtgtccaaccctcctgctagtgacagtggtttgggtcttagagtgcgaccctctctcgaagaagttgaggttctggttgcttcacttggtgatcttcccaatgatgagaggcaagttcactttgagatgcctatgagttcgggtgatgcagagataagtgctatgctggacatgttggctgaggattcttctgactcggtccctgctgaaacaatagc

SEQ ID NO: 168688 - DNA, 400 bp, Zea Mays
gatgtcctctaagaagacgaagatgcaagatgtgccgaagcagactacaagccattcttcatcttctactgctaaggtctcagagattttgaaggtaatgactgagtctttcccatttgcactgctaagtcctctgaggttggaactgactagcctcttacagacaagggaaatctcttctgctgccgaggggaaaaacaagggccagaagaaacgacgtatgatgaatatactggaagccattgaacggactccgcccttagcttcgacaaacaaagttactaaatgcactgatgtcgaagctaccgccacagccgaagatgaaaatctcacaaccactctgtcagaaattgacagacttatatcagatgtggttgtggagaaagatgcagctgcagga

SEQ ID NO: 168689 - DNA, 621 bp, Zea Mays
aaattgtaaaggatatatactaggggtatccacgacacgtccataaagaagacattgacctattgtaaggaccttgtttggttttggtaattgattgacaactcaagtgaactaataagtatttttttgttgagatacacatgtgattagtctataggtacactggtgtgagatatttgagccatggtagtaaagtgccttggtattatcgatatgcttaactagtgtgacgaaggagcttgttgcatatgaagacatgacatggtgtcatgtgattagatggagaagatcaagatacatggcttggcttcgacaggctgagtttctagtgtgaagggcaagtgagaggctcatgtgtgagggaccgcgtggtgatcaagaaagagaaagaatttggcaccgatggacataatggaacggtgaagaacaagttaagttgagattgatgaaccaagaaggccatgtgatgacatggagtggatcatatcattaaaggggtatcaaggaaagtattgatttgtgctattaatcaagtggcttgatgaagggtgacgggggaacttaatgctataaacaatgatcaaaggtagcatggttggctacattatggatgaccattat

SEQ ID NO: 168690 - DNA, 618 bp, Zea Mays
cttaaggatttcatatagctccgacttgcttcgtctgctacacatgcgtcgttagtccgaagctggtgtcttcgtcctcacatctgtgatggctcgagtcgaaggtcttcttcggcattcttcctattacacttaaaacaagctaaaaagtaaatgttaagctaatgttttgagaaccttcgggagaataagacccccaacaccacccctcattattcttttccagattttttctgggtttatgttgctctgatcttgaactttaattagtgttgtgctcctcccattaaccaaagggcaatcgcccacgattataaatagctagccatacctgtgccgaccacggttctaaatagcgctatatactaaatttttgaattgttgttgccactctcaaagagtataattgctttcttcttcttcttcttcgtctcgcctctactatctactggcaagtctgaactcccgtcgcctcagatgttttcttttttatctacactaagaaaagtgtagatcatgccacgtggacacaatactttttccgctccctagggctcgggatttgttgtcgaccggttcgtttgacacaacaatgtcaattctatagagcaagctcag

SEQ ID NO: 168691 - DNA, 780 bp, Zea Mays
agggcatagtggccaccccgagttaagtaagcgtgagcatgttgcaccgtattaagtctttgccgacttaagccgattgctccgttagcagggcatagtggccaccccgagttaagtaagcgtgagcatgttgcatcgtattaagtctttgccgacttaagccgattgctccgttagcagggcatagtggccaccccgagttaagtaagcgtgagcatgttgcaccgtattaagtctttgccgacttaagccgattgctccgttagcagggcatagtggccaccccgagttaagtaagcgtgctagtcaatcatgaacaaattgagtatctttgaagtcttctttattgatgacatatctcccgttttacagagtacattgttgtcccaatagcttttgaaattcagctaggggtaaaactttctgaggtgttctatattccaggagttcccaacttctgtgccgtctatctgagttagacgatatgatcccggtcgagtgatttctgctactatgaatggtccttcccataagggcgacaacttatgtcgtccctcccccgttagaattcggcggaggacgagatctcccactgagaaggatcgttgtcgcacggccttgtcatgatagcgtctcagagtctgctggtaccgcgctgattgaattactgcatttagccgttcttcttcgagtacatcgatgtcctccagtctagtagcttcggcttctgctatgctttcgaagaccaaccttggcgccccgaacttgagatcagcgggt

SEQ ID NO: 168692 - DNA, 545 bp, Zea Mays
ttccaataacattgtgattctttggtctttcaataagctccgaaacttcattacgggtaaaattgtttaattcctcatgcattgcattcacccaatcaacatcaagtagagcttcatctacacggttaggttcaatacaagaaacaaaagagaagtgctcacaaaatgaagctacacgtgatcgagtttgaacacccttacttatatcacccacaatttgatttggtgggtgatcttttatgattgaatgatgaattcttgacgtaatttgaaaaccactagttgtattttgaggagaaattgcatgacctgagatgtcttgaacatgatcatcctcaatttcatcattatgttgattttgttgaatttcctcattcatagttgaagaggatggaatgacaaccatactatcatcatcatcttctattggctttatttcaccgatagccatagttttcatagcatttgtcaaatgaactccaccaacgtcatcaaggttttcattttcatcttgagaaccatttgtttcatcgaactctacatca

SEQ ID NO: 168693 - DNA, 428 bp, Zea Mays
accgaggatccaatgactcggccttcgtccgagccatactgcaaaaagcgccaaccaccttcgaacaactattttgagaggtagacctctaccacaccagtgacgagcgggcccaggacctaatcggaggtacgaaacctgcaccacctacaccacggcacgacacgaaccagcaacctgacaggcgctaggagaagaggcctcgtgaggaggtacatgccgccggaccacccgtcgctcgagcgcaaggtgcgccccgcgaaggcaaacggacactggatgacatcctcgacgcccagtgcccgtaccataaggacatgcgccacaccctacggaactgtagggacttcaagcactccgtcggacatggccgaccgttccagcctctaccacctcccccaccatgaggagggcctggtgagcccagg

SEQ ID NO: 168694 - DNA, 420 bp, Zea Mays
atgagaacggactttgacttttctgaattactccttgggctagcatttgtttcacctgtgtctcaatctcgtccttgagcgttgggggataacgatacggacgcacagcaaaagggttggcacctggcaacaatggaatggcatgatcacactgccgggtaggtggtaaaccaatcggatcatcaaatacttctgtgaattgtgatagcactgcttgcaccctgtctcggtagtaatttgctgttgctcgctggctggtgcttgagagtcagagaacagctgcagttcgatcaccgctcccactggcaaagtagacagcattccttgaagatagacagtggtgccccgataaggaatagtaatccacttgtgataccaatcaatatgcatgagactataatgctgaagccaatccatgct

SEQ ID NO: 168695 - DNA, 474 bp, Zea Mays
gtttgtccaactcttttcatgttctggtgtttcctatgttcaaaacctaaatatgcagcttatgtccactggttagcttactgatcgtgttattcttgatcttgattttttttgctatattcagggtcgttgcacgggtcacatgattggtacaagcccttgtcgtgtttctcgacgtctttgggagattgactggcttcaccttctttctgccgcgcttgtcaatcttatcggttttgcttttgctgcttagtccatcacatcatttgctcagtggcaatcatcgactatgtcatctttgtggtccctgtctgtccactttgatttgtcgtggtcttttaggttcggttttaggtcatgagtctttagaatactgtcaaggttgtcgtttgggaaggcatattcagcttccttatcattctagtgagtcagtgtccatgcatcctttgatcttgtgcactcagatgtatgtgg

SEQ ID NO: 168696 - DNA, 498 bp, Zea Mays
tgattccaccacgaaacttcgccgccgcccgggacgtggcgccgacggcgagcagcttcgccttgcctcctccctcctcaacctgcggcctgtacctctggcactctgcagtctgcacaaagactcggcattcggaaacaaaacaatatatgaaacttgaaagctccgcaggcagctggcgtcggggctgcgttgaccgcggcgctggactttgaaaagtagtactagatgcgacggataaacagaattaattagctgagtccatctagtcttcgtgttatttatgagtaaacaccgacgtcctctgtatctgtcgcggtcatcgccggagagccttcgccttctccgtcgccgtcaccaatgggttccgtattcatggttcctgaaaattatttcgagagcgacaacggatcgcgtcgccttccagattccagcctcgccctaggtgaaccaagggatttttctctcttcggcaaaagagagatggcgatggctgct

SEQ ID NO: 168697 - DNA, 1714 bp, Zea Mays
attacaaaaataaagggtactgcataaagggtactgccataataaaccttctccccctttttggcaacaagaaccaaaaagagagagagagacgccaatccaacgatcaccagttggaaggaggatgaggagcaaagaggtggctcgccaggtgagaggcaaagtgttcttccccagactgatccgggggaggagcactgccagaaggatcctgggcggagggtgagaggacgattggcccggatccccgtgatacggaggcgggacaaactgctcacggtcatcaaaataagcttcttcttcttcgacgtcatctgctgtcataaaaggcaccccgtatgcctgctggtaccactcgttgatctccggaggaggaggatggagaggtacatcaggagagcggggggcgaagggagtacccaaagaggaagcttgacgacgtaggttgtcgtcagtctcccgctgacgtcgagccacctcatggacatccgcagcaatgttccggcacatggagaagaatgccgcaaacccgtgggccaagcgggcacccatccctcggccacgacctcaaccacgaccacgaccacgtggcgtgggagatccgcggccaggggaaggatgcgaggcaccggcagcagcagcagcagcaggaccagcagacggacccgcagatgtatgagcgcgagagctggagggggctttcctgaggcgccctgctggattgttgggatcaatccagaaaggggtatatgactgatgtcttgtacctttgtcaaatttaaactgggtcacaacctcaatcatcttcatgataaacggagcatgaagacaccccttcaatggaaagcaggcggcatgaatgatttcctgccaaatcatatcaaagacatttatactttctgagctgctgggtttcatgaagaagagcaagaccttgctctccccaagaatgttcatctgattacccccttttggaatgagggtcatcctgcagagggagttgatgtaacgataatacttatgaatgtttgtagactcccaatactttccagattcagaaagatgaagatctttggcttcatctctagtaggctgccggaaatcatgtatcttgatcttgtcgccagagatatcattgtcagaaaaaccaagaatgtgagcaaatcgacgatagctcaccttataccatctaccttcaatgtagaagttcagataagggtagttgtatggactctcctcgtcagctggctttatccacaaagttgagtagaattgagcaataacttcatcattccaatcatattggaatgtcatgatactcttcatctttttcctttcacaggccctcaatgcctgtgtcatctctagatccccaatggcctcacaaccttcccagttgatatagcgttgtagcaggataggttgatgcttcttggggaggatcacagaattataaaaatccacgtgatgaagcgtccaaaagcggtttccatcaatcctagcatcgcgaatgcacaatgcagtattttgcaaacgaagatcctgaaggagagcagaacctccactggcagtgaaatcggttactggctcattgccagcacgccgagcctctgcccggtgaaggaccagcccacgaatcacaggggcgtgggccgggggaagatcaacttcatcatccttcccgccttcgtcatcactcgtagcctcccacgcc

SEQ ID NO: 168698 - DNA, 575 bp, Zea Mays
gagcccctgcttggtgcaggggtccatcctggaggcttgtcttgtccttttgcctttacactcccccgcacaccccctttgtaggaatgcgagaggtgagcagtaccacgctttcctcgatgggctagtaatggcgctgagtgagtttcaagcgggtaatccgaatgaggccctaattccttccataggatccaagcccgaggtctgctcggggccgtcctcatattcccgggcaccgactcatatagttgttgattccattcgaccgaaaccgacggctcgctgcctctctctgtgatgaactatgagtcagactttcgtaggactcaaacacgagatggtgatgcccttaaagtttcggacgttagggtcctagactctaatgtgacagtctccagctgtccctcgctttattttcgttcgagcggctgcaagccctccgtggaccggccttcgaactctaaaattcacagctgctttggcatgtgctatttgttttgtggtccctgccaaaggaatttgaattggttcgagttcttactaaaaagtgagtcctcggcgttcgtttagttccc

SEQ ID NO: 168699 - DNA, 849 bp, Zea Mays
caaaatgttcttcgaagttgtcatgcttggaacttgagtggcaaaacggggtgagctcaacctagccttctccagcggctcagccaaacttctgcgctgaggtgaagaaggtctaggggaggtcagcagcccatcaccaacacagaaagcagctaaatcggcacctcagtcatatccccatgcacatctgcagttcgttctctgcccgctctctgatgggaaccgaggcgaaggtggacagactgatgctgcaaaggacccagttgtcggttccgggggttggactgaccccggacatcctcgtcctcctcatcatggagctcatcctcatccgaaggagatagactgctctccgagagaaactgaaggggagccggaagaacggaaatgctaatcttgtaggtcagacatctcgcctcctgattaaatggcccctgctcaatgatgtggaggtccatatccctgtgaagcttcatcagatccaaacaccatgcccgaagcttgagtgaggagagatcagacttgctcgcagaggcgggatgcaactccaaaatgtgataggagtcgtggagaagctccttggctgtggtcagaccccacgcgtgcgctgagatcccacggatctcaatatccatcaaatgaggcagtgacgtagccgaagcgtgtgtaaatcttgtccactgcttgaacacgagcgagaacatagggcctctgaatggccttccttcgttaagcactcttatcgccacttcttcatccggcaaaaacagaaggaagtcttccggcatggtttgatgaatagacatgtcatcaatattgaggcaatagcgacgcgccacttcttccagc

SEQ ID NO: 168700 - DNA, 914 bp, Zea Mays
cataaccagagagtgtctcgacaatgtatgtggttggctcacgccattgtctctcatctgtgcaggagaaggaagctgccattgtcggccaccgtgggaaggagcccactggtcacacagctctagtggtagcttatccggtcaaggtaaggtttccctatgagcaagccctcctcaagtccccagatcccttctgtccacgttactgcgacttctgctatgcataaattggttaccgcgtggcatctctcatgttccattcatgaagtcctccttcctaacgtcgtactgggtaaggtgtagtgagccaccagattaggttcagttaaatgctcttgtcatggtttgagaactagacagacttcagactgctgtaacttaccaagcgtcgaattggtggtgcaggagtagtggttttgtacaaacacaccaagttgtgtcgtacaattcttatgcattagtttctttgagatttccttagcacgtatctgtcgatccataacccattactgaaatatccacgaaacattaccgacacgattctttctatcaatgttgtgcaccatacgagtatttcttctcattctttcggctttatacaatagggagcttgtgactttctctcctttccacttgcattgcatcttaccttgaggtgtgggtgataataaagaagggctatgtcttttctagctttgatgttatgtttggtttgaccggtgaagtcaaagcatatccttatgatgctttcagcaacattacgctcctgatacatcaaatctatattatgcgataatattaaatggcttcgtgtatggtagctcctagagaaaggatatgtgcgtccagttgtgttctttattgtaccctttgaacccgtctccttcagctagttttaggtcacaatgttgtct

SEQ ID NO: 168701 - DNA, 330 bp, Zea Mays
agaggggattataagaaacctggtatcacaaaaggtcattagctagcccaataacgtcttcatccactagttgtactctaatatcctcccgtgcgaatacaatgcccttaacatgagggaaacatcatttttagtttaaaaggtgatctattgttttgaattctttatattcctacttattagcaactgtttggtggaaaaaggtgccttacaaccttaaactatgtttggacagttctctcgtgtaatttggctaaatttcccatggtctttattttattttgagaaatgatgtggcataatgatgtgcgatgatttacttgagtggac

SEQ ID NO: 168702 - DNA, 701 bp, Zea Mays
gatcggtttgcaatgaaggacaagaaattggcatcgtgcttgtttcaccaagtaacgcatcattcgacttctctagccgactaaaaacttattgcactagcaatcaagtcgaatatgaggccctcttatttggcttggagcttctaaattgtatgggagtaaaacatgtgaacgcatttggtgattctcagctggttgtccagtagatattataagagtatcaatgcttagatggtactctaaatagctatcttgaaaatgttgggacataattcattattttgatgaattcaacattcagcatataaccagggttgagaattgcagagctaacaatttggtgcaggatgcatcaggatatcggatgaagcgagggaaatttcacaacaccgaaaatctgataacatgtgccagaaaagttctcctgactgattcagctgataacgaagtcgatgcaattgattggaggacactcataattaattaactacgaaatcccagtgttaggacagatagaactgttcaacgtataactttcaagtatgttttaatgagtgatgaaatctaccgtcgaacggtcaacgacgtcctacttaaatgcttgggcccaggtgatgctatattagccatggccgaggtacatgagaggatttgtggtacccatcaatcagctccaaagataaagtggttattgtgaagat

SEQ ID NO: 168703 - DNA, 756 bp, Zea Mays
cttttaggagtaatctgaccacacaaatctgcatgaaccagttctaaccctttctcagctctgaaacttgacacagttggaaaaggtttcctatgctgtttcccaagaacacaaccatcacatacctgctcagcctttttcacagtttgcatgccatcaaccatgtttttgctactaagatcatgtagggctctgaaatttaggtgaccaaatctagcatgccactgccatgacttgtgtccggtatttgacagcaaacacacaggtgctgacaggccaaatttgatggtgtagagcctatttgcagttctaggtgcagctattaacagcatatgttcttgatcatacacacataattttccatttccacctccaaacttaaagcctttttcttctaattgacccaaactgactatattggttcttagttcaggaatgtagtaaacatcagttaacaccttgtgcccattaccactgccttgcataataactgaacccataccttgtattctgacgacagacccatctccaaaccgaactgttccccgaacaccttggtcaagctgcgtcagcaacgaccgtgtacctgtcatgtgattacttgctccagtgtcaaggacccacataccttcaggaactgaaattggtatagtcttctctgtcagatgaacatgctgaaccacatcgtgcacaaagtcacaggtggccagcatcagtgcgccactgtgttcagttccaccgatcgccacatttgcc

SEQ ID NO: 168704 - DNA, 338 bp, Zea Mays
gaaagcgtcagttagtgttaagttctataaacagagaaagactgaaatgttcaggtgaggtacctcttcaagtgagagctttatcgggcctacgccatttgacaactgccgcgtaagcttgttgtaccgtccccacaaatctttgaagtatttaaacctattttgcagatacttaagtggaatagtcatattcgtttgtttattaatggattttgtaacattctgccaaaaaaggtgagtgaattctgttacatagatgccgttctcaacctctttgaaacacgcatccacgaaaagtgtgtccaatacatcaggccatgccatgtccaacggatccc

SEQ ID NO: 168705 - DNA, 494 bp, Zea Mays
ctcttccaaatgcacaaatgacaccagtagggatgaggtgatcttcttcagtttactcagcccactctgaattcagttccccagtcctgctgccccattcctcaccttcatgttcagtccatgttaactcacaaccccaaatggcaacaaacccatctcccttaatacacattattctccacacatagttctattaacttgttagaatcacccaagaccaagaatgcaaggaccaaaagttacagtgccccaaacttcttccaaactcactgaattttctgcttcagttatctgcaatagcataacaccaaccttgacagcccaacttggaacgcactcttctcccaattccacacagcaacaagactaacaccttatatgaaacttgttgtctttaacatgggctttcatcttgctatagagttcctaactcaattctccctgtactaattaccatagggctccaaaggcagataaaaacacacaaattctct

SEQ ID NO: 168706 - DNA, 512 bp, Zea Mays
tctgatggatacaaggtggagaaggtcggattcagaaacaacagacatgtggttacctacgaaaggcaactggttgttgggatcgatgggaggaatgattgcgacagatgaactctgagtcttccgcttgggcgccatctcaatcttgctggcgagtggagcggaagcaatatcgcaagagagcagagaagatctggatgcagaaaagcaaaactagggctcagaatgcagaggcatgcgacaatgcagtacatatggggttttcctgggccagacgccatttctaaaaagtgcccagtcatcacccaactgttatttctaaaacgctggcgtgccatgtcatcactcggccgttatttccaaaacgggccgacgcggccccaatataactcagctgctatttctaaaaacgctgacgttaccagactttcactcgaccactgtttccaaagcggccgacgtggtccgttgtcgctcggctgttacttctaaaacaccaacatcgccagtaa

SEQ ID NO: 168707 - DNA, 345 bp, Zea Mays
gtccgtccaggacccgaagggatccacggcgtgttcattccaggagcaagactgacgcaaagcggcgacaatgacgatgacccgaaacaacgaaagaagaacacaagttacatgcccgttcacggaccgaccattcatggtccgggtctccaactcgcggcaacgatcgatcgatcatcttccttccgagaccgaccgatgtcatatcatgcacacaatcgccatacttacatagatagatagatgccatatacatcaccacaaaatcaaaatcgtcagtagctttattgcgggagctggatcacgtacgggcggcaagcgaagcgacagcgccatggcccccac

SEQ ID NO: 168708 - DNA, 445 bp, Zea Mays
gccggaatggaatatctcacggcatatgccatgcatggaggtcgggtcggtgagggggaagggaaggtgagcggattgatggtacggcgcgcaacgtcaacgtgactgaacaaggtttgttagtctccagcctgaagtctgaaccaaccgtggcccggtgacacaggggagaatcattcttcagacaaggagtaaaagtaaagcgtcagagacggctatgagctatatctccgaaaacatccaagaatatgtgcaaggcatattccatacatgcttgccaggacgtacgagggtgccttcgaggggggtcgctgtcccgttgatcaagcttacatactactctcttgcattgcatgcgtggaaggccatgggatcttcaaaagtgcacacatggcattcaacggaaccttcctattatattgtcactctcatggagtcatagcta

SEQ ID NO: 168709 - DNA, 927 bp, Zea Mays
caaatatttatctagatttcttgggtgtcaaaatattctatgtgaagtgctactagcaatcatggtgtatgcatatattgaaggaaatgtttcatgagatggggtcttagaatataattaaagggggggttaggagtttaggtttctaaccttgggatcaaaattgggatgttacagcatgtcgcaccgacttaaggcatttccgacttaaaccgattgctccgttagtagggcatagtgatcaccctaagtcatgtaagcgtgagcatgtcgcaccgacttaaggcgtttccgacttaagccgattgctccgttagtagggcatagtgatcaccctaagtcatgtaagcatgagcatgttgcaccgacttaaggtgtttccgacttaagctgatttctccgttagtagggcataatgatcaccctaagtcatgtaagcgtgagcatgtcgcaccgacttaagccgattgctccgttagtagggcatagtgatcaccctaagttgtgtcatgctaatttcgagttgagctcaatctacgtcaattctcaatcaagagcttgaatgcctttggaagatgaaagctttattgacgatgaaaccttctgattacagagtacaatttgccctcgagacttttgaggtatcactaagggtagaactttctgaggtgctcgatattccatgagttccccaccttggtgtcgtccatctgagtaagccaataggatcccggccatgtgacctctgccacgacgaacgacccttcccatggtggtgatagcttgtgctgtccctcccctgttagtactcggtggaggaccaagtctcccactgtaaaggatcggtgtcgcacaactttgtcgtggtagcgcctcaaagtctgttggtatctggacgattgaattaccatgtttagtcgttcatcc

SEQ ID NO: 168710 - DNA, 683 bp, Zea Mays
ggaaattgatctttttatgtggctgtaacgagaacctattttatggttttatgtggctgtaatgagaacctattttatggtattatgttgatgtactcagaccctattcatgttatattcatggtattttgtttgtgcctttattgctgaaatttatagacgagtaaaggaaaagagaagattgagaggaccattgtgtgggatgaggatcaaagcaagtttatgcttggttggtttactgacttcataaaagaacaacatgctggttttaagattaaaaaacaacaccacttcaagtgtgctgaggcattgaacagacaattcaatatgggggtcactgctactcaagttgaaagacgttacaggcattataaagagaattggaagtttgttgctgcagccttaagcaagagtggtaacacttttgacacaacaaggtctatggtagtcatatctgaatcagagaaagctaacctaaaggtaataaactcttcgatgcatttttctaatttctagtttctttatggaatgtgcatttccttcatatgcttgaaatcatacatgttagatactatttgtcgtgcattctaggtgcttgctctgtttattatatgtatttgttcctacatgtacctaaaaattcctatttatgctctatgtttctgtatgcaggatagggcaag

SEQ ID NO: 168711 - DNA, 453 bp, Zea Mays
caacaacgctcgttggacagtcacaccggtcaccgtttgccacctgcagtgctggtaagaacgttgtaagagcggggtaagacgcttcataatttgtattccaccaccaccaccaccctgagagatagttgtagggttcattttgttgcctttttgtctctgttttgtgctaacaatgacaggaccaaagaatcaaatggacaaggacaaggggcctaagcttaacaacgatgagtgtgtctctcagctggaattgaaggagatgatgcgcgcgatgactgaagcttttaaaaaatactaggactctgcgacgacatcctatgagcagcttgatcgacgagttgctaaacttgttacacgcatggatgtactggaggctcgtcccccaccaccaactccagccccagctcactctcctgtggacgacgacgacgatgacgacgatgtttatgc

SEQ ID NO: 168712 - DNA, 626 bp, Zea Mays
tccggtcggatattgctttgcaaagatttgctagctaacagcacatgagatcgagttatgatctccaggtgtactcatgctctccttatgtttggatatactgatcttggatatctataaaagatccccaggtacaagatcaatgacatacttctggtgggttggacctactgtttgataaatatcaatcaacagagattaatggtcacttacactaatcattctgtagcacacttcgtgggattatacagaatgatatactacatactgagggtatgtggtggtcatgattttatatcattgaccttattatctatggagataatattactttgtgttgtttagatgaaaaacaagttacgaactaagtctctacttactccacattttagatgtgtttgagagcaggtatgggatgacttagtgatttgtaaagatcagggggagtttcctcttgatctgaagaacttgtttacacatcatgttgtactcttttcttcgcatgagtttttccctgattgggtttctcattcaaagtttttaacgaggcaacatcaacacaaggcctatgtcgtatcatctatttttcccgtagaggttttcgaggatgatacattatgacatag

SEQ ID NO: 168713 - DNA, 499 bp, Zea Mays
gttttctgagtggtatggtctttctcacgctctagctgatgcttttgtctgtcggagccgtccgattttaggtgatagcagtaggttgacgaagtgttggttgctggaggaattgttggaggatcatctaggttagtgcaacgcatcgcacgacgtgttggttagcgacccttgcacccttgaatggtaataccgggcctgtcactcttagtggcatggctgcaagattggtagagatggagcatgtcagaaaaattggattcaggcctaccactcttcctggtctgttagttgtgactgaaaaacagactgatgggtagccataagtaagaaaatgcaaacagttacctacgggaatccttcgagcattctgggaggctagttttggaccttcctttgtaggaattggagtggagtgaatggttgtcgtcctgcaagcagcaaatcaagatcaacagtcaagtgtgagcgatttttctatcacaccacaggccaaccg

SEQ ID NO: 168714 - DNA, 480 bp, Zea Mays
tgcttcttgagtttttgtttgttaccactgctgtcataattttaaagatatgaaattgacaagcagcgccgctgcagttggtgggtgatgggggtgataagtcgcttgcgacgggtttggaattgtgcgtaggtgcgacgtcgtttatgagcgtttgttatgtgaatttgtgcactaagtggtgtgtcaaaaacaggtggtggacttccggatcacacttagggctttgtccaaattccccgatgaaggcaagtaaaatagtgatggttattccgtcggtcgattaatgtgtcttatactttattatatttatgctatttgtgttcgtactcatattccttgttgggtaccattgtttgaagatatccatgttctattgattacatatgttgagggtgtggtttgatcatgttacccatgttgtttattatttggaatgggtggaagtatatgtttaacacattttatttgggaaggact

SEQ ID NO: 168715 - DNA, 549 bp, Zea Mays
ttgcaataaacctcaaagggcttggtgttgtcaggttgagctagcactggtgcggttgtcaaatgctgcctcagcgtatgaaaggcatcttcacacttcttggtccattcatacttaactcccttattcaacagttcagtcattggcttggcaattctggagaaatctggaataaatcgtcaataataccctgccaatcccagaaaactccgaatctgtcgcactgtggtaggaggtttccaatccattacttcttgtaccttctcaggatcaactgatatcccatcctgagaaattgtgtgacccagaaattttatctccttcagccagaaatcacatttggacaatttagcatacaactgatggtcacgcagcctctgaagtatggtatgtaaatgcttagtgtgctcagcttcatttttggaatacaccagaatgtcatcaatgaaaaccacgacaaatttgtccagttctggcatgaacactgagttcatcagatacatgaaataagccggggcattggtcagcccaaaagacatcaccaaaaac

SEQ ID NO: 168716 - DNA, 290 bp, Zea Mays
aacagttctccacttactgtttactttagctgataagtctactataactataaagcacgaaaacccaagacgttcagctcaaaacaagcgactagcttgtacctagagcacatgtatgtttgtgtcatataaagaagatatactataaatacatatactaataattggggaaaatgtaatcttggttgaataaacatctcatttaagcaaaatctacctatacgatatatatagaatctgtagcaatgtacgggtaactaactagttatacattaaacatgctaactggt

SEQ ID NO: 168717 - DNA, 316 bp, Zea Mays
ctagattctatctaatctattatgatctaatctaaagtgagttacttaatggaccagttaatacttgtgaaatagattagaccctatccatatgttttaacttagttcaccctacactaaataaagaatgatagaccaacccaaccaatagagtcttgatggattgcataatctgcctatccccacctaacatcaaacgaacttttgacctacatcatgtagtttatctcatccatatctatcttaaccatattccctagcctgataatatacactaactcctaatcaatgagacaagaccggagaagatgatcaa

SEQ ID NO: 168718 - DNA, 274 bp, Zea Mays
attagagatctctagtgctcttttctccttaagggggtgaattggggtcttcaaggggtctttttgcaatgttccctccctgcatttgttaggttacaaagccactaaaacttgtttaagaactaagatcatgctttggcaatttggttaacttatccactaatccctggcttggaagtctagtgctcttaggtgccctttttagggtttaatcttcttggctccaaatgaccattgttccacttgtgtggttgaaacccttgccattcacttc

SEQ ID NO: 168719 - DNA, 649 bp, Zea Mays
gctcccttttattttgatgatgcatgtcctacactggaaactaagggaagcccattagcacttgcttatatggtggggtcctaggatgaatggtgaaggaactacccaatggctaggtaaaggactagtcaaagaaatagagctcgaaggttttggcttagactcttgatgttgaatgtgttgtggaatctaaggccaatagtatgaagatgggtggaaggcctcctttggttgacttgtttacgcagcagcagcaagctcattttgcttttgaatggttatttggcaggtcttcgtggtgtcacccttgttctctccacagaaaactgaaaaaacattcttgattgtcagttgaatctacctccaaagctttgcccccctcttcctcctcttggagctagatgtcgaaaattactttgcgaaggttgatgttgtgtccctaatgtctaggatgggtcttgtggctgattttgctgtccttgaccacgactagatttttggaggctttggacatgtctgggatgaaacctcactatgaacgccctagcgacctcagcatataggcacctcttgcccgtgctgacgaaaaccattgtctgctcttataaactaatccatcttctatagcagcttctctagaaagtgagga

SEQ ID NO: 168720 - DNA, 708 bp, Zea Mays
aaatgatacaaatacaactcactccataaatgaaggtacaaagaatagtccattaacattttttacaattcggctgaaggttcaagcaaggacccttgcgcatcagtgaagaaacggacaataaaatcttccaagaactaaaagattccctcgtatcaccgccagtcttttgagttgagggatatttattttgtattatctatgtaatgatatgtatatatgtttttttaaaacaatttgtttaaatataacaaactaactccagatattgcaacagacatattaacccttggtatgtctcacctaactttattttagataaacctatctattctagactctactcatatgttctgtgtttggtgtgagtatattaattacaataagtacaaatagtttgcttacaatcaatataacatatttaatattaaaattacaaaacatttgtgttatgctgtaaatagattatattgaacaaacctattcacttattgtaaacagattcatcttgtccctgtattacaatatttagcaaattaaataaactaaaaatgttacagtttgtttaacctgtaaacagattttcatatcgctttttgcaccaaatttgtttcctcattaattcaaaggtccatatacactaaaattatttttcccttaattcaaagagacttagttctcttgtgttttttgggaaaacaaagatgt

SEQ ID NO: 168721 - DNA, 570 bp, Zea Mays
tgaggaggagccggatgacaaaaatgcagcagagcgcattgcaaggcagtcagctcattatacactcattggggaaacactatatagaaggggtgcatcaggagtcctcatgaaatgcattctttcagctactgggaagcaactgctagatgaggtccatgctgggcaatgcgggatacacgcagcatctaggactttggttgggaaggtcttcaggtctggtttctactggccaacggcaaagagtgatgccaccgagttagtccagaggtgcgaagtttgtcagtacttatcaaaacagcagcatctaccagcatagcaactgcaaaccatacctgtaacctggccgttcgcgtgctggggactggatatgattggacctttcaagaaagctcaaggaggatacactcatgtactggttgctatcgacaaattcactaagtggatagaattcaaacccattgcttctctaacttcagctaaggcagtggaatacaggacataatattcaggtttgggataccgaatagcatcataaccgacctaggatccaatttcacaagctcagag

SEQ ID NO: 168722 - DNA, 474 bp, Zea Mays
cttcggataaaaccacgcctaccgcctccgggattggagcagggtttcccctgagagctgaaggggaagccgttagagaggaaagtgaaacccacctccccacacccccactactaccattagacctagcccaagttctagccaatcaaacccgactcatcgaggtcctcactcgaaatctggagaatcaacggccaaacggcggaagaccgcaagacagaatgggggatttcctgagactcaaacctcccacgttcgccggatcaagcaaccccctcgatgccgacgattggatgcgcacgatcaaaagaaagttggaagccatcggttgcccagaaaatcagcgtgttcagctggctgcccatcagctttccgggatggccttagcctggtgggacaccttcaacgtcaccatcagagatgctacctgggaggaatttgaagcagccttccaggagcaccatgtgccccaag

SEQ ID NO: 168723 - DNA, 621 bp, Zea Mays
tgatcgtgcgtctgttgttatgagagatgcgagcaaggaaaatgatgatgtagatgagatccagcagtatagagatgcaaggtgggtgactcctctggaagcctttattgaggatatatggatttgagcttagtcataactctccatctgtgatgcagctgcaactccatcttccaaacatgcacatggtgacatttcacgagcgacaaatggtcgagcgagtcgtcaaccgtccaggtgctgataggtcaatgattacagcatattttgaggcgaataagctgcacgaggaggctcggggcatcctgtatcgtgaattccctgagtggtacacttggcagcagggcaaagtgtggcaaaggaggaaacaaaatacatgtggacaggttggtagaatcatcttcgctctaccatctaagggggagcacttctatcgtcagctcctcctaaaccatgtgactcgtgctacctcctatgcggatctaaggacaatagacggtgacacactaccatcgtttcgtgaggcagcacaaagaaggggattgcttgaagcagacaacacaatagatgagtgtctcaatgaagctgcactttaccaaatgccatcagcactacgaaggt

SEQ ID NO: 168724 - DNA, 672 bp, Zea Mays
gacggattagtgggttgttccataaaaatttgaggaaagagttcctaaacttgctctgtcagaacgacttattgggatcacgatggtatagtgaactgaacaagaatccaggttcagcgcatctcgtcgccgatgaactcacgccgcgatccacgccagcgttgcgattcgtgcccagtggtgcgcggatatctacgtgaggtgaaagatctcgcgcggaggatgaacttggggcactgttactgctcagtcgtcgtactcacttgaccgacaacgtggccgcgcgaccgccgtcatcgtgcccgccgttcacctcggtcacgacacgccttaagttgtttcaccacatcgtcgtgggccgtgaagactaagtcgtgactgacgtaaacccttttcccagtaaatgccacaataagcgactccggtgactcaccttgctccggtcgccagcttgcctttcccaaatttggagccaccgcttgccgacgctataaattgagtgtacgaaaatactagatatcgatatcacattaaaactatagctatggcattctaattttaagcggatttaattcgaacagcacacaacattaaactatgtgtaagcattttactctcctaaaacctatcccgacggacttatagaacttagggtcattacttgcttcaatt

SEQ ID NO: 168725 - DNA, 501 bp, Zea Mays
gggcatagtggtcacccagagttaagtaagcgtgagcatgttgcatcgtcttaagtcgttgccgacttaagccaattactccgttagcagggcatagtggtcaccccgagtaaggatgtaggttgacaatgaataatttgagcgctctcgaagtatttttattgatgatatacttcccagtttacagagttcattgtcatcccaatagcttttgaaattcagctaggggtaaaacttcctgaggtgttctatgttccacgagttcccaatttctgttccgtccatctgagtgaggcgatatgatcccggccgagtgacttctgctactacgaatggtccttcccatagaggtgacaacttgtgccgtccttccccgttagaattcggcggaggacgagatctcctactgcgaaggatcgatgtcgcatggtcttatcgtgatagcgcctcagagtttgttggtaccgtgctgattgaattaccgtgttcagccgttcttct

SEQ ID NO: 168726 - DNA, 657 bp, Zea Mays
accgcgcatgtttgtgcctagtggtgccttctgataaatgatgagagggaaaagacatggaaggccactagtggcattggtgttaggtacatcagagcttagtaacgaaggtgcatcgggaaggagtcaatcaagaaagagagcatgaggtggtggtcaagaagaaggaattaatcaatcggtttagagggcatgtcgtgacgtggagaaaacaaagaaatgtagtcagagtaggctggcgacaagaagaaaacaaagtagtggagtggagtcacatgtggaaagataaatcagggtagtgtagtaaaagggggtgcggtggtgagaatacagacgagtgagttgggttttgatatatttatttatatgagaaatcgaggtgcgggccacattgagacaaagactaaacatgaccttagacttgggtcaggccgatataggctcgacaaccatcaagctggatcatacctggatcgggccaacataagagaccatgggttgtgactataggacgcgggtcttgtggccaccaatagtcggggacatctcgggcgcaaattgtccttggaccaaggatggtgtacgaggccaacacaaggctgagaaggtagggcaggggccaacacatatcgtggtgttgtcctatggtcctatttg

SEQ ID NO: 168727 - DNA, 315 bp, Zea Mays
ctggagttatctcgagcagcgtcccgtgcctcgtcgaccttagagcgcggtcttaagggtcaggaggctggtctggattgttctgctcccatggaagtgggtgaaggtccttcagccttagaggtggctgttacggagagcttgaccctcaaggatggcgctagcgtttacccagcccccgagggtgttgccggggatgacccgactcggatgggcagcgcgagctttgacccagcccccgagggtgtccgagtcggttctccctctcacacttccatggacgttcacgtagggtcttctcctccgcattctggt

SEQ ID NO: 168728 - DNA, 336 bp, Zea Mays
agctgagttaacttgggctgcgtcggccgttttggtaataacggtcgagcgatgacatggcacgccagcgttttagaaataacggctgggtgatgacatggcatgccatcgcttttagaaataaccgctgtgtgatgacatggcacacctgcgttttagaaataaccgtcgggtgatgactgggcactttttagaaatggcgtctggtccgggaaaaccccatatgtactgcactgtcgcacgcctccatgttccgtgccctagtttctgcttttctgcatccaggctttctctgctctcctgcaatattgcttccgctctattcgctagcaaggt

SEQ ID NO: 168729 - DNA, 327 bp, Zea Mays
gttgagagcttgtacccttcagcatggtagtagttgggacaagagtctaacttatgctgagttctcatgtaataatagttaccaggccagtctaaatatgtcaccgttcgaggctctatatggaaggaagtgcagggctcctctacattgggaccagattagaggaaggaagttctttggacctgaaattatacaagaggcagaggaacaagtccatcaaataagagaatttgagaattacacagtcaaggcagaaaagctatgctgatacccggagaagattattagagtttaaggagggtgatcatgtctatttgaaggtgtcac

SEQ ID NO: 168730 - DNA, 447 bp, Zea Mays
ccacatgcatagatctcacgtatggaaaggctgtcagcacagccttatctgttgaagccaaatacacaaattctgggaagaataagggattcggtggtgagaggcctaatcagggccaggcgaagaaaccacggtttgtgattcgaccctcaaaccaaaatcgcactttttctcgtccaccctcattccccttcaaacagcctatcattattcgccccaacaatacccccaatcagtcgggtgccccaggcactcgattccctgccttgcctagttcttcaactggttgctttaattgcggcaagtcgggacattttatcaaagactgcccatatcctcggcaaaatcagtccaatgctccgcaaggatctgggaaatcagctcagcctaaaggaaatgctgtggggaagaatacaaagaaaacggggcgtgtatattacactcaag

SEQ ID NO: 168731 - DNA, 466 bp, Zea Mays
ctattgtcgagggtatgcctttgtcgaaggttgtcaaactaacaaatcttagtcacttcgtggtttgtttctggaataacaagttggccttcgtcgaaataacttctataggacgaagaaaggaaatagatgcttcaacattgatgtgtagccaaagcacattctagcatctgaagcaagtattaaggaaacaaaggaggatcgaacgacgtgtgcgccacgttttcaagaggaaaggacaacaacacccttaatagaatctatagttcacatgtatagggttcgaggtcatgattataatttcatatgaagttgtacgtcgttgtgctgcctctataagtaggggtatagggcctatgcacattttcaccttttactgttcacgcactcatgtgacattggatcgcttagcatccaaagctctaaggtgttggaaccttcgaacatcctttgaacactctggaag

SEQ ID NO: 168732 - DNA, 636 bp, Zea Mays
gtctgaagtgtttgtattatggatcatccaggccaagtggccggaccatccgatagtcctaaccagaaagggtcttgttctgcatagtccctgagttgttggtgtgggctgcccggtcgtagggcacaggccatccacaagtgtcctaatgttgtttgagcaggggactttgtgttttcagaagtttgtaatgcggactgtctgggttccaacatcgaatagtacttgttcctaggttgcagaccgtccgctagtgttaaagtcaaatgggtagagctcatggctttcattttcctaagtcatggaccgtccgattggggtgggcagactgtccacaccttgcttttttgatagctataacacgttattcgaatgaaaaatagttgttacagtaagggtcagaccgtccaagcctaggatgcaaaccgtccgtgagtgtgcagaaagggggcagtttgcccacaacgactagttttgtttggagggatataaatagaactgtgtggcagctctcttgaccattctttgcatacattaagcacacttgagttttccaaacactctgactcacaaccatagcttggaattgcattctagtgagtgattgggtgatcctagtgcattgcatcatccgtg

SEQ ID NO: 168733 - DNA, 464 bp, Zea Mays
tactcgtcccctgctacagcgcccaaaggattgtcggtggtgatcgcctaatccgagcctgctctggcgcccgccatcaccgtcgagccacttcttgcgtggccaagccccaacgaccactctcccactagcccaagcacccagtcgctcccccacgccttgccaaagctcatcgaccccctcatctgagctctactatgccgaggatctcgccaccccacgtcgaccgatgtccgcccgccagaccatgtgaatcggtgagttcacaccaccatcgtcaaattcgagctactactagcttcaccgagccctcatgaatctctcgtgcccttccccgagcacactactgcaccgaggcctccgattgaggcttgctagcgacatccacctgcatatgctcatggactagctagctccactcatcgccggccaacccttgccgtcttcatgttcgccaaattagc

SEQ ID NO: 168734 - DNA, 677 bp, Zea Mays
gggagtaacaaatctccaaataggtttggattcactctcaaaagtgtcagggacttttttgctaggttgaatttatattcctcgacacaccttgctgaaaatcctgatagctgcaagcagttgtttgatctttcaaggagattattgtcagatgaactgccagttacttctaattttgagtttgtgcagagtgggtctatcaaatgtttgtcagtttatctctcaaacggggcatactgcaatgcagaccttaatgatggacctgtacttgagcagcttagtgtggtgcatagtcggttgcataaatttgctaatttggctctcacccccttcaatgaaagttcagcaaatccacttgggattttggtggagaagctgctagacactttgcacatgtgctatggcagttttccggtactgctatcttatgaacagatgccacgtgaggacatgatgattccgctgagatatcctaaggccaagaaaccaacatcattgctattaaaattccggaggtcgcagaaggagagagaattgtataactacaatggtgttcttagtgtcgaccttttctcaacaccagatagcaccgaaccaattctatttcctgagatctttagaagaactgatcaggaacctgcatccgaggtacacacagttgctcaaaatataatttc

SEQ ID NO: 168735 - DNA, 530 bp, Zea Mays
gcattgttcaacccgcgacaaaactggtgtcaaaccgtgccaaacggttctagtttggtttcaaatttttcaggggtgtgccttgtgtaatttggctcctttttgtcaattggaccttatgaatttggcgccagctactaagggaacatctctaatctttggaagagggctgatttttaacttagagaaaatttggttgctcttgagtgctcttcacttgggggctgaatttggggtttttgtgggacctttttggaataactcccatactatttcttatagatacataaatgtacttcaactttggtataaggtttaagtcatgaaatggtcatttgcatagttttcctactaatccaatgcttgggggtctaatggctcaagagagggtgctagggtttgagcatctttttctaaggtgaagatacatgaaaagctagggtatcccttctatcatgattattacttaattaagccatggtttctaatgtttttgtgccccttctccccacttacccacttgtgataac

SEQ ID NO: 168736 - DNA, 878 bp, Zea Mays
gtgtccctcaccggagtcagattaaccgtatccagtaagtgtatcatggtctgccattctacaagcttaattccaacaatggatctccggaaagaaagatttagattttcatgtgacaacacttctgcaaccagcgaggtcttattgcgtactatattaaaaaggtttgggaattgctcactaagaggagaattattaagccatttatctttccagaatcttgttgcttgtccgttccccaccttaaaatatccccacttgaggaatttgtccttgacgttcattagaccggcccagaaatgagaatcacccggttttctgacagcttgtgttagggatttgtctctcaagtatttgtttcttaatagccgttgccacacaccatctccattgagtaatttaaaaagccatttgctgagtaaacaaatgttctttatgtcaagattgacgactcccagcccacctagctctttaggttgacaaatgatttcccatttggctagtctatatttctttttatgatgtcctccttgccaaaagaatctagaccgaatagcatctagcttctgtagcacaccagtcgggatttcaaagaaagacatcatgaaaatgggtaggctacttaagacagaattaatcaaaacaaaccgcccccctgaagacaggaatttggctttccaattactaagtctcgactcaaaccggtcaacgacacaatgccactcactatttctcaatcttcggtgggtcataggaatcccaaggtactttaaaggcattgtgcctacgccgcaaccaaagagttgtgagtactggggctcacaatccttagccgtcccataacagaaaagttcacttttgtgaaagtttatcttaag

SEQ ID NO: 168737 - DNA, 598 bp, Zea Mays
cgttaccggccaccgcccgccccatctcctcgccattaactcgctcacctgcacaaattggcgccttgcgtccccgagccatcccgtagccaccactgtgcgccatcatcgccgctgcagcaagcctcgccggtgctcgccacctctcctccccctccccggtcgccaataaaagtgccgcccgagctccccaagctcctcacaccagcctcggccttcccacacccctcccccgagctcaatcgagccagcgccgccacgccctccctccgctccggtgagttctccctcccctctctagtagcctaaggttcaattaagttagctcatgagcttcaccacctccccacgatcacgaggcaccactttcgcctcccccatcgcactgtgtggcctcaccggcgacctcatcgccgcggaagccgccccctcgccgtgggtcggccataccaagcgcttatcggccaaattgaccccgccaccataaccccctacctctggccacagtagtccacctccccaaccacccggaaccacgccggagaaccaccgaggaacctcatcggcggccgattttccgaccccggctggttcgccc

SEQ ID NO: 168738 - DNA, 492 bp, Zea Mays
caggaatggtgcatggcttgcaatcactcataccaacacgatcaagaatctcgagcatgtattgacactgattcatgaacaaattggaagccgtgtactgaacatgcatactaagtggtgtcatggcccaagatccttcatggagaattcttgctgtaaggcattaatgatgcgtcgaagaagagttggtgatgacgcggttagcacaatatcatcaacataaagcaagaggtacaccataacgtcgcctttgtgatacatccgagtcgaagcagatgtgaggcgaagtgactgtaccaggcacgagggacctgcttgagaccatagagtgagcggttgagacgacacaaaatctggatgtgcagaatcttcaaatccagtaggctgaacacagtaaacagtctcagagagggagccttggacgaaagcattgttgacatcaagctggtgtatagcccaagtgcccaaccacgtgagagagccaatgaggga

SEQ ID NO: 168739 - DNA, 422 bp, Zea Mays
gctgatatcaataaatttagcattgcaagtgaatgaaatactgaattgcatccaaagggtcagaatatagggtgcggtttgaattcaaatacaatcttacagatagctaatggacagggtgtatgtatttttgtctagatcgacttaccatctatgtgctgattctttgactatcattatgcattcatacttttgacaacagctgcaagttcggataataactgaatcacagattgctgtgagcaaactaattaataacagccccaaaagttgacaccatttttgtgcccgcacactgttctgtgaatcagaagcagtttgaattatcgagtcctgatgtttttgtctctgctacctccaagcctgcagattctatcaagaaaaattgatagaatgtttttgtctctgctagccttgtccat

SEQ ID NO: 168740 - DNA, 642 bp, Zea Mays
caaaatagtattatgaagatttcggttaagtatcaaataaattaacataatagtatataacaacgattaattaatgtcatccacatatgaactagaaattgtaaaatattcagataaaagtgacgatgatccattatatacaaatatgtatgcatataaaattcacgctgatctagaaagaaagactgccctagcaatatcatcccgggatctgtccatggttcgatcatttgattgtgttgtcgatgtatccgatgcattttgcgatggctgaaatctagcatacctttctggaattgtgggcacataatcaggattccgatcacacttcacaaaatccaaatctaaagcatggttctctcgaatgtagttatgcaaacacatagtcactgccacaatcattttttgaacttccattttgtaagacggcattttcagtagcactctccacttcattttccagactccaaatgctcgctccacaacattacgaatacttgaatgcaaatggttaaagtgctcttgctcaccatttggagccggtcctctcctctagtcaggtacatggtacctttgacctttatatggtgccaagtacccaggtcgatttggatatcctgcgtcgacacaataatatttccc

SEQ ID NO: 168741 - DNA, 448 bp, Zea Mays
tctcctccacttatctcttcatgcctcggtaatgcacaaggaatagtgaagtcataaagaaaggcgcctaagcgacacattgtgtcaatagtcgtgccttggtaacgtgcgggtaacagtaaaatctgcatgttgcaggcctggtgcgccacacgtatttaatgcggggatatgctacccacagctggcgcgggtaagtatgtatcccatctgcacctaatgctggtggggcccatctaagaggcatacatcaggcaccatccggtggcttacgctaggcgtgtctggccatgcgccggcatcggacctctgtcttagactaggggcaggcccgggaatatgtggagacatggcattctcaggccctctctgattggggtcctagatcgtgcccgagggggcccaggttctcctcgaccagggcaatgttgctagccttgtcctccag

SEQ ID NO: 168742 - DNA, 964 bp, Zea Mays
cactgctaatctgctatgcacgctgggacgagggagagaaaacgagccactgctaatctgccatgctggaggctggacacgtccactcacatcactagtgatatgtatctatcaagactaattcatttttggtgcatgtgtatctatcaagagtattcggttttcattcagcctaaaaagaaatagtctagacgtacatatatgggcctacatccatgaaatagcccaaaatgaaatagcccaaaaataacattcatgtacatccgggcctacatccatgtatacaatgtctaggttatattggcatgctcccttgaaacttcaagtccagtcgtccacatatttcacacgcaggtaggagctgctgccggatacacgcgccatccatttctacagcacgcacgtaggagctgctggccggagatacacgcgcacacatgcaggatctgctggatacacgcgtgtctaggtcaagtcatcgatggctgttctagcaccttcactgcagcaaggttttgcctgtcagacaagggagaaaaaaccatccaaagattagtggatcgtaagtatcatctgtctccaacttgtatataaatacattcaatgaacataacgtggcatgattgagtaatcccttcaatttcttgtaactcacttgcatctaaacatagagatatggtgtaatttcttcagcaatatgtaatcactccatgtaatcttctttcttttctttcccctccccttttttccctactcatatctccccctctcccaacatgtatttgtattagaactgatccttttctctttttataagaatcaggtgcccccgttgcattgtcaaaaaaacatagacatattgcagctggtatggtaataacaagtcactgaacataaatattttgttaatcaaatgcaatatgtttccaagtgaccatcagcaacaacatccaataaagatttc

SEQ ID NO: 168743 - DNA, 735 bp, Zea Mays
cagcggcgcggagtctccggggtgcggcggcggcacgcaggacagggattccggcgagcagacaggggcggcacgacgtctacacgcggccaacacgcatggagagctgggaggagaaattgaggagggacccgaactctggcacggctgcagcttgaggcggggtcttcggggcgtcgtgcgctctgctgctggcgttcggcacctacggtcttggcggcgcggtggggcgtggctgagcgcaagcgagcagcggcacaatttataggcctggcgaaggagtgaagaggtccgggagatgagaaactgtaggtaatggccattaatggcgagagagaaactgtcgattaatggagtctgcagtagtagtggaggggagagtaacgggcttgacacaggctttatgctgttccactggagctggacgggcacagggttgacgaaaaggcagcaacgagttaaaaccgctggcagcgctatctgcgttcgaaggaaacagacgcggctggagattaaagaaggtgctggcgcatggggtccacacacaagtgagaagggaaatgggcccacgtgacatgaagcaagggcatggggagagatgaacgcttggcttggacgttcgttaccttttttaaaaaaaacaaattcctttttcaaattcagaatatacatatatgaataaataaatgcatacactaaaatttaagataattgaaagataatattaaccgaata

SEQ ID NO: 168744 - DNA, 652 bp, Zea Mays
cttttcaaggatattgtgtagtttaggtgcttggcacacttaaactgttttcattgtctcgaacattgtttgagttaagtagtttggtattgttcattgtagttaaaccgctcacatgaacggttgaagtgcatgctcaatatcatacgtgtctttcctcaaacgtgttcgttaaaatccttgaacatcgattacctctctcaccatatgttcttctttttatcttaaggatggtgcgtcatagaaatctgtctgtagttgagtccgactcagatgatgacgctctagagattcgtgaagaaactcctcctcgtcggtccagatccaagcgtaggcgtggatctggcaatgtcctgccaggagatgaggcctcagggtctcatggggctcatggtcgaacgacccgtaatccctccggtcggtctcgacccgcggccaatccacaagcttgggaggcaaccagcgatgatgagggagaaaaagatgatgaagttgatctcccttctgccaatgcaccaattatcggggggttggttcttcatagggcggaggcccgtcgctctgccaatgagcaagtcactgatttcactgctagtggagggtctgcccttctccaggacatacacttccaaaatcctacattacgggttcg

SEQ ID NO: 168745 - DNA, 686 bp, Zea Mays
gcttcatgtatcacggtccttaaatgtgtcttggcaacaactaggggtgtggcctttctctgactctatcaaaggccaataagtccattgccaaaccagtccattaattggacccatctttcttgctatgtgcctaatgaaatagattccacgtatgcatgactgaaaaattacacatctcatcaggcatcatgacaactaggtccctaaggtgaccaagcacaattgaaggattcataccatgatttagttgttcttgggatctgtctctagacctctgtcggggttagttgtcggtcatttttgtttttagctcgaagcactgttatcagtggcgttttatgtctacaccattcctgttatgatatgacatatattggacctagagcccaataattatgcaaaaggaagtgaattgccagtaatatttagtggggagtctcatatggtaatcacacatggttttcgagcgagggctcaggtccggagtgtgcatgatggatatgtcctcttcaaaaccttgggtgtgatgaccattgtggtttggcagttttcatttataggtctatcatgacgtatgattttcctttttatgcggccatgtggtgctttgggtttcgatgaacagatagagaaagaagggctttaaatagtcttcttcttccttggtcggctttctattctcg

SEQ ID NO: 168746 - DNA, 583 bp, Zea Mays
cgaggcacaggaactccttcgtgcactcaagatgacgtatgagcagatacatgcttgtccgaattgctgcgtgctatttaggaaagaatacgcggaggcaaagtactgtcccaagtgtaaatcgtctaggttaatggaggtagattttggtgatggacagaagagtcagcttgacatccccttgacaatcctacgacaccttccgttcataccgaggatccagcgtctatacatgaccgaggaatccgcgaaacagatgacatgacacaaaaatggaaaacgatacaatcctgacaagatggtgcacgcattcgatggtgaagcatggaaacactttgatgtcattcaccgtgagaaagccgaagaggctcataatgtacgtgttgcgctggccacagatgggttcaatccctatggaatgagcgctgccctgtacacatgttggtccgtgtttgttatcccaatcaatctcccccccggtgtgtgctttcaaaggcagaatatatttgtgtcgttgataattcccggacacccggggaataaaatgggtgtgtacatggagcctttgatcgatgaattggta

SEQ ID NO: 168747 - DNA, 448 bp, Zea Mays
tccgcggccccgttcgctcgctcgcgtagcctattcgcccgtacaacgcttaaccatcacgcttagtcatttatcttttaggtgcgaattgtcgcgctacgatgctcttcgccaattaaaagtgctagtactaatgggactgtgtcaagaagcggcaataactaggcatgagttaattatgcttagataatagctatctttacacctatattaaatatctgttagtatgactacatgaaatgtagtggctaagttgtttctttctcttaacatgaacataacgagttgtcaattgtagtaatggttacgattctattagcgcatgtgactaatccttattattggaactaagtggaactagagcacgtgatggctagttatgcgtctacccgtaatacgccttgagtatagctttaaccactgcgagacctttcttctctaaccatgg

SEQ ID NO: 168748 - DNA, 421 bp, Zea Mays
gttgcttgcaacggagggggcctggagggaacaaagaccctgctgactgaaacgtgacggagtggacccgactggcttgttgaagcttggtcccttgggtggaaacccaaaagatcgaactctctggtgcctgtcctactgctgagctcggaggacctgaaacttcctcttgaggtgacccttttcttcttctctagccctttccacttgtatggccttgtttgagaggtgcgagaagctgataaaatcttggctgacgaggatagtcttgagttctggtcttagccctttcaagaaacaagccatctttttggcttctgtgctgacatcatcaggcgcacatcgatccaattctgtgaacttgtggacgtattcactgacagatctccctccttgagttaattcccgaaattcatcttct

SEQ ID NO: 168749 - DNA, 503 bp, Zea Mays
ggggaaacagcagctacagtccatggatgaaccttcaactcgccatggatcatcggcgactcgtcggagtagtgggcggttggggaacgtcagtggggttgcgtgcaggggcttcgagtgactacgcagagttcacacgcccgaaggccgctccgccgagggaacagagggaggacgcaagggatgggagagagggagagggctcacctagaaccgccatgtgcagggacatctgcttctacgcgatttggatctagggagggagatgaggagttatgcgacggtggggtgggtatatagaagagaacgcaggaggtggttgctaaattcgtcatcaattgcgtcgcaatcgagtgagagaggcggttgcgagcacgatgaactgggcgagacagtttaagacggagattgagtcggacgagcggtagacagggttagataaaattagaggagggcggtcagagttggcccatgggtccaagacaatgtgatagacgtcggag

SEQ ID NO: 168750 - DNA, 583 bp, Zea Mays
caatgttgtggcagatgccttaagtcggaaggcccagtgcaactgtgtgagtatggattccaagattgccaccctgtgtgacgagttgtgcaagctgaacatagaagttgcttcctcaggtgccttgagttatatttcagtggagcccactttgcaggagcagatagccatggcacagatcggtgacaagggtgttcaagtcattaaggaaatgatcggacaaaaggtggacaaatacaaatgcttccgtcaggacaacaagggaattttatggtttggagactgattggttgttcctaaaactcccgaactcagaaagaaaattttggatgaagctcacctttccaaattctccatgcaccccggcagtaacaagatgtatcatgatctcagatccttgtactggtggaccagactgaagagggagattgctaagtatatatctaaatgcgacacttgccagagagtcaaggccagtcatttgaaggtagcaggcgccttacagccccttcccataccatcttggaaatgggaggatatttgcatggattttattgtgggattgcccaatacctcccggcac

SEQ ID NO: 168751 - DNA, 958 bp, Zea Mays
atctaggaaagagaatgaaaacagaaataaataaaaagagaaaagctcacctgtgcgcttgggccgtttctttcccgaccgacccaattggggatttcacacccgcgcagcccatcacccctcccttccttttccctttttccgcgtgagaatgacaggtgggccccagcgaacggtgactcactgggaactcctctcacggtcgcgcgtcgtgtcgctggcgggtgggccccttatgccagatcattcgttcccaacagatcgcgaaccaggcgggcgaaacagaagccgcgcggtcctcacggtgctccctcaaccgaatcccaatagaacaccgatggccgcgtgaatcctcccaggctcgttctcattcggactctcggccatggtaatataaaatccaggtcctctccccctattggccatcctattgagctggccgcatcatattcatcaatcggagagagaaaagcgaggaggcggaggcagggaatcacggggtctcgtctccgttgccgtcgggcgcccgggtgctagtcggggacctgcgcagggtggttgcgaattcgtctgtggcgctagccggtggaaacaacgggcggtgcgaacttaatcgctcgccagagtttagattgggagctgcgccgccgcgtaccgtgtacagggacattgcctccgagaatcgaggtaaattcgcctcccaatcgattcaccatgctctcgtagggatttttcggtagtcaatgcgtacttagggcactgggtgcgtgatttgggtgttccccagcaagaccgccgccgcgcggtgtgcgcgcgccgccgccctgagcaactatggcatcagggtcatagcaaggggtagatgacgaagtgcgggtcgtctgatcgtcgttatgcggtggtgattgaatcactcatatcctgccatttcaatgatctgtggccgtaggattagttt

SEQ ID NO: 168752 - DNA, 327 bp, Zea Mays
gcgaggttgtcggtgatggagccgttgatccaagacagaacaacggcgttcatgcgagtccagtcgggcgagtggtggacaacatcggaaagcacgtggcaatccagagagaatttggtgagggttaggaggaaggactcacgccaccgagagtagaaggtagagttgacgtcgaggaggagtgggacgagggcccggatgttctgcacggcgacggcttgagcgtgcagattgagaagagcagccgcttcgtgttggagaagagcggcagaaagctgggcgacggagtcagcaccagtgccgtcggaggtgatgacattgatgggg

SEQ ID NO: 168753 - DNA, 1587 bp, Zea Mays
gggctcctgatgttcaatgtgcagcaatagaagtctgtgctattgagactcttcctgacaaagatcaaactctggtgcaacagctacctcaggaacttcagcaattattgggcacttatgctgatttgtttgaggtccctcaaggtttaccaccgcagcgagaatgtgaccatcgcatcccactcatcgacggagctcgtccggtgcaactgaggccttaccggtatgcgccagctttgaaaactgaaattgaaaaccaggtggcagaaatgcttcagtccggcattatccagcgtagcaaaagtgctttctcatcatcagttattcttgttaagaagaaggacaatacctatcgattttgtgtcgattaccggcatcttaatgcactcactatgaagaccaagttccatgtaccaattatcgatgaattcctggatgagcttcacggagcagcatggttttcctcattggaccttcgcgctggatttcatcagatccgcatggcaccggaagatcgccacaaaacagcctttcaaacccaccacggccatttcgagttcaatgttatggcttttgggttgtctggagcgccagccaccttccaggaagcgatgaatcgcacgcttgctcctctccttcgccgatgtgccctggtgttttttgatgacatattggtttacattgcatcatgggaggaacatatccaccatctgacattggtgttcgatctcctccgcgcagataagtggcaaattaagctgagcaaatgttctattgcacaacagcagatcgcctacctagggcatgtcatttcagcacaaggagttgcaaccgatcccaacaaggttacagcagtgtcttcctggccgacaccaactaattgcaaagagctcaggggatttctagggctggcaggttattaccgtaagttcgtgaaacattttgcagtgatagccaaaccactcactaatcttttaaagaaacacacactgtttgtttggacagcagaccatgagaattcctttcagaccctgaagaaggctttggcctcatcgcccgtcttgcaactacctaacttttcattgccctttgccatcgagacggatgcatccaactcaggaatcggtgcggtactcaatcaacaaggtcacccactcgcctttatcagtaaagctttgggcatcaagaacaaaggtctttcaacatacgaaaaggaatacctcgctatcctgatggctgtggaccagtggcggtcatacctccagcatgctgagttcctcatttatacagaccatcatagcctatcccatctgtccgagcagaaattgcacaccccttggcagcagaaggtcttcactagacttttggggctccagtacaaagttgtctacaaaaaagggcatgagaatggagccgcagatgctctttcccgccgtccccatgacaccttggattgcaaccttatctcgtacagcaacccacagtggctcacagaggtggtcgcagggtatcagcaggattcccaggctaagcgcttgctgtctgagctggcattgcaccagtcgccctctactccttatcaactgc

SEQ ID NO: 168754 - DNA, 550 bp, Zea Mays
cataccgggagtccctagagagctggccaagcaaaaactaaaggtgtatcctcaagcaaagctgatctgacagaagctacaccgcattacgctcgacaaaagagaagccatattggccgagttagctcgcctagtagcttgtgaaccttgagtggcttgtgaaccctgttcttgtactaaaaaagaataaagttgattggcgcatgtgcatcgactatactgacatgatctcaacaaacactgcccaaaggatcccttcgggctccctagaatagatcaagtggtcaactccaccactggctgctccatgctctccttcctagattgctactagagatatcaccaaatcagtcaggtgaaggaagactaggaaaagcggcgttcgttaggtccttcgggggcattctgctatatctccatgccaattagccctcaaaaacgctgaagagaattatcaatgggccatccgaacatgcttagccgaccactggggcaagcagacagaggcctacgttgacaatgtggtaatcaaaaccacgaacctagagaa

SEQ ID NO: 168755 - DNA, 593 bp, Zea Mays
gacgtgatgcacactgaaaagaatgtcgccgaggcactttgggcaacgattatggacattcctgataagtcaaaggataacgtaaaggcaagagtggacctggcagagttatgtgatagaccaaaccaagagatgaagccgcctagtgatggaaagacatggagaaggcctaaggccgatgtcgtcttgagcagggcccagaggaaggaagtactacagtggatcaagatgttaatgttccctgatgggtatgcagctaacctgagtagggggtgaacttatctactctgcgagtcttagggatgaagagtcatgactttcacatatggattgaacgaattcttccggtgatggttcgaggctatgtccctgagcatgtctggctagcgcttgcagagttgagctatttctttcgccagctttgtgcaaaagagttgtctcggaccgtggttgcagacttggaaagattggcacccgtgttactgtgtaaatggagaagatctttccacccggcttcttcaatccgatgcagcatttgattcttcatctcccgtatgaggcacgaatgggggggccgtgcagggacgttggtg

SEQ ID NO: 168756 - DNA, 830 bp, Zea Mays
caacataagctcaatccacttgaccaaattatcattaacatgaggctcagaacatgatttatttccatcttcaagttcaattatatgtgagggttcatgtcgctcttaagtatgagtattgggacagagaccgaaccagccctcgatcaacccttctttgcccccgccctatgtcaaaggctaatgtttgtttggatgcaggcccaatgcaattgcagacttcgctaagcgcgagccattacaggggacttcgcctcctagggaccgacgatagtctcgaagggatggcccatacgagggctcacgaggatcgaaggcgagtgttacgcctgtgaagacatgtaggtctcgaccagtcagaacccttcgacatgaagtcaaagggcggagccaaagtgttcgtgccgtcggatcgaaggctccgcggagataaatgtgaggcctaggatggatcggatgcttggagcatggaggcgtctcctcaggtccacctatcagcgaggaagacgggtaggcgttttggtgcacgtgctctatctaggccaccaccctgtaattaccctattgtataacataatctaggaatgtagttggtagccaggggaataattgtacttaagttatctaccctggctgtcttataaatacccacgtactgtagctagataggacacacataataagacagccagagaagacatgcataacaagacactaaagtttcctatttaacattttgtcgtgcatcgtgcctctcacctgatcctgactgtctgggtttgcctgttaggaccaaacaatgagcacgactgatatatcggttttacact

SEQ ID NO: 168757 - DNA, 461 bp, Zea Mays
cgagccgccgcgacaccgcaccatcgacccctcgccctgactacctcgacacgccgcaagaccggccggacctaatgccgtgacgcccgagcgcctgaagcagccccacgaccgagcaagaccaagcctagccagcgaacccggtgaggagccacccgcgccaaggactaaagccgtgcgaccccgaccgagcgcgcccagcccaacgcaaccccgcgaccgaccgtttgtcttcgtcgtaatggagctttaacacagccgtttcttcccccatttacctcccttattgaagctccctcacgccatcaatggccgattgaagtcccggccgcctctcccaaccccggcgccctctcctctccctctcgctcctctataaattggacgccgagccctctctttccctaccccaagctcgctccctcctctcggttctctctccctcgccgttcgccaccgtg

SEQ ID NO: 168758 - DNA, 863 bp, Zea Mays
ctcacaaaggggatttttatatcattgcgattactcccattaaatttgcttgtggagtcagctactccaaatgtcaacccttaccctgcggccagaggatgataacagacacacacagttgcacctctgcatgcgtgctacaggtgaaagtaaccaactcgacgccctagctgcaatgtttatcttggaggccggggttgacttgcacaaagacggccagcgccggtgttccaaatgttaaccacatctaacaccaaaacacttgttgccgaaatggagcattttgtattccctgctttgcttgtagagaagtcaagagatccttctgggagatgctgcttgcaccggttcattgttctggtctaatatatgttgacttgactagttcatcgcactccccatcctatatatggcgccgttagcgttttttgtattacgatgatgatcagttggttttatttagcggcttcttgttcctgaaccttcgcggtaaccaatatcattttctttcgtcgtactcgtctttccagcgcatggtgctattgtcaaacaaaaggaactggccggactcgacagacagctagtcaagaacacatcgtatagccaccccgtatggctaagtaagtgatgaaacgttcatgtagtttttttttgtcgtctacggtgcaaaacaaaacagtattttggacggtaaagacaatctgcatctgctggccgtggaatctcactgcgtccttggctttgcaagtcggccgtcgagaaaaaggggcggctctgccaaaacggtgcagcagcgtcacgcctggtacccgaaccagaaccaggagaaaaagctccggtgattgcgatgcagcacgcaacgc

SEQ ID NO: 168759 - DNA, 576 bp, Zea Mays
aactaactttattaataactacaccaagttgtaggggatacccacagcttgatgacaatcattacaaagatccaacttcattacatgtccatcataacaagcatccaacatacgataagcaaactaactcgaactaagactaactagactaagacactgaagtaagcattattacagactccgactccatcaatctatggatctaaatctatgcaggtcctgcagtctggggtaccatagtcgaagcgaccacgggacggtgaacgataagggtgctgaatcccgacaggggcgggagaaccaccatccagatagtggcatgctgcgcacttagcacgcaattccgcaacctccgcccgaaccttgcccaactcgtcgagggcgtggtccaactctgtgttgagcacgacagccaagttgaccatgttgttcagcctgggattgccctcaccaactggcgaggcaatcacacctccagcaccgccggtcgaacggtgagggtagtacttcaggtcgaggccatcagctaccccgctgaacaacgagcaatactgagaaagtgcccgtcgtgctgca

SEQ ID NO: 168760 - DNA, 1294 bp, Zea Mays
aaacttattacctctagtgttatttcctgtaataaagatgatgccaaccacatatgtcatgtgtgtcaacttggtcgtcatgctcgtttgccgtttagttcatccagctctcgagcttctcataattttgacttaatacattgtaatttatggacctccccaattgttagtgtgtcgggctataaatattatctggtaattcttgatgattgctcccactacatttggacgtttccactccgcctaaatccgagactttttctgcccttgccaccttttcacctatatttgcaccaaattcggcaccatcatcaagagcatccagtgcgacaatggccgtgaatttgataattcccaggcccgcacgttctttctctcccaaagcattgccttacgcatgtcgtgaccctacacttctcagcaaaatgggaaagcagaacgttctcttcgcaccataaatgacattctgcgttctcttttgttttaggctagtctccctccgacttattgggttgaagcccttcacactgcgacatatcttgtgaatcagctccccactaaaacccttgatttctccacaccatatagtgccctctttttctcccaaccctcctatgatcatcttaaagtttttgggtgtgcctgttatcctaacatgtcctccacagcacctcacaaacttgccccccccccggctcttccttatgcgtttttctcggctattcctcggaacacaaaggctatcagtgtctccaacttgagtcgaaccgcattcttatttctagacatgtcgtttttacgagtccttcttccctttcacagccatgtctaccactcccatggcatcctctgtcttggattttctccttgatgaacatgatctaaccgctcctattcttagagcaagacttgtgcatgcaggtacacctcacgtcacccatgggcgtgtagaggcacccacgcctcctcccactcgattggtgatgcccagtccctctcctggtacctccgccacgtcgaccagtgctgctgcccctatgcaccctacacaggctgctgccagcagcgccccgccgcctcaccgaccgcatcgacgggtgttgctgcccccgtgcctcctgcacaggccgttgccagtagcaccgcgaccaccggtcgcacggcagacactcgcccggtctccatcacccttgtcgccaatgcgcatcccatgcgcactcgcggcaaagccggcatggcatagcccgtggatcgcctcaacctccacgctatgtctatgttgtcactgcctcgc

SEQ ID NO: 168761 - DNA, 366 bp, Zea Mays
gtcgcactctaaggcccaaaccgccatcactagcaggaggatttgacacgaaatgagtaaagaccttggaaggaggcaggttccaggccgagtatgcaacaggggcaccaacatttgataccttgcctctgagtatcatttcgagccggctcaccaagcccacagcaggaattcttctgttggtgacccgggtggagtcagctaggccacggtacagataggccgggtatgccctgtccttcaatggttgaatattcttgaagacaaagtcagcaaccacagcctctgcagtcagacccctctccttcaacaatccaacttcagctagcagaacccctgcctcagccacatcctggtctgtggggg

SEQ ID NO: 168762 - DNA, 1089 bp, Zea Mays
cgaacaaacacgcgtgagcacatcgattagccgcggcgggagtacaaggggattaaattgggagtctggaccctggaaacatgggatcctggaagctagtactaattaacaagctgtattttaccgcggctgcagaggagggagggaatgcgaggtgccgcgcatgccgacgcacgagaagaggagaaggaaacttgaagcggaagggtacgtctgacccacacgatccagcagaagccgcacgagcggcaaaccgaccactagcctacgtgctctgaggtttgaccctagaaccctcccctccacaaacccctaccagcagggacctctcctttcattaaccctaagattcttgcactgttgggtgctcggaggacagggtttggaaaacatggcccatgggattttgggttgcatgttacagtatctttcttcccttatatatttttttttatatatttctggcttggctgcaagggaggaatgagaaggcagcacttggatccacgcaggtttctcgcatcaatgtccgtggaggctctgttgacgacaccgacgcagcagtgctgtgcagcaccggatgcacgaatggccggaccagtctgaaaagcttcggttaaagaatggtgccatatgtgactacgatggtgacctgcctggtgatcagtgacctataccttgggttttctcacacggtttcttggtaacttgtccgcctgcttcgcctctggcaccgtggtccaccactgcacataccaagcgtgtaaacttaatctcatgtcaggaagaagaagaagaaaaaagtcttcaggagacaatttttttgtggctacttgttcactagacaatacttgaatcaaaaccatgtaaaggttgtcaagccaaataatccttgtttgaagcataagtactggctgtctgtagtcaagaaggtgtgtatcccagactctccctcaaggataggcaatcacagaaatttctgagtaccgacaaccaaatggatacaaaacattatcgccaatcgacaaaggtagataattataaccacacgttggcaccaaggatagagagaaaatccagagatgggcc

SEQ ID NO: 168763 - DNA, 379 bp, Zea Mays
tctccgtataccatcaatctcttgacgtccaatgaaatggcgatgttcaatccatggattagagcttcatactcggcctcattgttggaggccggaaatagcagctggagggcatatttgaggtgctcgcctccaggtgcggtgaagagaattcctgctcctgctccctgcaacttcagcgagccatcaaaatacattcgccacacttctgcagtctctgggttatctggtacttgctgctcagtccactctgatacgaaatcaaccagtgcttgagttttgatggcagtgcgaggttggaacttgatgtcatgagatcccagctcgcaagcccacttggctattcggccaatggcctccttgttatgaagaatatccc

SEQ ID NO: 168764 - DNA, 447 bp, Zea Mays
ggaaaaataaagagacccctagtccagaacaaaatcaaggtgagatgttttatttagccatattccaactagaaaataattattggaattataaaaacaaatccaaaattgttaataaaaacccaatggacttgtaaccactagaaccccactacaaaaatgataaccaccccagcccatcattttaagtagggtaaacaattaaaacttgatattgggtcctatttcaaataaatcatgagcaacccaaaaataatgcaataatgggcaaataaaattatactagatcaatgataagataagccaccagagaaaaatgcaaaacccaattgaaggctgcaaaataatacccattgcaaatactttatgaaaaaggccatttaatcaaaataattcctaccacctttcccttaagcaaaaagttgccaaacttcagaatgattgctc

SEQ ID NO: 168765 - DNA, 641 bp, Zea Mays
ccctttgaccgtgccccgccatccaatccactcgtgcctcctcgccgccgagaaatcctctctgccgtgtggactaaacctgccgccacatccaaatcaagtggtcaccggcgttgggaccccaggaattagtctgggagcgtccgtgggccttctgggagggtggcgtgtcgtccgcgagtgagatcggtcgccgagcaaggcgcaattgctcatcggacttcgattctccgccgcggtccgctcttcgtcgcggccagcgtcgtcgtggcatcgatcaccggtaacaagcccatctttgtcctcgttgtgcatcgcgcattgtgtagcgacgacgaattgggaaatgggggagcgggagcgcggggttgatgtccgccggcggtagcttcgccgtggggattgtgcgccgccgtgcgctgtccgtggttttggggaaaggtggaggctgggttgtgtggaccgttggatgcagttcgggcggtcccgattagatctccgtgtaccgcttcgcggggtccctcgtggccgtcagaaggtgatcgggcgggtgtcgagcgcctgggtcgtttggtgatccggtccgttgatttggcatccgagggctatgaaccgtgcactggtttataatagcgaagatc

SEQ ID NO: 168766 - DNA, 482 bp, Zea Mays
atgcagcactcctctatattgggatcaaactggtgaaaggaagttctttgggcctgaaattatccatgaggaggaataacaagtccgtatgatccgagagaacttgagggtagcacaaatcgacaaaagagctatgctgataatcgaagaagaccactagaattcaaagagggtgatcacatgtacctcaaggtgtcaccaattcgtgggatgagaagattcaaagttaaaggcaagttatccccttgctttattggacccttcataatctttaggcgagatagggagatcatatcaacttgagttacctgaccatctgtctgatgtacacgatgtattccacgtatctcaactcaagaagtgtctctgtgtccccgaggaacagctaccaatggaagaactcagtgttcaaggtgatctgactaacactgagtatcctatcaatatcattgacactttgagtcaggttacaaggaataaag

SEQ ID NO: 168767 - DNA, 355 bp, Zea Mays
caagattgatctttgaaaacatagctgaagctgaagctactagactggaggatgttgatatactagaagaagaacggttgaatacagtgattcagtcagccaggtaccaacagactctgaggcgctatcatgacaaggccatacgacatcgatccttcgcagtgggagatcttgtcctccgccgaattctaacgggggagggacgacacaaattgtcgccactatgggaaggaccattcatagtagtagaactcactcggcctagatcatatcgtcttactcaaatggatggcacggaaatagggaacttctggaatatagagcatctcaagaagttttacccctagctagattt

SEQ ID NO: 168768 - DNA, 1290 bp, Zea Mays
ggttctaattcgattaaacgcaggggctcttatgcaagattctaaggccgaaggggtaccgtgaactactggccgtcacgcgtccagattaaatcaacaaacgcgcgaaccggtacgccatgggatccacacgatctaagatcaacggtcaccatttaatgaatatagagataagcgcctatcgtccgatttgaaatcgacggcccgaacgaagggggtatcactgatctaatcagaatcgttcggcagtaaatcaacgaccatgggtgcatcttctcctccgctggccacacacggcggcgctctggcccaacggcggagccattgccgccaacagtggttgtgcgccaccgtcaccccaaattctgattgaaaagagcaacacgtatggcagatgatgacgaattgtttggtggatcccataccttgagtcgagacggcaggggccccaatcacgtaccgcagcggcacccaacgtgcctaggaaattgcatagaccgcggatggagttgagaggtggcagccagggactcctacactgcggctgcccaaccaacactccccagctggcggcagaggtaggtttaggctatcaatggcagcggatccaagcttgggcgagagctccaggttttctgtgcgcgaggtatttcggatggatagaaaggctagaggacgggcggcgttcgccctgacccgtgcggtggaattggtttctccccgatgaagcactcggctactcgtttaatcgcacaaggccatccgaccacgctttatgggtccagagggctccgtgcatgggggagtctgttgcgcggacgacgcggtcttcacggcgagtttgtcgctgcgcacgagccgccattgcgaagaacaggcgaatgtagttgctgaccaagcgggcccgcagatcagggaagaggtgcgtgctgtgtctgacggggtggccccatgcgtcggcgactccatacgaaaatcgtgcaggtcgcggctgggcagtgggccgcgcggggtaaaaatgcgaatgggccgaaatggatagagccagcccaggcgtatagtcttccctttctttttcttatttgaatttccctttgcaaaatttgaatttggtattaaatttccaattcctatttaaattcaaagtttgtggcgactttgtcttcacattaaatgttcaatttaagcgtagtgtggacaaatttatttattttataaactattttgtttgtatagtattttctctcttgtttcctctatatcacttccaatttctaaagtgcatctttg

SEQ ID NO: 168769 - DNA, 516 bp, Zea Mays
caaaagacgaggggcttctttgtaacactgttcagctgaaggggtatgagggctttctagccgtccgatctaacactggcggaccagattagaactccaacattatgaatcggtacacccttactaccgtcggattcaacatctatggctgatcatctaccacggcgcgatctgatctactccctctgatctggttacaacggcgcagatcaaaaggtatcatggctgattcttaacggtccgatctagatcgagggtctggattcaatctcgaaagggtatgcctaggatccgatctcagccgtacactctacatcctacggctcgcactgattcacccccaacccactcttttttcctcggcccgcatagcggcgacaccgtccagcatggcggcgccatggctgggtcacgaccctatgccgatgagtctcccaaccggcacataggcacagggtggcggcgcatccgtgcagagcaatggcgcatgcacaggcgaagccccgcacggcggcc

SEQ ID NO: 168770 - DNA, 527 bp, Zea Mays
ctgagctcggtcgcgccagccactggtgaggcaagccatggctcagccgcaggccagggctatggccgacttggggttgggggtagccgggttggagagaggaggaagaaaaggtgtttggccgttcaattgggtttgggaggatcagaaccgtgggatgaataactgacgaaccagattagaatagccataccccttcgtgcaacgcgatctgtgccgttgatccatgatcgggtgaacaggagcagatttagtcacttaaaatctatacccttggtgcgggatccgacggaccacgttgttcatcgtttcaggatgacgattggcctaatctgggtcgtccaatgaggatccgatggccagatttcttggataccccttcgcaggacgccttttccttataagcccctgatatttattagaatcaacccgctgtccaattgaggggcgccctgtgtctcaagaatatttataccagaccccctgtgttttgatttaattgaagctcgatccagataactcataaa

SEQ ID NO: 168771 - DNA, 277 bp, Zea Mays
cggaaatcaggggcagtaagattagtgttcggtggggagattagcagtgactcacttcgaatggtggatcgcagtgactcgagtggtggatttgagacagttgttatactggttcagggcttgcgccctagtctagtgtagtgctgatcgtagtattgctctgagcgtgttacagttggtgtgctcgtgtgttcaaaaaagaggggtccttcccttttatacttcaagggatggactatacaatggggactttgtattctgctggggggtgctcgac

SEQ ID NO: 168772 - DNA, 816 bp, Zea Mays
atctgaagcgtgtttgttatattttaaaggctgttgtttgggcaaggcgaatcaggcaagagttgatgacgagcggctaaactaatccaagagttgatgacgaccggcttgttctttcacttgcaacgacttagagtcgggcggcctgcaagatcaaggtgcatggtcgtcgaaggatggcgacggcgtatcctcgatcgggcaaggcgaatcaggcaagcatctatttggaggttggttagttatcccatgtcatcagacatcacgcaggaatcaggtcatccatcaggaagcagccagctctgcctggactaacccagggcaaaggcaaacagcaaactttccaggataagtctctgactttgttatactttcctgtgtgcaggaggtcttgaagatctggaactgcaggtgcagaatgctattgcagcagcagcagctgcagctccacccaaggaaagcaatagtgtcagcagcaacgatcctggcagctcgtcctctgtgatttttccgtctggtccagctgatcaagtccctgttcctgctacctctccagaaattgagccccgttttgcaaaccaaatccctgctgcttcttcgaaggttaaggcaccatgcctggcaggtctgttgtttgtaagcgacaggaacgagaggaactttaggttgcctagcccttctgataactgtccatggaacttattcgaagctagccgtagcgcagtcagctttctacaggagtatatgctttccggaatcgtgccactgaagttattcagcatgagatctatggttcttagactgggcatattgctg

SEQ ID NO: 168773 - DNA, 367 bp, Zea Mays
cggtgaagcgggactgccaatcctgcccgccgaacaacccataagcagctagcactagaccaatcgtccagtctagatgatcgcagactggttcccaagtgtctcctaggtctatgatagcaagccgagcagcgtcaaaatccaagattctttagctccgcggctcaaaaaaatgccatgaaatttccacctgcttctcgatgctccccgggaacttcaaatctccattgcgcctctatactctataggctgttttttcaccttccatctctccactcggtataaatttattttacaaatctgcatcgcgcctctacaggttgtgtttttcacctttcatctctctccactcgatgttaattcattt

SEQ ID NO: 168774 - DNA, 754 bp, Zea Mays
ccaagggtgcagccgggttagcacaacaagtgcgaaaaattgaagtcttttccaagagactccccgtgcaaaagtcgcccaagggtgcagccgggttagcacaacaagtgcaaaaaatcgaagtcttttccaagagactccccgtgcaaaagtcgcccaagggtgcagccggactagcacaataagtgcgaaaaatcgaagtcttttccaaaagaccctccgcgcaaaagtcgcctacgggtgcagccggaatactagtacgaaaaatcgaagtcttttctaaagaactccgtacacaagcctacgggagcggcctgatcaacgaaaacgcgcagcttcatcacacaagagtatggttacatacatacaagcgagggcatcgtacattacattggctcaacctttgggatgatacccatctccctatagttgaacaacattatcctcaattcctcacccgcaaaaagacttcgcagctccccatcacccacactcgccccagccggcgaggacaacaattcccgcttgccagccccgtccacacgaaggcgaccacctcccacctcaccacgaggacgcctatcacctcgcggcaactcactcacccttcatttggccaccgcccttcgccgcctatgcccaacactcgcactcagaagatcctcatcacaaattacacgcggtgaagcctccgccgtagccacatgcaatgccgcaaagtaatccaaatcctcatccgaagactcctctgtcc

SEQ ID NO: 168775 - DNA, 463 bp, Zea Mays
ccggaccgtccggatatgcgtacgcagagccgagagctgcgcaatacgcacagtttccacattcatcgcagcaacattatggtgcctcaccagcaacacattataatcatgccataccacctcatggacatagggctgaatactattcggccacgagagagcctgagaggaatagggcaggagctggtgacattaataggacacctaacacacacttcaagcacccctgggaggaaagccgatagaatgatgtcaggcaacctgagatctccacccacaaacccaatggatggttgccagacatggcggagaggatcagagacgaggtggccgggatgttcagagacaaactcggtgttagtgtgtcaggtacaggacaatcgtatcggaagccttatagccaccgattcgacaccgtgccatatccacagggaactagaataccagacttctctaagttttc

SEQ ID NO: 168776 - DNA, 349 bp, Zea Mays
atggggtgcgtccgcgcgtgggctccgcttgcatgctgtatgccaactcccatagtcccatgatgtgcgtggaggagaaatctcatgtggagcccacatccatgtgttgcctccgtgaattatcgagtctgcatatctgcatgtagtcaaaaccgaatgcaactactcccacacctgatcccacctctccttgatcccctgtggctaagacccatgtggtccatcgtatggttagctttcgaccaatcaaatcacgtcacgcagtgtaaatccgagaaacactagttattcaatatatacgttgcgttgcgagtccgtctcgactcgtttcattcgtaccgacttcgta

SEQ ID NO: 168777 - DNA, 340 bp, Zea Mays
tggccacctgcttagatcttacttacagcagagctgtcagcacggcgctggcagtagaagccaagaatacaggccaaggaaaatcaaagggatttcgaggtgataggtccaatcaaggacctgagaagggaaccaggttggtaatccgaccgtttaatcagaatcgttgttcgcctcgtccaccctcctatctgttcaaacaacctattttcattcatcctaccactgcgcccacttctacaaatcagccgagtgcccctggtgctcgtttccccgccctccctagttcctccactggctgcttcaactgtggaaagtctggtcattttataaaagacta

SEQ ID NO: 168778 - DNA, 335 bp, Zea Mays
gaggaaggttgctgcttcggccaatattgctgcttcggccacttcagatgagcctgcaccgaagagcaaaaagttgaaagtccttacccactagccacgctatattgagccagccgtgatacctgagtttggcggggagacttcttcagctgctgaaccaaaggagcccattcctcctacgcagaaggctgaagaaccggctaccatgccgaaggcgccctcagccgagcaagctgagtcaaagattggtaaagataaggccgaagagccaaaagctgaaggaacaaaaatgttagaaattttaagcccttcggcggaagtaacagtgccgaaga

SEQ ID NO: 168779 - DNA, 484 bp, Zea Mays
ctgatttctttttccttggatgccttgggtgtggacttggtcgtcgttcccgcacgactggctgaccttgcattcccttcctcctcaacgccaatgcatgatcaacaccgcgtgctcccgcgtagaaacgccataccagcggtcacggcgccacctaggggcgacaattaacatgcatggaggccgagattggtaggcttcggttggggttgtgttgctgatcaagcattaaggcaggctcccagcggtcactggcttggctcctgttggtgttgccgacggacacattgccagacctgcttgccgaactgaccgtgaggagtggcgacagggttgctctggtcgtgggcgacggccgaagtgcgccctctacagcgagctatgactgagtaaacggccgtgaggagcggcgacacgattgctgctctcgtcatgggctgaggccgaagtgcgcccctctacagcgagctacgtacgtgaataa

SEQ ID NO: 168780 - DNA, 537 bp, Zea Mays
gagatcacacccattggggtcagcgtcggcagggtcacacccattgggataagctccagtaaaaagttccactggcacttcctcagcagcaggagcgaaagggccggcatcctaatccaaacatgacactcgccgaagcctcctctttttcttcttcttccccttgacaggagcagttggatgactggctgagcgaaggcgctttgggcgagcaccatcagatttttgagcagtcaaggtcttttcaggctcggggacaattgctatagctatggtttcagtagggacggagtcagatgaatcctcagccaacatgtctagcatagcacttatctctgcatcactcgggtttataggcatctcaaagtgaacttgcctttcatcattggggagatcaccaagtgaagcaaccagagcctcaacttcttcaggagagggtcgcactctaagacccaggccactgtcgctagcaggaggattggacacaaaactgaaaaaagtcttggaaggtggcagattccaggcagaatatgcaac

SEQ ID NO: 168781 - DNA, 602 bp, Zea Mays
tggtagaggacactaagtgaaatgcacagtgggaaactctagactctagaggatctcaggcagttatatctgccatatagggaagttaaacaattgcttctaattgcaccattatgtataaaccatatatgcaagtgacattcttcaaaggagttcaaaggacatgatatcatgtattcacaactatgtttatggctgggcacctgtgtatgccaggatgctaactacaacttgatttgcttgtaatatgggttaagaagaacaggatggatatccatagagttcacatgaggcaaggatgtattgtgatttctatctagttggttattatcttcttgaaagaaggaaattacttgtaagggacacgtccttgtctggcagacgtgtaagtgcacacagcataaaaccattgacatcagctttcaagttgaacataataactggtcggtacttgatgataacgatgccctggttgcttttgttcctgcacaaactcaaggtagtactgattaagtcattgagtcatgccaaacagctcaatctaagctaatatatatgatctgttaatgggcatgcctgccacactatcattactcattaaa

SEQ ID NO: 168782 - DNA, 504 bp, Zea Mays
agctagcacgtctcaatcatattgttagccacgacactcgagcaggagacgacaagttgtcgcttcgatgaccaggatacaaggctgccacccaggaacacagtatagtcaaaggtagacctacgcgtatttagtcaacccatctaattagtgttggtgtatgaaatgaaacgaagtagacgacaaggaacattggagaaggttgtagtcgagggtgctctggaggtaccgaagaatctacttcataatggtgaggtgtagctcccgtggatcatgcatatataagcacacttgttcaatggtatatgggatatctagactggtgaagatggggtattcaagagcgccaatgagactcctataagcagtggggtcactaacagaggcgccatcgtcagaggagaccttggaaggtgtatccactcaggtggagcaaggcttgcaattagcgatgctagcccgctcaaggttatccagagtgtacattcacggaggaacatgttg

SEQ ID NO: 168783 - DNA, 614 bp, Zea Mays
gggggagggacagcacaaattgtcaccactatgggaaggaccattcatagtagcagaagtcacttggcctggatcatatcgtcttactcaaatggatggcacgaaaatagggaactcatggaatatagagcatctcaggaagttttacccctagctagatttcaaaagttattgggacgacattgtattctgtaattggaaaatacaccatcaataaaaagacttcattctcaaaggcactcgaactgtttattgtcaaactacaagctcactcaactcagggtgaccactataccctactaacggagcaatcgacttaagtcggcgacgacttaaggcggtgtgacatgctcacgcttacttaactcagggtgaccactataccctactaacggagcaatcgacttaagtcggcgatgacttaaggcggcgtgacatgctcacgcttacttaactcagggtgaccactataccctacgaacggagcaatcgacttaagtcggcgatgacttaaggcggtgtgacatgctcacgcttacttaactcagggtgaccactataccctactaacggagcaatcgacttaagtcggcgatgacttaaggtggtgtgac

SEQ ID NO: 168784 - DNA, 735 bp, Zea Mays
agaagatacctagttcatccccctttgccgccgatgaccgtcgtgccgcgattcatgtcggtcgccgtgattcgtgcgctgtgacttgtggataacggtgaacgagtaaagatcttggcgcatggatcaacttgggtttggccgcggctaagttccccgtaccacttgctcatcggccgattgggataaacctcgccgttgttggctgattaccgccgtgtgccacgtgctaaagtgttagaccacgtcgctgtgaatcgcgtctcgcatgcacggtgatcgccggtgtaatgccacggtgaaagccactaacccgagcaccagtgatctcccacccctccgaccgccgcgcgtctcaagcccaaattcatcggccacctcttagcgatcctataaattgatggccaggtctgttgcgccatgtaatcacgaagccaacgcaccagctattgcctcaaatcgttcaccagagaccgcgaatttcttacttcccccaatactgtttctaccaccgcagagacaccctcaccgcggccagcttattccaggttaattcaagctccccgatcgtttgttctagcatccttaagttctcctcaagctcctcgacccctctgattgaactagaccaccgtggatcaccgggaacacgttgttcctttgattgtccacgctgtcaccgtggccagaaccatttgggtagccattcgtgaaattgagtgaggggaaacactc

SEQ ID NO: 168785 - DNA, 478 bp, Zea Mays
gtatgatcggacctgaaacaagctagccacggcgaagactctttcacggtggcagaaaacagatttgggggaactgagcaatttgtgggcttaggtgagtaattggaggcacaagcgggtggattggatgctggaatacctaacgaagccaagggggtgctcaatttataggactcttgattggtggctcgtgaatttgaaggagacgcgcggcggccggagagggggaagagtactggcgcaagcgattgatggcatttaccatggcgggctcgccggcgatgaccagacgtgctagagcgagtcaatacgatgaagtacagcgtctaggcacatgtcatctgagcggcaaatggctactccggtgaacttatccacagcggctgtgacccaggcgggtacggcggccggagtagaatagtggccggagttcatccacggcgcgatatttccttacccctctgcattatctaactgc

SEQ ID NO: 168786 - DNA, 647 bp, Zea Mays
aaagatagccagactagggtgaccttagggatgaaaacggacggaaacggacggaaaaacccctctcccgtttccgtatccgcattttatcatcggaaacgggatcgggtccggaatagttggggacggaaacggaagcgggataaacggaattgcgaaaacgaacggaaacggaaatactaacggaaacttataatttaatacaaataaaaatgttattgatgtttgactagtgattgattggcagaacaataatataaaacaaaaagatatagagagacaacattctattgttgtttggttgctaaatgtgtacatttagctacattcgatgttgtttaagactttagatcacttgttatttgaaaagagccagtggttacaatggtcaattgtgctataatttgtcacctaaatacataagaatttagtttatatgctaatgcatattaggctcgtcccatattatcaaatacagaataaatacgggttcaatccggaaaaaaacgggatcccgcaaaaacggacggaataagccctctcccgtttccgtcccgtttccatatttttccgtaaatacggaaacggtcgggtcaaatatagaaaacggtacgggtcgggacgagattttttccgtccgttttcaa

SEQ ID NO: 168787 - DNA, 1019 bp, Zea Mays
taagctgagcagacaacactgctttaaccaaggtctccctacctgcctttgagagtaaccttcctttccatcctgctagccttttattaattttttcaattagaggttgaacgtcaactctcctaacattcctgaaatgaagaggtagaccaagatacttgcatggaaattttgagtatttgccagggaacacatccatcaggtctggccatagagtctgggggtaacgaatcgggaaaatttcagttttatcgatattaatcttcagccctgaacacccttcaaaaacttctagaatcctttttaggactttaaagtcctctttatctgctctaacaaacactcctgcatcatctgcatacagagaacatcgcagtttagcctttttggcagaactcgacccagaagcccagcatctgccgccatctcaatcatcctctgcaaaagatccattgccaggataaaccggaacggggatagcggatcaccctgacgtacgccatgcatgtgcttaattgcatttgtttgttgaccattgacgatgatttttgaagaggaagagcctaaaattgtggcgatccaattcatccacttctaggaaaaacctagagctcccaatacctctaacagataagcccagttgatggaatcaaaagcttttgatatgtcaagcttgacaaagagggttggatgtttattcctatgaagtttctgaataactttttggacatagagaaaattatcatgaattgatcgtttttgaatgaacgcattttgagcagtggagacgatctcattcattcctggcgcaagtctatttgctaaaatcttggttaatattttcatgaaatttgttgatgaggctgatcggtctaaacatgccaatcctgtcaacaccctcccatttttgtaaaagagtgatatttgcctcattaacgaggtgcaggtttttgcatctatggtggtagaaatcatgaattgcactggatagatcatctttaatcagctcaaaacagcac

SEQ ID NO: 168788 - DNA, 565 bp, Zea Mays
cgaaagttgaaatccctacaccaggctctggaagccagacgacacgcgacgagcagcagcccagggtgctttctggacggagatgggaaatctacgctggcggtgcgagagagaaaacggggcatcgagcgctcctgtcaagtctaaatagccttggctccattattagcggaagtggcagtttcatccgtagccgccgagcgcaggacccggtcagctcgtgggtggttgccaccactgcgaagtctgcgtgagctccacgatggctgcaccagtcgtaggcgtgtccgagacgactcccagtgccggttgccaagtgggaccatcacgcagcgagagtaagtgacaggataacggggcaccaacctgtgggatccgcgagtcagtgactcacccgcagtagggtttgggctggcgtgaggtggatgctaggggaatgggccgaaatgtgcagattgaggcccacctaggtattctttcttttatcttttcttttcttttcctctatttcaaatttaaattgtattcaaatttaattcaaactattgtgaccaattattctcag

SEQ ID NO: 168789 - DNA, 626 bp, Zea Mays
ttaaattcgaaacctaaagataaaaagaataaaaagaaaacagaaaatgtaaaatataaaaaaataaacataccgcgcctgggccgccatcccgcaatttggcccactgggtctttccctccgcgcggctaacccaggtgcttcctggtgccaacaatcatggcccactggtcagctccttgtgccatcacctaactgacgtgtggccccaccttgtcagctcgatctctcccaccgcaaccggaccgcaacaaccttctccgagctctccgaggattcgagttgatgaccggtcgattcagccccttatcctcacccataaagtcgagtgccttcctttctccctctcgccattagccgactagaggtggatccagagctagacacgtcgtgtgagagaaggatcgcccaaccgtgaggtgtggtctcggcggggtacttctgggaggaggatcgccgtcttccacgcttggcgtcgaggtacaggaacgtcctagtaatcagcccattagcctcgcattaaccctcgctcggacgtgtaagaattggggcgctaggaattagcatggtgattgtcggtcttgggagccgccgtgatgccaccgggtgctgcaggcggtgctctg

SEQ ID NO: 168790 - DNA, 879 bp, Zea Mays
gtggtcaccctaagttaagtaagcgtgagcatgtcgcaccgtcttaagtcactgccgacttaagccgattgctccgttagtagggtatagtggtcaccctaagttaagtaagcgtgagcatgtcgcaccatcttaagtcactaccgacttaagtcgattgctctgttagtagggtatagtggtcaccctaagttaagtaagcgtgagcatgtcgcaccgtcttaagtcactgctgacttaagccgattgctccgttagtagggtatagtggtcaccctaagttaagtaagcgtgagcatggcgcatcgtcttaagtcactgccgacttaagccgattgctccgttagtagggtatagtggtcaccctaagttaagtaggcatgcagatcgataacaaatagttcgagagcttttgagaacgaagtctttttattgatgacgtacttttccaattacagaatacaatgctgccccaatagcttttgaaatctagctaggggtaaaacttcttgagatgctctatattccatgaattccctatttccgtgccatccatttgagtaagtcgatatgatcctggccgagtgacttctgctaccatgaatggcccttcccatagtggcgacaatttgtgtcgtccttcccctgttagaattcggtggaggaccagatctcccactgcgaaggatcgatgtcgtatggccttgtcatgatagcgccttagagtttgctggtacctggctgactgaattactgcattcaatcgttcttcttccagcatatcaatatcctccagtctagtagcttcagcttcagctatgttttcgaagatcagccttggtgccccaaacctaaaatcagcaggtagtactgcctccg

SEQ ID NO: 168791 - DNA, 661 bp, Zea Mays
cgcgcaccccttctgtctctgcgccgtgggccttccctatcagctccgccctccccgtgcccgccgtggaccagcgagcgcgcactcgcgcacgtcgtcgagatcctcgaccacgtctctctgcccacgccccagctccttttgagcccccgcccgtgcccgcactcactcccccgcctcatttcacgcagtcccgccctcgctcgcactctgctcacgtcgtcagacctcgccggagacccgcacccgcctccccggccatctagctcgccgaagaccgcgccaagccaccccgagctccgccccgaggtgagacacctgtacccgtgcccagtttccctaattgcgctctgtggtcagccaatttcggcttcaccggagttcggccgtggcggtccgccgtgcccgcgcggtgaccgataaaactagcccggcctagtgcccaggtgttagtccctaaggtacccctccctctgttgaagctatcccaggccttagcgcgcctcaagccccctccccgcgtctggaatccttcaccggagttcctccggtccacccgaggccttctccccgtcgttctcccctctctgtccttggattcgtggccttttccccgccactgagttcgccgtggcattctctccctctctgcccaatctcg

SEQ ID NO: 168792 - DNA, 593 bp, Zea Mays
ttttgtgccttcggcactgttgcctctattgaagggctcaaaatctctggcatttttgttatttctccaatttttgacccctcacccttatcagccgtcgcttgaactagcttaactgaaagtaacttcggcattatggctggctctccagtgttctgcgcaggcagaacagtttcttttgtttcggcagccgaagaggcccctttgccaaattcaggaatcacaaccggttcgatgtaacacggccggtgagtcagaaccttcaacttttttcccttcggcataggccaaacttgggtgtccgaaggagcatttttcctctttttcccctgtccccgtagcggatagcggtagtcggggtaaacgaagccaatggcgtcaaaaactttgttcagtcttttctttccccgacctctgaaggctgcggacagtgcattatcttctgccttggaatatgctccaagcagttcatcacttgtagcttcgatacacttcagccagtcatcgtttggttcatcgaacttatccccaaacctgaatgtatacttcagccggaccaaatcaccttcgctagagttagtgatggtctcctt

SEQ ID NO: 168793 - DNA, 527 bp, Zea Mays
ctgagttcccaatgtctgaaataaagctttccagaattggctagtgaagaccttatccctgtcagacactaatgtcttaggaactccatgaagcttaaccacattatctagaaaaacctgggcaacaatagcagcagaaaatggatgttttagtggtaagaaatgagcatacttcgaaaaacgatccaccaccactaaaatagtgtcatagccctcagatttaggtaatccttcaataaaatccatggttagatcttgccaagccccactaggaattggtaatggttggagcaacccaggtggatgaatcctttctgacttgcatgttgacacaccaagcattgctacacaaaagaaatcacctcagctttcaaccctttccaccaaaaaagtcttttaactctgtgataagttgcaggtcctccagaatggcccccacaacactatcgtggagttatttgcccatttgccattatcaaatacgggtttcgcccaaatgccatcataaaaatgggtttcgccgctac

SEQ ID NO: 168794 - DNA, 989 bp, Zea Mays
gtcgctacgattagagctgaatgcgatgcactgcgcagttgttctatcgatcagtgttgaacgtgatgtgccggcctaaatctgaatctctcgcaaactctgctctgaattgcctgtttacttgccttgatactacttctgaccatcgtgattgatcctacaagtgctagaggagctccttgcttttagtgatggcattgacgtgcatgctagttgccagcttatttttatgcaggattgtgtgcttaattcctgcacagcatgtatatgatgtcgttgttgtttctttcattccatgtactgtgaacatcataatatatgctatttgcctgcttatttttatgatgcagtcagtttctacaaagtatacgactcctacatttccactcctatgaacatcagaatgtaatttgaatgcgtcgcaagctctgctccgaatcaccggcttgctagtcttacatgtgcatgaaggactcttgacggtgggtagaagatagtctcataattgatgatgtgtcacaagtttaaagtattggggagtaaattattagcgaactgctgtgcgaagataagattttggggaaaaagttttttagcggaacccctaataaatagtttttgggaacaattgtctaggggactcttggagttgctctaatacctacctctccccgcgcgtaaacagaaaaataattgacacgatctacaacaaccccgcctgaatcgatctccttcatgattttctctcgttccttgtcaatagatcaatctgcgcagccggggtagctacaacgtcttcctcctccctctgtaattcctagccagccaccacgtcttcctcctcccctctataatacctaggtcaaagggagaaggggtggccatcccccatcccttcccttccaggtcgcgaccatcttctcaccttgggaaccacattcacctcctcccctttgtaattcttaggtcaaacagagcaagggtggcca

SEQ ID NO: 168795 - DNA, 538 bp, Zea Mays
gtatgcttcctatcttgcctagacatctggatctgatggaaaccagagtaagcatctaggaaggacaagaggtcgcacccggaggtagaatccacgattttatctattcgtcgaagtggatatgggtccttgggacaggccttattaaggctggtgtagtcgatgcacatctgaagcttcccgttagccttgggaacgatgactggattagccagccatactgggtgatggacctcttcgatgaagccagcgtccagcagcttccggacctccttacggatgaagtcctgccgctcaacggactgtctccgaggcttctgacttactggtttagcgtcagggtgtatcttcagatggtgctcgatcacctccctagggatcccaggcatctgcgatgattcccatgcgaatacgtcgacatttgcctggaggaaggcgatgagcgcgatttcctatttctcctccagatcacccgcaatgcgagtggtctgggaggaatccacgctgagccggatggtcttgatagggacaccgtctg

SEQ ID NO: 168796 - DNA, 568 bp, Zea Mays
acctgcttgctacgccgctgcgttgctctgcttgcttgctgtgttgctctgcttgcggcgctgctcctgcttgttgcgcttgctctgcttgcttgctgtgttgctctgcttgcggcgctgctcctgcttgttgcgcttgctctgcttgctgcgctgcctgctgcttgcttgcccggccggccggccccctgcgcggcttgcctgctcggcttattgtttgcttgcttgcttttgctttctcgcgcagcttgcctgcttgctggttgctgcactgcttgctgcgtcggcggcggaattagttgggactggtgcgcgactcgcgcgagcaaccgagcagtgaagacgacccgcaaccgccacacaggcacagaccgacagccgccgccccaaaccctaaagtcccaaacgctaaaccaaactagttggactgttcgcagttactattcatatttgtttggcctgctattacacaactagtcggcccaagagtagggcctgggccctagtggccccaggcctgcatccgcccctgggtcccatatgtgtaactagattgatgcttagagat

SEQ ID NO: 168797 - DNA, 1111 bp, Zea Mays
ggccctacttccagtagagggggtgaggcttatattactcgcaccaaggtgcctgcagtagggattacaatcacggcaggagagggaagtccccaagtccctagaactgattgaggcaagtgtcaacaccgaaagacttggaggaaaaccattgaatgttcgcttgccccttggaggagctacgactgccctatttatacacctaggagatgtacactattgaaccggggggcgtcgtgtttccagaagagaagtcttggcgtcctgtgggtgacatgaagatgcactcggttgttgacttgggcttgttgttttcccgctgagggccgagggtgaggctgaggggttagccatacgcccgagcccctaggggaggggatgccatatcgtagttgttgtaacggggcttcagtatgggtaaaagcctgcttacgggatgcgtcagtgtccctgtggtgggtgacgttgggattcctttgctcctttgggggcttttattttgtaccgtcgttggtgtgataggttcaatttgatctttggccgatctgttggaaccttcagcgtggtttgcgagggcagcccctgagcctttgcgtggagcaaaaggacggtcaagaggtgccttgacttttgatttgtacgccccttcgtcgcctctccgtgaggaggaacacgtcatgctaccctcgatgggcgacaagcatgatgtttccattgagcttttatcaggtaatccaagcgggggtccgagctcctttcaataagagtgggctagtagtccagagacatgccctaaaaagtacctgcgggtgattcacctggtaccgaacccgtttgatggggttcgagggctcaatgcctcactacaatgggatatcgtcatgaatagctcctgggggtctcggatatgtctcagggtaccttgggtcacaacccgagctagggtcatgtacaggcgtacccacagtcatccctgactctatgttctgaggcggttatgaagcccttctgaggagccaacctttgacaccctaatcagtaatgggctcggagccctggcgtcctgtggcggttttgtcgaaccctgccgaaggcctaaccttcgaacctc

SEQ ID NO: 168798 - DNA, 524 bp, Zea Mays
agacgttttagttgaagttgtacacaattcaacatgagtcatgttggctagagggtggaaggctaggcattctgctaaatagatccaaggttcgatccctaggcagccacggtttgattttttttctgcgcgcggaaaactggtgtgcgggattggacggctgagaccgtagaacggtagaatggacggctgagatcgcagaatggcagaacacgtagagactagtgtatggcgcgcgctcatgcgcgcatttcgatcccgcttaacagcataatataatactaggataatgcccgtgcgttgcaacggcacacgatcatgtttaatgagtaactttagtaattcatttagacaaagagtttaccttatgtgtatttcacttgcatacatgtgagttcgtgaattagtacatgacatcatgatcacgatagtagctctgatcactgtgctcgcgttctagctctctcacaatctcctcttcctctacatagtgccgctccggctccttcactcccattacactc

SEQ ID NO: 168799 - DNA, 558 bp, Zea Mays
gcaagatctttactgccatcaagaaaatgcttcttgacgacaagaagggtaaatgggccgacctgctacctgaagcagtctgggcactgaacatgaccgaatgtcgggcgactagattcactccctttcgcctgctatacggatcagaggccatgaccctgcaggaaatcaaacatgggtcaccacgggcaagcgcttcagccgtccccgacgtagatgaaccaacctccaaagacctcatcgacgtagaccgtgtcttcgccctgcaggctctcaacaaataacaagctcaaatgaaggcctggcgtgaccacatagtcgtcccaaaagaattcgacgaaggggaccttgtactcgttcggacaactcagacagagtcacggggcaaactggagccaaagtgggagggtccttttatcgtcaagacgaaagcgttccccagcgcgtacaggctaacaacgccatccggcgaggacctagagcattcctggaatatcgataatctccgcaaattttttgtttgaatcctcagggctaacacgcccttgtaattcacca

SEQ ID NO: 168800 - DNA, 731 bp, Zea Mays
gtttggaccctggggtgggaacagtggcaccatctttgacgacgggatatacacgggtgtccggcagatcaatttgacgcgggggctagtagggatatcctccatgaaggttctctacgaccgcaacgggcaggccgtatggggcgacaagcgcggagtcagtgggggctctactagagctcaaaaggtcgtgttcgatttcccgtcggagatcttgacgcacataaccggctacttcggctcgacgacggcgacgatgaagatgaagatgggcccgacggtgatcaggtcgctgacgttccacacgacaaggaagagccacggaccgttcgggggggacgagcagcacggcaccttcttctccagctgcctggccgacgggaggatagtagggttccacggcagggcgggatggtacatcgacagcgtcggggttcacgttctggaagggaaggtgctgtcgcagcagagagacgacgagacgcgttgttcactagcactagcagcgagggaaagggaagccggagacgaggtggtgagcagcagcagcaagcagcagcagctctggaggaggactgctgcaggcgccggctactactactactacatacggcgtggtgaaagagccggtcccgataggccccggaccgtggggcggggacggcggcaagccgtgggacgacggcgtgtacaccggcgtcaggcagatgtacatcacgaggaccgacgac

SEQ ID NO: 168801 - DNA, 368 bp, Zea Mays
tgttgaagctggacaaactatggttgagggtgatagtggtaacgagagcgaggaggactacaacattctaaacccgacaaagcctagtcatcttgaatttgaaaaatctactgtatcggaagatgacatgactatgatgaaaaaactgggctatttcagagagtctaagagcaagcttgttcgatttgctggggaagagataattccagagccgagggatgatgaagttatcgtctttaagagcttcttcagagcagggcttcgattcccgctaaatgacatgataggggaggttctaaagaattttgaaatataccttcatcagctgacccccaatgccattgttagacttagtgtgtacatatggg

SEQ ID NO: 168802 - DNA, 1991 bp, Zea Mays
tgtacactaatatatcgtcgaaaaatacaaggacacacttgcgtaacaagggttgcaaggttttgttcatagctccttggaaggtggcgggtgcgcctgtgagtccgaatgccatcacacgaaattcaaagtgaccatgatgggtctggaatgctgttttatattgatcctgaggtgccatgcgtatttggtggaagccagctcggaggtccagagtagaaaaccacgcagcaccgtgtaattcatccaaaaactcgtcgatgacaggaacaggaaattttgttttggcagtcaaggcgttgagatgtcgataatccacacagaaacggtatgtattatctttcttgcgcaccaaaattactgaagaagcaaacagactcttactgtgttgaatgatatctgattctagcatctcagtgacttgtttctcaatctctgtcttgagggctggagcgtaccgataaggacgcatttgcacgggacgagcatctggaactagaggaatgtggtgatcacaatctcttgcgggcggaaggcctttaggtaattcaaacactgaagagtactggtccaataatgcttgtaagccggctggaagtgattggatcatgtcttgttcctttgttgagaagtcactgagactgcacagttggataaacgagccttgactgtctgatgtcttcaccccatagagcttgatgtaagaatttcccaccggaatagagacccacttgtccagccaatgcaccatcattgggctatttgttgccaaccaatccatgccaagcactacgtcgtactgagttaaatccaatacccggaatgtagcggtgaactggtaaccttgaagggaccacactgtgtcaaccaatgcagattcacaagtcatttgggcgccatttgccacacggaccagcaatggttgtggcaaggaagtaagattggaacattgatttgcaatggtggagctaataaatgaaattgagctgccggaatcaagcaggatgagcaccgagagaccacaaacttcgcccacaaaacgcattgttttcatttgaggcacctgagcaattgctgaatacgataactgaaagctgttgagctgaatgtcctcgagcttttcagaaagggcctcttcagacggttctggaaattgatcccaaagttcttccacgaggtgcagctggactgaatctgggcattgatgaccgcgggtataaggtgacccacacttgtagcataacccttgagccttccgatacacatagactgaagcaagacgatcaccactcccaggtggctgaacagagtgcagagacttgtgttcttgtggccgaacaggagttgtagcaccagccttgggtggagaaggtagaggtaggggacctctattgtaagaccttcccagtggtatataatccatcttcttatactccggcttcttggctgtggcgccgatttcctcctgcaattgcgcaagaacgtaggcagtatccaaatccttgtgtcgctgaatcatgaccatagatttaatgtcaaaacgaagaccatctagaaacctcatggtgtaatacagggggtctgacatggtttgataactatttaactgatcgaccagctgggcaaattgatccacatactcaactactgttccctgttgcttgatatgaaatagctggcgaactaatagagcgtgttgatccttcccaaaacgttctctcaacatgtggacaaagtcgacccacgaagcagtgctcaactggtgctctacagattgccaccagcgagcagctgctccagagaaatgcatggtggctaccttaatccaaactgaggaactcactgcatacataacaaaataatcctcacaacggcgctgccagagcttagggttttcgccgtcgaaacatgggaagttcaatctaggcagtttacccaaatcagaatgcagtggtgactcatgagctacatgttcagagctatcatgccat

SEQ ID NO: 168803 - DNA, 364 bp, Zea Mays
ctcggggcaaaaatccccaaggcacagagacaagccgtgcaggacggcgggttggtttctcagaagcctagggtttctttagcaaaatgcctggccgaagggttattgaccaatcttggccgatggattagaaacgggtggctcagattagatctaggcatcaagtgactcggtgcacgccctagccactggatcaagatcgcgcggtcgagaataagcccaaccgaaccggtacgtggaagctaatcagagccgttcatccccaatccaagggcgccagttcatcttcttccactcgctactcccaccaggtggaccacacgccgagcagcaccatggacagagccgagttcgccgtactagc

SEQ ID NO: 168804 - DNA, 1313 bp, Zea Mays
ctcaactcattttggagtgtagttggaaaccagcgccaagttgagatatactgaaagaatactagcagccacatagtctgatacgccactccactcatgtaacattggctctgaatattcctagctacatgtttactcatattgcagctgccaacaactttgcacaagttgcatggatcaaatgcccaccaaggaagctttggcatgatggagccggccgcgaccagagatttaatccataataccaaagctgcatgccagtaaaaagatggccacggtagaggtctgacttgaacgccgttagcaggtatcaccaactgcatgggtggcggccatggttgccggtgcagcactgcatcccagccacaactaaatggatgcaagcaagaactctgtatgagactgaagcaattcctcaagcacctattggttaaggtgttgagaaccatgtccttaatctgaaggtcaatatgatgttggacgagccatgctgccacgtcttctccatcacaaacaacatcatattggagtgtccagtgcccttcaatgtgcttagcattcagaactgtatttgtttctgcaagaacctcagcagcattaagatcacatactgaaacatgcatcccaccaagttctgaatcaattcctatgcaacttgtgcaaagttgttggcagctgcaatatgagtaaacatgtagctgggaatattcagagccaatgttacatgagtggagtggcgtatcagactatgtggctgctagtattctttcagtatatctcaacttggcgctggtttccaactacactccaaaatgagttgaggatcatcaactgggcctgggaaaatgattgtgttttcaactggtctgcattccagataggaactagctccttgagcttgaacgcggacggctcggtgacaaacttgtagaagctgtagagacgcagttgtgcttcctcggggatgctgatactggaggccgcgacgaaggcggatgcagcgttgaactcccgctcgtccagaaagttgaagtcgcggcggtggaagttcacgaacctctgcatcgccatgtaggactcgaagacgaaatcggcgtcgccaatgtgccggagcgggatgcccaggtgcacgacggtggccgcggcgcccagaccccacaactgcattgatctcagcattgacttggagaagcagcagattgacttcacagcgtgccacagtgtggtgttgaagtgggcctggttgaggtcggagaggtggagccgtgcctctagggggcgctcggcacgatgctcagcagtgagggaggtgg

SEQ ID NO: 168805 - DNA, 388 bp, Zea Mays
gaaaaaggtcgtagtagctgaagcgtgtgccgttttttcagattgctttggaccatccagaactcggagagcgaaaagctaagcttcgttcaggcgcacctcttgcgtcgacctctgctgctctgtagccagccgttatagccgacagctgaattgcaactcatacccctacgactgatgactcgaccagtaagtaataaacaatcgatctatggacagcaggaaatttcagacagtatcccggccctcctcgctgcactggatacctggcaaccttaggaattaagcatcaactaaccatgtcaccgtgatcttgcaagatgaacatcagttgtgctgctcaagtaacagtgctctgacacggacccatcagcgccacagaacacca

SEQ ID NO: 168806 - DNA, 350 bp, Zea Mays
tcaaaacctttatatcttctattattaccataaacagaaatgtggggcaatggataggctactatgatctaagcagcaggcagtgaattcgatttgtgttgcctgtgtatttcttttttcccagccatacctaatttttgttttgtcctccgctactgtagacatgggacaaaatacacaatcattgggtaagcggagagtttggaaacaatcatccaaactcgattacccatggataatattcacccggtaaaattagttgtgcagcctaataggcaatgagcccaacaactaacccaacctcttctaacccttttaagcactcatccacccaacctagttggtcaacc

SEQ ID NO: 168807 - DNA, 661 bp, Zea Mays
cagaactagagtagaggaagagtcaaccatgtgacagcagaatcagttcctgaggatgccgacgtggtgtatggtatgtttcttattaactccatacctgcaatagttttatttgattctggagcatctcattcctttgtaacaaagtcattcatggaaaaacataatataccaaactatccttgaagaagaaactattaatctgatcaccaggaggtgaacttagagctactcactcatgcccttggactaagattgaaattagaggcctaagttttctaatagagctgataattttggaatcaagtggaatcaatgtaatacttggaatagactacttgaccaagtatgatggagtgatatcttgtgccaagaggatggttacattaaccagtccacaaggagaaagaattgaagtcaatgtcagtatgccaataacagtagagacaatggtaaatcagttggaagagaaatctttgtagcacattaggatagtgtgcgaatacccagacgtatttccggaggaattaccaggtatgccacctgatcgtgatatagagttttctattgaactattacccgaaaccgcacccatttcgaaaagagcttaccgagtggatgtcaaagatttaattgaactgaagaaacaattagaagaatt

SEQ ID NO: 168808 - DNA, 446 bp, Zea Mays
ataaaatagattagaccctactagccagatgttaacctaacttaacacattagaccaacttaaccatgagcagaagacccatcccaaccatagagtcatgatggattgcataatctgcctatctccatctagcgtcaaacaaacttttgatctacatcatgtactctacctcacccataactatcttaaccatatttcccaactccgatgatatacattaactttgaattaatgagaccaggaaggaaagatcaacatcaacaaggaaggatataacagtcaaagcgaatctcgagatgaatcaagacttaaacttttcggatcaagtcttttccttgccataatcttacttacccctatttattcttgccctaacctatccatctctttttccacataataagtagctggatacatatgctctcctaatcacccactatgcccac

SEQ ID NO: 168809 - DNA, 1318 bp, Zea Mays
aacgccttgttatataatagtgtgttgattgtcacaacttttaatgcgtagggtatgcttagtgttccaagcagcgaccaataagtagtctacattattttgtattgtatatatatataaatttgctggcgtaagtatgcacgaagagtgtgccattgaacatgtgtgctggagtatgttacatcaagtgttgcgttaggtggatggcagtgttccgaatacatgccgcaatatggttgtattcgtgacaaggaggtgtaggttttactcgactagaagttcggtcgatgtggctagggattgctttggcttgtgtggtgaggtgatgacatgtcataattagtcatcacttcctctatgattataagttgagtcaatgcgcattatgtgttcgttaaattatgcttcgcatttagtgtatggttgtgctcacgatttcgagtagacacatcgagtggtcaagtaagctcgtaattcaagttgtgtaatggagttagtttgttttaggataattattgaattgctctgttcatatgataaacatgtatgtgttcacgaattgggaagtaagtacataatggttgtgagttggagattagtggtttacgattcgtatgaattggtcgatgtgcgaatatacgtgtgaatatgtatgtttatagaaatgttgtagaattgatgctcgacatgttagatctcctaaaatatgctgttttatgtgacttgtgtgttatccaatttaagttgaggatggttaagaaaagctaattaatctgctcccactcatgttttgagtcgcaatgtctaaaatggtttgctaagttttatactgtgttagccaactcctgttaaataggagtcaattgcgttaagtgattgttatatatatgttgtgtctcggatcgcaataataataggttagccgacttgttagatggctttggttaagctcgtaatcacgatgatttgcttgatgtggtctaaatgcgaatagttatggtcgcggatgaaaagtagtagtgctcatgtgatgtctaagttaaaatgcaaattattgagtgaagagcgcattgatatacatatataccgggtctgattattgtggtggatgcgtttgttaaatgtgtgtggtaattctagtgcacggaatgacttggataaaatttgtaagtcgacttgttggccctcattgattattttaactctaacaaatggtaaagtgttagagtaatttcagtctctagagcatgacaattctggaaataaataggagctgaaatttattagttgctgttttgggctacacacactgttttgg

SEQ ID NO: 168810 - DNA, 379 bp, Zea Mays
gcccccgctcccgtcactaccgcgcccctcgaccacagccgggtacgccatgcccccgctcccgtcactaccgcgcccctcaaccctcccctccactcaccgcgacatcgccccattctcctgtgatcaccgccgagcaaacccgaccgtggtcctcctcctcgcctgccccttccatcagctcgagcgctcgctcccgtatttttctctccccgacatcgtgccctctgcgctcgcctcctgctacctttctctcctcgacaccgtgccagccgcgctcgcctccccaacaatcccctccatctcgcctcccactcctgtccttcccctttctctacccgacactgtggtcgtcgcgctgacctcccacacaatcccc

SEQ ID NO: 168811 - DNA, 553 bp, Zea Mays
cccccacctccgtcgcccagtccggcagccaaggtcgacacgaacccacctcccatcgacgcttacccgtccacggcaggcaagccaatgacgtcataccctacggtgggccccaacacatcagtgatctacgttgcaccttcgccacagtatggcggatacgggtactcgcaccatcagatcaccgggtatggctacccaaccctaaacctttttggcgacatgatctcggatttgtcagcatacgacgccaggttcaacattggaggtggcttccatttctagagtgctctgttgggtggtgacgtgacgccacacattagagatggagaggtccttcattctggatttgctttttttccttctatacgagatctatctaactgtcgggaccaaatcaaaattatgcattacacccacatatgtgacatactatatgaattgcacgcatatttattttgttcagatctatgccagctgctttagaagtatactgtatgaactgcacgtggttttcttctcttcagatttgtgccagctttcgaagttttgt

SEQ ID NO: 168812 - DNA, 403 bp, Zea Mays
tccaacggaaaggagaggggcagagctacctactcgttggactatatacggggaacaagcctctcatagaacccagcaaacttagcatcgaggcactggaactagcaagcatgacagtagcgagtacttcacacaagcacgggagatatgtgctccgcctggtaagacctccaatcagcaacaaagattttaagatcaaattgtacgtaggggacttcctgaaccaatgtaaaaaccatctcaagccgctatcctacgaattcgatacctccatctcctttgactcctctgcttgtcctagcagcatggcaggcacacgaattttgccccttgtagcttcatcatcagtaacgtcaaagtcgggcatgccctgttcaatggtggggctagcctcaacctcctc

SEQ ID NO: 168813 - DNA, 497 bp, Zea Mays
gataacccgaggaactccacgttagctcttacggtgtcctcagaccagtaatgtggcggacttagcacgacccctttatgccagtgcaacacagaggcctccaaccagctacgtggatggccggagcgtccggtggcttgctacggcggcggtgaatgaaacacggtgagcacacgtggtgtccgtggctagagcggtaactcagtcaacaaatccgagccagagatccttttaccccttcgttgatccacgtctcggcggcaccaatcgtggcgcgagctcgaatcacggtggagagacgtcagcggcgggcacacggaactcaatcttgttcagttcactgtaccatggcgatgttcattcagcgcgcctaacagagtgatttgaggagttcctttctcaaatttttatttgacaacttgtttatctgactacatcaaagttgttgtccgtcatgccagcttcaatatttttataaggttcttgctcatacctcc

SEQ ID NO: 168814 - DNA, 759 bp, Zea Mays
gtcgaatccgcctgtgactgacagcaatttgggccttagagtgcgaccctctgctgaagaagtcagtactttggtcgcttcgctcggggcaattcctgatgatgaactgcaggtttattttgaagtgcctctgaaccctagtgatgtcgacataaatgatatgcttgatctgttagctgaggattcatccgatgctgctcctgatggtacgttggcagtggtgccccttctagaggttgatacaactttgaatgtcccgaaacctatcagcactcgcccgaggcgccctagccgaaccagtcagcccgagccttctgctgatgagcaaaagaaaaagagaagacgcctccggcgagtatccagttttgatgaggacgccggtaccttagctcctgctgctgaagaagtgcctgcaactggtcttactgacactgaacccaatgggtgtgcccaaactgttgctgatcccaatgggagtgctgcttgcgttgccgctgtggaggatgaagaggaagaagatgaggctcccttaactcggaaaaacagtcggcagttcatcgccagcggtggaagtagtggagttccttctcctgctttgtctgcccttattggtctgcaagaactgtccatggccaactttgatcaaactctagaggatatggtcccagaggatttgctatcagagcctgcggatgtagatgcaacagagatttgtgctgccatgcctgatgctgggttgaggtcatcccgtgcctcgtc

SEQ ID NO: 168815 - DNA, 986 bp, Zea Mays
  misc_feature (969)..(986): n is a, c, g, or t
actaccccgagcatctcccccaaatcaattgcaaggatggctactaggtttgctctggccgcagtgaccgtggactttgcgggcagatgaatgtgttcccgtcgattcatggcagttaagttaattggatggtttggagagcatcaagggcacatgagaatgttagaacaagactgaggatgacagtatcggacctgatttgcgctggccgcggcgaggctcgtttcacggtggcggagaacgaagttgggggaaattggaaattcaagctcgctggtagatgattgaggctgattagcggtggctagttagctgacgacctcacggagctagtcacgggctcaatttataggcggagtgagcggtggcgcttgaatcgacgatggcgcggtggcggccggagatgaggaagaagcctggcgcggtgaatacgtgtcctatagcgtggcagtaactccggtgagccacggagagcgagggtaaagcgcggtggtgcggtggaaagcgagagccacgcggtgcatggccgggagacggcggtcgccggtgtgtttatccgctcagccgcaaagaaggagagagagccacggtgatgtcaccggagtgacctccaactcaccgtcggcgaggggctcctaccgcacgatgttatccacacgcccagagcacgaatccaacagcggtggcatgaatcacggcggaaagccactggcggtgagatcttttctatggcggccgatctgatccggttagggcactgtaccatcgtgagctcccatcagagcacctaacagcccatatttagggtcgattttctccaatttttgtatggtgactaaaccaaccgtctgtaacaaagttgttgtccattataccatcttcatctttgttacagtttccatgggcaaattcttactagattagtcataaactgttccaaagatgacgaatctctagaatcgccttttnnnnnnnnnnnnnnnnnn

SEQ ID NO: 168816 - DNA, 632 bp, Zea Mays
cggttcagagtcccatcagagctaacagttcgacaaccaagactgtcgagaattctgcaactctatcggcacgaaggcagtgttcgcttctgtctaccatccgcaatccaatggaatagttgaatgcgccaacgacaaaattttcagtgccatcaagaaaaggctactcgatgacaagaatggcaaatgggcagaccaacttcccgaagtcatatgagcactgaacacaacagaattcagagcgaccgggttcacacctttcctcttgatgtacggatccgaagcaatgacgccacaagagttgaagcatggatctccacgagcgagctccacaaccaatcctgatgtcgacgagtcaacctccaaggaccttatcgatggagactgtgttcttgccctagaggcactgaataaataccaagcgcagatgaaggcatggcacgacaacactatcatccccaaagaattcgagggaggagacctagtcctcaccagaaccaccagaacggagtcccggggcaagctcgaacccaaatgggaagggcccttcatcatcaagacaaaaacatcccccaacacctataggctcgcttcaccatccggcgaagacctagagcactcatggaatgtgg

SEQ ID NO: 168817 - DNA, 475 bp, Zea Mays
atcatcaatcggaggcgtgagtggatggcaatggtggcgggttggatccgttcatcctgcgcgaatgacggctcgacgaaatctcccttttgggtagcaccgaggggagggctgctgagccagatcttaaacccgtggtcagcgctaacaaccccgcattacccgcgcgggtcgttgagctggcccggccggctcgctgcggacggttacgcgagggagaagaaggaagaggaacaaagcagcgcgcgagcggtgaatggcaggtgggcccatgtgtcggtgttagctgcaccattgtgcaccgccagcgtggggtgagcgactgacccgctggccccacgggtcagcgaaccggttagcgggtgcgcgcatgcgctaggggccgcgcgattgaagtggggagtgggccgaattagatcccgcggcccaggtaggctttttatccctttttcttttcttttgctgttatttcctt

SEQ ID NO: 168818 - DNA, 951 bp, Zea Mays
gagaaaaactgactaccttgacattcccctcaaggatagtattaagggatggcgtttggagtggtttatcgtggagaatcatgggaattccctccccccacggtcagggagacagccggatgttcgtactccgagttggaccgagtcccctacagaccaggaggtgaccgaggcaggggctctgctagctgaagttggactgttgaaggagagaggtctgactgcagaagctgtggttgctgattttgtcttcaagaatattcagccactgaaggacagggcatacccggcctatctgtatcgaggtctagctgactctacccgggtcaccaacaaaagaattcctgctgtggatttggtgagccggctcgaaatgatacttagaggcaaggtatcgaatgttggtgccccagttgcgtactcggcctggagcctgcctccttcccagccctttgcccattttgtgtcaaatcctcctgttggtgaaggcggtttgggccttagagtacgaccctctgccgaagaagttagtgctctggttgcctcacttgaaggaattcctgatgatgaatggcaagtccacttcgaggtgcccttggatcccagtgatgcagagataggtgctatgcttgatatgctggccgaggactcttctgatgtcgctcctgctggagcattagtagtggcgcctctcctagaagctagtaaggcctcggatattcagaggcttgacagtgctcgcccgaaacgcccttgccgagccaaacaacctacttctcctgctgatgagcggaaaaagaagaagagacgtcttcgccgggtgtctagcttggatcgggatgctggttcttctgctcctactactgatgaagtgcccatgactgaatttgctgaagctgatcccaatgggggtgacccgtctgacgttgttcccaataggtgtgctgtccg

SEQ ID NO: 168819 - DNA, 664 bp, Zea Mays
cgcctaacgcctacagttcgcggtgccgtttacgggagaccaccttctaggcccgtactcttaaggtgtatggaatgcacggaaattcccaaagcgctgctaacttatctcggtccttatgtagcaagggcttgcctcctccagggtcggttgccaccctcaatggtgggccgctcactccatccacctctctcatatcaccatcgctcacaggggatgtctcagtcatcccctaattcttttacactcacacatgcttgcccctgccggtaacccatctctcatcactgttcccgctcatccccaacccactccaactcacgccaagaatccacgacaatcccatccatcacacccacacgccatacacacacaccaagtcgcatgaatagtataagtatgggataataacatgatatcaagtaggagcaatgatatcaacaaaggcttatcaatcaaacagcatggatatcataaggtgagacatccatgaaggctaggaatgagatcctgggtttttaggggtctcactcccagtagtcgttcggaactttggcctagcactactgcaatataagcgtgtctataggatatgcgaggatgttaggtgacctattgtagcgaagtcctcctcgggctcggggacatactctgggtcgtcgac

SEQ ID NO: 168820 - DNA, 593 bp, Zea Mays
aaaggccttaaggggacactgttggtcccggaccacgtcttggatagcccttggccttatggaggtctggaacctctaaagctaccaaagctctaggaagagggggaaaaggaacccgataactacagttggaggtgttcacattaggaacattttggtaagggttcggccctataaacccggtctgatcataaatcgctcataatccaatgaggtcacttatgtaaacccggtccctggtgccctctgtggtccaacccagtaagagtctatcttataatcctagacattctcgggatctctatgcctcgagcatccggaaaaaagaggaagggttttgctcccaatctagctctaggtgcacatgatccattatcacatcctcggccaaggtacatttttctctttctacctccctcttgagtttcttagctccgttgttatcatgaaatctggattatgtgaccaactttgctacttagtttatatccccacttcatactgaacaagggcacatgttgactgatacctggtctaaaggaaaagtctacattctcgcgggtggtcaggagctaggtagtcgcttagcctag

SEQ ID NO: 168821 - DNA, 488 bp, Zea Mays
cacatcataagtacattcaaccccattagtagagcaccagcacatttccgaaaatttcccgagactacgacgacaaggcatcgatcttaccacacacataaagcaccacaagcatatttacggaacctatcggttaacttgatcgacaccatacgcatgttctttgtccttcaaaatttatcgcacaacaggaatcatctcacttgctaatgacaccaacaatacctactgatctattatttacaacacgaacacagttacacgccacatactagtttctaacataatcctcacataactcgtaattcaactactcactaacaataaatcacgcacgatagctaccacattaaccggttaatttatttggaacaccgcccgcctagcgtaccattagtatatgaactccgacactcatatcttaacaatacatcctccacgcaaactagcattttctaaactactcgacacatcaataaatatgcccc

SEQ ID NO: 168822 - DNA, 905 bp, Zea Mays
tatgctgatgccaccaagataggacattgaagtcctcatgaaactcagtgatagtgtcactgtctaagtaggaagctagctcagatgttgatgtaacagtcttagtcaattcatcgaagtcattccagcacttggaccttttcttcatcttggtaccactagcatcaggatcagcctgactaggatcagggactgggtgggcttgtggatccagtgccagtaccaatttgagagctgacgacattatcaacttcaataggatccccatgggtgtcatcgaaccccagaaagtacctagcatcctgcgcctcattgtgatcctcaagccgacgctcctcctcctctacagccgcatcaaggtccatgaccccgacttcgaccacgagcccgaggagctaaaccagctagacctgtgaactgtcgcctccggttcctcaatgactgcaatgtaccaaaactgaaattaaactaaattctacaaataggctacattaaccagagaggagtaaacattaaagacatacctttaaaagtcggagaactagagacgacaagtcgacaacaaagaggctaaattctaggtgctactgtgctagcttgtgaggagtctgggactgggagacagccaaatgggaataggaattaggagggggagtgaggaggttaggactcaggaggatgatgagttatcagtatagatgtccaaacaagcgacggtgaggaggccacaacagtgaaccatcacccatcagtgaatcacactgacaccgacgtacagcaagagaacaggcatagcacaaccacagccactgagccaccagcaagcgaacagcaacagcaagcgaacagcgaccagcaagcgaacaacgaccaaggaggcagttacacaggtactgcaccaaatc

SEQ ID NO: 168823 - DNA, 513 bp, Zea Mays
taagcgtgagcatgtcgcaccgacttaaggtgtttccgacttaagccggttgctccgttagtagggcataatgaacactctaagtcatgtcatgccgatttcgagtcgagcccaatctaagtcggtggaggaccaggtctccaactgcaaaggatcggtgccgcatagctttgtcatggtagcgcctcaaagtctgttggtatctggccgactgaattactgtgtttagttgttcctcctccagcacatcaatgtcctctagcctggttgcctctgcttcagttatgctttcaaaggtcagcctaggcgcccaaagatcagatcggcaagcagcactgcctccgacccatacaccatgaagaacggggtatttccatgcagagctcggctaggctgggttcgtaggctccagaccacgtatggcagttccctgatccacttccctgcaagcttctcactcttatcgaataccttttttctgagtgcttccagtatcattccgttggctctttc

SEQ ID NO: 168824 - DNA, 313 bp, Zea Mays
caagatataatattcaggttcgggataccgaatagcatcataactgccctaggatccaacttcaccagttcagaattcttcgatttctgcgagcaaaagagcattcagatcaaatatgcctcggtggcacatccaagagccaacgggcaagtagaaagagccaacgagatgatattagaagcactcagaaagaaagtcttcgacaagaatgagaagttcgcaggaaagtggatcagagaattgccatatgtagtttggagcctgagaactcaacccagccgagctctgcatgaaatacccccttctttatggt

SEQ ID NO: 168825 - DNA, 2107 bp, Zea Mays
gctatgacagaaaaaaatgcaagctgatctgcataagtggcatgtcatgcatgttaatatccgaagaagaatatcaagtgctgtaacaaaaggaaactaagctactcacgtgccgagctggtcctgttcctccattatatcccttgtgaccacctcaagcatatcttggaacaaaatgactacctgacccaagtcttcctccttgtttttttgctgcactcaagaaatcgacaaagttatgaggtatccaccatgaacatgacctaaaaggctaaaacaacgatgacacgatttataccagtaattcaagtaattcaacaaacttcttgctcagtgcaggaaggttcctcatattgagatcctttatcagagtttcatcttctatatgctgatccacaactgcgaaaatctgtgctaggacactgaaataggcatcacatggttattcagaaggaaatccaagcggctcaaatggacttagtcaaacagatgttacacaccaagggttaaatacccattcaaaatgaactcagtttatattatcttcatgctttcacactaaaatgcatcacttatgttttgagcccttgatttggggtggtgtgttcagagtagaattggtactattttaggtttagtgtgcctgtgccatattgcttcaattccagagacgacaaacaaccacgtgaccggggcccatatttccctaataaataacaatcttgggaagagaagacatactctttctcccgctgaccaaacactaaagtattgatgatgttcttgaatgaagcatagcattctctgatagcaaaggaaaagtatggatctgattttatcctcttcgtcagatcacggtcttttccgccactgtctgctgccatatccagtgctattgggatctacaatccagcagataaacaataaactgctgaatccacaaatatagtaagtagaaaaaatacagaaagagcaagatgagcaaccttgctagcaagtaagaaaggtggccattgaaatatatcgagctcacggtctttacagtatggaaccagtagcagatccatctccctattgtctatgaggtcttcttcacggaaacttgtaataatgacattccacatttgagcaaaccttgcagctcttttctctttctgtctttcgtcaccagaagcctaaaaaactgtgtcagatcaaatagatagatactcaattgaactgccattgatctactcataacgcccaaccttacaatataaacaaataccttgggtctacttgaaaaggcagcacgaagacctttactcttatttgcatcagaaggaatcaagcgttcattgaaggcctcgggcaaagattcaaagcgagatctcaacattcctaatgtccgtatctgatattatggaaccacaaaaggagtctaatgtgagtcccatcgatcatgataaattatgctccacaacactaggaaaatatataataaagtaaagaggcgacataaaacaggcagaattgggtaaataaaatggtataaaaaataaaaacacttttattgatgctaccattatggaaaaaactataaacagttgcttcaaaatgggaagggtgaaacacaatcctaggactaattttctgattgctactagacacaatgcaatttattggacaaggaaactgtttcaaaggctaaagaaagacgcattaaaaatacacaagatactatttttttaccaacctcaccaagacgacgataagccccatagataccaccaattaatgtcgagaacagtgcataccaaatttgggtgtccatgaaatatacctgtattttaactaattaaacttgtactaagaaaaagttttccttatgagaaacaagatggatcaagacatactagaattattggagcccacagtgatataacaacaccaatattgttagttcctgcaaattaaacctaaataagaagccaaaaaagttatcaaaatgtaaaatatggatttcatgacaaataccatgagggaaaaattcgtgccactggaaagtcctgataggttccctcattatatctatggttggctgtaccagaggtttgatctgcaacag

SEQ ID NO: 168826 - DNA, 306 bp, Zea Mays
ggtcagttctaatttctgcagcactaatgctgattagcgtgatttgctgtcacatcacatatctgaaactttcagaatgaacccgctattctttttatttatgctcgtctaaactaaacacagtgtgtaaatttacaaacagaaatgtttaccgctggtgcagaaaaggtctgatgcagagcactggttgtggctgatgatgtttgtagtagctggttcagtcttctggacatgatgcttggattgctctgactgtagtctgtctgaggtttccctcccggatgatcctgaataagctctgatcat

SEQ ID NO: 168827 - DNA, 413 bp, Zea Mays
agcagatccaaattctccaaagaatgcaaggttgattatgtgaacaacaacatctcataatgcttcaacaattggattaaagattacaaagaccttccggttgctgaattgatggataagattagggagaagatcacggagaagctttacacaaggcaggagatatccaacagaatggaagggcgtatcctagcaagtgtgttgcatgagttgaacatgaagagccgagggctgcagtatggaatcatgaggactggtgcaatgtctgctgagatatctggaataacaaaagaaggtaagaattggagagttcctgttgacattgagaaaagaacttgtggttgtggacaatggcagatttctggaaaaccatgcactcatgcaatagctctattttgtcagcttaaaaaact

SEQ ID NO: 168828 - DNA, 451 bp, Zea Mays
cccactcatctccctgacgcatctttccatgagcatccctttgatcccaacctctatactgcgccctggtattctgatctggaccttctcagtgttcgcggtaaaggcattcatctcttggtcttctctgaaggttccctctaccttctaccatctctttcatctgtaggaccagcatcccatctgccatcccgagcatcacggctatacatcttcttgtctttagcacctccacagaagaccagtcgtcggtcgtcttagcctcgatctccaaactgccggatctcgtccatcctcgtcgggtcccaaacctagcggccagaacccgaagccagtgagatgattggggtagcaccgtagcaggggaggacgaggacgagaaaaggtccacaatgttgcgcccgaattgtgccttctggctgggccttttgtttactcggcccaaaacttc

SEQ ID NO: 168829 - DNA, 650 bp, Zea Mays
ctcgtttatgcaactttcaaaggatatgctgccgaaattttatactagtttgttggaagtgtaactttagtaacacctcggggtgtttgtggaccttgggttgttacagttggtatcaaaggtaggttgtatattctagcaagaaaatggtgataaattgacacactacacatatatgatgggttgcttgctttcatatttctatgacatgaattgtcagttctcatttgtttttacttgaagttgatgttgtgctattttattttctcctgtggctgcagctatgccgcctagaagggctcgtggcagcccgcaagaaaataatgcggattctatttgtccgacaacaatgttagccgcgatgtaggccatgcagcaggagttgacaattctgaggcaagccatttcaattgcttttgctggccctgcttcggctgctggtgctcaaggtggtggtattagaggtgttcccgggggagttgtccctgcgggtgctgctccaggttgtgaggctgaggcgcttcttctagttagtggcctttctctgatgcagtggatggacatgaagttggatacttttgatggcagtggtactccggttgaggcggcagattggctgacttatgtggaggataagatggatgtctttg

SEQ ID NO: 168830 - DNA, 517 bp, Zea Mays
cgtcatcgtcaccctcgccgctgttgtcgtcacactcctcggagtcatctgatccctcgagccctgcgcgctcgatggaccggatgtaggcccgcttcgccaccgatatccccatggagtcgtccgagtcattgaacgatgccgcaggggatgtcgaggccggcgagccatcgtaccccgaggagaattcctcctcggagaatttcgagtccccaaaatcctcagatggggggctcggatggcgcttgcgtttccccttcgatgagcgaagcttccccttgcctcctttgccttcggccattgttctcgagggtgaaggggaaaaggagggaaagaagacgagttaacaagtgcaagtgacgaaggcaaccggggtgagtgggctatttaaagaagctagggacgatcgtttgtttcacgcccgttcgcagaacactcgcaagacttcaatagcgcatcaagtctccaagaaatgggtcaggcggctggcgccgttgcacataacacatcaccgaat

SEQ ID NO: 168831 - DNA, 608 bp, Zea Mays
accttcgatcccttttgatctaggtgcaaacgaacaatgccttaagattattctaggacatcctatttcataaaaacaaaaaatcaggattgttccttggaaccttttccagtaaatgttgcacatgcctgaattttgtagatgctgaccatctaccattgtgaagccggtatcattctatttctcaagcagtattagaaacaatgttatcttcttggcactagcgtttttggcatttgaagcccatatgttctgttgctctgcactaatagattgctaggaagatgttcaccttctggccaaaaggttatggaggttttgggtacccagctattgatgtatctgtatataagttcattaatcaccaccaatctttttgatagttgaacaccttttctctgttttattatagaaaatgatagttgaaactgctaacttgatgtccgatgtttacaaagaaaactgaacgttgcttccggaaactagcacagaaaagtaccagtcacggaaacaccaccaaaatagtgaatcaagttggcggtagcaacagtgaactgatccatctatccaagtgagtgacaccttgttcgtcggtacgtgaaggccag

SEQ ID NO: 168832 - DNA, 898 bp, Zea Mays
gccagctgtgacaacctgacgagggtgtggtgtctgaggcgtggcctatggtgactgctaaacagggtgttggtatgattgttgcactcctcctaaatgagctggggtacccagaggttgagtataacgaggacgactgatgtagcctccctgtccctgagtgatagtctttctcttcatctcgcttagctaaacaggtatgtgttcaagggctatggtcttgtctagcagtttctggaaagatgggaatgagtgagacatcatctcatattggagtggcccgatgagtccctacaagaacaattcttgcttcttttcatcttcatcgacctcctcaggagcatatctagataactggatgaatttgtctctgtactcacttactgacatccctccctgcctgagtgagagaaacttcttcttcttgatcttcattaaaccagcaggaatatggtagtttctgaaattggttgagaattctgcctaagtgatggtgtcaatggcagcatatgctgcgcagtaagcatcccaccaatccacagcgaggccagtgaggcgacccaatgcgtatagtaccttctccctatcagtgtattgggcaatgttaagcaccttctccacgaacttcagctagtcatcatcttgcagcggatctagggagctagaaaaggtgggtggtctatggctcatgaactcgcgatgtttgtctctaggtggtggttggtgtgggtgttgcaggttattgttgagctgggcttgcatgttggccatggtattggacatctattgcagtagctggatttgggcagcaaaaaattcttccaacccagcaggcggagggttttgggggattcatcttcagttctaaattaactactgcccttcttcgcagaatgtg

SEQ ID NO: 168833 - DNA, 430 bp, Zea Mays
ctaaagtcctgtctggcaactcgacaatatcatcaaggttcaagaaaatatgttttggaaatggcggcatttgaactgggacagcgtatggctctatgatagtttgttgggtgaaatacaactccatggtaccatttagatgtcaaaaattaaatgcacccggattaagaccaaaccatacgttgtgcatcttgtagacatgcttttcatggagcaaactgttgaagtatttgactatctcataccgagttgcaatggcctcgatcttggctccctaatttgatttcagcacaaaatagattgtggtacgaatattatatatagttatgtaaatgaaacttaaagaggggttgtcttacattgatatcagacaaaatgtaatgttgcctatcacgataacgtggttcaatcgggaatataacttcaactc

SEQ ID NO: 168834 - DNA, 294 bp, Zea Mays
caaacactttctgaaagtcgggcaattgtaagagtggagcatgggttaacttatctttcaaagtgttgaacgcctcttcttgtgggggtcccaagcaaaagacacacctttctttgtgagttcgtgcaaaggggcagcgatggagctaaaatcacgcacaaaacggcggtaaaatcctgcaagtccaagaaaactccgaatttgcgtgaccgtcattggtgtaggccagtcctgaatggcttcaaccttgctgctatccacctcaatgccctgcggagtaaaaacataaccaag

SEQ ID NO: 168835 - DNA, 910 bp, Zea Mays
cttaagccgttgccgacttaagccgattgctccgttagtagggtatagtggtcaccccgagttaagtaagcgtgagcatgtcacaccgtcttaagacgttgccgacttaagccaattgctctgttagtagggtatagtggtcaccctgagttaagtaagcgtgagcatgtcacaccgccttaagtcgttgtcgacttaagccgattgctccgttagtagggtatagtggtcaccctgagttaagtaagcgtgagcatgtcacaccgccttaagacgttgccgacttaagccgattgctccgttagtagggtatagtgatcaccctgagttaagtaagcatgcaggttgacagtaaacaatttgagtgcctttgaagtctttttattgatgatatctttcccagtttacagaatacaatgtcgtcccaatagcttttgaaatatagctaggggtaaaacttcctgagatgttctatgttccatgagttcccaatttctgtgccgtccatttgagtgagacgatatgatacaggccgagtgacttctgctactatgaatggtccttcccatagtggtgataatttgtgtcgtccctcccccgttataattcggcggaggacgaggtctcccactgcgaaggatcgatgtcgtatggtcttgtcatgatagcgcctcagagtttgctaataccggaccgactgaatcaccgtattcaatctttcctcctctagtacatcaacatcctccagtctagtagcctcagcttctgctatttttcaaagattaacctcggtgccccaaacttgagatcagcgggtagcactgcttccgaaccatagaccataaagaaaggagtgtttccatgcaaggcccggctaggttgagttctcaggctccaaacaacatacgac

SEQ ID NO: 168836 - DNA, 336 bp, Zea Mays
gtgtcttgttgactcaccttttcacattatctttcctgaattattggttgctcattgctctacgtatcaaattatctcttagcttatcatgcagttaaaattatgctgttttgatttctgagaaatgctgatgatatcctggagttgatccgaataggtttaaccatggttgccactgtgcacccaacatatgtgatagctgaatgggtttactgtgtttgaacttagaaacagacatttcgtccatctttaggcagcatgaactgcaagcgtggatagaaacatccattctcatacattttcccaatgaatgagatagctttgattctcataacg

SEQ ID NO: 168837 - DNA, 776 bp, Zea Mays
ggcgttcacctggtaaacggcgagctccggtgaggataaactcggccggtcgcgcagcaagtggataggatggccggaccagctagcaattgtaatccatcccgcgctagatctttttacccatccccggtgttatccattcctccccgagcacgaatcggaatgacggtggcatgaatcgcggcggagaggttgtcggcggcgaggaccctgcgctggtggcctgatccatttcagggcactgtaccgtgggacttccttattcagttggactgaccgagcaagtttggcgctaattttcttccgattttcaatggcaaccagtggattggccagtaacaaagttgttgtctgatgatccaacaacaatcttgctatagcaaccatagccaaattcttattagatcaaggttgatttccagttcaaagttgactcagtaccactgttagtctgaatttcatacttcagacagcctgaaagttcaactttgagtgcacttttctccaaattcttcacaacaaccatgcttactctcttaagcaaagttattcacctaagatagatctacatagttgatgtggtgacctagggcaaattctcaataatttggaagatatagagctccaaagttgagccaatatcactgaaaatcagacttaatcatttgagaaaaatgtggctttttgcatataagcccaaaacttagggtttagattgcaaatccaccttcttgtgaaccatagtacttaagatacttatttaacatggtttttgc

SEQ ID NO: 168838 - DNA, 568 bp, Zea Mays
ggccaggttatctgatcacattgacttgagttgtgggtcacttgaaacaggggcagtagctcccaggcacatttttgtcaaggttcatagcaagttgagtccatcactcctaacagcagcgggtacctccaaattttagtgtattcagctacacatttgtacaggctgtctaatgatgcatttaattacttataccttattgctgttatagctttgtatgaaccaaaaccaatacacaaacctatttctttttcttagtttgagctgctacagtttttttttttggcatagaccaagttctctgcccatctgcacattctagcttcagtggacaagggtgaactcttgaattgttaagtaatattctatgtctatggtgtaatatgttatttttctctttctaagttgtatggttcatttaaaatgttacaatatgtgctgcattagttgggtatgcacacaggcttaatgtattttctttttggatgctcctgtcctagctttggctgagttttgtatcactaatattctgctagttatgaaaaactcactgagtaggctggtgcta

SEQ ID NO: 168839 - DNA, 671 bp, Zea Mays
aagcgcaatgtcacagctagagagcacagtgaagcaaaccccgcggtcgcttgtaccaagctttgttgggtcaaaggcaggttcttaaacttgttatcttatcttaggttgttaaacaagaagtaatcaacaagcacgggtcgagatagatgacttcaccaattcaatcatttacagcagcggacataaaatggactctgcctctgtcagcactggaaacacggatacatgcacgaccacctcacgtggtgtcacatgcgcgagcgaagactttgatctttggcgtggtggtggtggtggcatgcatgacggaggtggctttggcttggcctctgaccgctgtgacatggaagtggaaccggatcctcgctaatctgaccgacaatccgaagcccaggccgagtaaacaactgcgagtagtactaagacatacggagtactcctcctaatagatagtatataataatggcttggcctggcctgcactgaattattcagaagcaacctgacgagagggagagccctgcccaaccacaaccactccactcctccccgtgcaaaaagaatccagctcaatgatggaggtttgcccccgcacgagagtgatgatctggacgcaatcaagtgaagattccctcacttaacgcacccctagtaaaatgattagactc

SEQ ID NO: 168840 - DNA, 377 bp, Zea Mays
tctcgataagggaaaggggaacacgcttctgccattgcttggctccccccacccgaatcttttctgcttgttgaatctgaaatttgtgctgggttgagcagcgtccgtccttgcgcttagcgaattcgcggtgtttacgctccgatgcctcacgtaaggctatctctcaggcttcccaaaagctcgggtaggttgaatcgtggagagttccacagcgtcctagccgccgccgtggcctgacctcgccataaccttccattccatggaggtctccaccatcagcttctcgtccccgccgccgcgggccacgccggccgacctcgaggccgtcggcctccgccgcctcagcgacaacctccagcgcctgctcgacccgg

SEQ ID NO: 168841 - DNA, 528 bp, Zea Mays
ggcggtacaataatgccaccccatgcgttgttgaaactgaaacgacaccaccttgatggtcgtggctacgtaagtgcctgatcagtggtatcttgtacatgtaatgctaccatgcacaatcatcgtcgtacgtacgtgcatactatttatacagaaccctctaattttgaaagatcagcagtctctgtcgctcgctaagtccacctagctatggactgtatgtactacatggaagtgggactcgagagtagtagaatgcaagacacagggaaattaggtcaaacacatgcgcttaacccactagctagctatagcctatagggccatctatcgactagccaaggtcaccactcaccaccgtactaattgaccattgcattgcagctgcctctagcgcgcacggttggcttgcatagttgcattggccggtggttcctgtacgctgacgtccggcaggcaacggcgcggcaccagctccactgttacggaccacggcggtagacgtcgaggcactgcaccctgcctgca

SEQ ID NO: 168842 - DNA, 517 bp, Zea Mays
ggacaaccctaggatatgttctacctccccatgtcggttcaggccttcaatcaattgcaccttctatcgatgtcaatgcaagatcagtcgttgtcggttgaacgtgatagatggacacacaaataggattcccacaagttttcatctcaaaaagcatataaatatatcacaaaaggtctgccagcaccacgactttcactatgctctggaaatcagaatgccaacccaaacaaaaggtgttcttttggttatttctgcacaaccgtctcaacacaagggcaatgcttagaagaaaaaatgcagttggattcgtacacatgtgaaaattgtattatacagaaagaagaaaatgtcatccatctcttcttaaggtgcaacttcgcaagaagatgatggtagacaattggagtaactacgctgtcggtaccctgaattaggggtaccctcttctacagtatgaagacgctgcacccgtacgacacctccaggtcacacggagagcggcacccgaccccac

SEQ ID NO: 168843 - DNA, 332 bp, Zea Mays
aaggggtagcagcacttcttaggaggagctcttgcagcttagaagccccaaccaaacaccacacgtgaccctcatcccctacccgagcaaggaccgcttgcatctaaggtcgagctccataaaaattgcatgcattcttgtgcttccatacttcctaggtgatgagtatgactagagaattgaacccttttcgtagttcaatgggggagggaggcgatggccttgcaccaccaggcaccaacccgtcgcaaagaattacccactgggaccatatcaagcctgagcttcctcaagatcaatgcccacactctcatggtgagaacacaagagga

SEQ ID NO: 168844 - DNA, 406 bp, Zea Mays
aaagaaaaaaagagttgtagagagactgcatacgagagtagtgatcatcagctgccaagagctgagggcacacacgtcattcccctcctcctatatccaagcaacccagcagccaaagactagcagtgatcatcagctgccggcgcatctctgcctagaatgacagatgaaaaggggcttgcttttgcttttccggtgacctgttgtgtttctgtgaaacacctgaaagatgcgaggagactactcgtctgctgacatatattctccgaacgcacgcacagcctttttgcttttcagaaaggaatcttggtcgcagtcatccattctctctctcttattgaatattccctctttctccctctcttactcactctccttgaaaatattccctcctcctttccattcc

SEQ ID NO: 168845 - DNA, 1205 bp, Zea Mays
caagtccctgtcgagcaagcccgcgaggcgaaatgggtgatcaagtccctgttgagcaaccccacgaggcagaacggactaccaagtccctaccgagcacctcacgaggcagagcaaacaaccaagtcttgtgtcaatctaaccggcataagggatgggccgacccaatgctgctgccccgcatcagtgggacaagacacatcatcaccgaaccacgtccgggcctcgcgtacggtgacaaaaggtccttgtcgaacgacgacagtacatcatcacaaagtgtgtcgggcgagcccccactgacgtatggggccagtcgaccccagtcatagggatctcagcgtcgaagtcgctatagtgacctgcataccgtaaaggacgcaacagatacatcataccgtgtgtatgtctacgcacgccggcaagtgacacaggcccatgacgacaagtgaagctgcgatacgcgctaccactccatggaactgacccacgggacacaccacaccacgcactactatagagatgccagcgttggactcgctataggagtccgtatgacgaacgagcgagatagtacgccatacgaggagtatggctacgcatgatcctacggaggacccaccacgacaacccagaggagccgatctctctctctctctctctctctctcttgtagaaaacaaatctcctttgtaaggtcccttgagctataaaagggcatgccctacttcttctgaggacacacaagcacacttgttataacatgcccaaagcaatactacgatcagcactatactgcagtagggtgtgaactcgaaccagtataaacctcgtgtcttagatatctcaccgagtcccaatgattcaccattcagatcgaatccgcgctagcaccccccactaaacacaaatcttattgcccctcggtttccgaaaccacgacaggcgcagatagagatgagactagtgatgtggtgcacgtgtatcggatgcggacgtgtatcagatgctgacgtggttggtatgtagtgggttatggatggaagacatttagattggtcccaagacatgctcctataatttttttgccacgatccaggatgtagcctcggcaacatatctcttgattccggccctattagaccgtctgcagcagtgtgtgatagtttaacctaaaacattatttttacactgttctacgttgt

SEQ ID NO: 168846 - DNA, 685 bp, Zea Mays
gccacttctgtccacaatcatgatttggatgagactctatatgtggctcattttattaagggactcaagcaagaactaaaaggaccggttaaatctcatatgtctgcttctgttgaacaagtggcgttattagccaggattcagcaaggtatcttggataaacagcgccacaaacctttcttgactatcagtcaaagccgatttggtagtagtgtgtccaaagctgacagtagaggctcgacttcgttgcccgatttgtctaaagagtgattggtgaaagagtataggaagcaaaatggtttgtgttatacttgtggtgacaaatttgaacccggccatcaagctcgctgtccaaaaagggtatagatgcagttgagtgctcttactgccgaggagttgggtatgaccctatccgagcaaacattgacacatattgagttggaggagaaaggggaagaggagaaatttatgttgtctatgaatgctctcagcggtactacaaacgaagaatgtatggttgtgcgcgcattgttgcagaatcaggtgatgctggtcctagtggactcggggagctccacgagctttattaacaagcagctggtcgatcgactgggactgccagtgcacccttgtgtttcatgtaaagtgagggtagcaaatggagagattatgtatagttacacga

SEQ ID NO: 168847 - DNA, 578 bp, Zea Mays
ctcggtctctacggtggagaagaacaaggcgacgatggctcgatctccgcgttggagacgatgaaggcgacgacggctagaatctctagggtgtggctgctgcagtggagcgaaggcgactcggtctctacggtggagaagaacaaggagacgacgacgataatggctagggttcggccgtagcgtgcgttgcgggtgaggtgagctgaataattgcgtgctcgtgggtggaatcatgggcccgatacacatactctgctggacgaaatctacgtgaaggcccatggaccgacacgtggattactgtttcgtaaacggaaacataagacatcgtaataccaatatttgtgtggggactaatatggctgcccagattgcgggaacacaatcttctcgtgggctcggatacccaaaacatgcacataccataattgtataaactgatacacaaattagcctaacatgtattaatatttgacgtaagtagttaggtacagtaaggcaaaaagtgtccgatgcggtctgcgcacctggtcggtgggtggtcactggtcggggcttccaataattaaacaaag

SEQ ID NO: 168848 - DNA, 964 bp, Zea Mays
acaggacttcactgatccagaactcgcacttgctaagcttggcgtacagccgacaattttgtaacctctgaagtaccttcctcaaatgctcctcatgctcttgctcattctgggaatatataagaatgtcatcaatgaacactactacgaacttgtcgaggtagtccatgaacacactattcatcaagtacatgaagtaagctggtgcattcgtcaaaccgaatgacataaccgtgaactcatacagtccatacttggtgatgaatgttgtcttcggtatatccgagggtcggattctgagctgatggtagcctgacctcagatctatctttgagaacacactggctcctctcaactgatcgaataagtcttcaattctggacaggggtacttgttcttgatagtaacctcattcaaggatctgtagtcaatgcagatcttctttgttccatccttcttctccacaaatagcactgggctgcccaaggcgaggtacttggtctgatgtagcctttctctgacaactcatcaatttgcttcttgagttctaccaattctggtctggacactcgataggctctcttggaaataggggcggtacctggtataagctctatggcaaattcaaccttcctttcaggtggcatacctagtaactcctcgagagacacatctgggaattctgatactacattgatagcctctgatggtttaatctcctcaatacaagcggtgatttggtgacaactctctttccttggtccagacaagaccaactctactaacacttcttctcctgatagggatactaacttcaccgttctcttgtcacagctaagactggcttgatacttggttagccaattcatccctaggatgacatctatagttgtatcctggttacccataactattaggtcagcggggaactctatcccccttatttaaacctttgcattagggc

SEQ ID NO: 168849 - DNA, 582 bp, Zea Mays
cgactttcatgctccttcgccttaaggttttcctcggcaagggcggcgtcactggccttgccctcgagctcttgctgccacttttgcagcctctccacagccttgacctgctaggcccgctgggcttccagagtctggtccagggtagcttggcctggtactctatcgtgagggcctcctgctgggtcacggcttcctccctactggtcacattcttttccctccgagccgcctccagctccctggcacacaccttctagaggtctctcttgtactccttgcggtcccgctcgagttgggactgctcggaggcgaactgtcgggacgccgtcttagtctgttcctccagttgggtgcgccagtcactgaggcactggtgctcagcctcaagcgcctaccactcccgcaagattgctgcctcagtgtcactgaggacctggtgggcacgggacagcatgtgggggagtgggactggcgccgcttcttgctcggcgcccgaccggagccgccgcccaaacaccacctccatctcctccggcgtaggcggggggttggaaccggacgcgcctccggtgtcacccc

SEQ ID NO: 168850 - DNA, 1051 bp, Zea Mays
attcttcacaagggaatgtccacgacgggcagcgacagagaaccgagctccagcgagcctacaccggccgattcacgcaacgaccggtgctctactttggcttagacctaattcaagccctaacaagtgtttcccctcaactaatttcactaacgaatctctagagcgctctgtccatggtgactgtgtgatcaatggacaagccaacatgttcccggtgatctaaggggtcctagcttaattggccgggtcggggagaatcaggggcacacaagtacactgaaacgaaagagcagagggtatgagcggacctgggatgagctagccacgatgaggtttcttttacgctggcgcaaagcagatttgggggaaatttggaattggcgagctctggtaaacaattgagggcacgacttggtggcttggtgcttgacaaccctacggacccgtcggtgtgctcaatttatagtgtgcttgagcggtggagttcaatttggacgaattgcgctagcggttgagaggggaactgagtcactggcgtggtgattcgtggccttcaccgtggtagacccactagtgatgagccaggactacggggcggtttatgatgactcaccacgacgtggtaaagcgttgaggcacatagcctggccggataacgacgaacaccggtgatgccagcgcgactgaccacggcgggacacgacggccggtgagaacagtggccggactttatctccagcgcgatatttcttaccgaggagcgctatctgtgattggtcgggcgtgaatcgcgacgccgacatagatctgggcgcaagatcacctgaggagaggtgggtgaatctgtgatctgtttcagtcactgtacaatggaattcctatatagtgcgcctgacagcccaatttgaagggcctggatctcaattttccatgtggcaacttactaatccaccagtaacaaagttgttgcctgatgatccagctacaatcttgctatagcaaccatagccaaacactcactagatcatggttgaattccagtccaaag

SEQ ID NO: 168851 - DNA, 833 bp, Zea Mays
ccgggcagaagatgcgaggacgggggttgaagagcaaccggcgccacagattggccctggcaaagaccctgcagcggcggctgcgccggctagcgaagacactgcagcgtcggctgctccttcgcaggtggaggggtcgtgttaagggcgttaggtttagggctttattttagtgatactaaaagtcggttgctgtgcaggttccgacgtccggacctgcgcaagcaacccctactgatgatattaattttgtggcggccgcgaatgttgtgccagttagtggaatttgtctggttctaaaactgagtcttggtcatcagacgggggtgagtttgcgagcttgttttcatggactgaggagtcttcggatgagaatttagattattttgctgcgttggatgtggccgcggcggagtccttgccgcagcctgaagtgcgcgaagtctctgctcccccggctgcggcgatgcccgaagagcaccaccggcgaagggtggtgtcgaagcacaatgttggcgagatgtcgcgaagtgggaggcgtcgacggatggggatggaatggtcccgtcttcggctagatcggggtggccaacgagatttgttgtcatcgacgtccgggacgtgtattggaaagggggatctgcggaatctttttaagggcgaagagttgaagatgatgatgtttaatttttgtgaggcaggccttattctgaaggccgagccgatgtagcgagtttgctgccctcgctctcgtgttgcggtagtgagtgaaaacgctgccctcccccggctcacaatagagaaggagggcaacaagatgtgatttgtattat

SEQ ID NO: 168852 - DNA, 477 bp, Zea Mays
gacgctccatctcagtgggcactgaaggcccagcttcggttttagcttgaatcgttgcaacttcgacttctgcctgcttcgtttcaacttcgggttgcaccttggaagcttcggcaatttttcttgaaggagcaggactcaaagtttttgttgtttctaacacgacatctagcacatttgccatccttctcctcttaggagttgcgacagaacccttttgtgccttcggcactgttacctctgttgaagggctcaaaatctctagcatttttgttatttcttcaatttttgacccttcagccttatccttatcagccttcgtctcaactagctcaactgaaggtatctttggcaatatagccggctcttcagtcctttgcacgggaggaacagtttcttttgttttgttagccgaagatgctcctttgctaaattcaggtatcacgaccggttcgatgtaacgcgacctgtgagtaa

SEQ ID NO: 168853 - DNA, 984 bp, Zea Mays
tggtaaagctagataggtttttggtttcgacagagtgggaagagaaatttccctcctgctctgcccatggactgaccagggtggggtctgatcataaccctattattattgactccagggatcaaatccatcccaaaccaagatatttctactttgaaaacaactggtttttgcaacctgggtttgaagaattagtcaaagaaaaatggatcgagaagttaaggaaacgacctgtgggaatctattcaattgaagggtggcatgggagcttaacagcgttgaggatgttccttaaagggtggcataggaggctgcttgggtataaaaagaaagagaaaaatgatctcatccaggagctagatcagatagatatattgatagaggatcaggttaatctatgggagaactggtcaaaaagactcgcgatagagaaaaagcttgagcatatttatcatttagatgaggtgttctggcagcaaagggctggtagaaaatggactgttaaaggggactctaattctagattttttcatctatatgctaatgggaggagaaggaagaatacaattgcctatttggaaacagacaagggggtctgtatggatcagaaagcactgatcgcccacattgtgaacttctacaaaatcctatttggtccgaacacaccctgtaatatgaagctgagtgaggacttttggagggacagatcaatgaccagcaaagaggaaatggaatccctggccaagccgtttgaggttagtgaaattaaacaggctattgatcaaatgcacaatgagtcagcccctggcccaaatggttttggtgcctctttcttcaaaaagttctggaatcttattaaagaggatttgatcatgatgttcagtgacttttatgcagggaagttggatatccaacgtcttaattttggggttatcacgttaattcccaagattaaagaagcaagtaatattaggcagtatcggc

SEQ ID NO: 168854 - DNA, 563 bp, Zea Mays
aagtactcctccaacaagtaaaagtccaagggaggattcgacaaggaggcgctcaagaagaagtaccttcaaaagcaaatatcaaggagcgtgcctttcttgcctccctcagtgacctcaaccacgactccgacaatgacgtatcttcctcaaacgacgaggagcttgagaggcgggtcaaggacaagctgaacaggctgtgcttcatcgccgacgccacgggagcctctacaccatggcaattggtgaggatgtggtcgacaccaaagatgacaaagacgtcatcgacaacactacttccgaggtactaccttccaccaatgatctcgccgttgagatagaagagctgaacgctgctttggctagtcaggaaaagttgcttaagtaggctgctcgtgagaggagagaatttatatccaagtacgatagcacgcttagggaacttgagtctgctagagcatcagttgtggtgttcgatgagaataaatgtgattattgcgctctacacatgtcgaacatcactgatagagctggagtgcccgatcttttggtgaggtggataa

SEQ ID NO: 168855 - DNA, 541 bp, Zea Mays
tgccgacgtggtgtatggtatgtttcttatcaactccatacctgcttcagttttattttaatctggagcatcgcattcatttataactgagtcagtggtggaaaaacataacctaccaaagcaccctcttaagaagatgttacatattagttcaccgggaggtgatatgaaggccacacactcatgcctccatgttaatctcaagattcagggaatagattttccagtcaacctagtggtcctaggatccaatggtattgatgtgattcttggatgtgactggttgaaaagttgtgatggagtgatacaatgtgccaaaggaacaattatgttgacaagtacacaaggtgaaagaatccaagttagcacagacatgtcaacagatgaaaaaggagagacaatggtaaatcacttggaagaaaagcctctggaaaatatcaaggtagtgtgtgaatacctagacgtatttccagaggaattaccaggtatgccacatgatcgtgatatagagttttctattgaattattacccggaactgca

SEQ ID NO: 168856 - DNA, 284 bp, Zea Mays
gttgagccagcactggggctgttgtcaaatgctgcctcaaggtatgaaaagcatctttgcacttctggctccaattgtacttggctcccttcttcaatatctcagtcattggcttggcaattctggagaaatccggaataaatcgtcgataatacccggccaatcctagaaaactccaaatctgcttcactgtagttgggggtttccagtccatcacctcttgtaccttctcaggatcaactgatattccttcctgagaaattgtgtgacccaagaatttaatc

SEQ ID NO: 168857 - DNA, 483 bp, Zea Mays
aaaagatgtatataagggtgcagttcactattatcgtccaggcttatttcttgattatgtaaaatattgtatgtttgtctcccatgatgtaatgataaagaatattatattcttgttagagtactccacaaggatgaaatggagaagagatcaacttagtttagaaaacaacagtgtaaatggtttaagatcacgcatgatgcttacgtttaaaattgatatgtatttctagcttcagctaatctctactactctttaagatattagtgtaggcgtccacaagttggtggttctgccatgcccgcgcctccgcgattcgcgtctctgccgccatcctcaccctcgccccgctctccatcgaaggaagggcgccattccagggattacccaccattctcgccctcgtccgctctccgccatcctcgcccccacccgcacccgccatccttgccctcctacgcgcaagtcctcggcgccccttcc

SEQ ID NO: 168858 - DNA, 650 bp, Zea Mays
gcgtgaccgactctagatggtgtgcgagaagacacaagtagttatcctggttcgggcaacacaaggtcctacttccaacagagggggatgaagcttatattactcacaccgtggtgcctgtagtaggggtttataagcacaacgggagaggggaagtccccaagcccctaaagatgattgaggcaaatgccaatatctaagacaatgtggaggagtgagtgttcattggcgtgtgtgtcgatgtccctccctagagggatcactgcctatttatacacgaaggggagtgtccgtagtgatgtcgagtgctgtattcgaaggagggacgccctgacgtatacaagccgacgtgacgacgaactgtgttgttgattcgcgcctgttgatttctcgtagagagccgaggcaaagaccgaggggttgcccgtacgcccaagcccccgagggagaggccgcccatgccgttgttgtaacagcgccaggatatcagccaaaggctgcttacggggtgcatcattgtcctggcgcgtgatgacctcgagattctctgaatgcgtttgttagggggttaattcgggtgtccctaattattgctcccgacacatatgcttcttccattcttgtataaatatgtacatagatcaatacaa

SEQ ID NO: 168859 - DNA, 632 bp, Zea Mays
agtgagcaacacatggagtccaaaacaagtgagggatctttctttctaaaagtcttccagcagccttaaattagcccattatatgtaacaatctgcactaccttgtctctaccaatggcatcaattcttttctctagtagtgcagctaacatctgagcatctgctatctcacttgaggcattgacagactccaagaaaaatgtgccagctggactattgacaagaaaattgatcaagtgccgacccctcctatctgtccaaccatcagacataagtgtgcaaccaaatttagtccaagccaactcatgagtcttttttatctcatctacactattctttgccttctcaagcaatggcaccgatatgaatgtttcacatacccaggaccatattgcccaaccgcttcaagcatgatctcaaaggcccttgagttgatgacattaagtggtaagccacactcataaataaaatcagcaccatacatatatgttctttccttctcctccttcctctttcgttgcaatgtagtttgagtgttgcccttgcaatgcctctcacgaaccacatctccaggtgctttgcgaagcgtggacccaattgacttagaagacttcgatgcgtgttgattattt

SEQ ID NO: 168860 - DNA, 562 bp, Zea Mays
atacacgtatacatcaaaatttgctatatctataccctaatgtcctttttacccatcggatactgggttagggtactcattgcctaccactaccgttgtgaagttcttttaacaggaatcggtacaaatatcacaagaaattgacaaaagatctaaaaaatagttacttgaattctggttaaagcgggaaagaagggatagttaatggactacaactgcaagttccaattttggtcacactcaaaagctacggaaactggctcatgcattatccatccaatttcgggccggactccaaaagcgtgcggctgggcccaaatctggatgcagtccagctgcttaaatccaacgccctcccttctattcccttctcctggcgcgtgagtatccatcttcctctactgcctactccgtgctcgctcgctgtcggcttccgcgatcaacccagtctctcttctcctcgccgatcgaatccatcctgcacagctctcctccgcccgcgatcgtgatgcatctgtctcctcgctcctctatcgccggcatgcgaagcatccgccgcgag

SEQ ID NO: 168861 - DNA, 309 bp, Zea Mays
tctagaataacaaccacgagcagaatatataactcaaccaatagagtcatgatgaattgtataacctatctactcccacctaacatccaacaaggttttgatctacaccatgcagtccatctcacccataactaccttaaccatattcccccaacttcgatgatagacactgaccccgactcaataagaccaagactggagaagaaaagatcaacctcgtcaaggaaggagagaagtcaaaatcaaccttcagatgcattaccacccaacacggagttcttcatcaccataaactttcttacctctgcc

SEQ ID NO: 168862 - DNA, 631 bp, Zea Mays
aagaaaaacgataaaaaatggataaccgaataattacgttttcatctctaattgtaccagtcgtacaaacccatctgaccccttttattcaagtcgatgtacctgtaggcatcgagaattcatgcggcaatggccccggccgtccccaggaggccaggccaaagagctgtgtgccgagtgctgatctgaccaccgtcgtaacgctaaccaaaaccactgttataatattactgttggccaatcaatcctgatccgaagttgtcggtgcggtcagcttcatgataagctgccggcgcccggacagcaacagccagcagcggatgcatgagagcgtcgaagctgctgctgctactcgtacatcgcatgatttgattcaacatactgatggaacaggagaaccaaaccaactgccagattgttataaaacagtagtagatgcatattcgttccttcatgttagtagtcagtagcgaactatttcagaacagagcagagattttacaactgcatacaagaatgtttccatcttcttattattgtttccagtagcacccgtagtgatctaccaacagcagcattgacgcacgcacgcacgccgacatgtacaagatcaatccatcatcatcccagt

SEQ ID NO: 168863 - DNA, 657 bp, Zea Mays
ggagacattgcgtgttggggccgcaagctggatcttctggtggagctccgagctctctgttggtgcgcggatgtagtcgcatatggctcgtttctgcttaggctgttggacaagtgtcggtgctcttttttattcagccgaaacaagtgagtcgttatgcgtttgcataaagtaaagttcaaatcaactggaacgaatgggtctgttttggcatgtgttagtgctatttttgtaaacatagtaggtttatacaggcaacaaagctttatgctaaaacggggctactattctgcgctggtctgtggtattaggtaatagctggagtgtggtcacaactcaccagctattttgtgtggcatattagattccccgtttcatcaaatttgatgatgccagggcccaaggatatcgattctgtgtgcctaactagatttagtgtggccacctagctttctgttagcattccttggttagctcagataatcagtacacaggaatttgccctattgcctattcttaaaccatatgaaatacaatcttgcacggggctgttatgaccggcgtgcagtacaaaaggaaacagcaggccagggggcatgcggcaggagaaggggatcaaggctgggacagccagcagtaattcagtaatcctaggat

SEQ ID NO: 168864 - DNA, 866 bp, Zea Mays
ctcgaagtgaagcctataaacctgttggtcataatggcgtcccagccgagcaggccagcacgatagagtgaccgaccaagtccccgtagagcaagccagcgagacagagcggacaaccaagtcccccccgaggaagcttgcgagggggcgcaactgaccaagttcccgacgaggaagccaacgaggcagagcggccgaccaagtctctgtcgagcaagccagcgaggcagagcggccgaccaagtccccaccaagcaagccaacgaggtggagcgaccaaccaaatccccgtcgagcaaaccagcgaggcagagcggccgatcatgtccccgtcgagcaagccagcgaggcagagcggccgactaagtcccacctagtaagatagcgaggcaaagctgccgaccaactatttgcgcccacgaggtggaaacctgagcccaatgatacgtgcctgcatctgtcgcgacaagacgtgtcatcaccacgccacgccagaacgtgcgcacaccgcacgagacaagccttagggagacatcagcataggagtcccaatagtagcgtgcatgtcggaaaggatgggaccacactccatattgagcgagtttaccttgatggacgggaagatacgcaaggtgtgcggctggcggagccacgctgcgtataaccacgtccagggatagaatcgcgggacccgccacgcactgccaccagacgtcagcaatagactcgctacaggagtcgacacagagagcggagccgtgtcaaaaatataggaaagtagggctagatgaaatgctcgtggctcgttcgctcgctcggttcatggtgaactcgactcggttcggattggcttgtctgaatttttt

SEQ ID NO: 168865 - DNA, 333 bp, Zea Mays
ccgatctaatcttagctgatggattgagatccaacggtccaaccgttttcttcctcccctggctaccagagcggcggcacacagtgccccacggcggtgagcccaccggaggcatgactgccggcgctataaggcactaacccatcatctaaatgttgcttcgcgatgtagattggtcatagaagatgcctaggaggttcttaccgacgaaggagctacggtggggttggtccacgggaggaggcggatctgtggcggcggaactactccgtcgaggaatccccgtgttcccgggcgtcggtcccgcgcggcgaagctacaacacacatcccc

SEQ ID NO: 168866 - DNA, 388 bp, Zea Mays
ttttttcccatccttaccactgtgacaaccactatggtatggcaacaccttgccagggggctcgagtatgtgatcgtgccctcggcctcagccccatctctcaacaaaaaccaagcaggcgcaagtcaataacaagtacaagaccataccaccggccataccatctacagggatacaaagacatctcctcacagtcgcgaccaactcccatcctccaggcaactcccactgggcctataaataggataatctacagcttctagagacagggcaaacacttcacaagttttatcctccacacggtattggcacttgcctccatcaaccccagggacttgggatccttccctctcccgctcttcttgtactccctattgcaagcaattag

SEQ ID NO: 168867 - DNA, 384 bp, Zea Mays
gcggggaagaggccatgaatccacgggcagagaagggagaacagcggtgagaaggtctcgggcgggctggagtaactccggtgagccattccggccacggggaggagacttaaggcgcgctaaggccttggctaacttcagcagaggtagaggtgacatagggacatactccggtgaactagaccgggctaaatcggccggccaccgcgcgagcacggtggaccgccatggccgagcactggcgaaggtgaaattggcctaacacagggcgcaataggggaaattaggcacggggacgggtgtctcacctcggggcggagctcagggaggcttggagcggtctccggcgagctggatggccgggaacacgggcgtgggtcttcg

SEQ ID NO: 168868 - DNA, 380 bp, Zea Mays
caatttcatgctttttgctgactgtttttttgggtcatattgttattgaatcttttctgtaagacttattagctttggcatacatgtgtagattgtgaatttgcacacaaataaggtttcccgtatcctggggaaggtagagaacaatgagtggtttctgagaattgcactataccaaggagagaaaggcaacaagaaggttagaaaaattccttcagtagctgccaatgtcaatgatagcaaggaacctttatcagacccaacgctgctgtgttgtgctttcaagaagcatcggatatatctctttaggtatgatgtccaagtatatcttgataattctttattggctgctatatgattttgcaaaaactgttgaaaac

SEQ ID NO: 168869 - DNA, 798 bp, Zea Mays
ctcatagcaaccaatcaaacagtagctacctacatcccgcgatgcaaacatggacagatacaggcaaccaaacgcgccctttgtttttaacagcagccttcaccggacgtgcttttgttaagattgtgtcgaagtggcagacatgaacatcatggctggcgagtgaaccgtaagtcaacctgccaatattatatcaccacttttaaaacgacgtatgctagacctgaactgtactagaaaaaaaaacaaattatacagcatagcgcaactacattccaacttcgaaaaaaaacagctccagggacaccaaagcttaagctagaaatgaacaaaacatcatctgaatggcggcctgctgaaactgtgaaacccaacccaacacaggctgcacatcttgggctacacacctgcccactcaaatcttattagccagtcatcatcttcttcctcaccaccggcacagccaccccacaacttgcccggcttctggttctttcacaatgatccaaaacgggcttgccaatggcaggtcaacatgcttctcagactccggcccccgccaatcaccatagacaagaggatggatgtcgacaactagccttccaaatcagcacagtgatccaaaagctactatcgatgttcatcagaaagaaagaaaaaaagagcaacatcatttctgcaccatggtgtcggtgggtaaatctctttcgttggagcttagcgtcagaaagcaatgcttaggtttccaggaggccatcatgggacattttgtaggcgttctcatcatctgcctgcgca

SEQ ID NO: 168870 - DNA, 1500 bp, Zea Mays
ggggaagaccgaaggcgagatgaagacggcggcggtggacgtcaagaagccggtgtcagggcaggaagaacagaagccagcggcgaagaagaagccgagccggaaatacagctctggcgctccaaggagggagatggaagacggcgaaaggagcaagggcggccgtgttgaaattgaaacccaagtggggaaggcgacaccacagctggaaggggagcgacctatgcgaaagaagctccagaaggcgatcaggttggttcagctcctcatgtccttgtacaacaagcaccgctcccaatcccaggagaagaagccagacacggcttccgatccaggtggtgaggaagacagcgaggccaggctagagtcggcgccggaagacaagaagccggcgtcagcagagcaggaagagcagaagccagcggcgaagaagaaaccgagccggaagtacagcgatggcgctgcacggaagttgaaggacgacggcgaaatgggcaagggccgccgtgatgaaatccaagtggggaaggctataccacagctggaaggggagcgccctatgcggaagaagctccagaaggcgatcaagctggttcagctcctcatgtccttgtacaacaagcaccgctcccaatcccaggataggaagccaggaacggcttctggtccgggtggggaggaagacagcgaggccaagcgagcgtcggcgccggaggaaaagaagccgcagcatcggaattggccacgagaggaagtgcgcctggagcacatcctcgaggaaactttcacaaggcttcttttgacagagtacaacaagcagctgagcggcgtgagtcagaagtgcctcctcaccttctccatcttcgagctcgcctccgaggtcaagaagcagatcatgatctattggtgggtcgcggagttcaacctccggcaccggagtgatccagcgcgggctctttctggcggtggcgaaacaagtgattcgccggcgctgcagggtaaaggcgcagacgctgctgacagcagagatgacgccgaaagcatcttcatcatgctttctgatcatggcttcctagtgccgatgaagaactggtgcagcaaggtgatccatggctgccaggtgaaccccctggtgcactggatgctgaagcgcatggcgagaggttgtcgcttcgccgagctggacgacaagggcagcccggaggacctgcaacccaattccaacatcctttgcctgacagcaggcaatcgccacgtgctgcaacagatgcacatggcggatgagtcacagacacaggccaaggccaggaagaaagatgagtcacagacacaaaccaagaagaaagatcactcacaggcctggggaaaaagcaaggtaacaaatgaaccttccatgcagggcaagggcaacgatgtccaggaccagcagcaaccggaggcacatgtcgggagcacatccacggcagcagcagataagacaccttcccagaaggacgaaga

SEQ ID NO: 168871 - DNA, 548 bp, Zea Mays
gccaggaattcgtcctcgccattccgttgttcttgatgggggcagggtgattcatcgaggggcaaggaaggttgttgtggcatcggtgcaagggaaacgccatcggtgccgctggaattgatcgacggagatcgccgctgtcgtggattccatgctccgccgtagacaaagcgcccgcgcacaccaaatcaaggtgaggaaccctgccatgtctcctttgtccttgatgctttgtatgacacatagaatcgtagtgaattgtgcacttgtgggtcggtaatcgctcatcagagttcgggttccaccgtggggccgcagaggaccatggacaagaggattagagcgacaaccgacgttatgctggtgggcaatgagttcaggttggtcggggcttggtgtagtatcgatgggatcagggttgggagcacaagtgagcagagttgtcggactctagtatcggggcttggtgtagtatcgactcagtgcagctcagtcacctagcgagccaagttcggcttggctcgatcacattacgagctcgaagatca

SEQ ID NO: 168872 - DNA, 391 bp, Zea Mays
ctgccgcatggagcacttcaatagaaactcggactcccctaccatgtgggtcccacacaacggctgtccctgcaacctcggcgacatcaaaacagaaaccgcgacggctaaccgaattcgctgctgcttgccgatcctcgccaggttgttgtatcttgcatgtgtcgcgcgcaagcctcacaacggattcgccgtggaaggcacgccgccccaatctcctcggtagactcgccctggccctataaaacaatcacgggcttccccatccctcttccccattgctagaatcccaaccttggtgagagcacaacacagggagccccgccgcggccatttcttcccctcgtcgtcatatggtgactgggtttggttcaaagatgttcgatctacc

SEQ ID NO: 168873 - DNA, 321 bp, Zea Mays
aggggcacaaacctccctggtataagaaataggtaagcgccagatgatgaaacaaggagggctgcaatgcaatgcggtttgcaacctaatctagggctagcgtggcgagaattcacacaaggcggctagcgagggcaaatcgagtaatgtggtgtctcgacttgtaatctgggtaaggtggatgggctagcggcggaaacaaataacagcgatggagcggttgaactacgattacgacacaacctaaaccagcaataagactcgaacacggacacaaattcaacaaagcaatctgaaacgaaattgcaaggctaaacatgg

SEQ ID NO: 168874 - DNA, 374 bp, Zea Mays
ctgttctccagtgaaggtgaaggtggctaatggggaaatcatggtgtgtgataaaatggtaaaggaatttgaatggtggtctcatggagtttctttttgtactgatatgagagttttaactcatactgcttttgatgtgattttggggtatgaatggccgagacaattcagtcctatgcactttgggaccaaaaggtgctgaaattcagacataagggggtgtgagtgacactcaaaggtgatgcctcacaacctcagaattctatagaagatgtctctgttttgcaagtgcattaatggctgaaaggaaatgaggtttgggcctttgttttgctggaaactgtggaagacacaaataattgtgaactgaagga

SEQ ID NO: 168875 - DNA, 387 bp, Zea Mays
tctccacttttcacatcaaaatcatcactatcatcagaatcttcagataaatctgccattatctcctttgtgatcttctctgtatttgtttttgccatagattcgtaaaacccagcaataaaagggtccacaaccttcttctcctcagccacctttgtcacctcagacaccttcttctcctcaaacatttcttcaaaacttcagtatttcacgaagctcaaaaatcaagcaagagttgacagcaagagaattaaaatttgagaaaacagcagcaagcaacagaaatggcggtagcaaatgccgctgctgtgggtttctatttatacgcctagtgcattgcaacttggcgggccccatttgtcattgactttcgctattctagcgaag

SEQ ID NO: 168876 - DNA, 579 bp, Zea Mays
cctcttgtgcaggctgagccatctcctcttcagttgtatgcggcacatctagcataggagcagagctcacattccccatcccttgaagtcctgcttgaccccaaacaggtgcactaggataacactgctagagtgcttccttgttttcccaggtagctaaatcgcgaggcagacccgctcattccaccagtacctgttgtacgaggcgagttcccttggtgatgccaggatgttgacaaggtaactgaattctggcagcgatgaaggcaaggaagtagaagcagtgcccttgaacactttagctagcttcagctgagaaacatgcacaacacggtgaatacgattggaagcaggtaagtctaggcgataagctaccttgccaacacgggccaacacacgatagggaccaaaatatttaaaaatgagcttgtgatgggcgcggggcagcacagaagattgcacatatggttggagtttcatgtagacccagtcatcaatagcaaaggagcgttcagacctgtgtttgttcgcttggcgttgcatgcgagcctgagcacgcaagaggtgctgatggatgag

SEQ ID NO: 168877 - DNA, 692 bp, Zea Mays
ggaacccaggagactctctcggccgtgaggaaggcaaccacgatcgttttgcggaggattagccaccgacgtcgcctgaatttgtcgctgtcgattcaagcaccgccgcggatcgctcctcaccgtggtctgaccctccacgcagcatcactgctagtgagaatcctcccctcagtttcgtcatcgtctccgttgcatgctgcgctgtccgcccgagtgcttgatcgggaatcagagctttcggctctgccgttaatggccccgccgcggctaagggcgccgccatgctgtattccggtgaccgtggttgagcagagaagggagaagggccatcggccgttgatttgttggtggacggggtagattaaaccggagggtatttaatcgttcaatcgaaccgtgtccatagatgtgggatccgatggccacgaatgcatcgacttaatttaaatccgggccgtaggagatagatcggaggggcagaagtacgcaccgtttcgatctaggatgaatctaatcagcaccgtagagttttgatccaacggcccatagtgcaccgtacccccttcgcgggtactttttgttaaagagcccccaaggaaatcactaatcaacccgccatcctgagaacactattctctgtgcttggaaatcttacgctagagccccctgagttttccaggaattgacgc

SEQ ID NO: 168878 - DNA, 472 bp, Zea Mays
atatattcgtatagtcaccttattgtgtaggataaaagataggttagggcaaaaatagcctggagtaagacagtttatggtgagaataactccgtgttggatggtaatgcatctgatgatcaagtttgacttctctcctttcttgacaaggttgatcttgttctctttatggtcttggtctccttgattcgaggttagtgtatatcatcggagttggggcatatggtcgaagtagttatgggcgagatggactacatgatgtaggtcaaaatcttgtttgatgtttggtaggcacagatagattatgcaacccatcatgactctattggttgggttagagatattaggatgacataaaatcttttcaagataagatgaatcctctaaggtaatagagtatattttaagataagatggatctattaagctagctagattgtagtgggggatagtctaagttggctagtttttg

SEQ ID NO: 168879 - DNA, 676 bp, Zea Mays
tgtccctagtaattccttagaccatcaagtcaacgttggccaacaacagccacaaagttgacaataggtagctccacctccacatctctcgccttctcgtggggcatcgacaactccatctgcacacctccatggcatgtcggcgacatcgcagtggctccattgctataccgcccctacacatgagtatacgttcacgtccacacacctagtcccccactgccacccgtcaccaccgccaacaattaggggcggatttaggccttgggccatagctcggggcctggtccatgtaactaaagtaggcataccatctttattgggccttttctcttatttgctggcagctggcgccctcccgctctcccacagtcttcattcctcgccttaagccccgccgccactcgccaatttgctagacgccaagtatctcatcgtcggcctatcgcaggacggttgcctcaccacgactcccatcgctgctccctccactgctctctccgagctccggccagcgcttagcgctggtcacccttctccctcgtctggctagcgcaccggtggagtgtcctagggcttgccagccgcgccgttccagcctccaggcatttgcaccacgtttcccccacccactggccaccgtccctatgtgcagctcaccaccactcccccaggc

SEQ ID NO: 168880 - DNA, 832 bp, Zea Mays
ggcggctggtggtaatccaccattcctttagtcaatatgtgtggttgcttgtgtaccattatattgccctcttacccatcggtttgggttatgtggagttataatgctgcccctaggtactccatattgcatgttagatcattccggccttctaggggccgaagagggctcatacctaggtgtgggtggtaccattctacatccttggagggtcgtgggtgctagagagacgttagttcaaggctggtagcaaggttgttggtaatattctacattttgttcctcataccttatcacggatggcccggtgtgatacccggatggtccgatgacatgctcggacggtctgcacatataaccggacggtccaaacaccactgttgtccctggtgtggttttcggtggctaatcatgggagaaggagccaaccgctgctaggctagaccgtccggcctcatgcccttacagtccgaccgtgtgcaggggcatgggttgttcccatatagttggtcgacgatgtggttggctgttataggagttcatcggtatcccataaaggggctgggattaggcatgcccatttgtagccgatgggtcctgtaggtcttctttagtgtggcatagtgtgatggaaaattagtaatagtagatttatcaaatgcacgtgctagcctcctataatcctcttgtacacccgtaagatttgttgcatctgttctcgttgttcttctacgtaagatcgaagagcttggatgtcgtcgggtttacttacaacaggtacgattgtagcaggacgtagactcgccaggttgtattccttctgtcggataag

SEQ ID NO: 168881 - DNA, 416 bp, Zea Mays
caatattgattctatggaacctctgcatgtcaatgaacaaacatgccagaggagcctcaacagatgggcaacaagtagaggcaaacaggaaaatgaaacaaggcacacgactacaagcacatgaggatggtagacgagattgacgaaagagaaccgtggattgtcgtcgttgccgcacacgaagacaaaagtctggcaggtggatgttttcgtgcatgaagaagacaggtgagggaacatctgtagctcaagaaagggaggcccgatggttggacttggggccacaatgagttaccgaagtggttccatgaggcccacgagatcggtgcacgaactagcaaacgacacagacacacatttgccacagatgggcccataaagcttggcatgcgaatagcgaccgacgcatttggcat

SEQ ID NO: 168882 - DNA, 661 bp, Zea Mays
gctattggaagagattcacgccgaacagtgtggaatacacgcaacattcagaactctagttggaaaagtcttcaggtccggtttctattggccaacaacaaagagtgatgcagtcgagttagtctagagatgtgaagcttgccaattcttgtcaaagcaacaacatttaccagcacagcagctgcagaccatacctataacatggccatttgcgtgttggggattagacatgattggatccttcaagaaagctcagggaggttatactcacgtgctggtcgccatcgataaattcaccaaatggatagagtacaaacccattgcttctctaacttcagccaaggcagtggaattcatacaagatataatattcagatttgggataccaaatagcatcataactgaagtggggaattcatggaatatagagcatctcaggaagtggggaattcatggaatatagagcatctcaggaagttttacccttagcaagagctattagagcaacgttgtactctgtaattggaaaatacgtcatcaataaaagatttcattttcaaaggcattcaaactatcggttatcaattgacttcaacttgattagacttggaatcaacacacttactcgacttagggtgaccactataccctactaacggag

SEQ ID NO: 168883 - DNA, 555 bp, Zea Mays
gtcaggtccaaatatttccctttctccagcttgtgaccaatttagcggtgttctacaccttctcccatacaaggcctcgaacggtgccatcttcttgctggattggttgttgttattgtaagaaaactttgccagtgaaagacatttgtcccaatccttgccatagtgtatcacgcaggctctcaacatgtcctcgagaatctgattcaccctttctgtttgaccatcagtttggggatgatacactgagcttctaatcacgatggttccaagtgatttttgtagctgctcccagaaacgtgttacaaacggtgctcctctatatgacacgatagtcatggggattccatgcaagcgcactatttggtcaatatagatttatgcgtatttttctgtcttgtgggtggtatgcacaggcaagaaatgggctgtcttggttagcctatccataatgacccaaatagaatcgtggtgccgggaggtgttgggcaatcccacaatgaagtccatgcaaacgtcctcccatttccaagatggtatagggagaggttgcaa

SEQ ID NO: 168884 - DNA, 736 bp, Zea Mays
gtcagagggcagatcatactgattaactgtcctcctggagcagtactcagccatagagaatcttctcttgggataggtccatcctgtgacatcaattggataatctggatgagcgtgtggagcatcctctgtgtccatagaaatgttgcccccagctgatgattgggcctctgagtctgtagctggattataatctgcatcatctgcacgaaggcgctttgacttaaaatgacctgcaagcttcttcttaagaccacccagaccactgcaatatatatgaggaatatccactggttaatagttgatgatgtcacaacatgagaaaggaagtgtaagtttctgtcagggaccagactgtccgcgctagggggccggactgtccgcgctatccaggcggacggtccgcgaccgtccagaggcgatttctagaaccctagccgccccttccatctaatcatcgatttgacataaaataaccatccaaatccattcaaatttttgcaccatatttacaatgagtaacacaagcaatttcaccagtcaaaattgtaattccactacccaattctagatcagagagaaaaccctaagaattcccaaatttgaataaatcagacaaattccatgagattttgaaataccgagatgaagacatggttgatgaactccaaacaatctcccggacagtccgtgcgcaatttcggttcaccgtccgctcacaaacgacaagaatcac

SEQ ID NO: 168885 - DNA, 812 bp, Zea Mays
cttttcttttatttaatcctcttgccgcacatgaggtcagcatgacacaagtgtgacatcaagcaagcaacacatgcagtcgtatttccatgcacacgtccacttctacgtagtcgccgacatgtggacgatagaatcacgtacgaagctctgcacgggtaactggtttataggatctgatgtcaaccgcgtcttcctccctgtaacaaacccatgcatgccgtaaccacctctccgtaacagccggcccaggtggcttcctcctatagctattctcccgccgaggaccgctccagccgaataaagaatagtttcctgcgtgggtgacgtcggctgggcgtcataggtgacctcatccgtatacctttcaccgtcactgacggctgggccaccatgcattggtgttcgcttgcttcctggtcttgggcgttgatcggaacggcttgccgtaatcccggcactagcgccctgctcgccctataaactcgattgaccccaggggtttgccgtctctgttaaccagaagagaaaaaaaaccaacgagtatacgctgacgatgtattcgcgcagtcgagagagaagaaaggaagagcagagagagaacgggagcgttgccgggagggtgttcaacggtgccgcaccctggacgtccagggacattcctgtgcttgcggcgtggagcgttctgggcctcctcgccgggcgttgaggactgcgcgggcgccgtcgtccggttgggtcgcagaccagggcatgctcgaagtggtgggcgactggagtcgcgtctcgagcccaggaagtcggcggcgcgc

SEQ ID NO: 168886 - DNA, 716 bp, Zea Mays
aggtcttcgacaagaatgaaaagttcataggaaagtggataagggaattgccctatgtcgtttggagcttaagaacccaacctagccgagccctgcatggaaacactcctttcttcatggtctatgggtcggaggcagtgctacccgccgatctcaagtttggggcgccaaggttgatcttcgaaaacatagcagaagctgaggccaccaggctggaggacattgatatacttgaagaaggacggctaaatgcggtaatccaatcagcacggtactagcagactctaaggcgctatcacgacaaggctgtgcgacagcgatccttttcagtaggagatctcgtcctccgccgaattctaacgggggaaggacggcacaagttatcacccttatgggaaggacccttcatagtagcagaagtcactcggccaggatcatatcgtctcactcagatggatggcacggaagtcgggaattcctggaacatagaacacctcaggaagttttatccctagctgtatttcagaagctatcgagacgacgatgtactctgtaaagtggaaatatgccatcaaataaaaaagaggtttcaaagatactcagtttattcacgattgacttgctttcttacttaactcggggtgaccactatgccctactaacggagcaatcggcttaagtcggtaacgacttaaggcggtgcgacatgctcacgc

SEQ ID NO: 168887 - DNA, 573 bp, Zea Mays
aagctgtacctgaagatgtgcgtggaaaacttacagcttatgtaactgaaattttacattccaaacgagaaactttcagtttaggtgcattgaatcgagttggctggaacaatgtaagaccaaccactaccaagacattgtcccaggaaaagctcaaagattcagatcatgaaagcgggcttaaggatgccaaaatggttgatcataacaggatttctgcaactgcttttgagggggatatgaaagacattaatatgacaaatgatgataaacctggagaaagcatcgaatcatcacagggaaagccttctcaaacttctgaacctgttggaactgcgacataaattggaactgagcagccttataaatcagataaagctaactatggaaccaatgatagcagtgaagggcagcatctaacagaacgggacaatgaaatgactccaaagcaagtttctgatgatgagtcagtggtcagctctaatgggccttataaagaaagggagcaatcaatagatgctacaacagaccagaatctacaatctaacacaacagaaaaggaaggtgacacaa

SEQ ID NO: 168888 - DNA, 777 bp, Zea Mays
attatttttaaactaaaaatcctctttctgaattgttttatcccatttattctctgattggactggggacactattttgcgagagactaggggttgacgtataaaatcccatagactcagtccaaccccgcagtggaccgcaggttgatttatattaatccgagggactcttttgagaagttgccacgcgaaggggtatgaaaggatcacaggcgttggatcggccataaatggctcagattaaatttgtctttaatccgaaacggtattcaatcatcaccgttagattcgctatcaaccgcccagatctaaaatacctgagccaaatccaccgcgtacactacccgatctagggcggaggtgagcccaaactgaaaggatatgcgtgcacagatctgggctgtccatcacagatcggacggccaggagcttctctcccttacctctctcacggccggccaatcccaggtagcggcggcgttctgcccacagaccgcggcggcggccatggccggcacaagcccgagcaacgtccgcgcacgagaacttcatcgacgatttcttacccagggcggacatgggaatatcctagccacggcggggacggatactgcccatccaacgatcaatccactggtgatgaggtcgacattgcccatatcgatgccggtgatggactccatacctcctggcgattacccgctgcgaggtcgagtacaccgaacgtcggtgggggcaaagaaccattgcggctacaccttttttcctctctctccc

SEQ ID NO: 168889 - DNA, 701 bp, Zea Mays
gacagaatgaaaaaaagctaatttacctgaagattagaaaagaatgaagcacgcccaagtcatgagaagttgagttataactcgacgaaggaagatcaactagaacaatctgaagagcatcggcacggggtgatttagctccactggcagatatcagaatcctgtcatccggtgcgccaacctctaaggcgactccctcacttgaagctaaagaagtatgtatcactatcactccatcaaaatgtggtggagacgacccgacgtggacatccatggaggtatgggaaggagagctcgctcagacaccctcgggggctgggttgcagctcgcactgcccatcggagccggatcactaatggcaacaccctcgggggctgggttgcagcttgtgatacccacccgagccggatcattaccggcaacacccacgggggctaggtattcgccagcaccacccttgggggctgggttttctgcaacagccacctctacggctgaaggatcctcagacacctccataggagtcgggcaatctggaccaacctcttgacaccgaagactgccttccaaggtcgacgatgcacgagatgctgcccgggatacctctaagcccacatctggaatgttagagcaaacatccatcatatcaccatcagtcggctctcacagcatatcctcaggaatgacatcctcaagggtc

SEQ ID NO: 168890 - DNA, 599 bp, Zea Mays
acatgacccgaacgtcggcgccagcaagtcacgacgggcccccagatcaagccatggtccgatccgaagacacgacctctccatgcccattcgacgatgccttctaacaccttgagaagactcactgacgttttgtttcgataccccccatcttttttcgccctcgtgggtcacctaggagtgcaccatccgaagtcaccggcgctttgcagggggtgaccctcaacggagactccactgtagttaatccaatgccgcaaaataatctaaatcatcctctgaggatttgtcatctatccaagaaaaagggctccctaactttccaccctccgaagaccacgacccaacatcagattccccaaacgcgttgttacaaagagacactgcatttccatccatcaaaatatcatcattcatgtcatcatcagggtttgcttgcgcaggctcagatgccggaacctatgcagcaaccgatctttagtatcatacaaaatgaaaactatcagtctatcccctattacactctctcaacctgctccaaagcgtctgtcgtcgcaggaccatcagcgacacctccttggagcatggtttgctcttcg

SEQ ID NO: 168891 - DNA, 488 bp, Zea Mays
gcgatgagaggtcatgctgcactaaagctagagctggccagttgagggtgatccctctctccggggttgtccctaggtgagatttgaagtgttcctaaatgatttattctttttcctcatgggctaccgctaaagtttccaattgggggctgcaggcaatggatgaagtttttacgtgctctggagctagcagataggtggaagaacttagtgttcgcgtcgcccaacctaatgcgagtgaggcgagcccattggcggatcctcgatttttcaattacagcaagtcccagtgccctggctttgagtgccttcaggagatccagttcctcttgggtgagcacacgctcctcttgagcagtttcgaatcggaggattaatttttttggaaattgcaagctgtaatctcgtgtctcccactttggtcttacaccatagtttgatggcctttgctgcatgcactagtttgatatgaaggcgcttcatgggtg

SEQ ID NO: 168892 - DNA, 389 bp, Zea Mays
acggtttcggtgacggagataattcagctacagtggaaaaaattaatcagtccgaagccacaaaacagatgccaaagctagatgccgcgaaacaatacctatgcgtctctcgcgctctgcagtttcttcaacttgttttgcttgtactcgggcgtcatggatgtctttctcacttttcttcataatttcatgagccatctctcggccaccatttacccagatgtcattgtaaaatttcccgcccattaaactcgcttcagctgagggatcctttgtatcatccacggagaaggcagcttcggcctaggcagggtcttgacatggtcgcatcctgccttctccaggatggctgagattccccttgcaccggataacgcgcacacatcccc

SEQ ID NO: 168893 - DNA, 643 bp, Zea Mays
cgttgacgatgtggttattaagacgaaaaactcagaaaacttcatcgaggatctccaacaagtcttcaacagcttgagacgctaccgatggaagctaaacctagaaaaatgtgtatttggagtgccagccggaaagctacttgggtttattgtcagtcatcagggaatagaagtaaatccagaaaagattgaggccattatgaggatggaaccgccacggtcatagaagaaggtacaaagactcactagatgcatgacagcgctaagcagattcatatcaaggctaggcgagaaaggaatgccattctataaattgcttatgaaggtggacaaatttcagtggaccacagaagcataggaggccctggatgcactgaagaagttcttgaccactccgccagtactgaagccaccacgccgagctacgcccggtcagtcggcagaagatttgctactatatatttcgtacacgactcacgtggtaagcaccacgttagtagtcgagcgggcagaggaagggcacacatacccagtgcaacatctggtttactttatcagcgaagtcctcgggccctcaaagataaggtatcctcaagttcagaagctattatatggggtacttctaaccgctcgcaagctccag

SEQ ID NO: 168894 - DNA, 554 bp, Zea Mays
ctctcccactatttgtatcacttgcgcatgggtcccagttatcaaatcctagatctatctcctaacgcctctctcttgctttgttcgcaggaacgtcggcgcgctgtcgctcggctcctgcccatggagagtcgttcgcccgggttcatgctgcctgctcgtctcctcgtagtgaagccacctcactgtatgtttccctgccgtggctcgtcctcttcctcccactacagtgtttcttcttctgctcgccattaatggcgatgtttgcaacagtttctcttccttgcgcgattcaatcgtctgccagtctttcttctaccattagcaaacttcattaatggtgtgattgtttcttcgaatacagtgcagcaaatagcattcaaggcgcgtgaagtcgttcgattcctcctcccatcatcggcctatttaagcacaaccgtcattgctgcgtcgtcgcttgccaccaacgtagttcctgctcccgtcgcgctattgcgaagccgcgcccacaatcgcctcctcgccgtaactgcgcacgtgctctgctctcctct

SEQ ID NO: 168895 - DNA, 493 bp, Zea Mays
attgttattaccttgctagcggtgtgacataccttctatgttttgatgaagacggcgacgtaggcgcaaatctctggtggccgcttcatcataattaccttcttcatcaaacactgcatcatcgggaaggcgtggacgaggaggtggtggtggtggtgcttttgttgcgtctccaacacagcaagtctgtcgatgatctgggacaatcatcgatccagcctctcgtaagtcttgccaaggttcatgtcaatgaaggcatcatgcactgacttgtggaccgtctcctccatttgctccttcaggagcttgttgtttgcctcaagatcttggtggctaacacattcatcgaagtctatagggatccttgcttcttcttcgtcgcctgccatcgaaacacaaaaacaggaaacaaacggtgacggttatccctaataatttcactacacactcctctcaggtggaacacagaaacacgctctattgtatcttacca

SEQ ID NO: 168896 - DNA, 841 bp, Zea Mays
gcgcctcaatttctaataaagacagggccctcagcgcaaaagtcccaagacacagtgaatagccgtgaaggatggcgggttcattctacagaactacaagggtttatttgcaaacaacgcacagtgaaggggtatcgtgaagtctcaaccgcccgatctaacccagacggtccagattagatcacgctttaatcaaaccggtatacgattcaagctccaaaggccaggattttattaaggcgcaaaccgatccgtgccctccaaccaggatctaacggccccaaagcggcccagccttacgggtatacacgctctaatcctagccgcacgctaccagatcaacggatcccggttgtcttcttcaccccggccgacggacgcaagggatgcgagcgcccaggtagcggtggcaatacgccggcgagcacacacaccgacgctctaacgctccaacacacgttctgccaggttctatacgctaagggggaaaaagcgaatcttccagtggagttcttaccgtagggattgacatcggtgcgtctagccacgatgacaggcggatccatggccgactccagatcccggcgaggatttcgacgaagacgagtcgccacaaagtcgagcgatgccgcagccggcctctacttgcacaagcgatgtgctgcacttcaccaccggtggcttcaacgacggtggcgccgatttgcgggtgcggcaggggctctacccttctctctcttgctccgttcactcgattccctctctcaccggacgatggccagccaacgcgatgtgtcccgatctgcacggaagtttgcgcccagaggttttataaacccgc

SEQ ID NO: 168897 - DNA, 468 bp, Zea Mays
gttctgtgacgacggagtggtggcaaggcacgggcgggggtaggagatcacggtggtagggccaatttggccgaagggtgcttggaatggccggtccacggcgaggtggcgggcgcccgcggcggtggggatcgccggtgaggctgcagggtgtaatagggaaagggggtgggtgtgttgtgctcgtgagggcacggtgaaacttaagagctacaacaattggactagaattcaacagagaggggaggttgggactcaccggagcggaggaagggcgcggcggcgctggctcaatcgagctcggggaagggaagagggagtggccgaggccggtgtggaggaagagggagctcgggcggtccttttataggtgcccagggcggggaagggggcgagaggtggcgagtatcggcgagcttgccacggcggtgatggtggcacgtagtggcaacgactgaacgactcgag

SEQ ID NO: 168898 - DNA, 444 bp, Zea Mays
gcagcgaaggaccccacacttatgcagtacctcgcggctatccgcagtctcgaaagacaattcaaaggttttaccttgcagcatgtggaccgcgccaaaaatgaggagaccgacgcattggccaaggcagccgccagaggcgaggccctgccctccgacgtattctaccatgtcatcggcacgccagccgtccgcagcccagaggggctccaaataaccaaagacagcgaaggccaccgcatagtcaacctcatcatgactgaagactggcgagcaccaataaccctgttcctgcaggggtactatcatccaaccgacatcaatgaggccaagtgcctcaaacatcgaagccgggacttcgcactaatcgaaggccagctttacaagaagggggtcagtcaacccatgcttaaatgtgtcaccgagaccgaaggcgtccaaatt

SEQ ID NO: 168899 - DNA, 518 bp, Zea Mays
gtgtaggaccacatgtttgtcccaaaatggaggaggttgtggttgcccagtgtacgagttcattggcatgctataatatggctaggtttgtgactgcccatttgtagccgatgagttctttgtgctagcttagcattattctcatatgatggaaaattagcaacgatagattttcatatgcacatgtcagtttttaaaggattcttccatacccgccatatatgttttgtaattgatctcgctgctcatctacataatacctaagagattggattttgttggttttacatacattggggtgtgtgtagcctgtacaagagatgccatctcaaactccccttaccggacgatcttcttatggcgatcaaccttggaatgcactagatatttttttctttgcctcttcgcgctcttggtcttgcctccgcatcgtctctcttcttgttgtcttatctaatctttgaatcgttgttgatctttgacaggctctcaagagtcggcttcatgatgttgctcgg

SEQ ID NO: 168900 - DNA, 566 bp, Zea Mays
atgatggtgagttacgaaggtaaaaacgagcaacaaggcaaaaagtttcaaataaaagtacctataatcatggcgcgttcggcagcttcctcaacttgcttagcctcctcacgggagtcgtgagattctttctcattcttttcaatggcttcatcagccatctcacgaccacccttcatccacacatcggagtagaatttgccgcccagggtagaagcctcaactgaagggtccttagtattgtcagcagagagaatagattctggttgggccgcggccttgacatgttcgcacccagccttttctaagattgccgcaatccctcgggcaccagaaaaagcacaaaaatctccgcaattgctaaggatctcatccaatccttcggcttcttcacctatccattggataaccccttcggggtcgccacgaataaatttttgttctgaggaatacgcccccaccttcgcaaagctatcttttagcttcttcgcgcagtccaaggaattttcataacacctttccctggaatcatgaagctcttcaacattcttttctagccttgaact

SEQ ID NO: 168901 - DNA, 633 bp, Zea Mays
ggaggaggtccccttaattcggaagaatagtcggcgttacatagtcagtggggagagtagcgatattccttctccagctttgtctgctctcgttggtctgcaggaattgtccatatcgaactttgatcaggctctcgaggatgtggttcttgaagatttgctgtccgagccaacagatggtggtatgatggacgtttgctctgacattccagatgtgggattagagttatcccgagcaacgtctcgtgcatcgtcgaccttggagtgcggtctttggagtcaagagcctggtcaaggttgttccattcccatggaggtgactgagaatccttcagccttagaggtggctgctgcagagaacccggtccccaaggatggtgcaagtggttacctagcccccgaggatgttgccggtaatgatccgactcgggtgggtaacgcgagctacaacctagcccccgagggtgctaccggtggtgatccggctccgatgggcagtgcgggctgcgacccagcccccgagggtgttcgagcgggctccccttctcataccttcatggatgtccacgtcgggtcttctcctccacattctgattgtatggcaacagcacctgatgctagagttctgattcc

SEQ ID NO: 168902 - DNA, 851 bp, Zea Mays
aggaagaccccttgacgatgaggaactggtgatgtatatctgcaacggtcttgatcttgagtacaatcctctagtttctgctcttgtaactagactagaacctgttactccttcagaattgtactcccaacttttgagctttgagactagattagagttacagcttggcatcgggtcatcgtcatcagcgaattcagcaggaagaggcggcggccgtggtgggagccagcaaatgcgtggcccaaatcgtggccgaggtggacggcagaactccggccgtagctctggtggccgtggccgtgggcagcagcagccactacggcaaaaccagcaacgcaggagcttccccacgggcccaactgcaacccacgacaacaatgggcgcccaatctgtcaggtctgcttcaagacgggacacacggcgattgactgttggcacaggtttgatgaaaactatgttccagaggaacgccatgttgctgctgcaatgagcccttattctatggatcaaaactggtacatggactctggtgctacagacaatatcactagtgatcttgagaagctcgccgttcgtgacaagtatcatggaagtgaccagattcatacagcaagcggcgcaggtatggaaatcaaacatattggtcattcattagttcacaccccaactcgcaatttacatctaaacaatattcttcatgttccaaaggccactaaaaatcttgtttcagttcatcgcctcaccaaagataattctgctttccttgaatttcatcctgattattttttgatcaaggatcaggcaacgaagaacaccatccttaaggggccatgccgcaagggtctttacc

SEQ ID NO: 168903 - DNA, 373 bp, Zea Mays
catttacgtgctgtttttgatgttttgcgtgatgcacgtttatttggtaaccttgagaagtgcaccttcagcaccgatcgtgtgtcttttcttggatatgttgtgacatcgcggggcattgagatggacgaggcaaaaattgttgccatcacgagctggccacttccaaccatggtcacgcaggttcaaagttttcttggtcttgcaggattctacagacgatttgtgcgggatttcagcaccattgcaacacctctccatgagttgacaaagaatggagtgccgtttcgttgggtaccatcacaacaacaagcttttgatgccctcaagtcgaagctcacacaagcaccactgctgcaacttcctgattttg

SEQ ID NO: 168904 - DNA, 516 bp, Zea Mays
aacagttgtgtcttttcaactgtccctgtccctgtagaattgaaacggcaatcgccgaacacgaagcggtgacttttgactcctctttgctcctcgaagttcgagtaaacgatgattcagttctcgatttgattgtatttaaatggtcatcggccggctacatttccattcatcgcaactcagaaaaaacaggcatatttccacgtttccattcatcgccacagcgcttagctttacctatgtcgacatcaccgagtgattcctctgctccttttgtctcccattcttctagccgtgaaccaaccacaaagtgggatcctataatggcatataaaaaacaggcacctttgcactgggatgcagatggatgggactttgcagttgcatcggaatccgacggcgacctcaccgacggggatgacctccagttcctcgttgaagggaagctagactccgacaccagcactgactggtcttgggcgtacgacggagaatcgtcagatgtggagtccttgg

SEQ ID NO: 168905 - DNA, 508 bp, Zea Mays
caagttttggacaaaccatgtccaactttcaatcgattccgtctcaatcactccaaaagccactggaaaaagccagttatggccgtccactgcaacagcagctgctagttgccctcttgatcttcctgtcaagtgagtggaatccatagcaatgtacggtctacatccttgtaaaaatccatcaatacatggtttcaaagcaacaaagaatcttttaaaacacatgtctcccttatgatcttctgtatctaactcaacaacactgccaggcattgctctacaaagctcatctctatatgtaggaagtaagtcatagctatcatcccatgctccatatatcatgtcaagagccttctctttacctctaaaaactctatcgtatgggatatccatcttgtacttctttagaagttcctgctgcaacattttaggcccaagtgtaggtgtctcccttaaccaatcaactattctttcggctacccatgtatgtgatgccattgtatcacca

SEQ ID NO: 168906 - DNA, 990 bp, Zea Mays
gaacttggcggaaggtgtcgacatcctcccaagtcgctgatgctggggactagtccttccactgaatgagtacctggcgcactccgcgggcgatcctggtcttgacggctcgggctggctccaaggtgacggctccatggtgaagcgggggcagtggtggcgtagcttgtggaggagtgccctggtacttcttgaggacacccacgtgaaacacatcgtggatacgagctcgtgccggtagctcgaggcggacaacgacctcgttgatgatctccagcactcggtacggcccatagaaccgaggcttcagcttgctggtggtgtcggtgttgagggaggcaggggaccggtcgcagaggcggagcagcacccactcgcccacctgataggtgacgacgcggtgtccctggtcatagtactttttctggacggcctgagcctgctccagacgatggcgcacatcagcgaggaactcctcgcattcctccatggtcctggccacagcagcaacacgtgtgtcccgcgactcataggaccggatggatggaggatcgcgtccgtagacgatccggaatggcgtgtcacgaagggagctctggtaggcggtgttgaagaggtattctgcccacggaagccactgcagccattgtcgtggtcgatcacccgtgaggcaccgcaagtacatggtgatgactctgttcgccgactcggattggccgcccgactgagggtggaaggccgatgtcatgtggaggttggtccccatcagtcgcatgagctcccgccaaaacttggaggtgaacacaacatcgcggtccgacaccatggactgcggcaccccatggaggcggacaatttccgcgaagaacgtgtgagccacggactccgccgaatatgggtgtgccagcggaataaaatgacagtacttgctgaacctgtccaccactgtcaagatgacggacttgccgcttactcggggcagggcttcga

SEQ ID NO: 168907 - DNA, 752 bp, Zea Mays
gttcaggcaggctctagaagctaggttacaaacatggctgggagggatagctggtacgttttccactgtcgtacgttaaggtgctttttcacctggaaggaagacaagtgagatcgactcacttgcggattttcttttctccacatatacctacatgaggactgacggcctcttcgcatttcttcagagctttgtgtcagcacttgacattagatgattattcatgccacgcgtaaagatggcagacatacatatcgcagtcgtagcccgcagcggtgtcgtactgtcgtttgcgcggtgatctctccggcgcccggccgccatgtgtactcgctatggtgtttcgttattaaatatcatgcatgcgccgatgttcagaagcgtacttgtaaggcacgtcgtgtgtgctggtgatggccattcagatcacgcgtacatgccgcaggcgcaggagtagagaatctcgcggaagggaacgatgatgcttgggcacgaggttaagcttaatcaatgagaagctagcgtgcgtggcaccttcttgaccaaaatgtcggcttcagacctgttctgttctgttcccacgttgtcagtctgttctgttctgcaaggccctgcagcgtccccggttgatggaccaaaaaaaaaaaaaagaccgtgtaggcgaggtcatgcaagccggagaggcatcggtcagactgggtttcctctatatcagactgactcttaacgctctccaataaattttctcttat

SEQ ID NO: 168908 - DNA, 660 bp, Zea Mays
ccgatgataatttatctggttctggatctgagtgttttgagtctgatggtgagtctgggagttcgttttcctggacggaggagtcctcggatgaaggcttggattattttgttgtattagatgtggccgcagcggagtcctcgccgcatgtggaggttggcgaggcggctgatcttcctagtgcgaggactaagtacaagcggcgaagggtggtgtcgaagcacagcgtgggtgaggtttcgcgaagtggtaggcgccgtcgtatggggatggagcggggccgtcttcgagtagaccggattggtaaacgagaactgttgtcctcgccgactagggcgagcataggtgagggggatctgcgaaatctttttgagggtgaggaattgaggataatgttgttcaattatagggagttgagtatcatcccgaaggttgagccgatgtagtatatggtgtcatcgctgtgtgtatgtaactataacttgtattgtaatgtggcatgttggccgttttcgcacgcctgcgctgatccggctgcacccataggcgactttcgcgcgaagtgtcgattgacgtacttgctgcacttatccgtcggcacccttaggcgactttggcacgtagtgttttttcggagaaagacttcgatggcgtatttta

SEQ ID NO: 168909 - DNA, 1110 bp, Zea Mays
ctccctgtttgatcttgccgcccgagggggatctacctgacctggggtataagagaaaaagcacgccgcatctgcgcatctcttgcttgccgcacagagagagtcatggagaacgagaagcaagagataaatgggggggggggggaagccgccacactcgatctacgaattcgcagccgatcgatgcttggggatgggtctcggaggtccgctggcgtgtgaagatctcgtccgatcgattcctcggatgcgtgggccacttgggtccagggaatcgctcaccggagcgctgggcccaccatggactgcacgtctctgtggttcaggcactactccgcacaatcgtcggtaagaacctccccatagtttcgctttcacctctgcatggtgtagcatcttttgtttcgaagttgaattagtggataatctactggtcgaataccggccatggtgccaccacattgggtgggcaccgccgcttcgttggccagagaaggaagagggccgtctatccattgatcgactaagaaacggtgacgattagagcaggcagataccggttgggcccttgatccataccgttgatccgggatcggagcgttgtgggttgggcacaactattttaaatccgaaccataggcgctcgatcggatgaataggcttgcatcaaagggtggtctattgtgggctattgatacgggatccaaaggtgggggtgacataccgattcgttatgaaatccgacatatcggtggcgtgggcttctaatccaacggcacagatcagcccatacctcttcgtcgtggtgctttcgcataagagaccccgagtttctgaaaactaaacccgccatccccgtatgcataaaaatcactgcacctaggtcctatttttcacgagttagcccctgaactctcaagaattagtgtccgctgtccaacaaggataaaataaatggtgaattgaatatagaaattgattttgttgtaaaaataaacctagaaatcttagataaatcataacttgaccgttttaactcagatttaaaccgttcaggttgtgttagcttcataataaaatgtcctacgcagtgacatcattattgtacca

SEQ ID NO: 168910 - DNA, 653 bp, Zea Mays
acgagaccttcagtccggtggtcaagcctgccaccatccggactgtcctgactctcgctctgtcccgggactggccggtccaccagctcgacgtgaagaacgcttttctccacgacaccctaacggagacagtctactacactcaactcgttgggttcgttgaccctactcaccccgacatggtctgcaagctcaacaagtcactctacagcctcaagcaggcccccggggcttggtacagtcgcttcgccaccttcttgtgttcgcagggcttcgtcaaagccaagtcagacacgtccctgttcctcctccatcgcgccccgaacactgtgtacctcctcctctacgtcgacgatattgtgctcaccacctcctccattgggctcctgcgtcgcatcatctcctgccttcagcaagagttcgtgatgaaggacatgggggtgcttcatcacttcctggggtaaaccgtcgagcgccgtccccagggcatgttccttcaccagcgctagtacacagttgacctccttggtcgtgctggcatggctgggtgcaagccctgcgcgaccccggtggacacgtagggcaaggtctccactgccggccccctggtcgctgatccaaccggctactggagcatcgtcggggcactttag

SEQ ID NO: 168911 - DNA, 825 bp, Zea Mays
agtaacctgtaaagaggtacccaccataaagcagcactgtcacaggctcacagcagagtaaccgtaaagcagcactgtcacagcaggccgtcagaaaacgttttagaaggttacatacgcctaaagccaggagcaacagccactgtcaactcctgtgccagcagtacaaagtctcagggattaagaataattgacactgcatacgaaacgctcttccatggaacactggataaaagcccgattaccgagagaattagcactggccttgttttcacagaacacgaggaagagatgttttcacctccaaagagagcagcagcgattaacaattcaggggagggagagggaggctgcaatggcagtaataagtacaccaactggcgataaacatatgcagagatcatgacaccaaccacaccaccttcctctcatcttccccgtcactagcactagcgcatccagtatccattttcctgattaaaaaccgattccagtacgattagtttaagtgtccaggccaagatccaatcaagcctgctctttagtagcagcagcacactgtcacacacaacactgcaacaatcgttcaaaaatctgttctttcgcttggtttttctttggggggccaaattgtaggcaattgcttggtgctcatttggatccagatctcctgcgctttccctgtagtacaaacaattcatggggtctccccctctacaatcccaatgcttgcgagaggcgccacctcacagagccagccatccaccgcattgccgcccccctcgcctctcctcacgtcacccgcccgtctcagcctcaccaccg

SEQ ID NO: 168912 - DNA, 733 bp, Zea Mays
cttgaacgctccgcttaggtctcgccatccgcgtccctcttccgcttccactcttcctcgatgacggcgacctcaggaaggggcggaaggcacactgccatgggaccgatccctgtagagaacactttagaggaaacgggagaatgaaagaaatgaagcaacacaccaaggagaaggggctcactagagtgcttgtaatgtctttggacaggggaggggatagatcttcatccacgaaggatgccaacgataatgtcataacgaccctaaccctgacctccatcttagatagagcgagcgatgctagggaatggcggtcaggatcgtcaaccctagagaattgatgcatcggactttggcgagccattagaggctagattcggcaatgcatgaaagtccgcaccagccacacgcctgagagaccctgctgcttcgacgtcttgaccactgttagcaggttccctatctcggttttgaggctcacctccccatcgtgctgccaatcatttgaggacaccagctcacggtcggtgaacgacgaagtgctcatgaccagattcctcacatagaaccactcgccctcatactgaacagaagaggggagggggatcttgaagtactccgccttccgactaaagcaaagctgaatgatggtcaatccgatgaatagttgatcatcgtagctcgagacacccgcgatggagaagtaccgccacaacttctagtggagtca

SEQ ID NO: 168913 - DNA, 304 bp, Zea Mays
gcccacagtctgatagttttgctcccttcgctgccagatactgctgcaacagaaatagcaagcacactctcgaggctagtctcagttgcaggctcttcagagtccatctccggctcagatgcacccattgttagagcccacatttcttcaaccagatgtaaaggcactgtgttagagcacgtgtgaagttgaccccatctttctccacacttaaaacacagtcccttagccttccgatatgccttgagggcttccattttactcgtttcacctttagcacccactgttgccatagacctccgtt

SEQ ID NO: 168914 - DNA, 801 bp, Zea Mays
ctcccctcggcctttcagcccaagccgccccaactaaccctcccgagcgcgtgcgcccgcgtccgctggtaggcgggccccacctgtcggcgtcgcgccctgcccgctcactccccctctctttctctgcccggtgggaccgattgtcggcgccaactcccttcgcgcgcgcattcccttctctcactgtcccacggaccccgctcgtcagctcgttcgcccgttcggccgttcgctctcgctggcacgtgggctctgcctgtcagacccgtcctcctcctccgcaactgctgcccatggcgtgcgccccgcccacatcgcccgagcactaggtaaagccccgcacactccctcagctcgcccctacctcactttcgcgctcccccgccctcgcactcacccagccgcggagctgtttccccctcgtcgtcgcttcactgttccgccgttgccgctggacttctgccagcgctttggccacggtgagctttgcctgagcttggcgcatcgggaacccagagtggtttcccctttcctcaactctaccgcccggtccgcgcttaacctcttccctgagcaggccagagttcgctgccaccacaatccttcgacgtccggccaaccggagcctcctcgcgccacgccaagtcaccccgagttccgtcccaaggtgagatgtctgttcccatgctcgatttctcccaattccgctttgtcttggccaattcggctttgctggtgtttggccgcgctagtttgttgcgcccgcgtagtgactggctgatatagcctggtcctgtg

SEQ ID NO: 168915 - DNA, 1630 bp, Zea Mays
cggaaatcgtactttgtccaacttgtcatcttatagacatgtgcgggctgctcattcacaagcagaagcaacaatccagcctgtccgtgctgataagccaggcatatcaactgggtgtttgccaagaaatgaaactcttagttttggtgtttataatggtcaatgtaatcgaatgtctcagcatttgagatactctgaagtgcagaataagcttcattctgagtttacaacagacagtaatatgggaaaggcagtcaatcgtcatgggttgaagccacttcagatgtatgtaaagaagacaaacaccacatttggttctgctaacaagccggttggttcaattggtgttcctgaatgtcctgtagggaagaatagaattgagctagacaaagcttctattttagcatcgccaacttctacttggtcccattcatcagctcaaaaacctatagcttctgctcatttgcatcaaatgagagcaccacatgaatccatccttggtaagaagcctaacatatcagttgagttgcatcaagtgaaagtaccacatgaaaccatccttgatgagaagtctagcatatcagttgagttagtgagagtaccacatgagtccatccttagtaaaaagcctagcccatcagctgagcatgcatcaagtagggcgcatgattctgaagtttgtggcatcaattataatccaacatgtcagcaattcaaatcttctgaagcccagaataagctccactcttgctctaatgtcggtgatagcagtgggaggttaggaaatgaatataagaccaataaagagcaaccatatgcagaatgtataaatattttcacaacttcagcaagcaatgaaataaatccgtctactagaacttttgataattctaacggaagtactttgagatatccaaaacaatctttgtcagcatcgtcaagctctaaattgcttcagagtgcaaaggtgaatggctcaaatctgatgttatcggatcatatatctttacttgctgataatttgcatcaggatggagcaacaaccatttttggtaagaatagcacatcatttcagtgcactgccaaaagtagaacttttgtttttggtgctagtagtggccagtaccatcagacatatcagcaatcccagtcttctctgctatcagagcaacataattcaggtactagtatggagcatggtcattctgactcaataaattcgcatagaggcagcgctgcttcgccatcagtagagcataatggtgttccttttgcacaaacacgaacattctccagtggctcagcttttgaaggtttggatgatatttgcaatggttttactacactgaatatttctgaatgccctcaaggaactactgagaccagggctcaagatccacctactaatggtccttcaatgtgcatgctagataattatgaacatcctgtagtttttcgcgagaacagatcaacttttgacttggattctaaccccagctgctatcagaatcactctagtgatcctcaaagtggccaacctcctttcagcgactatatttggcaccaacctaatctgtccagtgatatgcaaagctcctctgagctctctggagataagccaagacatctg

SEQ ID NO: 168916 - DNA, 600 bp, Zea Mays
tttgaggtgacaatgagcagcatcgtcgcctccttcctatggtgaagtgccatctcccacatggacttggcctccttttgtgccctggttgtagtagcgctaatagccagtgtctgctccttcatcttccaatggcctcctccatgtcctttctttggagagcatatgtggccattggcatgcaggattcctagaagtcgaccactaattggtctagcatcagcttgatggcctcttacttcttctttagtagctcccactcaatgatagccatggtgtacatctatttcatgccttgtagtcccgcaatagtactatgcctagaggctatggagacctctacaaatgatatattatgttgttgcgagcttgctaatacatgaaacaacatccaatttggggggtcattgttggcctcgtagctgcggaacatagcagcccttcttgcctctatggtagtggcctcctaagactaagcactaatggatacccctagcatgctcctgctctaataggagcccttcatcactatcagtgataggcatcactgggggaacattgtcgtcgatcaaggcctctagcatcactccatcgagagca

SEQ ID NO: 168917 - DNA, 735 bp, Zea Mays
caaaaagtggttacaccttatattctgggacgaagggagtatcttttagcacatcaacccacttggttggcaggactgtagcctatcttgtttagcctcctatagctccaccaaaaacctgaaccaggacgttctacttgtgatcccttcaaccgctctaccacctctgtcgagactgccacaccggcatcatcacggtcctagagattagaaaatagcttgggaagtaagaggtgagatcgagtgctccgcaaattctttcatatttcacttttttattgcttccctctaacatggcaggatccaattcgagtgttcatagtgggaaccatggagatggggagccctctatctctcgggctgaattgcatcacatggtcgactcactcgtggaggccatgggaaggacgtttgatgaacgtctgcccgcaagaggacggaggctacatcatcgtgatccagaagaatttaactgagaagaatccagagatgagaattctggtcttggccatggatttgatcgcttcagcaatggccgtggaggttatggtggtggttgccacgctaatttcgataatccacgtggaaggtgtcgtgcacacgaacgctgagtgagatttaaagatgaatagtttgatgactatgatcgtgaagaaggatccgataagaacccctttgccaatggggaaatgttaggtcagcgtcatcactaccgtatcgattttcaaagtagag

SEQ ID NO: 168918 - DNA, 535 bp, Zea Mays
gttgttccatcgttcttgctgatgaggtcttttcagctaatctcgtggtgatttccctgggggtcatttgatgttatcttgggtatggattggttaactcagtatcgcgcagttatatcctgtttttggaagacagtgttattgcaggcgccgtcgggtagggaggtggtattcttgggaagctctccaaagttcactctctccttgttgtcccaattacttccggatcgtcggtcaaggaagtcagaaatttttttctccatggtggtggagagtgagactgccttgcgggtgcaggacatccgtgtggtgtgtgattatgctgacgtgtttccagtggagctaccaggcattccaccggagcgtgatgcggcttttgaaatcaagctgattccgggtacgcagcctattcacaaggccccgtatcggatggctccaaaggagcaggttaaattgaagcggcaattggacgatctgctggctaagggtttcattaggcctagcaggtcaccatgggctttcccggtattgtttg

SEQ ID NO: 168919 - DNA, 450 bp, Zea Mays
gggaccgaggcccgcaacagcgaagattctattgtcttttccatggcaaagactcgacacacccaaccagggattgctctaaaaccaaagccacaaaagattgaatggccagaaaccaaccggctgacaaccaaagagttgtcgcccacacctaccatccccatcagtacaaccaacaccaattccatgatgaacatttccatcctcaccagcagaaccacaatatataccagcaacaccaagaaatcctagctctaccgcctccaccacaaccacagcatccaaatcaaccgttaccaccacccccagcactgaagcaagaggacttcaccgatcaacccttttgaggggtcattcacatgattaccggaggatccagctccgaattcaacacataacgacagaagaaagaccactatcgaagggtcaatcatgtagccctcaccgggc

SEQ ID NO: 168920 - DNA, 814 bp, Zea Mays
ttcaagtgactgttgcctttgctacttttttgatttacacgcttaatagttcacccatatgcctaatgttgccgacatttttagaagtaaccgtcgagcgatgactgatactgccgtcattttagaggtaaccgtcgagtgatgcttgatactgctagcgttttagaggtaaccgtcgagtaatgtctgacattgtcggtgttttagaggtaatcgccgagtgatgcctgaaactttgctttcccgagtagtgacctggcactttttagaaatagtgctcgacctgggaaaccccatttatactcgcatcgacgtgctttttctatttctgagccctaacttcacttttttcaccttgaaccactcttctgcttccctgagatctcgatcctgcttgttccgccagaaagattgtgatggcgccgaagtggaagagatagagcaccgttgctgcgatcatcacgcctatcgaccccaacagccagctgccattcgctggtaaccatatgtccatcatttcggaatttgacctccttcatctcgttgacgttgggattttgcttccaaaagagctctgctcttagcgaatttgttgcggcgtcaccgttccgatagaggatacccatgaatctgtcgtttatgttccttttcttattcgtggtcttgctcttctcgtctccccctttttccgcggtctccttgatttctatgaattgaacttgacgcatcagaactctaattccattctacaaatttccattttcgtacatctgtgtgaggcctttctcggaattctcccccatttcgatctttg

SEQ ID NO: 168921 - DNA, 637 bp, Zea Mays
cttaaggaaccaccataggagaactccataactcttatgggtgtggcccatggcttggatggccactctggtgacagaactaaccgatagcggtagataagcacaagtagtggtaggtttgccgatggcagtcgtggtcctaaggatggcggtcgttgccttaaagcgacacttatagcactaattgagctaggtggcttggatggttatggagctggcagaggtggctagtccatccgtgagcagtatgatgaccacaactttcatcacccaaagatcaatttccctaacctatagtgtgacacgcagtcgcccgagcttacgagtgatatatgtttgtatcctcaggcgtaacctcaccaatatctactatgacatcggctaggaagaccctagtatcgtttccttccatataggcaaccttggaaacatctaagccatgtttctaatagttgtccctaaaggagttggcggccaaatgggcaaacagggaatgctaccactaccctaaaaggtacaccagcgtccacaaatgtgtgtccaaggtcgtgtttctgttgtagctcaatgatgaggaggaaatagaggccacgatcgaagagctgagatctccctgtatgccttgatagggatcaac

SEQ ID NO: 168922 - DNA, 668 bp, Zea Mays
gtcctatctaggacctatatgcttgtgttgcatacatatctcggaattgtaaatactcatagtcactgaattgactcggggtagtactttgacgagaatggtaaaggtcggtcctgaatggacacatacctagggttatgtagcctaactacacttgatttcaccctttggcatccttatattatctacctctcatctaccaaaagtaagaagagtagaaaaatagtagtgaaatcccacatcaccacagagcttgaagctacattaggcattaatttgtccttggttcttggcgttggaagagccacaatttttgaccataataccgttcgtgatgttaatttgtgataaaaatataaatatcttatggagacctgttgtattctccctagtcctgatgactccttcgtatgagagtagtactatctgttgttgaagcttggtcccaggcagataccagtcttgtttcgttcttgtcaagtagttatcatcatttacttcatcaaaagctagttatatggtgatttttcccagatagaatgaattcttggccttgtctattctattccaaagcttctctttttgctgaacaatgaagagatcgaaataatgctttatagaacaaattggtgtataatatgaggagaaaagtttgccctgttggcagc

SEQ ID NO: 168923 - DNA, 1673 bp, Zea Mays
aacaaaggagaaggtttttccgagggttttgatgcacacctcaacattgagcagatgaataaaacatcagttgagctatttcaaatgtatgatgaccataggagagaaggtgttctcttctcaacagaaaaggagtttcggggttattatgcactgctcaagttagacaaacatcctggttacaaggtgaggcaacttgagcagatctggtcttttgcgttctgatatttgctgactcatagatacatctgaattaggttgaacctgctgagttatctctggatcttgctaagatgtctcgtgaaattagaggcagtccagagatcttgtttgcaagagaagttgcaaggtagtcataccattaagcattattttgtgcttatcatatttgtactagctttcatctaatgcctacatttcctatacattcagagcatgcagaatggggaactttatttccttcttccgtcttgcaaggaaagctacatatttgcaggcctgtttgatgcatgctcattttgcaaaggtagaattattgtctctaaaagctgttcatcaacataccctttcagtggaatttattcttcctaatctcttatttcctaggccaactgtgtttgaaatactgtaatggcaaccaaaaaaacattgaccaacctggtaggaactaggtgacttcttattaaggagaaataggcacaatcgaacttgggtggcttacgggtgcatccacattctcaatcaactgagctaggctcagttcctataatataatggaattacctgtgataatggatttagaatgcgagcattcttttcacaatgcaaaaaatctactgtggtataaagataaacttgattcatttcagttattgcatgcttaccattgtatgtttgtcctataacaatttggcactcgattgagtggaaaggttttgccaccctggcccattgccagtgactactgctcaagggtggcaaattatcatgtgcctcaatgattggaaaaggcactgaactcactcggtatatcatatgcctggcatcgtactgcatgctcagtatacttccaacattttgataacgttacggaaaagctttacagagagtaaaagctatatttatatgataaatggagtccatgcacaaagatacagaaaataagagatagagctccacaagttaaaagagtggacaaagaagtaaagaaccacctaacctgtctaatctaaaatcttgagcatcacattggaatttctaactttaaaagcctctgaacttaattcatcgtggcttaatgagtgcatgctgttacacattatttagttattagcattagatcattttgtgatagcagtgtctttcagtacttctaaatcactacttcggtgtactttcatgtagtaggctgctgttcaatttcaagtgcaccttttttttgtaaatttaacaagcgaactctcttcccagctaaggaggcaagcactcgcttccttgcacagtggtcttcagaatggccaaggcatccctatttcgcaggttgtggtgtggcttgctatggaggttagtatgttttcttcctttggacagaaactaattctgaactgggaacttgtgaaatccttatatgccttcattttctctttcaagggcgaggatgttgaaaatctatt

SEQ ID NO: 168924 - DNA, 712 bp, Zea Mays
caaatttgaagggctggagtttcatcatgtggaaagggatcgcaacgtggtagccgacgcgttgtcgaaactaggatccagtcgaactcaggtcccacctggagttttcgtccaggaggtgccacgcccgagcatttcctcagatcaagcagaagaatgcaatgttttgagccagccagagtcagactctaatgactggagggagcctatcatcaggtatataaagaatgaagaggaatcggatgataaagccacagcggaatgcatcgtgaggcagtctgcccactacaacctcataggggacgcactatacagaaggggtgcaacaggagtcctcatgaagtgcattccttcggttactaggaagcaactgctagatgaggttcacgccagacagtgcgggatacacgcagcattcagaactctggttgggaaggtctttaggtctggtttttgctggccgacggcaaagagtgatgcagccaagttagtccatatatgtgaagcttgccaattcttatcaaaacagcagcatttgccagcacagcaactgcagaccatacccataacgtggccatttgcgtgctgggtactggacatgattggacctttcaagaaagctcagggaggctacactcatgtgttggtcaccatagacaaattcaccagatggatagaatataaacccattgcttctctaacttcagccaag

SEQ ID NO: 168925 - DNA, 360 bp, Zea Mays
ccgtaagcttttggacgtccttgatgcgggccagaggcctcattgtctcaattgccttgatcttctctgggtttgcttcaatgccccagtgagaaaccaggaatcccagcaacttccctgcagagacaccaaagacgcagttgtccgggttcagcttcgtgcatgttgcccgcagcttgtcaaaaaccagggttaagtcttccactagggtcgatcctctcttagtcttgaccacgatgtcatcgacgtatacctccatcttgtccctaattaggtccccgaaagtcttactcatcgcccgtacaaatgttggcaaggcatttttcataccgtaaggcattacaatataacagtaaagcc

SEQ ID NO: 168926 - DNA, 763 bp, Zea Mays
gcaggagcacagtgccccaaggtcgtagttaaggggtttttgttttaacttgtaataacctgttaaggggtttttgtattaaatatgaattgcatgtagaacataaaatccattgtgtcataatctggtaggtaagtgcttgaggctggctgcataatagcaggtttgttttcatttttcaaacacaaacatgtatcctttttgaagcaaacacatttgatcgatgtcttgtgtgggtatcatgcactttttgcgtgggttccacctccactgcgcgggctgtatatagagccgcccacctgccccacaccatgtcgtcaccgagttgtgagtggggcatccgtcgcctctaatccaaataaggtaacacccttgcgccttctcatacaaaaacagtagtgcatcgtcttgatcaatctcacttagccgctgcttgcctagatgctgtgtttgtatcgatgtcttcatgttttctccatctcatcagttccccatcccaatccaatcctaaataggaggagctgcggccagacatgggcggcagagtagtatctggatccgctgaacacccaccggtggtatctagctttcctatcaatcagtggctttcaaaggtacactcctattgtgtgcgtactaatttttaatttattattgttcactctcgctttgttttcttgttgttgatgcatctcctctcgtactctactgcattcattgaagcactttgcactttcatcaggacgactcagagagtgtctcg

SEQ ID NO: 168927 - DNA, 661 bp, Zea Mays
ggcaaaggtaagaaaattcaaacaattttgtcaagatttacttgaatgatacataataaattcatttattagtgtttatcaaccagatcgacaataacaaagctatacctgatttgaggatttgtgaatgcgctagactgtattttgttgtggataacaaattctttcaaaaaaaaaggaagttgtggataacaggagcacaatatgcacaaagccaccaatttacaaagcacatcagtagatcatcttgagattgccaaagatgctagtacgcgctaaattaaacaaaaaaatgaacatgccagtgatgctgcatgaggattccattccaccagaaccaggcaacagtgtagcaggcatgaacagtgaggtcaactgctgcctccaccagcattcgcaacagctcctcatcttgcattgcacagcttgctcactgatgccatgatctggatctaacactaaaatacagactcgcgcacaccattttgcctcttacctaaggaaacaaacaaaccgaaagcatcagcttgtcatgcagataggtggttttgttgcagcagcacaacacctcccatcaatgagattcttgttgtcgataccgtcgacgagttcatttcttcacattgtttggttatataaagaggcctctacagccctgtcg

SEQ ID NO: 168928 - DNA, 535 bp, Zea Mays
cgacacgaagcttctatttattgtacgaatttacaataatgcccatctatttttacataagttatttacaaatggtataaaggcagtagtgtacttttcttcgttcttgccttcacgagttctagacttcgtcactcagctacttcttcctttcggcttgtgaccgaagtcgctaccttcagccactgtctttatcgcttgcatatagacaaagtgttttgtatgctgctctatgtcaaatcttagctttgtacgctggtgaggacattcctgaaatgcacttgttaatcgccatgtggacatagattttgaagaggacaacacggtcatccaccctacgtagcccaaccatgtggagttcaggaaatccaagatcaaagaagggcacatagaggtacttaaccgcttcggcaactttgactaggtgcagttaggggtgatgagttagtaccgaatacgagggaggacaaagttgtcgtgtttcagggtttgttgaaggctggtcttaggtttcctttgcataagatggtagttg

SEQ ID NO: 168929 - DNA, 291 bp, Zea Mays
aagctagagtaaggacttggcgtcgatggattgagtgcaattgtaaagagcaaatgtagacacaattgatgaaccttacatgatgacatagattggaccatgtcgtctatgatgttttaggccatgcaatacttgtgttgattacaagtgacttcataaaggttgatgcttgtatagcatcaacatcagaggaatgtgtaacaaaaaatgtttgaattgtagaatatagtacaatgccatgtgctgcgatggcacaccaatcatatttgacggtatagtgcaacagttcta

SEQ ID NO: 168930 - DNA, 404 bp, Zea Mays
gcaaaaaacaaacaaaggtatgaaatatggctcaaaccgtgaagtactactccaatgctatgaatcttagtgagagatgtgaccgcatgtgaacaatctacaaactaacttttgtataatcctctgaattttttatcgcaagcaactagaaccaagttaagactccatgccaagtttcactattttttgaccacctttggtatttatttgatttttttcggattggaaaggcatttagaccatagaaatcaataaataatccgaaatgggagatcttcagcggaagtaagtttgtagcggttagaagaacatatggtacacttttcaagcaaaaaacaaacaaaggtatgaaatatggctcaaaccgtgaagtactactccaatgctatgaatcttagtgagag

SEQ ID NO: 168931 - DNA, 605 bp, Zea Mays
aggtcagtcatttcagggtatttggctgcggatgctttgtgctaaaacagggtaatctggacaagtttgagtcccggtcttctgatggggtttttctgggttaaccattacattctcatgcttatcgtgttcttaacctagagactaaccgcattatggagacttgtgaggttacattcgatgagactgcaccttgtccatcacctgtctttgagcctgcaggtccagattagatgggatagaccatctttgttgaggaggagcacgacaacgatgattgggttgctctcaagccaactccaccagccgccctagttgagcctgcttccactactatggctgacgaacccgaccccactccttccaccacttggggttcgcatgagccagctccttctgggactggaggagttgaagctactgttgagggggaggccacttcctcaagggaggctccacaacatattcagcgccatcacccacctcagcagatgatcggggagcttcacgagcgagtcactcgctctaagtcacaacacatttctcattttgctcactcagcttttgttgctacttttgagccccgagatgttggacatgcttta

SEQ ID NO: 168932 - DNA, 499 bp, Zea Mays
tccgttagtagggtatagtggtcaccctaggtcgagtaagcgcgagcatgttgcaccatcttaagtcattgccgacttaagccgattgctccgttagtagggtatagtggtcaccctaagtcgagtaagcgcgagcatgttgcaccgtcttaagtcattgccgactcaaaccgattgctccgttagtagggtatagtggccaccctaagtcgagtaagtgtgttgattccaagtctagccgaagtcaattgataaccaatagtgtgaatgcctttgagaaggaaatcttttattgatgacgtattttccaattacagagtacaacattgctctgatagctttttgagtcttgctaaggataaaacttcctgaggtgctctatattccatgagttctccacttccgtgcaatccatttgagtaagccgatatgatcttggccgagtgacctccaacaccatgaatggcccttcccatagtggcgataatttgtgccgtcc

SEQ ID NO: 168933 - DNA, 1503 bp, Zea Mays
ggcagcagcaagagacactgcaaagcaaaggcaggcggaccaaggatgaagaagagcacgcatgcatctttctcagcactcctcgtttacatctgtacccttcttttccttcttctgagaactgaggagagaaaaaaaatgctagctgatggtatgcaatgccaagcgaaaaggcacaatagatacaagagtaaagcctgaagcaaagcagagaggagtcacaaccatttctttctttaccctgctgtcacccacacagtcagttcagtcccccgtgctcgcaacaactacagctaccgttgaattgtttaactggagaggcaagagggcccctagctagagaacaagagagccgagacccactgctgtgttttcttcagacatcagaccacaaacagtggcaacttgcgaggagcgagagaaatcacactgctagagttgcagatgctccagggaaattcacatgctcccctgaaaaggtgaacaaaagatgaacagggctagctaacccggtccttggccaccacctgcatctgcatgctggcgctcctccaggtccccagtgacctgcagcagctgtgcaccgtctccactgcctggcatgcgggcccacgtggcacgcccacatggcaatggcagccaagcccacaggaaccctaataatccaaccaggcagcaacagcaacaagcatctccttccttcagccaacagcaagagtaatatatgtatgtattatcagtacatgtatcaagttgttttaaactaacaggcgggtggagacaccagggcaaagctccatgtttgatgccgtggctatcatcctcattcacctcatcagattacatgtccccaaggtatgaaggctgctcaagattctcctctctctctctctctctatgtctctctctccagttatttttttgcttatgcagggcccaaaacgcgccaatcttgaggcgacgacagggcagttcagcctggctgattccgtcaccaaattaataagccatgccaatgggcggccaacatttgtcttactggtaagcatgtactatgtttcagcctagtggcacatggggggtggtaggctctaagctttggattaaactaaacaaaaaaggtgccctcgaatcagataaacaaaatgacagttgttgacatgcgccctaacaagatcatcttgtgcctcgcgagttgtgtgtgggcaggacaggacaaaacaggctccaagatgccatgtgcatgttttcatgtcctctgcaccaccagatcatgcgttggactgatcgatccaagcaggcgtaggtccccaccacagcagcacgccactactatttcctcctctcccttttttctccgtcccgagtgagacgaactcagctatagtctacaggaagcatcaacaaactagtgccgtggaagtgtggagccatgcaacttattgttttttgtcttgtttgtgtaaaaaaaactggttatggacacagcaatggcatatatag

SEQ ID NO: 168934 - DNA, 636 bp, Zea Mays
gggatctgcacaaagtactcatcgataagggcagccagacagacatcatttttctgcatgcctttgaccgcatggacataagtcatagcttgctcaagccagcagacaaccccctctatggctttgaaggaaaaggaacatttccactcggctaaaatgaattaccattgccactcggcactgcaccaaactcaagaagtgagccgatcatctttgacagagttgatatggtttacccatacaacgccatcatggggcgaggatccatcaataaactagaagcagccatacatggattatacctgtgcaagaagatcctaggcccccaaggcataatcaccatatacagagactagcgggtcgctagaaacatagaaagggacttcgtccttggccagtgcaatgtgcattgcctcacaactaaccatgaagaccctagtagccttcgcccaatcaaagaaaaaaggatcagcgcctagctacaaagcaactaaggggtagtccccctagacacaaccacaatcaatcaaacggtcttgatcagcgaagacctcaccgaggcaaaagaagaaagactcatgtcctatctaaaccacaataaagatgtattagcgtggtcggccctttatcttgtcg

SEQ ID NO: 168935 - DNA, 789 bp, Zea Mays
caagcatgcagtcgtgcgtagattcgctgcatgcgggcatgcgattttttttgatagggtttatctggtctcaacacggatccccttgcatgccgcacaaccgaacccaactgaattggtacaccattccaattctcattctttttcatcaggaagaaaagaaaactgaaaaaggacctgtacacacgcacgcaattcatctctttaaggctatctgcagcggttccctctaaattctatcctctatatcccactagcgcaccacatcagcactctctccccctctatattctcactctctgcagcggtttcctctaaaacatcccctaaaccccaccataccaataaaatatatatttcccttcaactacctcaaccaccatcctttatttttaaatttccatattttgtcttattttgcaccgtatcatagttgtaggtgattaccaattactaagtaattcataatatgtaaaataattatccaaataaactacaataattcgtacctgaaatttgttaataaaaatattttcattgaatagtaacggttctagcgatttgcacccaaaaacgtacttggagtcgtacgaaatcaactaagaactagcgtatttgtaactcaacagttgcagctccaaggaaccccaacggccaacagcagatcctgaagcggttgaatggatcctcttctgagttccgacgaggctctagccgttgccgagttgtcaggcagcaggcagcaggcagcagtcccggcggcgagcccgacaccgtaggccagccact

SEQ ID NO: 168936 - DNA, 507 bp, Zea Mays
gaaataatgcaggattaataatatgaaattgtaaatattaattatcagtcgaagtgatttttgtgtaattgttgtcgggaatacgattccagaaacactagcttgcaccgtaagccacgacacttcttcaacaagtcatcgactagcttcgtatgcacaacaagaggatggcttgtctccgaagcctatccgttctataaataatcactcacgcttgaacacttcactcacacttcacttagagtgctccacaacaatgaactcgtacgtagattccaatatttttcttaggatggcgcaagacatggaagatgaagaacatgagttggaggttgcgacgtaccaacatcttaggcatcatgcacgcaatgagtgtcggtatgctggttccattcctggtcgtgttcgaatccaccgtgaccatatgagtggcgatgcaagaatccaagctatagatgtacatgaggcacgggcccgttaacccggcccgaggcccgttttttggcc

SEQ ID NO: 168937 - DNA, 1803 bp, Zea Mays
acaaaagaagctgcacaagacatgcaaacatcgccggatatctcaagcttccctttttgaaaaaccaatctcaagtgaaatgctcacacgggcagtattctagtatctgcgtaacattgatgaccagaaaaaaaaatgagtataataacagaaacccaattacacaaggaaaattcattctaagatcgtgtcttctggaaaataccacccaaagaacctggctccataaaataccattgcaaggtcaaaactatgggtttttttagcaatctgttattctgtttaattttggtctggttgtcgttaaaaaaaggacagatctggtgactcagttagacagctctcactgcggcaccaggctgccccataccatctcaacacagaacgagccatcttagcacgacctcaccagcagctccgcaggcaatctacttgccatctgcccatctccatgacatgctagctgccttctcagcacagattatacctgcttccatttcagcacatatgcactaatcctgcattggggctatccagtccttgtcttgctgctggcatcttcgcttggtggcgatgagcaggggtggtgtctggtgcttggatgggacatggcaaggttgccagtcatgcagcctggggcagagaggaacacgggagagtgcgcacagcacatgagcatagagccatagacacatcaattcagagacagaactgatagggtgaggttcatgcttgttctggccagtctggcacatgggtatcgctgtcatttcgggtatgtgtttagagaaaataaacaagaaataacatcctctaagccgatcaattctaacagattttccataatgtttgtacctttcagtgatattttatggaattaagttctttcggtaaactcctcctatgttgatcggaattccttgagtcgtttcaacatagccggtcccaagcccggtaaaggaggagggttgtgttaggtccggcaaaccaacgtaaaaaccagccaaatcttatggagatgaaaccacagagaaaatcgttggggtgtaaccctcttagcgacgcgccatatcggaacccgggtatggtgttaaatgagcaagggtcgggccgtcaccccttaagtgacgcgtcgtctcttgatctggagccggtgataagtgagcaaggatcgggtcgtcgcatccttagtggcgcgctacatcggcgcccgggtgtagtggaaaatgagcaagggtctttgcatcttcctcggtaggtgcgaagggtaaggaagctagtcgagccaactaggatccatgtaggtagttggaacgtaggttccttaacaggtaagttacgagaaatagtcgatgttgtggtgaggagacgggtaaatattttatgcgttcaagagaccaagtggaaaggacaaaaggcgaaggaagtggaaggtacaggcttcaagttgtggtacatggggactgcagcaaacaagaattgagtaggcgtcttgatcgacaagagccttaaagatggggtagtagatgttaagaggctaggagatagaatcatcctagtcaaactggtcattggggacttggttctcaatgttatcagcgcgtatgctcctcaagtaggccttaatgagaactcaaagagggagttctgggaaggtctggaggacatggttagtagtcaagggatgtcaaggaaacataaggaaaggcgatgggccctgatggtatccctatcgaggtatggagatgccttggagacatagcgatagtatggctgactaagcttttcaacaccatctttcag

SEQ ID NO: 168938 - DNA, 507 bp, Zea Mays
gtttcgaacaccagtttgagatgttccaagtgtttttgccaactgggactatacaccaatatatcgtccaggaaaaccatcacaaatttgcgaaggaaaggtgccaacaccaagttcattgcacactgaaaagttgcaggagcgtttgtgagaccaaaaggcattaccctaaattgataatgtccttgatgagttttaaacgcagtcttgtactcttcaccctcccccattcttacttgatgatatcccgctgtcatgtccatgctagagaagtattgagtccctgctagttcatccaaaatctcctctaccaccggcatcggaaatctgtttttatggtcatattgttcaattttctgtagtccacacaaaatcgccatgacccatctttcttttgcaccaacaatactggtgaagcaaatggactgacactgggaattataagtccacttttcaaaagctcagagacttgcttctctatttcagttttgtggaatggtgaataac

SEQ ID NO: 168939 - DNA, 526 bp, Zea Mays
ccacacagatgcttgtagaaaatattaacaaggttttccactaatcctggacctctacctgctgacatgctcggagcacaaggcacctgtaaaaatgcaagagaatagggacagtggaacctcctgccacataagcaaaaccagatatcattgttgtccatgtaatggtatatcttgtcttcatttcattaaaaactaaccgcggtcttcctacatctccacattttgcaaactacgagtgcatttcctaatgcaacagttatatgagtgttgcttttactaatgtaagaactgatccagttgcagtattcaacactgcctagctgagtgcaggctgagacaacacttactaatgttgcttcatcaggcatgaatcttccctcaagcatcatctgctgaaatgtgcacaatgcctcattatacctcgagttgtggttgtaccctctaatcattgcattccacaaaacaaagttattatcaggcatctgatcaaacaacactctagctgaatctagatccccaatct

SEQ ID NO: 168940 - DNA, 560 bp, Zea Mays
cgaaatatcgaagtcttttccaaaagtctccgcgcaaaagtcgcctacgggtgcagccggaatactagtacgaaaaatcgaagtctttttctaaagaactccgcacaaaagcctacgggaacagtctgaccaacgaaagcgcgcagcttcatcatacatactcatggttacacacatacagcgagggcatcacacattacatcggctcaaccttcgggattatactcatctccctatagttgaacaaaattatcctcaattcctcacccgtaaacagaattcgcagctccccctcacccacactcgccccagccggcgaggacaacaattcctgtttgccagccccatccacacaaagacgaccaccctccatctcaccacgatgacgcctttcacctcgcgacaattcacccactctctgtttcgccaccgctcttcgccgcctacacccagcactcacactaggatgaacctcagcgcccatcacacgcggaggagtctctgttgcagccacatccaactctgcaaaataatccaagtcctcttccgaagacccctcc

SEQ ID NO: 168941 - DNA, 558 bp, Zea Mays
gctcgttggtcgcaatccatgcccacggtgagtccctattcagcattgtcgcgtccgcgagattttgtagcgatattggtattgggtttcggtcgaccgggcatggatttcgccgcactccggcggggatccgccgtagtcatgggggcggcggcgccgtgctctgggtggtcgagaggtggaggatggctgtgtgccattgattttccgttggatgatgtagattagatggtaggatggccctcggatcttgatcgtgtggcttgcacgaattcagacatcataaaatcagagctacccatttcagatcgtggggtggggattgtataccggctcacggtggtagtgatctaatcgtgactctcggttttagatcgagcggccagagtgcaacgtaccccttcggctagcgtattatacaaaagaaaccctatgttattttagtatcaacccgccgtccatattcactatgctctgagtctaagatatcttgcgctgcggtccctgtctttttccgaaaatggggcccaatccagtgcctagttaaactgtataaat

SEQ ID NO: 168942 - DNA, 512 bp, Zea Mays
gcttctactgattctgcaagaatcacaagattcaacaatgaaaatgaagctcaagctgatgcgctgaacttcggacagtcttcaggttcactaaaaaacaagaaagtgacttcagctttcagcatactgctgtacattcttgattcccattaaccgagaatatagaggtcgaagctaacacataatttaacacttcccagacccagaaagtacagctgacattagagttgcttcggtaggctttctgttagactgttactggttttggatcgctagcttgttgagcaatttcagcatcacctgtggcagactaaaacgacgcctttaggtaaacacctactatatatctgtacatggatatgataagagtgaggtgaaagggctaatggttaaggctctcgtttagcgcctttaggtcccggttcgatcccccttggaagcgaatctcgggtttggttaaaaaaatctttgctgtgctccacccgctctcaaggttacgtcctgcgcaccac

SEQ ID NO: 168943 - DNA, 476 bp, Zea Mays
catagagggtgtagtaatgataggtagaagtactttacccaactaagctattgtgacccaaaagatctcaacctaaaagtcatgtgtctcgtacctaactatctgtcttatttgtaaatctatcttaccttatgtctctaacccagatggccaagtccaggacaggaggaggtgttgatcaatctgcacgcatttatcaaagaagggcaatagttaattcaaagtcacagatgaatcctccaaatcctccacccgctggggcagaaaccttcttcgccacttaaacccaactactatagcaaatggttaataccatggccaacatgcaagctcagatcagtaataaccagcatcacccacaccagccacctcctagagacaagcatagagagtttatgagccacaagcctcccacattctccagctccccagatccacttcaaactgatgactggcttaaatctttgaaaaagatg

SEQ ID NO: 168944 - DNA, 677 bp, Zea Mays
tggagagcgaggttagcctcggcgcgtgcaagcttggcatcgacgcgcgcagcctgggcctccgcgcaggccttgtcagcatcctccttctccgccgccagccggcggccgaggtcctccttttcggcctccatagttgatagcttctccatcaagttgcggctaacttgtcccgcacggcctcagtgtgctgcgcctggaggcgctcaatcctcccctcgagttgttgcctttcggcagcgaactccaaggtcagggccctcgacgcaattcgtttggcgaaggcggccgcctggtgtcgaacaccgtcaaatttgaagtcatatacaaagaacacactactgaagactacatacatgcttcagctgctgcgcaactgagcccgtcacgtccttagcagcggctgccgaagcgatcttgccattggtgcaaaacttggcccatgggtcctgcacagaccccttcgccccagtcgccacggcgacagacccagccaccaccaacgccgggacaacagcccagttgcccagccttcgatcctgcaccatagtctcgtcaaacacccagtcccaaaaaaactcaccaaaaggtccttgccctgtatgggcatcgaacattgtgtcgccgcccacaagatagtcatccacggaaatatccatggagacctcagccccgcc

SEQ ID NO: 168945 - DNA, 683 bp, Zea Mays
tccggcttctcgccaaagtatcttttggtttccactcaatatcttttttggtttcgcggagacaatgagaaatctcctaggctgagacgctgccagtcatcatgtcgcgttagcaaaggtctgtgagataaatgtggccgagtcaggattcaggaaaagcgtcatcattcatccagggtttggcgtggctgcatctgcatcattagtactagtacgtactactgtactgctttgggtttagcacgtgtgagccgtgccatgcagtctcggtacacgcatgcatcattgcgccgtagtgctttgttttgtcgcaaaattactggttccattcaaaccatatatatatagtacgtccggagcactgcttcttcacgtggcacaggtaccacacggtgagaagggacgcagacgcatataatccatgattcacaagccagaccacgcaccgtgcagacatgccgaacttcttcgtattttagccccctttttatttcacgttcacttttttatgggactgttaccatgttgggcactttgagtgtctgcgtgatgatctaccacgcaaattttctgcttttgcttccggtggctagttttggactctgagctaatatatcatcccagccagccgtttgagatctgtggaagcccaagtactcaaatatcactcggcagtgtaggcg

SEQ ID NO: 168946 - DNA, 959 bp, Zea Mays
ctctggtataggcaagggtaacaataaaccaggatagcggcttctatctggttttgcctggagacaaacagaacaagtactcacaaactccttaatttgacttttcattccaggccaactgaacacagacttaatacgtcgataggtaactgggaaacctgagtgacccccgactgcactgtcatgaagggcggtcatcaccttcaactgtaatgcagaatcatgttccagccacactctgcctttatgtcgaataatcccagctgtcaacgtgaaagggtccatggaatgtccagtagccagagattgcaacaactttttagcttgttcatcaaactcataccctttggtaacctcagccaaccaacttggtactacagaggaattggccaaagcatgtagctgcaaggttatatcatcacagtgcagatttggtcgtctggataaagcatcagccaccttgttctctactccttttttataaacaatagtgaaattcaaccccataagcttggttaatgcttttttctgccaaggagtagttaccctctgatcatctagatgaatgaggctctgctggtctgttttgatgacaagggcagcatgttgcagataaggtctccagtgttctattgcaaacaaaatagcaaggcattccttctcataagttgatagtcccaaatttttttgtcccaatgctttactaatgaaagcaatcgggtgcccctcctgttgtaacacagctccaattccaactccgcttgcatcagtttcaataacaaactctttggtaaaattcggtatagccaaaactggagcatgaatgagggcctctttcagtgcatcaaaagcctgttgggtactactagtccacacaaagagttgatcctttttcaacaggttagtcaaaggtttgcagattataccgaaaccagccacaaatcttcgataatacccag

SEQ ID NO: 168947 - DNA, 385 bp, Zea Mays
aatattcgtggaggcacgacggcttaccgtcggttcccgcgggtggttggtgaggtcagaggcattgtggggttcccgtcgatggtcgggttgcggtcggaggtgatcggagttacacggaccacgcctcccggttgcggagctcggcgacgtcttcgattttggctagccggaggtagtagcactcggtcgggctggctgggaagcttcactaggtgaaggtggagttacgggtccaaggaattggtcggcggtgaagggtggagctcgggccacgttcactggcgatctcgaggaatccggcgaggatgattttcctatttggatggggtatagtttcagctcgagcttggcgagtgaaagggaaatagggtcaaaccttttc

SEQ ID NO: 168948 - DNA, 1190 bp, Zea Mays
ccgacggatgggctctggcatcactgccactggcgtgtggacccaacgcctcagctcgtcttcgtcaacccatggagttcagaacagtagccgctgagatccgatttctgcgccgtttgcgtgatcggcgcgatggtggctgttgtgggatttaaaagggccaggaccccctttcacctccgtgatcctctaaaccaatgcgtgcacgcggccggggccagttcctcaagcttcctccccaacaactcctccgcttcctgcgcgtgaatactgctggtgccgcaacaaactactccgtggtcagcgcgaggaatccggccatgggccgaacgacgtgaattctctccccgcccggctataagccccaacctcctcctttatcgcctgggtaatagaaacccttctctgttcgccatctcgaatcgtcacctcctcccaactttaccttgagctatcctcgtcgcgacggagtgggcggagcttggcgtgtatctgcctgactggtagaatcgcggcggtgcttgtcattcggggagagcaggaggtcgccgccaccaagtctggccatcttccacgtcgcgctctgccgttgttggtcaccagtatgattttcgggggcgaatagaagaagtcgcgacttcggcgctgccgcagggccacacatcggcgtggtctgggttccctgcgcgttcaccatcggtaagaatcccctctccgagccgccatgattataaacatcacgttgagtcctgcggttttggaatcgagtgttggatccgtcgcatcacgaccaccagggttgctcgtcgtcgggtgtgcgtatcgccgcccaggtgtatgggtcgccctggtaatggcttgcgaagagagagagagtattgggcgtggggtagaagataaccagggaccatccgattggtaacgtacggctgcgattagaacatggatttacccccttcggatgtttaaatcacgatcgttcattgccgatccaacgcatctcgtagcgtatcctttcgggttataactgagtccatcggatctggatcgtgcggccgagatatagagataccccttcgccgtgcccatttgctaaagagcccctgaaaaataaaagaaataacccgcagtccttgttctactgttacctgggtctggtgaatcttctgggttagcccctgcactttcta

SEQ ID NO: 168949 - DNA, 331 bp, Zea Mays
ggaccctgcaagcttctggacgtccttgatgcgggcaggaggtctcattgtctcaattgccttgatcttctctgggtttgcttcaatgccccggtgtgaaaccaggaaccccagcaacttccctgcagagacaccaaagacgcacttgtccgggttgctcgtagcctgtcgaagaccagggttaagtcttccactagggtcgaccctctcttagtcttaaccacgatgtcatcaacatacacctccaccctgtccctaattaggtccccgaaagtcttactcatcgcccgtacaaatgttggcaaggcgtttttcagaccgtaaggtatta

SEQ ID NO: 168950 - DNA, 642 bp, Zea Mays
agagaaccgggctaatgcgcaaaaggggtcttgaggacgaagaagataagtgtcaccgaccacggtggtgctcggatggcctcagtcatacctagaagcgtaggatgcagtagttgcggaacctagaagaggctgaagtcaaataccttcaagtgcttaaaaaggcgcgtctggacctagcgatcaaggtgtgatacccagggagagtagaacaacgccctcagaggagggagtggcgccccaaggaaccaagagctaatggggaaggtaacggggaagccactgaggaagtcgacgagaaggccaagggagcaccatcgggcgatataaatatggtgtttgtgctccctttagagtttcatgcaccaaaacctaaagaatcatctatggctcagatggatctcggcccgcagccagttgtattcgagaagccgctagagaagggatacaagcatctgaaggcactgtacctcaagggttacctcaatggtaaacccctcaacagaatgatggtgagcaccggagcaacagttaacatcatgtcatatgttgtgctacactttttggggcgatctactgaagacttgatcaatactaacatgacacaagaccatcccacatcattcttcgtcaccagtagcc

SEQ ID NO: 168951 - DNA, 615 bp, Zea Mays
attggactgtcaggttattaggtctgaattttcaaacaaacagtgcaacccttgagactttgagcatggattcaattatgatccagcatgaatcggggtgaggggatagtgctcggggtctcggaaatatcaccaccgtggataagtccggccggtaaaacaaatccgaccaccgtactagcttgtcgcggtggaacccgataggctcgccggtgaaccgccgtcgcacggccttgtgccacatatccgagtacctccaccgcatcgcaatgattcgttttagcttcccgtcgatcaccggagtagtcgccacgacggttgacacgagttcacttgcaccagtaacctttccccaatccggctgccaccgcgccatcctcaaattcaagcgccaccgtccttggaagctataaatcgagcccgccgttagctccgcaacctcattacacatcacaccgtccagtatcgcccccaagcttgcaaccgtgagctccaatttcaagtttccggtcagccgcagggtcgagctaaccgcggccagcccctttccggtcagttcatccccctctctccctcgtttgagcactcttatagctctgtgatgcttgccaagcc

SEQ ID NO: 168952 - DNA, 536 bp, Zea Mays
tccgaagctcaccatgtcgccgacgactagaacatctcgggcgagctcaacttcgcttgatcgagtcctcaccaaggggccgagcggcgattaaggcgtggtggaccccgagctggaacgcgacgccctccagttcaggaatgtggccagagatgagtgtcattcggggagtcagggcagacattttcctcaactacgatgaccgcatacgaggtcaatggtcatagccacactagagcgctcggtgtgaagagcccgaaggcgctccaccgcacgagaaagctactctatcaccatcgtaggcgaaaaacaggaaatcccatgagaaaactactaggtctaggagggctaaaaattgaggatgaaagagcatgagcctcaccttctatcaagaacccagatgaatgtccttcaacatcacgcaccagcgaccgtgcttcggtaagacccagctgggccctcaaagagccctccctcgcttcaatcgtagggagctcaggcctcgccatcttaccaagctcggaccccgccaccac

SEQ ID NO: 168953 - DNA, 532 bp, Zea Mays
cgatgttccaggagtgctctaagtcttcgccggtgggcgttgatagcctgtacgcgctgggggatgccttcgacttgacgatgaatggaccctcccatttcggctccagcttaccccgtgactctgtccgggtggtccggacgagtacgaggtctcctgtgttgaactctcttgggacgaccgcgttgtcgcgccaggccttggtttgagcttggtatttgttgagggcctgcagggcgaagacgcggtctccgtcgatgaggtctttagacgttggttcgtcgacgtcggggattgctgatgtgtttgttcggggcgacccatgctttatttcctgcggcgtcatggcctccgatccatgtaacagacgaaaaggtgtgaatccggttgcccgacattcggtcgtgtttagggccccagactacttcaggtagttggtcggcccatttgcccttcttgtcgtcaagaagtcttttcttgatagcggtgaaaatcttgccgttggcgcgctcgacgacgccgttggattgcg

SEQ ID NO: 168954 - DNA, 400 bp, Zea Mays
cagcgtaccagctgtatgacttgtggcaccgggcccccgtgtcataagatggataccccggtgagcatcgggggagacttctcgcgacgtatcgaggcgggagcgggggaggctgcctttaaagaggggttcatccctcgagtagcagccatgccttgcttctctcccactcgcggtgccctttcgcctccgagctctctgcgcccctttgccttcaaggtctctgctttgcgttgttgtagtttgccatggctttgtaagttcatcccgagcatgcccagactgagtgagtgctcgacatggtataccgcttgcttggatgggatgcgccggcgttcggcggaaggatttgcgtcggcgccacaccctggtgaacttgccgttggagagttcgtgcctt

SEQ ID NO: 168955 - DNA, 518 bp, Zea Mays
ttcaaattatggggtttgtgccctaggtcaccacatcaaaattgtagcccaattataggtgaacaactttgctaaagagtgggagctcagttgttaagaaaagtttagagataaatgagcctgaagttggactgtcagactgcctgaagcctgaaattcagattaacagtgtgatgggatgaactttgagctcgattttgatttggatccagtgactttttgtgagtacacattatagcaaagatatagatggatcatagctctacacctttgctgcagaaagttgacatagattccacataaaatcgggagaaaatgtagctccaatatgccctgtcagtcgctctgaataagtggttcccatggtacagtagctgaaacagataaggtcgccagcgcggctgtcttcaccgccggtggctttccgccgtgattcacgtcgccggcgtcacgattcgcgctcgggtatgtggataacttcgcggcgtcaaaagatcgtcaccgcccgtgacctggac

SEQ ID NO: 168956 - DNA, 475 bp, Zea Mays
ggccgccggtgaccctctgccgtgattaacgccgatcgtcgcaattcgtgcgtttggtctgtggattgagttcgccggtgaaaagatctcgtcacggatgggttcaagttactgtggccacgctgtctctcagttcctcgcgctggcgacgtggccttacggacatcaccggaatccacgatattcaccgcggttgcgccacacctccagcctttaaccgcaccgccgtgactcacgttagccatccgatcatcgccggtgagtctgccacggtattctccacgaatcaactgcgccagtacccttctccctctccggccgccagcgcgtcttcgcgaaattgaacaccaccaccttgcactcctataaattgatggcctggcctattgcaccatactatcacgaagccagagcacccattaccgccttcaattagccaccatagccggtgaatttccttcttcccccaattctg

SEQ ID NO: 168957 - DNA, 453 bp, Zea Mays
tttcaattaggagaggacctcatacatcacggagactggggacacctctgacgcagtggtgacggaaccagcggaggccgcccctgcagaactacatgtgaatgctgctgctgcaatggagggtgttctgcatgctgccgggattgtggtaaatgtggtgcaagtggaggctgcctctatgcgtggtgaggtttatttattatttgtaagaaaacttcgtatgcttttggaggagggtcttctgatactcattgaacattgcttttgtgttggttccttcttgtggcctgtgtagggcgattttgtggctcattttgtaaaggaaaacaatccattggatgtcactatttgcctatttgtattacacccttagcttgccgaagtccattggactccgctagtgtatacaattttttgattcggagtcatccaggggcgattctagggaggggc

SEQ ID NO: 168958 - DNA, 782 bp, Zea Mays
agttaaggagttacgagctgtgtcgaggtcacaagcgaataagagggaggttttggagcataacgtcagcgtcttgaagaatgacgataagttattgaaagtctctcgtgatcaagccatggataaggtcatccacaccgatcggttgctcatgaagaaacctgatgtcgtcgttcttgaggacattgttactgatgtgctattcacgcttagtgtggatgctagaatttctctgagtgattctagatcgacatctgccgccaagagcggacatgattgatcttgtagcccaaacttgtgatgaacttgcggacctgattgatcttgtagcccaaacttgtgatgaacttgatcgccttgtagttgcagtatgagatctgtaacccatatgaatgcacttgatgatgatcgagttcaatatttgtgatagcctgagctagtgtccaagttacttccatatgttgtcagcgtaggccagaatgtaacctatgataggtgtatcattaaagaggtttagaaatcaccctcggtgttaatgagtgagcatgtagcaccgacttaagtcgatctctgacctaagtcgattgcccatttgcagggtttggaaaacaccctttagtttgcattgcgtgggcatgtaacaccaacctgagctagtccctcgacttaggttgattgccccatttatggggtttagaaaacatccttcagtttgcattgcatgggcatgtagcaccaacctgagccggtcccccgacttaggtcgcttgccctgtttatag

SEQ ID NO: 168959 - DNA, 812 bp, Zea Mays
attcaaagttcttcttctctctcccaagttgcttcatcttctccatgatgactctattgcactttgcacattttgattactttactcctcatgacacgagtcaaagtatcaaggatcttgataggatactccgtataagtcagatcatcttgaacgctaagctcctccataggcagttgcttttcgggtacccagagacacttcttcaactgggatacatagaagacatcatgtacatccgcaagatggtcgggtagttctagttggtaggcaacttcccccactcgctttaggatcatgaagggtacaataaagcgaggggacaacttccctttaactttaaacctcctcataccccggattggtgacacctttaggtacacgtgatcaccctccttgaattctaactgccttctccgggtatctgcatagcttttctgccttgattgcgcagttctcaagttctcccatttaaaccatacttgttcttctgcctttcaccagtttgatcccaatatagaggagtcctgcactttctgccatataaagcttcaaacgaggacaacttcaaactggcttgctaactgttattgtaagagaactccgcataggacaaactcttatcctaactgccaccatgtttaagagcacaagctcttaacatatcttcttgtacttggttggttctctcggtctgcccatcggtttgaggatggtaggccgagttgaaattcaacttcctgtccaaacactcgtgcaacttctgccaaaaacgagaagtgaactgggatccctggtctgacacgatcttc

SEQ ID NO: 168960 - DNA, 597 bp, Zea Mays
gaaccacacccgacccctacaatcaacaatcaacggtctgtcttaactcaagcgaatcggtatctggtttctaatcctagtcgcgcatttacgatcccacggctaccaatactacctaatcgcagccatctatcaagaaatcgatggccgcgccatctcttctccacctacccaggaagcagcgccgccgccatagccacacagtggagaacacggccgacacccatcggtcgtccccgagcctcactatcaaatcgaacggggctacacggagttaatcaaactgtgaggaggatgaggtagcacataccgacgattgcgatgtgatgaactccacccacggagctacacgatcggcgagaaattcacctggctttagcaggcgccctcccaattaaacctttccccagttgtagtggaggtagcccgacgcacgattggcttcactggcgcatgaatcccaccggcgatgagaatccgcgacagcgctcctactgcccccttcttctctctcggcggcacgcgcgacactctctctgctacggcggtggtcgcgatggtaggaagacagggaggaagaggcgagctcggtcgtgg

SEQ ID NO: 168961 - DNA, 425 bp, Zea Mays
agatcgccaagggggacggcgctggcgcggattcttccggcgagccctggcgcgctccacccaagcaggccgcgcaccaggttgagcgcctcctcagactgaaaacggtcaggatgaccaagcaaagccatggcgtgtaaggcggcgtgggcgtggaatagaggagcacgaaggcaaaggagcgcagacgattgggagagaatgcgaaaaggtaactgctacacgcggggtgaatcctttttcaaggaaacctgagtccttgttgagggaaacccttccgcgcgcccctgaatcgccacaggaaatcccgcccgacgcgcacctaggatccaggcagcccactctatgacacgggagctcgggtccacaggtcatacaggttgtgtactggacttcaggtgcggaaacagcgaaccgccgtacga

SEQ ID NO: 168962 - DNA, 502 bp, Zea Mays
catctgtgtgtaccgaagggagaggcacaagaaatcctgctagatgaagcccacaactcagcctattctatccacccagggtctaccaagatgtacctagacctcaaagctagatactggtggagaggaatgaaaaaagagatagctcagtatgtggcccggtgtgatacttgtcgatgaactacgcagaacatcagaggcccgcaggcctactgcaacccctttcagtgcccaaatggaagtgggaagaaataggcatggacttcataatcgtactgccccgaacccaaaaggggaacgattctatctgagttataattggccatcttactgaagtagctcacttcattcccgtaaagactacctttggaggagccaccctcgcccggatatatctcaaagaaatagtcagacttcatggcattccgcgaagaatagtgtcagacaggggaacgcaattcacctcaaaattttggttgagccttcagcaagctatgggcac

SEQ ID NO: 168963 - DNA, 288 bp, Zea Mays
ggacagggcagcatcaaacaaactagcatacttcctagcatcttggaaagaaatattttcctgctcatcacaaaagcccaaaagtctgcacactttagcagcagagtcagaacgcaacttagggggaaacttcgcaaccctcctgctacgtcgtggcttgaaattgcttggcatcaactttctgcgcttaacaataagaggagtaggcaacagttgagccgtcggcaaaacgagatagtttctgaattcctgcaattggggtgacagcaccaattcctcaaccaccag

SEQ ID NO: 168964 - DNA, 626 bp, Zea Mays
ggacttttgtgtgtgcatatcagatttaaattcaaacttgaaatttgaaatttgaaaatagaaaaggaaaggaaaaaaagaaaaaaaaagaaaaaggggaccatttctcctgctaggccgaattccttacccctcagcccactccctactccaatccagcccaatcccgctcagcccgcgccatggtgctacaccaatgacgtgtgggccccacttgtcatctttttcaaccggatgagacagacgccatggccggaaatctcacgatcaaacgcatggctccctcctggtttcttcgccaaccaatgcccaaccctatgcatataaccggggtcgtgactcctttggccatatgtgatggtagggatagtttgccgcaagaatgaagacaacagtaacgagaaaccatggtgatatgggagagaatcagaccaccgcagccacttcacgcatcggtcatcgtccagcctcgtctaggggtcatgcacgttcactagggagcataggtcgtgtgcatggtctgtggtgctgggatgttgtagcgtgcttggccgaatcgctcaatggagcaatgacgccgtcgtgggccaccctgctccgagggaggaatgtgtcatgacaccatt

SEQ ID NO: 168965 - DNA, 530 bp, Zea Mays
ggttttcactcaagactacactagtgaacctatcatcacatgtggtttaatttgagcaaaagacaccaaacttgggggtcaagatcgtaagtaggtgaaacccattttagaagtcatgctttggccttaccatgcacctaaagaggagagaagggctcaaaccctaattcaaatccctttaggcaaatgaagccctagaggggattatagcaaaaaggctatgtaaatcacattttcatgacttgggctaattataaaagttgtagtacacttaataccctacaaaaaatagaaagagagtgaccccaaaaagatttcagaaaaaccctaaaaaggtcaccaaagagaagaacacaaaagaaaaacgagattcttctcactttcaaaaccaaccctctttcaaagatcaaacatgttcacctttttccaaacctcaaaaccaaagggcccaattgacaaaatggcgcctaaagacccctagaacaccctggaaaagtttgaacccaaccctaaatcgtttgacatgactt

SEQ ID NO: 168966 - DNA, 936 bp, Zea Mays
ggaatatgcaaaatatataattcagcgtctaatacaatcacgcttaggcgtccaaaggccctcgattgtgaatagtgatagggctcaatcatgcatggtggccttcaacactgtgtgcagtagctatattggcaccagaaacttggtccaagagtacataactttcaaggtatgcccccttgttaatgaatgggaaattccaaaggagaccacatatagttcaagcgaaggtggtctagtttacctgaaatattcctatcgctatataagtcaattcggtgagccaaatgatgaatggcttgaggccattgaggcgactagtgatgatttgctaggagcttatacgaaagctgaagattaagctatgaatatcgccttcggcgctcgtgggaagaaaaggttgaatagagtatttgttgtcatcggttttgtctatcctgattactgctttccggctcgaaagcaaggggcgaaaaggaaaatcacatcaacaaccccctctaccgcgttgaaagcaaaggaaatgaaagttgtaactcaccggccgaagtcatattttttggagagggcttctttactgcctgccactacagtagtcgaagttcccaccattcaactggagaaggcaacaacagatagttcgaaggtcaaacatcaaccgaagctgcagagtcctccaacaatgccagggttgtcaagaacagcagcagttccagcagctactcctaggaaagggaggaggatgaccagcgctctagacactgttctgagaccttcgaaggtggctactcctgctcctactagggttttcaaagacaaagttgaagaattggaagaaggtgtcgctgcaagtgctgctcctgattgtactaagtctataccttcagaaactaggccgatagagcacaatcttccaaagaagttatcactactgat

SEQ ID NO: 168967 - DNA, 385 bp, Zea Mays
cttgacctgaagtactaccctcgccgttcgaccgcgagtgctggaggtgtgattgtctcgccagttggtgaaggcaatcccaggctgaacaacatggtcaacttggctgccgtgctcaacacagagttggaccacgcccttgacgagttgggcaaggtttgggcagaggttgcggaattgcgtgctgagtgcacagcacgccactatcttgatggtggttctcctgcccctatcgggatttagcacccttaccgttcacctccccatggtcgcttcgactatggtaccccagactgcaggacccggatagatttggatccctagatcgacagagtcggagtctgtaatagttcttagttcagtgtctcagtctaattagtcttag

SEQ ID NO: 168968 - DNA, 541 bp, Zea Mays
atgggacacccgcttggatacgggtgccccttggagtttgtggcgcaaatggagcgaagtcttggtcgaggttgtgaccctcgaagttttgccgacgctcgcgccctctccagagagactcgggcatcctcacccgcacgcctacggttgagctctgcccgcaggtcgtcagccctctccagagatattcgagcatcctcgcccatacgcctacggttgagctctgcccgcaggtcatcagtccgtgcagccctcactgagggtgagcgcacagatgtcgacgcctcgcgttgacgccggaatgatcgaggcctaggtctgaccgagccagaatgtgccatgccgaggagacggtcgacatcttcgcgccactgcctcatggcccccgacgaggtcatggaacttggagggttgcgtagcaactccctggctgcagacaatgccccaggagcagcccttgacggagccctggatgtctgcgctggcgtgtgctgctgcgcatcgtgcatagcagcagcaccaggcgtagggcggttagagc

SEQ ID NO: 168969 - DNA, 531 bp, Zea Mays
attaatacatgggaagagatgaagcgagtgatgaagaggcgatttgttccttccagctatcaatgtgatcttcgaaatcgattgcaattattgaagcaaggaaagaaatccgttgatgaatattttaaggagatggagttgctgttagtgcagactggaatcagagaagatctccagtcaaccatggcaagatttttaggcagactcaatgaagagatttctggatttgtagagatgttcccataccgtaccttgcaagatcaagttgatcaagcaatgcgtatagagagaaaaattcaacaagagtcatgtggaaaatcttatgcaagtcattataatgttgtcccatggcgcaaacagcaatcccgtgcttcttttggtggaggacgatcccaaggaaatgcagctaggtcttctccatccaatggtacatcaaagatggcggcttctataggttcattccctacaaataagcagtggcctactgctagtacatcagacccgactgaagcttcagtcgctacttcttct

SEQ ID NO: 168970 - DNA, 559 bp, Zea Mays
caaatagatgctccttgtgtgaccaagaatctgagataatagataatttgctagtgtcttgtgtcttcaccagagaattatggttcttccttttaaggcaatttgggttgcagagtttagccccacaactagggtcttcatcattcatgatttggtggcaagaggcttcagaagcagtgaataatcttatcaagaagggcctcaactctctcatcattttaggagcttggataatttggaaccaccgaaaaatgtgtttttgaaggaaggacacccagcttagcagcagctcttacactagcgagggaggaaagaggcttgtgggagatggcaggagccaaaggcctctcctacctagcagcatcccggctggttctttagtggtagtggttagagagcttagactgtagatgggccctttcatatgtgcttgttggtggcccccgtaaggaggcctctatatttgtatctgttttggtctattttagaccttttctcctatcttattataatgaggcacaactcttctgcgcgttcgagaaaaaaaaattatgtccat

SEQ ID NO: 168971 - DNA, 1310 bp, Zea Mays
ttaaatctaattgaaatttgaaatgggaaaagaaaggaattagaaaagaaaaagaaaaggttaccgtgcatccggcctaaaacctaaacttctcggcccaattgccttctgaccggcccacctccacaagcccgcgcgcgctcacaattcccttcgctgacatgtgaaccccacgcgccagcacttggatttcttctctgactggtggggccccctgtcagctgttccttctccccggtaacagaccgtgtgactcgctcgccgtgatcccctcctcgcaaatcgggagctcgttcgcaagaatcgctcggactcgttcccagcccgcgataaatgcctggccgccgcccttaccgaatcgcgctaccggtcggccgctcccggcggaacagaaaacaccgaagtccaccgaaagccatggtcttcaccgcgccgcgaagcccgcgtcccgggatcctctccaggcacgacccggccgcccataaaggctcttcccgagactcgttcttccccctgctaccctctcgcgcctgcgccgagccaaaccctccaccatcccgccgccagtgagacccggtcctgggtgaagtttccgccgcatgctctgatcgccgcgccaccgtagccactgcgcgtgcgcatctgcgttcgactgggacggaggggtctgcgaggatcaccagtatacacctcttcgggattggaacctaccgtggcggatcgtgggcggggcgctgtacaatttcgtaccggcactcctgctccgccgcagaaccctgcgtcaccgtggccaggcaccatcttggtacaattgccggtgagtaccctcaaaccatgttcgcaatagcatgatcatcgcgtagtcctatccgatttggttttgtcgctcggggttggccgttcgccgtcgcactcacgtgctccgccgtgtgagcctggcggcggtgactctgctcggagttggtaggaagaagggcttctagccgttcattctttgatggtcggctagaattaggggtcttgggtgtattaaaccagagccgtcgaattggatgtgtgcggcccagatcagaaagcttatataccgtttagtcggaggagtgtaatccgtagatcttggatcctacgaacgagagcgagcacaggttcataagggctcggatctaatctgagcactcgaactaggatccaacggccagatttgatgcataccgcttcggtctgagagtctttctaaagagccccttcgtttttagcttatcaacccgcagtccagggtgactgtgctctgagtctagggaatctttcgc

SEQ ID NO: 168972 - DNA, 607 bp, Zea Mays
tcgacctccctgttcttggccacgaggaggtggcggccgtcgttgccgaggttggcgatcggaggctcgccgccttagccgaggagaggcccagcacgtcgacggcggcggtacccgatgtattggctgcagggggacctgacgcctcagtggaggggcgtgcagtactatggcccgtcttggggagcagcggccttatccccgcgcaactcaaccccaatgagtggggtgggcagccactcctgttctagagccgcactacctcggacctggaacccctcctctccctcaacgatgagctggaggagaggtctcgggacagtttccatgagtataccgaggcagcagtgaggtcgcttcagtcgaccatggagatccttttcagggacgttccctgggtcttctaggtaaggatttggatgtacacctttcgtgaccagggcattcttcgcaatatcctgttttccctccttaggaacttgcggacgtgagcaccgccaagttgctgttcctgcaccgcaagagggacgtctgggattcgctgcggtcccagcgagccgtgcttaccgaggccaatgagcgcctcgcccaacagagcgccgaggtg

SEQ ID NO: 168973 - DNA, 685 bp, Zea Mays
ggccggcccacgtgaggccgctgcggcctaggcggggagggcggccggtccagtggcaaaacggcccaattgtggctcagccagggggcgtggcaagcgagatggcaactgcagcccgcaagcgcaaggtgccatgtctgaaccatgcgtcctcgtgtgtcaccgtgatcggctggccactgctagtgctagcctcacaccgcgacccaccaaggatcctctccgtcacaggctcacagcctcacaggcacagccacaccactctcttgccgagggaagtggagcccaccacctgctcgtgcaaatgcgcaagacgacggccaaaatacggcagcgcccctcatcgtgcgccagattactagggaaccacagtgtgtaataacggggtccgaggagaggattggtattaactattaggggaaccgaattccagcagccagcactcagctacacttctgctttactcatgctctgacctaggcaattcgacaagaaccagggacatgtagctccttgctgacgatgggcgcgcagggacagaaattttcgcatgtgcagatatgctgtgccattgcgaccataccatggaacaacaggttgacgtctccgtagtctgttgtcatggatccagggatcttttccgttcttttactacctgtgaatgacccttctatgaccacttgta

SEQ ID NO: 168974 - DNA, 629 bp, Zea Mays
ctagctggttcgggtagattttcttgtcttccctaagttctaagcggtgttgttgttcccctgtcatacccaaacacatcttcgtttgcgttcgtctagttgctccgctctggagttgcgtgcttcgtgcccagctggtaatcgtatggcccttgctgttcttgctgctgctgttgactgtgcaggatggactagtttcaaccttaggatctcttgctacctaattcaggtgcgggtgcagcttaagtcgcatagattttgggttttcagctgaaaatcacgtgtcccatgccagttgcgcccgtgcgtggggttttagcacggttcaattgagctgtttcaacaaaaccttattattgcgctcgtttcttgtacttgcagttttttcttcgtgcctgtgttttccgattagagttactttgttccacgtttagttatacttgattatcctgcggacaacctgatattgtttccttgccactgtcatcccaatgtgctgttgataaacgaacgacaatttatcttatctagtataggaaaaatcaagttgattgccactagctttggattatactggttgcttgtgacattcattatattttaggttaattattgcaaaagtagagtgt

SEQ ID NO: 168975 - DNA, 812 bp, Zea Mays
gttgggtttgaattcaatagagaaaataaaaagaaaagaaattagaaattcaaatttataaaagaaaagccaaagcagcccaaatcccctctctcttggccttttggcccagtcggcccagctcgcccgtgcccgttgccccatccctctctgctagcccggtcctgcctgtcggcgttgtccgctcgcttatgtgccccctcctgctgacctgtggactccgcctgtaagccctatcctccctgaccgcgcgcacgccgtcgactccacacccatgatgcacgccgatgctgcaaccgccccaaccccggccatttctagcagcccacacccccactcactcccccctccctcattcgcgcacccgcagagctcccgccctcacctcgcaccgtgcgcacgctagagaagcgtcgctgccgtctgtcgtggttgtgcgcccgttccaccgtcgtcgttgagccctcgctatgtccactgcctcagtgagcttcgcctccatgtccatgacccagacacccttcaattcgcccacttcccctctgttctctttgttcatgctcaccagacctccctccacatagccatagcgccaacccgagccctcgccgtgcgtctaccgccgttcaagggtcccaaagtcttccctcgaggtaaccaacctccgccgcccatttatttccccttctttgcactctgttgtgcgcaattgctcaccggagtgaagctgcaccgtggccgagccatcacaccgtggatgactaccttccggtgccactgcgtcggtgccgtacccacgctcatgttcgctg

SEQ ID NO: 168976 - DNA, 1022 bp, Zea Mays
ggcccttcagcaagcttcagcactttggttgtttcaatgtatctgggctgatgtgttaaaactttaacctttttcaccttcgacgtagaagagatagccgaagcagcaaccttcctcttctttccctgcttttgtgagggatagcaatagtctaggtaaataaaacaaataacatcgaaaaccctgtttaaccttttcttgcgacgccctccgaaggcagccgtcatggcatcatctttggcccttgagtaggcaccaagcagctcatcactatttgcttcgatggcatccaaccaatcatcattcggctcatcgaattggctcctatacttgaatgtgtacttcagatataccaaaccacctttgctggacccagcaacagtttccttcggcatctcccacccacttgagagcggccacactctataagcaatatgctcttggactaagtccctggtgcctatgtaggtacatactgtgttataagcagcttggcacgcttgaatttcgtttccaagggcaagagatggtatcctgatgccaaagtgagaccatatgggatgttcgataatcccctcaatatcttctctctcaactaggtcattctttaaatagaaccattcttgcatctaggctcctggccatctcttgcggaacgttggcactggattgcttacttcagaacgagttacgaagccataacaactgaaattgttgtggtattgctcttttccaacagccttcgtctcataagttaattcatgcaagttgcagaaacatttcgcattcggcacttatccctgactcctcatggcccaaatataaacccctatccggatgatggcttcaagggtaagctgatgaaggtagactttgaaggttttcaacacttcaaccagcagactatccaaagggaattgaagtcccgctttcataaagcttctgtagataactacctcatcagcttcgggcagagggacattactctctcccccagctcgcacaatagaaatgtcacgaaa

SEQ ID NO: 168977 - DNA, 456 bp, Zea Mays
cgggtagttctagttgataggcaacttctcccactcgctttaagatcaagaagggtccaataaagcgaggggacaactttcctttaactttaaatcttcgcataccctggggttggtgacaccttaagatacacatgatcaccctccttaaactctagtagccttctccgggtatccgcataacttttctgccttgactgtgcagttctcaaattatcccttatcattcacacttgttcttctgcctcttgtacaatttcaggcccaaagaactgtctttcaccagtttgatcccaatacagaggagttctgcatttcctgccatatagagcctcaaacggggacatcttcaaactggcctggtagctattattgtaagagaactccgcatacggtaagctcttatcccagctaccaccatgtttaagagcataagatcttagcatatcctccatt

SEQ ID NO: 168978 - DNA, 508 bp, Zea Mays
aatacctaatccacagtctttgtctagatctatgaatgtcgggcgatagaggggatctagaataaatacatatgctctaatatcggggctcctgaacaaaaaagagatgcaatgcgcgatgcaatgacccgattagagagatgtataaacggatacaaatcacacatttagttggagaataagggttacaatcaaatccacttcaatcgaccgaaatgcttcaaaaaatcgacggcaaactcggtgtatttcaatgttggattacctggaacttcttgaatcgggctccaatgctgggagattgaaggatgtaagctggattggaacgacgctggattggagcagcgaaaatcgtctggcgagtcgcctccgacgaaaggaaagactacgcggctggggttttcttcctatcgacgcgggtttgcctccgttgattgcgcgaatacggttttagaaacaggaaacgtgggagaggtggctggctgacggaggaaacggtgtaacggcg

SEQ ID NO: 168979 - DNA, 905 bp, Zea Mays
attataactggtagctctttggctctgacttttttaaacgactaattataaaaagaatataaagtagtcctttttgtactacaaagaatccataaatggctctagatctatgataagatattgtcggagaggaaaatctccggctgggcggcagaacgcacccgtcctaaattttaagatgaggagggtctaagcgttttgactgtctattgggagatagatgatagcgagtgtacacgaagatttagagtggtttacgccgtgggagcgtaataccatactccactgtctgtgtgttgtattgagtctgagagcttgagcgcttgtgagcccgtctgagggtttgagtaaacttgagagtttgccttgtaatgttgtgtgacttctgatttatagctcaagggaggcacatacaagaatcctgagccctgacatgtaggcttaggaacataacggaaggaacacattataggagtaactaatgcaagtaacgcttgggctcaggaacataacggaaggaacacattataggagtaactaatgcaagtaacgcctgagcaatctcctggtgccatgatgttcgcagtccacgcagtattgatatgcggtgactgcttccttggtaacgtgcgagtaatgatgagcgtagtgcacgtggcagtatgagtgttgtctgccagtggaattgacaggcacgccgcctgcggaatggacatgtcgccgcctgccaggggaatggacaggtcaccgcatgccaggggaatggacatatctcaataaatgcagaggcggcacactgcctgccagtggaatggacagacgacgcgccttatcctcaataaatgcagaggccgcgtagctcagaggcattacgtcaggctccacccattggcttacgtcacgtg

SEQ ID NO: 168980 - DNA, 2119 bp, Zea Mays
tggctctacctgccccagcgccacccctgctagcacttcaggcgccgccacccaggggcgctcccaacccggccaggcgtctctcgaccgaggaacaggcagaacgccgccgcctgggtctctgctacaactgcaacgagccgtattcgcggggccataaccgtgtttgtcgtcgcatcttcttcatcgacggcgttgaattggatgagggcgccacgaacgaagaagccccggtgttttccctgcacgcggtcgctggtgttcccggcagcaaaacgatccagctgccggtccgggtgggcgcggtcgacttcatcgcactcattgacactggttccacgcacagcttcattggggaggaggctgcccatcgcgctggtgtccacatcgaacagcgcccacgtctgacggcaaccgtggcaaatggcgagcgtgtttcctgccctggggtgctccgtcacgcgccagtgctcatcgacggactcacgttccaggtggatctgtttcttatgccccttgcaggctatgacgtggtgttaggaaccaactggatggcgccattgggggacatcatgtggaatttggcggctggcactatggcattccagtatgcgggcagatctgtgtgctggcagggcctcgctcccaagacccctggtcgtctccactctgtcgaggccagggaaccattcctcgacgcactcctgggggaattccacgacgtcttcgccgagccaagtggcctgcctccggagcggggccggacgcaccgcatcgtcctcaagcccgacgcaaccccagtggcggtccggccataccgctaccctgcagcgcacaaagatgagttggagaggcagtgccacgccatgatcgctcaaggcatcgtcaggcgcagcgactccgcgttctcctccccggtcctcctcgtcaagaagcaggatggatcgtggcggttctgcgtcgattaccgcgaactgaacgccatcacggtgaaggatgcgtaccccatccctgtcgtcgacgagctactcgatgagctccatggtgcccggttctttaccaagctcgatttacgctccgggtaccatcaagtgcgcatgaggaccgaggacatccacaagacggccttccgcactcacgatggcctctacgagttcttagtgatgccattcggcctgtgcaatgcctcggcaacattccaggccctaatgaacgatgtactacgcccttgccttcgtcgctttgtactcgttttctttgacgatatattgatctacagcaagtcatgggcggaccacctccgacacctccgcgcggtcctcagtgagctacgccgccatgtcctcttcgtcaagcgctccaagtgtgcgttcggggagccttcggtcgcctaccttggacacacaatttcggcagacggtgtggctatggatgcgaccaaggtccaggccatccatgactggccggtgcctcgatcagcacgggcggtgcgcggcttcctcggcttggcagggtactaccgcaagttcatccacaattatggcaccttggcggcaccaatcaccagtctgctcaagaaggaaggtttctcctggggtacggaggccgccaaggcattcgaggacctaaagaccgccgtgactgcagcaccggtcctggccatgcccgatttcgccaaatccttcgtggtcgagtgtgacgcttcctctcacggcttcgaggcagtgctcatccaagatggtcactcggtcgccttcttcagtcggccggtggcacagcgacaccgcgcccttgcagcctatgaacgcgagctcatcggcttggttcaggcagtacggcactggcgcccgtatctctggggacgtcgtttctgcgtcaagacggaccactacagtctcaagtatctgctggaccagcgcctcgccaccattccgcaacatcattgggtgggcaagctgctgggattcgatttctccgtcgaatacaagccgggcgctgcgaactctgtggccgacgcactgtctcggcgagacactgcagacggggcgctactcgccctctcggccccccgctttgacttcatcgaccgtctgcgccacgcccagctcgtcgatccaac

SEQ ID NO: 168981 - DNA, 823 bp, Zea Mays
tgcataatacacttataggttactcatgtcctgcacagttattggaacgttttctgggccaccatgcatttctgtaacaaaatccataatgcaatgttgtggaatcctgctttcttgcatcgcactaaggaactccatatattcacgatcatgcattttgttgcattgcaattgccctttttctgtatctttcttcaagaattcatgattatgctcatagtttaccagatcaatccggacggaaataacattctctttagcatcatcgtagatttttttaagtttcatcccagccttgcactgtgttcgttttgaacatgtgttacgtatccttggatttccagctaccctttcagcattctttcctttcattgaacaattcaaccatttacaattcttccgctccctatatttcttcaacggaaatccaacctcgtatgcatattgactataaaaattatacgcctcgtccacgttactaaatgtcataccgactttaggtatcaatcttatatcaatattgtccggctgtgcacagaaatttaacatttacgattcaatagcgactaaatctaatgtaatataggtacaacattacaaaaaaatatgtaacagaatttaagtatcatatttgggagaacttacatggctttgaagaatatgaggtgtgtcctgttcatgcggcccaatatgtctcatggggatgtgcttctctgcgccgaccacgtctgccgtttttgtgtgttcatcgatatgtccaggtgccctcaatgccgccgatggagtaacggagacaccctctgtgtaaatggtgatcgcagac

SEQ ID NO: 168982 - DNA, 392 bp, Zea Mays
tttgagagtcggtggactttggcatattttcctcttcattcagagactcatgtttcttcaggaaacaataactcgtgtttataatgtcgtgcaatacgaaacaggttccaggtcaagggaactcgagatccgctggtatagcaggatgctgagggtcaacaccgaggatgagggagcgtggaggatgtgggaaatcaacagagggagattcacgaatgccagggagggcgccaccgcggagatccagatgcggtcgccccttcttgtcgcaaggatgatcccgtccttccgtgactccgatccaaataccgtgccgtcaaccgaacgcacgcaaagccactgaagcgcgaccggatggcggattcaacgtagcgaacaggatttcagccacc

SEQ ID NO: 168983 - DNA, 745 bp, Zea Mays
cgacatcaagttgggtgatgagccgatcttaagccgtctatcgcgtcataagtcaccaacgccgaattcaacaccaatgcaacagaaagatagttcgatcattccataccccatggtgcaggaaaatatagcaccgacctccacaaaaaccgttgaaaccatcatatcacctcttgtgaaggaactcgatgagggggacatagacaaaattgttcctcagaatgtcgacgcaaacatcaaaaaggaagcaaatgttgacaccaatgttgaagggccaactacttcaaagtaaattcatcagcgaatcaccactgacaatgtcaagaaaccatcagaagcagtgacacgctacctgcaaaaattgaagagagttatgatagatcaataaaaagcggaatcagcatctcgtggagtacgcacacggtcccaaataggcaatttcaaagtatggaaagaagatggaatgattcatactcgagaatcattacgtcttaaaatcaatatcccgatatacaagaaggaggatgttcctcctaaatttgtgaatgggaggccgttcttgatgatggtgcaactttctaagttgtcaactccggagattagaatgcatgagtggtacatggtggctagcaacaaatacaaactcgaggacttcacatttgttgtgccagaagatgcattttggagcaaagataatatagatcctgtgcggcatttattctttgatgatctgtggtcgttgtac

SEQ ID NO: 168984 - DNA, 958 bp, Zea Mays
gggcactagcaaatatatccaagtatgatggatccttgaatccagacgtatggttggaagactatcgcctcacatgccgcatgcacgaggatcaaggatgaccacctcatcatctagttcctccccatccaccttgtggaaggagcgagggcctagctcgaaaatctaccagtcaacaccatccacgattgggtcgacctccgaaaggccttcgtcgggaactttcaagtctcctacaagcgccatgggagctcctgggacctcaagaggtgcacccagcgaagtgggaaaagcctccgagattacatccaaaggttttgccagaaaatgaacaaacttcctaatgccaccgacaccgacgtggtgagtgccttcccctacgttacaaccaatgaggcactcgtccatgaacttgggcgggggagaccaagaacgattaccaacctcctcgacatagtgaccaatttgccaacagggaggacgcagtaggtgcaattttttgcaatgccagcgaaccaagcggctagaagagggagcgttaggagcaccccaacaggcgctttaggaaccatcacccctggcatggtgaataagaagtcggcaccacggatcgcccacctagaccaccggtgaagagaagtggcgaccattccagaagctgatggactcgtcgtgccaacaccatggcttccctgtccaccacaagctccgggagtgcgaagttcttcatctccaagcccctcgccaagaaagtaaagccagaggagctggccaagccagcggagcaggaggctcccaccgaggatttccctgagacaacagggtgcctcataatattcagtggggccaaggcgtatggcgacaagtgccggcggcccaatgcgaggtgcacgctgtacagagcctgtcgtcccgcagtatctacgatggtcggagttccacatcgtcttcaaccacc

SEQ ID NO: 168985 - DNA, 917 bp, Zea Mays
taatgacatctcatgctggttcttatgattgtgcatttaattgaaattgaaatccaaaaccaaatttgaaaattaaaaaaaatgagaaatggaaatgaacaaaagaaaaaaaaaggaaaacagtttctctcctactgggccggctacctcacttttggcccagttccctgcaaccggcccatttcttctcccgcactcctccatttctccacgatcgcacgtgcttcaccaggggcccggtggccagtctgttggcgtgcgccgtactaatgacctatgggacccactcgtcaggcttatccccttcctcaacaacccgctcggcgcccgggatttccgagctccgtgaaccatggcgtgatccccacgcggacttcctatcctcggcgcataagaacggacttcgctgggctgtgacccccaccttctgtcggacctcacctcacgaggatttgcggccggttgaacacgtaacagaacgcgccgccgccgccgcgtatcgcgggaacccccacgattaatgcgggcggaccagctccgttgttgcggcgtataaagaccaaccccgtggctcccctcatcccctcaattagttaatttgaggcttccaccgagccgttgggagcctcgcctggcgcagggagatttgagtgatgcagcggacgtcgattccgggctacattcgggctggggcatcggtgtagtacctggacgcttcgccatggcgcaacgaccgtgttcgtggttccggtgcaatgaaaagcgcaccaaaagccctataatccctcgccggagttggtgctccgccgtgaaccctgcctgcaccgtggacggactgctccacgacgtaatcaccggtaagatctaccttgatcaaatcgctccactctgtactacgtgtagaacctgtatgtttg

SEQ ID NO: 168986 - DNA, 601 bp, Zea Mays
ccttcgagtctttgaaataatatctgtctgatctggcaacattaactagcctagacccagtcttacccctgctactctacattgcaacatcactcagcgcagtcagcgtagccttggtccaagaaaggagcagagagggcaagacacaccaatgcctggtatattttgtctccgaagtacttaccacctccaaatgcaacatgacagagttagaaaaatagcgtacaccgtcatcatggcttctcgtaagctaagacattattttgtggcacacaaagtacgaagtcacttcagattggggtcttggagagttattcagaaaaccagaggcgtctgccagaatagctaaatgggccactgaactctctggttacaacatcacctccgaacccaggacaacaatcaaatcccaggtttcatgcagaaactatctggaccatccactgcgatggagcatggtgtcacgttggcaccggcgctatagcaatcattacatcgcccaccgaactcaaatacagatacgccgtgcgtctccgtttcgcactagactcagacaaatgcacaaataacattgccgaatacgaaacagtcatcttaggcc

SEQ ID NO: 168987 - DNA, 578 bp, Zea Mays
cgctgtcatggcaatcggtcgggcttgtgtctctggccgtggaagggagactaggagcatcgccaggacacgggaaaactgtacctatctcgaatcaatgaatgggcgatcggtattcaacgaatttctccgcggagattaactccgttgcggatcaaggccatcccgtggttagtagtttttatcgcaccaattccggtgagtttcctcccattcgattcgtgctggcattagagtcgtttagcgcattttactttatcaattagtgcacccaggcgcggtggcggatttgccggtcatggcgcctccgttagggctggcggcgtcgccgtcgggatggttcaaggagagaagaagggtgcggggccattggatccttgtcggacggcctagattagaacaccgagataccccttcgcgcgttgtattgtgaccattggattcgatctgaacggcacttgcccgcgcattataacagtcatggtttttttctaaaagaacactcgcccttttgacttatcaacccgccatccacccaaggcacaagaccattacaattaggtcttgaatgtttacgg

SEQ ID NO: 168988 - DNA, 874 bp, Zea Mays
cgctccgtcgggtagacgaccgacctttccccacctcgcctacgccgtataaaaggatcctagccgtgaccctttcctccgttttgcgctcacgtttcatacttggcgccgccatcaccaccgtgggtctccgcttgcgccgccgcggggaaatttgggttcactccatcgggtggtcgtgggaagcagcgcaggagcttcgccactacctggggaatccgcgcgtcgcgttattgggcggagtagagtccggtcctagcctcaattcgccgtcagagttttgtttccgctgtggagctcgcctctctgtcatcagctctctgcgctgctccattgtcggtaaggaccctccccatttatccgcattcgctagggtggcgttgagccgatcgattaggtagatgcatgctctggtggcggagtaattgctcgccggcgtggagcgccgccgcggggtccctgttcatcggagttgccgtgcgcgtagctgagtttaggaggagccactcatgctgttggatctcccagcgacggctgcgattagatcgtaagcgtaccgcttcatggagttaatcagtgccgtcggatggggatcggatgggtgttcgagcgccccggttatttttgttccagtccgttgatcgggcatccgatggctgtgattgcacgctagtgtataagaataaggatctaatcctagccatagatgtaggatcgtccgatcctagtcgaaacataccccttcggccagacagatttgtaaatgaaaccctagactttctcggattgaacccgccgtccaggggtagtgttcactgagtcttaggagttttaccccgagaccctgcgcttcacaataattgacgcccagtcc

SEQ ID NO: 168989 - DNA, 423 bp, Zea Mays
aaacatgttgtgaaaactgccagaggcatccagatcttggaggtcaccatcgcgagaattgagcaagcgcagcaagaaccacaggtgttttgtagcctcagaaacaaatcagacaatgaatattttgagaacttgggatgccctggtcgtcttgagctgccaatattatacgactatgttggctagagtgaccaatcatgtttatatgatcatacaaatgaccctgcctttttatactacgcacaacatagctgctgatagacgtagctcctcctgaactgtgcctggaaagaattagatatatggtattaatattatgtgctagttctttttactctgcaaagaacttgtaggagacttttgtggaggtaacatgtatgcatgatttgtctttatttatgcaatcttattacatactaagag

SEQ ID NO: 168990 - DNA, 571 bp, Zea Mays
ggtaatggcgacgtggttgatgctgcggtaatggtcccgcttctgccgctttgtgtcgaagtcggtgctggacccccagtgatcatatgaatgactccgcgatacggctgatcggcgaagtcttcctgttttggggcttgagggtgggggatgttttgttgttgctggtgtggaggtgggggtgggggaggtacgatttgtacttcctggtggtgttggtatgcgtggtgcggtggatgcggggcgggggcgtggatgtatggtggagggggttgttgataagtgtgcgcgacaactctagggttgtcggctggctgcgcccgtgccatcctgtctttggtggccttcgcctctgggcagtctctggtttggtgggcgcagtcttcgccgtgaaaaagacagtagaatcggcgcggcggctgcgcacgtccccgacccctaccgcgagttccatttccgcggccctgggggggatattcctgacggcgaggggtgtcaccggcggggtgctggttggcgatgttgtgcacctgttgctgattgcggccgtctcgaccggagtctggctgcg

SEQ ID NO: 168991 - DNA, 1161 bp, Zea Mays
cttaagatatatccgggcaagggcggctcctccaaaagtggtttttactgggatgaagtgggccaccttggtgagacgatcgattattacccagatagaatcattccctttttgcgttcggggcagtccggttacgaaatccatgcctatttcttcccacttccattcaggcactgggaggggttgcagtaggcctgcaggcttctggtgttcggcctttgttcgctgacaggtgtcacacaaggccacatactgtggtatctccttcttcatccctttccaccagtatctggctttgaggtccaggtacatcttggtggttcctgggtggatggagtaagctgagttgtgggcttcattgagcaggacttcccgtgcctctcccattggtacacacagacggttcttgaaccaaagaactccttgttcatctgtcctaagatccggaagttgctccttgcgagctctttccataagtctggctgtctctgtgtccaggcgttgagccttgcatatgagatcttctagcattggcttgacttccaggctaccgttgtcccccagacatgcatttagctgagctgattcctccttccaatcttctaaaaagttgatcccctttatcccgaaaggttttcggctgagggcgtctgctaccacattggccttcccggggtggtaatggatctcgaggtcatagtccttgatcaattcaagccatcttctttgacggaggttgaggtctggctgagtgaagatgtacctcagactcttgtgatcagtgaagatgtggcatttgttcccaatcagatagtgcctccatatttttagggcgtgtgctatggctgccaattccaagtcatgggtggggtagttctgctcatgtggcttgagtaacgggatgcatgggcaataactttctctttttgcattaagacaccctaaaccttgccttgaagcatcacagaagatgacgaaatcctggtgtatatctggtagtgacaaaacgggtgcggtcgtaagcttatccttgatgatctggaaacttccctcacattttggagtccacacaaacttattgtcctttttgagaagttcggtcataggttttgctatgctggagaatcctttgataaatcggcggtaataccctgccattcc

SEQ ID NO: 168992 - DNA, 557 bp, Zea Mays
gcgcaactgaaccatgatttttcttgtcccccacatccagtacactgccagctgaagctcgaccagtaggacctacattctgggtgacatcaatcaacatattttttcgcctgtatcaacctgttctctgaccgacattcttgctggtattgctctttgcttattactgcaacctgattgttcggccaatgtgtgatgctcccccctatagtggccatccatcataacaccgggaccaactatgcgttgatttgcaatcatttcagccctgcgttcaccctcccagctagcaaagttattcatttctcgtgcagcccctacgtcaagcctcatgcgcttgctgctcaccccttgatcaccaccacttcgcagcatgctcccttgtgatttgtttgtcttagcagcagctacgcgtccatgccctatgcttggcttagctgccatttcctcacccttctttgtgtaaatcttagtgacaaccacctgaccattctgctttgccacctctgcctgggaaccttctgtatcatttaatatgtcgcactccactgttccca

SEQ ID NO: 168993 - DNA, 356 bp, Zea Mays
gcgcaaaggtggtgggtgacaaatcgtccacccaagcaagcccatcaacctcaagtcatccaagtattgaagaaaatcatcaaccccaaaggatgccaacggtggtagaagatgaacatggaagtgttgatggtgaagtgcctcttgatcaagtggatgatgaggaggagcaaattcaaagacaaccatcagtgccccatcctcgagtccatcataccattcaaagagatcatccggtggacaacatcctgggtagcattaggagaggggtaacaactcgatcccgtttagcaattttttgtgaattttactcgtttgtttcctatcttgagccacttaaggttgaagaagcgttg

SEQ ID NO: 168994 - DNA, 369 bp, Zea Mays
gcgtcgatggcaggatgaaaggggacatagtcctaaagcagaggctatgcttctctgcgatcaaagaaatcatttacaaaggtctatcacggcttgccactgtttgtccacagtttgctggtcgtgcttctagcctcagagcaaggggaaaggggctgttgcgtggatggtaggaggaaaggggacagagccctaaagcagagatgattttgaggcgcctggagcaaagcagtagtgggcataggcaccgtcaccgtcagcaaggacgcgatgacactcgatagacatccacataggctctaggaatctaggtcaatactcccaaagaaggcactgtcaattggaacaaagggtggtaagtgttttctt

SEQ ID NO: 168995 - DNA, 992 bp, Zea Mays
ggaggttctaatcctgaacctacagctccaatccgatggaccctatatatcctcaatcttgttcgtggatctatcaatctacggctcagatcttatgaggatgaaacggtacccgaatcaatctcggtcgtcaacttagggatcaacgggacccaggatctattctacgcgagccaatcacggccatccgtgattcaatcgacgacccagatccaactatgaatgggggtacctagcaggtctaatcatggctgtctaaaaacagataaacggtcagggacttatccccttcccagccgatcacgacggccgagcagagtaccccatcgacgatagtgttatcggagtaaggctcttcccccgcccatggtgaacaagacggaccaaaacaagccccaaccagtgcgagggcgagtgcaaactagatagagaggaactcacaagctatccgggccgtgatgtcgtctgcccacagcttaccgctgatccaaggcgaagcgtccactccgacgagcaatttgtgtgcccccggtgaatattctcatctggaaagaccccaatggcgcgtggttagcaccagcgactctccctgaccacccatcggggactcgacgccacctttcatgaatcaccccatggcggtaccggcgcacaaggatccccaacgcgccgcccctctcgatatttcgaagatggctgctgtggttgagggccctggtatatatgcctagagccacatgacccgcataggaacgccagtacagggattgtcacgagatcggcgcgagcaagcgatagattcggatgtattcggttggtggagacggagctgaccgtttgaccccacatggtggtgggagcaggacacacaagcgctagcggtgaagaggatggcaagtggggcccgattatcggtgagagtacgggggagggttggctgctgggccggtgggagtgggtttagtgggccaaaaggggagaaccggcccagg

SEQ ID NO: 168996 - DNA, 307 bp, Zea Mays
gagagacacaaggcgaagcgaggggcaagtttatgagcgacagtggcagaaaggtagggataacacttgcaacaaaaacatagatactcatacgatagtcgagtcccaaaaagggagagacatggagtagaaaattcaacgttttggtgggaagtatgttcagaaggtaggtggcagtgctaagggccacaacccaaatgtgggatgaacactaacttgaaataggagggagcaaacaacattgttttgcagtgcggctaatgcgttcaactttaccgttataaggagaggtgtacgggcaagacac

SEQ ID NO: 168997 - DNA, 630 bp, Zea Mays
cgtcgccagcgacctcgcgctcggatttgcgccaggcgccgcgattcatgctcaacggagtacaaataactgctcggggtaagaaatatcgcactgaggatgaacttaggccactattccgccccggccgccgtgtccgcctaactcacggtcggttcagataagctcgccggacttggccgcctgttgatcggtttccacgtgtctaggcgctctaccacgtcgcagtaaagtgccttggcgtgtccgttcatcgccggtgaccttgccgcggtgaaagccacgcacctcttgcgccagtgctctcccctctctccggccgccagcgcgccatgcctaaattaggaggcaccgccctcggtccctataaattgagcgtgccatcagcttcgctaggtaattacacacccaacgcaccaacccgtgcctcaaattatccaccagagtgcttcaatttgggatttcccccaaatcagtcaagaacaccgcgtgtgtgagctcaccgtgactagctatccacaggcccgatcatgtcttcctcactctcgtttcaacatccctgtgtgttgtagatgcttagcagcccggccaattgaactagatcacgctagatcaccggaaacacttcag

SEQ ID NO: 168998 - DNA, 901 bp, Zea Mays
ctgaatttcgaatttccacaacacttccactatgaatcgatgcaccgataagcgaagtccaacagcgaaaaaggcctcaaacacaaccaactcaccctccgactcaaggacatcttcagcccccagggcccacccaactccattcccaaaataacacaaatgttgcatctcgtgcacgcggctcgagtaaatcctcgatgtactaaactccaccatgtggccaagctatagctccacaaccgccgccggatcactaatcgtcttctccgatgatggcgcgttcgaggacgcagtcgcagcggacgaagaagaagacgatagcatcacgtgccggcggcgacgagttgtctgcttgacgcgggccagatcaccggtggcacaggctaaggtttttcgcatgaagatggataaaaaccctgaagcgccgcgtgcgtgactttttataggccaaggaaaatgccttgggaactcaacagtactacagtaaaacgtcacctttcaacgatcactttcaaaaaaccccgtgaggccacttcaatcgagcgacggtagcgtttcgaccatctcctgacaaagacttcagtaccagctcacttagtcgaattgtcccctcagagggcaagtgttggagcgtaggcgtaccgctcctcgctcggctgtttcgtaacaaggacaaataatgacggaggaaaagcgaaggcagacgaagaatgatggagtgcaggccttgttggttcccgtcggagcaggcaacgacgaaggcctcaccgactgccgaagaacaggcacacggagcacgaaggcttctgtcgccacccgcgtgttgtcgagacgacgtgcccatgtaaaaccgcctggggcacctggtcccacttgttagccactgtgtgggtagagttaa

SEQ ID NO: 168999 - DNA, 587 bp, Zea Mays
ccaacctcgccaccgcatcgtcgtgactccctctagcttcccgtcgaccaccggaattactgccacgacattgaacacgtattcaccgcgccagggttctttcttatctccggccgcccgcgatgttcgatcaaattaagcgccaccgtcgaaacctcctataaattgagcccgagaccagctttgcaacatcatcacccatctcgccaccaagaatcactagcaatcgtgcaccagtgagctcgaatttcattttcccccaaatcagtcgaagagcaccgtgaaaccaagttcaccgtggccagtctgttctggtaaaactctgcccaattcaaaccttgtttaagtgctctcgtatgcctgtgatgtccatcgacccacttaattgcacggagtagcctctggttgccgggaacacgacggtatagccgttatgctcacggtcaccgtggccagagcaaaccattgggccatagatgaaattaggttgggggaaatgctcggggtaggtcttatttggtgtccatcgctcgggagcgccggtcatggccctgttcggccggtacagttgctcaccggagcgcggc

SEQ ID NO: 169000 - DNA, 1155 bp, Zea Mays
ggaatattattcaaaacaaataaaattatcattaaaataactacatcacttgttggtttttgattttgaatattaaatatgaaatcggagtcaaaatttgaatttggaaatggttcaaaataaatagaaatggaaataaaacagaaaatataaaaaagggatcacccacctccacactgggccgaaatcatctctgtccggcccactcctttccttcaccccacagcccacctgcttctctgcccttgcgtgtgctagctgctagccggaccccacatgccagtctcaccctccctttggcgtgtgtcttcagctcgctgacgggtggacccagtgcgtcagctccgtcctcaacagaagcgccgagcatggcggcatgcacaattttcgcgtgaggccgttgtgcgcttgaccacgtatgcgtccttaaaggtagcacgtccgggctcgcctctctctccttgtcctcctacctccgcgacccatctacctcctctgccagttcaccatcgacaccgagggaaagggagagagagaccttcgtcgccgccgccacggtagtcggccgtacctgcggaatctggtggtggctggggagcttcgcgcgaccacacggaacgtgtacgactcgtcctcgggatcgattggctactggcgttgtgggaattgctcaccgtcgacctcgtgtggccgcgggatcgtcgggcgccgtgggcggagctcggtgctccacctgcgttggtaagagtttctccaacgggttcgcaattattccttctacgttttagggcctttggataagtcgaggaaggttggggcgccgctgcaatctgtcaccggcgagagtccgtcgcggctgtttttgcgcgggcgctcgttcaccggggaggaaggagatgattccctggccgtccatccgggtttggacgctagggattcggttatggggaaagcgattgggttaatacaccggaaccgtccgatctaaatcgtgtgcacaggattagatattaggtttttaaatcgggagcgttgcattgggatctgacggctgagatcgcataccgcttcgtgggagatcagatctaatcgcagtcgtccctggttgatctcacggctaggattagttgataccccttcgcgggtacattttgc

SEQ ID NO: 169001 - DNA, 545 bp, Zea Mays
aatgcgtgactttttgagggtcttagtcctagtgtttccttggtgtgtcaggaagtggccggaaacatggccttccatgaactgctcgacaggaagccaaggctggaagcctgagcagccctatgtggtcgtttcttttaggtttagtgcgtcgcgcgtttgttaccttttggtgatgtgttgcggggggcttgtttccaccccttgggtgttttatcttttttttcttaaatgaaatgacacgcagctctcttgcgtcgctcttggaggtaagtccaccgccattgcaaggtagatgaccattcctgtcataacatattgaacttgcacttttcttccagctctagtcatcaagtcagccttccacctagggcgctggtcagctatcctgtcgattatgctttgagtttgatttctggatagcttactcaaagacagaggcagaccaaggtatttacaggggaaagaagagatctcacatgggagtagctcttgaagggttgccacttctttcccacatctaattggatacacattgcaaacca

SEQ ID NO: 169002 - DNA, 453 bp, Zea Mays
ggcggacgccgatgaggacattctggtcggtcgcgaagcaagtggttatggtggccagctcacaaacttatccatagtcacgatcttttcacttgcccggtaatatccgcgttgatccgggcacgaatcttcatggcgagctcgaatcacggcacccgatcaccgatggtgaggtacactgcaccaggaatcttcttcagtgtactataccatggcaatgttcattcagcgcgcctgaccgagccatttgagagtcatttctcttcgacttttgttcaataacctaccaagccgaccatagcaaagttgttgtccatcatgccagctttaattttgttatagggttcttgatcatacctccactcgatcaagcacaattcagctctcaagttgatctaatgccactgtcagtctaaacttcaggccaacccccgactgacagcccaacttcca

SEQ ID NO: 169003 - DNA, 276 bp, Zea Mays
cagcttgctcagggcgatctctctgtggacgagtactgccgtcagatgaagacgatggcagacactcttcgcaccctcggggcccccatcaccgacgagtgcctcgtgctcaacctcctccgcagcttgagccctcgcttcgatcgtgtgacgcccatcctcacccgcatgaagccttttcccacctttgcggagaccaagaacgatctgcttcttgaggagcttcgcctctccgcccactgcgatcgccgctcccgccacgacgctctacagcgc

SEQ ID NO: 169004 - DNA, 448 bp, Zea Mays
tagaatctagattaggttagatataactagattagactagttaaagttagatagatctaccagggtaggatatatcttattaggatatgttagaatcttttgagataggatggggtatatagtgtaggtaggtcagaagctctgttaggttaacacagagggattatgcaactatcggatgggtaaggtagatgcatatgactaggtagttgtatatggtcaagttaatctagggcaccaatttagcttaaaacatttttataggagtgaggtctaatctatttcactagtactaactaatctgttaaataactgactttagattggattatatcaaaatagatgggatctagattagatcgatatcaccagattagactagacaatatctaattactttggattagatcatggtggttacactagtgtgggataaatatgcttattg

SEQ ID NO: 169005 - DNA, 451 bp, Zea Mays
aatttttgtagatcggtactgatatacttctccactcatcaaacatcttgtttgaccaaagaatattgttgaataacttggctatccatactatagctatgtccctgaggctccatgcttctattgagataccattagacccatcgccttacacccctttcatcctcttcaatgcctctctctaatctcagatttttggatcgtgcacgaaacgcctattggtgtcatcatccaattgaaaggttgtgtttccattgaataatttgtcaaaatacccttgccatctctgttgatctcatccccttcatgaagagctgcaccattttatccttaacgcacttcacttgattgaagtttcttgtctttctttcatgaaccctagccatctatatatgtccttctctctttcctttgtactcaaacgttgataaaggatatccttgtatgccct

SEQ ID NO: 169006 - DNA, 464 bp, Zea Mays
cgaagccatctgccatgggaagagagtcactattatgcacatgccattttttttaactagttattttattcattacatcaagccattacattacatagcataccactaccacaagcttgtcacacacgagtgctacctagggtacccctgaaatctctctctaaagtgtccccaaattccttgagaaggtcatcaaggctggccagggacatgtcctcggcgtcggactggttcctgggagggttttcttcctgctgctcagtctgacacccttggcttttggtcttcttgcggcttttccttgcgggggcgagcttcttcagtaccttgtcgtagtccattttgagggtgcggtaggcttcgcgggtgttggtctcttcgccttcagctaacgaaaggctctcttgaagggacgctttttcttctgaaagttccctgactttctgctccaggctttccacctg

SEQ ID NO: 169007 - DNA, 800 bp, Zea Mays
gccgtgggaagtcgtggccaagctatcagcgcacgctgcagcgagaagagcgtcgagcgctatggagaggggtcgtgggcgcgcttgttcagcaagggggtgagcaacagtgcagtagggctgaccgctgggaagggagaggagggtcgcatgataggtagagagggaggggcgcatagggaccaaccatgggagagagagctcgaccatggggccatggctatgtgcacgcaggtagaagattacccaagaagagagaaaagagaaaggcaaatgagaaattggggaaaattgggatacaatgagttctgaccatggtcaacatgattagaatgttgttcttatgatcctggagagggaggagcggggatttggttactgagtctatgctactgagcagaggatgtcacaacaccgatacagaacagagaaggggcatacgtttctcactgaggggaaaggagggacatgcgacaaagtgtcgtcgacggtgaggaaggcgatgctccgggcgaggacaacgaggaacgatgctccgatggggaaaacgatggtgctcctcctcgattgttgtaggggcgcttcacctggggatgcacacctccgtgtgtagagcgagtggaaactgttgtatgagagggtatagtggacgaggtgattgtgcgatacgtggaggttttatggagcgaatggaggaaccgtcgctcgacgtacggagggaggtgttttaggatgttacatcggggatgctccggagtggtcataatgcaggctccagtgctcgtggatggtagcggcgc

SEQ ID NO: 169008 - DNA, 723 bp, Zea Mays
catgccctcgacccctttagagcccgcaccccgctcgcccactcttccctgcccatttgcaccttcagccgagcaccctcgccctctctctcgccctacgcgcgcatctaggcagctctgtcgccgctcaccgaagtccgccgcccgttctatggccgccgtcgagcccctgtcgcatccgttgcctcggtgagttccgccttgccgtcagcaactcgggacacccctcggttcgcccttagtccctctgtttcgcccggtctgcactcaccggagtattttcccgtgcacccggagtccgccgcgtcgacccaaggcttctccacgtccccgccgtcacccaagcgctcctgagttcgccctcgaggtgagcaaccttcctatgcacttatttcgtccgttactaccctagtgtcagcgcaattcctcgccgaagttgatctgtgccgccgttaggccgcctcgccgtgttccacgccctctagtgcctctgtgccagtattgcgcccatgactgagttcgctaggtcgccctgatcgcgcctgagcttttccctgaacccctagagccctgtcatgtccgttcctcttgtctccggcgacctcaccgccgaggagcaggagcggtgccgcccacagccataaaaccttcccggcgttgatctccaccattcaatcctgaccgcgtggtccagatcaccgggtaccgattcgtgcccccgcg

SEQ ID NO: 169009 - DNA, 614 bp, Zea Mays
cggggaccagtatcttggaatgtgcctggaggcataggcatggccttttgctggacataatacttgccatggccatgctgagttaattgactttgtaacattctggtggcgcgactttgctagtctactactccgcatgtgcgcttcgccagtttggtactatggagcacacacccgcgctaaattgggactgttaatctcccgcgctctgtaaccttccatgagctatggtaaaagtcaattttgtccctgctttaaccacgacgctggtgaaaacctaacacctctttccattccacggcgccgccaatctctctgtgctcgttcctccgatggcgactctgacgagagggaagaaacggctggtcgtcgacgtcgatgtcgaggtcgacagtgaggccgaagtggctgccgccttcagtcgattgtccgtgtcaatcgtcgccaagcctacaggcgacggtagcggcaaggagcactccaccggcaaggatgtcacctgcgcggccacatcaggtacgtggtacacccagcaaactcaccagcaacatccccaatcctacaacagccagatgcaatttactccccagcagcagacccattctgtcttcaag

SEQ ID NO: 169010 - DNA, 706 bp, Zea Mays
ccacagatggcccaggggttacatgagagaattggaagggccagatagcgacatcaccttgaagggcaatgcttcctgaaccgttgctttaagagatcaaatcagatagcaagcatgcatatatgcataggagcagcaaagaaagacatgcatgcatgcctcccaccaactgatcgagcttccggcttatatagtgcaagagccccacatacacctgagcgcaagccggccatgcagtgcgtgcatgcagtccacacaccctttgaagcaatgcaagcatcacacactcaactacttctcccaggccagatgtgttgtatactgctgatcgatagaatgggacacatatacagccctgcgtgtcagtggctgcagttcctgtgaaaataaaagggccaaactacaatacgataggattgtgtgcgcgtgtatgaggtttaaaaggcaggggtgttgggaaccaggcaggcaaaacatgcatgagatcgatgggcaatgagaatccaagtggttataattaagtacacagagaggggatggtgatgtttgtttgtagaggaagataacatgatgcctgcgtgaaagccttcatgtgagaccccatcatgtctgctcgcagccccttctaaatctctagctacttaatccgccatacgcaactgcatacagttttcacactgcatgtacaatcattcattcatacgcc

SEQ ID NO: 169011 - DNA, 859 bp, Zea Mays
caactcgcttgtcaaagcgttccgatacgcgagagagcgccttgagcgcgagggtaatcaaaagataacactcagattgctaggctgcaacacacgccatgatgtacaatacaacctaccctcaaatggtgagatcgctgccatagttgttggtgactacacgactggggaatacacgtacgatgttcttgtgcacgatagagagtgtggcctaaaacgtgtttcatgcttgcatccagcatacatgcctttgcaatatccgctgttgtttccttacggtgaacatggcttccatattggtattaggtactttggtgctaacgaggttggttcatcaaaacgaaaatacgttacgatgcttgagtttgtaaggagacacctgcactacagattggatgagccaaacccatatacgtgttacggtagattaagtgatcaaatagatgtcgatgcatattcaactatcgagggcaacatgctacagttcatagcaagccaccaaagcgaactgcgttcagaaactatccaaggcatagctgacgccattgataagggcttcctcaatgctgattcgattggtggtcgtgtagttgttcctgccagcttcattggtggtagaaggtaccatgtcatgaattaccaggacgcgatggctatatgtagggtatacggacctccagatctttttgtgacttttacttgtaatactaagtggagggaaatagccgatgccttacgctttgaacctggccaacaaccatgcgatcgttctgacttggtggtgcgtgtgttccatatgaaagtaaacgaattcatagcagatattagagagggaaagacatttggttcgatacttgcg

SEQ ID NO: 169012 - DNA, 470 bp, Zea Mays
tcgttgtgccaaaatcacggctttcccgtcttccacaaactccgagagtgcaaactcctaaagcgcttcatctccaagccatcgaccaaaaaagtgaagcaggaagagctggtaaagccgctagaacaggaagcccccactgaagaattcccaaggccatggggtgcctcataatcttcggatggggagaagcatacagagatcgacgccaccccaaggcagcatgatgagagttgtttgccctagatccctcgatcccacggtacgcacagtggtcagaattctcgatagttttcgaccgccacgaccaccccgatgtgatcccacatcctaggatgtaccccctcatcatggagccgatcgtggggtcaaagagccttaccaaggtgctgatggatggggggagtggtctcaacatcatgtacgtcgagacatttgatggtttgggcatttcacattcaacgttgcgc

SEQ ID NO: 169013 - DNA, 610 bp, Zea Mays
ccggctgcataatcgacaatcttgtcaattcgcagtagcgaaaagttatccttggggcatgctttgttaaggctggtgaaatcaatgcacatgcgccattttccattcctcttctatactatcacaacgttggcgagcgaggttgggtaagctattggctcgatgaatttggcttccagtaagaggtgcacctcggcctttttcatcggacatcttccttagtcgttgcttttttggacgcaccgaggggtcgatgccaagctgcgttagatgattgtgtggctaacccccactaggtctagagcggaccgggcgaagatgtccttgttgtggttgagacaagagagaagtctttcctcgtcatgtggtgacatgtcttcgttgatcatgacgattttctttggggttatagggtcgagggggaccgtcttcgttccgtcgttgcttcgcaactgggcgttgatctttttgcttttggttgggtgataactgtcactgtcttcgcgctctggtattaagcaatgaacgttgagcttacctggaacaaaatctctttcaatattccacgctgcttgctggtctccgtacactgtgatcacgccttgtgcgc

SEQ ID NO: 169014 - DNA, 877 bp, Zea Mays
aggtactcgagccaagctcgagctaattccgctaggtggatggagaggtattggatgactaacatgtcgtcattcgtccctcccatgcggtaggcaaagcaataatactcgatttagacagatgaactagtaatcccatcgtacttagcaattttgtccaggggccagaaatgccgagaaaactcaatggctcagatggcatggacaaacgcctatggcccccaaacaattctccctgtcatcatggatgttgtctccacctgggatcacgccccgagcctgctctctcattcctaggcagggagttgtgtgttgaggttgacacatatgttgcggatctttcccagtctttagcgcatctgggtgtgtgatatctagggatggtggttcatgttgttattgccctaacccttggggcaacgctggcaggctgtattcgttggctgactcccctcgatgaagaggtggcctatttggaggcattgtgggagtctttgggtggtcacgtgcttgattaattcccacagcttgaggtatgtggccttttcctagggatcctctagctctgtggtcgtccatagcatcactatcgcaacgacaacattctagctagctgacgagaagtatcgtggtctgctgcttcctcccatgccaacattgctatacaaaggatggcaatgggtacccgcaccactggtacaacatttgtggtatcattttatctctcatttcagaccgtgagcttggctgcatcgacaactttgacttctctcgtggtctcctcgtgttgccttaggtgttgcttgatataggcccaaaggtattccacttcttgttcagtggagtactaacccttagtgggagcacccccactagg

SEQ ID NO: 169015 - DNA, 630 bp, Zea Mays
ctggacccgttacaagtcggttcctgaattaatcctgcagatttagctaacaaatctcgcaagaaactgagaaccctaattgattctacaaacatgcggaccgttcacgtcaccatcgcggaccgtccggaccacggtccgtccgacctacagggccgagccatccgcctgcccaaaagcgggctcaacatatgccccctaccttttggtgaaggttgatgaaccaaaagtatatgtactatcaacaatcttcggaaaacactagatctcacaagtcatattgttccgaagtaagaactaagcctgatgcaagtcaccagctttttaatccaatcgggtgataatgcataaaggtcgtttcggattgcatctttctcgaccatgaccatttgatcaatggatcaaaaggtatagaatgaaggtgcccccaagtctgaatagacaaagggactatgcatgtactatggattcatcatcataccattccatatttgaacaagacaatacatcgacgatgagtaggcgggtggaaagcatcttgacatcacatgatgaatatgcgatgcttgttgcgtcgccttttgggccgttttattttaacgggtgaccaggtttctttgttgaccgatc

SEQ ID NO: 169016 - DNA, 536 bp, Zea Mays
cgacgatctagccacactgctcacggtcaccgtggccagagcaaaccatttggccatagatgaaattaggttgggggaaatgctcggggtaggtctattttggtgtccgtcgctcgagagcgccggtcatggccccgttcgccggtacagttgctcaccggagcgcggccgtgctccacgccgtcggggaccgcgtgatgtaaagtaatagaagccgggggtcttttctgcaaactatcagtgacttaagaaaacagtaacagaacccacttcaagttatccaaaacgttgagggcctctgcgcaaacctgcaccgcgggcgcgggcacgcgcgcgcttttcccctctgtactaggccgctgggctgaaaatagtttaataaaccaatagaaaattgtagaaaaatcttaaaattgtgaaaccaattttcctagacttcttattttccatagaatttaataaaaatagtttcatgatttttaggttaaataaggaattttaaggcatttaaagtagtttaaagtattagttctgga

SEQ ID NO: 169017 - DNA, 686 bp, Zea Mays
tttctagcatttattttctcattaaaaatcattttctaaattaatttctcctattttcctgagttctgggctgcgcacacaataacagagaatccggggtctagctcacaaaatttcttaagactcattcccccccgcactggacgacgagtttattttataaaagtgtagggactcttttgaaaagctgcagccgcgaaggggtacggttaactctcggccgtccgatcaaatatcaaaggccaggattagatcgacattaagtcgaacccgcacgtgatacagaccatcggatcgagatctgatggccccgaggcctccacgaccaaatactatctcgatcgcacatcatgcgatcgacgactcaggtgcaatcgacaaagggacattctatttctaatctgagccattcatcaccgatccgaaggacggagttcgtttctacgtgagttaatctcggcccttagctacgagatccacggtggagacgccttcttctacccctcgacctccagagcggcggtgcatcaaccaacagtggtgccccgccggagaatggcgatcacccgcattatcgcataatccccatgaaaagccgatgttacacgcagaggacagcaaggcaaaaacgataggaattgtcttaccatcgatcgttacacagggatggcagtccacgacggagc

SEQ ID NO: 169018 - DNA, 763 bp, Zea Mays
cagaaaggccctcggtgttctggctaactgggaacgggttcagttactgttttcttgagtcactgacagtttctaaaaaggacctccaccttctattcctttgcagattaaggtccacgacgaggaacaaccctggccacactccggcgagcacctggaccggccggagggagccaagactggcggcccctagtggcgaacaccgaattggatctcccccgaacaattctcctcaaacaatttcaccaatggcgcactaaaacgccctggccacggtgaccgtgtgggtgatccaaagaacaatgcgttcccggcgattggcggcgatctaattcaattgggtgggtcggtgagcatcacaaacgcatgagactgcttaaacgcgggagcagaaagtttgcactgacctgaatcgagttagccgcggcgagctgttcttctcggtgttttcgaaccggtttggggaaaatgcaaaattcgagctcgctggtgatcggctgggggcaatactgggtgtcggggtacttgactaccttacggagcttgcggtggcttcaatttatagagctagtgtgcggtggccgcgaatttgaagaaggacgcgcggcggtcggaggaagggaagagcactggcacagtggcttggtgtcctacgccgtggcgattactccggtgatcaacgaagagtgagagtaggctacgacaatgcggtggaaaggtagagacacgtggcggacgccggtgatggcttaacggcggtgag

SEQ ID NO: 169019 - DNA, 536 bp, Zea Mays
tggcgagcttgcgcgcgggtaaggccacgacgagcagcctggtgaaatgctttggtcgaacgatgccacctcatggttacatgtgccacgtcccggaagatttttaccaacggccgcaagtccgagcagtgaacacacaactggcgttcttatccctggtgaggtacactgaacccaggtcgatatcttgcgtgctagcccgaatttggatagacattgcgccctaattcatgtagttacatgcaaatcagcccgcatcaaagtggtgcattaatcaacgttctttcactttggtataacaatcataccgaaaatccccatggattaagcacacgacaactcccaagttggctcaataacactgaaccccagattcagttatgatcagatgcagtaattgcatttctttccccatcagacctacttcaaggcattattacttctgttttcatatagtaacaacccaacctcacttcagaaaagttatgctcctatatacaacctccaacgtcatcacagtgaccttggacttaaac

SEQ ID NO: 169020 - DNA, 456 bp, Zea Mays
cttcctttcttgttcttcgctttctctctgctcaggcaacccaatgctggtggtcatgaatcagccgctgctagccaacatctcacaccaggcagtagtgaaattgattgtgcgcaatgttctcttctcttgtgtgctcccagttttattggcgaaggcttaatcttgcatcagatgttgctgcttcccaagtcgtgggggtcatgtcaaattgtcaacgattgttggtagtcatgtactcatgttcaatgttagatgtctcccatgtctcagcaacataaatccacatcatctccatctcttctcctctcccctgtacctcactacaacccttcggatctgtggtgtactgccgagtggagtggtgacccagacagaatcgagatgttgaccttgcttgacccgacccttgatttggatgtcctggggttgcagaatgcgcccgatcctgaccac

SEQ ID NO: 169021 - DNA, 408 bp, Zea Mays
accttggtgacgagaagacgatggcgcggacggtgagccgtccatggcgagcgcagcagagtgattcggatttgaagggtcgtgggaagatgggcgatggggaaccagagaaaatgggaggaagcagttaaggagaagatgaacaggacgacgtgggagaatttgcatgcgagcggacccacatacggcagttttccaattgaaaaacaaacgcacggcgtggagatcgtacggggcacatgcatgcgatttcttcattcttcacctccttcctgtaactgcacatgggcgcatgcaggcaacaggcagtcggacagggccagggagagtgggcacggggcgcgcgcgcatctgtgcatgccgccatgcacgacgaccaggtgggcttttccttttcctatctctttc

SEQ ID NO: 169022 - DNA, 624 bp, Zea Mays
gtggaatgtagcgcgcgggtcggcgtggaagcggagacaagcaccgatgcgatagatggtgccacggagaatctcggcgcgcaatgggtgacgacggggggggtcctattaataccctgccgcgaggggattccggctgggcggttggaacggtcagcgggttccgcccgatcctggcggcggacgccgcggcgaggtaagcgggccctggtgcatgcgcgagggcaatcgtggcggcggacttctcacctccgcggcacgcgtaaaatcgctcgcgtcagggttctatcgacttgagtacaagtgacggctcgcgggcgtggtcagccattatcttccaggaccggtggagtcggagacctggggatctagcgcggaggatagggaagaagcgcccgcgcgatgcgcacggccgttagccccgcccacggcgcgaatttcgcgcgaggaagacaaccagctcagggaggcccgcacggcagtgtaacagtgagagggggggtttgggctagcgcgaggtgggccgaaatggatgaagccagcccaatcaaggttttaatctttttctttttattttctttcctttcccttttcaaattcaatttgaattccaattttaagttc

SEQ ID NO: 169023 - DNA, 597 bp, Zea Mays
cggataggtgcccgctctatagttttgtggccacggggaggcctagagttatgctgacaggggcttcgctcatcaagataattcaattcttggaaagcagcttgtatgttggctgacctgtggaagtgatagatgttttgatttgccccgccagccagttgttgctgggggggggggggggggggtcttcgtactgtatatctgcaatttcttgctctagcactcttgttctttccttctcgtccgtgatcaaattgtctcactcttgggatatggtggatgagaagggctgaatgagggtgggttggcgtgtaaaagatatgcggagtgaggggagtgctcaatttaaaggaaccgatcgtgtgcttcatgaatttgggcgagagtgttcataacgacggtagaatatttccacagagacccaaccatcgtggcacgcggtgaaacaatggcctcgggcagtaactatctacccagcactactcctagcattgtggtagatcggctcatggcatggtgcaaccgaggaagccagcagctaccaagggggacgactgttcagccacgtcgccggtaagtggacacagccgtgcagag

SEQ ID NO: 169024 - DNA, 993 bp, Zea Mays
tgagaccgtgttttggcgcttggaggaccaagagacgaggttagcaccgaggaagacagcataaccagaagtagacctcctagtgtttggatagccagcccaatcagcatcagagtaaaccacaagttccatttgcgaagaggggctgaggtgaaggcccaactgaagagtgcctcggacatagcgcatgatacgcttgagggctgccaaatggggttcccgaggatcgtgcatgtggagacagacttgttgaacagcatacgtaatatccggacgggtgaaagtgaggtactataatgcgcctacaagactacagaattccgtgggatctgagagagggtcaccatcagctgaaagtttggggttgatatcaaaaggggttgtacagggtttgcagtcactcataccagcttgctcaagtatctcaatcatatactggcgctgagagagagtgatgccagaagcagactgttgaacatgcatgcccaggaaatgatgaagaggaccaagatctttcagtgaaaactcctgttggagagcagtaatagtgcgccgcagaaggggcatggacgaggcagttaacacaatgtcatccacgtaaagaagaaggtaaatcatatctgcacccttgtgatagacaaacaatgaagtgtcagacttggcctcaacaaatcctatttgaatcaggtgggaagagaatctactgtaccaggcacaaggggcctatttgagcccataaagtgaccgattgagacggcacacataatcaggatgagtggaatcttcaaaaccagtggactgaacacaataaacagtctctaacaaggtcccctgaaggaaagcattgttgacatcaagttggtgaatcagctagttgtgcgagagagccagggaaagaacggttcgaactgtagctagcttgaccaccagactgaaagtttctgaaaaatcaataccagggcgctgagtgtggcagaacctcccaagttattg

SEQ ID NO: 169025 - DNA, 515 bp, Zea Mays
cagaaactctgacacaaccttgatagccttgagtggatttacctccttgctatcaatagtcatctgatgacaacctcctttccttggctcgggcgagactaacttagtcaccacttcctctcccagtggggacaccaacttaattgtcctcttatcacagctgataactgcccggtacttacccagccaatttattcctaggataacatctattccctgagtacccattactatgaggttagcgggaaactctatcccccttatttccacacttacattcaagcgaacactaccgggtcgaactttaccaccgactgaatcaatttgaatgggtgttgacatggtagttattggaagattatgagcttctacccatgatgcagtaataaatgtgttgctccagtatcaaataacacttctacaatatgggaattgactggaaacatacctactatcatgtctggtgtttttcctaaactgcttcatcctccaaatggttcagtctcccgttgttg

SEQ ID NO: 169026 - DNA, 613 bp, Zea Mays
cctgcgcttctccgtgcagtccgcacccacaacgcacgccgcggccacgcccgtccccaccccagcctatttctagccgcctagcacccgctcgccctcctcttccctcattcgcgcactcacagccctcagcacccgcctcgcgtcgtggacacacctagggagcccagccgccgttcacgtgtctgcgcgcccgttccgcagccgtcgtcgaacctcggtcgtgctcatcgcttcggtaagctccgcctcctcgccagcgactcaagacgccccttggtttgctcttaccccctctattcccctctactcacgctcatcggactctcgccgtgcagctgtgtcgctaccaccatcgacctgggtccccgctgtgttctcatcgtcgctcaagcgctccagagccgtctctcaaggtaacccacctccccgcgcccctaattttcctttccctaccttgttgctcgcacaattgctcgccgatgtgggctagagccgccgccgggccactccgccgtagacgggtaccctccaatgcccctgcgccagtgtcgagcccacaaccgagtccactgcgccacctcgaacccgcctgagccatccccaacacccc

SEQ ID NO: 169027 - DNA, 517 bp, Zea Mays
aacaaagcccttcttatgaagaatctacataaattctacaacagagctgacatctcgtggattaacatcatctgggccaatcattatagccattcgctgccctcggataaaccagttggttctttctggtagagagacgtccttaaaactctagaatctttcaaaggaattgctcgggtggagatcggagatggaaaacaacttttttgtggcatgacaattaagatggtatgcacaaatcggcacgatacccagaactttggtctttcgcctcaagcaaagacatcaccatccaccaagcaagaatggcagcctcacatgagatgtttcacactcctctgtcggaggaggcctttgagcagtttcaagctttgcatgatcttttggttaatcttccgcttaataatcagagagacaaatggctctgcaatggctcctctagccttttctcatcgcaaaaggtctattctcatttgatgggcaatcagtggatccatcccttcttcacttggctgtg

SEQ ID NO: 169028 - DNA, 612 bp, Zea Mays
gagagaggtcaagggtcaaaggtgataatagacaaggatataaaggaagaggtaaatgtgcataaaaaccatgaatctaggtacaatgaagaatagaaataagataagtcttgcaagaggtaaagtataggatataaccatgggtgagataagtaagagaccacgcatgatctaagatgggagattggaggttttagataacgaacatagcgtaatcaccaaggtaagattgagagatgcgaagggtaaaggcaataagaagcaaaagcacaacaaaggatgaggttacaaactcacgagccaaagaagaggatacaaccaagagaaagaaggtatgagacggaagaggggcgattttaaagggcaggtatgagacaaacatcaatgtaggatatagaggtgtcaagggtgcatatgataataattaaaaagcataacaaaagatatagttaagacaagactcgcgaacgacaaagtggagaaaacaatcaagggtaagatcggtaaggttccaacagaagggttgaagtaaagattcattaccgagtggagttacaaggaaacaacgagattactacaggtgtgcaaaataaaatgatcactcatggatca

SEQ ID NO: 169029 - DNA, 585 bp, Zea Mays
caaatctctagccaccagaacaaaccgaagcgagcgcagcgccgcgaccagctcaaaccgaggaagtgccgccgccggctaaatccgtcctgcgggaaaatccggccgtggcaaagagtccagcgtggtcgggggcaactactgaagccgtccgtgggcgtatcagggagagctgatcgagggagcggcctgaattcctcatcggacttcattcctccgccgttgtccgcctcacgtcgcgaccggcgtcaccgaggcatcgatcaccggtaaccagcccatccttgtcttcgttatgcaatacgcaatgtgtagctgcgatgaattggaaaacgggggggggggatgcacgattggcgtccaccggagatgggtccgccgtcgtccgctcgggcggcgccgccgcgggttagttggttttggcacgcgaaggcgtgggggtgctcgcgaccgtcgatccggtcagtaacggctccgattagatcttcgcgtaccgcttcgcggagttgctcgtggtcgttggatgttgatcgggcggatccgatcgaccgcgcccgtataaaatcctggccgctggtttgggat

SEQ ID NO: 169030 - DNA, 545 bp, Zea Mays
ttccgcaagctttttctgagagggctctgaaggcccagcttcggtaccagcttggattactgtagcttcaatttcggccgtctttgtttcagcttcggtttgcgctttcgaggcttcgacagttttccttgaaggagtagagttcaaagtttttaccatttctaacacatctagtacattagccatcattctcctcttgggagttgcgacaaaattttttgtgccttcggtgctgttacttctaatgaagggcttaaaatttctaacacttttgtttctccaatatttgactcttcagccttatccttatcagtctttgactcaactagatcaatcgaaggtgccttcggcattatagctggctcttcagccttctgcgtaggagtaatgggttctcttggtttagcagctgaagaagcctccccgccaaactcaggcaccacgaccggttcaatatagtgtgaccggtgggtaaggaccttcaactttttgcccttcggcgcatgcttgtctggagtggccgaagcagcaattttcctcttctt

SEQ ID NO: 169031 - DNA, 843 bp, Zea Mays
gttttggggagcttcggggtgcacatgtagtaggttggaagagaagaaaataacgcgttgaccatttgtattctaccagcctgggaaagaaatatagaagttgaagcgagtcttctttcgatcttctgaatgagaggaaggaatgcttccaaattgggttttctaagccccaaaggaagcccaagatacgtgaagggcaaagacccaaccttgcagtggaacgtatttgctagaactgccattttctgctctgaaacattgatgggataaatattagatttgttataattcacatggagcccagtagagtcagcaaaagaattaagcatcgctttaaggaagaagagttgtctagggcacgcttccaaaatcataattgtatcatctgcgtactggataatcggaaagtggtggggaaattggaagaccaggctggcgagacaaagcaccagtctagcttttcaagcaaaggttgacgttgcatgtttgaccaagtgaaagtttgccctttgagaggaatttcttgtaaacccagctgactgattgccgcattaaaattgagcattctaatagggtcaccacccagcttgttgcgattttccggtatctaatcatgttgaaatcacccagaaaaattcaaagcttgtcttcatcaatttcaaggttagaaaaccaggcaagaaagacttctcttccatgaggggaacaaggggcatagatgttggaaagccaccagacttgaccatttagattagatcagaaacgaatagtatgcccaaacgcattctggtcaactacctcagcctcaaagagggagcctttccaaatagtgatgaatcctcc

SEQ ID NO: 169032 - DNA, 611 bp, Zea Mays
gccagattcagaacaccatggtctcagtgagatgtagtcgatttgagagcaccagatctaaaaatctatgcagttttgatccaagaatcctatagcaaatttgaaggctgttgtctggtgaacactttttattaatggagattaccctgttcttaacaagaatcaagagaaagagggggtgaaaggaggtcggttcaacataacaatgaagatcagagaaccggaaatatctgcagaaggaaaagatctctggttgttgtggtttcggatgtgtgcaggtgaagtggagataggaacgaccgcggcaagataactactggctgattcacggtcccgcgagcctagccggagcctggccggagattttttgccggtgctcgccgtggcacggtattttgtcgctgtgtcactcgcgccaccaccttacctcattgtgcctcttccttacttggtagccatgcgctaacgatgcatttcgtggccgtagatcgttagccaggtcgtcgtcgctataaatagcgccatgaactacggcgaggcactcacagttcttcagtgagctcggttgaagccaaaattcgtagtgtctcctcctcctttccccaaattgg

SEQ ID NO: 169033 - DNA, 406 bp, Zea Mays
gccacacaaaagtgatagggatctcaaagtgatatggaccaactacagattcaagtctggaagctttctcttgctccttgtgtgggcagcagggctttgcctttgaggagttctgcttcttgtagacattgctggactatcaggtgccactgaaacattgttcttccttgtcttcccttgtgcctttgccttcccattagccttctttttgtcttttgtaggcatagaggtggtagttgttgttgtacccaaagacaacacaggatactcaatacaaagtgcctctgggtggtttgagccatgtccagatctacacatgagcaaaattatagcatgcaatggtcaaaataatatgggaacaacaaatattgagcatgtacctttctgggtttgtgcccaagctagc

SEQ ID NO: 169034 - DNA, 575 bp, Zea Mays
ggtccaacatgggggcctaggcccacatgtcatacaaccggtgcaccggttgccaggtgtggaaaaatcgcaccaccgctcgcgccaatgccacgtcttctcggggccgtcgcagctgactgaaaagataggttttcagaaccaatgcaacgactcgaggtatcccgcgcatggcccaacagtgacattaagtacgaaaattacaggccagtcaaccatgggaataggcgtggcggtcgacatgaccataggtgggccgacagtaattgcgtcaacaggcgcgcaggagcagcaagctaaccgctaatcaagctttggccccacctgcaggctcgcatcctcccctgaggcgggcccgggggccactgtcggtacccttaattaggggtaccttcttctacagtatgaaggtgttgtacatatacgacgtctccaggtcacgcggagaatggcacccaaccccaccacatgggcaggtataaaggcaccgcgtggcaaggaaaggtaatacatcctaggatgtattactaggtttggacctccacagtaggacaccggacccctgtgcgtacgag

SEQ ID NO: 169035 - DNA, 633 bp, Zea Mays
aaacagagaaaagttctaagctatacaaagccctcagaatgctttgagacacttgctctggcttcgcaactcggtgctaccttcgtctgcgcgaaattttcaatttgatcggggcaatgtcaggagaagcgaattattctgccgatgatattccaaaggcgcttgagtttgtggaaaaagaaatcaatgaatttgacgaagtgatggtggggcatggagatttttcagctctagtggccgccgaggaactgctactatatttgcaaaagctgggtgtaagcatttgaaaaatgttaacaaccccaccttcactatttccacggttgaccttgagactattccaagcaaggctcgaagcatgggtaacagatttattacacaaatctagacaaagggtgtatgagagctagttggaaacgaagctcgggctctccttgacgaagtatgaaaacgtccttagtccccctctgttttctcctacttcatactgctaaacatttcatatgattaattttttaggctgatattggcgaagagtgaagaaccgaagctgaagactatgttagtataatctggagaccataagctgaaggattttggtgtagtcttagaaaaattcttgtaacttttgtt

SEQ ID NO: 169036 - DNA, 514 bp, Zea Mays
atcaatttgtttggatgtctgaacctgtagttgtgaatttttgaagtcgcaagtctgaatctgtccaacctggacagacctgttatttttgcacagttcgactttgctaagagtctagtcatattgagacaataataccaaagttgtagagcgtttctcaaactttctaaaaagtatttgttcactatttttggataaataattgaagagttatgactgaaacaagcaactgctgtgctgctgtcctaattttattatgtttggtggattgctctactctgtggtgtatttcttgagtcgactgtttccttgttttgactttggttgaacacgcagtaatgataatataactaatataattgagcctaagtatataggtaactagtacacgtctcgctaaattagtaaactaaattggttaaggtctaataaatgtttgcctagtaaataattgtaaagcccaattaagtgtctagttccctttcaactaagtctgtctacatatcagtattag

SEQ ID NO: 169037 - DNA, 902 bp, Zea Mays
ccatggccggcgatggctgccaagtctagctatcggggaggcataaccgacctaaggtgactcaggaacactcactaatcttagcttgaatactttgggaatggtctggccatgtgcacggcggagaccgtgatcacgagctcgtgttcccgcttaaccatggccgaattgagctaaaggttgccacgacaagcttcacaagcatgcagagatactaaaacaacgcttgaattggacagagtcttaccagagcgggctggccacggatgagctgttctcggcggcgcgactgaccgatttgggggaaaacagcgtcgtggcgtgctcggctgaaattgagggcggagcttggggctatacgaccgcaagggactctagttttactgtgcacaatcaatttgagaggagggggcagaggcagcgcgaatttggcttcgattcaactcactgtgtgtgtgatgttcatacctcgccgtggaccacagggctatttatagctacggcggtccggcgatcacttcatggccacggataaccttgtcagcgcaagcttacatgtaaggaaaagatacagtgaggtagaatcggggcatggatgacaccgtggcaaaactggctgagtcacggtggtcgccggtgattatctccggccacagtcgaccgggttcgcgaaatcatgccacgttcgaggctatccaccccagatcaatccccagcactgtattgcgcaagttcatccatttcagcagtgcccctgttcttatcgctccatcagatatttgcagcgctcgatcttcggtttttgtctgaaccgaccaccttcttccatctttaactctggatttttgttaataacagagcaatctcccttaataaagtttgttcttgatttaacagccttc

SEQ ID NO: 169038 - DNA, 428 bp, Zea Mays
tgccgacattgatattttaacagagcccaataatccccaactaaaacggaagccatctgtacttgcagcatgatatcctattggcccttttagatcacccccatcatgttactaatcatgcaggttattggttttctggttttgacgatatgagggcattatatcattgccacttgcccatgcatgtgcctgcaatctcagccaaactaatcatgggtcacttccatgcatgagcatccatcacctttgaggccccatggcagcactttttaatctcagctcactcatggctagattagcatcatgcctcactcttctctcccctactaggtacatatgcattggtgtaagaccaaggcaggagcctaccactgggtccaaactagttatgggcaacatgtgagccaagagacccacctgaatttttt

SEQ ID NO: 169039 - DNA, 538 bp, Zea Mays
gaccatgactgctaactccaagtcatgagtgggataattttgctcatgaggcctgagtgctcttgatgcataagcaatgactcggttgtcttgcattaagacacaacctagttcagtgccagaggcatcatagtacacatcaaatggcttgctactgtcgggttacgctaacactggtgctgtagtcagatgttgcctcaatgcatgaaaggcatcttcgcacttctaaccccaaacaaacttggcttctttcttcaacaactcagttatgggcttcgcaattcgagagaaatccggaatgaatcttcaataataaccagctaatcccagaaaacttcgaatttgacggacagtcgttggtggcttccaattcatcacctcttgcaccgtatcaggatcaacagttatacccgcctgagagatagtgtgacccaagaatttgatctcctttagccaaaaatcacattttgacaatttggcataaagatggtgctctcgcagacgttgaagcactacatgcaaatgcccagcatgttct

SEQ ID NO: 169040 - DNA, 818 bp, Zea Mays
attataaatggacatggcaagggaagaagtagcattctgttgagccttatttgttactgttattggaaatagacccgttgttcttggcttggaagtgttggaggaagtgggccatcgttatagcctcaatattgatgacatgtctatacatcaaaccatgctggaagacttccttctattcttgcctgatgaagaagtggcgacaagagtgctttacgaaggaaggtcgttcagaggtcctatgctctctctcgtgttcaagtagtggacaagattcacacatgcttcggctacgtcactgcctcatttgattgatattgagattcgagggatcccagcgcacgcgtggggtctgaccatagccaagaagcttctccacgactcctgtcaaattattgagttgaatcccacctctgcaagcaagtctgatctctcctctctgaagcttcgggcatggtgtttggatccactgatgcttcacaaggatatggatctccacatcattgagcggggggcatatgatcaggaggcgagatgcctaacctacaagattagcattgctattcttccatctccccttcagtttctctcatagagcagtcagtccccttcggctgaggatgagctgcatggtgaggaggacaactaggatccgaccaacccccagacccgacagttgggtccttctctacagcgtcagtctgtccatctttgcttcggttcccattagagattgggcagagaacggactgcatgtgtgcatggggataagagagaggcgcctcttttagctctagaggatggtgttgtattatgtg

SEQ ID NO: 169041 - DNA, 441 bp, Zea Mays
gctacgcctgggtggctggcggctcatcatcccgtaccatcacccgtcggggcctggttcgaggttcaccgccgtttgccgtggcccaggctcgctgcaccgctgttggaggtaagacggtggccctgatgttcgccatgtttgtagcgtcgtgtaggaggcctcgggtgagagtttcgtgtgcgaggttggtagatgcttgcgtcagccatggctccgccgtgggaagctacgatgccgctgactggacaacggggaatgggatgacagatgagtggggttgctctggtcggttgatcggcatggacggtgcagattaaaacaagcataccgctttgagccaacccggtacggaccatggatctgttgatgtgtggctcgggttggttcccttcgtgcttacaatccggttcgtcagatcttaatccaatggctgttagc

SEQ ID NO: 169042 - DNA, 569 bp, Zea Mays
ctcaacttccagcatcttgttttaatcctcgcatctattcatcaggtcccatttcttctgacgcccccacctaccggagccaatccgcccagatgccccgttcttgacatgtcgcctccttcccgacgcctgacgtcgcctaaccccgcccccttcccaacgtcctcgtcccgctcgttaccgtcacgacaccatcccccgctcttggctgacccgacctcactcgccgcaatgatacgaccagtccacgacaactggcgagcttgacgaaccagtgagctctggctctcagtcggagacatcatctgccccacctctttctcggtgccccaccctttaaggagatcgaaattcgacaatgtacgcatgacttgattcggtctggaagaacttagttgtatgtttacttctcttctttaaacttgtatgttatattgatagatatagaacataaattttatgcaattatagtttttatcgtcttgcttgattttgtaatatggtttttttacctctcccccataaattttggtcctgcgtccgccactgatctggatgtatattaatcg

SEQ ID NO: 169043 - DNA, 521 bp, Zea Mays
caattctcaaaacacaacatcaacaagctgaggcaccaaaggctggagaccaaaaaaacaagaaatgcaaaccaaaattggtgggctaaaggacaccctaccagcagatgattaatagtctcctctcgttgatcacaaaggggcacttttttggatggtcagcctctaccagcagatgattaatagtctcctcctattgatcacaaaggcacccaagatttccacaccaaatcagcagatgcaaagtgggtggctccaaagaatagagcattgtcggcagacattgcagattaggatcctcaagaggagaacctccaaattgttgatcagagacatttggctgaagtaccacatcctcaaggatttctgcacactagagctctaaacgagagggccccttggatgtcccttgcccaaaagaaatccaccaaagcctccccaacaggtctcatgttaacaatccacttaggaaccaaagaaacaacctcgggagccaagtccttgatgcttctacccatgag

SEQ ID NO: 169044 - DNA, 289 bp, Zea Mays
ctgatgaccatggtcatgagtccactgagtttgagcttcagaatgacccgacctttatgcaatatgcaactggggtcaccctgccagctgaccgaagtagaatttagagtgatagctgagcagatcagtaccagggacttagtgcaagaatacttggcgaatagaacatatccgacgtcaagtggctggggaatgccgaagaagaaagaagcggggaagaagcatgaacttgttcgtcttgcttaccgtttcaaatttgaaaagcaatttaagaagccttgcaaagaat

SEQ ID NO: 169045 - DNA, 715 bp, Zea Mays
acccgcgcaagcacacgacgtaggcacgtattgcgggtgaaagctcgagggggaaggccggaaggcgattggcgacatgcggtaatcaaggccgggcacgacttataacacaggccgcacgaatcaatgggataggctggcggcggtggaccgagcactcacgcgacggctccaccccttccctctgttctggttacggaatgccggccggatagaaggggaaaggcggagacgggtgtccccatttatctccccaaggtcgtgcaggtaggtgggttctgcggggttcgcggtcaactgatcacgcgaagatcacggtggggcaggtacgccgtccgcgctccgcgcgatgggaggaagagcaacagtgatatatgggccccacaggtaagcgaaaacacgagggagggcgcgagctgacggtccgggccaccagccagcgggatcgcccagcgcgcgcatgtggcatcctggtttactgacgaacggccccacgttgttagcgcgttttcacattcatgcggctgtaggcatgggcaccgaccggcttggcccacgtgtcataccccccacgcgactggttcctaatctggccgcgcagaggcaaattgaagctgggccgcagcaatgaggagtcagcccattctacatttgacttctttaattcttttctatttttcccttttctttttccaattattattttttatttcca

SEQ ID NO: 169046 - DNA, 688 bp, Zea Mays
tgaagtggagcaggcagacattgaagaaggtgatattggtgaagaagagattgattataacaccgctatgccatcgaagcccagccatttggattttggaaagtcaattgtgtctgaagctgatatggctatgatgacgaagctaggctacttcaaagaagctgacaaggggttgattcgctttggtggggaagaaactatcccgaaactagaatgatgaagtggtggtctttaagagcttcttcaaagcagggctgagatttcctctgcacgagatgattggagatgtcttggaaaattttgagatttaccttcattagctgacccctaacgccattgttaggctcagcgtttacatctgggccctccaaagtcaaggggtggagccactcgccgaagccttctgccgagtacatgaacttcattatcaaacgaaggctagggaagacggactgcatgagaactttggctgctacaactttgcttatcgcaaagacatgaagacacaggtggtcagctatcgcactaaatggccgaccggttggaaatctgaatggttttatgttaaaattgatgagaaaaaatagaagctagtgcagagcccgctggagttaaccttcgggctaactaggccttagtgcaacatgacgccgggggcaccatgcccaaatgctgtgtatgagtttag

SEQ ID NO: 169047 - DNA, 647 bp, Zea Mays
ggcgacccggttcttgggcaacaggcagacactctagcatgaggaggggctgacgagcttgggggcgggcccaatttggccagaggaggctaggagggggctgaccgcggggaggtggcggagctccgcggcgggagtcatcgctggtgaggttcgtgcggggattggggtaggggagtggcgtcccaagctcgcggcggtgtggcgcaactgatgagcctatctaatttctcgctgaactgccagagggggagggaaaagagggaaaagggcttaccggaggggaagaagacggcggcgcttagcgcgattgctcgggtgagggggaagatgggtggttgaggccggtgcggggctaaggggtgctcggggcggcccttttataggcgcccgagggaaggggagcggaggagctgggcggacgccggtgaggttgcacagcaccggagttaatgccgcacagcggcgacgacgagaccgcacggcaggcggtgccgtgcaaggacgcggccgctgcggcgaggacaaggcggtgccaaactttcctgtgcggtgaagggatgggcgaggggacggggcgaggaagaggacggtggccggaggtgaccgcggcgaagccgtacgcggtgaggatgatggggtgacta

SEQ ID NO: 169048 - DNA, 392 bp, Zea Mays
aaaaattcctagccaagaatgtgtgcaggtcgagtcccagttgggagcgccccttgggggtcacgacaccagttactacttaagaatcctggcatccagccccgacacgtcgaggccatatcctaggggggccaagtaccaaggaagaagttagtaacagtgcacacaacaaagaaaaagtggcgtacaaataagttgtaatatcacccggtaagtagtacctaaagagtatcttacaaaatcaaaggtatattacaacccgctccccagcggaaccctcgttttctccacgcaggcctagctactcatcgtcagtaggatcccgctgaaagcgcctagccaccacatccacaacatcctacacgccctcccgagcagcatcttcagcatca

SEQ ID NO: 169049 - DNA, 424 bp, Zea Mays
cggagttctcttataacaatagctatcaggccagtttgaagatgtcaccgtttgaggctttatatggcagaaagtgcaggactccactgtattgggatcaaactggtgaaaggcaattgtttgggcctgagattatacaagaagcagaggaacaagttcagcaaataagggagaatttgagaactgcacagtctaggcagaaaagttatgctgatacccggagaagactgcttgagtttaaggagggtgattatgtctatttgaaggtgtcaccactccggggtatgagaagattcaaggtcaaaggaaaattgtcccctcgctttattggacccttcttaatcttaaagcgagtgggagaggttgcatatcaattggagttaccggatcatcttgcggatgttcatgatgtctttcatgtatc

SEQ ID NO: 169050 - DNA, 520 bp, Zea Mays
ggtcaacacagtctttgcttgagttggtcaacatatgtcatcgttatcctcgactactcgatcaccaagtcctcatgcgcctttgcttaatttggtcaactgccatcttgagttggtccacacagtctactccttcacatctacatttacttgttgatatcctcaagtattagccatccacgatctgtctttcaagcacgttggtccctcggtcaaaggcacaagtccttcaccgcttctagccaacgatatggcatgtctctgcttgatcttctccatggctatcgaatgtatgcacatcaacacaaccaagacacatgaaacccacacatgcatgcacatcaacacaaccaagacacatgaaatccacacactcacgctagggttagttgttaactcaagcgaagcctgatcatctcctaacaatcacttatcacaactaacacatggacacatatcaaccatgtgtttacatatagtcatactgcctctacgagcccctcaccctaaccatatgaac

SEQ ID NO: 169051 - DNA, 547 bp, Zea Mays
atttaggccataaaggctactactactattaataaggatgctgtagcaagcacccgaaaaattagttaggtctgagaagacgactagaatgagcatgcatcatggttgccgcatcattgtctcttgtgcatcaacatgcttctctcacctttattccaataataagaacttgtgaataatgtgatgtgctgctatgttagaaatgctttaccttgtgtcggattggtaagtcttgactaggtcgtgatatgtgtttctcttgccttgctttctagaaggtacgatagttgttcagtccattttgcctctaaccaaaaaaaatgttgcctgtttggcccataaaagaccccccaccttaaccagcctagtggttagcaagtgaaacctcttaaaaaaatcctgcttgtgttggtattttctagcccttgagtgttttacccttgaagttaaacctgcacaacttatagaccccatatcttgacccctaaatagaccaaagcttccttgtgcacttgtgtatgtaaaaaaaagggtctattgtctattc

SEQ ID NO: 169052 - DNA, 469 bp, Zea Mays
ctaggagccagatcactcactctttgacccaagagccatttgtctatccagaacagagtgcgggctccattccccacatctgaaatcaagacagtggagaaaaaagcttttgccttttttggaacttggataggaaataacaatcatatgacactgaattttgaacggattattgcaaataagtctttgattaagttgcataaaaagggaaggacacaaacatatttcaaatttggtgcaaaggtcaagggaagtacccccaaaagaacattccatgtttctaacaaaatatcaagggaatctatgccccaggtttcctcttcactctggttattcagaaccgacttgacagcttctgacgtcaaagcagaaagcagattaactgtaccatagggcctacaaagtgcaagcatgtccatgttaaacaaaatagaatagcaatctcaggttagctgatattgtaataata

SEQ ID NO: 169053 - DNA, 298 bp, Zea Mays
gggaagaggtggggaaattctattcgaagctcttcttctctctcccaagtagcctcatcttcaccgtggtgactccattgcactttgcatatttttatcactttattccttgtaacccgagtcaaggtgtcaatgatcttgataggatactccgtgtatgttagatcaccttgcacactaagctcttccattggcaattgttcctcgagaacacagagacacttcttcagctgagacacatggaacacatcatgtacatcggacagatgatctggtagctcaagtcggtaggccatct

SEQ ID NO: 169054 - DNA, 531 bp, Zea Mays
atggagatgaggagctagcgtttgtggctagtcgattcacgtggtttcacaacaaccgtatgagctggcaacatggcaggtcaaaggatggatgctacaactgtggcaaccctgaccacttcattgccagttgccccaagaagggcaagcaggaggctggcccacgcgaccacctgtctcgttggcacaagggcaagcgggaatacaccttcgacaagtacaagtccaaatgaggattcaacaaggaggcgctctagaagaagtaccttcaaaaggcaaagatcaaggagtgtgccttccctccctccctccgcgatcttgaccacgacttagatgacactgcatcttcctcgagcgacgatgagactaggaggcgggtcgaggacaagctaaacgggttgtgcttcttcgccgacaccacaagaggtctttgcaccatggctcttggtgattatacgaagggcggcgacggataggacatcgacggataggacatcgacgacgactctgcttctgaggtgtcacattccg

SEQ ID NO: 169055 - DNA, 586 bp, Zea Mays
ggacaaacagagcgggtgaatcaatgcctcgaaacttatcttcgttgtttcgtacaatctgctccgaagaaatgggcgagttggctaccattggcggagttttggtacaacacttgttcccattcagctctgggcacttctccatttgaagtattgtatggtcactctcctctccattttgggctcactgacaatggccagtgcactgttcctgaccttcacgagttgttgaaagaacgtcagttgatgctccaacaggttaaaatgcatctccatcgggcacaacaacgtatgaagagacaggctgacaagggaagaactgactgtgtcttggaagtgggccaacaagtatttctcaaattacaaccttactgtcaaacttcagtggctgctcgcccttatcccaaactagcatttcggttccatggtccatttgaaattactcgtaagattaaccctgtggcttatgagctggctcttccaccaggctcagaaattcatccggtgttccacgtttcccaattgaagcctaaagtgggatccaatgccccggttagcagcacaattccagatgtgtttactggat

SEQ ID NO: 169056 - DNA, 1118 bp, Zea Mays
gttttgaagaactttaggcttgattcatgctcaaaggagtaagcatctgagcacgatctctgtagcagaattgtagtttgtatatagggctacaagtttgctacaaacatattagcaagttgtcatgcaaaaattcaagaaaaatgcctctgaagattctcggtcagaacaactgacgcagcttctgatggtacagtggcaaaagatctgcggattcagtgaacttgtcgccggcgaaccccgcgcgtggattcacgccaccgcggtgattcatgctcggcgcgactggataacgctgagggagtatgaaatatcccccggtggatgaactccagccaatgttcactccggctgtcgtgtccgcttagccccggtcgctttggatctaccctcgccagagttagacacctcacggccttgtgccacgtgcctcggcactttaaccacaccgcagtgactcatgatagcccatccggtgatcgccggtgagcttgccacggtaattgccaccaatcgcgtacgccagtacccctcctctctggccgccgtgcgtctctttcaaattcaccggccaccgctcaagagccctataaattgagcacaccctcgactccgttaggtattctagcattcaatccacccgctcgtgcctccaattactcaccagagcccgcgaattgctcagttcccccaaatctattttccgccatcgtgatcaagctctcaccgtggtcagtgcaatactggtccggtcttgccctctactctcttgtttcggcactcctacataccactgatgctcctcaacccattcaattaaactagaacacgctagattgttgggaacacccttgttcatccgttgtttacactgcctccgtggacagagtgatttagagctcgaactatgaaattgatcgaggggaaacgtttgttaggtgttgaattagatctcagccaaattagagcactggtcattgagtgtcgtagccgatacgagttcgccggagcttggttcctcgccgtgcgacgtcgtggacctcgggttgtgaagaaaaaagcgcgagggtttatttgcaaacgtcagtgactgaagcaacagtgtcacagactctttc

SEQ ID NO: 169057 - DNA, 374 bp, Zea Mays
aaaaaaaataggcaacagtcatctgagttcaagccaacagtcaataaattagaaactgaaaatgggaataagagaggagatgagaggagagaagcaggggacgaggaacaaaacttgggttgtctgctgtcgcgcgtacaggagagaaaccttcaacaagcagtagctgcccgcgtacaggagagaaacaagattgggaggagagaagcaagttttaccggcgtacaggaaaaaagcaagcaactacaggggtctggcgtacaggagagaagcaagcagctacaggggtcttctctaccgcatgttttctctccttccttccttttttggcgtacaacttctttttctggcgtacagtcctttactctgccgcg

SEQ ID NO: 169058 - DNA, 455 bp, Zea Mays
gtcgctgtcatctccggagtcggaatctctagcgaagacgtccttgaggtccccctcaggtgactgatacccgagttcttgatctcccgcagccacttcatcgttgtcgaccctctccttgccaggccgatgacggggcggggtgccgcccctggatggctgcttgcgccgctcactgacgcgcttgacgagcctaatgatctcgcggcattctgaggcgccgtggtgagcgttgggatgcacgtggcacaagctgttgttgctcccctgtggctggggtcgcttattgcgttcgccccgccccctagccgtggctgcgacagtcggagcggcaacctgcagcctctcatagccgtggttcttcttctttctgtcgtcccgggagatggcatccgaccgggcagctttggtttgtggaaccgagtgccatgcacgaccttcggcagccctggcgc

SEQ ID NO: 169059 - DNA, 469 bp, Zea Mays
agcatacacgtagagttcacaacataattttaagtgttagtgcataatcaatgtaaagatagccaacacataaaagtagttcgtgtataaccatagacatagctcacatatgcataacatagttcaacacatgcataaaaatgacatgacaatatgaaagtccatgtccatgtcaatgagcgagctcccctaagtccatgacatcggttatcttctcctatattccattatatttctatccccctttggcatcaatttccataaaaggatgtcatctattcaccactagccagaggacaaggatacacagagtaaaagcgactgctgaaatcatcgaagatggaggtgaactgatgactgaagacaatttagagttgttgatgcctctaaccaaacacatgaagttatcttgagtagattcaaactgactggacaatgcacccatgttaacataaaggctctgttgcat

SEQ ID NO: 169060 - DNA, 371 bp, Zea Mays
agaggggaggggtcccgagaggcgtaaggacacggtaagcgaaactgaacctgagcgcactcttcctttatttatgcgagtaggcagggggcagtcgcaaacaagcagacaaggaaccacccatgggccaggagatgcctcgagtatcgagcaaggggaccatgtgttttgcaggaccactctgcctgaggtagagcaccaggaagatacgttgcgacagatatagttgtcatgggacaaaggttaaccaagcccccacgctacccgagcgcgacgcgacagacgaaccgtttttagtcccatcaggacacccatgccaaagcaacattatgatggccgcccattactggtgcaccacaactataactcca

SEQ ID NO: 169061 - DNA, 659 bp, Zea Mays
aatttatctctgtactcgctgacagacatgttgtcttgcttcaatgacagaaactccttcttgatcttcatcaatccaactggaatgtggtagtttctgaactatgtactgaattccacccaagtaatagtgtcggcagcatcatgggcagcaacataagaatcccaccagtcagcagcaggacctgtcagacgaccagaagcataaagaaccttctcccggtctgaacattgggcaatgttgagcatcttctcaattggcttcaaccaatcatctgcatcaagtggatctggcgagctggcaaaggtcgacggcttgtgacttataaaatcccggtgcttatcacgaggtggaactggtggtggtggaggcagtggtgcttgttgctgttgctgttgcagctgctgttgcgcccttctctcctgacgtatctcttctcgctcctggcgcaactcctggcgtatctcttctcgttcctggcgcatctcctggcgttcttgctgcatctgagcatgcatatctaccatagtgtctgacatttgttgcatcatcctcatctgagctgcaaccagtgggtcaactccgcctggtggaggattaggaggattcatctctgctggttgtggttggggttgtctaaatatcctctgagtgtgtcg

SEQ ID NO: 169062 - DNA, 557 bp, Zea Mays
ttgattctgtaattatacatgcatcatgctaagcactatactaataacatttttccccttaaaaagatgccgccacgcacaaggctaacggcacgcaagtctacgggaccaattggggtgcctcggcatcaattggctcccctgcatgaaagcagcagcagtggaagtaaagaccccatcggagaccttgaagcccgagtgagtcgacttcaagcagcgctgcaacacaggaccgatgcttgggtcgccgacggagatagaatcaatgaactgagaagggacatccgacatctgcaggatcagctcactgatcgagacctagcacttgactgggccgtacagtctcgtttgctaatgtgtgctaaggaagcaagggctcaggcccgaattaaagaacttaacacaactgtcgacaacctgcaggtttactgcaatacgttgcatgaggaagtccatatactatactcacaattacaccctagtgagcctgcacaccctgctgaggcggaagccggaccatctcacgttgcgggacacgcgctaggtggggagttaga

SEQ ID NO: 169063 - DNA, 1460 bp, Zea Mays
gtgagcatgttgcaccatcttaagccactgccgacttaagttgattgctctgtaagtagggtatagtggtcaccctaagtcaagtaagcatgcagatcgataataaatagtttgagtgcctttgagaatgaagtctttttattgatgatgtattttccgattacagaatacaatgctgccccgatagcttttgaaatctagctaggggtaaaacttcctgagatgctctatattccatgaattctctatttcggtgccatccatttgagtaagtcgatatgatcctggccgagtgacttctgctaccacgaatggtccttcccatagtggcgacaatttatgccgtccttcccccgttagaattcggcgaaggaccaagtctcccactgcgaaggatcgatgtcgtatggccttatcatgatagagccttagagtttgttggtacctagctgactgaattactgtattcaatcattcttcttccaatatatcaatatcctccagtctagtagcttcagctatgttttcgaagatcagccttggtgccccaaacatgagatcggcaggtagcactgcctccgaaccatagaccatgaagaagggagtgcttccatgcaaagctcggctaggttgagttcttaggctccaaaccacatacggcaactctctgatccactttcctgcgaacttttcattcttgtcgaagacttttttcctgagtgcttccaatatcattcctttggccctttccacctgaccattggctctcgggtgtgctactgacgcatatttgatctggatgcttctttgttcgcagaaatcgaagaattctgagctagtgaaattggatctcaggtcagttataatgctattcgatattctgaacctgaatattatatcttatatgaactccactgccttagctgaagtcagggaagcgatgggtttgtactctatccatttagtgaatttgtcgatggcaaccggcacatgagtgtatcctccctgagctttcttgaagggtccgatcatgtctagtccccagcacgcaaatgaccatgttacgggtatggtctgcagttgttgtgctggtaaatgctgctgctttgataagtattggcaaacttcacacctctggactagctcggctgcatcactctttgctgttggccagtagaaaccagacctgaagaccttcccaactagagtcctggatgctgcgtgtatcccgcattgcccggcgtggatctcatctagtagttgcttcccagtagccgaaaggatgcacttcatgaggactcctgttgtgccccttctatacagtgtttccccaatgagagtgtagtgagctgactaccttgcgatgcgttctgtcgcggttttgtcatctgactcttcttcattctttatatatttgatgattggctccctccagtcatctaaatctgactctggctggc

SEQ ID NO: 169064 - DNA, 512 bp, Zea Mays
cgaagacctgcctttataaagcttctataaacgacaacttcatcttcttcgggtgcgggggtggtgctgtctcccccaaccctcacaatagacgtgtcatgaaagtatcttcccttcatggcatcaatctgactctgtttaatggatgactttccaaagatggtatgacttggccgccagggccggtcttcggcatcttcatccccactttccacatcaaagtcatcactatcatcagaatcttcagataaatcagctagtatttcatttgtaatcttctctgtgtttgttttttccatggcctcgtaaaagccagccaaggcaggatcagcaaccttcttttcgtcagccatttggtgggaaattgaacgaaatgccgaagctcacaaaacaagtgaaatctgacagcaagaaaattaaaactcaagaaaacatcacaagcaattgaaatggcacaatagatgttgtcgatgtgggtttctatttatatgcttagtgcattgcaacttggc

SEQ ID NO: 169065 - DNA, 827 bp, Zea Mays
tttgtttgcagcttcggtcagcagttgagtcacgacttcgtccataatgctttcggccatgttaataatttctactgattgctttgcctccggctcgatcaatgactcgaagggctctgagggaggagatagttcggctgcggtagaaaacgtaaataagttcgaagtcacaaaaataaaaaataaagttaaaagctattaagcaatacctatccaactttcgagttccgcggctttttcagctgccttcgttgcttctcttgcatcgtgagtatctttttcgctatttttttattattttgtgggccatccctcggccgccattttcccatatgtcagtaaagaattttccaccaactaagctcgcttcggccgaggggtcctttgtgtcagcaatagataaagtagcttctgcttgggccaaagccttcacatgatcgcaaccttacttctccaaaatagccgcaattcccctcgcacctgagaaggcacagacgtccccacggtcatttaaaatctcctcaaaggcttcggcctcgctgctgatccactcaattggcccttgggatcgccccgtacgaagttgtcttcacttgaatatgcgccaacattggcgaagctagtttttatcttttccacacattctacagatttttcataacatctttcttttgaagagcgaagttctacaactgttttttcccaataatttttccattaatcactggcgtctcggtcagcttcggcaatagcacatttcaattttgcttcagccagctgtttccgaaggtcctcaatttcgcatttctgggcttcagcttgggctt

SEQ ID NO: 169066 - DNA, 879 bp, Zea Mays
ctggttgattactgctttcttcggggactctttaacaaaaagtacccgcgaaggggcacgggtgattcctggtcgtccaattagaaacgggtggcccagattagaaggttataactctgaaccggtattcaacaatagccgctagatcccatatctacggcttggatccaaaataaccgagatcgaatcgtatccataggattgcagatctacggtccacgcataagggtacccctgatctaatcatggccgttcgtaacacatctgacggtgcacgaacctgctcctaccctcagaccgtgcacggcggcgcggccaacccgcggaggcgccatggccggcggactcccaatccggtgccaggaatgccctaactcaccacaatccggtgcaaaacaaagaggggacggtagagggattaatagtggtgatcataccgagaatcaggtcaccaagagctacgacaacggtgcacggcggagaatcaacaccggtgagaatttagccgttccattcgaacgccccgccgcctgtggtccgcccggttaggcccctgatgcccacaagtccgtactccgaccccgccttccgccaatggcacgcgacactggtgaatctgccggtcaacgacgacggactccacttcgagtttgcggcagcgatggtggcaatacgacacaacagacgtgggtgcgagtgggcgaggagaggggaaacggtcgtgggagctacgagtttatagtgccagggggaagaaatcgattccggggcaccagcaaccaccccccggaatccctggcggagatccgagcttatcggagtcgtgcgctcacgggaaggagacgagcctgacgcctggggcccacgcgccagtgaaga

SEQ ID NO: 169067 - DNA, 573 bp, Zea Mays
caaatacttggacacgtgcaagaagtcttcagagttctgaatttacagtttgtgttgtctgctgctgctgcagacgtacagcagaagggagaagagtggcagtctagcaggattacagatgggggggcacaaaaatgaggataaatctggcgctgcagctgtggcacccatcacaggatggcaaacacaaggacccgaatattcacacagacacagagacagacacgcgctgggcccagcgaaaaccctcggcgtcttccttttttttgtgggtctccctaacatggacagctcaagacgatacagtttgaagctcccgacgaaaaaggacagaacaaatccaaaagatgccgcctagattcatgggaaatttccggtgttgggccttgcgactcagcggattcctggtaatcctgctttgctttgccttgccttgccttgtcgcccgaccctgatcttaataaccgcgaaaaagtgggctgacgcatgtggcaaagcgaggacggaggagacgtttcgagtcgcttggctttccatggaagttcattcgtgctgataaaccctggagctttc

SEQ ID NO: 169068 - DNA, 950 bp, Zea Mays
caaaacgtgaaaggttgtgttccgggaaagacgatacaggttgtgttgcgatgatgggtcctttgtcatagagcatgtcgcgaagtgtcaaaggaccgcggggtggaggcacagggcagctccgagtccacagcacgcgagtgcctaccggctcaccgccaccaccacctggcgcgactgctcctagcagcaacagcagtcggaacaacgacaaccaccgccgcagcagcggtagcagcagctagagcagcggcggtgcccacagcaggtgtagccgtcgccacagcagtcacggccggagccataaccttgcctgcccgaggccctagccttagccagcagatgacccacaacagtcgtagcccaagctacagtcacccgacttccatgggagttggactgtccacactccgacttgcttccggagccacaaaccctcttcctccttggctctagttgccgagggttcgattgcagaggcaaaaggacgcggcccaggagagcgtccaagaggtcttcgagatcattgttgctcgtttctgacgcgatcctgaagagtcggacttgcaaggaggcaagggacacgctgagccttcacagtaggagcagtagttttgtttttggtgaatgataatgtatttatgaccaagtcataaatggtattgagacttagttgtctatcatgtctctggttttggcgtacgcagcaacataattttcgccacttgacatagaggaaggactttctcatttccttcaaccgcccctagtattctggccccctaggaggtagtctcaaatgtttgaggctagttaccaccaaaccagggtttagtcatgcatatgactcaaggttgatgtttagtagcgcacccatggaattcacactctgttctctccgatccattaagacatgcaactaggcttgatgaacagagcttgggaagcca

SEQ ID NO: 169069 - DNA, 453 bp, Zea Mays
ttttcccgtggtttttttctcctctacattggggggggggctttttccacgttaaacaatgtgcctcctttttccccacctacgatcctaacaattggtatctagagcaagggtttaacacattatttcccgcagtcaccgcctgttcttcattgtgtgtggaagttgctgccgccggttattcgtcttgtaagatcaatcttcacatcaatttctagatctcgtctccagtctgctgtgtggcacgctcatccagggttgtctccactcttcagcggtatcacgtcctactcggtctacgggtatcttgagtcgctaagggctattgcagccccctacaatctgtcgtgataggtcctatcatagcccctgtgatttgaggattgcgtgagcaatgttttgctatttggcagacatagatgaaggttgttcttactcatttatgtgtacaaa

SEQ ID NO: 169070 - DNA, 460 bp, Zea Mays
gccacatttccccttgtgttccatcttgcgccaacccatctgggcaagggcacgcagcgataaattcactggtcggctcggttgagggaccccccgggtccgaaacgccgacaacctgtgaccgccagaccggtgcgtcttctccccaactctctctcctgctcctcctctcacgtcgtttgctgcccacctccctctggatccgtcacctcccgtcccatttagcgaccgctgtccatggcccttttccatctctgtcatcaccataggcagatccgcctcctctgcggtcgaccggcgacaggagtgaggtgtggcggctttaggcgatgaaggccactgtaaggaggccctcatgcgagacctagctagactcggagttcagccacatccacgtagaccaacacagcatagaccaacatgattattttgtgcgtactttattctcactcacgtgcac

SEQ ID NO: 169071 - DNA, 756 bp, Zea Mays
gcacaatatctgttcattgagtcggttgagcagtcccagtctttgtttacttggctgataaccactagtgaatcgctgtataccattaatcttttgatgtcgagtgagatggcgatgctcagcacatgaactagggcctcatactttgcagcattgttggacgccagaaacaggagctaaagcgcatacttgagttggtcacctccaggggcaatgagaagaatccctgctcctgctccctgcaatcttagcgagccgtcaaagtacatttcttagactttagtagcttctaggtttttcgggacctggtgctcagtccattttgatacgaaatcgaccagtgcttgagtctttattgcattacgaggctgaaattctatatcatgagctctgagttcacatgcccatttggctgttcttccaacaacttccttattgtggagtatatctcctattgggaatctagtgactactatgactttttggtcgtcaaagtagtgtcggagcttacgagcagttagaagtactgcatataatagcttctgaacttgaggataccttatcttcgagggaccgaggacttcgctgataaagtaaaccggatgttgtactggatatgcacacccttcttctacccgctcgactaccaacgtagttcttactacatgagtcgtgcaagagatatatagctgttgggggtcttctccgctgaaggtcctcaagacataaacaccttcggcaaaacgccacaaggtg

SEQ ID NO: 169072 - DNA, 521 bp, Zea Mays
gggatggccatgaacttggtcagcctcggtctctggatgatggtgttgtagacgtagttgaactaggccacatcgaagcgaaggtactcggtgtggtagttgtccggtatgccaaatgtcatgggtagagaagcatgacccaaggggtactccccttggttgggatgatgctgaagattggagtgccgactcgtggagctcgaagagggagatctcgagcgcctcaagggtcagagggaatgtatggtcgatgttgcttccctcgtccatcaagaccttcttgacccatctatctctaatcaccggtttaacaagcagagggtacttgcctggatgatcaaagctaagtcactggtcatctcgactgaaggtgatcggtgactccgaccacctatacggcgtcggtggatcatttaccactacaaggatctatcgatcagtgagcttttgctgcctcttattctcttgggagctatggccccatagaggatgttgactctctatcgacgtggggaaactcc

SEQ ID NO: 169073 - DNA, 335 bp, Zea Mays
ttggcatgctcgttgcagagagtggagtgcccaccagaggccgtggttgtcgcagaaagagtagctattgtaggtcatgcccgtcatggagggagaagccaccaccggagaggaggtgtggctatcgtatgacgcgctcgtcgtgatgaggaacaaggacctttgaaaactgtggtcgacagtgtggctgcatggggatggtgattgagtaggagaggttggagatgcgtgttggagcggttgtgatattttttagtaggggaggtcggcgcaggcatcaaagggatcgaaaaggcgaagggtgtgggatggggcaaaaactccaacaacaaagg

SEQ ID NO: 169074 - DNA, 508 bp, Zea Mays
gtagggtgggtatcggtgctggctaggaatacatggaacccagcagaatggcatgcgtagctgccatcaaccaagacagttcgtggaccactatgaccacagattccaacataggggttagcgtagggggtggtggaagatgatggggaaacggtggtggtcggccttgagatggtggaaactgatgatggcagtgggtgggtgggtgaagaatggaggatcgctggacatagctgatactaggttaataggattcctactcctacctgggatctccctcaatctatactggtgcactcgtggtggttggccatgaactgggcgagaggaacgacgaacgtcgtgttcccggcatggagaacaaggcgactagggttccgacctccacagggaagccagctaaggtaatacttctttcttattccttcctcacgtcttcttcctgaataaaaggaagcttatttctaaataaaaggaaactactttcaaaacgaaatagatcctaaat

SEQ ID NO: 169075 - DNA, 397 bp, Zea Mays
aaagaaacggagggagtacaaaccaaagaggcgcacatgtcggcggctgatgcacggataggtggcctgcgtctcctggccggttttgtcgttgttgttaaggcatagcagcgatattgatgtagcctccctcccttttctatagcacgtttttgattcggctgctgcggccacgcgcgtacgtatgatacgtgggttcctccccgtccgcgggcgcgccatggattctttccggcctctccgatcttgcagttgccgtcgtcgtcgtcggtcgggccgccgcacccgccggccgctcgctcgatcaccgtgcgtccacatctcagggtgccacgtttcgccctctcgcattcaaaatgacaacgcaagatgtgatatacgagcgccccgatcgaac

SEQ ID NO: 169076 - DNA, 396 bp, Zea Mays
gttcatctttctaaccaccatgacaatcccactattagcatcctccagagctccaccaaagtttcaattcatatgtcacaaataaaaagctctatactgatttccagaattctatatagagagatggaggggaaaaagagaggagatgaactaattgtaaggttgtatcgctaaaactcccgatgcccgatggacgccatggccttatccaccttcctgacgcaaccaacaaggcgacactgcatctcaatctggaacctgaattgcttgggcacctcacgcgaatagaagaaccaaatcattatgttacttctgttcagaaaaggacaaacagaggaataagaaggtgaagtccctcactgtcctcatggcagtctttctaaagcccgcagcagc

SEQ ID NO: 169077 - DNA, 596 bp, Zea Mays
ttactctgtctaccgtgcggttctttaattattctgtgttcttcgtgcatctcctcttcttcttcctttgtttgggcggactcatgtacaaggagaggtcaaatcttgatgagggcacagactccgacagacgatgtgttcagtgagtgaagctgctgaatgagagagaaagtcgacagagatattgttctgtgcagaccctagccaagaaactgccatccctagagagagagaggagagggggagctactagtactagattagcatagctagagcggctagagagagagagatcatctacttctgctgctcctactagctagatagtgagggagattggatgtgtgggtgcgtgtgtgtgcaagaaaaggtgccatcatcattgcacaataatgcaacgtgtgtctggtcctgcaagccgcgcccaacctccaaagctagctagcagtgaagtgagcgcaacatgggcacgcacggacgacgagatcatcagagtcagagaagagccggcccaccccattgcgatttcctttggacagttctggccggccgggtgctccgttttgtgtgcgatttccctttctccccccgcccca

SEQ ID NO: 169078 - DNA, 794 bp, Zea Mays
atttgtcttatggtaaagacttcgcacccttagggtgatgttgcgcacttattgtgcatgtctggctgcacccttaggcagcttttgcttggatttgtcgcacgcgagggtagtctaggctacctcttgcggtgactgttttgtatgtcgaatgtcgaaggtcgtcgatgcggccattttcgacactcatgaccatgatgcttgctgaattttttgcgagggctttttggcggtatattacatggctccgcctcgttaaaaacctcaccccccgggaggaaaagagtgcgggcctaaatgacattgtttgaagaattacaaaggcgcttgggccttggatcttaaataaagaatttacagaggttatctatgttccatgaatgctctaagactttgtcggatgatgttgttagcctgtaagtgtttggggatgcctttgtcttgactatgtatggcccttcccacttcggctctagcttgccctgggactttgttctggcggtcctcacgagtactaggtccccttcgttgaattctcttgggatgatattgttgtcacgccatgctttagtctagacttgatacttgtttagggcctgcaaggtgaggacacggtctccgtcaatgagatgtttggaggttggttcgttggcgttggggatggctgttaggtttgttcgagggatccatgctttaactcttgcggtgtcattgcttcggatccatacatcaggcggaaaggtgtgaacccggttgctcggcattctgtcatgttcagtgcccatatgactttg

SEQ ID NO: 169079 - DNA, 996 bp, Zea Mays
caaaaatcatagtgggaacagtggagtgcgacatattaaatgctgcagaaggttcccaggcagaggtggcaaagcagaatggtcaggtggctgtcataaagaattacataaagaacggtgaagaagtggcggccaagccaaacatagtacatggacacgtagctgctgctgggataaacagattacaggtgatcaggccacaaagtggtggtggacaagggatgagcagcaagcgcatgaggcttgacgtaggggctgcacgagaaatgaataattttgctagctgggatggtgaacgcagggctgaaatgattgcaaatcaacgcatagttggtcccggtgttgtgatggatggccactataggggggagcatcacacattggccgaacaatcaggttgcaataataaacaaagagcaataccagcaagaatgccgtttagagaacatgttgatacaggtggaaaaaatatgttgattgatgtcacccagaatgtaggtcctactggtcgagcttcagctggcagtgtattggacgtggggggcaagaaaaatcatggttcagttgcgcccggtacaaaaccagcaccgagatggtgtccacctgggttaagtcgtacgcaaaagcgtcgtgtccagcggttgaggactatggaaatgacagaaaagatggaagaggaggaacgtgacagatggtttaacgaggataggccaatggttatccctaagaaaacatggagggagaaacgattggccagggaggaaaaagatgatgacaacagcagtggttccgataaagaagaaagcactgaagcacaaggggacatggatataaacatggtgtttgttttacctactgagttcagagcaggagagggagatgtggctgagctaacattgggggctgagcgtgctgtgtttgaaaaaacaagtgagcagggatctcatctaaaaccattatatgttcgtggtcacattgatgggaggccaatggggg

SEQ ID NO: 169080 - DNA, 580 bp, Zea Mays
gtcaacgcaagcaacaatggtgctgctccttgagtgtctcttgctcgccctcgtctctctagcatgctctaccataaacatggcagggacctcacttgcagctcatccagcgtccacctcaaacatctccgaccacttcgcactcgtgtcgttcaaatctcacataatgagtgacccgtcccgagcccttgcgacatggggcaaccagtctgtcccgacgtgccggtggcgtggcgtgtcgtgtggcttaaaaggacaccgccatggccgtgtggtggcattggacctcggcgagctcaaccttgttggcaccatcactcatgcgttgggaaacctcacgtacctgaggctgctcaacctttcgtcgaatcacatccatgggatcctgccaccagagctaggtaatctccatgaccttgaggacctgcaacttagctacaactacatcgaaggggagattccgtcgtcactctccaactgcagccaccttgtcaatattttgatcgatgtcaaccaattgcaaggagggataccagtcgagctcagctcattgcgcaatgtccagtcagtcaaccttgcc

SEQ ID NO: 169081 - DNA, 336 bp, Zea Mays
ctaatcacgtccgcacagttcaaaatcggtggctagcgcgcatcttcctcaccaggacacacacccggcggcgccgtacactcggctcgacagagcgccatcgccggcaactcccaaatcggtgcccgaacgcataatacacgaattaaataggtgctacgcagggagaaggtaagtgcaaacgctagggacgatctcttaccggctaatgatgcgctaaaattcccgtccgcggtgacccgtggatctgcgacggtgatggagctacggcgagtaattgctgctccacccgttgcccatagctctaggaaccgaagctcgcgcatcaggtactcc

SEQ ID NO: 169082 - DNA, 408 bp, Zea Mays
cacgaccggatcaacgaaggcacgcagcttcatataaattacggttacatacatacagcgagggcatcacactttacattggctcaaccttcgggatgatacccatctccctatagttgaacagcattatcctcagctcctcaccctcaaaaagatttcacaactccccctcacctacactcgccccagccggcgaggacaacaattcccgtttgctagccccgtccacacgaagacgaccaccctccacctcacttaccctccgtttcgccaccgcccttcgccgcctacgcccagcactcacaccaggaagaacttcagcacctatcacacgtggagaagcttccgccgcagccacatctagtgccgcaaaataatccaagtcctcatccgaagactcttccgtcc

SEQ ID NO: 169083 - DNA, 588 bp, Zea Mays
aaagcgatgcgatcgagaaggcattgtggcacaagcttgattggctttcaacgatgcgccaatagcttgcggtaagccgcacgtgggtggcttggtgagggaaacattcctcttgctaatcaacttgttgtccgatttttgtgtgttcattcactcatagggatgctggtgggcaggtcccatcttcttcttgaccaaagggaggcatgggcgttccaccagtgatcttcaggtagcgaaaagcgaggccgtcgaagcccgcacttgcgccacgtcgatctagaacgcatgtgaaaccctggtcggagcagcgaagagggatgcggagtcggcgaccctcgcacatattgagagagcgaaagtgaactcccacctccatattctggagcatggtaaagaggtcaccgaggcccgagtcgcagccttggacgaagagctgggtgatcgaaccaaggaggagaaacatctggcctctttgtatggtaatacctcataatagtctcttttgaggctaggcatccgctgtcagcttcctccctcaccgcttatgtcttgtccggatagcaatacaagggaagttcgacgtca

SEQ ID NO: 169084 - DNA, 1066 bp, Zea Mays
ccaaggaaaccgcacctggcggcccatgtttcccccaggccaaccttctttgcctcgcgcggaccgactcctctgggccaaatagtcggcccatttccccgctgactgcactgtccacaccggtggagcgtgctgacgtgtgggcccgtgtgtgggtcaccgccatgtgggggccatttgtcagctctttcttctagaccggtccgttgggatcttccgagtctaccgtagctcgttcccctcccggcgatccaacaaaccgcgcccgaaatccctaccacctcgggctataaaaccttgtgccgcactcctctcgtaccccacgaccgatccatcgcacctagaaaatggaacaccaggggctgccattgctgggagctcactccaagaggcgaagcgagagctgagtgtcgtcgcatgccagttcggcccacaaccacgaaaagcttgcgctatggcgtggagataagccaatggcccctgacgcgtgtgcgcggggtatttctgagcacgggggttcactggaaccgtgggaattgctcgccggagcaattttggcatcccagatccgcccaacgccgtagggagcctgtttctgccgccactgccggtaagaatcctctctggtatactcacgttgatctcaactgtgtgtaggaatggtcgacgatggagtctgggtgccgggccaatggatggtcgtgggcggcaatggccccgccggctatgctagacatgccatcggccgacgttggggggaagaaggaggatgcgggaccattggatcttggacgtacgaccaggattaaagcgagacataccccttcacctaataagatcttagtcgtaggtataggatcagacggccagaggcagatcttggcgccgtgatatcagggtcgtggatcgtgtgatggggttgcccggatcatataccggttcgttttaaaataaatctaatcctagcgctctgttattgatcggatggctgttatcggcgcgtaccccttcgcaggcgtactttttcatatgaacccctcagtttacttaaaaacaaccagcggtc

SEQ ID NO: 169085 - DNA, 642 bp, Zea Mays
tgatgaaatggtgtcatgccttcgtagtcatcatgtcgtctgttggtgacctaactgaaggtcgtagagaagggtcgattacatgtgtgttattattgtcaccttgtggttctgtatgaatttgcaatgtgaagtagtaggctctctatgtgatgctagatgtctaggtagacgttcgtgaattgtggtgctcggaccgtcgagatgaaggttaagtcggtcgacgccgattaagtagttaaaatgattaatagaataatcatggggttaaaactagaaactagtgttctcgcacccggttgggatgttgtagcccaatttcgcatggttatgatcgcgggtaaaaattattagtgctcatgtgaggtctatgttaaaatgcaaattatggtgtgaacaacacttcgatatcgattatcggggagaatgcgttgttaattaaaatatggtacttctagtgctcataatgacacggataaaaaattagtaagtccacttgttagtcctcacttggttattttaactctaacaaatgtcaaagtgttagaataattcaagtctctagaacgcggcaattcttgaattatatagaagctgaaatgtattgattactgttttggactgcacgtactgttttagttg

SEQ ID NO: 169086 - DNA, 388 bp, Zea Mays
tgcgttgtgatgtggccggacggtcctcgccgtggagatcgccgttcaccgtgattgtgccatgccgtaatcaattcaccacgtcgtcgcaaactgcaaggactcagccgtgacctttgtagacagttagccagtgagtgcctcgttagcgacctccggtgactattcccacttctcactgtgcgtgcttccccatccaaattcaacctcctcgtggtcgtattctataaattgatgccctagtctgctccgctagcttgttgtgaagccagagcaccagccctcgcctccgatcgtccaccgtagcgccctaattttgtttccccccaaatccactctccgcgccaccgtgagtcacctcgtcgtggtcagccatctacaggtccgc

SEQ ID NO: 169087 - DNA, 445 bp, Zea Mays
gtcacgattagatgctagggcactggttcgatgggctcaatccggtccgtctgtttccgatcgagcgcgcgggattcacagagggcaacatagaatctggaccactgatcttaaatcgtgcggtcgacatgggatattggtttatttacacctaagatctaatctggatcacacacttatgatccgacggctgtagactcccgataccccttcggcttggctgattggcaaataagcccctgaaaaatttagaaaccaacccgccgtcctcggcgactatagcctgagtcttagaaaacttcggttgaggcccctgacttttctggaaatcgaggcccagtccagagatgattaaaaacagagaaataactatagaatttagtttttaatacaaaaacaatcctagaaacttgtaaaatgcatagaaaattcattttaatccaaa

SEQ ID NO: 169088 - DNA, 571 bp, Zea Mays
taaaacaaatattgttttagaacagagggagtattcgataggtaattgagatattagtttaacaatctaaacgaagttgattgatagtgcgtcgctctttgtatatttatatctagggtaaataggtttaacgggaaaaggtactagcgtatagtagataggtgtccctctgtccttgggtgccgggtctgtctatttactacacctcgttgaatacttaaaaaaaacgtgtcatctagagcgcttgtgcgaaatagaaagtcgaaataaaaagagcataggagcgcgtctattaacaacatccgataatttgacagcaaggaggtctcccctgtacgccaggatctgcaatggagacagtgaaaaatagccggccaagagcataacataagcagtgattatactggtgtaaatggagtgtggtgggctacttactattgggatcgttggtaaccccataaatcaataatgacatgaccaagatcagaagaggcagcagccgccgagtcaggaaaccgtaaccgtatctttgcatgtttccttgtaggcgccgagagctagggatgactat

SEQ ID NO: 169089 - DNA, 1005 bp, Zea Mays
gtggtgctgctgtattctgaattttcagattggaaacagtaactaaaactgaatttcagtgttttgatagcagttttgaagtctatttgtggctattctatagggttttaggctatggtgtttgtagatgaaataaagaccatatgatagtgaataattttcagtaagtgggtataacatgattctacacgaaaagtggagtaaaactggctcaaagttggattgtcaggtgactgaaactgagttatattcagtgtactgaagactgaatttcagtgttgggttatctgtttggagctctgtggtaattaatccatggagtatgagccctactatatgtagcaaagttaaagatcatctgaagtatagcaagtttcatgtagagagttggcttgatatggtgtaggatttagagaaaaaggggtggcaaaaccctctgtcagactcagtgtagtgttgttcaaacttctcaaactgaattttcagtgaatttgctcctttttggtgcttcataaatattgttctgagtatattcagccaaggagtgttatactaaatagggagagctataattggagagtaattttggttaagaaaggtgggcttgttgttgaaaggaattgtgagatactagtgactgaaccgagaagagtgggatggaacagcaggactgatgaagttggattcagtgcctgggttggtaactgaaggagaatctcactgctgtggttgcacttgtgtgtatagttggagatatggatggagtacaatgataaggcctagaggcctcacttccaacagaaattatttactttggatctctttgagcctatccacaaccacaagtggagtccacatttgttttattcgctatccgcagaattagaccgcacaggtttttgtggtctcactccttcaaaaatatcatgttttggactatctatcggcagtaagtccttatctgccctttctcctgtttaagtaactggacaagggatatttgtt

SEQ ID NO: 169090 - DNA, 534 bp, Zea Mays
ggcagatgaaatagatttgctcgaacatatcaagtctatagtatcgaattgcttacacgatgtagatcttggtggccattgctttgcttgacttgtgatgttctgcacacagcacacagacacaggacaggagcttgtcctcgatctgctttgcgctgaggtctgctctgatgtggtggttgattatttgatttatagggggagggcatgggcaggaggcagccggagagaggggggtggtttgacttggaccacaatggtcgatggctgccggaccgtcggcgactgagtgtttgatttggtttgacaagttatttccaacgaaacaaaagctaacaagttaaggcgccagacgctgccatggcgtcatcctgacatcgcgtccagacgctcgtttcatatggtagcaaatgggaatgataagttgaaggcccgtttggtttgtgccttgcctgccaggcaacggatgttacggatctcagccctaggcattcgaaaacgttgcccggtaaccaaacagcccttaaacctgat

SEQ ID NO: 169091 - DNA, 290 bp, Zea Mays
caaccagcgccccatctcctgctcggtcgcctctatgcgcagaagctttcttccccgcgccgtccagctccctggccgagcgctccactgttgaagcccatttgccgacgccattccctccatatctgcttcagtgacgcagcagccctatagctcgatatccccttccattggccatgtgcgggtgctgctcaacctcccccatgtgagcacgcacaagcccctgtgttcccccttccggccgtggagcacctccctgcatcttccccgccatggctcgcaactcggcg

SEQ ID NO: 169092 - DNA, 586 bp, Zea Mays
acacttggtgatctcgttaattccttgtaacttcctttggtaatgaattttacttcaacccttctgttggaaccatacctatcttaccctttattattctctccacttcgccactttgcaagtcttgccctaactctgtccatggactatgcttttcatcattatcatctttacccttgtcacctctatatcttaccttgatgcttatgttatacctgttctttaaaaccttctctcttccatctcaattttatagttgtattttacctattttcccttggttgtatcctcttccttgtcgcttgcgagtttttaaccccatcctttgttgtgctccggttgggtactacatttacctttctcatctctcgatcctaccttggtgattacactatgtctgttctctaaaatctccaatctcctatccaatttgagagcagtgttttacttatcctacccttggcaatatcctcttctttatcgcgtgaaagcctggacgtgaccccattctttgttgtactcataccactggctattcaatgccttcatattttctctcatacccttgtccgttatcgcctttgac

SEQ ID NO: 169093 - DNA, 664 bp, Zea Mays
ctttggtgggtctgactactacatgtcaagaaggcacataagtcaaaacgacgtgaggtactccaggctcaggaagcatccccgaccttccttgactggtccgaccactccattagctatgaccactctaaccacctagagcacatcccctgtcccgggcgatacactcgcgttgtcagtcccattgtcgaattagtgtggatgaaaaaggtgttgatggatggagggagctggctcaatatcctctactttgccacgcttgatgttaagggcctcgatcgaggacgccatcgaccgataggagggccattccatggggtcgtacaaggaaggagggtgaccccgctcgacgaattgatctccttgtcaccttcgggatgccgaccaacttcaggactgaaaccctaacctttgaggtagttgggttctaggggacctaccactccatccttgggcaaccatgtaatgcgaagttcaaggctatccctaactacacctatctaaagctcaaaatgtcgagctccacgagtaccatcaccataggcaccacagtgcgccatgcttatgaatgcaaggtcgagtgctacgacttaaccgagggatatgtcgctaaagatgctctggactatggacaagaaagcacacgatgtgaagaggatgggca

SEQ ID NO: 169094 - DNA, 549 bp, Zea Mays
gactgctttacggtcgcggttgaatgtggcaagctctaagagaagcaccgcgctcggtgtcgtcgttgatcgccaccagggtccggtgatggttatcactgtgaccatcgcgatgctcacggagcctataaatccaccctgctcccacttcgtttgtctcaaatcaaccaagcccagctcttcattcctcagttgtgaatccaaccagccactagccatcacgttctgtcccccatcctctatgatcaacggagttcccctgaaccagtttcttccgccgccgtgaagaactcttccatggctagcactcctcgggttagtgcatacccaattgattcgagttcttgcttgtttttagccccctgttgctctcggagccggccaattggagtttacctgagtctcatcaccggaacacccctctgctctgtagaacgccgccacgacgccctctctgtcgaccctcttttccactcttgcccagcccaaattctagcatgtacgtaaactctggtgaacccgtgaagcttacccaagcttcaatttagt

SEQ ID NO: 169095 - DNA, 385 bp, Zea Mays
tttagaagatattatggaatctagaatttgaagcaccattacccttcgccttgggcccacacgtcagcctcacaaacaccttcttcaacctctgggatgtgcaggcacagggccgatttgccgctgctggagggagagggacgcacgcccatgaggagagataggaaagcaccctgcagagctctggtcagtcactctgctggcgtgaggaggtctggctggagaatgaaatggcttggaggagaagggagagggcaggctgcttgattttaaagaggcatcgctggcaaccattggtggagatgggcggcctgcagagctctggtcagtcagtctgctggcaggtgatggtagagcgactttgggcgcccatttttggcatttt

SEQ ID NO: 169096 - DNA, 674 bp, Zea Mays
ggtgtgcaccggacactgcactgtgcactatccggtgcaccggctgggcctcacgtgattctaccactatgcggccctgtatgatgtgtatcggacagtgactgtgcgctgtccggtgtgcaccggacaacaattgttcactgtctggtgtgccataaccagtttttaaaaacttttcctctcccgagacaaagccctggctcttcatttccagcgccagcccgagcagctctctccctcaaaccgccgccaccttccctcgccggcggccactgctgtcagcccatctccggcgagctgctccagcttctgttcccacgctcctcttccctctagtgagattcaccctctcctccttcctcaatatgtctctagttatccagtgaagcacactcacacccttacaccaaatcttcaattctagtgaatccagcgcatctttgtgaaatccgtgtgtgcttgagtgtccctggtacactagtttgtctcccttgcaggtgtcgtactccccttgggaggttttagaccctaaaacagtcattccactgtttcaccgaaaccccgcgcaccaaatgctagctaaaatgaccaaactagccaaacaagctcaaatcgaccccaattttttccagcacactccagttacaaccagtacctctcatgccaaatttcac

SEQ ID NO: 169097 - DNA, 753 bp, Zea Mays
agcatcaggtcgaggacgagcaatcagagcaaaagtaggaaggggatcagagttagtctcggattcaggatctgtggtagaggctggagctggtgctgactctgccactggctgtgatgcctaagttgctgatgctggagctggaactataacaaccactataggggtagcaactgtggatgctggtggcattggtggctgagtactgatagctccgacgacctaggtcaagaagtccaaggtgacaggttagagtggagagaatgtcggaccaaaagggtggagttggggtcctaactaaatcgctagcaccactgaagtctggagacctagtggtggagtggactacactggaggcataggaaccatcagtgtgccaaagaatgtgagtcatgaagggttggtgctccgccttatctgctagaagctgctgctgaagagtgtcctgatggtcctgaattgtctgaaacatcgatagcatccgctcggacatgtgctattgaatagctgcctgacgagcctgctcagcggccaagtgagcctgctgctaagttaacaactgtagaatggctgccagggctggatcgatggcgtgaggagtagagggaggagcaaaactggaaccactgccatgtgaacgaggtggcataggaggaggtttttggcggtggtggaatcccgaggtcctcatcaacagagtctgaagaagtattagcaaccattccctagtcctcaagctagcggatcaccttg

SEQ ID NO: 169098 - DNA, 422 bp, Zea Mays
tcgggatccagttttcaccagcaagttctggcagcatctcttcaaaatcattggcaccaatctaaaactcagctcgtcctaccacccccaaacagacgggtagaccgagcgtgtcaatcaatgtttgcacttgtcccaaaaagtggaaggattggttatctgcagtagaattttggtacaatacaagcttgcactaggctctcggttgttccccatttcaagcattgtatggtagacaacctaggacccttggtctcaccatccatgacgcagcgccaaccaatttgttagcttggttgtaggaacgttcagtgacacatgagcttcttcgtcatcatcttctgcgcacccaagcccgaatgaaatgacatgctgataagcacaggtcagaacgtacatttcaagagggcaattgggtatat

SEQ ID NO: 169099 - DNA, 750 bp, Zea Mays
ttatcctccctgcgctttctcggtctatggccgctccatttgtccggcatgcctcctcctcccgctccaccacctcctccctccgcatgccacgcctcctccctctgcatgccacgcctccttccctctatcggacgtcacgctaggaacaaggtgaagagcgatattgaggaggccatagggtcaggcatggaggatttcgttctccatatcgggccaaaaggacagaggtgagctcctacgacgttccttgctctcatccatggaggtggtggtcgagctagccgacgcggggtgaggctcctcatttgcatggggcgggcttcctcgttggtgtttgatctatcaaattggtgtctgcttcaaacttatgttgtttacttattctatatttgtatgtagtatcatctctattgtttttagcagtataaattttttatttgtagacacttgatgtcgatgttatctatgacccaaataaattattgaaggaactgttcaacatggcaatgttaatgatccgtatttgtataacacttagttcttacacctaacactagtacatgaatttgtatagtttctagttctacttcatatggcatgtcactgttgtagatgcaagattccccaaccatcctagatatctagctccataagcaagtaaccaaccgtcctagatatctagctacataggcatagaacctaattcttctgaataaaaaataaatcatgttcagtcatctattgaaa

SEQ ID NO: 169100 - DNA, 463 bp, Zea Mays
ccctgccgcacaccacgcctgtggtaaatcttgtctgattgttgaccattgatgatgactctggaggtagaagaaccaagaattgcggcgatccaattacgccacctttgggggaatccccgggcttttagcacatctagaaggtaagcccaatttagggaatcgaaagctttggatacatcaagcttaacaaatagagcaggctggctgtttttatgaagcttcctgatcaccctttgaacatataggaagttatcgtgaattgatgttttctgaatgaaggcgttctgagcagttgatacgatctcgttcattcgcagtgctagcctgtttgccagaatttttgttatgattttcatgaagctattgataagactgataggtctaaatttgtctattgtgtcagagacctctcttttgggtagaagaatgatgtttgcctcattaactaggtgcaagctcc

SEQ ID NO: 169101 - DNA, 517 bp, Zea Mays
gttctacagatcatagacagcggttgtgaagattggtacatagactttccagttgaggggatcataactttgcaggaggcaatgaacgagttggtccgttggcatcgacgcgacatcaagttgggtgatgagccgatcttaagccactatcgtgtcataagtcaccaacgccgaattcaacaccaatgcaacaaaaagatagttcgatcattccataccccatggtgccggaaaatatagcaccgacctccacaaaaacagttgaaacaatcatatcacctcttgcgaaggaactcgacgagggggacatagacaaaattgttccttagaatgtcgacgcaaacatcaaaaaggaagcaaaggttgacaccaatgttgaagggccaactacttcaaagaaaattcatcagcgaatcgccactgacaatgtcaagaaaccatgagaagcagtgacacgctacctgcaaaaattgaagagagttatgacagatcaatcaaaagcagaatcaacatctcg

SEQ ID NO: 169102 - DNA, 679 bp, Zea Mays
cttggattgcgagttgatttggcagaactctagggcttctttagcaaaagtgttgtcgttagtgatgaggcagtgacgtggagctctttgagcgctggattcggcaccattagttaagactagacggtgggaggtgaagcgacatttggtgctctaggccgtcagatcgtgggcaagctatggggatccgttgaggggctgcgacaatcaagaggggagggttgtgacggccccacttcgactctgtgtcggaggatagtcgacgtgcgagcatacttgcgattgggtgaggctcgggccgaaggtatgagcccgtgacaatgacgtgacaccacgaacctagcttgggggttgggaaagttcgatgatggcttggaaaaggcggtgcattagtgtgtaggggcgttggcggcctcgccaactacggcgagcgattgtcgtctgatcagatagagagagagagagagagggcaagacctagtcgggggagttcctcacctaaaggcacaggttagggaggcgagcttgacgatagggaggcgttgatggcgtcgaacggcgatggcgggcaatggtgaactcggtatttaaggaggaggatgggtgagtgtcactaggataaaggaagtgagagggagagcgtggtacatcccacctaacgacaaagctcatgtggggg

SEQ ID NO: 169103 - DNA, 673 bp, Zea Mays
cggaaaccgcggtgtcaatcccgtgttctcaattatccacgctcggattggttaaacggccactacgaggagcttcatgaacacatagatctgctaaaacaaggcttgaatcggacagggacttaccagagagggctggccacggagcgcagggctttacgttcgccggagacagagaaagggggaaatcggtgtcacggcggctctggttgaaattggggttggggattgaggctacagggtcgtaagaagctgtgttttcattgcgtgcaatcaatttgggcgaagatggagagggcagtgcgaatttgactttgactgagcttcactggtggagatgaaagcacctcgccgtggcaccctactcaatttataggcacggcggcccaatagatgacccccggccacagatagtagcgcaagcgcatgcctaccacgtcggaaagagatacagtgagggagatggaggcatgggcgacaccgcggcaaaattcaatggtcacggtggccgccggtgaagactccggctgggctagggcggtggcgccacgtatgggttatccctccccgacgttatccattccctaccgcccacgaacccggacggcggcagcacgaattttggcgcaaagaggtcgccggcggtgagtttgccgcacgggcggtctgatcc

SEQ ID NO: 169104 - DNA, 457 bp, Zea Mays
ttagctcgatctaaagggtcggggagtttgagaagagcttagggatgttagaacgagcaacaaagcaacatgaaccgacctgaaatgggctggccgcgacgagcttggttcacggcggcggagaattgatttgggaagaaacccgaattgcggggctacggtgaacgagtggagatgagagtgggtgctatagctgcgtgaatacttgacggagttgaggacgcgctcaatttatagacggctggccggcgacggatgaggcttggggagctcgggatcgcgctggcgagcgtaccacgcggcggattccggggacagcgcggcggtcgccgtttaaccggagcctgccacctcggtaactcacggacacgtcgccggtaactttttccgtgaccgccgacgaccatactgggccaccgcggcatccttatcgccggcgacgagcgatccagctggc

SEQ ID NO: 169105 - DNA, 990 bp, Zea Mays
ggggcggatgccgaggcatgcttggggccattcgccgagttggagtaggcgggtcctggcggcttcagctggggacagttgttcttgaaatgactgggatctccgcagtgccaacatgcattcgccgggggttggttgcttgcaattgagggggtatggaaaaagctctgactctgctgactaaaccatgacggggtgggtccagctggtctactgaagcttggtcccttgggtggaaattcaaaggatcgagtcttctggtgccggtcttactgctgagctcggaggacttggaatttccttttaagatgccctttttcttcctcctttgccctttcaacttgcatggccttgttggagaggtgagagaaactgaggaagtcttggctagccagaattgtcttgagttctggcctgagtcccttcaggaaacgggccatcttcttgccctcggtactgacgtcttctggcccgtagcgggctaactccgtgaacttgtgcacatattcactgacagatcttccgtcttgagtcagctcccggaattcatcttccttaagctgaacgagcccctgggtacatggtgctcccggaaagccgtttcaaattccgcccaggtagcatctctaatggtgacgttgaaggtatcccaccaggctaaggccatcccggaaagttgatgggcggccagttgaacatactgattttccgggcatccaatggcttccagcttacttttaatggtgcgcagccaatcgtctgcatcgagggggttgctagatccggcaaacgtgggaggcttgagccttaggaaatcccccattctgtcttgcggtcttccaccattcggacgttgattttccagacttcgagtgaggacctcgatgagtcggtttgattggctagaacttgggctagatctaagggtagttgcggaggtgcggggaggtgggtttcactttcctctctatcggcttccctttcagctct

SEQ ID NO: 169106 - DNA, 504 bp, Zea Mays
ctcttcttattagaacctacacaagattgtgcgcacgagagtcacccaggacgacacaacctcctttgccgacacgtagcgctagcagacacgaaaattttatcaaatgaagctatggctgttctcggggcccgagtactctccctcggtcccactatggcaatggcaggaaggccggcgatgaagtcggcgatgaagatggtggctgttgagaagaagcagcacgctagtccccgcccgtgataggagcctgcttcgccgcctaaaggacggtgaggagactgcccgaaatgctcaatcctcttccttatctgatttgtggtagtagctctagggattttggggcgggatcaagaccgtgatttcttttggcaccgcagttttgctagggttttatctccatggatgagcatttgatgggcctgatccctagcccacatcccaacctaatgattggcgtcgccccccgcggaagaaagaggtgggagcggggttgggtgtagg

SEQ ID NO: 169107 - DNA, 646 bp, Zea Mays
agacaaccggatgttcgtgctccaagttggattgaatcccccacggatttggagataaaagaggccagggttctgcttgctgagatttgtttgttgaaggagagaggtctgactgctgaagctatggttgcagactttgttttcaagaatattcagccactggaggacagagcgtacccggcttatttgtatagtggtgtcactgattcaacccgggttaccaacaagaggattcctgctgtggatttggtaagccggctggagatgattcttagaggcaaagtatcaaatattggtgctcctgttgcatattctgcctggaatctgccaccttccaagtcttttttcgattttgtgtccaatcctcctgctagtggtagtggtttggatcttagagtgcgaccctctcccgaagaagttgagtctctgattgcttcacttggtgatcttcccaatgatgagaggcaggttcactttgagatgcctataaacccaagcgatgtagagataagtgctatgctggatatgttggccgaggattcttctgactcggtccctgctgagacaatagctgctgcaactgtcccagagcctggaaaaaccttgaatgctcaaaaatctgatagcattcgcccaaaacgccttc

SEQ ID NO: 169108 - DNA, 580 bp, Zea Mays
agttaggtttagaatttttgaagccaatatcctcagattaggtgtgtttgtgccatggtttagccaccactttgctgcatgaacaagttaataattacataattgtgatagaggcaagaaacaaattgaattctgaaaccatgtattcaaaatagaatcacctgaattaaagttcttgtttctcctttgccttatggcaatttcatgtccaaatgtcccttgttgatcttggtacatgtagagttcttcaattattttgtcttgttttcttcaacaccaatcttctttgtaatgcaattaatcactccagctctaaaggatccatcatgctcaatttcagacttctttggataataaaagtaaggattcaagtagtacccaactaagtgaagcgaagttttgagcttgctatcccaccacttatcaataatatcgcaagcaactttgtagcggctctcatcattgtcaaacctctcagaaatttctttctttgcctcaagcattaatccatgaaagaataccattgctggtacatcactatccagtctcctcaacacatttgccaatggttcaaaaaaat

SEQ ID NO: 169109 - DNA, 604 bp, Zea Mays
caaaaagagcctaagcatgccatagcattatcatgtacacaaagaacatactactaggagcaaaatcacattctagcagttatacaagtgaagctcaatatgacatgcagatataatacaaaagaaagtgaaagcagaaaataagaagaaaagaccaaaaagggagccctctaatcaaaaagggaaacaaaaacctaattcccctcgcaaatgaacaaaagttttttgatcaaggggtttggtcaaaatgtctgcaagctggcgagtggtatcaatacagcgcaattcgatgccgcctttctcataatgatcacgaagaaagtgaaagcgaacatcaatgtgcttggtcctcgaatgtagcacaggattcttggcaacacttatggcactcgtgctatcacaaagcagaggcacatgatgaaaatccaagtcaaagtcccgtaaggtagccatcatccaaagtaactgtgaacaacagctagcggcagcaatatactcggcctctatggtagacagggcaacattagactattttcgagaagaccatgaaacaaacgaagtacccaaaaactgacaagtcctagaagtagacttgcgctccaaa

SEQ ID NO: 169110 - DNA, 287 bp, Zea Mays
gcagtaggtaatcaaagtattagatgcttacagaaacataccagaagagtagcagtagcagtcaccttcagaagtgtagcagtagcagacgatagatgttagacgtcagagatgttcttcagttcttgcttagcagttctacactcgggaaacagttggaggcttggagcagagtagcagacggccagacgccatggtccagacttgagacagatttcctcaagaacttaggataggaaggaggaagggaggagtcagccagccagattgaagaaagcaagtagcag

SEQ ID NO: 169111 - DNA, 1562 bp, Zea Mays
gatatttattcttgattgtcacttgattcaaagcgcgataatccacacatagcctcttgcttttatccttcttctcaacaaacaatactggggaagcccacggagacctgctaggcctaatgaaacccttagccagcagatcatccaattgccgcttcaattcaacctgctcctttggggccattcgatacggggccttatgaataggctacgtacccggaatcagcttgatctcaaaagctgcatcgcgctccggaggaatgtctggaagctctactggaaacacgtcggcaaaatcacacaccacacagatgtcccgcacccgcaaggcagcctcaccctccaccaccatggagaaaaaaatttccgacttccttgaccggcgatccggaagcaattgcgccaacaaggataacgtgaactttggggaacttcccaagaataccacctccctacccgacgttgcctgcaataacactgtcttccaaaaataggatataattgcgcaatactgagataaccaatccatacccaagataacatcgaatgcccctaaggaaatcacaacaagattggccgaaaagacctcatcagcaagaatgacggaacacccctgacaaactaaacagctactaatggagccattagcagaactaaccaaaattgggtgacccaacctctgcaccgaaagaccagcccacgacacaaaattctccgaaacaaacgaatagatagcgccagaatcaaaaagagcatgggccacaaacaaatcaactaaaaccgtacttgtcaccacgtctccttgctctctgccatccgcagcgggtagcacataagctccggaaatacccgcagaagaggaagctcccggagtgaaattaacagaagaaccccactgagccgtcgggtgaggcaaacgcggagctccaaactgagacaacataggagtagtcggtgcaggagtaggcgtagccaaatactgaggaaaaccctgcatcggcacgaactgagaagtcccaggcacataaaactgctgcggaggaagtggaattgaaaattgctgctcagcacttgacatcatgttgacagtgccctgagaagaggaggaagtcactggctcccatctgagcttcccattaggattcctcctacacaccacatccttgtggtcttgactgcagatagaacacctgccactccactggcactctgcacggcgatgcgcatcaccacaacagaaacacaccagccccaacccgggcttaggaacagcccgaaacctctgagtacttcctcccgaagtacccgagtcagaagatttgccacggtagggatggtggcgctgatgctgagacttgcccctcttgtgggctggacctccagtgttgcccctcctcgcgtcctggccacaaggctgatcaacacccgaagacttctgcgactccatggtatactggtgttgcatctccacacccagtgcctgctccactgtagtatggaagtccaccaatggaaaggctcccagggcatgcctgatagaaggttccaggccctgacggaac

SEQ ID NO: 169112 - DNA, 392 bp, Zea Mays
atattcttcttgtgtaggctgcaccatgctagatacagtcactatgattggatgcatgcgcgagcccatgcaggctcgaccaatcctgttctgcgggatacggccgattccccgcgccctgggcatgcaggtgaatgagcgcttttagacttggcctgcatccatgcataccggctcgggcggtgccgtgcaggtaaacaatcaaacacacagctagggtcaacgcatcccacgggcctgaacacagccggccaggaaaccaatcatactaaatgtgtcccaaagattcacctatgttcagcacacttaatactaagaaattcatggcttcatttgagcttttaccttgcattgcatccacacatatatacttacattgcatccacatcttg

SEQ ID NO: 169113 - DNA, 760 bp, Zea Mays
tagcatgtgccaattcaagaaaagggggaacccacgaccacagaatgggctttaggttagacagaggttgagttccatacgaacatccaaccttctgatgatttttttgtgtgtctgcttgatagcttggtaatggacatggatggtgacctcagattacatcctatgatgagaagagcgccctgctggattatgttatctgtgatcctggttcagtaaaaattcatgctgacccagcaagaatcttgggcagtgaatcaacaatggtggggcccgttcaaagatttagtgggtttcaaagcaatgcctaccgatgcttgctgagtaggtgtgcatcaatggtcctttcgcattgacttttcctcatgaagttgcctgacaattatattggacttttgtgggtcagtcagtcatgttcaggatgaatcttgactcctcagatcaacttaaattgaatagtctgattaaccatcgctttgtacaaatccagctaaggttacaatgattgtggccgttattggaaacccgacctaccactgaaatcattctagaccagaatcaaagtacagcaacctcaagtgcactatgataacgttatagccttttgctatcactcagacttgtggctccctcagtttgtctttctgcattctctcttctcttttgcatgctatccaatttcatgaagtacaaagtatttaatgaaagtcacagtgtattgtcttggtaactgcatgtgcactcaattatcagtctagac

SEQ ID NO: 169114 - DNA, 801 bp, Zea Mays
aggaggtttggaattcgaatagaggcacgaaatgacgtggaattgagccaatacttcacgaataggtttatatgggtgaatatgagtgaagtgtgtgtttggtttgaatttaggcgaagaaaatgagatttggtcactcggctcggaaacgatcgctcgaaacggggaattgggtgaaattaaagcctggaatatcggatggacgtgaaatttggcgaatatgttactggagatgtcgtgaaggtgccttaaaaaatttgggttcaattggagcatttttggctggtttgggcatttcaccgaacacgtggagggcagagttttagggtttcggggaaatggctatttgaggtgggaaaaccctcccgaaggagctaggaacctgcaaggatgttcaaggcacacagaggaacacatatgaccacttgatttcactggaattcacaggaattttaaatgagcacaaaggggtggaagagggggcttcactggctagagaaatagagagagagagaagacagagggagaaggagctgctcaccgagcgagggtaggagaggagcactgggtcgaggtcgccggagcacggccggagacggtgaacgccggtgagcagagagcagagggtggtcgctagaaaccgagagcagaggctggccaggggagaaaatgagcctggcctcgggctcagacagagaaggatttttttttaaaaccaagtatgggcgcaccggacagtctacagtgcctgtccggtgcacaccggacagcgcacagtagttgtccggtgaaccaccggac

SEQ ID NO: 169115 - DNA, 292 bp, Zea Mays
ccaggagggctcttttacaaaatcgacttggcgaaggggtatcggtcgcttctggccgttggatcctagttcaagcgctcagattagatctgagccatatgtgaaaggggtacgcaatataaagcctcggatccagatccaacggtccgtgttttatgacagcaggacccgacctgatccacacgatttcgatctaaccgcccaggacttaacccgcccaacccaggtgctcacctaatcctagccgctccaggccataccaacggcgctcgcccatcttcccacactggcc

SEQ ID NO: 169116 - DNA, 797 bp, Zea Mays
tcatgaacggagcgacccttgacaaaggcactttgatttgtagccaccagattttgaaggtgcggtgctaagcgattagccaagactttggataccaacttggcgaagctgtgaataaggctaattggcctgtagtctccggctgtcttggcatcaaccttcttagggataagtgttaggtacgcagaattcatcatccacaatttgcgtgtgttaccttggtgcaggttgataactgccgccatcagatcagccttaattatgtgccaacaagttttataaaatcttcccgtataaccgtctggccccggggctttgtccgagggaaggctagcaatagtggcccggacctcctcctctgtaatgggaaggtccaaggccccaagatcaacattagcactgtggcaagcctccaaatctagagtgaactcacgctgcttcgctacccccaacagattggagaaaaaatcaaacaagacctcctgcttttgctcttgcgaggtgacgatctggtccccatgcactaattcaggtttcgctttttccgatagcaagcctgtacatgaaaaaaggaagtgttggcatctccctctttcagatatttgatccgcgatctaagtctagcaattgtcctttccagagatgcaagccccaggcagtgatgcttaagccttcctttcagccatatctcgtccccacacaacaatctattgtcttgagcaatctcaagtctgtgcaaaatttccctggccaagctaagctgaaatttaacatttccgatccttttatgactccac

SEQ ID NO: 169117 - DNA, 1438 bp, Zea Mays
ttttccaaattagatttattctagtgtttaataaaaaagaccacaacccatgacactatcaaggcatcagaggcgagttagcctacatctgtaatgagggggagtcattcttgaagatgacaaaaaatgactacaacccatggtactagcaatgctttgtaggtgaacatcttacatcctctgtaagggaggagccattcttgaagatgacattggtctgatggttccaaattgttgagacaccaagaaccactcaaatttccttatgcatggccgttgcaatatgtttcttcccatcatgctgatcaattctagaatgatgagggagttgtatcccttgtgcatgtctatacctaatatcaaagtatagaacatttccatgctccttcactccctcgtgtcatagacacagtgaagagtttaatctaaagacaaattggaagatgttacatttgcatggcgtgccacccctgtggttgctacgagtaagagtagcgtgtgtagacatggtgttgagtttgatcccaagacgaattagcgcgcatgatacaatcgataatctccatgcctcccgtgcttatacgagttaaagcattgtgcatctaagcatgattagagtctgattctttgaagaattggagcacatgtcataatcgtcgaataaatctctgagtcaccagtcattcaggtacctttagttcacaattgtacatctcgttgcaacgtacgagcatgtatgtgtgtatataatattgcaatatgtagtgttcccctagtctaccactctcttgtgcttgtgcgagttagagcaacatgagtcctagggcagagtacgatcccaagacgtattcgaacacaagacgaaatcaagttgagcatgtctaggtatggcgctctgttagattaaacagtgaattgaaaagcatgatgttgaggaggtcttcgaccaaaggtccctactaacaaggatcattgtttaagctttttctcatgataaagatctatataaaagtcaaaagataaggaagcttcagacaaagattgaagccgaggcttcggatgtgttgcaaagccaaaggaaggataaacaagttttggtgcctccgatatggtttgccagtgaagggagccgaaggtgatctccaagagaagaaaagtcatacactacacgtcaagggtgtaaaatgacggaattgtatcccctcaatcgtgaagggatgctatgtaatagggagggctgaattgtaatttcatatgtataaaggtgtgccggtctggccctaaaaataaatgaaaaatactactgctacgggtgtcggttattttgtaaccttgtgcctgtagcaccttagtcccgggaaagagttttcgaaggtaattcattatcgaagctcatatgcttggtccttcgcctgtgtgtattgtgatataatacctg

SEQ ID NO: 169118 - DNA, 554 bp, Zea Mays
atgaactgccgactgtttttccgagttaaaggagcttcattttcttcctcttcatcttccacagtgacaacacaagtagcacacccattgggatcagcaacagacggagcacgcacattgggatcagtagcagtttgggtacacccattggggtcggcgtcagtaagtccagtcgcaggcactccttcagtagcaggaactgaggtaccatcgtcctcatcaaaactggatactcgtcggaggcgtcttcttttcttcttttgctcatcagcagaaggctcgggctgactggttcggctagggcgtctcgggcgagtactgacaggtttctggacatccaaagttgcatcaacctctgaaaggggcaccactgccaacgtaccaacaggagcagcgtcggaggaatcctcagctagcagatcaagcatgtcatttatgtccacatcactagggttcaggggcacttcaaaatgaacctgccgttcatcatcaggaatctccccaagcgaagcaaccaaagtactaacttcttcagcagagggtcgcactctaag

SEQ ID NO: 169119 - DNA, 685 bp, Zea Mays
ggcggtggcgggggtgcagtgcagggtcgtacacgtcctatggagatggagatggagacgtcgacgtctgctaaagatgctatagctagctagtacaaactacaacgcacaagacccgtccgtccgtccgtcgctttgttccaagaggggggaggaggagttgggttggcgagccaatggcaagggcggtacgtgcacggcgccacccttgtgtattgtagtagtagtatcgctttggcagcagatgagatcagacggcgaaagtgagcccgctttagcagcgtcgtcaccgcatctttcacatgccgccgcctgtgctgtgctgtgacctgacctgaccgtcgtccagcaatcgagcacctgactgaatcttttcttgctccacttgcccagcggcagagagagtgcgagcagtatatgcaaatcgaatcaggacgaccgaccggtgcgtgcgagacctgcctggcctgctagcttttctctccccggccggctaaagcacgcacgcacgtacgggaaaaagctagcgcgcggcgtggcggcaacctggcgcgaggccagcgagccctttgtcttctcctctcttgtggatgccaggtgccggttggcgtgttctcaggctcttggatccgtcgccatcgccgatcttgagatttgacggccgtttaccccggagtcccgggac

SEQ ID NO: 169120 - DNA, 823 bp, Zea Mays
agaaaagtgactacaaagcaaagcaaagtcccgaagatacaggctgagtcgacacctcaggtttcagagaaaattctggtaaaaatgcttcttcgatttttactacattgctcataaatttcctgtattaatctctttgatatatatttttaggctacacccgatgctaaggtggcggctgaagttgaggaactcccttctatggaagccggagagacgaagatcagagaagctattgccttgatagcacaaaaagttactcctttggagctgctcctagagagcgaagaagaggaagaggaggagcgaatagctccggtaatgagcccgttcttcgatatcgatgaagatgagtctgaggatattgtctgtacaatattagcattaaagggttctacatcgcctgctgcaaatgtgattataccaagtagttcggagtttagctagatggttgtagcggtgacaacttcgatgatcgtaatagctaaagagaaaggctcctccaaacctgctccagcggaggattaagttaaagggcctgctgaggttgaagaggccaagaaagctattgaagatgatataccgcttggggtgagggccttttaaccaagatttaggcgatcgaaggtacatggttcatcatgttgcgaggaaagttatgggtgcaaagcaattgggcgaagctatcggttttgctgagcaactttgataccctttggggtccaccatcttcgagggagggccagacgattacttgtactactgcccgaataacatggaaactaaagtatgctgctacatgacaaataatattggtttccca

SEQ ID NO: 169121 - DNA, 521 bp, Zea Mays
ctactcaaggcgaccaaggaacatgcatcaattggacaagaacgccatgagaacggcctgtccacgttcacggtgggaaccgcggcgttgatcccatgttcccaattacgcaggcccggattgggcaaacggttgctacggtgagctttacgtgcctacatagatgctagaacaatacttgagaggcgcggaactttaccagagtggtctggccacggtggggtgggtttcacggcggcggaaaatgatttggggagaactccgaattcgcggctctcagtgaatgattgaggctgattcgaggtggctggttagcggacgaccttgcggagctagtcacaggctcaatttatagggaggacgggcggtggtgatcaatttggccgagccgtgctggcggccggagctggagaggaacgtgggtgcggtgaattcgtgtccaccgccgtggcaacctccccgtcgacgatgggacgggtatagggagtcatggcgacgcggtggaaaggcttggacacgcg

SEQ ID NO: 169122 - DNA, 498 bp, Zea Mays
gaagccttgacacttttccccggagtagagcttgaagcctttactgtctccagcacttctaatacactggccatcctttttctcttgggagttgccgcaagacctttttgtgccttcggcattgtcacttctgccgaagggcttaaaacttctaatgtttttgttccctcgattcctggttcctcagctttatcagtctttgggtcagctaacatggctgagggtgccttcggcaaggtggccggttcctcagctttctgtgtagaaggaattggttcctttggagtagcaactgaagaagtttcctcgccaaactcagccattgtggccggttcaatatagcacggtcggtgggtaaggaccttcaactttttcctcttcggcgcaggctcgcttggagcagccaaagcagcaacctttctagaagctgcaccctttcttttttgcccccgtggcgggtagcgatagtcggggtacacaaatccaatagtatcaaaa

SEQ ID NO: 169123 - DNA, 2255 bp, Zea Mays
aagacattgtcatctcttctccggaaatgtgtcttggtgttcttcgatgatattcttgtatatagtcatacttgggaagaccacttgctacatatagagttggtgttgcagctattggttcaagattgttggcaagttaagatgtctaagtgctcctttggccgtcaagagatctcttacttgggtcatattattagccaagctggagtggctactgacccatctaaagtagctgctgtgtcttcctggcctgcccctaagacatgcaaagagctgagaggatttttgggtcttgccggctattataggaagtttgtcaaaaattttggtatattggctaaaccactaaccaatctgctcaagaagcacactgtttttgtatggactgaggttcaggattcagccttccaagctattaaacaggctttgtcttctgcgccagttttggccttgcccaactttcataggccgtttgctattgagaccgatgcctcaggaacgggtattggtgctgtgcttcaacaggacgggcatcccttgacatttgtcagcaaggccttgggggtggctcatttgggactttcagcatacgaaaaagaatacttggccattcttctagctgtggatcaatggagatcttatttacagcatgctgaattcttaatactcaccgatcatcgcagtttgtctcacttaaatgagcaacgtcttcacacgtcttggcaacaaaaggtgttcaccaagttacttggcttgcaatatcgaattgtttataagaaaggtgtggacaatgctgctgcggatgcactctctcgtcgcccacaccatgaaaatcttgagtgttgtgctctgtcagtggcttcaccgagctggttacaggatgtagtggctggttacaacaatgattctgaagctctgaagttgttgactgcattatcagtgggttctcagcctccatacagcctgcacaatggtattatccggtataaaaatcgtgtttggttgggcaataattctgagttacacaacaaagtggtcgctgctttgcattctagtgccttggggggtcactccggatttcctgttacatatcgtcgcattaagcagcttttctattggccacatatgaagcagactattaaggaccttgttgatgcttgttcagtttgtcatcaagctaagcccgaccgttctcggtatcctggactcctgcagccccttccggtaccacaacatgcttggcaggcgatttccttagatttcattgaaggattaccacggtccggggtctacaatacaatattggtggttgtggacagattgtccaagtatgctcactttgtggcaatgcatcatccttttacagcactgaaagttgccaagattttcatgacatcggtataccgtctccatggcatgcctgaatccattgtgtctgatagggatcgaatatttaccagtgcgttatggaaggagctgtttcagttgtcaggtacatgcctccatatgagctcttcataccacccccaaacggatggacaaactgagcgggtaaatcagtgtgtggagacatatttgcgctgttttgttcaatcttgtccctccaaatggtcttcatggcttccaatggctgagtattggtataattgctgcttccatacttctctgggtcggtctcctttcgaagtattgtatggccattctcctcggcactttggtctgtcagttgatgattcggtgaaccatgctgatcttaagctctggctgtctcaacgtgagctcatgttacgagctgtgcaacaacatcttcttcgggcacagcaacgaatgaagaatcaggctgataagcgtcggtccgaacgcgagtatcaagtgggcgatatggtgtatttgaagctgcagccttatgttcagacatctgtggctgtgcgtgctaatcacaaacttgtttacaagtactttggtccgttcgaaatcttgcagcgcgtggggaacgttgcttacaagttgaaacttcctgagtcggctgcagttcatcctgtgtttcacgtatctcagctcaagccctctcttcatcccaggcatttggtgagcagctctcttcctgttgttccggatgcaatacgttttccggtacaagtcatccagcgacgtgtgattgctcgtggaggagctcaagtgccgcaggtgctgataaggtggtcaggttgtgatgctgctcttgacacttgggaagatgagttcgacgttcgtcg

SEQ ID NO: 169124 - DNA, 763 bp, Zea Mays
gttggggaggactcggcgagcactatggcgggatcgggatagcatgaaagggggtgaggcaaccggacgacggtgggggagtcctcggcggaccggggaacactctggcgagcaatcgcgagcgactaagtgcaagacatgggaaaataagggcaggttaggacggttaccttgacggaagaataaggggctcatgaacggcatccggggcgcgacaaggacgtgggtcgacggtggcggaactgcggcagtgaaccggtgagcacggaccaggctaactagaggggaagggggcaaaccgaggggcgtcccgggttgcgggtgataaggaggagcttaccgaggcaacggacatggcaagggctcaacggcgaccgtagaacgggcacgagaccatagcgagcggcaacgaaactccctaggtgcgcgtgcagagcgagagagagggcgggagtgcttggctgagggcgcaactgagcgggggagggtgagtgaatgaggaaggggtccagaaaaggctcgggtgcgtgggggcgtggtcggaaatcgcgcggtcgtgggcgcgcccacggcggagagcacgggcggttcggaggggaagggtctgacagacgggccccacgggtcaaagagggagcgagcgagcgaacgggtttctgtgctgcgagcgagacccatagatcagcgagagaggacaaacgcgtgcggatgggtttggtactgacaagtcgaccccactaggcagcgagagggagagagagaa

SEQ ID NO: 169125 - DNA, 663 bp, Zea Mays
gaggggtgtcccgagttgctgacggcgaggcggaactcaccggggcaacggaggcgacgtggactcaacggcgatcacagaacggcggcggtctttggtgagcggcggcggggcttggctggtcacgtgcgcagggcgagagagggggcaagagagttcagctgagggcgcaaatgagcagggggaagtgggcgagcgagacacgaggtctaaaggggcaagggcgtgaggaagtggccgaagaacgtgcagtcatgggcgcgtccacggtgggggaacgtgggcgagaggttagggatgtggagggggctgacgggtggggtccgcgagacagagagaaatagtgcgcgcgtgcggaaaagaaacggcgccgacaggtgtcccatagagcagcgagagggagagagagagggaaagggcgcacgggttcgcgccgataggtgggacccgcctgtcaggcaccgggggcacgcgggcgcgcgcgcgcgtggagctgggcctaatgggccgacttgggcttaatttgccttttctattttccagggaatttctaattgcttttctatttattttctctagggtttcaattcaaattcaaatcaagtttcaaattcaaaccaaatcaaacatgtgcaacaattcaaagaatatttggagctcaac

SEQ ID NO: 169126 - DNA, 927 bp, Zea Mays
gtaataaacaacattattacaaaattttaggaactggaatatactaatttggagctagaatggattttctatgattaaatcaagtttctagcaattatttatacataaaaatcaatttctacatttaattattgaatttcctgggtctctggatttcgcatcaattactgcaaagcgcaggggctacggcgctattaaatctaagactcagggaactgtgcactggacggcgggttgattcactaaaagcctgagggttctttaacaaaagtgacccacgaagggggtatggcgcattctcgaccgcccgatccactgtgaacgatcacgattagatcgaactattttaaaccctctctcaccagacaccatcggattcctaacatacggcccagatttaatcctgaagacactacagcttgactatctctcatccacacatctgagaaccaacggaccgggatcatcttcaacctaagacttctccccatccattccgcccaggttagacgtcgcgctctccctggaactctctctttctccgatggttcaccagcgtgcactcagcccggacccgaacacgatgccgccgaacagatgcaccaaacaataccgtagtcgtccatctctaggtcaaggaacgtgctggcgccacctaccttgcgctagtgactaacggcggcgcaacacacacccgcggcggcagaccccgccggagcgcaccaaagcctcgccaggcgccccaaacctcaccggatcaactttatgcgcagaagagcatcaaacgagcatagcggggttgcttcttaccggaaatcgacgcacagagctccacggcgatgctccgatcgacgaattccacgcaaccctgccccgaggatcgctgggagaggacacagacacatccttgtgcacccgcgaatgtcc

SEQ ID NO: 169127 - DNA, 497 bp, Zea Mays
gcggtacttaccatgtgtactttgtggtggggcggtggaagttgttcgaatggtcgaccgtggtcgaataagttcttgaagtccctacaattatgcagggtatggcgcatgtccttgtggtatgggcactgggcgtcgtggatctcatccaacgttcatatgttgcatcgtggcacgccgcggggccgactcaccggggcctagcgcatgcactttgtctcttggcctcttgtcctagcgcttgtccagctgctggtttccctccttcttcggcgcctagggtgcaggcttcgcgtggtcgatgaggtcctgggaccgttcatcggtggcgattagatgtttgcctctcagaacggttgttctgaggtggctagaggtttctggacgaaagtcgagtcgttagacccacggtagaagtcctcgatcatggtggcctccgtgacatcggtgatgcgattcctcatagtttgaaaacgctttaggaacgagcgaaggga

SEQ ID NO: 169128 - DNA, 393 bp, Zea Mays
gttggtatgccggggcagagtcttcgttccagataattcaagtgtgtggggtcagttgctgatagctgctcatgcagcaggtcatgagggagtagagaagaccttgcatagatggaggagctcattccacaatacccatattaggagacgggtacaggaatttgttcggggctgtgcagtctaccagagaaataagtccaaacatcttcaccctgctgggctattacaaccactgccagttccctctgaagtatggagtgatatctccatggacttcgtggaagggtttccaaaagtgggggataaatcaattatcctcatagtggttgatcgtttctccaaatttgctcacttcattcccctaggtcaccttattcagcagcttcagtagtg

SEQ ID NO: 169129 - DNA, 1396 bp, Zea Mays
tcggtggggaggggatggtaacaagccatcagaaggcttagtgaccgcagacttgaactcttccaaaggtggaatcatttccaccacagattgcagtaaaaggtcttcctggacaacctgagcctgagataatattcttctggaataaactttaaacacgggtggctttgatctccatctatcagccctggaagactgacaagacccaagccttcgcaccctagcagagacaatagaagaagaaccatcagccaccaattgggagaacccggaaccatggtgcccagcagtgacaacctcctccacaatagcagaagaaccatcagccactaaataggagaacccgacaccatgctgcccagcagtgacaacctcctccaagttggtcataaggaccacctccaaaggatcgtccgagcaaggcttaaccggcgagataacatcctgcgacaaacaatccacctgacaactaacccccaaatcctctgctagatccaacgccaaaactggagggtgaccaggcgcctccagctctgcaaccgaaacttcctggagagccagggcatcaactgatcccaaatccatagccataatcatctccaaatctggagggtccagctcctcaaccgaaacaaccgggagagccggggcatcaactgatcccacctccaccaaatcctgatcaacagcctgaacagacatgaggctgtaatccaccttaccagaacgactgcgctgacccagtcgcaaataaattggaacttgaacagaagtcgcagggcacccccactgctccacatgatgctcatgatcactatcttcgtcgataaagcctgaagggggtggcgaaggaggatccacactgaaagctaaaattccatcagaatgaataaccaccacagaaacagggaacgccaacgtgcaaggagcccagctcccatcctctccaaagacaatcggctctttagcaaggagatccaccaccaccggcagcagctcaggtgaccggcaccagactttcagtatgagaacagacatgtcttcctcctcgactgagccaggaaataatccatgaatcaaacagaaagcaccaagcacagcctcaacagcctcaatcccctagagatgtgcaggaattccacgtagctcaacgctaacgggcacgtggctgaccacttccaaaagtgaaagcctgacgagaccaccttcgaatatgcaacctgagcggagggacatgaagagattgccccccaaccacccgatcagccacgtcaaatgaggggaagaagacgaggaaagaattaggcgcatcacgacgtatgcggagcgaccctgcttcaaggcaaaactcgaggcgatcgcatcacgcacctccacggcgcagccagaatcctcc

SEQ ID NO: 169130 - DNA, 482 bp, Zea Mays
agctccgcaaggtcatcagctacccagccaccaagaattgctagcaatcgatcaccagtgtgcccggattccttgtttcccccaaatcctttctccgccaccgtgaagatccgttcaccgcgaccagccctttaccggtcagttcatccctcactctcacttgttcgagcactcttgacgctctgtgatgcttgacgaacccccaattcgtacggagtagctttagatcaccgggaacacgtaccaattgtcttcatcgtccgcggtttacgtgaacagagctcgagagcttaccaaatatgaaattgattggggggaaatggtccttagaactcgaatttggtttaatccaaagctgggcactagtacttgtcccaatcggccggtccaggacctcgccggagcctctccgcgcgcgtcgccgtcgtggaccgcccactgcgaagaaataaaacctcaagggcctctgtgcaaagcgtcag

SEQ ID NO: 169131 - DNA, 932 bp, Zea Mays
atactgcaataggtgatttggactatttgatactgtttacagggagaagtttgaaataagggatgggatataagatttgctagtagtagaagagtctaaaatcagtgctgcaaaaagggagagggagcgcccaaatttcatggagccgacagaaataccttcttctcgagcgcgcgaaggtcgcttcttgaagcgcgcgaaggtcggatttcctcttttcctcttttcagactactaaacacgaatttgatagaaaaaaaattaacaacaggaaacgagagagtagcaacaatactgatgtttttaatgtctcggttgtgtgagtctgaggaggacgcgtgcaaggacacgcggaggcaggtcgttgtcgtgccgtgcgtgggattccctactagagtactagtagctatgacgagagatcgccatcgtgggcatcgagtatcgatgtttttaatataaagtttatcttcaatctaatcttatacatatgaagaagtcataatttcttttttatcaaaaaaatcagccactgtccactaaagtcatgacaaccaaaatatattgataaaaactggatatgttgtgggtaccattagggatgaaaatgatttcggtttctcgccgacagcaagagccagagtacgaaccaaatgaatctgtctgcgtgcacgatgaaccagatgaatccgcgggtataggccactggatggtgtagatgcttagcggagcgtgtgtgggtggcgtgtgggtggcgtagagatgaatccacgggtacacataggccccaaatcttacaagtgacaggaaaaaaaagcctagcgcgcgggaaggccggatttcgcatggcttacgaggtaggggagtaataagcgtcgaggacatcacggcgcagtcgcatggagctgcccagtctacaggccggatttcacatg

SEQ ID NO: 169132 - DNA, 1941 bp, Zea Mays
tgaagaaccaaacagtaatttggttggttattgcctaaatttggtaggatagacacccggagtcaaactcggggctcaccaatttgtcaatacctccctgagaaattggtttcagcatgtttcctggccagacagggtttagtacacctcaaccttcaattaaaaaaatggcatgggaagtatctcctctcccagtgatcaagttaaaaaaacttacagccatgacatgccccatgtgcaaccaaaacatcaaacaatgttttttttgaactttaaatacagcaggggagatccccacggtaaggattttattaacaaatgaaaagaacaccactgcacaaagagggagaggggaaaataggagccagggagctacaagtctacaactaagagaactgcacaagctgtacaagcagaaacaagaccaacaaagttaagctaggacagtaagaagggagaagaaactaggttttttagaggagccggtcagacaatgttgttgaccaaatttctaagacgtgctgcagatttcgacttacattaactccagagaagtgatatttccgacctccttaggtatggtcccgccaatcgaattccacataaaatcccttcaaaagaaataaatactcagcatctttgtgcatgtacgattaaataagtgggcagttcaaatgacaagctaaacttagctcagcaatcaatcaattgccagctgaaattaaatccactcacataattttcatttgagaaagctgaccaagctcaggagccaaaattccagatagattcaaacttaggagctgtctgcaatcaaatttgtgttatacacgtaaatgctttaatagctatggaattaactggcgggtggggtggggtgggcttttttgcggttgtaaattattctcttctttattgaaatgacatgttgctctcctatgcttttgagaggaaactggtggatggaagatgtggtcaagtgaaacaagtgcacagaatcacagtaattacatctgattgtaaaaatagctaacttcagtcataacagaatagtattaacacattatgttccaaacaaaatattgtctattttccaacaatgcaaatcaggaagagtataatgaatgctccaacatatttctgctttggagagagaatgtgtgatagcagttaataggtaatcaatttttatcttcccaaaaatgttggaaaaaagatccaggtgcaaacttttggcctactaaggcagtaaacaaatttataacaaaactaagttcaggtttagtcactcatcaccaaaagtaactcataaccaaatgttaaggtgtagtgtggaatataacaagcacttgattgacaaagagatcgcttatgctcatacaattcttttacatggaagtatccatcactgcctgttgcattgtaacagataacatgggaccaatttcccatgcatggatctcctcggttccagctgctaagatttccgtgtggatctatcaagctgcccctaatagccttgagggcatcaactgcagagcagatgaattagtttgagaataatgttgcaaagaaaaaattgaaggcatgaaaaacaattgtgataatataagtagtactgctgaattgtatacacctctccaccaaagtaaggggctaagggccatgtttacaaggtaaaagtgaaatgggcacaaatgacgattatgcagagatcaagtcgagtaatgggtatgcatgcaaagtgcagtgaataagaaggattttaccttcccatggtgcagtgatctgtgcagcggtcggttgcaaaagggtaaaaaataacgtgaggataatggagcacaggcagagcacttgtggctgtaacatattttgccccatttgtccagaatatatagatttcacacttgcaggatccctctgatagcagaatccattccc

SEQ ID NO: 169133 - DNA, 573 bp, Zea Mays
tagacatgtgattggcgtacaagttgttgttcatatggtgaaggtcccggtatgaagggctgaggtatcacccaatgaattgacgatggacttgtcgaagcaatggagcccgaaggttgtggctttgactgctgatgatggacatgcattagaatgtcgggagagtagtatgaagatgtgtgaaaaacttgcttggactgattttgccatgcttcagccatttccatttgcttttgtataattactttggaaatcttcatggtgtggccttattctctccacagaagatgcataacaacttccttggttgagagttgtatcttccttcgaagattcgacatcctctttgtcttctcgaagctagtgggtggaagttgttctgagaagtttgctgctgggtccctgtctagtaaggttgattttgttgtccatgcaactggctatttgtcttcaccctggcttggattatgaatgcttatgatatgttgcgggtgaaacgttcccccaaaggccctaatcatctccgcatatctttggactcttcccttctttgatgaaaatcattgtctaccc

SEQ ID NO: 169134 - DNA, 697 bp, Zea Mays
ttacttcatgatttattatctgtcttcgtatatccttgtctgactatagaaataattgtagattgttaattatcttcgtaccgacgtaaataaaattttgccgggtttatggtcttgcctaacggatactattactacaagatataattattcaaaatgcagggagctgctcagctgcctatctagaagcaatgacacacataacttgttttacgtttcgaccaaagttaacaaaatctagatccctgcctttatttgtaaaaacagaattatgtctgcgaatttaaacagaataaggaacacagcaaacagaatgttacacttactgctgcttctagctcttgccgcgcacgtgtaattcaagagtttacacaaatgaaaactccatatccaattactctaccactaaggtgtcttggatcaactgaacgaaaacaaccaccaaagtttcaccgtttgcacttaattttcttgcattgtcttccttgcgcgaggtttctttttgggcaaatttcagtcgagcggagcggagtgttccttgttatttcggcaggatgtaaaacttctgtgctttgtgtttctgtttgatttgatgtaaaccagtttagccttgctcaaaactgacactgtcttttgttcgttgccatacagggccaaaaagtaaaacagcagttattgccggtaagcactacgccgc

SEQ ID NO: 169135 - DNA, 567 bp, Zea Mays
agcaaagcagaagcagccaaggaaatttacctcgtgtgccatcttctcagagtcgagttgtgcattcagaaaggagtttagggagcgagcaccgtccaggaaagcagaagtttcaattaagtcggcctggctctgagaatacttctcttcaatatcagagcaccgccgagccaaatctgataaagcaggagaagaagagcgcaagacttagaataagctgagtaaagaaagcaaataaggaaactgtgggttcactaaccaatatttgacgccttcaggtcatctatttgtttttggagcagtagagggttccactgcatcagagacgaaactagatcggggacgggagcaccgtaggatctcagttgggcagatacaccaccaagaacatcctatgatcacgaaaagataagcaaaaaaggtagtttgccagtaagaacagtaaaaagcaaaagttgactcacctgaagattggagaggaacagaggaagaccgaaagcaggaagagttgatatattacttgatgaagggagatcggcagcaacgatatcaaaggcgcgactcgaa

SEQ ID NO: 169136 - DNA, 452 bp, Zea Mays
gctgaggcttgtccttgcttcattggagctagtgtagtgaaggtagccctgttgagacagtagttggcgtagtgtcccggttgtccacacttgaagcatgccatgttggtggatgtgttaggagcaatggatcctgctggggtgcttgcctgcgagggagctgtttgtgtctattgagtttgctgcctggaaccggcacgagctggtgtacttggagtggtagtatagcgaggacgggaactacttctagcctgtccttggttagcagcccttcttttctctccaaactcacacctcttgttttccatagcaatagctttgtcaagtagtctttggaaggatggaaatgtgtgtgataccagttgatattgtaggggtctaatcaaatcgtccagaaagagctcatgtttcttctcatcatcctcaacatccctaggagcatatcgagatag

SEQ ID NO: 169137 - DNA, 563 bp, Zea Mays
cctgtagtgcattggcatagacagtgagcacttgaaaaggtgcaggttcatactgtcataaaagagatacatttgcttgaacataatttgttattgatatataatctatatagtgcatgagaattatttcaattagtgtcaattgctaatgatagtagttgttgaatatgtctagttgctcctaatcctgaatatgtccaattgcaaacaaataagatgccttaccagccctaatgtagctcctaaacctgaataggacaaaaactacatcatagaaatgcatattaaaagaaataaaaacaatggttcttgtcatcgttaattgttacgtacattagtttttttacttattcaattgttaaaacgtattcaggagaagccttattactgccatcgacagcatgagtgtgaaccaacacgcaagggatcgaacgagacaaactagatgcagtgaaaagcaaaagatagattagtactggatacctacgcgtcgattagcctgaacccatccttccacccatcagtaatcatcagcaatagaaattgagatacatataagatct

SEQ ID NO: 169138 - DNA, 629 bp, Zea Mays
tgcagctcctataattatgcttgctattactaatacctttccttgctattttgcaacaagtccacaacagttgctcgtgtgtatttcctctgtctcgggtaagcagcatagcagtagagtaggtgttcactagcagtacaaagtcctccaaggtttggttagtgtctattttgatcatattgtaatgtttgtgaggcgtgtgaattttttttgttacattagcaacacaagtatgtgatgttgaacaaaaaaacttagacgaatagattgtggggcttctaggtagggatgtggttagtgaattcgattagcagcacttgtgttagttaggctaatatcacagattttttagtagtatgttaattgtgtgatacatccagctatttgaatatgatttgacatatattgtagtcacccctgtaaatcgttttctttattcttccaaagaatcaaagccaaaatctgtgttatgcgttcatcttgttctttagattttcttgcttgtagccataagtcatgcttcatttttcgaatgtacctaggccgctcatttttggtagttcatattgacgccaactaaaattagtgtttaagtagttccattcatgtttcttgtccttgctggttca

SEQ ID NO: 169139 - DNA, 786 bp, Zea Mays
cggggagacagccagatgtacgcactccgagttgggttgagtctcccactgccttggaggtaacagaagctagggttctgcttgatgaaatctgtctgctgaaggagagaggtctgactgtcgaggctgtggttgctgactttgtttttaagaacattcagcctttgaaggacagggcatacccagcttacttgtacagtggcattactgactcgactcgggttaccaacaggaaaattcctactgaggatctggtgagccgactagacatgatcttgaggggcaaagtatcaaatgttggtgctcctgttgtctactctgcttggaatctgccacctcctaggtcatttttcaattttgtgtccaaccctcctgctggtgatagtggtctgggtcttagagtgcgaccctctcctgaagatattgaggctctggttgctcctctttgcgatcttcccaatgatgagaggcaagttcattttgagatgccggcgagtccagatgatgcagaaatagatgttgtactcaatatgttggctggagaatcttctgacttggccatgctgaaccaatggctgttaccgttgtacaagagcttaacaaaacagtggacacccgaaagcctgagggtattcgcccaaagcgtcctcgccaagttagccgcccaactgcgcctgttgaggagaagaagaagaaaaaaaggcggcttcggcgactgtcatgcttggaccaggatgctggcccttctgctcctgtttgtgaagaagtaccagcggaggtccttac

SEQ ID NO: 169140 - DNA, 368 bp, Zea Mays
ctcgcctcgcagatcgtgtggagtggtggcgacctgaagaagctagaggttggagagcaggagagattgtgtggggtaagttctcgcggtggtggttgttaagttcatggctgtgcgatgatcatgtcgccttgtgcttcccttcccgttggaggttgcggaagcaattgtccccatttccagcaacctggagagctgtcagatcctaaacatggggagaaagacagcccatcgagcagaactacacaaatttctgctcatagtccctgtcagctgtatgattccactgttcctgtgctcaatcttcaggtaatgcgtacatgcaaatgcaagtagttagtagcattcattcaactggaatcccacgt

SEQ ID NO: 169141 - DNA, 561 bp, Zea Mays
cggagttgtagcaagttcgtatagcgacgatggacaattggaggactattatggtattgttcaagacataaccgagtatacatttggaggtcacaaacctttgagacttatgacgtttgattgtatatattttgatccacatgttagcactcgagttgaggaattcgggatggtggaggtaaagcacgcatcaaggtacaaagacaatgagtacaacaatatcatcctggcacatcaagcgcatcaggtgtactatttgagttatcctcataaaagttttaaaacctgatgggttgcatataaagttaatctagaggttcacccttaccgatatcaaaactacaatttaagcaccaacgatgatgatgatgatgttgtcttccaagaagtcggtgatcaagctagcagacgatagcggcaatgatagtattgtatctgaaggggcaggactaaatgagttagcttctcttaccatagagttaatggaggaaccaatttaatcaaattcaaaacgtcaaaggtttgaagaaacagttcttgaaacacaacaatgggttgaac

SEQ ID NO: 169142 - DNA, 420 bp, Zea Mays
gaaccgtagtggcaaaatggcttccactgccgatggaccctaagtagtctctacacggaaaattattcttttccataacgtgcattcacaaaaagcttcttctttggaatttagttctccacctttcacctaactattttctttcggaaagatcacaaattaaacaaacaaatacgtagttgcctgattcaaaagaaatcacagaaaacggaaaatcatttgcttttattccaaacaacctaccaatattttagttctacaaatttgagtattgacgacaggtagtcccttcactatttttgtgattatgattccttatttcaattacaaaatcattataggcataatgacttctaaatcctcagttccaaccgaagcttgttttggaatttcatattcatatttcctgaggtggtcaag

SEQ ID NO: 169143 - DNA, 647 bp, Zea Mays
agaacgaccaccgccgtgggtggttgcgctccgtcggtgtggttggtggattgatccgaagcggtcgtgtggtgttgccatcaatcaggggtatcgcatgccccatctatggtaggggatttgaccatatcggtgcgaaattcctcgacgtcgtccaagctccgccgtgggggcggactgcgctgcggccgtcttcctcgtcgtgatcattctcggtgagacaccccctcctccgtgttcgcctagccatcaatttcgttttccgcacgttattgctcgaactcggtcaccggggtgggagaattcggtggagcaccggtggggactccgtcgtgggcattgccgcgccccggctcaactctattaggggggagaagattggtgcatgccgtaggattgggtgtttgatcggacagttcagagcgaatcgcgtctcataaaatcgggaccgttgatctcggatccaaccaccgtgattgcgtacctgtaagttttagtacagatatgatctgggcgctcgggttataatcggacggctctgggtccccgataccctttcggtctgaccgatttacatatgggccctcggagaaaatggaattcaacccaccgtccacactggggactctctgagtcataggaggaat

SEQ ID NO: 169144 - DNA, 1061 bp, Zea Mays
cccagattaaacccactaccctgcgaaccggtactcactcgtggctctcggatccaagacctacggtcacgatctgacgaggtacgttttaaatcaagacagtctgatccagaaacaagcgccaggatctaacctatccaagcgttattcctcatctaatctacgccgctcaatcaggatccgatggctgcgagccctcttccccaaccaagacccgcgcatggcggtgccatccttcacgcacggcggagcccacgctggtgcacaccaatttcgcgccccaacgctccccgcaccaattgccctagcgcaaaataaggtggaggtctgcgcaaatacagagggcaagtactcaccgacgaatagggcacggagtttccaggtgacgacaagctgctggttctggacggagctccgcttcggcgagaaatccgagcaccaccggtgatcctgcgcccgcccgcttgtacagatacgatccgaggacgactgcggaaaccactggactcaggtcgaagctcaggtgatagagcacggctgctcacggtgaaggtgtcttccgcacggtgatgaccgccggtgcacaaattcgcgcgatgtggacaaggatgtatgcgattaagggggaaaattaaccaggcgcaggtcttataaccgcggcgcagctgttgtcccgcctgccgtcaccggactccgcggattcgacggccactggtttgactgcggcggatgcggggatccggtgaagaagatgagcacttgacagagcgggccccgcgtgggagcgacggatggcgcgcgctcggtcgtggtacgtctgacccgtgggacccgcaggtaagcgaccagcgcgaggagggatttgttaggtgggctgcgtgggtggcttcttcaggtgggccaaaataagggactgacacccaggtaagggtttagtttattttttttcttttcttcctcttcccttttcaaatttgattccacttttacaaggtttattttatatattttctcaatagtacctctcttctccctctccacttttgtttagagatttgttt

SEQ ID NO: 169145 - DNA, 827 bp, Zea Mays
ctaggaacgaagaggccgacgcgttggctaaggcaacggccaaaggcgagaccttgccctccgacgtgttctaccacgtcatcggcacaccagctgtccgcaacctagagggcttacaagtaactaatgacgtcgaaggccatcgcatcgtcaacctcatcatgactgaagattggcgggccccaataactttgtatctgcaaggacattaccacccaagtgacgtcaatgaggccaaacgcctcaagcaccgaagccgggacttcgcactagtcgggggccagctgtacaaaaaggggatcagttagcccatggtaaagtgcgtgaccgaaaccgaaggcattcaaatccttcgcgaagtccacaacggaacttgcggctcccactcaggacccaaggccctcgctgccaaggtgatccgtcaaggattttactggcccacgataatctgtactgcgaatcgagtcacgaggtcttgtgaagcatgccggaagttttctccccgctcgagcaacccttcgcagttcaccaagctaatcgcccacacatggccacttcaacgctaggggctgggtattgtcggaccactgcctacggctcaagggaacctcaaattcaccttcgttgccgtcgagtacttcaccaagtggatcgaggctagagcagtatccacaataatgtcgaagaccacccaaaagttcttctggcaaaacattgtctgccgattcgaagtcccatccgaactcacagtcgacaacggcaaacagtttgatagccaggacttcagggatttctgtttctccatcggcaccaagcatgtcttcgcc

SEQ ID NO: 169146 - DNA, 765 bp, Zea Mays
tctctttggctagcactattgtgtttttgtttagaatatcctagtttttcattccctagtttggccgagattcgcaggtgttttgctctcatctgtgtgcttgtaatcttgaactctgtattcgaaggaagggtggcgaaatccatccacggagtagtttggatcgtgtactctattttgtttgtgctacaatttttatcagagtttgtgtccattctagtttcctcccctctcctttggattttggaagaatccttgatttctttagctagggattgccttaggtggagagcctcgtggatgaggagctgccgcttgtgtctagtcggttcacgcggttccacaacaacgcttgagccgatggcatggcgggtccaaggatggatgctacaactacggcgaccctcatcacttcatcgccagttgacccaaaaaggtcaagcaggaggctgacccgcgagaccatcactctagtcagcacaagagcaagcgggagcacacctctggcaagcataagtccaggagaggttctacaaggaggggctcaagaacaagtacctccaaaaggcgaagatcaaggagcatgccttcctcgcctccctaagcgaccccaaccacgacttcaatgagtcgacctcttcttcgagcgacaaggagcccatccttagaaacaagtgtggtgtcataaacctaaccatcccaagaacccacttgacactctgccagatgtctctaatgatccccttcctagggaaccccaaccac

SEQ ID NO: 169147 - DNA, 408 bp, Zea Mays
gttggcttttgctgaaatggagacaaactgcagttgtagtttggtgtgcttgtatgagttagtcttccttggggttctttggtatttttttcaaaataacttccatgaggtcattaggggaatagaatagggtggtactggatttataagtttttaggtattgggatctatatgggtgtaatccaaatcatgctaaaagggaggaaagaccatgtagttctgcgtggcaagtctttagtaaataaacaggtagactctttgctttcatgtgataggtcgggtgcatgatttccccattcgcacggcacaacgttgctctccggcctaccaatgctcctagctcatctttctaccaatgccagatgtggcgtcacagctcatgtgcttccaatgcgtcacggctcacgg

SEQ ID NO: 169148 - DNA, 515 bp, Zea Mays
ttatggagcacataaatacataagtgcaagacccaacttactgtatttcagcagctatcgactaaattgagacgataattcaagcgcttacaccagttgtaaactgagattacaatgcatattaagtagcattaaagtagcgtatgtcaagagttaattagaggggtcgcatgaacatatacagaggtagaaaggcatcagcagttgggttatatgtatacaaaagcattcttgattcaaaagtgacgatgtccttcataggtatgcaaaaacagctacctgtacacaaataaaaagagaagatccgttgcacttaaagtgtgtgtcagttattttattgttgtgtaatgggtacaatggagggcgaaggacaatgtgcaaactatattgtaaataagctctgtgcgattaaggagcatagatggtgtcataccttcatgcaattcatgacgatctaaccgttgttctttttgggatatgcgggtaggagtttgtgaagttggctaggtttgatc

SEQ ID NO: 169149 - DNA, 783 bp, Zea Mays
cacgtcctctactcttccctagatgaagaggatgtccgtgaagaaagagctttatgcgatgcttcgtgctctgaccatctcctttgagggcagaatgctcagagtgattgtcggtcgtgtccccacggctacgctagtgctgggggcacctgcttctctttgctgagtgattcgagtccatgcccgagtgggtgacgaggataaggggtccgccacaacagaggtgcaaccttagtcggccgagccacagatgtcacaacgactctgggcccacccgacatagacataattctgcgcgaggcggaagcctatcgaggttctcgtgccttggagttcatcggcgtatttcttactggcgctaggcgaggcaatcctcctgctgccgttggcaccaccggggaagatatcttcctggatgggtccgcaatgcggtgtaagatgccctcctgatctgcaatgcaggagagggatccaaagcagaagatctctccagcattgaaggtgaccgggatgttgaagacgatagccattgagtcatcttagatcaatgttgcaccccctacctggcgtgccagctgtcggtgtttgtgacccaaccgtgcaccatggggttacccacatgatgcttttgggtaggacggtgtcattgactgcgactcgatggtatgtgaaggggcacatcggacttgcacgagggtttatacaggttcgggccgctttgaatacgtaacaccctacttcctattaaggttgtgtactggaatttctttggagtacgaagat

SEQ ID NO: 169150 - DNA, 323 bp, Zea Mays
ggacgatcaagttggtgtccccactaggagaggaagtggtgaccgagttagtcccgcctgagccacgaaaaggaagttgttatcagatggctgtcgatagcagtgaagcagacccaattgaggctataaggttgtgtccgagttcccagatgtgtttccaaagaacttaccaggtatgccaccagagcggaaagttgaatttgctatagagcttcttcctgacaccgcccccatctttaaaagagcttacagaatatccggaccagagttggttgaacttaagaagcagatcgatgagttgtcagagaaaggttacatctggc

SEQ ID NO: 169151 - DNA, 783 bp, Zea Mays
ctatctgagccttcttgaaaggtccgatatgtccagcccccagcatgcaaatgaccaggttacatgaatggtttgcagctgctgcgcgggcaagtgttgttgctttgacaggaattggcacgcttcacacttttggactaacttggcagcatcactcttcacagttggccagtagaaaccagatcttaaagccttcctgaccagagtccttgatgcagcttgcaacccacactgcccggcatggatttcatctaacaattgtctcccagtggccgagtgaatgcatttcatgaagactcctcctgcacctctcctgtacagtaagccccctatgatgatgtagtgggctgactgccttgcgatgcattctgccacagccttgtcatccgactcttcttcatttttatgtacctgatgataggctctctccagtcgttgggatctgcctctggctgactcaaagcgttgcactcctccacctgatccatgaggatgctcggttgtgatatttcttggacgaagatcccaggcgaagcctaggcccgactagatcctagctttgacaacgcatcagctactgcattgcgatctctttccacgtgatggaacttcaatccctcaaatttgccttccagttttcgcacagctgtgcagtactttccaattgaatcggtcgagcagtcataatccttatttatctagcttatgaccaccaacgagtcaccatataccatgagcttcttgatgccgagtgatactgcaatgcttagcccgtggaccagt

SEQ ID NO: 169152 - DNA, 578 bp, Zea Mays
aaaaaataccaagacacatttccataatagagcaacaagcgtcttgttcatggcactttgaaaagttgtaggcgcccctgtgagacgaaacgacatcacacaaaattcaacctatccatggtgagtttgaaaagccatcttatgttggtcttaaggtgccatgcaaattatggaagcctggacataaatctagagtggagaaccatgtgtccccatggagctcatcaagcaactcatcaataactggaactgggaactgggttttaactgtgagggcattgagatgcttgtaatcaacacaaaaccgatatggtttgtccttcttctttaccagaatgacatgagaggaaaactcacttttactttcctgaacaatgcctgaagacaacatctcttgcacttgtttttcgatttctatcttcaaggttggtgcatatcgaaagggtctcgtgtggaacggctaagctcctggcaacaaatcaatatgatgatcacatcacgtggcggaggcaagccaattggtaaggcaaatacaaattgaaaccttgtgacgagtgattgtaactcaatcgacaatt

SEQ ID NO: 169153 - DNA, 295 bp, Zea Mays
cagatatattaaacaaacttatggtgcacgcttaggactggtcaaaacaaagggaaattttatatgcctagattcttttaggatcaggtggttaataaattaaaaggtgaaagacacatgaagggaacactttgtgggactatagtcgtggccaaccactgaccctcgtgggacgtgatctatcaaggtattgtgatgcacagcagcacatgcccatataacttaatcaggtgggaaaagatatttagctgatttgattagtgtcggccattctggacggttcctacagactcca

SEQ ID NO: 169154 - DNA, 726 bp, Zea Mays
gttcgagctctctggtgttcttgttctcagttttcttacagccggtgaacgccgtcaattcgccggtggttccaacaatctggtatcaaagccaagttggtgtatgagcggatctgtgagtccgccgagagaaccaccaaagaagaagagaggtattccgcatcgtcagcccatgagcgccatgagtgaaccagggaaatcaagcagcagcatcagagaaagttctctaatgtgaccaatgctcactcgcgacaactatgcagagtgggtgatgctcatgcagtgcaattacgaatccctagagatttggggagtgatcgatcctgggatcgcccccaaacgttcgcaagatcgtcaagccatgagtgccctactgcgatctgtgccaaaggaaatgtggcaatcgcttggtgcgcgcaacaccatgaagcaagcctgggatgccgtgaagatgatgtgtccgggtgtcgatcgagtgaaggaggtgaatgcatagaagcttctccaagaattcaagaacataaagttcaaggacgatgagtccgtcgaggatttcgacatgcgcatcagcaaccttgtcggaaatctttgagccctcggcgaagtggtggaagatgtccgcatcgtcaagaaattcttgcgcgtggtcccagcgcgttcactcaggtagtgattaccattgaaatgttttgtaatttgatggaactcaccgttgatgagctggtg

SEQ ID NO: 169155 - DNA, 843 bp, Zea Mays
ggcggcttcgaccgtggctgctgatgacgattcgttcggctctaagtcttagtgttttgagtctgatgattctgggagttcggttgcatggacggaggagtcttcagatgagggcttggattattttgcagcgttggatgtggctgtagcagagccttcgccacgcgcggagggttccgaggagctcccgagcgtgagttctgggtataggcggcgaagggcggtggcgaaacggagagtgagtgaattgtcgcgaagtggtaggcattatcgtagtgagatggagagtggtcgtcttcgcgtggatgggactagtaagcgagaattgttgtcctcaccgattggggtgagtgtaggtgagggggagctgcgaaatattttgatggtgaggaattgaggataatgttgttcaactacacggagatgggtatcatcccgaaggttgagccaatgtaatatatgatgccctcgctgtgtgtatgtaaccgctatttgtatgataaggttgcgcaccttcgttgatccggccgcgctcgtgggcgacttctgtacagagagtcttttggaaaggacttcgattttgcgggcctattattccggctgcacccttagacgacttttgcacgaagagtcttttggaaaggacttcgattttgcgggcctattattccggctgcacccttaggcgacttttgcacggatagtattttgggaaagacttcgatattacgcacttgttgtgctattccggctgcacccttgggcgacttttgcacggagagtcttttggaaaagacttcgattttgcgcacttgttgtgctattccggctgcacccttgggc

SEQ ID NO: 169156 - DNA, 894 bp, Zea Mays
cttctagttaagtaggatttcccccttttctggtaggcaagctggcagataatgcacaccattattgatgttagggtagtaaggtaacttctagttataggatgtggtatatcaaggaagggtgtgttatggccacatcttctaggtagatattctgaagatttttttggggggtctccatgaaatatgtggtggtaatggttcatgaacatgcttcctgctggactgctatacaggctgtgtcatttgctgtctgcccagcataggattcttttgacacgcatctactatcatactattattactgactcgagttcttcagaagatataagaaatgtccttgtcagctggggactgggaacttcagaaggacagaccctgtcccatatctacctctttcgcttagtcatttttttttacttcaatgcagcataattcaatgttcatccctgaaaaatcgcagtctgaaatcaatagctctgttatagcatgtggtaagcaaggatctggcagaagatggggttgtggtcatcgctgctgtcccgtatcgaatacatctgtcaatcggagctatctgcaacgctaagctgaaaactggattttgtctgtatcaatagcttctggattttagaaattacctgcatgattgcgtgaagatcttatcatcatcatcatctgttgtttagattataccatttgtttacattgctcttgatatagaaggaaagcctttactaagcttgttcccataactgtctggtaaaatcaagcgagttgatttttttttcgtagatgggtaagaaagagatgtgtttagttctgaagatgttattgttctgaaaggactacatgtgggaagtagaggttgtaacgatctctaaatttacactatgg

SEQ ID NO: 169157 - DNA, 666 bp, Zea Mays
cccatttctggcccatctagtttcccagaccgcgcagcccaataccatctccacttcgcgccgacaggccggggccacctgtcagccacccagactcctccactcagccacgcgttggacctagtctgtcaccgttcggtgggccccagctgccagtttgtttcgctcgcgctcgcgctctgcagttcactgccgtgtggacccatgcggtcagtcgtcccttcttcaacagaattgcccgtatcgcgcgggtggccggcgctcgacgcgagatcctcggccatgaccgccctggactcggtctccccggttataaaggtggaaacccccctcgcaaccccctcctgtggcgttcaagtccggagaccctaaacttatcgtaaagccgagagagtagagagaagcgcggcgtcgccgggaattcacgctctatgtgtgctgcgctcggagctgatcaatcacttgtaagacctccctcgtttctccgcatgtccttccttgtttcaatttgagcggaattgagttagattggaaagcgggttctggtcgattgctcgtcggtgtggcgcctggccgccgactatgcgtctcagcattaccgcgcgattaccgctgttgagccatccatttggtctggtgcgtttcggatcaactcactgtaggtaa

SEQ ID NO: 169158 - DNA, 396 bp, Zea Mays
gtggtattgctctttctcgatcgccttcgtctgatatgataactcgtggatattgcagaaacacctggcatctggctccaacccttggcttctcatggcccatataaaaacccctaccttgataatagcttcgggagtaagttgatgaagataaatttcaaaagtttttagaacttcgaccaacattttgtccagggggaaccgaagtccggctttcatgaagcttctgaaaattaccacttcgtcagcttcgggaagaggaacattattctctcctccgaccctcacaattgaaatgtcacgaaagtatctgcctctcattgcttcgatctgcccttgtttaatagtcgactttcctaaaacaacatggctcggtctccatggccgatcttcggc

SEQ ID NO: 169159 - DNA, 451 bp, Zea Mays
tctccacaacaaagaagccatcggaagaatagccatgtgggcctgtgaactgggggctcatgacattgagtttcggcctcgcacaacagtaaagactcaagcactagttgacttcgtatcagaatggactgagcattaggtcctgaacaacccagaggctactgaagtttggcgaatgtatttcgatggctcgctgaagctacagggagcaggcacgggggtcctcttcattgccctcggaggtgaacaactcaagtatgcacttcagctattattcctagcatcaaataatgcagcagaatatgaggcattgatccacgggttgaacatcgctgtgtcactgggcgttaagaggttgatggtatatggggattcactagtggtcataagccagataaataaagactaggattgctcgactgattctatgggcaagtattgtgctgccgtc

SEQ ID NO: 169160 - DNA, 1146 bp, Zea Mays
gaaatgataattaagatatttgcacttgaaagcataattgttaccatcctttggctttcctccatgttgtaggtcttgacttttcggcataggattatttctttatttcctacaacatcaacatcttcccaagatgatatgagttttagacataataatttgaaataaccttgggtcaatcttggatatgtagattgatagcttgagttaataagaattgaattgactttctcaagcaccccaagacttcataccatctcctattcctgcaaatcttgtcaagcatgttttggtacccatcgcttgatgggtccatcatggttagtcaacaaaaatctaggaacccaagagtcctttgtgttagcacttggtaaactcattacctttctaacacaagttgcaattttgggttgcctagttacatgagaatcaattgacaagttaggagtggaatagttaccaatgggacaatccttgcattgatgtcctttccttcggcatgtgtagcataggcgttttccaagttttgaagatttcttctttccttgtttgttgcttgctacatggttagtaaaaactttcttttctaaccctatgcctttttgtttcaaatggggacaagatttaataaagtgtcccttctttgagcattcaaaacaaagtctatcatccttgttaataatcaagccatttttaatgtagggacaagacctaatcaagtgtccctcttcaaagcattcactacacctcttatttctcttaatgtgaagtgtggcttgatcattaccttggatgttaccttgtatggaggcatggttgaggcttttggaagaggtattgattttcttcttttgttcgctcctcttggcaatcctcaattccttgacattttcttcaagggatttagtgcatgccactgttgttcccgtctcaagcttcttcaccatgtgatcatggttatcttgggaaggttggccaatgcatttcccttttagttgtgtcaagctcatctttagcctctcattttcttctttgagcttttgatatgtatcatcttttgttcctgcaaattctagctcaaaggaaggtttgcttgtcgacggacaacaagcattagcacatggtaatatagtctcaatttgaata

SEQ ID NO: 169161 - DNA, 520 bp, Zea Mays
catatatacgaaagaatggaaggataacctccaaattagactacaatgtgaaactcaaaaatgggttgaaggtgaagcatctcttcttatgatgacaagtcttcattccaagtcacaaaatgaagtgtgagggttggcactggaactcaagaagttgaatggtaatttaagataggtggagaacagtaaggttgatcttgataacatcataattgtttcaaggccatggttttatgataaaatgcatgcatgcatatgccttgactatgctaatttccaaaacaaaacaataaaccgaatttagcaaataaaagaaactgaagcttgaagatcccctgtatcttgatcatcagttcctcactaaagctttccaatcaacctaacatgtaaggatttatctattacagacccaacttagacaaaggttggttgttaagtcatctgtgcattagttaggaaccattcaaggagaagacgtgaaactaatcaccctaagactttagtgatatttgtgaggtaa

SEQ ID NO: 169162 - DNA, 633 bp, Zea Mays
ctgaaatttaaatcggtagggaagtcatacaagttcatgtttattcccttcttcctttttcttcggcatcccccacccaccagacgttggaaatgttttgttggccagatattcttgcaccaagtccctagtactaatatgctccgctacaactctaaattccacttcggccaactggcagggggacctgagttgcatgttgcacaagggctgtgtcatgccgaagctcagtcttaagggactcatcaccatagtcgtaagcttgtccctcttcttctcgtcagctttcacgtaagaccattcattttttagccagtaggccacttggtgtgataactaattacaggagctttggtatctttctggtacgcaaaattgtaacatctgaagttcttatgtagtccatcagctctagccttcgtctggtagtggagttcgtgcacccggcaaaatccttcagcgttggcactcttcccctggcttcggagagcccatattacactaagtctaactatggcatttggggtgagttgatgaaggtagatctcgaacttctttaaaacctcaccgatcatctcgtatagagggaactgatgtcctactctgaagaagcttttgaaaactacgacttcg

SEQ ID NO: 169163 - DNA, 362 bp, Zea Mays
gttgtgtgatcacaaacaactctgggagtcagggactacgccactaccgagagctccgggagggatattgctggccaacggcggccaggcgatcgcctccatggcatggaagcttgaggggtcatgtccattagggagagcagaggagatccgatgagtccattctctagagtccagactccagactaggatagaacaaggctgaggcatccagtttcatcagttcatcacgtcagttaccaggcgcacgccacatggctgattaccaaggtgggcctttcctatcctcttcacacctttcttgatgcagtgtcaatctttaaataatctcgacatatatcttctcctttcattttctatgc

SEQ ID NO: 169164 - DNA, 921 bp, Zea Mays
caaagcttcaaaaggtgccatctttagactggactgatagctgttattataagaaaactctgccaaggaaagacacttgtcccaatcttttccgtagtgtagtgcacatgcccacaacatgtcttccaaaatttgatttaccctctccgtctggccatctgttggggatggtatgccgagcttcgtattacttgggtcccaagtgattcttgcagctgctcccaaaagcgtgccacaaacagtgctcctctgtcagatataatggtctttggaataccatgcaatcgcactatctggtcaatgtagatttctgcatacttctctatcctgtgggtggtgtgtactggcaagaaatgagcggtcttggtcaacctgtccacaataacccaaatagaatcatggtgcctggaggtattgggcaatcccacgataaagtccatgcaaatgtcctcccatttccaagatggtatgggaaggggttgtaaagggcctgctgccttcaaatgactggccttgattctctggcaggtatcgcactcggatatgtacttggcaatttccctcttcatcctggtccaccaatataaagatcggaggtcatgatacattttgttgctacctgggtgcatggagaatttggaaaggtgagcttcatccaatatcttctttctgagctcagggtccttgggaacaaccaatcgatctccaaaccatagaattcccttgttgtcctgacgaaagcacttgtatttctctgccttctgcttgatcatgtctttgataacctgaacacccttatcttcaatctgtgccctgactatttgctcttgtaatgtgggttccaccgagatatagtttaagtcacctgaagaaacaacttccaggttcaatttgcacaactcatcacacagggtggtaact

SEQ ID NO: 169165 - DNA, 612 bp, Zea Mays
atttttaccatttttctacaattttctaaatttgttttagttctggtagaaaaagaaaaagaaaagttgtgaacagtactgggccgaaagcagcccaagcggcccaattccaggggaaagcgcgcgcccgcgcctgcgctgcatactttgcacaaaggtccctggagttctggttaactcaaagtgggttcttttactgttgccctgagtcactgacggtttctaaaaagacccccaggttctattcccttccaagtcgaggtccccgacggtgcaccgcacagggagccaagctccggcgagctagactggcaggagggagccaagactggtgctcccgagtggcagacaccgaatcggaccctgcccacgcatttcccccaacacaatttcaccaaaggctacttggtttgctctggccgcagtgaccgtagaccatgcggacagttgaacgcgttcccggcgattggtggcggtctagttcaatcggatgggttgacgagcatcacgggtatgtgagatcactcaaacgagagagcagaggggacgagctaacctgtatcgtgctggccacggcgaggtgttcttgcggcgttcttcgatcgatttggg

SEQ ID NO: 169166 - DNA, 622 bp, Zea Mays
atcaacatgaatgctatgaagttttacgggcaaggatttatggacagaaacatggccttgatagggttggtgcaactagacaccaattaacaatttttttgacacaacaagtgcacaaggagacttgggttgatctagcggtcaagctatgggtgtctataagttgtgtaggttcaatttcaagtgtaaaacacacaagggctagaaacatcaaaacaagcatgtgatttgatttttttaaagggtttcactagggaaccactagattatttggggaagggggtcttttcatgagcaagacagacaacatttttttttggttagaggcaaaatggactgaacaactatcgtaccttctagaaagcaaggcaagagaaacacatatcacgacctagggaagacttaccaatccgacataaggtaaagcatttcttatagttcctaacatagcagtacatcacattattcacaagttattgttggaataaaggtgagagaagcatgttgatgcgcaagagacaattataatgcgacaatcatgatgcatgctcattgtagtcgtcttctcagacctaactagtttttcgggtgcttctacagcatccctattaatagtagtagt

SEQ ID NO: 169167 - DNA, 334 bp, Zea Mays
ctgggcctcaatttctgtgaagcacagggggctcggggtaagaatctccagacacagagaatagttcccgaggaccgcgggttggttttccgaaaacagagggactctttaataaatgtacacgatgaaggggtatcggggatctagggccgcacgatccagatctggcggtccggattagatcgccaataaatgaagaggtatgcgattacggccactggatctaagatcaagggtaaggatttaatgaagccgatatccatccgtggccctcggatctagatctacggttcagatcagaagaccacatcaccctactggcatgcgccctgat

SEQ ID NO: 169168 - DNA, 505 bp, Zea Mays
ttcaagttatatgatatttttgccacatctgtaggagacatgtcggatgaagatagagatagagaaagagaaagagatagagtctggttgcacggagagaaggttggcgcatgtttcaaatgcaagtattgtagagaaacaaagagcggaggggatggtacccgattgaaggagcatctcgcgcatagagggaagaatgttaagaaatgtccctctgttcctccagacataaaggcatacttcaaacttgacatagacaagacaaaggaaaagaagagttctaggttcaggcagcagttgagggcagatgaggaagcacaaacccattttggggatgatgagtatgaggatgaacttaaagcagctctgcatctgtcacgtgtggagcacaaatttagtcagagggctggtgcaaggtttgacaggggtggtagatcctccagccagagggtatctcgagggccacttgataggatgatgggaaggagtagggaacaagtacctg

SEQ ID NO: 169169 - DNA, 372 bp, Zea Mays
gtttccactgttttccaatcaccattagccaacctgcgatggtgcatagggattccaagatatctgaaaggcatgcctccacttttactgctaaacaatcttgtgtacctcacttcctcctctttggccttcccatagcagaagacctcactcttgtgaaaatttattttcagacccgacagctgctcaaaggcacataatatgagtttcatattcgttgccttgtccaagttgtgctccataaacaagattgtatcatctgcgtattgtagggtcaaaaatcacaaatataatgtagtcaatataaaaagtcacaaatgacaacaattatcttcgttacctatataatgcagtcaatatttttgtttagtg

SEQ ID NO: 169170 - DNA, 632 bp, Zea Mays
gctcttcagccgcatcatctttggcttcaactggcctgactgttggcaccttcggcactacaatcgattcttcagcgctctgcacggtgggagcggcttgttttgcttcggcagttgaagaggtcctttcaccaaattcaggcactacggtcggttgaatatatcgcatctgatgggtcagaaccttcattttcttgcccttcggcacattagtggtggccgaagcgacagtttttctcttctttcctggccttcgcaatgggtattgataatcagggtatacgaagccaattgcatcaaacaccctgtttaatcttttcttgccccgacccccaaaggctgcggacaaggcatcatcttcggccttcgaatatgtcccaagcagctcgtcgctggtagcttcaatgcatttcaactgtcatcgtttggttcgtcaaacttctctctgaatctgaaggtatatttcaatcgaactaggccaccttcactggattcagcagtagtttccttcggcatttcccagctattcacaagtggccacaccctataggctatgtgctcttggattatatctcttgtgccaatgaaggcacaaacattgctaaaggccttctggcatgcttcgacgtcac

SEQ ID NO: 169171 - DNA, 1004 bp, Zea Mays
gccagaacacagcaaaggagagctccaagggcgccaacacaacatgaggtatacacatggtgctgctcctttgacccacgccagcacttaaacccatccaaggcactgaacttggattatttcataattatagcacacaaatatccaatttgtccaggcataaggacaagagaagtagtagtgtccatgcttgatattttttccagaggtgaggcctctagactttagttatgtgctacatccatatatcaacctttgcagtcgagtaaaacagcccagaacgctgaatttagtctgcctcacaccaccaaaatatcagctttgtctcaactgcagacaagagaaggcagctgagaacctattggtgcataaacactaaagggtccatagtgtgatattttgcaggggtgtggccaatggaatgtttgttgtccagttcattcttatctcaatcctagcacacaagtatttcctttgttcccatactgcagacatcaaacataactaataattactcactgctcactaattcacaacagtccaaactagatatttttagaggagaaaagctcctagcacacgaattatgcacttcctccatatctccatcactctctcaatctctaccaccagatgaaactcagcatggagagaagatattttctgcaccccagtctgttccagattcagttatctgaaccattcacaccactacctctaaatcagtacaaccttgatatttcctgtagggagttgaggtctctaaaacttggttatgtacttcatccatgtcttcatcccaacacacaagcaaagcacagggagagaggtgatcttcttcagtgatcccattaaacactgaaaccaacttcatatgtcctgctgcttcattcctctcctccatattcattccctggcatctcacaattcccctcacaacagacctaccatgcttagtagaaattattctctaaacatagctctaccaacttgggatagcaacc

SEQ ID NO: 169172 - DNA, 1434 bp, Zea Mays
gacagatcttccgtcttgagtcaattctcggaactcatcctccttaagctgtaccagtccttagggcacatggtgctcccagaaagctgcttcaaattccgcctaggtagcatccctgatggtgacgttaaaggtgtcccaccaggctaaggccatcccagaaagttggtgggcagctagttgaacacgctgattttctgggcaaccaatggcttccagtttccttttgatcgtgcgcatccaatcgtctacatcgagggggttgcttgatccggcgaacgtgggaggtttgagtctcaggaagtcccccattctgtcttgtggtcttccaccattcggccgctgattttccatatttcgagtgaggacctcgatgagtcgggtttgattggctagaacttgggctaggtctaagggtagtggtggaggtgcagggaggtgggtttcactttcttctctaatgacttccccttcagctcttcggggaaaacctgctccaatcccagaggcggtaggcgtggttttatccgaagccatctgccaggggagagagtcactattatgcacatgcaaattgttttcaaccaagttattttattcattacaccatcacattacaagcataggactactacaggtgggactacacgagagcgttcttcgaggtactagcgagttccttgtctaaggtgtccccaaatgccttgagaagatcatcgaggctggctagggatacatcttcttcgtcggaccagtcatctattctggggggtggtagggctagaggggccttcttcttcttcttctctgtctggcatccttggttagtggtcttcttctggatcttcttttttggggcgagtgtctttagcttcttgtcaaagtctatcttcaaggtccgatacgcctcacgggtgttggcttcctcgccttctgctatgctgagactctcctggagagatgccttctcttgcttaagctctttgacttgctgctctaggctttccactcgggaatttaggtgggtacagtgggaggagagctcatcgtagtggttgtcgagggtgtggaggtatccggccatgtagacgatagtgggatcatcttctatgggatctcctcctgacagagcctggagtcttttcttccaggtgggggtgtttttgttgctgggtgggaaatatcggagggggtctcaaagatctcgcggctatagttttggcacagttgtttgagggcttttcgagcaacgctctggcaagtgtctgggaaacggtgcccgatgaaggtaatttggaagggagggtggtttgggtagttccggctttctcccaagtagaccgccatagagcacttttctattccattttcacggtactccttccagacatattcgggcttcttgcggatccccaagcgtagcgcgcaactccg

SEQ ID NO: 169173 - DNA, 420 bp, Zea Mays
gtgcaaattgatagtcatctcggtcaatgcagtgtagttatgtagctgtgacgatcaataacaacatatcaccaatgaaagtaacggcaattgttttagaggactactcttctagaactcgcacacgcaagtagtggatgaagtgcttgactaacaacagaacaacaaaagaagccgactgagagaagatgatacgatagagtttatatagtcgggtctagacctgagcagtcgcgggagatcagcggtcgggagaggcgagaggatgcaggaggtcacaagtcaggtaacttctcaagcatcaaacatgtaactcctacaccttatcgcgactgtgaccatgccacgccacgccacacctcgcctcgtcatgctcgccacgtcttgtctcgccatgactcaatagcaacgtgtgagctt

SEQ ID NO: 169174 - DNA, 332 bp, Zea Mays
tgcctttccctttgctcaaagtaaaaatgccaaaccagttctttctttggccctgcctctctcctttgcttcagaattcagattctcgccaatctgtcaccaacagccacaggtgtgatgaactcgagcgtagcaatttgcatacacctgtctgagtggctttcttgcttgaaggatgcacagctttacctttccctggcggctccaccttttcagccttttcatatgaacgtacaccgatcgtttccctgtttccctttatcacgtcagtattacctgaatcaacaccacctcttttttctacttgtgcataccaactttctaacccatca

SEQ ID NO: 169175 - DNA, 357 bp, Zea Mays
acgaaggtgtttgctgacgaagcttgcttctactcagagtatgctattaagcaaagctttgaggatgcaacaggaccttgaagacaaaaaacatgagatcataattgaaggtttagaaagcaaaataaaagatcaagcagctgttcttgaaaagaaagatttcgaacttcagacaatggaaggtttactggcagaagctgaagccaaaattgcaaagttagataaggagcttctctcaaaatcagaaagcttcgaacaagaaaaatagagatttgatacgaagtttgaggctgaggtcgaaaaaagttcaaatttgcaaaaatcattgaaagaacttcaagataaatgtctagagtt

SEQ ID NO: 169176 - DNA, 637 bp, Zea Mays
gtttgactaattttggataaatattcttcaagttatgaatttcctaagttctctgttcattaaaaagaataatcagaaatggttaaatggaaactaactttgcatcggggtccctggcgattgttttaaaattcccttacagactagtcctcgggtcactattcaaatgtgccactgacagttcagaaaaccccctggggttttgctaaacctaacccgaggtccttctcccaaataaacagtacccgcggtagaggaaagggcggaggggcttaccggcggcgagattgctccggtgaggtggtcgagggcgtaggggaggtcgtgacggtcacgccgatgtgtggatcgtctccggggatggtcggagtacgccggtccacgtgcgcgggcggtggagctcgtcggcggcgagggctccggcctatccagggcggtagagttcaattaaactggtcagtgagcttcactaggtgctagggaaggcatgcgcgcgaggaattggagaatggctcaccggatagctcggcctacacgcggtggcgggcggctgaagtccgactacagtgatcttgttgttccggtgaggcagggcttcgatccttgcttggagaagcttcatggctccttggggaag

SEQ ID NO: 169177 - DNA, 661 bp, Zea Mays
gagctatctaaagacaagaacgtgtcatgttatccaaggcagaaaactatcggcctagtcggactaaaggaaagattcgacttgtatgcatgtcttcgaactttgtaaagagaggcaaggtactcctcttgtaacaacaattgcaatagacataacgtagggtgttactatttagtggtctaaatcggtataaattgttgtctttctgttcaccatcgagtttgatctatgctcagtcccatcaattgctactatgggtaacccatagtaagattatcggtcattagacaccgatatctagcacgctgggtagggtatttcggctaataaagggtgatcaaaagctcgatggatctcatcaagttcctggcaggatcaaccttcatgtttgcctcctagatatgtatatggtagacatctctcgaatgcttcatagacaccgttttgagaccatggtggcctaagcttctctaacaactcactgagacacaatagaagacctgttcgggaatttcaatgaatatttgacattgagtccaacacaggcaagaccatgttctatgagtcagcctatgtgccatcatacaactggtccaaacctagtctaattttaagtacaagtccaatttggacacaaccaagtcttctaagttagcttcta

SEQ ID NO: 169178 - DNA, 1108 bp, Zea Mays
gttggtatatagggaacaactttgatgcagtcggattagtagtttcattgcatggaaatcaaagaaaaatgcccccaaagtcggtatgtcaggcaaagcaatggagtcattcagagtgaacagtcaactgaagaagatctttcttatcgctggtgtgtcgtgtgccgtgatccgtgcaatgctaaggacgacatctatgcggtgagcaaaaagatcaacaggagagtgaaaagatccgggggattgaattggggctctcccctgcggtgcccacttgatgacgatgtggccgagcggcggtaattttggtggctgagggcttcctcggttgcgccacaccagggaccaattcaccacatcgtcgtaacggtatagatggcaagttacccctccatgagctattgcgccgctacgcgccacgaagcatagactagtgaaagatctcaccaccgccgtgaacgttctcatccgaaattcacaaagcacgcgagtgatcactataaattgagtgccctccctgctccgcccctattgttacgcaccccgcgcatcactcctcacctcaattcatccaccgtagcccgagaattcggatttttccctcaaattagtcactgccgccgccgcaagacacctcattgtggccagcccttctcaagttagatcatgtccctctgagccatgttttagcatcctctagttctagtgaagctcacgggcttaaccgattgaacgctactgcattagggcatcaagaacatcgcatcaacgccgcaaagcactcccgagagcaccctcacgtcaaccagccctcccgttctccctccgttcaaattcgtgcgcgcactacacctatggtgagccagtgatactcaccctagtttcaatttaaatgctacctcattttgttgctaggaacgtgctcgctggagttcttgctccattgtagtcacgggcagagggaatcacaagctcgattaattcaattgaagcctagaatagagtcgccttggctcaaggatggtgggtaggtgctcgagttcgatgaccgttgatatttgtagagagtcccggcaaggagtggtcggcgggcgagcgcgccgtcgtc

SEQ ID NO: 169179 - DNA, 789 bp, Zea Mays
gcagtgcataaattccgtgagaccgtgggtcaaaaaaacctaaccctaattcccaactcctagtcccaactcgtcctcgtcccgagcggctggcggccgacgaccgtctgcccgtccctggcgtggcgtccagcactcctgcattattgttcctctcccaggtcctagctcaacgcctcagctccacacacctcgtcgaattcccgacgtctaccgctcgtcccccatcggcacccgacggtctggacatccattcccctagtccccaactccccacttgccaaagagcaggccagcagttgtgcaataccctacctgagtgccatcgtgccaccttccagtgaatccgtccatccaaggcttcgagcactcagtggtcggcggtcgtccttgggcctagacatcgagccataaacaacgacgagtggagtacccaggcctcggatcggactacagccaacatcggcgccttgcgtgctatgcctgcgccttcgcccttcgacatgaacaccgacgatgatgagcaggggtggtgggatatcttccgccgcacgcaaacagtctgcttgtgctagtgttcaacgatccgtgaagcaactccaccgttgtcgccatcatcgtctccacacggtacatccactgcctttagatgaatagtagttgcttgggtactagctttttgacttgggatcaaatctagattaccaattgctttagaactgctagagcaacagattagatgaatagcaattgctttacaacaaattatatgaacaacaacaagttagt

SEQ ID NO: 169180 - DNA, 551 bp, Zea Mays
aacgctcgattttattattgctattttgctttagtgacaagcgattcttgtcgtctggtgactgtggatggagcaggatggtccttgtcgtcgcgctctcgctgctggtgctcggcgcgctgcccaacgcgaagcgcaagctggcggagtgcggggtggcgcggcaccggttcctctccatcggcggcgtcctctgcttcgtgcacgcgcccttctgcgccgtctactacgcctccgctagcgccgcggcgcgggaggctcgccgcgacgcgacgcacgtgtagtctgttcggttctattagccacccctccatgagaccatgactgtatcgtgctcttgacgaaggtgctggcacagaagatggcgtcggacgggctgggcatgggatgtaattttgctcgtttctcgaacgatcatgcatggctgtgcatgggatggaatttatctcgtcttgcaggtatgcggtgtgcatgtgtagtatgtataacatctcgccatggcgttcgcgaactggtacgctcgccggtgaaatctttcaggaactcgatag

SEQ ID NO: 169181 - DNA, 482 bp, Zea Mays
ggttggtcagccacacggggtgatgaacctcttcgatgaagccatcatgcaacagcttacggacctcctcacggatgaagtcctgtcgctccacggactgtcttcgtggcttctggcttaccggcttggcgtccgggtagatctttaggtggtgctcaatcacctccctggggatcccaggcatctgcgacggctcccacgcgaacacgtcggcatttgcttggaggaaggcgacgagcgtgagttcctatttttcccccagattccctgtgatgcgggtggtctgggaggggtctgcgccgacctggatggtcttcacgggcttaccgtctgctccggacagctgtactttcggcgccttggagggtgcctggtactgggggctgaggggcctctccctccgtcgtccggtcgagcgatctcggccgccagagtgtgtagcttctcgacggctgctagtgcggcggtgcggtcgccccgca

SEQ ID NO: 169182 - DNA, 424 bp, Zea Mays
tgggcgccgatgtttggcctttagagcttgaaggcaatgggctcttcgattgcatggtggaatggatggagtcgaaggtggtggagggcctgtctaggattattgatggcatgatgagccttgaggcattggcatgcgaaaggtgcacacacttcgaacgactgcgtgtgaggactttgttttcgtccggaaactctacaccaatgcttgttcttcatgttgttgaagctgcgatgagttgttgcaatggatgtgggcgacatttggcctcgaggtagcccacactcggtcttttgcaaagctagacaaggttggttttttgttgtttttaacttgttatccttacgggggctttctatctgacaacacttattcaggaaggtgtcatggagtcagagctagagactgctgacgtggagacaac

SEQ ID NO: 169183 - DNA, 728 bp, Zea Mays
atttagatgactcacccgctagcatactaagaacaacttttatttcagcctcatcagtagtcatttgcatctgaagatgggtctgtctctcctcttcagggagattccggtacgtagcaatgaaggtctcaatatcttctgaagagggtcgcactctatggcttggactgccgtcctggacaggcgggttggatgtgaactctgaaaagggcctcagtggtaacaaaatagcacagtaaggatattacacatgacaaacgtagaaactcataggcaacaacgcttaccgcaggaggaagattccaggcagaatacgaaaggggagcaccagcattcgaaaccttgcctcccagcatcaaatcaactcgacttagcacgtcctccttagatattcgcttgttggtaattcgagtaggtcattaacaccggtgtacaggtaagcagggtagactctatctttcaagggctaaatattcttgaaaacaaagtcgacaacaacagcttcagtagtcaagcctctgtccctcaacgcacatatctctgcaagtagcaccctggacttagcaagctctgaatctgtggggatctctgtccagctaggcgttcagacgtcgggttgctccgtgatcgagcagaaagtgacttgttatgatttttcatagtaaaccactcgaagcgccatcccttaatgatgtctttcaaaggaatgtcgagatactcagctttcc

SEQ ID NO: 169184 - DNA, 527 bp, Zea Mays
actcacaaaatggtctagttgaatccttgatcaaaaggatcaagtggagttctcacccattgttgtagaattgtaggctagcaaccacctattagggccacatagtgttgcatgttgcaacatttatctaactcaagcaattgtgtatcattacaaatctccctcacacctagtgcgtcgaaaagaaccaagtatttttccatctgtgtatgtttagttgtgtggtatacgtgcccatacaaccacctcattgtacatcaatgagtcccgactgaaaagttggggatatatgttggttgtaagactaagtccataatcaaatatcttgagcatatgactggggatcttcatacgacttagcacattgattgcattttttatgaagagcatttattggcattaggatgagatagacatccacaagaacgtgagacaattgagtggaatagaaacgaggcacaatccttagacccgcacactagtgaatttgaactagaagtctagatgattctacatttgcaaaatct

SEQ ID NO: 169185 - DNA, 499 bp, Zea Mays
gttccaacatttcagaaaaggtggcccgcggcctggatggaggaatggttttatgtcaaaaatgatctggttaaaagggaagatataaaggggattatccaacgccccatctggtctcgcttcggccttcgaaggccgaccgtggcgattgataatgatgccgaagcatgccaaaaggctttcagcaatgtttgtgcttttattggcacaagagacctgatccaggagcacatagcctatagggtatggccacttgtggataactgggagatgccgaaggagactgttgccgagtccagtgaaggtggattaattcgtttgaaatataccttaagatacagaaaccggtttgacaaacctaatgacgactggttaaaatgtattgaggctactagcaacgaattacttggggcatataccagagccgaagatgatgctttatcctcagccttcgggggccggggcaagaaaagattgaacagggtttttgaagcaattg

SEQ ID NO: 169186 - DNA, 747 bp, Zea Mays
attgactaagacgtttgtaacaagattaaagttggtttgtaggggagtaactttggtacactcatattccctggttgttgtacaaaaattaaagaaacaacagcccaaagttgctctgtcagaactatgtcgagctgtcgaagtgttactgaaaactgaattcaagagaagaaatggtcacagtgaaatggggccgaattggaagcaccatatctttgattccattcagttttggtccagggattctatagtaagtttgaagactgttgtttagtgaacaatctttattaatggagattaccctgttcttaacaagaatcaagagaaagagagggtgaaaggaggtcggttcagtaaaacactgaagatcagagcactgaaaatatcggaagagtgatgacaaagatccggggcactgtagatttggatgtgctcgagtgatttggggaagggatcgatcgcggggagataacttcgggccgtgtcaagattccgcgaacctagccagagcctgaccggagatatttcaccgtcggtcaccatggcttggccattccgccaccgtgtcactcgtgcctcgctcctccctcactgtgtctcttccttacgtggtaaccatgcactgacaatgcaatccgtggccgcggatcgctagccggaccgtcgtgcctataaatagccccaccacccacagcgaggtactcaccacttcaccagtgagctcggttgaagcaaaaattcacggaa

SEQ ID NO: 169187 - DNA, 891 bp, Zea Mays
ctggtctgcgcgcataaaaacagagaaacctgggggtctctacgcaagaaacaccagacacagtgccaaagcgtgtacggcgggttaaatcttatgaagcacaggggctcttttgtgaaaacacgtggccgaaggagtatcggggttttacgatcgtccggttagaaatccatggtccagatcagatccaagcttaagtgaactggtacgctatgcctaccctccgatcacaatccggcaaccaagatttcatactctaacaggtcagcgactcatccaatcctagccgtccatagttgatcgcacggccaggggtgcaccaaccctagatctaatcaccgccacccaatccggaatggacggcctagagggcgccttcctccctagggccgagccatggcggcgccagagctccccccacggcggagccacgccagcgcaaaccactcttagattttggtgcccgatcgaccacacggcccggcgctaaaccatcctaagggcatagcgaacaatcggcgcgacttcttactgaagatcgaagcatggagattcctggtcacgcgagcgacggtgttgctgtggagatcatgacgcttgtgagcaattggggcggcaccagtggtcgaagacggcgaacacgttggcgaggagacgcagatggggacgacatcggacttgaactcgcccatgacgttctgctgtccgcccgcgcgcgttcttggcgaagccggacatgggggcggatccactctccctctcctcttaattctctctctccggcgagggtctctgctccccgaggtatccgcgatagagggtgaatcctcccagtcgtcgaccccggcgtggacgatgttgtgaccgacggcgacagatcaccccgcaaac

SEQ ID NO: 169188 - DNA, 349 bp, Zea Mays
atttaacatacagagatgctgttgtgagatatacgaggatgctgtttaataggaatgtgatatagacaagagatatgaagatatatacgattgaatatggatacaacaacattcattctagtcttgctggtggcagggtggtgggatctacattcattctagtcttgctggtggcagggtggtgggatctgaaaagaatacacccatccattattccattgttttgctgtacatttgtaccaagcaaacagtctcgggaatattttaacgatacaaacacaaagccatgcacaaaatctgcgtctggttgaaaccatccgaaccctgcttgacatataacaatataact

SEQ ID NO: 169189 - DNA, 504 bp, Zea Mays
ctagggtctccgagcgactgacacgaaattgaatccaccccgaccatttcccccaacccaatttcatctacaaccaattggttttctctggccacggtgaccgtgaacatggcggactgatgaacacgttcccgtaaattcatggcagtccagtacaattaaagggtttgggaagctttggaagagcctagagacactagaacaatcaacataggagtatgaattcacctggaacaggctgaccacggtgaacacataccgcacggtgtttttggtggatttggggaaagtcccaaattgaagctctctgggagacgattcaaggcgcgagttggtgcacgggttacttgactaccctacggagcgcgtggcactctcaatttataggccgaggaccggatttggatgaaatttacggattgcggatgtgctggcaagcctaccgcgcggcggatttcggtgagggcacggtggccgccgattaaccggagcttgccacctcag

SEQ ID NO: 169190 - DNA, 303 bp, Zea Mays
ccatgatcgagcagggcaccgcagcgactcatcgttctcttcgccgatactcctcgtcaagaaactggacgggtcgtggctattctacgtggattaccgcgccctgaatgcgctcaccgtcaaggacacttttcccattcatgtggtggacgagctcctcgacgagctccacggcgcgcgcttcttcaccaaggtcgacttacggtcgggttaccatcaagtgcggatgcggcccgaggatgtgcacaagaccgctttccgtactcatgatggcctgtacgagttcctggtgatggtgttcgg

SEQ ID NO: 169191 - DNA, 375 bp, Zea Mays
attctgcgtatctacaaggtctaataaaatcagcttctagcagccggtgaatttcgtccttgattcgtgggagaaggtctgcagaaatgttgtagctttctgcttgaaaggtctgaaaccgaatttaataggcagccgatgctatacgatctctcggcttaatccaggcatctcagtgtaattccaagcaaagcaatctgaatattccttcaatagaccgatcatctcatttctaggatcggtctccagggtcttgtttacaaaagtcggccttagagttttaccattttctatgtcaatctcctccaaaggatcagccgatgtaaacccctgtcctagtttatcaagatctctgaattcctctatcatgtcccc

SEQ ID NO: 169192 - DNA, 344 bp, Zea Mays
gttgctcctcaggtaccctgaggcacttctttagttgggatacatggaatacatcatgtacatctgatagatgatcgggtaactccagttgatatgcaacttctcccactcgctttaagatcaagaaaggtccaatgaagcgaggggacaactttcctttaactttaaatctcctcataccccggataggtgacaccttcatatacacgtgatcaccctccttaaactccagtagtcttctcctattatcagcatagctcttttgcctggattgtgcaattctcaaattctcccttatcattcgaacttgttcttctgtctcttaaataagttcaggctcaaag

SEQ ID NO: 169193 - DNA, 421 bp, Zea Mays
aatatatgatgaaatacgtgaatataaaaactgacttaatatctttgatttgtagaaactggattttcatatggaaggtgtaaacttagcaagaccagataaggccaagcctaagggaagaacaatcaaaagtagtgagcaacaagttcttaaattgggtgcgaaaggagctaaggagatgagcaggaagtgccagaaatgtggcacagctgatggtcacaacagccgtacgtgtttaactgtggaggataatagggttcgattggctaacctatctggacgtaagcgagaacggcctcctggttcaaggaacaaaatcatagctgcagcaccatagtggaatgagacatcaacgtcgaaaaaaagaacagtggatgtcagagatgatgattcatctggtagagagtagaataccataaga

SEQ ID NO: 169194 - DNA, 496 bp, Zea Mays
cgcgtattttaaacactaaatattcagtactgtccgctcgatctagatcggacgccccagatcgactcccacgaaggggtaagtctcaatctaatcctagccctgcaatccaaatcggacagcacagatcccatcttctaccccgaggccggtgacgacggtggccgtgaccccacggtggcgccttctccagtgtgcaattgtcgctgccccgacgccccatcaagactctagttcgacccaacacattgagaggaaacctatgaacacgtgtgcggaatctttaccggagtcgaagcgcaacgacgttttcccacacatcgaagcggatccacgacggcgcacagcttcgatgagcaattcaaccagcgcagcaatgccaatggcggaattagttgtcgccgaagcttctaggagacacgacgcgactctggtatgccctacgggtgccctagtgcccccctgttgccttgcccgacggcggcggcccgttttc

SEQ ID NO: 169195 - DNA, 781 bp, Zea Mays
cggcagccgccgagagaaagagaggagagagaacaaacgcctcggcgctcccatcgcgtggaggaccttcagaccatgagcgccagtcccgtcttcaccccctccgcgtcggtatgtttcgtgccccttctctgtagcgtgataggaagcgcgagacgtcttagcctaggcactggcgtggatgcggtggggcaatgctccaggcgctgtcgaggggatggcttgccactggatggcgcgtagtctcgagcagtctgtagatgaaggcttggtgccgagctagacggggagtgggaggcgaagaacgttccgcgccgtataacggggactcgaatggtggactcgggtcgtcgctgccagatccttggcgctcggccgcggcgagttgactggagaaagaaaagagagaagggagagaaccggtgaggtagaagacgccaggcatcacttgatcatgcgttggacggtgtggattaaaggatagggatgaagaaaccaggaccgtaggatggtgagtggagggggtagattaaatctcgcgtaccccttcgcaatatggaatccgggcggttagattgtgatcgtgtggtctagatctgggcaggttttcataaagcgcggatctaatcttgaccatagatcttgaagcggacagccaggatgggtccatacccctttggctagcgcaattcgcaaaagagtccctctgtttatctaaaaacaacctgtcgtcctcattaacagtagactgagtcttggaattattgcaccagagccgctg

SEQ ID NO: 169196 - DNA, 625 bp, Zea Mays
gccaaagggaaggacgataaaaactagtgaacaaagagttctgaaactgggtgggaaaggagaaaagaagaagactcgaaagtgccaaaaatgtggcattgctgatggacataacagtcgaatctgcttgtctatagaggaaaatagggttaaattggctagccttgctgatagaaaaagaggacgaccgcctgggtctagaaacaaaaattcaacaatggccccgcagtggaatgagacatccacgtcaaaaaaacataaacataccgattctgaagaacatggttcggatgacgataatttgacatgattgtaaaacatttatacataaataatggatgatattgaaatgttatgatcatgatactatttgatgaatatgaatatttacgttaaaagctcactgtatggattatatctattaatgcaatgtaattatttcttatgagctatgctattgttgagtttgtttggctatataatcatatattcactgcatctcatacaatatttatgttgaaaaaatcaaaaagccggcgaactgaagtcaatatgtatgtactagcgtcaaacgaaaaaactgaatgaataagcgtaaaccaatatgtagatttttgcataatca

SEQ ID NO: 169197 - DNA, 384 bp, Zea Mays
tgtgccttccaatgacagtaggcgtgcaagagggaaaaaggtttatcgttggcatttctgctttgtctctttaggtgatgctagctgctgctaatagctaatatattggagggaagaggaaattagggtcgacagctagctgcgcttcagaacgaagaaacatcaatattatgacgcagaggcggcagcagagctagttgcatgagcttatgatgttaaaattatccaggaataatgttgaaacagctcgcaagtacttttctcatctcttccggtatctgcaaaacaaaaaggagaaaatttcaagaggtttggctactgaagaccctcgccttatcaagaatcgcaccgacaatgtgaaaaccaacacaaaacttcacgata

SEQ ID NO: 169198 - DNA, 771 bp, Zea Mays
aggagcaggaggcgaggttcaacgccctgcgcagccacgtggacaaggccaaggccgcgacgcgcgcggaggtcgagcggaggcacgcgcagttcgtggacacgtaccgcgagttgggtgtgcggactgctgacttcgaagtgcccggccaagaagcgggccttcgcttccttgaatggttgcaggaggagctgctggtgctcccgaccattgtgatgggtttcatgtccttcgcctccctcgtcacctgcgagggggccgtgaatgctttgtcccgcgaggggtgcaggcattacgaggtctttgaccaagcggacgaaaactttgaacgttaaatcttcaaggtcgaagaccctgtgttgaagcagtcggtgggggcactcttcgataggatgtggggtccgcatgaccgagaggcggtcagggagcggtctgaccgggcaatagagcaggtaaaagctgttttttgtgtggttatatgtgtgggtatgtgtggttttgctgaatgagtgtgatgttgctgcagatggcgcatgccgaagacgtcgaggaccttggtggtctggacggtgcgctgcccgaggccacggaggtcgatccggtgccgccctcggatgccggtgaaggcccctcggtgacccccgcgcctactgcggccggcgaagacccccacatcagcccctgcgctgacgggcgaagacatcttgaaggtggtggccgagccagcagccaaagaccccacagccacgaccgagccttcgtaggtggctg

SEQ ID NO: 169199 - DNA, 519 bp, Zea Mays
cagactggagaaagacagttctttgggcctgaactgattcaagaagcagaagaacaagtccatataattcgagagaatttgagggtggctcaaaccaggcaaaagagctacgctgataatagaaggagaccactggaatttgaagagggagattatgtctatttgaaggtgtcaccactccggggtatgagaagattcaaagtcaaaggaaagttgtcccctcgctttattggacccttcttaatcttaaagtgagtgggagaggttgcacaccaattggagtcaccggatcatcttgcggatgttcatgatgtatttcatgtatctcagctgaagaaatgtctcagggtgcctcaagaacagttgccaatggaggaccttagtgttcaagaagatctaacttatgctgagtaccccatcaagattctgggtacgctgactcgtgttacgaggaataaggttataaagatgtgcaaagttcaatggagtcaccacggtgaagatgaagcaacttgggaa

SEQ ID NO: 169200 - DNA, 608 bp, Zea Mays
cttgccgcggcaaatcaatcgcgatattgggcatgagctcatctttcctcgtgcctatatatcgtgaccgctcctttcccctctactaatccatccgtgagctttcctcgacctcggaccgtgagcgagaacgcaggaggaggccgccaccatgaagtagagagaggaagagagcaaatcacgttaccggttgattcgtgatgtcaagtccccggtgggcgacggggggatcaacaatattattcgcacgtggttgtggcctttccaagcggggagatccaccagtgattccccaattgctcgtcggagtactttcaacaccgtgatgtcgcgggtcgtcgtgggccggctccccggaactcgattgccggtaaaatcatctccacatctttcaccttgtgcttctcgtagcgtagcgcccgttggtttgcgtattagagcatcggggcgccggtcgtggccacaccgacaggctgcgccgctgggggattgtttggcgctgccgctttggtggctggaggtgaagggagatgcgacagccactgatcagaaaatcgacgacaaggattaagtcttgcgtaccgattcgtatggattccatctgagtc

SEQ ID NO: 169201 - DNA, 534 bp, Zea Mays
cgccggtgacctcccctcaccggcgaccaccgtgctccggcgacccagtgctcctctcctgccctcctctcggtgagcagccctttctccctctgtctttcctccctctctgttcttttgggcagtgatctccaatccaccctttgtgccaaatccaaattcctatcaaagtctgtgactccaagttgttgtgaatgtgtctagtgctctattgaatatccttgcaggtttctagctccctttgggagggtttcaatcctcaaatggccatatctccaaaaacctaattcaccgcacgccacgtgttcggtgaaatgtccaaaccagctaaaaatgctccaattgaacccaaaattttcaggcaccttcacaacacccccagtaacatattcgccaaatttcacgccaatccgatataccaggctttaatttcaccaaattccccgtttcgggcgatcgtttccgagccgagtgcccaaattccattttcttcgcctaaattcaaatcaagcactcacttcactcatatttacc

SEQ ID NO: 169202 - DNA, 423 bp, Zea Mays
cttaaaccggtacgcgacctacgccatcggatcagaatcccacggatcgtgttctatgcgtgcaaatcagctcgcgacccccagatcagatattgacggacacgattcaattgaacgaaggggtgcgctaagttctaatcgtagccgcccacggagatcggagggttcacaagcgtcggcccccatccgcacaagacacggcggcgcacagagtgtacgcggcggcgctctgccggcgtgcatgccaacctgacccccagcgcccgattcgcgatacgaacagggtttccccaaagacaaaggtttggcgagaagaatggtgagctcttacctaacgtcgttgctctaatcctcaggcggacgtcggtcggtggcttcaccgtggctgcagcctctacggcaaggaattcctccgcgcgcacg

SEQ ID NO: 169203 - DNA, 1286 bp, Zea Mays
aagacccaaggcaggaagagatggtgcatggcttgacgagggaagatcaacaggaacaatctcgagagcactacccggggtgacctcagccccaccagcaaacagtaggttcctagcgtctggctcgccgacctctaaggcgacttggccagttaaggccgtagaagcacgtgctgccatcaccccctcagaccggattggggatgacccgatgtgtacatccatggaagcattagagagagagcatgcctgaacatcctcgggggctggattacaactagcactacccacaggggctcgatcgctaccagcaacaccctcgggggctgggtagctgccagtgccaccctcgggggctgggtcctctacaacagccacttctaaggctgaaggcccctcagccacctccatgggagtcgggtaactcggatcagtgtctttgcatggaagactgccctccaaggtcgacgatgcgcgggacaccacccgggttacctcttgcccggcagaatcaagcaatgaaagcccaccatctgggacctctgaacagacgactgggatatcagcctcaggaggctccgatagtatgtctttaggaatgacctcttccagtgcttgatcaaaatctgatatcgaaagcccctgaagactgacaagtgctgacagagctggggagggaatatcgctacccctctcgctgcctctatagtaacgactattcttgtggatcagtgggatttcttattcttcttcctcttcatgctagtcaaacatgccaccagtagcctgcgcatcatcacagcttttggcgtcaactttgggaatggcggccgtcgggacatcgtcagggatcggtacagaaggaccagcatcctgatccaagcacgacaatcgacgaagtcacctctttttctttttctcctcgacaggtgcagtcggacggttcactcggcgtcaatgctttgagtgggcaccttcaggtttccgaatctccatttccttgccaaattcttgcccagttgtgatggccatcagctcggtgcgggtagagtcggacgattccccggccagcaggctaagcacgacatccatctcagcatcatcagtgctggctggcatctcaaagtgagtttgcctcttagcctcgggaagaatccaaagtggagcaatcaaggcctcaatgtcctcaagagagggtcgcactctatgacccgggctaccatcacgagcaggagggttggagacaaattcagagaatggcctatttggcggtaggttccatgtag

SEQ ID NO: 169204 - DNA, 556 bp, Zea Mays
gcagaagataatgcactatccgcagccttcggaggtcggggaaagaagagattgaacagagtttttgatgccattggcttcgtttaccccgactaccgctacccgctacggggacaaggggaaaagaggaaagctactacttcggccaccccagacgaacctgtgccgaagggaaaaaaagttgaaggtcctaactcactggccgcgttacatcgaaccggccgtgatacctgaatttggcgaagggacctcctcggctgccaaaacaaaagaaactattcctcccatgtagaggactgaagagctggctataatgccgaaggtgcctacagtcaaggtagttgaaacgaaggttgataaggctgaaaagccagaaactgaagaaataatgaagatgtcagaagttttgagccctccattaaaggcaacagtaccgaaggtacaaatgggttctgttgtaactcttaagaggaggagaatggtaaatgtactggatgtgctagaaacaaccgaaaccttgaatcccgcttctacagggaaagttgtcgaagcttcc

SEQ ID NO: 169205 - DNA, 663 bp, Zea Mays
tactaacatcaccatggtgcacagtttactaaagagctaaaacatgctagcaatgttctagggtgaggtggtcgctatcgttgtcttcctactgaactggtgggtcctaaccaaggctatcaatggatgaggttgtataagtcctagcatgggcatagactagatgtcatctttatgcacacattcatgtgcatggcttaagttaatgcgatgaagccacacctaaagaagctcgatgactatggcactttatttttcttccttagctacgaggtaggcaccaaggcattatgattctatgacctagtgatatgttgcaacatcatttatagggatgcagcctttgacgacctagaattcttgagctagaaggatgaggacaaggacctagaggttggcacaaagcttgtcatggattatgatttgatggatgtcgagtgcatcaacagcgacactatggctcatcaaagctcttgatgatgtgagcctctacaagaagccttgacacttctaaggaaggtacactcgtgatgtttctcaaggcaccaacccctcctcccgtgacaccatcactagcatcgatccctcctgccatgactagtatcaatgttgacttctcttgtgtctttattactagtatcaattcactgccctagctaggtt

SEQ ID NO: 169206 - DNA, 727 bp, Zea Mays
cacaccgggtcaacagttcccagtctcggcgccgttacaccatttcctccgtcagccagccacctctcccacgtttcctgtttctaaaaccgtcttcgcgcaatcaacggaggcaaacccgcgccgataggaagaaaaccccagccgcacagtctttcctttcgtcggaggcgactcgccaggcgatttccgctgctccaatcgagcgcagctccaatccagcgccgctccaatccagcgccgtttcaatccagcttacctccttcaatctcccagcattggagcccgattcaagaagttccaggtaatctaacattgaaatacatcgagtttgccgtcgattttttgaagcatttcggtcgattgaagtggatttgattgtaacccttattttccatctaaatgtgtgatttgtatccgtttatacatatctctaatcgggtcattgcaacgcgcattgcatctttttttttgttcaggagccctgatattagagcatatgtatttattctagatcccctctatcgcccgacattcatagatctagacaaaggctgtgaattaggtatttattgatgagttagcagagagtactcttacacaacccaagtaacacatatatgcttattgtatttgatatatatgcatatcctcagtactgtttatgcacattcacttgagtcatttgtttacacatttgttttattatatatgcatatagtcagta

SEQ ID NO: 169207 - DNA, 627 bp, Zea Mays
cggtgatagtggcgctaacggaggaggggacatgcaagggagtcagagcagcgtcggtcgtgagcaccagtcggtcgacgtggtgagggtcgttgtagagggcgacgtgatggtacactagcagttcatcttggaaatggcatgaggcacgggctagcataacaatcgtctgtagagccacaccaatcttcatcgaaagaatattgtctgacgatacaaacaaggtatgctcgagctgcccccaatcttcatcgaaagaatattgtctctgacgatacaaacaaggtatgctcgagccgccccaagacaacaacacatatactcttaccctacagttttgcccgtgacttataggttactactggcattagcgtcgatacctccgtctgctgcacccgtctccactaacttcctcgtcccactacgctccatcaggacgccttcccccacctatgttgggctttgttgctagcacttttggaagcgtcataacaactacatcttttggggcaagtctaccactatcaccgccaccctccgcgcatgcctagcagatgcctatctgtgggcatatcatctaaaagatagagactcccaccaagggagctcttggtgtgccaatctccc

SEQ ID NO: 169208 - DNA, 485 bp, Zea Mays
gttcggcaattgaggtagtgcatttcgcctctctttctaatgttcaggaagactgcttcttgatagaccaagatctatgcctcttagctgttgggatttccgtgtgttccgttagctgttcattggctgagtttctgtttagaaaaattggttttgggttgctttattgttcttctaggaatgactatgatctcgcccggcttgttcagtaataatttggttgccagcaaaactcacgccttcttcttttccataggaatatggagaatacaggtgtgccccagtgatagcagctgttggcttcctttgggccaattgcgtaaccttggcatttgggaatagagataagcgaagcagcaacatgaatgtatgctccatcaggtgctgttttgaccttcctgtgttatggtctcccctgatgcctctatggagcggatccacaagtccatatagtgtgtattttgactgtatactgaatattcatg

SEQ ID NO: 169209 - DNA, 477 bp, Zea Mays
ttgaaaactgcattgcagtgttcacggcgcagcacattaatgttttcatattatgcatatataaaatgtaaccaggataccagagagatgatgatcagcccaaggtacttggttcatttttagcagctagcaagttattttagtcaatccaaacaggcttagcatgacaaacaccccatatgcatatgattcggttacatcattttttggcgcctcgtggatttgtgggcatgataggtattcgaagataaatgttttcagttattggaaatgtgtgtctctcagggccttagcaaagctatatagcaagtggcttcagtcaaacataataagtaggaaacccataacaacacgcatgttgccaagtgggtattagtaagggatagcatgttttcttactggcgccttagcaggcacgttaagatctactcacgctaaattggtgatctacttacgctaaattggttttttctttac

SEQ ID NO: 169210 - DNA, 461 bp, Zea Mays
ctccaggagctatatcagctctttgaaaaatatgccaaatccgaagagctccaccagcgcaaggtcgagtcacagcggaaacccaaagacgccccgcagtccagccgcacgtggacgaggactccgcagccagactccggtcgagacggccgcagtcagcagcaagtgcacaacatcgccaaccagcatcccgctgccgaccccctcgtcgccaggaatatcccccccagggccgcggaaatggaactcgtggtaggggccgagggcgcgcgcagccgccgcgccgattctactgccttttccacggcgaagactgcgcccaccaaaccaaagactgcctcgaaacgaaggccaccagagacagaatggcgagggcgcagccaaccgacaatcccagaattgtcgcgcataattaccagccacccccccaccatatatccacgctcccgccccgcatccac

SEQ ID NO: 169211 - DNA, 754 bp, Zea Mays
ggggtataggctcatctgagccgttggatcagcgcccgatggctcagattaggctaagcgcattatgaacccgcgaacgacgtaaaccgtaggatcgcgatctaacgtacatgattcattggactgaaacgttatcccctggtttaatccggcccgatcatcagtcgatcaacggcccacagtgattctttccccagatctaatcgtgtgcgcccaatcgcagatcgacggccccaaacgctgtcttcttcctaccatccagagctaggccggcggcaccattgcatacgccgcagcagcggacatcgccggtgtgaagtgcccaggcgccacagtgcactaacctacggtacggatagcatatctcgaagctaacacgatggcggaacaggggacgagattcacaccaccggtgatggtgcagagggtcgacgacgaggtttagcaactccacgaggattcctagctctggcaagttctcgggactatgatcgcactacgaccgcacggatcagcgccaaacagacgccacacgcaccagacccgatctgagccatgggcgacgacacacccaaagactgacggtggcgcacaaactcaccggttctctcttctctctcctgtttctctcgagcgctcagcggattcgcaatatgcttggatggccagggtgatgcggcatctactccttaaatactgcccgcagggaaggccaagagcggagaaatctcaacagccgcgacatgcccggcgc

SEQ ID NO: 169212 - DNA, 676 bp, Zea Mays
gtctttttattgatgatatatttcccagtttacagaatacatcgtcgtcccaatagcttttgagatatagctagggataaaacttccagaggtgttctatgttccatgagttcccaattttcgtgtcgtcgatttgagtgagacgatatgatccagaccgagtgacttctgctaccatgaatggtccttcccagagtggtgacagtttgtgccgtccctcccccgtaagaattcgccagaggacgaggtctcccactgcgaaggatcgatgccatatggtcttgtcgtgatagcgcctcagagtttgctgataccgtgctgactgaatcaccgtgttcaatcgttcttcttctagtatatcaacatcctccagtctagtagcctcagcttctgctatgttttcaaagatcaacctcggtgccccaaacttgagatcagcaggtagcactgcctccgaaccgtagaccatgaaaaaaggagtattcccatgcagagctcggctaggttgagttctcaggctccaaacaacataaggcaactctctaatccactttcctgcgaacttctcattcttgtcgaaaactttctttctaagcgcttccagtatcaacccgttggctctttccacttgcccgttggctcttgggtgcgccaccgaggcatatttgatctgaat

SEQ ID NO: 169213 - DNA, 911 bp, Zea Mays
ccttgcttaaccaatgatgcatccctatttggtcgacgtttccactaagacctcgtacatatcatgtacatctattggaattatgatgcatcacacgctcattcttatgctctcctccttgttgtgacctggtaaaacatagatcctagatcgttgttgcatttccctagagaggcttccacctccaatagacactgtcgaattgaagtgagaaggcgggcacgagcttgtacaacacaggctccatgctcgactctaccagcttctgttgttcctctaaaggactcctacattgctcgcttgaaaggtcccctgctaggcgctacagtctccacatgcacgtgtcttacctctattgtgttttgctgatccattgttgttttgtgttccttcagacaacaatccattcctttcttattatggtggcccgatgcacgaatgccctttttgtggcgccttcttttggttccaggagcatgtcaagagtgcttctgctgtaactcagcggaggattgtctacaacctttgttgtaagggtgggcagatcaggttggaaccttacaaaaaaccacctgaacctctatgaactcttctgaggtttgatggcgacgctcactcaaaacggtttttgcgccagatatgatattacaagtcacttttcgctttcacctccttgggtgctaccgtcgacaaggctataaacaatggtactgcaccgtatgttttccgaattaacggtgtggttcatcatcgaattggaacctttctacctcgtcaaggttcacagcccaagtttgcttagctttacatacatgatcctgatgctaagctccaaagtaggctccacgtttttgagagcgatgatgttggtgctgcttgcccagactccgctattacacagtccttaatgg

SEQ ID NO: 169214 - DNA, 451 bp, Zea Mays
caaactttaactaacagtggcacaaatggtttaagaaccgcatgagaggtaattcaacagtactcgtccatcactttggaaagatggtgcaattatgaagctagcaacaatccttacatcagtctctctctctcttttttttgcctaaatatgcatgcatggctcacacaactattgaggacataatagagatacaagttgactccctagcactagttaattagtagatacactacgtactcatatctgtcaacatggatgtaaataaagctttatgacttggacccataagaaattaggagaactagctacatatacttaggtcattggacatgttatctaatatggatctatatgtaaataaagttcactagtagaaaaaggctcaaagcctgcggtgcggtatatttttataggcagattcggttatcaatcgcctgtgctattttta

SEQ ID NO: 169215 - DNA, 416 bp, Zea Mays
cttcagccgggttggcgttcccttgattccgagaccgttggcttcagaacggaagacaccaccgatgcggaagctatgaagaccctaacgactttctgtggctaccatcccctggagatggtgatgcaccccttgggactcttccccgctgagaagagggatgaccccatgtggtgcaaccgtgtgagccatgtgaaggacgtatgggctatgtatcctgacttggttgggaggatcactgtttagtgcatgagcgaactgtattacctattggccctgcagagcgatgctatggcacatcttgctaacctcgctcagaccaccaagctcaccctcgacagccgagaggacttcgtggtcgacttgtcctcagagttggtggagaaggacctacaagtggaacggttgagccagcg

SEQ ID NO: 169216 - DNA, 799 bp, Zea Mays
caaaagatcccaaatgtagtgaacctctcaccgccggtgagccgcgccgtgatcctcgccggcgttgcgattcgtgcgctctgacgtgcggataacggttgacggtgaaaagatcttgcgcatggatgactttggggcactgttttgccctgtcgccgtacccacttgcaccgacgacgtggctgcgcgaccgtcgttgtcgtgccactgtcatctcaccactcatcgcaagccgtgaagactcggcagtgaccgccgtagaccgtaaaccagtgagcgccacattagcaactatggtgactcttccccctttctcaccatgagcgcttccccatccaaattcaccctcctcgtggtcgtcctctataaattgatgcctcggcctgttccgcctactcgttacgaacccagtgaaccactcctcactctcgatcgtccaccgtagcgccttaatttgggttttcccccaaatcggttctctgcactgccgcgagcaccccctccatcgacccaccatcctgtccctccacccgccctcctagctgttgttcttgagtcctggtaagttgctaaagcctactgtgccccaaattcgtatgttaccgcactatgtcgttgggaacacgtcgggaaagtctcaagctccgcgggtgtacgtggactgagctctagagcagcgttcgggctcaattagtgatccccagtggagcgccaatgttagaattaggcgtagactgaattagagcacagattgttaggtattgcggctgatacaagttcgctggagcgcacacgccgc

SEQ ID NO: 169217 - DNA, 1945 bp, Zea Mays
gaagaattactatttacactagtagaataggactgttgatggccttgtgaaccaatttggcaactgaacattcacactgaagaccaggaatactactaggaaggtgattgagctggtgccatgtgctaagaaccgttggtgaaattggatgggttgttggttttacgttaagatgaacaaagggggccaagatgccttcgagtgaaatggtgccacattgcttcgtggtgtttccccggttcaaggtgaacaagggcgattcggagaaggctacatttaggcaggttgcccctatcagaagtggtcttgatttggtggaagaatttgttgcttttggagtgtgacctttgagccatggttggaccattaggaaggttgcatgaaggcccatgccgttcaaggagggtatggaagtgattagtcctaccttcacaattgatctagctggcagagatgtcacaacgttcatttgtgatgtggaggctgaggcatgtaaaattattgggaaatatgtgaagaaaatagagttgccaaagagcatcgatattcaaggttgcaacattcagatcaatcgatgttttgagctaaatcatctagaatatgggccatattctgaggctatgaaagaagatgtggaggagacttcaatgaagtggaggtggaataataaggagcggtggttgtgaaaggtggtgggacaaggaggggacttcaaagtgaaaggtgggggtgcctaagtcgagaataaaggaaaaggctcaaattcggtaggccgagccggtggggttgttaagtggggaggcatctggctcggtggaggaaaccatgggttttatcaaggacttggctgccacttgcatagcactaaaccagaccatgatggtggccgagctcaagggtgcaatagtgtgggcggtagaagataccgagggtgagtgtcctaggggtgaaagggtttctaggaccaccgcaggcgaagacattttaacgtctaggctaccgtagtcttttaatgtgttcccttatgttagtaacattggggatgttatgtcagctactatggagaagatatggaaggctatggtgaagagggtggcccctttgcacaccttatgggcctgacgaagctgatgcaggtgaaactggtgaagacagaggcatccaccaaggcggaggttggagtcgtcgtgtgtgtctgcttcacgtgtatcccccattgtgccgccgccataatagtctctctatggaggtgccgatggaatcatcgcttgtgctcggtttctaggatgtggaaaacctctctacgaggggctagacatctcggtgctggattaccaggtcgaggagccttttgacttcacgatgcgcgatagatgtgcctgcaacaatgtcatggaagccaataagattgtggcgcatagggttgctttggtttccttttgatttttgcctttttatggctcacttttgttactatattgatgatgtcggaggcaagactttggtgggttagtgactgcccagccgcgaagggttcggccaagaatgcgacccatgggctaggttctgcaccctctagtggtggctggggtggctttgctgatctggccatctctagcgagatcgagcaggctgtggcgggggtgctgaagaggtatgcggagtttgcgaaggctactgcggatgcatcatgcactgttgccgaggtggctgatgcggtgggctgacacttgtgctatgtaagttggtttcacatgataagttgcaaaccattgttgtacattatttatggattttgtagttgtgggtcttcaccaatcacgtggcatcctgaagaaggtgttggagcataggattcagtgtctttgctccgaccacactgacgagctgtggtggtgcaagacagccaaggccaagagtcatgtgctgaccgatagagtttaag

SEQ ID NO: 169218 - DNA, 1003 bp, Zea Mays
ttaaatagccttcatatcctttcgcacgcgaaaaaatcattcgcctgtgcgtaaatatttatcgactcaactcgtcctaatccctctctttttcacctttcacggcgacgatgaggtacccgatcgctgtgtctgcctccaccacaaaatgtcggatgccataggcatcactgcctccagccccaaggatctagcgacgctgcgtcaggcccgaactaggtttagggtttagggttttagcgaccagcaacctgtcaagcacctcacagttatcctcctcaatctccattagtagcctcacgctggtcctagcacgatcatcaaaatacaatcctctgccagcacaatgaagcaggcgccggtaaggctataatcgacatgtcactcggcctagaggaagaacctgatgcatgtctcaggggtgggcaccgaccggagcatcacgaccactacaacatcatttagagtcctgatgtcgacgaaaagaggcacgtacaagcataggtaagattttatacccacgaccgtatatggataacttgacgggtatgattttttgtgatggatactgatataaaatgctactacccaacgggtatatatcggttgccatctctaactgtgaaacaagtgagaaaacaagggaggtgaatgtaaaagctccaagtatgcggtaccatttcatggacatggggcttgttaaccgaagaaaagaggattttagaatatctccaatagctctcaatacttctaatctcaaaacatattttatggaaaattttaaaaaaactttgaacaattccttaaatagccttcatatcctttcgcacgcgaaaaaatcatccacatgtgcgtaaatatttaccggctcaactcgtcctaatccctcccttttcacctttcacggcgacgacgaggtacccgaacgctgtgtctgcctccaccacaaaatgtcggatgccataggcatcgccgcctctagccccaaggatctagcgatgct

SEQ ID NO: 169219 - DNA, 765 bp, Zea Mays
gcgtcggccgctgccgtgctactggttgcgccgagcaccaccgtccctgctgccaccgcgccctttgcccttgccactgccccaattgctggaggaagaggtggaatggcaggcaggcgacgtgcaggacagggcggtggaaacagcgagtgccgatgccaaagcttccttgttctcgatgccgaagcgaagttccttgacacggagcatgttggtggcggacttgaagtcgggcagcggtgacgtgttggcgatgatgtcggcggtgttggcgaagcgagggttgaggccgcgcataagattaagaacgagctgcgcaggggagacagtgtggccgacctctcagagcgcatcagcggtgcgcttcagctgctgggcatagtcgtcgatggagaggtcgccctgggacaggttgtggaactcctgctcgaggacgacggcgcgagactccttgttcgcctggaacagggcctcgatggagacgtacagggcgcgggcgtcctgatcaggctccatggcgagatcgaggacgacgtcatcggtggagttgtacatccacccgcgaacacacgcgtcgggctgagaccacaggggatcagccgggcgcgcaggcactgtgtcgttgatgtggccgagcaggccgtacttgccgcagagggcggtaaagaaggcattccatttggagtagttggggcgctcaagactgagatcgatcggcacgtgctgcttcacgttgacggcggcgtaggcgagaaagaaaaccgg

SEQ ID NO: 169220 - DNA, 524 bp, Zea Mays
tgacgagccaccggaagccgtcgccgccggtcatggtgcgggacttcgacctcaacatgccgtccgaggccgagcctgaggccgcgccgccggatgtcaagcgggcatgcacggacgacgatgttgctggtgactgatcctccggtcgttccaacggcggctgggaggtgcctgaccaggcagtctaggttgttatggtggcagcattcttctcctctctcctacatgtctacacccacgcacatcagcacatgccatcgatcgcctcatgaaaccggctcgtgtttctctacgtccgatggcggcgacggcctgtatgcaagttgagctgctgtcgccctccgtgagccccatatccgctaggtcctcaaaggcctctcccgctcgtgtttcgctgagcggcggcacggccaaaagagccatgtgttggtggagtggctctccgacaacggcccgacgtagaccatctccctccagcggaggcctagggcgtcgaggactgggaagagcagcacagcgtagcc

SEQ ID NO: 169221 - DNA, 510 bp, Zea Mays
gttcaggtaaggatgattcgttcggatccgccatgatcttctgcccattctgcgcttactctcgtatggattggggcactggggtggctgatgcttctgctcgtcggtgtgccatgccgtgttgggcggcgcggctgccgccgccgtggatcttgggatggcgactgggcacgatggactgtgaccgttgatctggccgggaccggcagagatcaagtcatgggataacaataaagcgttctgaatctcgaccgtccgatttggattgatcgggtgagatctggtcttaggggttttaaatctgggacgttgcttttggatccgagggcttggattgcgtaccggttcgataaagccaagatctaatcctggccttcgatatttgatcggacgaccgagagtaaaccgtaccccttcggccgggccgttttgcagaagagaccctgcgatttttagaaatatacccgccatcctttccatgccaaaataaattacagccaagccctaaac

SEQ ID NO: 169222 - DNA, 299 bp, Zea Mays
gtgcgatttaaaaaaatgggcccgattcgggttccaaggcgaaagttatggccgttttaagtttggactccgaatcagggtttctggcgaggcgctggaagcgtggggacggttttgtgggtatggtcagtttgggtgattgggtcagtttatcgagattgagcttgtggaatgatagtggatgatgatgaccaaactggccccaaaacattctaacccagcaacctaattagggttgttggcgaggcaaatgaagggtcaatagggttggttttgtggataggttggttttgtggata

SEQ ID NO: 169223 - DNA, 425 bp, Zea Mays
cgcatatacaattgttgagatgtatgtgtcgacacttgtagcttttaaataacacaattctccagttgacatgaagttattttcttatgtacccttatgattcgtcgtgaaatcccaaaacgagaatcaagggcttccggtaacctagcctcatcagtgcgcactgagctaggttgtgaatgtcttccattcacaggataatcaatatcctttaggtgtccaccaacactaggttggttaccaacgaataaatggtctgcatttactatctcagaaggtctagccttcagctgcttgcaagcatcttaatcccaatttgtgaccatacttctccccctcttatttacaacaacgttgcaatagggagttaagtgggtttccatgtaaccactctttctggcacttccacataggattaatttgag

SEQ ID NO: 169224 - DNA, 720 bp, Zea Mays
gaagaggccaacactcgcgaggcctaccgaactctaaagatggactacgcgaagaagttaaagaagctcgcccccgccaagaaaatccggaagcggacaaagagccgaggatgccagactgaccgaaaagaggaagccccgccaacactgcctccctccaggatagagaacttgtcagatgttgaggagatgtccctagctagccttgacgatcttctcagggaatttggggacaccttagaaagggagtttggaagcaccttagaaaatgctcgctcgtagcgtgatctaggaccattgtatgcttgtaatgaacttgagtgatgaataaaataatgtgtttgaaaaaaatatggcatgtgcatagtagtaatcctttccccctggcagatggcttcggataaaaccatgcctaccgcctcaggtattggagcaaggtctcccctagatgctaaaggagaagtcagtggagaagggagtgaaacccacctccccggacctccgaagctgccattagacttagcccaagttctggccaaccaaacccgactcattgaggtcctcaccagaagccttgagaaccagcgcccgaatggtggaaggcctcaggacaggatgggagattttctaaggctcaagcccccccacattcgctagatccagcaacccgctcgacgctgatgactgactgcgcacagtaaaaaggaagttagaggccat

SEQ ID NO: 169225 - DNA, 778 bp, Zea Mays
ttcaaaataggactcacaattgtccaactagattctaacatcttctccatcaaacatgggaaactctaacttgggcaaccaacttcttttgccagtatcattctccacatttcccctaaatatctcctcctatccaccataggaatggatgcatgcaatacctgctgaggtgttggtacgatcaaaggatgcactcccatcaacccatctccctaaaggtatcctttatgcagtgcctatgccattaatggcggcattagccgctgtcttcgccaacctcgcctgatcctaagaaacctgggccaacgacttcatcaagaggtctattttggttgcaggtattgcatgaccttgtcatgttccatctacctattctccatctcatgtaacttgttcatcactatcccaagtccatccatcttctttgagagttccatgagtgtcgtggtcgaagcatccatcgcctgttgaaacttctcaatcaagtgcttggagctgtggagacgaactccgaatccgcaccaccaacaaagaacaaccgccaacaactagaagttgaaaggaagaatgacgtgaactgatgatgatggctccgatactaatatgtggtgtccaggtagactttttcggtgatcaccagaataggaatgggagatagtgagggaaagaagaatttaggtagaagaatgtaggtgggaagagttatgttccttttcatttcgtgcctttggattacagagttccacactttatacctggtcgaggcctaggcccaaca

SEQ ID NO: 169226 - DNA, 1664 bp, Zea Mays
ggaccacaaaagggatggaattcattccctgctcctgcaaatttggggggatatctgacagcagaaaagtcttcgaccaattgaaagcatccggctgaagaagattcgaaagaaaaaaaggtgcccacttcttagggatgtccaccgagtggtcagtcgacccagacggagcaaagaatttggcccagagcctagagaactggacaactcttttcctctcttcaaacatctggaagacggggtcaggctgccattcctgatggagcatgaagttcatctccaaattctgagggtgattattgttaggctcatcaacatgggcctgagggggcacgacctccaaatcatggacatgatccacctgaggcaccggtccatcaacctcctgaggcccaataaatggggcaacattgatgtcaattccatccccaagcagcgcatgaccattcaccgcaaaatgaccattcggaaggggtgcaagctgaccagcaccaatggagctatctgacgacaagccagagtgttggttactgagttgtagttcttcctgctgaatgtgttgctcctctggcaaaaagggctgtggggcctgctgaatgggctgttcattcacaatccactggtcccactctccctggccaaagtcatcctgctgagccggcaacactccacccgcaggctccggagggaagtttaggtcaagccctgccggaggcaggggctgacccagcccgaagaaggccagggggagctgatggccatcctcgggggccgaggggatggggtcctcatcctgagcctgcccaccaagcatgagctgctgaataatttcacattgcatagtccaggagtcaccagcaaagccctcagcctccgaaaaaacaataaattgggggacttcatccagcgaagtgacgcgaacacgaagcagggttctagagatattactccgatcctcctcccatagaatcaacctcccaaacgacccaatggcggcctgcaagaactctgaagaacgatagtccaagggaaaccccaaaagcataagccaacactcatggttgaagagaagagcacggtgattccaagcatcattgtgacggaccgtagtgaaagtagcgtctaaatattgttgggggccaagcagaaccaagttatctcgttccagaacactacggaattgcacaatcacctgccccaaatgcgagcgctgaatggctcgaacaccaaccctacgatgctcaacaagatactccctgaccacatccctaaccgcagggaacaagacctcgtgctcaggcaaaggatgaatattgataatcgcccagtcctcgtgagaaggcggcaaacgctgcgaaactgacctgaccatgatcccacgatgctggaccaccgaggcgctgaatcctggtgggaggaacggctccgggtcaacacgccggtacgccattgacagattctcagacgatcgccggagagccaagagcgaaggagcggtttggggttttggtgaagtgacacccaacgcgagctccaaggacgtttctggcgcctgttcggatatttttaataataccgccctggcgaattcaccgaaggaggcaaaggagggaggggtcccacccgtcagggaccgggtggaagggcggaaccaggatccgaag

SEQ ID NO: 169227 - DNA, 428 bp, Zea Mays
attaaggagcaaacagataataaagaagaaaaagaagcagacccagtggaggaagagactaaagaggaagtagagggtgacgaggatgatgcggatagagcacatgcacacgatgaagtttcagaaagtttactgagaagatgaaagatcagttgagtgttcagagaatccggagctctatgaatgttgtttcattggagcgaaagatggtcacaaaagatattctcttatctatgagagtcagaactaactcaatcaaaagtgaggtgctgccccaaaagtcaacacttacccagaggccattaagggtccttcctcaaccaaatttagtaagggcaagcgagtttgttactagaattttgcgcttcgtttaagtatattgaagtctacaatatctggacaagtctaagatttgagacaaccgtgag

SEQ ID NO: 169228 - DNA, 708 bp, Zea Mays
cgcactgtgattcacgtcgattgtcgggattcgtgcgctatggattgtggataactgtgggcaggtaaagatcttggcgcctggatcagcttgagttcggtcgcgactaagcccgccgtacccccttgctcatcggtggatcgggatgagtcctcgccgtcgttgatcgatcactgccgtgcgccgcgtgtccagacactttaccacgtcacgattagttacgttaggggatccggtgatcgccggaggaagcgccacggtgaaagccacccatcccgagcaccagtatccatgtttccctccggccgccagcacaacctcgtgaaattggacaccaccgacaatgggaactataaattgacaccttcgcctgctccgctaggtaactgcgcagccggtgaagcaatccgcaccttgaatcctcccctagaattcaccaatttcggatttccccaagctgctcaagaactccgcatgtcttgacttcgccgcggtccgctcaattcttgtccgattttgccatttatgttcttgtttcagcacccatgcttaccctggatactcaccaacccacccaattgaactagaaacccactgatcattgggaacgcggttgtctgtccgcgacacccacggtcactgtggccagaacaaacctagtagtcattgatgaaattaagtggggggaaacattcattataccttgaa

SEQ ID NO: 169229 - DNA, 286 bp, Zea Mays
gaggttgcatatcaattggagttaccggatcatcttgcggatgtacatgatgtttttcatgtatctcagctgaagaaatgtctcagggtacctgaggagcaattaccaatggaggaccttagtgttcaagatgatctaacttatgctgagtaccccatcaagattttggatactttgactcgagttacgagaaataaggttataaagatgtgcaaagttcaatggagtcaccacggtgaagacgaagcaacttgggaaagagaggaagagcttcgtatagattttc

SEQ ID NO: 169230 - DNA, 821 bp, Zea Mays
gttaagattagacctatccgagtaatgaatcggtaagcagtaatgaccgtccgattgccaatcagcggtccggatttaaaaaaggcgcgatcaatccaggtccatacgattgccgatcaacagtcaaggcgagtaccacagaagcggtacgccccgatctaatctacaccgtccattgctagatcaccgatccacgaagcgtcttcttcctccgtcaccagagtggtggtgcagacgcgaccagggcatctccctcgccggagtttgaagacttacctaggagtactcgattgaagacttacctaggagtactatcgtctgcagctcctggttcacgaagcggtgcggatctacggccacgacggaaattcgtcgaggaattgtggtgacgatgcgcgcccaaaaagccgagtgacgccgcggccggcctccacttgtacggacgataccctacccttgaccgccaggatcgggacgacggtggcccccgattacaggtacgacggatttcctctttcctctcaccagctccgttatgtgtgtcttcgtgaagcatccaggcgattttttttatctgacacataattcatgaaccatcctccctggcttcatccttatgtgtgtgatgtctgtaaaaagaaaacaaaagggaaaatatcatcccagctcatcctcgcacccctcgatatctctcgttctctcttatcctctccaccacctaaagtttcaaccgtcctcatcctctcacagccgacgccaagcctcttcctatcttcgatcccaagccgcctcgtctctagccgtcccgtggagcaccagat

SEQ ID NO: 169231 - DNA, 1074 bp, Zea Mays
gtgcaaactacaaaattcatgagttggtaagggtgttaaaagatagttaacgagtattcaccatcatcccaaggacaaagattaatgtggaggccaatacgtcgaaccacggaggtgacatcattctcaatttttcttcatgttccaggttgtgcaaatgtggactgagcttgggactccataaggttagtttttccttttcttctcttatgtatgcatatgttttgtgagctaggctagggtatgttgtggcctacccaaaaataccattagatctagcatttttgaaggtcaaagcaaagtttaatgtgagacatatggatgccaatgaagaattacccatcagggaatgccttcatatccccatccctgttaaacctcatgagcaaggtttcctccccattaccatccctgcatgtgcattccatatcagacgggttccatgtctcggacaaaagttatgttgtgctcagctcaagaaggtgcttgttttttgcatctaagccacatgcatatgcatctgatgcacatgtatctttggtctatgtgcatctgcaactaaggtgcttgtgttcttagcaatgggtggatgattgaggagaaaccattggcgatgtgtgatgcttggatgggagatagaagaggtgatcgatgatgtttttgtgggagaacggaagggaagagcggtgacacttcagtggtcggttagagttagcactttggtcttgagtggaggtagtgcttggagaatttggggcaagcacgggctcccaactcgaaggcggcgcaaagacctacacgtctcgacttaggattgatgaggaatatactacatagaatttttttagggttgagagaatggatggatgcatgaacttctatagcagatggacggccagatgaatccatgatgaactaccttaatggggctccatatggaatgactacgatgaatgctcctcggcctcgaccatgccaaactcaacaagaaattttttatccctgtttagttttatgggggtaattttggcccatctatgcttactatcgaaggaattttccgcgagaaattag

SEQ ID NO: 169232 - DNA, 796 bp, Zea Mays
attccggttgcatacgtaaggtaaagctcccggggttgcatggataacaatcccgagcacatgagggtgctaaaacacgaacaatgagggcgaggacggacctggaatcggctagccgcgagcaggtgattcacggcggcgcagtcgaccgaattgggggaagaggggaattctctggctacggtggttaattgagggggagaacgggtgcgttggcttcacgatgacctagcgcagcaggcccaaccatcaatttatagggatagcgagcggtggccgcgaatttgaagaaggacgcgcggcgatcagaggaggggaagagcactcgtgcagcgacttggtgtccaacaccgtggcagtttctccggcgagccacgaagagtcacaaaggttcacggtgacatggtggaaacacttaggtacgtggcacaaggacggaagatggcggttcaccggcgagcttatctgctcaagccgcaaagcagggggggtacggcggtgagtcaccagagtggcgtccagtgcacggggtgatgatcttttaccccgcgatgctatccatcaactccaggcatggatccagtcgctggtgacatgaatcgcggcgaaggatcggtcatcagcggtgaggactccctgcgctggcggtctgatccgaccaggcactgtaccatgggaatttcggtcagatgaacctggcagccaaccttggagctaaattttctcccaaacttacatagcaactaacccgaggctttgcagcaaagttgttccactataatagctctataacttt

SEQ ID NO: 169233 - DNA, 298 bp, Zea Mays
tccccgtttaagtgctctcatatgtctacgatgcttgccgacccacgcaattgcggtaggaaccctctgatcgccgggaacacactcctctgtctgcaatgttcacagtcgccgtggccagagctaattagttagtcgttgatgaaattagattaggggaatggatcggggatcgttgccccattcggccggtcttggagctcgccggagctcggccgcgctcgacgccgtcgtggacccagcgcggtaaagaattagaaaccggagggtttatgtgcaaaccgtcagcgactctgtg

SEQ ID NO: 169234 - DNA, 739 bp, Zea Mays
gcaatgttgaagcatgttagaaggcctttagcactgtgtgtgccttcattggcacaagggatttgattcaagagcatatagccttcagggtatggccacttgtggagagctaggatatgccgaaggagaccaccgccgattctagtgagggtggtttggtccgattgaagtataccttcagatttagggagaagtttgatgagccagacgatgactggctgaagtgtattgaagctatcagcgatgagctactcggggcatactccaaggccgaagataatgctttgtctgcagctttcgggggtcggggcaagaaaagattgaacagggtatttgatgcgattgtcttcgtataccctgattaacactacccgctacgagggtaagggaaaaagagaaagactgctgcttcggccaacctagctgagccgaagagcaaaaaagtgaagattctgacccaccgaccgcgttatattgaaccggctgtagtacctgaatttcgcgaagggacctctttagctgccgaagcaaaacaaactgctccgattgtgcagagcgctgaagagccgactgtagtgccgaaggtgcctacagtcaggccagttgaagctaaagatgataagaccaaagagctacaggtggaaaaagtgataaaagcgccagaaatcctgagcccaccggcagaggcagaattagcaaagacacaaaaactgctgccgcaactcccaaaaggaggagg

SEQ ID NO: 169235 - DNA, 1029 bp, Zea Mays
gtctaagtaagcttcagcatcataagaacccatgaacggtggaatagataacttaatcttagcaaatggatcatggtctggttcagaattatgatgacgacgtctaccattacctcccataccttgttgattacgtgcgaggcgttgtcgtagcggtgcataaacatcgtcgtcatcatcgtcgtcgtccacaggagagtgagctagggctggagttggtggtgggggacgagcctccagtacgtccatgcgtgtaacaagtttagcaactcatcgatcaagctgttcataggatgtcgtcgcagagtcctggtattttttaaaagcttcagtcatcgcgcgcatcatctccttcaattccaactgagagacacactcatcgtcgttaagcttaggccccttgtccttgtccatttgattctttggtcctgtcattgttagcacaaaatagagacaaaaaggcaacaaacaatatgaaccctacaactatctcttagggtggtggtggtggtggaatacaaattatgaagcgtcttaccccgctcttacaacgttcttaccagcactgcaggtggcaaacggtgaccagtgtgactgtccaacgagcatgggtgtgattgcaaaggagtacctgttctgctcgagagaaagttggagttctgagaaggctgactaaatatatatatgtggcacataagtcagtaacagatagcaatgctgaataagtgttccaagtactcgtcctagttgctggcctagaaaatgtaatagaacagttggaccaaggcacaagaaaggaggtacaagtatatgggtgcagcaagaaaacaggcttgaagcaaaataatcacagaggtgcacagaacactgttgtttctggttatgtgctacccttctttttttgcgatttttttcaaatattttttttatatttttctattttgcagcagcacataagaagataacacaccaagtttcagattttttttgtgcaatgacgcgtcctctggaatttctgcaagtttgccc

SEQ ID NO: 169236 - DNA, 299 bp, Zea Mays
gttaggtaagaggagagatggtcagagtgaggttagctgatggtaagaagaacttggtaagggaagactccatccaaggtggtaaatcttgaatcatctcgagatctgctttaactcctattctttcatgtcgaggttgatctcctccttcttgctctttggtgtctccatccgggtttgggacaagaggccaagatagatctgttatgtaggtcaagttggtcaagttgttgggtatggccgagttgatctaggtcaccaatttaggcttaagtgaatttggaatatggccttatcct

SEQ ID NO: 169237 - DNA, 668 bp, Zea Mays
gtgagcatgtcgcaccgtcttaagtcgtcgccgacttaaaccgattgctccgttagtagggtatagtggtcaccctaagccgagtaagcgtgagcatgtcgtaccatcttaagtcgtcgccgacttaagccgattgctccgttaatagggtatagtggtcaccctaagtcgagtaagcgtgctgatttcaagtccaatcaaatcgaagtcagctgaaagtcaagagtctgaatgcctttgaaaacaaaaactttattgatgctaaagtcccccgattacagagtacaatgttgcttcgagaattttttaggcctcgctagggataaaactttctaagatgctctatgttccatgagttccccacttccgtgccctccatttgagtgagccggtatgatcctagccgagtgacctctgatacaatgaatgacccttcccatagtggtgacaacttgtgccgtccttcccccgttagaattcggtgaaggaccaagtctcccactgcaaaggaccggtgtcgcacgactttatcatgatagcgcctcaaggtctgctggtacctagccgactgaattactgcgttcaattgttcttcctccagcacatcaatatcctctagcctagtagcttctgcttcagctatgttttcgaaagccaacctcggcgcc

SEQ ID NO: 169238 - DNA, 1124 bp, Zea Mays
ggggcgcgtgggccggaatcgacccagccgagagggggagaggagttttcctttttctttttgttttctcttttctttttccttaattccttttctcccttatacaaatattcatttatgtttcctaggtgccaaaatgaaatactataggcttcgagtagtctcttgtggatcagggcaactttctcttctgcccctttgatgaaggcacacccttctagggtcttttctcccatgttggatcacatcagaggggtttggcatctccttccatacatggcttcgaaaggtgacatcttgatgctggtctggtaattgttgttatacgagaattctgcatacggcaaacaggactcccaatctctgtcgaaggtcagcacacaggctctcaacaaatcttcgaggactttattgactctttctgtctgtccatctgactgggggtggtaggcagtgctgaaatctagcttggtgcccatagcttgctgaagactcaaccaaaacttcgaggtgaattgtgttcctctgtccgatactattcttcgcgggatgccatgaagtctgactatttctttgagagatatcagggcgagggtggctcctccgaaggtagtctttactggtatgaagtgagctatcttggtaagacggtcaattacgacccagatagaatcgttccctttttgggtccggggcagtccgattacgaagtccatgcctatttcttcccacttccatttgggcactggaaggggttgcagtaggcctgcgggcctctgatgttctgccttagttcgttgacaagtatcacaccgggctacatgctgagctatctcctttttcattcctctccaccagtatctggtcttgaggtctaggtacatcttggtagaccctgggtggatagaataggctgagttgtgggcttcatctagcaggatttcgcgtgcctctcactttggtacacacagacggttcctgaactaaagggttccctttttatctgctttgagatccgggagttgtttcttgctagccttttctgcaagtcccgtcatctcagtgtccaaacgctgagctttgcaaatgagatcttctagcatcggtttaacttctatatttcc

SEQ ID NO: 169239 - DNA, 496 bp, Zea Mays
tgacaggccataatctcttcttggggtccttcagcattataacatcacagccatgccttctctgcctaactgcattggaaagtgcacttctgtctgcttcgtgcttcccggcccgatcctactccggaatttcgtccttcgtaggcagtaaagactctgggacctcacagttactagacattctgccttcctatttggggagaaaaggagggacacggaggtgggccttgaggcgccgccatcgccttcaccgccgccgacaaatggggaggccggcggcggcggcggccgggtacaggtagggtttgggctcgatttcttttgaatcaccttttctccaagttcccttattgatggaaccagtatatcagactaacagtatatcctcggtcgacctccttattgatggaaccagctgtgcactaggtacctactaggatggatgtgttctgcactggtgcgtctaacagagttgatgaagacgcgaccaaacttg

SEQ ID NO: 169240 - DNA, 367 bp, Zea Mays
ttggaaccctgcaatggtgtactggtattggatggtggaatgcaatcaggaaatgggttaacttcaggtggcccaagaggattcctgacaaaattcaagtaatgattccagtacatagctgattgagaggcgggaatcatggtagattgggaagatgtatttcctgtatgcatgggtgcccacattgttgtcggaccttgagcagggtttggaaaattcaggtttcccatgaagttacaatccataccactctgctgcatgtaagccgtcggccacatagggggtggaggaggaaactgctggccaattgatgaatttgacatgggctgagaagaagtggcattgtttgatgggtccattctagtaa

SEQ ID NO: 169241 - DNA, 548 bp, Zea Mays
aaaatatttacagttatttagatgcggagtacccaaccactgaacggcatttgtcacagtcactgttagttcttagcccgttatttgtatagtagttagctctttgttataacatatggcgcattatctctctcacaaggattttttggttctcgatcgtgtctaaccggctataaaaataactgtccgtttctcccctctcttcttttctctctcctccaactcagtacttacctttcttatagcgtgttttactatacttgctctatggtgtggaggaggatcactttggtagctctttttagttgtcccctgctatagtaagtagcacactagcacccaaccaaaatattcgctgtggcgactcgacgcatatatatgactccacgatcatggacacgagtggataacgtacgcttcagtaatccacgcacgtacgtctttagagagcttcctctactgggcgacgcatggcatgtgcttcgtggtttctgacacggatgtagccgccccctcttctctccccctagtacgtgacagatgctgaa

SEQ ID NO: 169242 - DNA, 563 bp, Zea Mays
aggctgactaactcgccgaccaatgaggatgagaaattagaagaccacatgaaaaggttagacgaggaattccaacgacaacaggctcagataagcaaggtggcgaaaaagtggtacctctcgcacttcgaggtagatcaccaccagaaggtcgtcaagaagagggaagtaaagtacgattcactgtcagccttgctgcatcagcttcccattgtaagtaacaccacgccattagccgatattcaatctgttaaaatttcttttgataattagattaaaattataatggaggatatagagaatatgacgcatgcattagaaaatactcatacacctgattttttgtcacataaattgggcactaaaataactgcgtcaaaaacatcggcgacaaatgaggcttctcagtcccaaccatgttttggtatgccgatggactcatatccaggacgaccgtcaccaccatcttcgctaaatggtgagtcaactctgagcacggccagaccgtccgcacacaatcgcggaccgtccggcccccgtcagaccgtccggcaccctacgcc

SEQ ID NO: 169243 - DNA, 511 bp, Zea Mays
cggaccttactcggagggatctggggcctacccgagggacccgacatgccttcttgggagctttggacttgtacgcacaggggtccggtgtcctactgtggaggtccagacccaatgatgcatcctgggatgtattacctttccttgccacatggtgcctttagacctgcccatgtggtggggtcgggtgccgttctccgtgtgacctagagacatcatacatgtacgacgccttcatactgtagaagaggggtacccctgatttagggtatcgacagtggccccgggcccgcctcagcggaggatacgagcctgcaggtggggccaaagcttgattagcggttggcctgctactcctgcgcgcgtgttgacacaattattgtcggcccgcctatggtcatgccgactgccacgcctattccctcggttgactggcccgtgattttcgtacttaatgccaccgctgggccatgcgcgggctaccttgagtcgctgcactggttctgaagat

SEQ ID NO: 169244 - DNA, 1024 bp, Zea Mays
agagctttgtcacttgatctggtcagactacttggcactcttcacacctcagcacctcgctctaatagtcttgctctttgtgtctcctaagggtgggcatgctaccccccgcaatgccttctcccaagccacacataacttcgtgcgggattcaacaatgatcacaacctccaagcaatctaggatgtggcaagcttcaagagtgacaagcaccaccagtttgcaactggattgcctagtgccacaccttgcaatctctcaatgcaacggactaacagtcactcactagcaatcggatgcaatcactacacgcacaagtgagttagaaggctctcaagcactcccaagcatggacacgaagtccctagggaacagccagccaaggccggccaccacttctgcttgtagcctaaagggctaactagccattgccccttcactaagcaaaacacgagagcaccggatcgtccgatgcacccccatcggaccaaaggccatggtccaatgccccgagcgcactgacgtgtcattctaacattcaaactagtcattgggtgcgccaacaactaccctggcacaaggttcaacgctcctaagttcaatggccatcggaccaacaaccacaccaatctgatgtgttctaaagagctcctagagtcgctcctaggccatcgggccaatgcccacaacgtgatgtctcttcaaccgttatccaacactaacaagtggggccaaccgaggaacagtggaaccgaatgatctgacgctagtcaaatgtcatcagaccatacctctcagtctgatgcatcctagttcgccttcatcgctagggttagccatcagactggtcagccctgctggtttggtgctctctacagggtctggtgcctatctaaaggcacttctagattgagttaacaaccccttttcaaatgtgctaactccatagtaatgcataaagttctgttttatgtaagtgagttagccttttctctgacattttcaaagggttttcacttcttac

SEQ ID NO: 169245 - DNA, 396 bp, Zea Mays
gtggaattcagtgtgggagattgggtctggctacggctacaacagtgaacggctgtaggggtcactacggcttctccctccaagttgggaccaaaattttatggtccatatcagatcacacaaaagataggggaggtgtcttacaagttgcaactaccaccaaatgcacgcattcatgacgttttccatgttgctctcttgaagaagttcgaaggcaccgtgccaacacagctggtccccttaccacccttgttacatgggcgggttattccatctcctgagaagctcctccgagcaaggctgaatagaggagtctgggagctgctggtaaaatgggtagggcgctcagaagcagatacatcatgggaagaagttgaggcatttaaacgccaatat

SEQ ID NO: 169246 - DNA, 584 bp, Zea Mays
gcgctaggtccccgacgacggcagcgcgcggaggagctccggcgagccactgcaccggccgattgaggcgatgaccggcgccaatctttagtttacaccggattctacccctaaggagtatttcccctcactcaattgcgcttataatcaactatggagcgctggccacggtggccgtgagcatggcggctatactgtcgtgttcccggcgaccagaggacccctagtccaattggatggtccagtaagcatcgcagacatgtgagagagctcaaacgaggaagagggagggttggactgaccgaaaaaagggctggcgacggtgaggtgaactttgcggtggcggaaaccagttttggggagaactaggaattctcgagctctggtgaggaactgctaacaattaacggtggctgagtgcgtgaggatggggtgaagctcactgcggggtcaatttatagaagggtaagacgatggccgcgaattttgaggaggacgcgcggcggccggaggtggaagaaagtactggtgcacgcgaattcgtggccaacggcgtggcaacctccccggcgatgatgggatgg

SEQ ID NO: 169247 - DNA, 823 bp, Zea Mays
acgaatcgcggggggttgttgcggcgctcgggcccaatccccagtgtccgtctcagctgaacacgcgccccctttcactgccggtggggccacgtcgtcgggcatctcctcttccttcgccgctctcctcggacggactcaatagccggtgcgcggcgcgggaatcgtgggcaaccacggcaagtgcggggacagagtcctgcatggagccttcgagtgcggggtccccgacctataaaatgtctacgccagaccccgtggctttcccctatctacacgcctccgccagacattaccgcgtgagggagagaaatcgcgaccacctcaattgcccacttacgccgataatccgtggaattgggaaaccggggataggcgccggtgcgtggggtgatctcggaccggctgtcgcgggggggattcctgcttcctgcgccattgattgctcaccggagtaatggcgccgccacggatccgcacaccttcgtgggcagggcgcagctcggcgtgattcacggtaaggactccttcccctgactcgcgttcatctctagttcgtgtagtgtcgttcggctaaggaaataggcccgggaggggcgggagcacgccgctccggcgggttcgccgtcgtcgggtggacggcgctgccgcttgggcgctctgggatcgggagaatcgcgtgcaccgtcagatcttgatggacggatgagattagaagggagatgtaccggttcggctcattaaaacgggaccaccaaattggaatccaagggcataggattgatcgcagtcacattaaatcaggggcgtagatcttggatcc

SEQ ID NO: 169248 - DNA, 897 bp, Zea Mays
ccagactcggcctcggtcacggcctcgggagaggtttccgcctttcccgagcccagcctcggccaaatgccccgacaaaaacacacgcgtgcgctgcctgttctccacgaatcacgcaacagtggctatagagacaacaagaccgacgtctaatccacctttctgccgtaccaagcgttgtttcaaccactccgactcgacgctctcggatacgtctcatccgtacccctgtacaagacgggcttgggaagactcccatgcacccaaactggcctcggctctctaccaaatcaaaggacaagctacagggctcggacacgccccccgccgatcggccacgtcgctacagggatcgggcatcctctcagaggagaaggccattccatcagccacgccgctacagggctcggacaggcccccaccgatcggccgcgccgctacagggctcgaacacgcctcccccgatcaagccacaacaatagcacagtgcccccttgtacacccgggcctcctccttgcgcctataaaagggagggcccggggccttcactggggagaggaaagaggggaacaagaggaagaacacacgacactccaccgctccttcctcactcaccaccgatattggcacttgcttcaatcacacaccagagacttgggacacgttccctctctcgaccagcttgtacccctgctataagcacctaggtgcaagataatacaagtctcctcccccgctggatgtagggccttcttttacccgaaccaggataaatcttgtgtgatctcttgcatcgaccatccgggacaaggacacgcggcaaaaattcgctagtcggacgagacccccgggttcaaaacaccgacaaataataataatagtagtagtagtagtca

SEQ ID NO: 169249 - DNA, 1132 bp, Zea Mays
atgatgttctctgtctgttatgcttgtgtcataacttggagtttttaggtcattcctctgtttgctttatctgtgaagtccatccctctggagtagtagttgagtcattcgggcatcatatcgtcgcttttaggggtgatggccgagttattattgtcaacatttacgcttttgaagtagcgtccgagtgatgacgaagccacatcagcgtttcagaattaacgttggaatgactgatgaccatgtcggcgcttttagaggtaacagccgagtgacttatgacgacgtcggcgttttagagataactgccgagtgactgaagacgacgtcggcgttttagaggtaactgccgagtgaatgatagtaacgtcggcgttttagaaataacagccgagttagaacgggctgcgtcggccactttgaaggtaatagccgagtgatgatgtggcacaccggtgctttagaagtaaccgccgggtgatgacatggcacaccggtgttttagaagtaaccgtcgggtgatgactgggcgctttttggaaacggtatctggcccgggaagatcccatatgtactgcgctttcagccgcctctgctttccgtgccctagttcttgctttcctgcctccagatcctttctgtccttttgcaattcggctcccgctctgttcgccctcattggtctacaagaattgtctctggcgaactttgatcagactcttgaagatatggttccagaggacctgttatcagagccagcggatggtgacgcgatggatgtttgtgctgatgtgttcgacgccgggttggggtcatcccgggcagtgtcccgcgcctcatcaaccttagagcgcggtcttgagggtcaggaaactgacttggatcatcttgctctcatggaagtaactgaggggccttcagccttagaggcggctgccgcagagaacttggccctcaaggatggtgttgacgcttacccagcccccgagggtgttgccggggatgattcggctcgggtgggaagcgcaagccacgacctagcccctgagggtgttgccggagacgatccggctcaagtgggcagcgcgagctatgacccagcccccgagggtgtccgagcggggtctccctc

SEQ ID NO: 169250 - DNA, 429 bp, Zea Mays
cggtttgtgctatcttgctgcagaggagcctagaagtgtagatgaagcattagaagaaaagtgttggagggaagccatggtcactgaaatgaattcaattcaggataataagacttgggagcttgcactattaccacctggacaccgagctatagggcttaaatgggttttcaaagcaaaaagagaccctgatggaaagataaataagcacaaagctaggttggtcgctaaggggtatgctcagcgtgagggggtggattttgatgaagtatatgccccagtggcaaggattgagactataaggttgttgatcgctttagctgcacagaatgggtggaaagtgcatcacatggatgttaaatcagcttttttgaatggtgatctgattgaggaggtgtatgtacatcaacctcctggttttattgtcaa

SEQ ID NO: 169251 - DNA, 697 bp, Zea Mays
aacttcggttgttacgggtttatcacccgtcccaacgcaagtcatccagtgccaacatttcggaagaggtgatcggaaaattggatggaggaatggttttatgagaagaacgatctggtagcaagggaggatgttaaggaggttattatgcgtcccatatggtcccgcttcagccttcgaaagccgaaggttgaaatcgatgaagctgctgaagcatgccagaaggcctttggtaccgtatgcttcttcatcggtacaagagacttgattcaagaacatatagcatttagagtatggccacttgtggaaaactgggagatgccgaaggagactgtcaccgagtctaatgaaggtgacctggttcgactgaaatatacattcagatatggagataaatttgatgaaccaaatgatgactggttgagatgcatcgaagctacaagtgatgaactgcttgggtcatattccaaagcagaagataatgcattatccacatccttcggaggctggggaaaaaagagattgaacatggtttttgatgccattggttttgtttaccccgactactgctacccgttgcgagggccgggaaagaagaggaaaattgctgcttcagccaaaactgttgcttcggccactccagatgagcctacgtcgaagagcaaaaaaattgaaaatcctaacccaccggccttgc

SEQ ID NO: 169252 - DNA, 319 bp, Zea Mays
cattgcaggaaatgaagaaccaccttgtgaggccataaagaagcttgcaataggtgaagtgagacctcaagaaaaggatgatgaggaaggaaccttgtggatgaccaatgaggtttttgatgtgagcgcaaaggtggtgggtgataaatcctcgacccaagcaaacctataaacctcaagtcatccaagtcttgaagaaggtcatcaaccccaaaggatgccaaccgtggtggaaggtgaacatgaaagtgttgatgttgaagtgcctcttgatcaagtggatgatgaggaggagcaaattcaaagacaaccatcagtg

SEQ ID NO: 169253 - DNA, 952 bp, Zea Mays
attttattttcctggttttctaatctctggactgggcctcattttctgaaaagtacaggggcctgctcacaaaaaccccacagacacagagaaccccgaggggagaactgtgggttgattccctagaagtacaagggcgcttatgcaagttggccacgcgaaggggtaggcacggtttctggccgctggatctcactccgaggatctcgatcagatggcgctttaagtgaactggtaatcaaccgaaaccgttggatccaaagccaacgcccaagatccaaccacgccagtgcccatcccacccctcggatgggcgacccacggtcaagatctaaagtgctaaaagggggtatcaatggtttaatcccagccgttcaaatcaaatcaacggacgcgcacatcgtcttcaacccctggctccctctctctcttctttttctccttcctcagttgatattccacggccgaacgccataagagcagtagcgagccaccccgagctcaccatacgagcactaatctctcccgccaatgtactatcctacggccataggccctcttccacctccgacacgccggtgaggatgacccgcccccaacatcttagtctacgaagctctaccgacatgacttagtaaattaaaagggttttagggattgatgggtctcaccagaagctcaagcgccggatcgaccagcccgccgtggcagccccgcacaagtcttcaacgatcggcgaggtgacctggtccgcttcacgtcgcacgcacaggcaagcaccggaatgtccagagcgcggctgtgtcgaacacccgcctggcgaccaccctcacgttctctctctgctcccttttcttctctcccgatgacgcaaacacgtgggagtcgcctggtcaaccaaaatggcgagcgccaggccccagtttataggccgcatggcgttagtgccgaa

SEQ ID NO: 169254 - DNA, 393 bp, Zea Mays
ccccccttaaaaagaattcgacctcgaattctgacgcttctatcggaacgacaaaagaaaaggttaaagaatcaacaacactcacacacaacgaaaagttcgagatatttctgccgcatcagctcctcaagttcccagtagcctcgcgctcagactgattagaccataagaccttgacatacttaattgatctcttcctcaaaacacgctccgaggattccaagatgcgcaccggacggcactctagagtcagatcctgctgcacagcaattggttccatttcgatctgatgatccggatcccgcaagaacttcctcaacatagagacatgaaataccgggtgtacccctgccatggaatccggcaattgcaagcgataagccaagttgccca

SEQ ID NO: 169255 - DNA, 752 bp, Zea Mays
gttagagtttggctatggttgctattgtaagtttgtagctgaagcattaggctacaactttgctgcaaaatgttggtctagttgccatgtgaaatcaggagaaaattcgtccccaacttggtctgtcaggccgactaaatgaacttcgcgatggtacagtgaccggattgggccgccagctcagagacctcgccgccagtgatctcgtgctcagatctgcgtcggcgttgcgattcacgcccgaccgaactcggataagcgctccttggtaagaaatatcgcgctggagataaaactccggccactgttctcaccgtcgtcgtgtcccgccatggttagtcgtgttggcatcaccggtgttcaccattatccggcctggctacgtgcctcaacgtttcaccacgtcatagtgagtcactataagccactggttcatcgccggtgaggccgccacggtgaaggacacgaatcacaacattagtgacccattccttctccgaccgccaccgtgcccaatccaaattcactggccaccgctcatgactgctataaattgagcacgtcgttagctccgtaggataattacgcatccaaagcaccagcaattgcttccaatcgttcaccagagaccgcgaattgctcatttcccccaattttgtttctgtcgccgtggtagaaccctcactgtgatcagcgaatcccatgtctgtttatactccttgttctctcgttttagcatgcttgtgtgcccc

SEQ ID NO: 169256 - DNA, 664 bp, Zea Mays
atagcatccctgccccgaggagaatgaggtaagcccaccacaaaatccatggtgatatgctcccacttccactccagaatttccaatggcttcagtaaacctgcaggcctcttatgctcagccttcacgcgctgacaaacttcacaggcggccacatacttagaaacgtcaaccttcatccgcttccaccagaagttttgcttcaaatctctgtacattttggttacaccagggtgaacggtgtaaggcgttttatgagcttctctcaagatatccatcttcacctatgatttctgaggcacacaaagatggccccctgaaatgaaccaaatcattctcatcaatggtgaactcccggggtttaccatcgccaaccctctttcgagcttcctgcaataaacgatcctgctgctgagccgcacgcactctctccatgagggaggattgaataagcatccgagtctcctcactagcggtgtcgacatagcacaaagtgatccccaaacggtctagatcagcaatcaaaggcaaggccacttttggaaccccggacctgctaagggcatcagccaccacatttgccttccccgggtgataatgaattgacaaatcataatctttaatcaattcgagccaccgacggtgcctcaaatttagctccttc

SEQ ID NO: 169257 - DNA, 1107 bp, Zea Mays
gaagaatcaaatgctgcattggattgaagaagccgggtggaaatatcttctcaagcttacacagtaacatgggtgccaatcttttcaagtctgcaatcacggtccgagataactcttttgcataaagctagcggaagaaatagatcaactcagaaagagctagccagacatgctcagggacatagcctcgaaccatcgtaggaagaatccgttcaatccatatgtgtaagtcatgactcttcatcactaagactcacatagtagataagttcatcccctactcaagttagctgcatacccatcagtgaacatcaacatcttgatccactgaagtacttccttcctctaggccctgcttaggacgaaatcggccgtaggccttctccatgtatttccaccactaggcgacttcatctcttggtttggtttatcacataacgctgccagatccactcttgcctttacgttatcctttgacttatcaggaatgttcataattgttgcccaaagtgtctcggcaacattcttttcagtgtgcatcacgtcaatgttgtgtggaaggagcaggtcgtcataatagggaagccaagtcaagcccgacttatgtgtccacatatgctgctcaccatatcccacaaaaccaccttctgtattggccacgagcccatctatctgttgacgaattttggcaccagtcatcgctgcaggtgggtggtctgccactatgacacctttcgtaaagttcttgatgtctaggcggaatggatggtcaggagggagaaattgtcaatgtttatcaaacgacgaatatttgccaccctttttcaaccaaatgaacctaagagcttccttgcaaactgggcatgggaacttaccgtgaacgcaccaggcgcagaatagcccatacgccggtaagtcatgcatggagtactggtacgaaacatgcattttgaagtttgtcttcgtagctcagtcatacgtccataccccttcctcccaagcacgtaccaattcatcgatcaaaggctccatgtacacatccattttattcctcgggtgtccgggaattatcaacgacacgaatatattctgcctttgaaagcacac

SEQ ID NO: 169258 - DNA, 503 bp, Zea Mays
ctcatgaacgacgtcttgcgcccgtttcttcgccggtttgtacttgttttctttgacgacatcttgatctacaacaagtcatgggccgaccacctgtgtcacctccgcaccgtccttagtgagcttcgtcggcacaccctcttcgtcaagtgctccaagtgtgcattcggggtcatctccatcgcctacctcggacacacaatctcggaggtgggggtggccatggactctgccaaggtgcaagccattcacgaatggaaggtacctcgctcggcgcgggcggtgtgcggcttccttggcctcgtgggatactaccgcaagttcatccacaactatggctccatcgtcgcgccgctcaccgcgctactcaagaaggagggcttcacgtggggcctaaggctgtctcagccttcctcgccctcaaggaggaggtcacctcagcgtcggtgctcgctatgccgaccttcgacaagccctttgtcatcgagtgcgatgcgtcgtcc

SEQ ID NO: 169259 - DNA, 272 bp, Zea Mays
aatagagattacaaaagcttttgattcagtttcatggtcctttttgcttgaggtccttcagaagctagactttggctgatttggcgggttgttctcagtgatttgttgacttcatctacaactcagatccttattgaatgggatcccaggcaattctatctttcacaaacgagggcttcgacaaggggaccctctctcccctatgttattcatcctagttatggatgttctcagtctgatttttgttaaagcttccgctgttggtctgcgat

SEQ ID NO: 169260 - DNA, 417 bp, Zea Mays
cttgtggttgccgacgacttctctcgctactcttggatgtttttatgacggcaaaggatgaggcttttactcatactcgagatttgattcttcggttgcaaaacgagtttcctaaaaatgccatgagagctataagcagtgacaatggcacataattcaaaaatactcaatttgcaaccttttgcgcttctttgggactcgagcatcacttttcctctctatatgtgccccagcagaatggtattgtttaatgcaaaaatcggatccttcttgagatggccaggacgatgcttgatgagcataggactcctaggcgtttttgggccgaagcgatcaacactgcttgccatgtgtccaatcgcatctttcttcgggcttttctgaacaaaacttcttatgagctgcgatttggacggc

SEQ ID NO: 169261 - DNA, 731 bp, Zea Mays
tattattattattttcccggccggtcccccccgcccctcatcacctgtgcttccgcgaaacaacgctccgaattcaacagtgcctaaattaagtgacacaaccctaaactttcatatgactactatatagcatgtgttacacacgatcctgaggagatgatcgatgatggtggtggcgcaagtgaggagagggggaagggaagggatgagggatgattcgaataaattagttcatggggaagggagttcagttatccaactatctggactattgattttgatagtgtgttaagtttgagtacaatatgtttggtgaatttagtgggataatgagtatggggtgatttggttgtgtgacttttgcaaagtttaaactgatggattatatagtggtaagagcataactcttttctattatataaatatatgtaactttctatctttaacatatacaactttatatctaactttctatctttaacgtacataccattctatatttaacgcaagttttttattattattattttcccggccggtcccccctcccctcatcacctgtgcttccgtgaaacaacgctccgaattcaacagagcctagattaagtgacacaaccctaaactttcatatgactactatatagcatgtgttacacacgatcccgaggagatgaacgatgatggcggtggcgcaaatgaggagaaggggaagggaagggatgaaggatgat

SEQ ID NO: 169262 - DNA, 959 bp, Zea Mays
ctctatcccaaaaccctaagctcccattgacaaaaatgtgcttaactaacccctctacctcatacctgaagatggcattgggacacgtgccctagacacgccaaactcgggatcttctctcgatgttcggcagtgaggcaaacccaacttcacccctccatatctcttgatccagtcagagaaacccataagcctccacacacaaacgacaaaggaatgtcaggagaagagatctctcaatgggatcatggccataatctcagagatttggagccaatctgcgtttgaacatgacctctctctgcgctgcctcgtgctcgatgtcgtgcccagacgccagagcgcgcactggcgctcgcccgcgcacaccctaagcgcatgtcagagccatccctaggccgtgctcgcccgtgcctttaagaccaccccagacgcgcctcacctcactccgtgctcaccctcgctggccagaaacacccccttagctccagtgagctctgcgccacccgcccgagccacccgagcgtcagccaccgtggccagccatttccagagaccttcagcctcaaccaagcccttagatagtttccccgagaccctgtgaagctgctccaagcttgagccgaggcattgcctcaccggagaaacagaatcgccctcaccagacttcggtcgcccgcccccgcacgtgaaccgagccatctggtaagccattttccaattcctcgcacccacgtcttccctagcatccagtgaagctctctaacctgttcaattggactatcgcgccgtgagtaggccggaatcctctccgccgacgagctcgcccgcctgcacacgtggaccgacctactccgaccatcgccggagacgatccgcacatcagtgtgaccgtcaagacttcccctacaccctcgaccacttcaccggagcaatctcgccgtcgataagcccctcca

SEQ ID NO: 169263 - DNA, 689 bp, Zea Mays
atagtgtctgcaaaaattactaaggcgcgaaggccttgggactagatgaagaattttcgtaagttatccacattccatgagtgctctaggtcttcgccggatggtgaagcaagcctataggcattgggggaagtttttgtcttgacgatgaagggcccttcccatttgggttcaagcttgccccgggactctgttctggtggttctggtgaggactaggtctccttcctcgaattctttggggatgacagtattgtcgtgccatgccttcgtatgcgcttggtatttgttcagtgcctccagggcaagaacatagcctccgtcgataaagtccttggaggttgactcatcgacatcaggagtggttgtggagctcgctcgtggagatccgtgcttcagctcttgcggcatcattgcttcggatccgtacatcaagcggaaaggtgtaaattcggtcgctctagattttgttgtgttcagtgcccatatgactttgggaagctggtctgcccatttgcctttcttgtcgtcgagtagcctttccttgatggcactgaaaatcttgctgttggcgcgttcaactactccgttggattgcggatggtagacagaagcgaacactgccttcatgccaatagagttgcagaattctcggaagtctaggttgtcgaactgttttttgttgtcgac

SEQ ID NO: 169264 - DNA, 761 bp, Zea Mays
tagaatgaaagattaaagcaagagaacctagagaggatatggaagatcaaatcgcaaagcaaaatcaagcacacacaaaagacataagtgatttgtttcactgaggtttgattccaaagaacatatgtccccgttgaggtgttcctaaggatgggtctctctcaaccctctcaaatgatccaaagatcagacttgagccctctagtattcttgagattgcaagacaacgtctcagcaaggtactccacaaatttggagcatctagcaagtctttacaagattgcaacaccaacaccaagcacaagaatacaacaacacggagcactcacacaaggcactatcaagatacacaacgagatggctatcttcacactaatggcacttaggaggctattaattcactatggagtgttgctctaatgcttatgagtttgtttctatgccttgtgctacttggatacttgaatgggctatttggggggggggggtatttatagccccaaaccccaaaagatccattgagaggacagccaaaaacctgcactgtgtaggtataccagaccagtctggtgcaccactggacctccaacggtcacctcaatcaataggatctgcccttacctggccttggcatgtggcaccaacaagtccagtgctccactagaccccgccacatgtcttgccacatcagctagccattggagctgatcgttgaacggtcaggtagccattggatccaactagtccgatgcacacccaaa

SEQ ID NO: 169265 - DNA, 556 bp, Zea Mays
caaccatccagctcaccgaaaaccgcgccaagcctccccgagctccgccccgaggtgagactcccaccctcgtgcttgttatactctattcgtgcctgctcttagccaatttggcctcgccggcgtgtggccgtgcctgctcgccgtgcccgcacggtgtccagccaccccgacctcgtccagtgcctaggctttggcccaaggtgtccccatctctactggaactagcccaagccctatcatgaccgattgccccctctagcggccgggattcctcaccggagttactccggctcgcctgagaccttctctctgccattctcccctctctgccctcggattcatggcctcttccccgccattgagttcgtcgtggcattctctccctctctgtccaactccgacgaccctagagccaccctagctcacgcctgcctcaactccggtgacttcaccgccacagagaggagcaacgctgcccacagccgttcgcccctccccggtctgatcccctccgtccgattctgatcgcacggcccagatcgcgagataccgc

SEQ ID NO: 169266 - DNA, 384 bp, Zea Mays
aaagcctttttggcatagaagacatcacaaattgggattctattagtaagcaaaaggccttaccaaatgatttaagactaaatctcagccatacattgctcaaccagatgttagcacattgctctctttgtcactaaacgacatgaagcaaactatgagataaaaggacatgtaatcgcgagcaacacaaagttgcgattataccgagaggttattctgagaattttttcactatgttggtgtgaaaaccatagtgtgttcccgtcgaaccactttactcgttctatataggacctctatgcttgtgtcgcatacatctctcggaattgtaaatacttatagtcactgaattgactcgggatagtcctttgacaatttggtata

SEQ ID NO: 169267 - DNA, 1303 bp, Zea Mays
agaaaatcggcgttcggttaagccccgcgtgagctgtatcccggtcgagcccggcgtttcctcgtcaccttggccagggaacgacgcccggtctctaggacgtggaaaatatcccgttgagcgcacgcgaagcaaatgcgagacaacacgcgcgaaggcaagcggcggcggcgacagcgacagtggctaagacacgggattcctctccggcgtggatctcctctggcgctcatcttctcactggtattcttcttcctccctatctggttctatcgcacctaggacgtttagggttcttggttcttgcgtctgcgtttagggtcttggttcttgcgtctcttcctggatctaaagtatttaggagattaggttcttgcacctgccgtcattctccacgagttcgttcttgcgccatcaagctctattttcttctacagttgaaaattccctcgtgtgtggagccgaggtgagtggtggctcatatcgctttctatgggtcaggtaggggacagtcctggacttctgattttgggtttgtttcggtgcagatttcgtcacttggatacgaattttcacactacttcgctgaattaaatcttcaggcttttctctcctgtagcaaatcttcaggcttttcgattcgaaatttaaaaccccgtcagatctgtgcttgcgctgctcgccataaactgaacctgacagtagcaaaaggaagtgttggatattgtgatagcacagacaaaattattccatccattagtcccccttgcagtcaagataaggatgtatcagttgccagacctcgaaatcacttaactaatgcacatcatatcacctccaaaaggtggactaaacttaatgcaacgcgtaaaactttaaatttctgttttttagaggtgtatctgtttgggaatagcctcaagagagactgatcatcatttcctttcaaacccagctatatttacaccaattcatgttaacagagacaagcttcctgttgctccacctacctatacatcatgctactccacccccacgatagagttcaagttcacattcaaatagtaatgtactcaactaggtaatgctgtgattttatcatctgcatttacacatagctgccattcaaatagtacacatgttgctgcatctgtacctcgccactctagggaaatcctcttcacattatgcacatatagaagctcgccttttcacctttagttaaagctcaaaagacccgataacaatatgatcatcaagctcagtttcttcactttcacaaagtgctccacccacagatcag

SEQ ID NO: 169268 - DNA, 538 bp, Zea Mays
gtcaaaactaggatccagtcggacccaggtaccacctagggttttcgtccaagaagtaccacgcccgagtatttccttagatcgggcagaagagtgcaatgttctgagccagccagagtcagattctgatgactggagggagccaatcataagatatataaagaatgaagaggagccagatgacaaaactgcagcagaacgcatcgcaaggcagtcaactcactatactctcattggggaagagtcctcatgaaatgcattctttcagctactgggaagcaactactagatgagatccacgccgggcaatgcgggatacacgcagcatctaggactctggttgggaaggtcttcaggtctggtttctactggccaacaacaaagagtgatgcagccgagttagtccagaggtgtgaagcttgccaatacttatcaaaacagcagtatttaccagcacaacaactgcaaaccatacccgtaacatggccatttgcgtgctggggactggacatgattggaccattcaagaaagctcaag

SEQ ID NO: 169269 - DNA, 563 bp, Zea Mays
cgtcagcctggttcagtatagcttcggcttcggtcagctttgtctcggtttcaatctgtattttcgaagccttggcaatttttcctggagtagagcttgaagtttttatcgtctccagcacatctaatacactagccatcctttttctcttgggggttgctgctagatctttttgtgccttctgcgcctccactcctgccgaagggcttagaacttctgatgttttcgtcccttcggttctcggttcttcaattttgtcagccttcggcattgcagtcggctcttcaatcctctgcataagagcaggtcctttggcttcagtagccgaagaggtctcaccgccaaattcaggcactatggccggttcaatgtagcgcggtcggtgagtaagaaccttcacctttttcctcttcggtgcaggctcgcttgaagcggctgaagcaacatccttcccagaagttgcaccctttcttttctgcccccgtggcgggtaccgataatcagggtacacaaatccaatagcgtcaaaaaccctatttagtcttttcttttttcggctcccg

SEQ ID NO: 169270 - DNA, 355 bp, Zea Mays
cgggacaacaacttcagcaacaaggcgggagggcttatccacaaggaccccgtgaaacttcatacctggatttctcggaaacccatccccactattcgtcaaagctgaggatcctctcaaagctgacgaatgggtccgggtcattgagcagaagtttggactcatccgatgcacggagacccagaagcaattatttgcggctcagcagttaagcggccctgccagcacctagtggggaaattatgtggccatccagcctgccggacatcaggtcacatgggatgaatttaaattggcatttcgtgagcactacattccagaaggcgtgctccatatgaagcaagaggaattcatg

SEQ ID NO: 169271 - DNA, 827 bp, Zea Mays
tttttggtgtgcgcatgtttcgtggcatcgggcccacgaaaagatcgtgtccccgcaatctgggcagccgtactagtccccacataaatatcgatattacgctgtcttatgcttccgtttatgatatagtaatccatgtgtcggtccatgggccttcgcgttgatctcgccagcagttacgtgtatcgggcccacgaatccagcaaccgagcacgcattttttcagctcacctctcccgtaacgctcgcgcggcggccgaaccctagctaaatcgccgtcgtctgcttcctctcctccgcgcccgccgaaccctagattaatcgccgctgtgagcttcttctctaccgcggccgccgaacacatagagattctccccccgtcgttccaccgccgtcgcattcaccttctccaccgcagagacccggaatcgccttctccgctgcagagacgctgtcgccttattcttcctcatcgggaagggacccggaatcgcggaggcggtggcgccgccccttcgttcttctcctccgcacagaccgagacctcgatcttctccaccgcggcggccgaacgctgagtcccctacgccgtcgcgagctccatccccaacatcgagtcccctacgcatttgaccgagccgcgcgtcgccttgggcttgtcccctgcagtggggtcccaaaatcggccgggcctccaggcacatccacactccgataagtactcaacatttaactcttacatttacacaatctaaatcgtaaataggtttgaccttattatgttgccaattgcttgatctatcaaaaaccaattcagcataaattta

SEQ ID NO: 169272 - DNA, 411 bp, Zea Mays
ctttcacggcggcggaaaaccgatttgggggaagtgagcaattcggaggctctggtgaacaattgaaggcaagtgctggtgctttggatgggtaattaccctatggagctcatggcatgctcaatttatagagtccatgagcggtgttgtccaattcgaagggattgcgctggcggccgagaagggggggtgagtcacggcggtgatctaccgtggcaatcgcagggcaattgagctacgacagttactggatggtcactacggctcatgatgacgcgataaacgtcctaaggcgtggtgccccaacggtgaatggcgaacacgccggtgatggccgctcggccacgtcgccggtgcgaacagatgaatagccgagcgcatagtacttccaagctcaactgcagcaagatc

SEQ ID NO: 169273 - DNA, 592 bp, Zea Mays
aagccagtggcaccttgccatcggtgttgttgtccttgtcgtcgtcgccattgtcatggctgccatgccattgacgccgtcactgctgctaccttaccaccgccacagtctccattgttgctgtcgctgctaccaccgtcgcgaccacctttgttgttgttgctgtcaccgtcctttcccttactgccgcagctaccgaccttgccaaccacgtcgccttcatcaccgccgtcatacccgtcgtcgtgctcctcctcctcggactcatccgagccatcaaggatgacccgatcgatgcctcggaggtaagccctctcccctgtcgatagcctcatgaagtcgtctatgcaaacgaatgacagggagccaggggacggcggaggagtcctctcatcggagagctttgagttgctgaagtcctacgacagcggaattgaaggatgtttcctcttgtcacccctggtcttcctcctgcccttgttatctttctttgccgccatcgaagtttttggaagagaagaagaggatagcagaaaaggagaaataagagcaaatgaaggagttcgcatcacacaattggcctatttaaagg

SEQ ID NO: 169274 - DNA, 985 bp, Zea Mays
aaaatacctatcatacttcatgttggatcgccaccagaagatcatctgtcaaggggagatcgatatgaaatctctcctaccttcacctcaggctcccaatgtaagtattccagatcaatctttcaaggatttcagaatagcggggatcagctaaaacaatatatggatgaatctgttaaagcttgtgcgcgttcatatgaaaaatctattgcctcttgttttcccttgtgtcaacctaatacggagccaccctcacctaaaacatcgactgcaaataggtcatcctttacctagccattgtatggtatgccgatgaatacgttcatagcaccactacagccgccgccacctggcacgcaaccggctctggacaaagtcagactgtcctgctacgtcgcgaaccgtccgacatattttgccgaaccgttcgtccctacactggctcacgggcagaccacctagttagtgcgatatacgaccggaccgtctgggtataagctcagaccattcagccctgtagcggactgtcggccccttttgcctgaccatctaggtacgcgtacgctgaacaaggagatgcacagtatgcacaatttctgcacccatcataatagcactatgctatcccaccgacaacatattataatcatgccttacaacctcatatacacaatgcctaatatttttgacgactagagaacccaagagatataggacaggagggggtggcactaataggacacctaacacacattttaaacatttctaggaggaaagccgacaaaatattgtccgacaacctgaggttttcacacccaaacttaatggatggtcaccagacgtggtggagaaaattagggatgaggtagccaggttttctagagacaaacttggcgttagtgtgttaggcacaggtagtcatatccgaaaccttataatcaccgatttgacgtcgtgccatatccgcaaggaactaggataccag

SEQ ID NO: 169275 - DNA, 727 bp, Zea Mays
cttatagataaaatgggcgttggtatgccccattaggtgtatgtaggtctttttttgttgaatagatatttgaaccccaaatatatctccatctgtcttttgagttatttatggtgatttgatcccaggcttcatttaactccaaatactgctcataagcttgcttagagaggggtagctgaaaaatttgaaatagatgctcttgttgtttaacctcttcaatagaaagttttgtgttgcatgcaaatgagaataattctggatattgttgtgttggaatacccctattccacaggtcttcccagaaaagcatggttctaccattaccaatggtcggaaatgtcagtcccttgaaattgtgtagaaggttcagtagacttttccacaaaaaagagccaattcttctatgaccaggaagtctgcccgacatatagtaattattccaaataacgtttatccatggtaagtcatgattgttgaaaaacttgtgcaagtatttcaggagtagcgcttcattctgggtctccaacctaatcaccctgaggcttccactgtcttttggcttagtaatcatggaccatgcaactagcgatggcttttttgaatttgtgtcattccctctccaaaggcaatgcttcctgtatatgtctactgcttaatggtagtaacggggattttaagcgtgcacataaaaaaattggtaaagatgagaaaaccaagtttacca

SEQ ID NO: 169276 - DNA, 1499 bp, Zea Mays
ataagtaactcatcttcggagtcatccgtcgcgcaatcatcaacgacaacctcattccacttgctgcattgtcctgcatcacacttgtcaacagttctcttgtaataattggcttctacttcatctgtagcttgggagaatagctcatcctcagcctcagcctcatcagacttctgcttgtaataagccacctctacctcttcagcggcctgagacataaactcgtcctcttcctcttgagcacgtaatcctgcctcagctagtgcgaagagctcactcaacctagatgtgccgtcctcctcttctccatgtaatcatgcctctgcgagagcgataagctcactcaatctagatgtgtcctcctcctcctcctccatcagctcaaccgtcgccattttttcctgaacatatcttgcatgcgcctcatcggccaaatagtttacgccacatccaatctctgcaaatataatgagaaaaataagttagcaaagtcatgataaataaatagtactaacaaagttatagtatcatttttctcactcacttcccttgagacgatcagcaagattatccaacatctgtttctcggctcgagccgcttcccattcgcttgcatcctttgctctcttctcatctgccgccttcaacctcctatactctgcacgcttcgggctgtcataaaaggcaaattttgcgtacctacgcatgtcgcgtatgcgatcgttaatatacgaatcgacgagctgagatccacaacacatcttctgtcccattagtctcttggactctattatgcgcatcacctctcctttgtcgtcgtaactctcccaactatatttcctcatctcctacaaaaaaatagtaagtaccggtataacattacagctagtgcaaaaaaaataccaacctcatcgtaatcgaccatatgtccacaaaaatatccaacaccaagctcggaaggaactaatccatacttagcttcattaccacatttgtagagtactggatcaaacttcaactcttccgcccactgatttttttcttttcctttacctctggctctggccaatgggacaaaggaccatacaaccactctctgaaacgacacttacgccacccgtatggctgcaggagaataaattagtaatttattgtaaaaaaataactagtttatacatttagcgcatcgatgggctcacataatcaatgttcggacacacaaactgcttctcagtgtcttcgtcgatgacagcacggtctccacaatcgcatcgaggcggtgagtccatccatctttctgttgctacctccttctctgcatccgtcattggtggaggattcgggggaggaggtacccaacgcttaaaacgctcatgactagtccttccacacaaccaattagcaaaaagaagatatcgagggtcaaatttatcagaaccgtcgatccactggaaaaagtaacacctcaggtgcccctaaaacaatggaacgaagcacta

SEQ ID NO: 169277 - DNA, 779 bp, Zea Mays
attcgtgcgccatggccatggataagcacaacccagtaaagatctcggcgtctgatccactcgagctcggttgcggctaagcatgccgtactttcccccagttcgtcggacgctcggataaccctcaccgccgtcgtactgtcgccgttgcgcaccacgtgccttagcactggctcccgtcacggtgaatcatgcggtgcatgcccggtgatcaccggagcacctgccacggtgaaagaccactgtgtcatgcgctagagcccttttcctctccggccgccaccgcgccatcatcaattcaagcgctaccgccccctggaatctataaattgagcccactgttagctccgcaacctcatcacgcaccacaccgtctagtatcgctcccaatcttgcaaccgtgagctccaatttcaagtttcccccaattctgttcttaaacaccgctgggtcgagctcaccgtggccagttctccacaggtttaatcataccatccttgttcttgttttagcatctctgtgtgctggtgatgctcaccaactcgcccaattaagctaagatcccatgaatcaccgggaacgtgtagattgttagttcatccgcgcgctcaccgtggccagaaacatttggttagccgttcctgaaattaacttaggggaaacatttactaggtcccgaatctagtttaggccgaagaaggacgccgttcctcgcatgaatcagccggtacgcaggctcgccggagctctgtcgtgctgctcgccgtcgaggatcgggc

SEQ ID NO: 169278 - DNA, 424 bp, Zea Mays
gaaaggcccagtgtaattgtatgagcatggatatgggaattaccaccctgtgtgatgagttgtgcaagctgaacctggaaattgtttcttcgggtaacttaagctatatctcagtggaacccacgttgcaagagcagatcatcagggcacaggttgaggataagggtgttcaggttatcagggatatgatcaagcaaaaggcagaaaaatacaaatgtttccggcaggacaacaaaggaattctatggtttggagatcgattggttgttcccaaggaccctgagcttagaaggaaaatactagatgaagctcacctttcaaaattctccatgcaccctggtagcaacaagatgtaccatgacctcagatctttatattggtggactagaatgaaaagggaaattgccaagtacatatccgagtg

SEQ ID NO: 169279 - DNA, 749 bp, Zea Mays
cgccacccggccggggagatttcctccccgacagtgaggtttgtccacctctcgcttggtctgaacctattccgattggaatccttgatgactaggggcctggccggttgagtctgaactagtagaggtctagctagatggcactcgaccagggtcttgaatgcatttgctgattggactttgcccgatatagtttcggctgacatcattttgaccgatcttgcgtttcgtcgttgggtattcattgcggatattttgcaggtcacgctgctttagaaaatcacgaaaaatccgggtggtacacccaatgggtgtatacccattgaaaagtgtacattgtcatgtccagaaatagtaaactaacatgacggggaggtgtaatgctaagtctgagcggttgacattgctttattctggtgccatgttacgtgaatttgagtcagcagtctgtcctctttcttggaaacttaagttgctattgaagtcctacgactgtttgctgaacaggtgggaaacgaagagtcgccctttgccctctttaatagtctgcttgcccttggtcgtctacctcacttgctcttgttcttatgcgctccacttctccttttcctactggctcgagagaaccatggccggtgggaaaggaggcaagggcaagcgtaactcagcgtacgggaagcgcaagcgttctacgcgtcatctaatggaggactttagtgactcgaagtattatgaggaggagttctcct

SEQ ID NO: 169280 - DNA, 586 bp, Zea Mays
aattaatcgggtgctacacgatgcaggagcatgggcgaagcaatggggaaggttattaccggcgatcgaagccccgacgatgctggccacacgacgatgcggatttgcggccacgaacgggcaacgacgagaaatcgccgctgttctggtgacccccgaccctcctggttgacaccaacgtgagcgcacccttgcggcgaagctccagtgcccaacaccagcgccaactcccgcccagaccgaagatgggggagcagcgcccttctcccggcgcgaggcacaaatggcgccgcgacttagctaacggctatggagatgacggtgcggggcgctagtctacgattgcgaggtccgcggagctgcggcatggaaggaggcaagggcgcccggggttttatcgctgtggtcaaacggttcgccgccgagaagcccggcggcagctgcgccagccgttcgcgagtgatggagacgatctgggcaccgcggagtatgacacctgggacccacgcgtaagcgacgggcagtgaggagcacgtgcggtgagctcatgagttagcgtaggggtgtggtgaggccgcccggtggg

SEQ ID NO: 169281 - DNA, 312 bp, Zea Mays
ttcaatttccgagggtttttacttagcaagctctgaaggcccagcttcggcactagcctggctcattgcagcttcggcttcggtcagttttgttttagcttcgatttgcattttcgaagccttggcaattttccctggagtagagcttgaagcctttaccgtttctagcacatctagtacacttgccatccttcttcttttaggagtgaccgctatacctttttgtatcttcggcactgttacttccgccgaagggcttaaaacttctaacatttttgttccttcagtctttggctcttcggccttatcttt

SEQ ID NO: 169282 - DNA, 282 bp, Zea Mays
ctaagtctcttgtgctaataaaagtgcatacactgttaaaagccttctggcatgcttcaatttcatttccaagagcagtggctggccttctgatgccgaagcgggaccaaataggatgttggatgatccccttgatatcttctctttcaactaagttgttctttacataaaaccactcttccatctaggctcctggccaccttttctgaaatgtcgggactggattgctcacatccgagcgaggcacgaagccgtaacaaccaaaattattatgatatttct

SEQ ID NO: 169283 - DNA, 621 bp, Zea Mays
aagcctttctgcgcctgcatgccgttacacttgcacatggcacggggaaaagtgactcgactccagccctttttactgccacaccgcccagcagcgtgaattgacttgtgtactgagcttctgactgctgggaccatgggtcccggtgcagtgcagcgcaccagcgcaagactgcagggaaggtacggtacgtgcgcctcggtcccgggcgggcgcgtgagggagaaaagtaaaagctgccgcggaagggctagatgccctgacctgacctgacagtgcgatcggggtgtgagttctctgccgcgtcgggattctcaccactgtaaaaaagaaacaacaaaggaatcagcgatgttatggccgctgtcttgttggaatatacgtcaacagagaagggaaaaaacgtcacattttaacagcaaatataataagcccaattaaaccaggtgacagcagtagtacacgcattacctgaaacagacgcgtcactgaaagcccgaaaagtgcggtccggtgccatgcatgtgcgacattcatgtgtgagcaccccacccggcggcacgttcccaagttttggaatacccgcaacacagatttgtggtaccggtcctccgctcccgg

SEQ ID NO: 169284 - DNA, 435 bp, Zea Mays
ccattaacccgagaatcgacggtccccgcgacaccgatgttatcccacgcctgcagtcgccggacttaggtggtggcgctcgttcagacggcggtgagctcaccggagcacaaccactaggcgctacggagacccattcctcaccccgagtagcgctacgcgaaggaaatgacactgcagaccatattggtagcaactcaccggagataggcatggcaaaaacaggaatcctcggcaattgaggagccacgtcggctttccaccaccggcgagcgattcggtaggccctggtcgatctccgtgccttgaagcctcacaaatcggtcccacacgcctaagtttatcccctggctatctcaggatcgtccccccactgttgccgatgagttatggtagaggcggatctctctccttcccctaccttttctctgcaat

SEQ ID NO: 169285 - DNA, 607 bp, Zea Mays
actctatccattttgtgaatttgtcaatggcaaccagtatatgagtatagcctccctgagctttcttgaaaggtccgatcatgtcctgcccccagcatgcaaacgaccacgttacaagaatggtctgcagctgctgcgcgggcaagtgctgttgcttcgacaggaattggcacgcttcacacttctggactaacttggcagcatcactcctcacagttggccaatagaagccggatctgaaagccttcccgaccagagtccttgatgcaatatgtaccccacacgggccggcatggatttcatctaacaattgtttcctagtggccgagtgaatgcatttcatgaagactcctcctgcacctctcctgtacagtaagccccttataatggtgtagtggctgactgccttgcgatgcattctgctgcagccttgtcatctggctcttcttgattttttatgtacctgatgataggctctcttcagtcattgggatttgcctctggctgactcaaggcattgcactcctccgcctgatccgtgaggatgctcggctgtgatatttcttggacgaagatcccaggcggagcttgggcccgactggatccc

SEQ ID NO: 169286 - DNA, 616 bp, Zea Mays
cacgctatgccgagtgacgttagccctcgtccccaactgcgcgaactcccgcgacaaccgcgcatgtccccgtcagccccgacagcgcgtgcggctcgcgctcccgcctcggcgtcacgcgacggcgggggggcgcgctgctctatacacgttccgccaccgccaggcgcggccgcggcaacttggctatttagttcgagaattctccaggggagatggagcacggagtccctgagatcgatcttgctctcagcgtcggagagttagctgcacaccccccgatccccggccacgctccgatcgtacgaggctagctgctccatcatcgccctcttctgggaccctgcccctgccgtgagtggatcaatccatggacgccgcgcaggtgcccgcggcagtggtggtcgacgtcggggcgctcaccggaccgatagggagcgaggcccccgctgcgccgaaggtaaacgacgcgtccgtcagcttcagtgcatcgatacgttcgtatcggcaacactggttgtttttcaatccgcacattgcgtagttccgtggccagcattcagcaaaactgggacgtgcgctccgcatgtttgtggaaatgcctacggccattgca

SEQ ID NO: 169287 - DNA, 391 bp, Zea Mays
atttggaggtgcattaccactctggtaaagccattgttgtggtagatgctttaagcaagaaggcccagtgcaattgtatgaacatggatgcaagagtcaccaccctatgtgatgagttgtgcaagctaaacctagaggttgtttcctctggtgccttgagttatatctcagtggagcccaccttacaagagcaaatagtcatggcacagattggtgacaagggtgttcaggtcattaaggaaatgatcaagaagaaggcagaaaatacaaatgcttccgtcaggacatcaaggggatcctatggtttggagaccgattggttgttcccaagaactccgagctcagaaagaagatattggatgaagctcacctttaaaaattctccatgcac

SEQ ID NO: 169288 - DNA, 1032 bp, Zea Mays
gtaacattaaggccctatggttcgttagtatttggtcccaaaaggcgccaacatactttttggcgactccagtagggatatgagcgtttcagatctattagataggtcatgatggctggttccaaacatcgcaccattgtctcctctgataatatctttagccgactatggagagcttgtcggccggttaatagtagtggtttaaagatctcacgaagctatgaaatgatgaagtgatgcaacaatgtgcccaggtgcgcgaagaagagaatgagaagttcatgtcacaccacatggtggatcgacaccagaagattttcaagcctttcggtcgatgagcagtagtggtttgaagatctcacgaagcagtgggatgatgaggcactgcgagaacgtgcccgggtgcgctaagaagcgaatgagaagttcctgtcacacttccgacaccagaagattatcaagcaaggggagatcaagctagactctctcgtgcctttgctccaaaatagcaatgtaagtaattctaataataatcaatctacttagaacaacgtatgggagtggtggaaaaattactcaacaaacccacatgtacatttgaaaaatctattgttcctagttttccatcgcatgaggttacaatagaggcaacctcaccaaacgcatcagcgacaaatggacctctacagtcccagccattatatgataagccaatgaactcatactcagggtagccactgctcccacaacccctgtgcgatatgacaatgcccctgaccacagctgtactatccaagtataatctcggaccatctggcccagaccggactgttcagtaatccactgtggaccgttcgatgtcgcgctggatcgtccgatgacgtaccacagatcgtctgatgtacaacactcaaattggtacaatatacacacaacacgcgcgacactctataccacaacagcactatcctcctccatctttggcccaccaaagccaaagcatacccacacctagggctgaatactactcaa

SEQ ID NO: 169289 - DNA, 346 bp, Zea Mays
ctccaatatgctcacaagtgttccaaatggcctcctgcttccattcaacccgggcaacacaaggatatatagccccctctccaaaactagccgttatgggtcaattgccccttttctgcgcacatgcggacggtctgcaatacaagcccggactgtccccacaagaatcccaacggctataaacggttataaaaatgtcagagcattcaaaaatgacttgcggacggtctgcccctcaaggtcggacggtccgcgatacataaaactgagccaaaacgaagttttgctgactctgcacatttgctgaaatttgtactgcggacggtccgcacctggaccccggacg

SEQ ID NO: 169290 - DNA, 1070 bp, Zea Mays
aaaaaaattagtgggcggaagagttgaaatttgatccaatactctgcaaatgtggtattgaagctaagtatggattagttccttccgagcttggtgttggatatttttgtggacatatggtcgattacgatgaggttggtatttatttattttttttgcaccagctgtaatgttatagcggtacttactattttttgtaggagacgaggaaatgcagttgggagagttacgacgacaaaggagaggtgatgcgcataatagagtccaagagactaatgggacagaagatgcgttgtggatctcagctcgtcgattcgtacattaacgatcgcatacgcgacatgcgtagggacgcgaaatctgccttttatgacagcccgaagcgtgcagagtataggaggttgaaggcggcagatgagaagagagcacaggatgcaagggaatgggaagcggctcgagctgagaaacagatgttggataatcttgatgatcgcctcaagggaagtgaatgagaaaaatgatactataattttgttagtacaatttatttatcttgactttgctaacttatttttctcattatatttgcagagattggatgtggcgtaaactatttggcggatgaggcgcatgcaagatatgttcaggataaaatggcgacggttgagctgatggaggaggaggaggacgacacatctagattgagtgagcttatcgctctcgcagaggcaggattacatggagaataggaggacgacacatcaaagttgagtgagctcatcacactagctgagacaggattacgtgctcaagaggaagaggacgagtttatgtctcaggccgccgaagaggtagaggcggcttattacaagcaaaagtctgatgaggctgaggctgaggatgagctattctcccaagctgcagataaagcagaagccaattattacaagagaactgttgacaagtgtgatgcaggacaatgcagcaagtggaatgaggttgtcgttgaggattgcgcgacggatgactccgaagatgagttacttatagattgtgattctaattgaaga

SEQ ID NO: 169291 - DNA, 1709 bp, Zea Mays
ctagtagagaataaacctttgatttggtatattaatcctaactagaattagactaaagactaatgtgagaattagttctaggtctatgatttttgagcgacgaggagtctttaattccggttgatgcacaaaatcaatttggacggactagattgcttcaatcctctccacttcaacttcaagagtgagtattaatggggttcctaatccgcccatttgtcacgagagaggcctcaggcatggggaccccctctcaccactactttttgtcttggcgataaaccccttgcagaaaatcctgaatattgcctcggagactggtgcactaaccaaattgggtgggcattccccaccctaaggatttccctatttgcaaatgatgtggccttatttgttaagttgattaaaaggaaatcgagtcaattgttagggtactaaccttatttggtgaggctactagtttggtgacaaaattttgaaagtccatgatcgtcccgatccgttgctagggactcccgcttgatgacatcattggctactttccagctagaagagcagccttccccattcgatacctaggtctcccactctgcacatctaggctcaggaaaggagacttccagttcttggtggacaaggttttaagcaagttaagtagttggaagggagaaatttctcggtggcggatcatttaactcttgttaaatcggtgattacctcacaaccaatctacctacttttcgcactcaatgctcccaagcaaattctggctattatcgactctagaaggagataattcctttgggctagttttgaaacgctgaaaggcggaaaatgcaaggttaattggaagcatgtggtgagactaaaggttcttggtggcttgggggtccttcacttgggctctttcgcgcgtgccttacgtgtgcggtggctacgacataattgcatctcctcatgtacatcctagggcaattgggagttaccttgcaccaagactgataaacttatgtttgcggcatcaacagatattgtgattggtgatggctctaaaatatcattataggatagtgcctgggttggtgggatgagggccaaagatctggcgcctcgcctatttaccatatcaagaaataagaataaatctttggtaggtgcggtaagaagcaatgcctagatcactgatcttgacttgctcgatagaataattaattctcaccgtattcacgagttctacactctcttgtcccatgtccaaaagatccaactccgactagggtatgaagatgtcattaattggaaattcacttcagaccatcgctacacagtaaatcggcatatcaggctcaattctttggatcgacttgcacaaagtttgacctgttcatatggaaggtttgggtgcccccctaagtgcaagttttttagttaggtagctattcaaaattgaatctagacggccgatcatttagcagccataaattggccacatgcatcatatatgcatggggccctggagtctaggatacatcttatcgttgaatgtgagttctctaaacggatttgtgaggacattgttgtttagatgactattgaggaccttaagccgttccacgctcattgttgtcctggtgggagagatcggccatgttggcgggatgcaaaaggaaagtcctgagatcgttgtggacttgtggcgtggcaaaatg

SEQ ID NO: 169292 - DNA, 381 bp, Zea Mays
tctgctcgcatcttgtgggtccatataatttctggtgtgtcagaatcagacaccattgcaccggcaaaagcagaagggccactgcgctccaagacatacagcaaagattctgggaggagtccacccagtacactacgctttgccaaaggcaaagatgaagatagtgctgcctcttcaccaccatgaaaagcttgatgagtatgtgtggccgaaaacaaatgtgcaattgataggagatttgaaccaggatatgccaatgcaaagtaaaaggcaccagtaatgtataatcgaatcatagctttagggtttcttgtaacaatagccataagcaatgaggcagctgcttcaacaatgcttggttccccagtaagcataacctat

SEQ ID NO: 169293 - DNA, 489 bp, Zea Mays
ttttactatgtcaaagctcgagcgccatagggacgagttgaaaatctcctagaacgaggtatcacaacttggcaggttgttgtcttcgaaagattccgtcatcagagagctgcgtgccttgaaaaaacttgtttcataggagctagaggtttttcatcgtgatgttgaggctgcccgtcgtgaaatcaaggttttagaggatgaccgtgctatcatgaaggcttggtgtgacaaagcaatggacaaggccgtccgtactggccagatcctgatgaagaggcctggcgttgtggtgcctgatgacattggggctgatgtacttgctgcgtcggctacttcaagtaatccttctacttctaggatcctacagataaggttcctcgcgatgatgctcctgcacagtaaacgtggagtgaaagcaaacattgatttgttcaaacagaaaacatttttcattgagatgacatttttctaattgatcgtgttgcc

SEQ ID NO: 169294 - DNA, 1000 bp, Zea Mays
tatccattcattatcacctgggcaaggcaaatgtggtggctgatgcccttagtaggttcggggttccaaaagtggccttgccattgatcgcagatctggaccgtataggggttgctttgtgctatgtaggcaccgctagagaggagactcagatgctcattcaatcctcccttctggagagagtgtgcatggctcagtagcatgatcgtttgttccaggaagctcgaaggagggtcagcgatggtaaaccccgtgagttcaccattgatgagaatgatttggtttgtttcaggggctgtctttgtgtggcacagaaatcagaagtgaagatggatatcttgagaaaagctcataaaacgccttacaccgttcacgctagcgaaaccaaaatgtacagagatttgaagcaaaacttatggtggaagaggatgaaggttgacgtttgtaagtatgtatccacctgtgaagtgtgtcagcgtgtgaaggccgagcataagaggccaacgggtttattgaagccattggaaattccagagtggaagtgggagcatatcaccatggattttgtggtgggcttacctcgttctcctcgaggcaaggatgctatatgggtggtagtgaatcgcttgactaagtctgcacactttattcccatgaagaccacaaattcagcttcagagtcggttcccttgtatatgaaagaagtaatcaggcttgacggggtgcctaagtccattgtttcagatcgagactccaaatttgtatccaaattctgggagagtcttcacagtgcattgggtaccaagctctctcttagtgtcgcttttcaccctcagactgatggtcagtcggtgcgaactatccaaaccttggaagatatgttgcgtgcttgtattctgtcttggaagggtagctgggaggatcatctcgccttggccgagtttgtttataacaacagctaccaggctagcataaagatggcaccatatgaggccttata

SEQ ID NO: 169295 - DNA, 565 bp, Zea Mays
gagggataggaaaattctgcagaagctagaaagcacaaccggagcaaattgtgcctctcataaccaatttttctgttgatattttgcatgcaaattctgcagtagctcgtcggctgggtggcaactacagcctacatgttcttttagaatagtgtggacaagagcagatacctttcgatactcatttggggcacatcgacacactttgaatcttttcttgacaataacggtaagtatgtattctccaaatcgtgcaggaaccagcttcttttgttttgactgtccccatcttgccagaaatcattgttgtaaagggctattgaggtcaaccgagagagaattatttctttgtcgaaaattggaggaataatcgagagaagtggccatagttggaaagatacttttatctacttattatagattattaggcaactggtgtttctatgtcagttactttaaggcccaatggtttcgttgtctcaggtatatatttatctctctttctcttgtcttttattagctactaactgggcagctgcaagaaaggtgcaaggaaggtgctgat

SEQ ID NO: 169296 - DNA, 348 bp, Zea Mays
cagtaccctgagcgcggcgaaggatacgtcggtgaactcatatccggtgatcccgagcgcccattaccgattctactagcactaaatgaagtggacggccatgcgaacatggagggcgggtacttaccgaaggttaatgcgcagaaacttccggtgacggcgcgacgcgggatcgaggcgtcgcgcgatcgactacaagaaattggggcggagctggcgatcaatcacgggtagcgcgtccactaatgtctttccctgagcctgaaggaggtctccgaccacaccgacaatgcagacgacgactagaccagaggtttccccgcggcgggtcttcttcctcacagcggc

SEQ ID NO: 169297 - DNA, 858 bp, Zea Mays
tacccgtcctcggatagtctcgaggcacagagcctgggatcgagcgaggtggagtcagaaggagaggtcgggctaatcgagaggaagccactcgagtggatttcgcgcctgacccaggactaacccgctgtaagtgagtgaccaaattaactatgcttggcaccgagccatagtgggcgagtcggtcctccttccactcatgacctacgagtccctaggcctacggcccactcatgacctatcgagcctaggtatgagtgtactcaccgtctacaggacccgcaacacgacgaaccgcaccgagacctaggctatggagaccaggggacggtaatggcacaacgatgataatgatggtgtcggagctgttcaccgcccacacatccaattttaaataacatggccagagaagcctagacgaccgaagcgcatgcctacaagcatgactttgctgaggtagaacgtcctctttatcatggcgcggtagctcctaccttgagaagctaccggtaactgaccccacctcagcctataaaaggaggagggtcgggggggggcacgaggacacggagagacgaacgagatacatacagagacatagagacgaactcatggcgggagacggatagacgactacacgccggaggactacggaggccgagaccaaggagctcgccaccacgacgcctaaggcttagctaggttgagagcaccagatttgtagtccttaggcatacgagacttgggagcatcctccctctctcgcccgcttgtaacccctactacgagcgttgagcaacaaagatgtcggtagcacgagccgccaaatactggatgtagcgacattttgctcgaaac

SEQ ID NO: 169298 - DNA, 1259 bp, Zea Mays
cttttctgcgcaagcagacattatgcaattcaagcccggaccgtccacacaagaatcccaacggctatcaatagttataaaaatctcagaacattcaaaaaagacttgtagatggtctgccccatgagctcggacggtctgcgataccaaaaaccgagccaaaccgaagttctgctgactctgcacatttgttgaaatttgtactatggatggtccgcacctggaccccggacggtccgcaatacaaaatatttgtactgaggacgatctgcactcaggcctcggacagtccatagttaaaaaatgaaagctaaaacagaactatccaagttctgtccaaacactagtccttcaactgtagacggtccgccacctaggactagacggtccgtagtaccaaaaacatcatgaaacatacaaactccacgtttctgcccatcacctcaagttagacctgcggacggtccgccatgctggcccggacggtccgcggtacctcaattcatcccacattaaaaaaacgtttttgaataagtttttctttcacaaaccaaagtattgttagccctcatgcaaatgcaccaactatatgagcaatgaggcattaaagacatgttaagtaagataattggtccctcttgatagtacgtctatctagcctactaactcggtcaattatcaacctctaagcacctcttgaccggtaaaacaaaaacatattatcatacctttgccttgagcattcaattccatgtcctcaaatgatgaacaatgggcatccataagtgtagccaaccatgataccttttaccatttgtccatagcatgaagttcctccatcatcatgatcatcatcaagccacttgatcaatagtccagatcaacacttggcttgataattctataatgacatgatccactccatgttatcacatgaccttcttggttcattaatctcatagcttgctcttcactgttgctttatgtccatcggtgctaagtccttgctcttacttcaccgccacgtggtccctcaaacatgagcctctgacttgcccttcacactagccacactagccactcagtccatcgaagccaagccatatctcttgatcttatccatatagccacatgacaccatgccatgtcttcatatgccaatgagctcctttatcacactagttgagcatctcaatatcaccaagccacatcaccaccatgccttaaataactcacactagtgtacctatggactaatc

SEQ ID NO: 169299 - DNA, 900 bp, Zea Mays
caagtctacaaggcagggtgaacgactaagtccctaccgagcaagcctgcgaggcagggcgagcaatcaagcccctgccgagcaagtctatgaggcagggcgaacgaccaagtccccgccgaatggacccgcaaggaaggaacacacgcgggcgctgctagcccatgacggctgcgacaagatgcaacatcaccaaaccacatgcagaccatacatacagtaccaaaaggtctctgacagacatgatggaataccttcgcatgtgcccacgaatataccctcactaactcacagggtcggtcaactccagtcacggaaacctcagcaccgaagtctctacagtggccgatagactggaaaggacaagacaataccccataccgggtgtatacctacgtgtgctggatagtgacgcaaggtgtatgacaaaatatgaagctatactagacacaaccccgaacctcatcgtaagcccactttgtgggactcgccaggtaccgcaacattgacacagagcaagctatagtaacccgtatggagagcggacgggacagaacgtcgtatcggtagtttggcagagcatgctgccatagacaatgccaggagggctagagcggcccaagggcaacaacccgaggacccccaagtagaatacaagtcccaactgtaaagtccacctttgagccataaaagggcaggacaatcttccttctacacagaagccacacttgttgtaacacgcccctgagcaatataacaatcagcagaacactagactagggcctcgacctaaactataataacccctgtgtctcagttcccagcttggatccccatgatccaccattcggagagagttcgtgtttcacccccaccgatcacaaatctattgtcctaccc

SEQ ID NO: 169300 - DNA, 401 bp, Zea Mays
tccaagtctgcagagcggagtctacctttcctcaagacactgtgtggcgcgaaagacttcgcatggggaccagaacaagcggcagccttcgcatcactcaagaagcacctgttagaattgacaattcttaccagtcccgactcctcgctgcctctgctgctctacgtcgcagcctcgccacatgcagtcagcgcagcgttggtccaagagcaagatagagagggcacgacccggcaatgtccagtctactacgtctccgaagtcttcacgacttccaaatgcaacatgatggaattagaaaaaaattcctacgcagtcgtcatggcatcgcgcaagctgcgccactatttcgaggcattttaggtgcgggtcacctcggacatgggactgggcgaactatt

SEQ ID NO: 169301 - DNA, 828 bp, Zea Mays
gtaaattcaggaacgggcacttcttcagcagcaggaaccgaaggaccaacatcccgatccaaactagatactcgtcggagacgtctctttttctttttcggctcgtcagcagaaggatcaagttgattggctcgggaagggcgccttgggcgagtactgacaggcttctgaatatccaaggttatatcagtttctgggggaagtgccaccaccaacgtcccagcaggagcagcatcagaagagtcctcagccagcaaatcaagcatagcacttatttatgcgtcactaggatccagaggcacctcaaaatggacctgccgttcatcatcaggaattcccccgagtgaagcaaccaagacgctaatttcttcagcagagggtcgcactctaaggcccaaactgccatcagtgacaggtgggttcgacacaaaaagagtgaaggccttgggaggaggcaggttctaggctgaatatgccactggggcaccaacatttgataccttgcctctaagaatcatctcaagtcggttcaccaagtctacagagggaattcttctgttggtgacccgagttgagtcagctaggcctcggtacaggtaagccgggtatgccctgtctttcaacggctgaatattcttgaaaacaaaatcagcaaccacagcctcagcagtcagacccctctccttcagcagcccaacttcagctagcaaagcacctgcctcagctacctcctgatcagtgggggattcggtccaacttggagtacgaacatccggctgtcttcccgacctaggggggagagaattttcatggttctcaacaataaac

SEQ ID NO: 169302 - DNA, 1080 bp, Zea Mays
tggaatgacaaacatcactataatatgcgctaggtagatgatgtctagtgtgttgttcctccgtgttccattttctatgtcaccaagcattgtaatttttcgcttcctgtctagcagaagtagacaaatttgtaattaattgaaaagtaaacccataacaatgcaatcttataacttgagtatttacaatagcgatcagcaacttaaacctgcagtttagttggccgtaagcaagaatgcggctgttatagctaactatgcagttctccaccatgggcaccgcgacaaccttgaacatgccatcctaatggttacccttgctcaaaattcagatactaaactgctcacataaacttcttgattgaattttgagtccgtcaaataatctcccaattaagtccatcatcctgaacaacacgaaaaaggagaagttgcacatttttgcacagttaacacaaaaaaaaagtcagcagaaggaaagaagggcgaatgctaaactgagaaacgagagtaacaagaagacctgcatgacatgttcgtccgtgtcaaggtcgaaagtgaatcggggctcaggtgtccaatctaggtaaggctttgattctattcatatctaacgcaccacgtctcccctgcagcgacaccttagtgctgctaaacggccagatatggaccgcaacctacaaatcggagcagttaagcgaccataagcattcatgtgctcgatgaaatgctaatgggcacaatcccgcgcgaggagagctctgagcagctcggactgtagtccagacggtcgctcgagtgctggctcgacctccacgacgacgagcacgcccacgagatgctcatcacttcgtgttggatcaggggtaggggggctcaccttgacctgggtcggatctgttaccgtcgcgtgcgtcgcttccggacagccgctcgagtgctggctcgacctccacgacgacgagcacgcccacgagacgctcagcacttcgtgtcgaatcagggagagggaggctcaccttgacctgggacgaagcagcaacccgctctcctgtgttgcgcggcgctatccacgcgagg

SEQ ID NO: 169303 - DNA, 301 bp, Zea Mays
gtgctggcatgttatatttttttccaaatgtttctttgcctcagatgccatcacggactcgcgcacatgatggtgtggggacttcccgcggtcgggaagatactcctaactcgccaccattactacccactttggccgaggctatcgctgccctggtcaatgctactgcggataatacgtgcttcttacgtgaaatggcgggcaatcagttctaacagcatggcaggagagctcctcctcaaggaccgcgtgaaactacatatttggaattttctgagactcgacccccacttttcataaa

SEQ ID NO: 169304 - DNA, 400 bp, Zea Mays
gttttgctgccaaatttttagtcatagccgaagcttgatcatcgtgctcagacgaaaccttgcttgtgaatctgcttcggcacaagtgtaagagcttcggaaaagacaaaaaaaacaacaccaaaaatttcaagtaagtcataatcaaatggccagagttcgctctactgcaagagtcgatcgtgagggagacgagaccgaagctgttgaaactgttcctatttcggaagcaatgaagcgatctaggttggtaacaccggaagacgtccctgctgccgaagcagagcaagcagatattgaagagaccgattctgaagatgattacaacatcgcagtgccgagcaagcctagccacctggacttcggaaagttgaccatctctaaagctgattttcttaag

SEQ ID NO: 169305 - DNA, 847 bp, Zea Mays
atgcgcacggcccaaaattcttcctgtgaccgacttgtgggcccctctcgtcagactctcctgttcgccatctctgaccgcagcagcgcgttatcccccacacaagctccgtaaccgaatcaacgaattcaccgcgtggactgcggatccaattccttgatccacgctcggactctatccgttcttgggtatacaaattgaatcccagcgccgtgctccaccagctgcacctcctcacagccatggcgtggggcctgttcctcttcgacttcccctccgcgttggctcgctttcggccgtcgtgaggacaccagcaagctccatatccgagcactcgtgctccaactccggccggtcaccatcgccgggcgcatcgaggatcaggactggctgccaccgtcgtcgtaggcggatacgctcgccgccaagcggtcctctcactcgcgccgccgattctgggttccggatggtcctagcgagtcactgtgtcatcctgcacctattcgtgaccgccacaggtgaatcaatcaactgagctgctgttgatttctcgctgaagtggaggtactcgaaccactggtatgtttatgcccccgtcaggttcgtagattcccgtaccacgcgcacctcccttcgggttagtctagggcactgggtcgtggttgggtgagtcaccggcgcggttccgccgttttggctgggcgctgttgctcgggtcaccacgggagaagaatagatgagagagagaaccgaggaggggatgaagacgatgtcctggccatcggatgcaccaggaacggctctgattagaagcaggcgataccccttcgcgacattaaatcggggc

SEQ ID NO: 169306 - DNA, 833 bp, Zea Mays
tggtgatcaaggttcattaaggttggtccctttattgtcataggaaactaagaattataaggggatgaagttgaattttaagtcaaaaaggtgcatatcagtgtgcttcaaaatatatgtagtaaaaaatcttcatccactgaggactccaggggtttataagggatgtttggatagagaccactacctactgaaatatcaagtttcgctcactttggagaagtaaggagtggggtattaattggttttgtttgctgactgcagaagtagacaaaagagatatttgtgctatgcctgtaaaccaacccaaagtcagtgctctgtaatgtttcactcgactggataagtgaaggctgaaatgaactagggtggtgagacttggttcactggctaaagactatattgcacctgttactggattgattacaaccaacatttccccctgcccattcttttgtgcacactcttggatgagattcatcacccctatgttatcttctacgtgttgtttatgcactgctgcttagtgtccatgctaggggagttgttggcatccccagggtccctctccatcgtgccctagccgagctcagtgacatctctctacctatcccttactcaaattgttgcttctgtgattcttgctgtctcaaactctagttagtatccactgcagaggagtggggtagtacttctgttccagcctgtgtaaacccccttctcagtcaccatgagtgatctgctctagttgatgtgtgccaacctctgtggtgaccatgccacctgatttcctcaccttctcgtggccaggccatttcgagcccagaacgtag

SEQ ID NO: 169307 - DNA, 651 bp, Zea Mays
atccacagaaacctcactttgcaaatagttcgatgcacttgtgcaagaagcaaacgagggagcattttcgcaagccttttccacactgccacagtggctttttcctaaagtgctagtcattggatctgaaaaggaaaaaaaaagtgcccgcaaagctggtcctaagatgcacaactttgtcgtgtgtctggtccccttgccgccaatgccctaatatctggttaaataaatacagtctccccctaattaactccatgtagttcgctcattaaggataagatgtttttttgctcagcgagtataggaaagtaaccatctgtccctataggtaagctagaatatcgcttagtaccttttatatgacaattttgcatctagtgacacgtgtaaatacgatttttttgtgccatctgatacctaatttgaggaatctaaatagcatatgggggagtgtattgtagagaatgacgtgcatctcctaacaagcaagcaagcgtagcactgctagtagtaggttggatactcattgcattgcaccatctaacccactaacattgtccactcgcgcgtccatgcctgcttgcgctagctacaccatgtaggcaacagcgactgcaagtatcgatcggaattattacattttgttgagag

SEQ ID NO: 169308 - DNA, 612 bp, Zea Mays
cttgtcttttttccctgacttattagagccaacacagccaggtgggttcttctttttcttcagggctttgtcagccagctcctcttctgacagattgcaaaagctctctcctaagcgtttgatagtcttagctgatagggaggggggaccctcaaacttgtgttgacacatcaaacagttcttcttctggcaggaaccctgtctgaacccagcccgggcgtcacggagcctcttgcttctcctcaggtcagattccacaacagcaagttttggcggggaggaggccgagtctgagggaacagaagcgtcgtcagcagattcctcagaaaggaccgaatcaagaaacttgtcatcagggcacttcttggggatgacaaagggatgtgtctcagtctctggctccatcagagcacaaggaatatctgaagacaggaaagtttttgaccaactaaaagaatcttcatgcagcaagttggataggaaaaagggtgcccatttcttgggaacctgcaccgaggtcaccgaattaccagtcggggcaaagtagttagcccagatcctatagaactgggcattccttttcctttccaagtgactcagcaaaacatggtc

SEQ ID NO: 169309 - DNA, 487 bp, Zea Mays
cgtgggccgattatacctggtcggcccatcaacacttgtcccgcacggcccagccaggggatctacacgcgctcactcactggcatcatgacccacatcgtcagccgcttcccacccagaacacacgtcctgtgcttcacagacaaatggaccccactgtccagggtcatcttcaacgtcgccgcaacagacttggtgtctgttcatctcgatccgtaggtcccgggccgagcttacaggtcaccgcttgcccttgcgaaatccgcggcaccataaatcctgagcccgtgaccgccctgctccctcgccggacccagtgaacgaacgccgagaacgccgccatggattccgctgagagtcttcacctaattcaatgcatatctgatcccttccccgggattctcggagaccggttcgaccgtggaatttccgggatcctgtaacaacctagatgccgatagaagcgaactggcctcgggcgcaagcc

SEQ ID NO: 169310 - DNA, 777 bp, Zea Mays
accagatgaatcatcatctccaacatacaccattcgttttttcgatgttgatgtctcattccactgtggcgctgcacctatgattttgttccttgaaccaggaggccgtcctcgcttacgtccagataggttagccaatcgaaccctattatcctccacagttaaacacgtacggctgttgtgaccatcagctatgccacatttctggcacttcctgctcatcttcttagctcctttcgcacccaatttaagaacttgttgctcactacttttgattgttcttcccttaggcttggccttatctggtcatgctaagtttacaccttccatatgaaactctagtttctgctcatcaaagatattaagtcagttttcatattcacatattcatcatatactgtagcaatgttattacctttctagcttccacatccgtagcactactatcaaccacacgcatatcagtgctatgtgccaatgttaatatcggcatattacattgatcatcgttagcattgcattcatttgtattagaccacattaaaaatttcctgtgaaataacgcaaactccagtgaagacacaaattttatagagcagcataaataatacattataaaattttgttccatacctcgttcccatcatctaatttgcataaattgtctataactatgtcttctgtttcatacgcttcgacctatatcatcattacatacatggatcattatcaacatgtaattatgcaaaattcataataacacgatgtgcgtacctg

SEQ ID NO: 169311 - DNA, 544 bp, Zea Mays
tcgtcactttttacatcataaactctatagactatttaatctttctccgtacataatctacgtgatacttaaattctttcgcagtaatatacatgatacttaaaccgcacgtaatcagaaaaactcatcgtaaaaaaactgaaccaaacaacccattaacacaagtttcttccacaaatacgcagatgggacaaatattatcatcctaaattgaggcatcagaagcgagcatccggtaacagtgcttgagctgtcgatggagccaggcaggagcgtgatgaatttttcccaggctcgtcagatcagctagccccacacatctcgcacacttgggtgccggagtggggatcgtgatcgccagttcagtttcagttcctcctgtgcctcccacactgttccgctgccccagtttattctacgatcaaaagcggaatttcagatcgtgatcgccacagtagtgttcattcacgaaaaaaagcacattttttgcgcgtagatttggcgattgtcccatctctctataaaccagatgtttaaaggtttt

SEQ ID NO: 169312 - DNA, 906 bp, Zea Mays
ttccgtcttatcttatgtatccacaagtttagggtcgattattgaagaatgttgatgaacaaagtttagatttagagtttttgttgcatatccattcgttttaatctgttttgtgtaactgtatatcctgtaaccgttttcgttttcggctaaactgtcctcgctcccgttttcgataaaaaaatatggtaacgaaaacgtgagagattttctataccgtttctgtctgttttcattctaaccgtgacgtactgatactgtctttgaaaatgggctttgggtcctctcggagcccatttgctccatcgtgagcacccaaaacggcccaacgcacacccctgtgcccccaatcccttcttcctccttcccgggaccctgccccctccgctccttccacctcttctccccacctgcacactgagaaccaccgcctccaggaggcagccgtcgccgctacccgggctcgcagagccatctcctacaagccgtttctcggttcctaaggctcttcctgatctcttggacaagaaaaaggaggtttattgactttagttgggggaggagcgagaggagaggcgatggtggtggtggtggtggtggtggtggtgagataggggttgcatacatacagggtgatggggagctgcgcgggagaggagtggcccggcggcgtgacggggccggacgccgaggtcggagcgctcgtctgggtgcgccgccgtaacggatcctggtggcctggccggatcctcggcatgggcgagcttcccgagaacatcgtcatcccgccgcgctctgccggcacacctatcaagctcctcggccgcccagacggcagcatgtccgtacaaaccctcgctctacccctgttgctctctgtaatcaatttgttatgctccttgttca

SEQ ID NO: 169313 - DNA, 534 bp, Zea Mays
ccctaggtgagatttgaagtgttcctgaatgattttttctttttcctcatgggctaccgctaagtttccaattgggggctgcaggcaatggatgaagttcttacgtgctctggagctagcagataggtggaagaacttagtgttcacgtcgtccaacctaatgcgagtgaggcgagcccgttgacggatcctcgatttttcaattacagcaagtcctagtgccctggctttaagtgcattcaggagatccagttcctcttgagtgagcacacgctcctcttgagcagtttcgaatcggaggattaattctttggaaattgcaagatgtaatctcgtgtcacccactttggtcttacgccatagtttgatggcctttgctgcacgcgctagtttgatatgaaggcgcttcatgggtgtaaaagaggaacgaagtggtttcagccaggcaatctgaaccgcctccttgaatccctccatctttacccaaaaaattccgaaacagaaagaggggctatgtgtcatcatcaattctcc

SEQ ID NO: 169314 - DNA, 560 bp, Zea Mays
gcgacattaatttcccaaaggtccgagtctattttataaatagtaggactaatttgtaatggtttttatattgcataggacagcaggttgattatttaagaacctgaggactcttgcgcaaaaaaggacgtggatgaaggggtatggttcaattctgaacattggatgcatacccaagatcccaaattagatctttaaatagcaccaataggtatgcatttgtagcggttggattaaagatcaacgatagagcgccccagagcgaccgggccgtctaccaatcaaccgacgacgaggatgcatcccacgaaaatggggggatatgttttaatcctaatcgtccaacgccgatccgactgccacgaccacatctcacaacaatgccccgattccccaccgaatcggtatccactgatctaatattaatcgtcgatgcacgatccaatggtccgaggcgtgcttctaccctttgacctccagagcggcggcgcgaacccgacctacggtggtgctccgccggtggatggccatcacccgtactagcgcaaaatccccatgaa

SEQ ID NO: 169315 - DNA, 562 bp, Zea Mays
ggatggcgagcgttttggaggctgttttagaatctgcgagtaaaattgaagcaatacgcgttttggtgccaagtgccatgggcactccaaggaaaagaagcaatacgccaccttcttcttctgctgaggcttctgggagtaaaattgaagaagctccaaagataattactgccagtgctgtgggggacagatatcccccgggtccactagaaggctagaaggcctcgcgtaaggctttgggcccattatttcgcaaggtcatcccttcgtgggccagggaaggaactgctggtggaatggatcgacgcaggattggatagactcgggcccagacggctcatgggatttaagtattatccacaacattgatccgattctcccgcgcagcaccctcagacgttggaactaaatgaagataagtcgacaggattataggaagataagttcagtcggttcactattacttaggtgcacgtcgttatcatacccgcatgtaacgccccacgatcaattatataaggcctagggggcaccccatcaaaagacaggtcattcatcaacc

SEQ ID NO: 169316 - DNA, 371 bp, Zea Mays
ataattgataattgataaaacagccgaagatgataattgataaaatattcaaatggttgccgacctaccgtgctcttggccgcctgacgcctgtgagcgatgagactgcgcctgtgcctgcgccaactacttcgcctgccgcttggtcgtcgcctccgccggctccgtgcctcgtctcgtcaatcgtccgccgtcgtgcggtaggaagcagacacgtttaatttggaagcagttgaaccgtcccttaatttattaggttaaaaactcctgatatctagacttaactaggcaaaaactaccgggtatgccgtggcccacccggcataccctgtagctccgcccctggcggcatggcatccttcacatcagct

SEQ ID NO: 169317 - DNA, 1027 bp, Zea Mays
cagaaagatccagctttctgagaacatgttcaaactccaccaactagagcgagatgatcgtataatgaatatgtacttggacaaggttgctccttatgcaagagactactatgtgtatatgcaaaaggacattttggcaaggcttcctccaccatcagacacatgaccttcaaaatgtgtggaaattgagctcagttgagcgtcatcgtcagttgtatgcaaacgatatgtttgttagtctgtcgtagactatgtcgtcacttgtccattttgtttctgtgaacacagactatgtgctttgacccttttaatttgctggagttctcagtttgtcgccacagcgtctggcaaacagatggtaccatatttccattcttgaaatacacaagtcacatgataattcttgaaatgcacatacccgtttgtactaccaaactaagtaggcaaacaaatacttgtttgcaataccaactaccaaatttactaagtaggcaaacaaatacttgtttgcagtacattgaaaaggcagaagacactacaaaataactgctgccatcctttgaaactgctacaaaataactgcaaggtcatcgccgtccctttgcctgaaaatcacagcaaattcagtatgcaaaaacataaaggtcgtttgtgcatacaacatagcgacttaccttcaaatttcaccttgacgattccacacatgctctatcaaatctttcttgagccgcccattagtgtattcgcatatgattttgttatgcccgatcaactcggcaatttccggcacatctcttatcgatgcttcatagtctgtcccagcaagtcgttgtagatttgattcaaacttgacagccatgttatgcaatatgaccacacagtctacaatgtacctcaagtcctcctgataccacatatgtgccggtcctttgattattgcatattgtccttgcaaaacaccgaaacaccgaagccacggattagatgaagaagccatcttgtcagtaggatagctgcaacctaaaaa

SEQ ID NO: 169318 - DNA, 448 bp, Zea Mays
gcgggtggaggttggcgaggtggctgatcttcctagtgcgaggaccaagtgccggcgacgaagggtggtgttgaagcatagcgtgggcgaggtttcgcaaagtggtaggcaccgtcgaatggggatggagcaggaccgtcttcgagtagaccggtttggtaaacaagagctattgtcttcgccgattgggacgagcattggtgagggggatctgcagaatctttttgagggtgagtaattgaaaataatgttgttcaattatagggaggcgggcatcatcccgaaggttgagccgatttagtatgtggttccttcgctgagtgtatgtaactgcaacttgtattgtaatgtggcctgttggccgttttcgcgcacttgtgctaatccggctgcacccttaggcgacttttgcgtggagtgtcgattgacacacttattgcgcttatcc

SEQ ID NO: 169319 - DNA, 958 bp, Zea Mays
ttctctcatccctattacctctgttggctccacatctattcctactgctcatggtcctttttctcttaatcacgtcctggttactcctcaaattatcaaaaatttaatttctgttcgccgctttacttgacaataattgttcagttgagtttgacccttttggtctctctgtgaaggatcttcgcaccaagaccgtgatcgccaggtgcaatagttctggtgatctacccgttgctaccatcaccaccacgtccccacgccttggttgctacctccaccaccctctggcacaaccgtctcggtcaccttggatcagaaggccttcgtcacctcgtccattcagctgctatttcatgtactcatagcacttgtgattccctttgtcatgcttgtcaattaggccgccacactcgtttaccttttacttcttccacttctcgagcatcacgccattttgatttaatacattgtgacttatggacatctcctgttgctagcgtctctggttacaagtattatttagttatcatcgatgattgctctcactatttttggacatttcccttgcgcctcaaatccgacacctttcccaccctctctcatttttttgcatacgtccacacccaattccacaccaccatcaaagccgtgcagtgcgacaacggtcgagagtttgacaacctctcctcccgttccttcttcctcactcacggtgtttcacttcgcatgtcgtgtccctacacatcccagcagaatggcaaagccgagcgctctatccggaccattaacaatgtcatccgcacccttctcttccactccagcatgcccccacactattgggtcgaagctctccataccgccacctatctcatcaaccgacaccccaccaaaactctcaatttctccacccctcaccatgcgctttttggctccccacccacctatgaccaccttcggg

SEQ ID NO: 169320 - DNA, 533 bp, Zea Mays
aaggctatcagcagtgggaaatttgaactattctatgccgtggcgcatatggctcacatgaggttctctaccgagtattacctctgtgcaatttagtgctaatccttgtatgtatgatgagttttagggtttatgtattggctcgttacagagtaaatcaattttgtttcataaggaggcgtttaatttgttgattttgttgggttctcccacctttttgggctgaagggtaacggcggtactatcctgacccagcaagacatgggcagcatgctattagaattgtgtactaccaggtgtccccaaaagttatgggaaatataagcttttctttacagttttagagtctcagataatcccactgaacagcactaggctaggcctattagggaatttcgtatgttgagtggaaaaatataatcgacacacttggtgctagttagctactgaccaaaagcgtaggttccagacaatcaatatgtcttgtaacattgtgctaaggttctcatcctatgactcactgcaaaaataat

SEQ ID NO: 169321 - DNA, 594 bp, Zea Mays
tggcacaagagatataattcaatagcacatagcctacagagtgtggccacttgtggagagctgggatatgtcaaaggagactactgccgaatccagtgaaggtggcctagttagattgaaatataccttcagatttagagagaaatttgacgaaccaaatgatgactggttgaaatgcattgaagctaccagcgatgagctacttgggacatattccaaggccgaagatgaggccttgtccgcagccttcgggggtcgggggaagaaaagattgaacatggtgtttgatgcaattggcttcgtataccctgattatcattacccattacgaaggcaaggaaagaggagaaagactgccactttagccaccactgttgtgccgaagggcaagaaaatgaaggttctgacccaccggccgcgatatattgaaccggccgtagtgcctgaatttggcgaagggacctcttcaaatatcgaagcaaaacaaactgctcccgccatacagagcgctgaagaaccgattgtagtgccaaaggtgcctacagtcgggccagccagagatgatgcggccgaagaatcaaaattggaaaaaac

SEQ ID NO: 169322 - DNA, 606 bp, Zea Mays
taggaattcatctaagtaaactcaggtgtgaattttgagatattggttgcaccaaggctacctaactatcaaaaagtagtcaaaccaagttgatgctgtgtaaaaatgacaaaggtaagctatttgttgcactgcacattcagtgaagtggctcgcttagtcccacgaagaggagtcaaacaagtgtccatagtgctgctctgccgctgtggtgctacaaaacttgcacacaagaatgctggacacactcctgttatgtaaacattatatccaagcatacgttctgtcagtctccttgaccttttgccaagattcaagagcagctacatttgggagattgttaactggataatattgaattagcatatgcagacccattgcttgaagaattgggttgaagtaaatttactctctagtagtggttctgcagttgtattctttctttagaagcctcggtgcttgaaggattcgatggaagtaatttactttctagcagaggtacttcatttctattatttcttctctgtgtattgttcaccctcatataggtttttttaggaaagagtatgcagtatgcacattgttgtgcattcttcatgtctacac

SEQ ID NO: 169323 - DNA, 304 bp, Zea Mays
tttcagtatatcttttcttatgctggaagactgcagagtcagatctgatatgtgtgtggtttctacagatgtctgagaataggtgcagaagtgcgaggcgtgctcagcctgaacagcaggcaccccaagaggaagcagccccgcagcagcagttgccaccaccacttctgatgaccatagagcagatgttcttgatgcagacccaagcagtccaggcaattgttagaccttagtagctatgcaatagccaccacttcctcagcctccagtgcaagtccagatgcctcaagtgcctaaagacaag

SEQ ID NO: 169324 - DNA, 809 bp, Zea Mays
atcgctcaataacattgcgtagcgatgagtgtgcatagttgaatacttctttgctcccaataggttgcctcgcattttgccattccgaaatgtggtacttctgacccttataaggtgcaaggtacccctttctatttggataacctgaatcgacaagatagtatttacctgcacaaacatgaaatacaaatgttaaatacttaagacataaattaataccatattatacaaaagtacaacatatttatataccttccggtggatgggggaacctgtccgcataagttatcaaagtatcttgtaatactcttgtgtcatgtacggatcctggccatcctgtgacaacaaatgtgaacctcatatcgaagtcacaaacgaccattacattctgcgatgcgtaaccgtgccggccaatatatttcgcttgctccgaggctgggactgccgctggaaagtgactaccatcaattgcgcctatgcaatccttgaagtgtggccaaaacctcgcctctcgcaaacgaggatgaatctcgatgaaatttgggtctttgggcttgattatgtcagatgacatcttaaacagtgcattaaggacttcactatacttgcgactaattgtttccaaggagtgaccaaacttattccttatctgcctaaaagattgtggtcccccacatgcccacaagaatatgccaagagcttccatagtactgacaccccgacttggaagcagaccataattttctaccaacgtgtcatgcaatcgtctaaaaacagttcgtcgcatgcgaaacatgtcgaagcagtcg

SEQ ID NO: 169325 - DNA, 654 bp, Zea Mays
cccaggaggaagtctaacagagggatggcctctcgcgtcgagacccgcagctgaggaagcccaacgtcaacgacacccatcgaggcaggcccccggtccgccatcaaggaatgaacagtggggacgacggtccccagcaacgcctgggtcttccccaaaggtgatgcaaaactcaaaaaaggttcgggagcactgcgctctctgaaaaccgcaaccccagggagagtcagggcgatggaacgaaggtgtcatcacacatcgcctttggagtgccggatccccaatcagaaagggctacaggatcaaggaaataaagttatcagactcatgagataagggaaagcacccaagggagcgacgaaagctacttacaaattcgatgaagcccggctcgggatgcatcgggggacactcgagggctataggaaagtatagtcgtgcttccccatgcgcctccttttgagtgtccaatgcttggctcacccatcaggcaacctctgagttgcttggaaggacctcgacacttggggacgaaaaatccttccccatcttgagcctttagaggagccactcctcgccgaaggtaggcgccaatgacacccgcgcctgtgactcctttctctcggaggaagagcacccccgacatatggctcc

SEQ ID NO: 169326 - DNA, 399 bp, Zea Mays
ttcatttatcaatatcttttcagcaccagctactatgtacagtacaacagggcatgtcttgcccttctactcattgccctgcagccctatatggccaggcagtaggcacttgaggagttctaccaactccattgactttgctagaaagagacaaagataggagctaagcaattactcaacaattcttcccctaattgtgatgctccttcttgatctcctccactcccaccttgttcctcaattcctggagccaaagacgcccaaggggcttggtgagaaggtcaccgtctcaccgagctgtcgagccgtctcgacatactcgatcttgatccgtgcttcctcaatgcagcccctgatgaaatggaacttggtgtcgatgtgcttgctgcagtggaggat

SEQ ID NO: 169327 - DNA, 406 bp, Zea Mays
ggcttcgaccgtggttgcggaaaatgattcgggtgattctgtgtctaagttttttgagtctgatgattctgggagttcggtggtgtggatgaaagagtcttcggatgaggatttggattattttgcggcattagatgtggctgcggcggaggcttctccgcgagtgttggatgctaaagttcccggtccgagtgctgggcgtaggcggcgaagggttgtggcgaagcgtagggtgagtgaggtggagggtggtcgtcttcgtgtggacagggctggcaagcgggaattgttgtcctcgccggctggggtgagcataggtgagggggagttgcgaagtctttttgagggtgaggagctgaggataatgttgtttaactatagggagatgggtatcatcccgaaggtt

SEQ ID NO: 169328 - DNA, 739 bp, Zea Mays
ttcaagctagcattctgggagcattatgttccagagggtgtgctccatatgaaaaaagaggagtttattcggttaaagcaagggggagacattgtaatgcaatatctcaacaaattcaaccatctctcccagtatgccattgaccaagtgaatacagatctgaagaaaaagaattgttttatgaggggactcagtgacaggcttcagcggaaaatggcaacatgcttggaccttacctacagtagggctgtcagtacagcactggcagtggaagctaaaactgcaggacatggaaaatcaaaggggtttggaggtgaaaagtcaaatcaagggcctgagaagagaaccaggttggtgatccgaccttttaatcaaaatcgttcttcgccttgcccaccttcatatccattcaagcagcctgtctttattcgtcccactactgccccagctcctaccaatcagctgagtgcccctggtactcgtttccctgctctccccagttcttccagtggttgcttcaattgtggaaagtccggacacttcatcaaggactgcccatacccgaagcaaaataaaaccaatttacaacagaactctgggaactccaaccaaggaaatgggaacacggctaatacttcaacgggtaagaatttcaagaaaactggacggatttattatacccaagtggctacaacaccagagggtgagccggtaatgatgggtacgttccttgttgcca

SEQ ID NO: 169329 - DNA, 1030 bp, Zea Mays
tgaggaactacaggttagatttagaattattgaagccaatatcatcagattaggtgtgtttgtgccatggtttagccaccactttgctgcataaacaagttaataattacataattgtgacagaggcaagaaacaaattgaattctaaaaccatgtattcaaaatagaatcacctggattaaagttcttgtttctcctttgccttatggcaatttcatgtccaaatgtcccttgttgatcttggtacatgtagagttcttcaattattttgtcttgtgtttcttcatcaccaatcatctttgtaatgcaattaatcactccagctctaaaggatccatcatgctcaattttagacatctttggataataaaagtaaggattcaagtagtacccaactaagtgaagtggagttttgagcttgctatcccaccgcttatcaataatatcccaagcaactttgtagcggctctcatcattgtcaaacctctcagaaatttctttctttgcctcaagcattaatccatgaaagaatcccattgctggtacatcactgtccagtctcctcaacacatttgccaatggttcaaaaaaatttacagctatatcaacatttttccaaaaggttgcagatctcacaactttattggctttctttctcttgtcctttttcaagtaacccaactctaacacccttgtgtgagcatacaagacattagtgacctgccttgcacttgtgatagtttgctccactggctcaagcttcccaagatcctctagcatgagatctaggcaatgagcagcacatccattccaaaatattgagggcctctttgctgtcaataggcttgctgctgctgtattgacactagcattatcagtcatcacttggacaacatttgcctccccaatctcctctatgcatctgtccacaaggtcaaatgtacttaccatcttttctctcacccgagcagtccactgaatctaagaagcaaactccatgagcactatggacaactaaattcatcactcc

SEQ ID NO: 169330 - DNA, 611 bp, Zea Mays
ctgacccggccatcaatttatagagggcttaagcggtggtgctcaatttggccgagcagtgctggcagccggagggcagaaagagtactagcgcaacaaaacaggtggctttcaccgtggcggctcctccggtgatcaccggacatgcatagcacggttagccgcaacgtggtaaagcatttggacacgcggcggatggcagggatgactcaacggcggtgagatctcatttgatcgacgatgagaaaaagggaaaagtgtggcggctagccggattggtgtctagctcaacgacggtgatgatttttctaccccgcgacgttatccatttaccctgggcacgaatcgagatgccggcggcacgaatcgcgtcggagagatcatcggcggcgaggttctgaaccttatcctcccggggcactgtaccatggcgaggatcattcagtgcacctgacagccaaagtttagggcgaattttctctcaattttatgtagtaacatgatcatcaccctttagcaaagttatagctctaagatccagctacaatattgttatagcaatcctaagcaaattcttgctcgatcatgtttgaattcatgcccaaagtcac

SEQ ID NO: 169331 - DNA, 453 bp, Zea Mays
ggactctttgaggaaggaatacccttaacttttatcgaacccagtctaaatctcaagggcgagattcttttaagtggggtaggtttgtaacatcccaattttgatttctgaggttagaaccctaaactcctaaccattactcgcccaccagccaaattggcgccttgcgcctgtgccgagccatcccgtcaccaccgtctgccccgagccatcccgtcgccaccactgtgcgccatcatcgccgccgaatcaagcctcgccgatgctcaccacctctcctccccctccccggccgcctataaaaggaccgcccgagctctagccttcttcacaacagcttcggcaacccctcttccccttccccgagctcaatcgagccagcgcaccgccctctccctccactccggtgagccctccctcccttctctggtggcctagagttcaattggtttg

SEQ ID NO: 169332 - DNA, 1953 bp, Zea Mays
tggacgcgtacgggaggttcggatccctcgcggatgctctcctgttgttcgacgaaatggcgcgccccgacgcggtgtgctggaacatcctcatcactgcatgctctcgccgtgggctttttgaggacgcctttattttgttccggtcgatgctctcttgtggcgtgggacagggcatgccgactgcagtgacggtggctgtaattgttccggcatgcgcgaagtggaggcatttgcagaccggcagaagcgtccattgctacgtggtgaaaactggtttggaatcagatactctgtgtggaaatgcattggtgtcaatgtacgcaaaatgtggtggaagtagggtaatggttgatgcacatagagcattttcttctattcgctgtaaagacgttgtttcatggaattcagtcattgctggatatatagagaatcagttatttggagaggcgcttgcgctgttcagtcagatgatctcacagggatatcttccaaattattcaacagtggctagtattcttcctgtgtgctcattcacagagtttgggaggcatcatgggaaagaagtgcacagtttcgtggtcaggcatggtatggaaatcgatgtatctgtttctaatgcactgatgacacattattccaaagtgcttgaaatgaaggatgtagaatcaatatttactagtatggatgtgagggatatcgtatcatggaacaccattattgcaggatatgtgatgaacgggtatcaccatagagcattgggcctgtttcaggggcttctgtctacaggaattgctcctgattctgtttcttttatcagtctgctcactgcctgtgctcaagtaggtgatgtcaagacagggatggaggttcatggttatatttttcaaaggccagtacttcaagaaacatccttaatgaatgctcttgtcactttttatagccactgtgataggtttgatgatgcttttcgtgctttcaccgatattctgaacaaagactcaatttcatggaatgcaattctctctgcttgtgccaccagtgaacaacatatcgagaagttttttgtactgatgagtgaaatgtgccgtggggtaaatcagtgccagtgggattcagtcacagtcttgaatgttatacacatgagtaccttctgtggtattaagatggtccgcgaagctcatgggtggtctctaagagttggttatacaggtgaaacttcagtagcaaatgctattctggatgcttatgtgaagtgtggctactcacacgatgcaagcatacttttcagaaaccacgctgggcggaacattgttactgacaatataatgatttcttgctacttgaaaagtaactgtatagaggatgctgaagtgatcttcaaccatatggctgagaaagacctgacttcatggaatttgatgatccagttgtatgcacagaatgacatggatggtcaagctttcagtctgtttaatcacttgcaatctgaaggcttgaagcctgatattgttagcattgcaaacattcttgaggcttgcattcatttgtgttctgtacagcttgtgagacaatgtcatgcctacatgctcagagcatccctagaagacatccatcttgaaggagctcttgttgatgcgtactcaaaatgcggcaacataaccaatgcatataacatctttcagatcagcccaaagaaggaccttgtcacattcactgccatgattggatgttacgcgatgcatggaatggcagaagaggcagtagagctgttctctaaaatgcttaaacttgacattaggccagaccatgtagttctgaccacacttctgtcagcatgcagtcacgcaggcttggttgatgctggaatcaaaattttcaagtccatcagagagattcacagagttgtaccaacagcagaacactatgcgtgtatggttgatcttcttgccc

SEQ ID NO: 169333 - DNA, 310 bp, Zea Mays
actgcatctgcttatcgcgcgcacactcacttcatttcccgctgacacctagggctcacgcgtcagggttgggcatcgtcaacagctcgcccgagcttcgcgcagatggtgggtgaaccgtacgcgacttcaccgcgggcaggggaagtggaggttgttgcacccgatggcgctacctgaggataaatcatcgcattcccttccctgaccacgtgtgcgcccttgccctgttccaccatccccgtgaatcacctgttggagcgtcgctgtggaccgtgaagggaggcggccgctgctgcacccgttcttc

SEQ ID NO: 169334 - DNA, 434 bp, Zea Mays
ggaatacatccatgaattattctaccactgacatgctttctgttgctagattaaacaccatcggatcattagcgggggctgagcctgacaggtgactgactttccttggtggtccgtgagaaggactgtcttgtttgcacaacttatgatgcctttgtgcttggttaaccaatccattcctaagatcacatcaattccttgggatggcaagacggttaagtctgccaagaacactacctcacttaaaaggattctgacttgggagcatttgagctggcatagaaggtctgaccctagggttcgggtgaccaagggaatttctaggtgggtagagggaatgccatgcttttccacacaactagtggctataaaagaatgggatgctcctgaatcaaaaagtacagtagcgggagtaaattcaacaaggaactcac

SEQ ID NO: 169335 - DNA, 654 bp, Zea Mays
gacggattgttaatcgagaagcccagggggtttgatgataatctgttgtggcagtatcacatgtaacgctctcgagccctcggatcaaacatcaatggctcagacctaaccatcgaaggggtacgccacggtgatcgtaggatcctagatcagcggtcagcatttagtatgctaggatctaatcccagccgcccgaaacaggatcaatgacccatatgcatatcagacccgatctaatcttcttcgtccgatacgaatccgatgacaatgcgccacccaccccaacctaggtcgagcaacgccagcggcgcttgcgcctacacggtggtgccatcgccagcgaccaacagatcagcgccccagtagaccaaatcacaccccgctaggtggcacacgtagataagggcccggagaacttcagtgtggcactaaccgtggaaggaagacgacagcgagggcatacctcgatgaatggcagcacaggtggcgattcttgacctcggtgaggaattgcgagaacctcggtcaccacccgccaagccacaactgtcgacgtgttccagatgcacgagctagtcttttgttccagtgatcagaggttcgacgcctgcacgctataacggcgacgaccactccctcatggtgctgattccc

SEQ ID NO: 169336 - DNA, 690 bp, Zea Mays
caactacttcacttacccatgtgtctactccgccactctattttcgtcaaatgtaccgtatgcgaaggagccatttccttcccatcttgaagacgttggtgagaactccctctacttaactcttcgaactaacgtagtcaatcgtaatggattctcccctcaccataagtgcacagctgccctacgtatgcttgcgtacggtagtattgctcactccatcgatgagtacatcaaaatggggaaaggctttgctttagagtgtcttgaactttttgtagaagtgttatcgaatgttttggaccagagtacatgtatcatcccactattgatgaccttaggcgtctattagctaacaaggtggaaataagattccttggtatgatagagagtatagattgcatgcattggaagtggagggttgtcctattggatggagataatagttcacaagatagaagattgtatcctcgattatcatgctcgggtagggattacaatgggtcgaggtcggatcgggtggagcaaaaactcgcccgaggtcacacatgtgaagtctatctacctaaacccgcctaggatcacacccgcggatgcaattccaaacccgaacatgtttggtttttaggtgggttttaggtcacccacaggtttttacccaacgtacatttttaaacaataattcaactataa

SEQ ID NO: 169337 - DNA, 1155 bp, Zea Mays
tatcactcggggtctcttatgcaaaagatctaggttgaatgggtatggagaaattcgggccgcacgatctgatccggacggctcggattacaacatggttataaccgaaccggtacgcagcgtggggcatcagattaagatcctacggctagggtgttatgaagatgtgatctaatcccggtcatcgaactaccatcctacggctcagatccgtttgatgaaggggtatgctgattctaatccggaccgcccacgcagagatcaacgtcccgaaacaatcagctgcacaatttaatccccaccgttggatgaggatccaacgccaagaacgtcatctgccaccccaagcgcttggacacggcgaagcataccccgcgcggcgggcttcacgccgacgagcagcgcatccagggttacagagcccaaatcctagaatagattggcacaaaacgtagaggggcagctagcggagttatacggtggacacttaccggcgattgaagaggtcgcgagcctgcccacggaggagagcggatccgcggtggagatcgaaccacggcgagcaattccagacgccccaaggccacacagttcaaattgaaggcgcggacagcttcacgggtccccggcgaacgcccccacccacacgcgcggacccgtgcgcgagcacagaggagaatcaccggcggcggctgttggcgagatggtctgcgcggcgcgttgccgtgcatgatcgggggaggatgatggctcgactagggaaccagagaggcgaggcaagaggtcgtggcgggttttatgccccccgcaggcggagtccacctccccccaagcacacggcagaaaggatgaggatctgggcgagcttttcgccatttctgttgaaactaaccccgaggagacggcgcggatgtcgcaacagaccgggtcgaagaccaccctgaccgtgggccccacacggcagagattctccccgggataatcgacttcgggtgcgcgggactggagctcagccatggactcgatctacccgcacgatcccgagcgacccgtgtggagtgaagaagaccgatccgacaggatggtcccacgatgcagtgacactgcgaggacaggccggaggactaggtactggcgagtgggcccggttcccag

SEQ ID NO: 169338 - DNA, 407 bp, Zea Mays
cagtcggcgcactatacactcattggggaaacattatacagaaggggtgcatcaggagttctcatgaagtgtattctcccgttcactgggaagcaacttttggaggaggtccatgctgggcaatgtggaatacatgtagcatccagaacactagttggaaaggtcttaaggtcgggattttactggccaacagcaaagaacgatgcagccgagttagttcaaaggtgcgaagcttgctaatacttgtcaaagcaacaacatctgccagcacaacaactgcagaccataccagtgacttggcctttcgcgtgctggggactggatatgattggacctttcaagaaagctcaagggggatacactcatgtactggtagcgattgacaaattcaccaaatggatagagtt

SEQ ID NO: 169339 - DNA, 535 bp, Zea Mays
cagcaatttgagaaggcggagacggttggcctgcgacgacggctgtcgtggtggatcaaccaattcgacatcccttcgaggccaaaggataaaattcttgatatcttgtccaagtgtctcgataccttcgggcccagggatgtctagcatgtcgtcctcggatccttggacgactgtcgtcacttctaccctgcaatattcttctggaatgtcgtttctatggaacttgcgtcctgggatcgcaagacatgtggctactttctttgtacgctgattgttaatactatatcttataactagtgtgcatgccacaggccttgtgatgtcatcaactggatagcggaccttatttcccattgacgcgatagagcttgggatggtcgtaccctcggtggaagctggcagttgagctgctggaattatttgcatatgtggagtggtcatctgttgaacagacatcgcactcgccaattgctgcatcaattctagaggaggattcgatagcatttcagacatcaggcctttgaactctttc

SEQ ID NO: 169340 - DNA, 551 bp, Zea Mays
ggaatccctgcggccgtggagctcaccggcgcaccaaagtcggccacccagagctcaaaaccaaatcggataggactacacgatgcttatgctattgcgaacctgggtggagggtactcaccgtaaatcgggggtcgaaggatgccggccacgacgcatggtggctccgtcgtggaccatctgtcccggtgagcaattgggctcgcccggacggccgtcttcccccaacacgaccacggacacatccccggtgatgggatgaagccccctgggttaacatccagggcccattggcgacgagagcggggatgcgcggtggccacgagagtatcgcacaacagctatctcactgattctctctcatctcttgcaatggcggaactgggtgcattgggttggggagaacgaggagactgcgacacccgatttatactctagtagcgaagtccgagcgaggcacgaggagcgagatccccggcgaggtaatcggcgttctgttgcaacggcatcggagagacgggtctgacagatgtggcccgcaaactagtggt

SEQ ID NO: 169341 - DNA, 683 bp, Zea Mays
gttccactagcataagaaaatccgctacaaattcaggtagaagcaagtgtaggcctttttccacggtcgtaaccccatcgtagcaattcatacacacaaaaaaatatttgaaaaataatttctagtatataacgttttttgggagatgctttaacctaaatcctttagtgaacacacacgcacacacacaagatctccgtgcgtgtagagtcatggcaatagagatgtagaagtatagacagggggagaagagagaggtctcctagacatgagtacatgtggtgtgacttggtgctatataggcgcactaaacctgaacatgctcttgattggtcttcaatctgcggtataataatcacaacacatcgcatccgatccaattaaaccatctatctgtctcgactcggctatgagcgagcgtgcacatagtcttctttttcaactttactagcatatagcatgtgctaacactacgattctggagagaggaggagaggggtcgacagtggcacaaggggtggggttgacagcggtggtggcacgagtgagggggggacgacggggacgtgagggagggagaaggggaggctaggggcgcgagggagggaaagagatgagggatgatcaaaataatatcatacattggatctgagtgagtaaaggagagatgattatccatcgat

SEQ ID NO: 169342 - DNA, 542 bp, Zea Mays
gcttgcctcgccgggcgaggcggtatttctcgcttccgatctttcgggtgcacggcttacttttgccacttgatattttgacatgcatagataaaattacgctgacatgttttggtaagcaattattctcgcattaattcttattagtgttgtgattacgcggctatttacttgccttagatgtgtcgtgtgtatataatgagggtgagatgtcatccttattacatatttctctcctccttacactagagcgttgtgttgccttcatctttctcgtcccgccatcgatatcctatcggggttgggtgagcagaatcttcgaagcctatgtcctctcgtgtccctgacgggctagggattgtatcaggtttttgggaagcgccgtcgtgactgcttgttgttcgtctacttcctctatgccgacgtcgtcgtcctagctggcctgctacgactactcttgcactattctagcaccaacaaccccactgtaaggatgtttatatgtatatttattctatcactagcactagtatatgaactac

SEQ ID NO: 169343 - DNA, 744 bp, Zea Mays
caggttggttggctcttgcattggaggcaggcaggcgtcggggggcccgggccgcggggaccggaggtctcatcgtcccaactgaggccgccgccgtcaccgtggatgcgccgccatagtcgtcgtcgtcgtcgttgttgtcgtgacggacgtgcccggcaacatgttcgttctgcccttccatacacatgctgctatgcatatgcatgcacaacgaacgaacacatgcatggccatgcattcaagctcgtcgagtttttacccagttttagatttaccgttcttttgatcggttttgtactcccattgcatggccagtcctcctcctcgtcatcgtcgtggtcatccgcttcgttctccatccagattacatgcatgtgcctacagcagcagacgcggagagatgcgagcatccgtccatcgcaggtaattagctgcgacgacccaattccagaccggccaatccgcaccatgtcctccgatggccccacgccgtcgccaccgtcgtcgcacgctgcgagccgccgcctgtcgaccacgcacagcttcggcagccatggcaagctcctgccttctcccggacacggcgcgacggcgtcgcagatcgccgtcgcggcggccgccgcggcgctgctcctcgccgtcctcgctgcctgctgttgctgctgctgctgcaggagaaggaggaggaagggggacgcggcgcagcgtcagcatcggccgccgcctcacggcggcatgagg

SEQ ID NO: 169344 - DNA, 718 bp, Zea Mays
tctctgatccactttcctgcgaacttttcattcttgtcgaagactttctttctgagcgcctccaatatcatcccgttagctctttcgacttgcccgttggctcttgggtgcgccaccgaggcatatttgatctgaatgctcttttgctcgcagaaatcgaagaactctgagctggtgaagttggatcccaggtcagttatgatgttatttggtatcccgaacctgaatattatgtcttgtatgaattccactgccttagctgaagttagagaagcaatgggtttgaactctatccatttagtgaatttgtcgatagcaaccagtacatgagtgtatccttcttgagctttcttgaaaggtccaatcatatccaatccccagcacgcgaacggccaagttacgggtatagtctgcagctgctgtgctggtagatgctgctgttttgacaggtactggcaggcttcgcacctctggactaactcggctgcatcactcttcgctgttggccagtagaaaccgacctgaagaccttcccaactagggtcctagatgctgcgtgtactcctcattgcccagcatggatctcatccagaagttgctttctagtagctgagagaatgcatttcatgagcactcctgatgcgccccttctgtatagtgtttccccaatgagcgtatagtgagctgactgtcttgcgatgcgctcagctgcattctt

SEQ ID NO: 169345 - DNA, 604 bp, Zea Mays
gcgttgtcaaggcgcccggggttggaacgagatgcacctcagctacaactgaatcagatagttgtttccacggtggttcctagttggctagtgcaagtggtgcaaggatacgaaaaggatccgaagactaaagaattgttgcaaatcttagctactggaagtgatcatggtgcctatagtcttattaatggggtaatttgatacaaaggtcgagtttggttaggagctaacacggagttacaacagactgttttatcagcgttacacgacagtgctgaagggggccattctggttttccagcgacataccgtaggcttaaggcgacctttgcttggcctggtatgaagaaacacactaaggaatttgtacaatcctgcaccacctgtcaacaggcaaaacctgatcgaggaaaatacccagggcttcttcttccccttccggtcccagcgcatgcatggcatactgtcactctggacttcattactggtttaccgagatccaaacactacaactgtattattgtggtggtcgataaattttcaaagtatgctcacttccttccattgggccatccttttactgctttatcggtggccaaattat

SEQ ID NO: 169346 - DNA, 3002 bp, Zea Mays
cggagtgggtcagctcttgagacgagatgtatagtatgttctagcatgtaatggcggagcttttgagatgcgaacacaagtgctaggcatattttttctatgtctgggtaattgcactctgccttcagcagggtgcgacttaaataatatagggagacttctttcctatcatcgttggtttgtgctaaaagagcacctagcgaagttggcatcgccgccgtatagaggatcagtggccgccctttaacaggtgcacttaagacaggaggatttgttaggtatttctttatatcatcaaatgcattttgacatgcttgatcccattgaaatgggactcctttcttcatgagcctagaaaagggcttgcacctcccggacaaatttgagatgaacctcctaatatatgccaagtgaccttggaggcttttcaattcgtgtaaatttgttggttgaggcatgttaacgattgttttgattttggttggatcaatttcaatgccacgcttagtgactacaaaaccaaggaattttcctgaagacaccccgaaggcacacttcataggattcatttttaatttatgctttctaaggcgctcaaacaccatttccaagtgctttaagtgatctttctcacgcttagattttacgacaatgtcatctatatagcactcgacaatcttatatagcaacccatcaaggataatggtcatggcacgttggtacgtggcgcctgcattttttaacccgaagggcattactttataacaatatatgcccttaggtgtgcggaatgctgttaactcttcatcttctggcgacatctttatttggttgtagccagagtaaccatccataaaggagaatatttcatatcccatagtggcatcaataaggatttcagagatcggaattggaaagtcatctttcggacacactttatttaaatctctaaaatctacacatacacatatcttcccatttttctttttcacgggaacaatactagacacccatttagggtattttacttctcgaataaaactagcagctatgagtttatcgacctcagcttctatttgtgggagaagttctggccgatatattcttttcccttgcttcacaggaggaacatcctctctaactgctaatttatgtacagccaccgctggatctaggcctggcatttcttcataagaccaagcaaatacatccctatttgcagcaaggaatttatggtattcttccttactttctttagataaatgtttgctaatgaagattggacgaggatcatcatctgtcccaatattaatttcttccaactcgtcaacagttggttgatttccatcttcaatctgtgaaggtgcttcagtagcatcaagaggtttggtggaagtcatattaacttcatagcctaaaccatatttctcttctttcaacactccatcttggtgtaaggcgttaaactgagcttgggacatcagcttttcgaaaggtgctagctgcccccggccgtcgcataaagaaggaccggtagatatatcatatcccatctgttgcataatataaagaactttgttatcatataaagagatgggtaatgctttatcatctctatttaagaaagtaacttgcgcagccattttgttatttttattatccctttcagtttgggcttgttttattttatattgcaccaaaggaggtaagggagttgggaatgaaatacctctattttgagaggcctttttatttataatgcgaaatatcggatcacctttcttcctttggttgcttggtatgtatcggtatattttttggcttgacgaagactcgtcatcttctatctttggaaagttttgttccaatagcaatgctgatgttggctttgagactttatcaacaggttcaaaatagaactttgcgtcagcatagaaagtttccgctatagtgaatggcttcttatccgcgaagatccttactatatcccccgactgatctttgtacttgatgcattgatgaagagtagatggaataactccattctcatgtagccacgggcgaccaataagagcattatatgaagtggccgcatcgatgatgtgaaatttcacatatgtcgtgaaatttttaagtttcagaataaggaatatggtacccaatgcttcttggcctgattgattgaagccatgaataacaacatttgatcgacataagtctcccttagagtaccctatctttttcagagttcgcaagggtagcaaatttatagctgaaccaccatctatcattatgcgattaatggcgagatcatcgatttcaccaaacatcaggaggggtctattgtgcgttttatttcctaacaataaatcctcatcactgaatgaaatactttgagtttggggtaatttcacttccgcttgcgagacctcggctttatcttttatttctgcttgtgagacctcaactttataatcttcagggaaggaaagtgcactaataaatgcatttctcaattcagaagaaagacacaaagcatcatacacggaaagcatagctggtattttcttcaagtgcgagattacatcatacttgaccgacacattatgagtatggtcagccacatcactcggagtgacatttaggggatctttttgtggaggagatggtctagctaattgacggcctgatctaagcttaacttcgtcaacttctagtgtctcttcttcagggaagtgaagagactcttcatcatcctcaaaaactccgatggggaaagcatcatatcttttatgggagttgtcctcgcacctctctacattttggtagatgcgcgggccttcaccctactctatcattcgttggagagcaagtcgtcttgagagttgctgttgacgctctcttgatctttgggaacttgatgatccaccttttggggtgtggatccatcgtaagaaagccttgccttcatgctggcgcttagcttgctgttgtggatacct

SEQ ID NO: 169347 - DNA, 507 bp, Zea Mays
aacttgagggcagagcttggtgtggccaaagatgagttcaatgtgacatttctacaggatcgtttaaggaaaggcgaggatgatgacctttcaatcagatgtttcttcctcattctattcaactgtctgctgtttccaactgctagctggggcatcacatatcatgaggtgcttctcacagaagaaatgcaccgtttccatgagatcgactggtgccagttgatttttaatgatctatgtgaagctgccaagaagtggcacaaccgaatcaccacaaatgtctccacgactatatatggatgctccattgttgtccttgtaagtatagtgtttttccgtattgacatttatttcatttttggttgctaactgttggtagttatgtaacatgttttacgatattggttatgtctacttacatagctattgaacattgtaattctttttatgtagttgtattacttggatcacctgcatacagccgctgccccccaaaataagactggc

SEQ ID NO: 169348 - DNA, 555 bp, Zea Mays
cgtgttcgtgcgcgttgaaaatcagggcggttgggcgctccgggactcggcaattgctcgtcgtctttagcgttccgcctggatccacgccacgctgtcgtcgagggtctctgcgccctaattcctggtgagtagcccttccatgtgttcacgcgatagctgtaatcgatttgcgctagtagattcgaggattaatgcctaggatcgcagggcagggaagttgtcggcgtggcgagcgcgttggtctaagttcgctccgccacgggatggccgagggtagaagacgggagattaccgtttgatcttttttgggcggttgagattagagcggggatagcctctcgggtgattgatccagtgtcgttggatcgagatctggcgtcgttggttggatcggaacttataaaatctgggctgtcgtgtcttcatccaacggcctggccagcgtaccggttcgacgcggtctagatctaatcgtgggcgccgattaagatctattggtcctggtaaaccctagagcgctgaacatgtgtaagttgcaaaagagaccctatg

SEQ ID NO: 169349 - DNA, 452 bp, Zea Mays
tagcttttgaggccttgctaagggtaaaattttctaagatgctctatgtcccatgaattccccacttctgtaccatccatttgagtaagccggtatgatcccggtcgagtgacctctgacacaatgaatggcccttcccatagtggtgacaacttgtgccgtccttcccccattagaacttggcgaaggaccaagtctcccattacaaaggatcggtgtcgtatggctttatcatgatagcgcctcaagttctgctggcatctggctgactaaattactatgttcaattgctcttcctccaacacatcaatatcctctagcctggtagcttctgcttctgcttcagctatgctttcgaataccagccttggtgccccgaacctgaggtcggcgggtagcactgcctccgaaccatagatcatgaagaacggggtatttccatgcagagctcg

SEQ ID NO: 169350 - DNA, 595 bp, Zea Mays
atgagttaggtctctatagtcgaattatagctggactataggactacaactttgttaaaggtggattagcaagttattacatgaaattttgaggtttgggcgctacaatctgctctgtcaagtgttctgaataacatactgatggtacagtaactaacacagatcctaggtgcagctcccctcgccgccggtgaaccatgcacccggagcgccagccgtcgcgattcgtgcatcggatgtatggattacgctcaacggtaaaaagatctcatcgcgaatgagctcgggacactgtggccgctctgtcacttgtccacttgcgtcggcgacgtggccaagcgaccgtcgtcgaggtatgcgtcgcccaccgtgatcgcgacatgctatgaccctttaaccacgtcgcaatgcatcgcctaagcatgtctattcgtcgctgctggtcttgccacggtaaagtccacgaatcgcttgcgccagtagcttcttccctctccgaccgccagcgcaatatcttcaaattgaacgccaccgccctcgaatcctataaattgagcgtgccatcggctccgctatgtagtcaagcacccacccg

SEQ ID NO: 169351 - DNA, 602 bp, Zea Mays
cggcgacagctgctcccctcctgcgatcctccgatgatctccctcggctgagctcttcactcctctctgatgagctcctcatcttccctctcctttctctttcctctgtctctcagctaaatggagctcctgcccacctcttgtgcttgattcaaattcttgtgtaaatcttgtaaatcctatgcatggttgtgttccctagtgctccattgtatcccctgcaggttcctagctccttagggagggcttcacagccttaattgatcatttccccgaaacgctaattccccgcagatcacatgttcgatgaaatgcccaaaccagacaaaaatactccaattgctcccaaatttttcaggcaccttcacaatacctctagtaacatagtcgcaaaatttcacgccaatccgatccaccaggcttcaatttcacacatttccatgtttcgagcgatcgtttctgagccgagtgcccaaattccattttcttcgcctcaaatcaaaccaagcgcacacttcactcatatttacccatataaacctattcgttaagtatcggctcaattccacgtcatttcatacctcaattcgaatttcaaacct

SEQ ID NO: 169352 - DNA, 568 bp, Zea Mays
aatacatatagattgaggaagatagcaacgatatctggtccacaaaagcaagccatgtggactttgaaaaatcaacgatcaaggaggtgtcatattcaggtattgactgagtcccattatatcagtgatgctagcttggtttgatttggtggtgaagacaccacaccgatgccaaaggaggacgaagttgttgtttttcaaagctttctgaaggctaggcttcggtttctactgcataaaatggtggtggctgtcctgaatagattcaatatatatttgcaccaggttaccccaaacgccatcaagaggcttggggtcttcatctaggctgtgtgaagccaaggcatatagcctaatgcagagtgcttctgccagatccatgagttgcactaccagacgaagacggttggaacggaccatcttcacaataacttcaaatgttattacttcgcttaccgaaagaagcacagttcccggctcttgtatatcgtagcaagtggctgaatgtctgggagaaggaatggttttacatgaagaatggcttagagaagagggaggatatcaaggg

SEQ ID NO: 169353 - DNA, 594 bp, Zea Mays
ttttctttaaacaaatatttatttagatttctttggtgcccaaatattctatgcgaagtgctactaacaatcatggtgtatgcatatgatgaatgaaatgcttcatgagatggggtcttaggagataaatgaggggggggggttaggagtttagggtttctaaccttaggatcaaaattgggatgttacaaaactaccacacttaaaagaatctcgccctcgagattcagactgtgtttgagaaaagataagggtattccctcctcaaagagtcctcactctcccaggtagcctcctcttgtccttctctgctccagtgaactttacagagtttcacttctgagtttcgggtctttcggatggctgaatcaagaatcttcactgacttttcttggtactgcagatccttctgaatctgaattgtctcttcttcgatgtgactttctagcactttcaggcatttgcggagctgggatacatgaaacacattatggatatctggcatggattctggcaattgaaggcggtaggctgcgggccctattctaccgatgataggatagggaccgacgaatcacggagctagcttccctt

SEQ ID NO: 169354 - DNA, 665 bp, Zea Mays
cacctgaagggctaaacactgggtgtttacttgactgaagaagcgattgaactatggataagcaggaacacatgccgcgataaaggaggaattaggtagaatagatagtgatcacaacttgtaaagggataaccctctggtcatctagataaggttgagggggtacccctatgaaaacatctcataccatctctcatcaaccacatcttagcacctccgcaaagctcattagccctcttgtaccaaacacgagctactagatcagtaagagaactcatcttccaccgcccacaactcatttgtaatctgtataccctagtgcaattccaatacatagcctcaacaggaagtagggtgttacacattctagcggcccaaacctgtatatatcattgtgcaaatccgacgtgctcctacacgtaccatcgagtcgcagtcaacgatgtcgtcctactcaagagcatcgcgtggggaacctcgtggtgtgcggttgggtcataaacactgagagctggtgtgccaggtagggggtgcgacgttaatccatgatgactccatgactatcatcttcaacatcccaatcactttcaatgctggggaggtcttctactttggctccctctcctacattgcagaccaagaaggcgtcctgcactgcatagtgc

SEQ ID NO: 169355 - DNA, 1079 bp, Zea Mays
aattaacagatttaaacgaatactattttgatacggagtgagtacaatcttagaggattatgcgacacggtttcaacttacaatagaagtgtgctacaatatcaagtcatcaacagtattaaaaaacacacacaaacaacccaggatgaactagatggttatgtaattaaataagaagaaataggcatccaaatcgaagtgggtgtgacaaagacctggatgtggatgtacagtgtacacccacgcctcccacacggtcccaccaactgagcctagctcaatttcttcctagagacactagtggtttagacaggcaacatagagcaataatcatagcaaacttttgtttaagaaactgtggccttcagtttgcttatgtaactctacttggaaaaatcaatcctgtagaaactacaggctaggagtgccaggcacaaaacaagccaaaacctggaggccaaatattcaaacgttccaagactaattgtgatccaacaccacatctaattctgtaagagggctgaaccagatctaggagctagcccttaaccatccatattcatagaaagaatttcaatcgaccaagttacagcaaatccaaaccccatgctgcttcaatactcgatcccaaagcttggacaaaaggtttctctaaacttgctaggacgataccaggtgtttggtgtggctttcaaaacttttggggatagagaaatttgtgtcaaaggttaatttgggcacaaaccaaacacacatgtgacaagctaggctggagaaatctaatgagtaaaagttcttgcaaagaaactagagccagattaattctgtggagacgtcaagataattcacatcacctaatacatcgattcccagatctatttctcctatggcgcgattaattagttgtaagttcaaactaccagctaaacactgaaaaggtaattctactgaaggaaacctggtaccaaaagctataaatctagacctaattgtagtgaaggaagcttgaataaacacgtaagttttggatcaaaagttacacatccaagtgaacaacctcacaggaaactagaacagaa

SEQ ID NO: 169356 - DNA, 377 bp, Zea Mays
cctcaccctcgggagagaactccacctcgcacgaagacagcttcagcctcaggagaagtctccgcctcactcgagctcgacctcggccaattgcactggcaacaattccctgcgaatcccgtaggagaccacttcgacaattgtactaacccctccctgcacaaatgtatggcccgagggaggctcgaccaaggcctcaggaggaacctttgtctcgctcgagcctggcctcagcctagataacatcaacaaaaggacgccaccaactcctccacgaaggctgctaacaacggggtggctacagaaccgatgtcaagtctgctttacaccatacggggtggattaccatgcacttttcaccatacttatcactattt

SEQ ID NO: 169357 - DNA, 515 bp, Zea Mays
ccgccagtgtctgccgcaccctgtgcgcttcgctgctcgcctgcccgctgcaccatagagatcacgacgccgtgctgtttcccttcctcctctttaactctggcagtttatgtctttcaccaagctcgccattaatggccaccgaaaccgctcctcttcaccctggcgtctgtccactctcctctggccctataaatcacatagtcgtgccccgacctcgcccacttacagtttccccttgcctctactcacctccgcgctgcatcgccactgttctgtgctcgccgtcgtccgcgcccagttcaccgatgctgccacccaagcacctccgcgacgtcgccggttcctagcccacaccatcgaccacctgcgtagcctcgtgctctgctggctcgctgtcagcgttgccgttccgatgtcatctcgcatagcctcgtcgtcacgccaagccagagctcatcttttactcgatcactcctgcgcctccctgctctccgtcaagctgctgaaggtag

SEQ ID NO: 169358 - DNA, 298 bp, Zea Mays
aacaccctcgggggctgggtcgtagtttgcgttacccatccgagccgagtcacccccggcaacaccctcgagggctgggtgagcgccaacaccatccttgagggctgagttctctgcagaagccacctctaaggctgaaggtccctcagtcacttccatgggagcaagacaatccaagtcaacttcctgaccctcaagaccgcgctccaaggtcgatgaggcgcgggacgctgcccgggatgaccccaacccggcgtcgaacacatcagcacaaacatccatcgcgtcaccatccgcc

SEQ ID NO: 169359 - DNA, 538 bp, Zea Mays
ctcagtggttaaatcctaggtccaccactaggtgtggggtgaggagaccgcgatgtcgctgtggttgaggttgaccctagctacggcgagtggccagtggtcgggagcagcacggagtatacgcctgtgtagttgtagaccccaaggccaatccagtcaacggtgatgttgctcggggcaaagaagatggccttccacgtctgctactgttgtgctcttgttacctatgccctggatcacatctcacctctgccttttataggccaaggcatacatgagcctgttacaaacatcccatggtcggaccttgtcatacgctttatgtccttcgatgtctttgcagatgggtgaactcctgtagatgactcttccttcttctagggtcctgtagcggcactgtggctaccattacgtatcatctcatcttacggtcgttttaccttccgtcctttgtttactttcttggtgagggagttgttggtctgacgttagcccccatgtcgtgttaggtgtcacatttgtgcaggcacatctcccc

SEQ ID NO: 169360 - DNA, 1474 bp, Zea Mays
gctaagtgaaaagactaagaagttcaacacatggacacagatgtgatgatccacacaagttgagatgactatggtctatggacatcacaagtaaagttgaaggatggtcaatgactatgtggaactcaatgtgcataacttggagacgaccgatcgaactggggacgaaggcaagaacttcgaggaactgagtgcgcaggagaaggtcaagaagaccgaggtacctaaagacaagggtgaagaagatggcttgcaagaagtcaaggttggtaaagctgagaagagctgtcggagaaaagatccctaggcccctggggcccactagtcagcaaaaggacaagggaaaggtctaccccggtagcacccacccccagatagtcccgaggccccgagcctaggatcgagcgaggcagagccaaagggggcgagagaattgaggggaagccactagtgtggattccgcgccttatctaagactaaaccgtcgtaagtgaccgaccacattagctactccttgcactgagccaccatgggagagtcgatcctcttcccactcatgaactatgggtccttagacctacggccactcatgacctatcaaacctaggcctgggtgcactggctgtctataggatccgcaagatgatgagcatgctgagagcatgagacctaggctatggaggccaagggtcggcgtggtgcagaggcgataataatggtgccagagctcttcgccacccacaccactagtcttaaacagtgcgaccagagaagcctagacagccgaggcacatgccgacaagcctgactttaccgaggtagaatgctccgttttaccacgatgtagtagctccttctttaagaagctaccagtagatgacccccaccttggcctatagaagggggagggtcagccgagagagacaaccaacactcacacgagaggcggagatacgcacgcaacacacatagacggacaaacgaccacacgtcagagaactacagaggccaaaaccaaggagcacgccgcctcgacgcccaaggcttagtttggttgagagcacaagatttgtagtccttaggccataccatgaacaagagacttgggagcctcctccctctctcgctcacttgtaacacctactacgagcattgagcaacaaaggtgtcgatagcgtgagccgccaaagactggatgtagggacgttctgcctaaaccaataaaaatctcgtgcccactgagcacaccatccgaaccccgaaacacgcatagaacaaatattttttggagctcgttcaaaacaccgacaagtgtcctatgcatcgaggatcacaacataaggacatgacttggaaccatcaaggtatttcttaggatttatggttcaagtcataaggctcaagattctagctcaataagtaggacatggtcacaataaggtggagaagtatcaatgtcagaacctagaagtga

SEQ ID NO: 169361 - DNA, 599 bp, Zea Mays
gggttccactaggaagcggcttgtaacaatttttggctttgtaagatacttttcgagaactatcaatcaaacaacacttatatgtatgctaatttgtcctcgctgtgtgtggcgttaccgactcctccctggtacttggcccccctgggatgtaggctcaatgtgtcgaggctggatactattattcctaagggaaaattagttggtgacccggcccctaggatgcagtctggactgggacctggacctgtacacagcttcggctaggaagtgttagtagcacacccataggacccatcgtctggtatctgccatcctttgattcatgcaacaggacctgcaggatttagtctgggaagccaagtcgtatgcccggaccccttgaataagagttccaaatactaggacacccatcgcagagtggtggagcgtgcaggcttagggtacgggaccatgctaagcggctacacagctccggacccccctaggagacgtgtgtccattctctagaaccagaccctaggttgccggacccacaggactatagttacaaatactagggtgctcgtcccagagtggtggagcatgcaggcttaggg

SEQ ID NO: 169362 - DNA, 522 bp, Zea Mays
caaggacattcgcagtttttatgcctcgcaggctactacagaaagtttgtcgcgaactttggcatcctaagtcgacccctgaccaacctattaaaaaagggacaagtgtttgtgtggcattcagaacatgagcaagcttttttggcattaaaacaagctttaatcagtgcacccgtgttagctctaccggacttctctaagcaattcgagattgagacagatgtgagtgacaatggaattggggctgttttacaccaggatggtcatcccattgcatttgtcagtaaggctctaggtcctcgtcatcaagcactgtccacatatgagaaggaatgtttagctatattgatggcagccgagcactggagatcctaccttattaacagtgagttcatcatccgaactgaccacaaaagtctaatccatttggatgaccaacgtcttactactccttgccaacaaaaagctctgaccaagttgctgggcctgcgttacaaaatcagctataaacagggacacacc

SEQ ID NO: 169363 - DNA, 494 bp, Zea Mays
gaccactacaacacaaactcccctatagcaacgcatccacaacaacacatggttttatgtgttgtaagaaattaacgggcaccacttcatatgcgttgcaagcatcatctgttaagttattagggtggtggcaacatttaatatatgttgcaagcaccatccattgtttaaataggatgcgataacacttaatatgtgttgctatgggaatgtattgattaattaggacgcgacaacaatatgtgttgctagtacagtaacatttataatattagaacacaggctcgatcttcctccctaactgtagcagtgacctaacctgaaatcacctgctcctgttcccctcgcagactcgcagccgccagccctgatgagcctcctgcttccccagtatccattccctaatcctagcgtcgtaggaaccaccatccacggtgacggccgtggttacacgacaacgagccaccgcacatgcacccacgacagaggctcac

SEQ ID NO: 169364 - DNA, 549 bp, Zea Mays
gtgtctccaattcgagattagctcacttggcgacgatcggggcgctggaggaaggtctccgccgtggggattttgcgctgctgcccggggtttggtcggaggttgaaggcgcgccgtcgaccgtctgatttggtgggcggtcaggatttgataaagggctgggtctgtgtgcgtcgttgattttggagtgagcggtagagattagaaattggcataccctttcggcgctttatcatccgaccgtcgaagttgaatcggatggttgcgcgaggttgtagacgtggccgaactctggccctggatctttgatccggtggcggctactgcccagggctccaggtgctgctttgggcctaatctggaccactggtgctcgatccaacgaccgagggatcacggtaccctttcgtcgtgcccattttgcataagcgcccctctgttttagcgaagttaacccgcagtccgcagcagtgtcagcctgagtcttaggacatctttcgtggaagcccctggtttttctgaaaattgatgcccagtccagaacctgtt

SEQ ID NO: 169365 - DNA, 592 bp, Zea Mays
tggaagataatgacaaatgttcgacaagacctgaagacttggaggccggagccaaggcttagtgtgggactctagttttgcagtatttaggtccacccatgcataagagacttgggagatatccttccctctatcgcccacttgtaacccctactacaagctttgagcaataaatgtgtcgttagcgcgagccgttgaatactggatgtagggacgttctgcccgaaccattataaaccttgcgcccaccgagcacaccatccggagtctaggacgcgcacataggaatttacttgttagagcggaggttcaaaacactgatatatggtgaaggcgagatagtgatgtgtggatgatcggagtggtagaatcacaaaaggctactggaagctcgaagttaggcgggttgaagcttgaagagccaatgagggttaaggcaaggtggtccatgagggaggtgatgatgggcggtgatggtagtatataagttaatgggggagggaagaggtagattaagaggacttggtggtctcacatgtggggtgttgagattaggagggtagggttgcatggctagaaagtggtagccctc

SEQ ID NO: 169366 - DNA, 695 bp, Zea Mays
aattccagtaggcacaacaggaaaagcctctatggtcggggggttgtttccaccctttcacttagcttcggcatgttggtcgtctcaatgcgcctgggtcggtgcgtcaaaactttgatcttcttcgaccttgacacatcagcagatgccgaggtagcggctttccttttcttcccttgcttccgcgtgggatgacagtagtacgggtatacgaacccgataacatcaaacaccctattcaatctcttcttgccgcgagcaccgaaggcagttgtcatagcttcgtcttctgccttcgaatacgctccaaatatcccatcacttgttgcttctatggcatccaaccaatcatcatttggctcgtcaaattaatttctgaaccggaatgagtactttagataaatcaggcggcggcctccttcggcatttcccactcgctcgcaagaggccatactttgtatgcaatatgctcttgaaccaagtctcttgttccaatatacgtgcacaccgtgttgaaagccgcctggcacgcttgcacatcattcccaagtgcagtgggtggcctcctaatgttgaagcgaactcatatagggcattgaataatccctttcacatcctccctttgactaaggtcatttttcacgtaaaaccattcttgcatccaagagcatggccacctcttgtgaaacgtgagc

SEQ ID NO: 169367 - DNA, 589 bp, Zea Mays
tgttgccgccggtatctgctgaggtcagcctcaagctccggaaagccaacactcttcgatagagtgctgacaaccttcgccccaatccggtccaggaggcatcctaaactctcttcggcaacgccaccgaagagcaatgctcctggtttatagccgcatgatattgcgtaatccctcaattcttccttctcagccttagacaactttttgccaagtgtgtcttgaaaattaaaatcctcttcctctgaagtttctttggcaacctccttctctttcccaggcactggggccagggtcttttcggcagctgtagcagcttcttccacggccatgttcaagatcatcttatcaatatcagaaaaagtgccttctagatttgtatcttcgaccgtctcagcttcggcgggggcaacctcagttgctgcggtatcttcggcagccggtgtttttgacgccgaggctggcggtggcgtttcttcaatagcatcaaaaacagtaatgatccttcgccttttttcagcaggcttcttgattgtcgcaggctcctccttcttctgtaaaagcttcattagttgtggccctagtggac

SEQ ID NO: 169368 - DNA, 428 bp, Zea Mays
tagaaatcagggagctaattggcaacggaaggggcatggtggttgaagaaggcgacaacctcggggattgagacgccgctgcagagcgcgaggaggaaacagaggagatggagcgggaggtgagcctgaggctgaggctgctgtggattggggtagaacctgggggatcaggaccagacgagctagggtttagtaggtacgacctggggatccgctgatggtgagcacgtactccatggacgggcgagctctagggttcatggaagcccatggagaggaagggatcacgacgagagatggagtgagccacggtggagaatggaagccggcgagaagggaagggatgccgcctcagagcttgcccacgcggaggcgagccgtgcctgctgagatctgcaaaggccccgtcgtcgtcacgtctacctccg

SEQ ID NO: 169369 - DNA, 3645 bp, Zea Mays
gggaaaagaaagcttagtgttcacttccagacaagaactcatggacgtccttgggctctggtaaggacgacaagggtgaggtggggcgaggcaaggtagaataggaggtaggccacctattagcgacgggccctgctcatggagtagggaggccccctaccttgtctctcaggcaccacccaccactgttgtcatcggagaaggaggcatattccccttgcaagggatgcccatccttgttgccgccaaaagagtagacaacagttccagtctcagatcctacaccaactctagtgcctaagcaaggagggaggcatgtctggtggcaaaaatgttgagctcaagtcagggtctagcttcggctagcaaggagagatggaggtaggcctcaatcgagtagaggcagaggcggggcgacgcttgagtgatcaagctcgagtaggtggaggcggcaccaaacaagaaacaagagaatcaaggagattttcatcgatgcttgaggataactcattccacgctcacgtttctccatgggggggaagcatggcaagttacgcggcgtcggaaacatggcaagttacgcggcgtcggaagcgaggcatttggtgccgtttatcggcatttttccactagaatcagaacaaaagcagttcaaataggcccatggaataggcacctcacaaacctccgagtctggtacccaagccaggaaaaatggtggcgggcctcgagcgagcataggtagagacgaggcagtgcttgagcgggtggaggcgacgccgaacaagaaacgagagtgttagatggtggtaggaataatggattgattgattgagaggaaatacatgtacatatatgtaagggaggaggaggtgagacaaaagaaatctcctaaggccatgttcggtttgttatggattggaggggattaaatcccctcctataatccataacaaaccgaataggccctaaatggtaaggatcgtgattgatcctgaccagtactcctctccccctgtaagtgaacggaattgaggaggaatgattggtgtgtacatatataggagaggaggaagagaggcaaaaggaaatcctctccctaattccctctatccatgtatactatagccggccagcacaagattgccaggctcaggccctcccatatataacagattctctaacaccccccgcagtggcagcggacgttgacactggaccgaaattcacagaacaccgatgacggaagtcctttggtgaagatgtcagcaaactggtatgtcgttggaacatggagaactcggacatcaccaagagcaacatgctcgcggacaaagtgaaggtcaatctcaatgtgcttggtacgctggtgctggattggattagaagacatgtagactgcgctaatgttgtcgcaatacaccagggtggtcttgggcaggggggagtgcaactcagtcaagagctaacgaatgcaggcagcctcagcgactgcattggcgaaatcgcgatattcagcttctgcactcgagcgggaaataatgttttgccgcttagaggaccaggagactagattgtccccaaggaagactgcatatccagacgtagatctatgagtaactggacagccagcccaatctgcatctgagtagaccaccagttcaaactgagaagggcgcacaagaagaaccaagtccaatgtgccacgaatgtagcgcagaatacgcttgagggcagtaaggtgagcctctcttggatcgtgcatgtgaaggcaaatctgctgaactacatataaaatatcaggacgtgtgaatgtcagatactgaagagcacctgcaaagactgtgaaaatctgtagcgtctgaaactagatcaccatcggctgaaagcttgggatttatatcaacaggagtagtgcatggtttgcattcactcatgccaacttgctcaaggatctcaatcatgtattgccgttgttacaggtagagaccggaactggtgtgttgaacatgcattccaaggaagtgatgtaattgcccaaggtccttcaaagagaattcctggtgaagagcactaatggtgcgccgaagaagtgccatggaggatgcagtgagtacaatatcatcaacatagagcaggaggtaaatcatgtcttcgcctttgcgatacacgaacaataatgtatcagatttggtttatgcaaaaccaagctgaaatagatgagaggcaaggcgactatgccaggcacgagaagcttgcttaagaccgtacagtgagcggttgagacagcagacataatctggatggacagaatccttgaaccctgaaggttgtgcacaataaattgtttctgacagagtgccctgaaggaatgcattattgacatctagctaatgaatgggccaaccatgagatagagccagtgacaggactgtccgtacggtagcaggtttaacaactggactgaaagtctcaaagaaatcaatgcctgaacgctaggtgaagcctcgaagaatccaacgcgctttgtagcgctcaagagaaccgtcaacaatgaaattgtgcttgaaaccccatttgccaattacaatattggagtgtgaaggacgggagatgaggtcccaagtcttgttatcaaggagcgctgagtactccaattccatggttgtccgccaattgggatcggggagagcaacacgataactctgaggcactggtgagagcacagaagcttcaaacagagccaggaaccgcagtccgcgcttgccacgagtggtcatgtcgtgctgattggtgaccgggggaacaagtaccgcaccggcagggactgagggtggaggcgaggtcgtagaagccaggacgcagggactgggtggcggtgaagttggcgccacggtgttgttctaccatcgagagtagacctggccaaggaagtgaccagggaagggtaaggaggcccagcgagcgtggcagggctagttgaagaagtaccaccggtcgttgctaggtcgacaggagtgcacatcccagcggcgagcgttgatgtagagccgatgggagagaagcctggtggagcgccggtggtgctagacgtcgaagaacgccaggaaggtccagcaggagggccggctgaagtggcaggcccaatgagcgggactaccggtgttcgggggttgccggtgtgcccagtcgagtccgacgtagaggcaaccggtcgaagaccagagttgttggtggtacctgcagtgaagaaaggtgacagctcgaatggaactggaaccgtgtcaggtatgtcatccaaaaaatcaaatgttgcgctcttgggtggagagggattctcggaaaagggataggaggtttcctcgaagaccacgtagcgagagatgatgatgcggttggagaggcgatcaaggcaaagatatcctttgtggtgggggagtagccaaggaaaacacataaggtggagcgagaggagagattgtggggtgtagtgggggtaaggttaggatagcacttgcagcccaaaactcaaaggtgttcgtatgaggggtttttgtagagagataggaagattggagaaaacaccacacaccgcagtgaggtgatgacgttcatatatatagccaatgtggttgagtgtacatg

SEQ ID NO: 169370 - DNA, 551 bp, Zea Mays
ccaaggcagctacacgggcttcagctgtggtgagatccacatggagcttacggttgcgcttctctgcatcttctgctcgggcaatcatctgacggtggtgccgagccaagaaatcatactgtgcatccagggtgagcaggtatgcagtgaggtacacgactgtggggtcatcctcaagcagctgcttcccttccaatgcacgcatcctggccatccaaactggacggtcttctgaaagggcggaaagaatctgagcggtgtgtcggccacttcttcttcatagatctgacacagggccctcaatgccttgcgggcgacgacttggcaggtgtctttgaatctgtgcccagcagcagtgacactccattccacatggcacggactggatccaatgtatacagtcacgacactcttctctgtgccatgctcgacgaattcacgaccatcatactctgggtggctcctgattccgaggcgaactgtgcatgctcttagcaacttggggaaaccatcttcattctggcaaaagctggtttggcaacggacctcca

SEQ ID NO: 169371 - DNA, 552 bp, Zea Mays
acggcagtacgtacgtacctgtggaaattggggcacacagaagaagaagaagaaataaaaaaggaaggacgcggacaagttctggtcgcagagtccaaggatgaactggccggccgccgggcggctccatacatgtctggtcccaagcagcagcagcatccaaagtctcatctaaaagctaaaggggacagggagctccatcaatagagctggaattcgatggctgttttggagcactgtctctagctggctttaattgggagaggactttggcatatgatgtgatggcgacaagtgattagaaaagctagcgtagcataaaaagcaagcaaagacatgttcacatgcatatggccatgcaactaacaagaattctctcacaaagcccccctgatgaacattaccaatgcataaccagcgggaattcatctaccttccttagcacggtttgcaggctctttccctgggccatggctgcatgtatacagcaagaaaaacgcgtctccacgaatccttttttctagtagtagcctcggtcgtcgttgcattgct

SEQ ID NO: 169372 - DNA, 813 bp, Zea Mays
gcggcacgatatgcggagtgcggatggcgggcgcagctcctgtggatcgcgggcgagacgtgggagcgaggatggaaggagggcgcagtcgatggcgccgccgccgtggggaggatgtttggcgcgtcattggtgacagaggcaggggcatgtaagatgcgggtggggcgcggcaggatggacagtacccgtcaccgacggagatgcctgggaggatggagcacctccattgttgcgatgtccacaaatcagaccctttaaatggagggcggccgcggtagtcttgccatagcgagcgaagcgggggtgcacggagggattggggacagggtgcgtaggcagggcgtgaaggcgagaatggagcagcgcggggcgacttagctggcatctcggcggggatgatgggagcgggggcacggtgagtcagggtggacgccctccttggagccttataggatagtagagatgtagtgtaacaaagaaaggtgcaatatttttgcacaaacacgtcaatctgcagatagcttcagacaggtggcactgtgcaccaataacactctgtttgacgcgaatatgttatcatacctagcagcaacaaatcaaaggtcaaccatgatatccctaagttggcataatttgaacataagaacataaagtcttacggtttgcgccttgatccctcaccgccacatgagcttcagattctgatgggctaacatgaatattctgcataaaaaatattgactattttataaaaggtatgatgaacctgaagaaacaaattaaatgagagaaagagtgagaccaccttgt

SEQ ID NO: 169373 - DNA, 772 bp, Zea Mays
acgcaccaacttcaatccggaccatcgatctcagaacccacggccagatccaaaccaccgaacgggtgccctcacgatctaatctaggccgcccaaagtcgatcggacgattccgaagatcgcccccaacctcagctcaacgggggagcgccgccgagacaaccccacggcggagctggtcgccggtgctcatcgttcgacgcccccgagcccgaatcccttgatttcttgcccgcacgcaaccacccgacccccctgaactcgaaggccgaccgcaggtaaccgattgacatgcctagcttcatatccatggcgagtcacggcgaccgaagctaggtgaacaccggtgtgcaattgccgccccaatgaggagtaatttcctcccccgcgtgattcttcaccaccggaattagctaacaagcgcaataaaagcgaccataccagaggatttgcggtgatgaggacagtcctcgacgcggggcggaagagcggcgccaatgaacgccggtgagtgattccgccagccccagaccacggccaccgcactggtccgcgtgtaaggtgccgtagatcccccagcgcgacggtatggagcccaggacggcgcacaagaccacgcgtaccctctcccttctctttttttctctctcggcgagcacggtagcaggcgacagcgcaaagttctggtcgaagtggaagaaattgagcgcggcggctcgcgattcatacggcgagcacacgatggcgtagttcttatacccaggatcaagtc

SEQ ID NO: 169374 - DNA, 469 bp, Zea Mays
gtcaagggccgcactaagctctgccacacgagcttgagctttttcttcgtggtcccaagtgatcgaacgcgagttgacgacgcaatcaatggccgaatcccgttctgaaatctcatattgcaagcggctgacgtcagctgacaattgagttatacgttggctgtcctgcgcccatgccctaatccggtgacgtagctctgaccgaagttgttccaccttggcctccaggtctccaattgtgtcattgctgccactactactcccttcatgtctgggggctagctgatggcgaggcacgccaaaaggtccagtagatttgcgtgatgttttccttatacgcgccatgtctccataagaggggaagatttattagtatattcttaacatgatgcatgcatattctaataattatggaatcaaccttagttgattcccagcctcctatatattgcactctgttacccaattc

SEQ ID NO: 169375 - DNA, 839 bp, Zea Mays
tatagctgagtctggcttgattcttctgtttgggtatccatgtgtttcggggcttttgcttgtggttgaggtggactactcatgtatccaaacatttttctattccttttgttgttcttcacgatgttggtagtagtttctatgcatttttgttcatatttcatgtctggagtctgagatagctttatctcgaaggtgtccggtagtgaactcttcttaggacagttacgaaggtaatgatcttcacgtccacatagatagcaagcttttctcgaagttatttcttgactttttccatgtttctctttttgtttcttggacctgatgcgacgacgaggctgaaactatgtgcaggtgatagtccatccatcaatgtaacactcatgtgcttctttttggagctgggcatcattgtgatgtttcctttttggaatacctggcaattcatcgactgacaatgcattaggtattcgagaatctgctattagttgttcttagggagaccattgtctttttatgccagaaaacaaaatccggttcttctgttttgtagtttcactttggtttgtactgatccggcgataaggaattccatagtactcacaacaacatgttccaagatcatttgtctgtttgtgtgcatccttttgtgtctgttcgtcagctgtttcatttctagtgacgtttcgacttgccaacacttgctggtatgaggaggtgagttgagatgctttttgtattatcagagcttgtgcatgtaatagcttctctaagtcaactatcgatggtgatgttgtggttaatgtcatatggttatcggtagtctgctcaggtgttat

SEQ ID NO: 169376 - DNA, 568 bp, Zea Mays
tagcaaagtctgctgggtggtggttgaatacgtcctgacgtgcttctagagtcacgaccccaccatatccttagtgccggtgatcgatggtctggtagccaccacagaagacgtcgcccgggagagtgtacaagatgttgtggagatggtggtcgcgcgcttccagcgtgatcctgccgacgccgagtagctaaatctgcagagacaaggagagggttccactgggaggcggctgtaataacttttggtcttgtaacatattttaagaaccgttaatcaagtaaaattggaacttatctggtatgttatttgtccttgctgtgtgtagcgtcatcaacttccccctggtacttggccccctgggaggtaggctcgacgtgtcgaggctggataccagtataccaaagagaaaattagttgcccggtccctaggaggtagtttctacaatttgagactacctacctctgaactgggggacctggacctccacacagctttggttttgaagttttaggagcacacccgtaggacccaccatctggtatctttcatcctttgattcatgca

SEQ ID NO: 169377 - DNA, 1252 bp, Zea Mays
cgggcagcgaatactgagaagtgcggggactattctacaagaattccccagactcaggctaaaccagggaaggactgcgggttgattccctaaatttataaggtcttttctgcaaaaaggcatggcgaaggggtatcgggaagtcctggccgcccgatctaaaacggacgcaccagattagatctcaactaccctgaatcggtacgctatgcagatccttggatctagatccaacggcctgggttttaaatagcgcggaacgttcaaccaccacccgatctccgatcaacgctcccgatcggtttaacgcgaaatgctactcggacctaatcttgaccgttggtccacaaatcaaccatccagaacgtctctaactagcccgagccacgatcaaatccgaacgttcattctgtcatctacggccatgagctcgtcctcatcctctgaccacacgccacggcggcgcgccatcacccgcgatggacacacgccggtgcgcaccaaaatctcatccccgaccctccaaagttcaattaactccctctacatgatgtcaggtgaaaggcgaagcaaggggagggagtagtaccggcaggcacgacgcgaagttccctggccgcggcagagggtgttctacgacggaggaggagattccgatgagcgattaatggcaccggaggcagcgatttccccgcaaacgcctcggacggcctcgaactagctcggtgtagacccccgacccctccaacagcttcaagcggcggtgaatggacgggagggcacggcggcgccgctcgtcccttctctcggtgatatggtggcactggaaatcaaggcggttgcgaacctagggaagctatggaacgggggaaggcaagggcggctggtgctttatctcctggcacggtcaatcggttcgtgcgcgctaaactagcgccagcatcgcgtccgccattcacgcgcggtcaaatcggcttcggttgaagcgagcacggcggcgagaagatctacagggcgcgctcctgacgtgctgggcccgcaagccagtgagaaaggaaacgagcccgccgcagggagtggctgacacaccgggcccgcaagtcagcgccgtgttaccgggtgggctgcgcgagttcagagttaggtgggccgagttcaggggattgagcccacacgacttctttattttttttatttttcctttctccttttgaatttcaaattcaaatctgaatcaaactttaaatgtgaa

SEQ ID NO: 169378 - DNA, 679 bp, Zea Mays
gtttccactgttttgtgcagtgctgacaaaccaaagtttggagacttataattcaaattctagacactgaatcaccctagtccctatagcaaacttgtagtcggtagagtggagagaaattcggctagatcaggcgacgcttcgtgctcccattttgtctcactcgcgcctacagcgcgggcagatggcaagcgccatgtggcagccgtggggacgcgtggagctcgcgcccgagcgcgcacgctgcttctcctcgcgtgcacgcctcgtacgcgtcgtgcctagcttcatttggccgaagtggacacgccttgctctctgccactcactcttgtctcgctctcactcgcctcgccctcccttctgccacctctcgccagtgccacaccgaccgccatgtcagtcgtgaactagctcgcgcccgcagctccactgtccactgtagcccatgaaccaagccacatctacatcactgtttcgtgcgccgtcgcgacacccttttctcgagccaaatgccgaccgaagctcaccgtcgacgtctccgtttatcgattcccgccggcgtgtgtggaccgagcaccatcatccaccgttcgcaaagccgaggacatcgtcgagttcatcatcgaccaccgctccttcccgacgctcgcctagtccatcttcaccgctggtaaac

SEQ ID NO: 169379 - DNA, 434 bp, Zea Mays
gtggcacccaattggtgtgcccaatgggtgggattgatgtccctttcgtaaaatagttccctgagttgacacagtttaatgatgcgtgtgagccaacagtcaacccatttactgacctttgatgtcgtgttcaccgtgttgtaccagggatatgctgcttcttggaaattgaagggactcttgattacttgtgtatgttcattgtatgggtaggaggcaaagaggcacccttctgtttctttaagtactccaaccggccgctacgtgcttcttcacttgctttcgcttccacttccttgcaagttattcttttcccagagaacttcaatggctggaggtagaggtgctaagggtggtaaggatggcaagggcaagggcttcaagaggaagcgccctccaaccctatcatctgagtccttcggcgacttggagta

SEQ ID NO: 169380 - DNA, 615 bp, Zea Mays
tcacaggacacagccgataagcagcggccaaaacagaaagcgcgatttgtttgatcgcttcctcctccactaccactagctagcctgccgccgtccgccgtgcagtgtgcgagctccgcccgccggtgccggaggcagaggaggaaggtgagctgccgctgttgttttctgtccccgacttggaattcatttctgcgtcgaggaagctttttctcaaatctgcatcgcgtattttccgcaatgtccttttttcgcagaacaaaaaagccgttttttcctttcctgttagttattggagtcagttaggaatgtttttctgatgatgttggtttggtcctttcctcgtcctgaaaagctgcctcttcttctgccctttgtccagttccctctctgaaaaaatcgcagatttctgttagtatcatcaccagttcgccatcatctccgctctgtgggggcagaagctccgcttcgttccaagaaaggcccccgcgtcttcctccgcaaaacctcccgggtcatctcatatccttggcgctggccgagaggctcctctcgttgcctgccggcgcactggcgcaggtaggtcgcgccattgccgtcaccccaactgccccc

SEQ ID NO: 169381 - DNA, 540 bp, Zea Mays
tttttgaggaggattgttacctgaatccccatctgtcctagtaaaacttcccatcatatcctacgacaccccagcaccttaatacagaatcccaagcccacggggcgagtactttccagccccgcctagaaggccagaaaggaacgaccaatcctatgaaccatatagggcaaatagtaatgcaccacataactcaaaccaatggggggcagacaacaaactcgtgtccaaacaacctcacctatgatgggacaaagagtcagtggtctcccatcggctactattgacatagtaagagaagaaatagctggacgtcccgagataagctcggaataagcatggtccctgggggacagtcatatcggaggccttatgacaaccgatttgaccaccacccatacccacagggaactaggatacccgaattcgcaaaatttttgggtgacaaaggaaagagcacacgtgaacacataggccagtttctagcacaattaggagaattggccgacatagaggcgttccgtgtgcgtttattttcat

SEQ ID NO: 169382 - DNA, 449 bp, Zea Mays
attagtctagttctatcgactcttgttcttttacttggtccaatcctcacatctattcatccagtctcattctttccgatgctgtcggagccatagaatgaccccatcaattttttataacctcttatacctaatattaacctaatgtaaagtatataaaaataaggtttggataggctaaaattgccctgagcagttctctcaacttccatcctctttggtctagtcctcgcatctatccatcgggtcccatttcttcttacatcccggcctgccggggccaatccccccaggtgctccattcttaacactgtcgcctccttcctgacgcctgaagttgcctgaccctgacaccacaactgacgagcttgacgaaccagcgagccctggctctcagctggagacatcatctgacccgcctcttctcggtgtcccacccttcgaggaga

SEQ ID NO: 169383 - DNA, 416 bp, Zea Mays
caagggggctcgccgaggatgaagcccatgttgtgacagtcaagcgaagtctcatgcatggtgggttggatgccccgagcatgagtccccccctcatgcgggggagccggcatagaagacgcgaggggagccaagacgtttgggcgtcgggtgcgaaggctctgggaagatgaagacctaaggaaagcataaactccataaggttgcccatgttttatgggctgcctcactaggccagtgtatcattgtagcaactaggtaggtatttggtgtgcttgacctcgagacgttatgacactataattacccagttgcacaacatattcctaggatgtagttggtaaccaagggtacgactgtattttaggccattgtccaccggttgtcctataaatacccatgtcatgtagttagac

SEQ ID NO: 169384 - DNA, 405 bp, Zea Mays
cttcacgcaaccggacctcaacctccgtcaaagaaggtggctcgaattgatcaaggattacgacctcgaaatccactaccaccccggaaaggccaacgtagtagcagacgccctcagccgaaaacctttcggggttaaaggaacaaactttctggaagattggaagaaagaatcagctcagctaaatacatgtctgggagacaacggtggcctggaagtcaagccaaatctagaagacctcatatgcaaggcccaatgcctggacgcagaaacaaccaagcttatagaaagaacacgcaaggagcaacttccggacctcaggacagataagcaaggagccctctggttcaaggaccgcctgtgcgtgccagtgggagaagcacgagaaaccctgctcaatgaagc

SEQ ID NO: 169385 - DNA, 376 bp, Zea Mays
ggccgaatagtcaatttatagcgatcgcttgagtatttcgcgaatttgggatgggatgagctggaggttggagaggaggtgagtcaccagagcataactaccgtggcgctcatcggggcaaaggctcaggcggcagatgggctatctactgcgatctactgtgacgtggtaacgcctcaaaatacgtggcatccttgcggcaagcggcaaactccagcgatggcatctcgaccggtcgcggggcaagtgggtatgacggccagctcacaatctcatccgcggtcaagatcttttcactggtccggtaatatccacgccgcgccgtgcacaaatcacagcggccgacacgaatccacatgcagagatcaccagcggc

SEQ ID NO: 169386 - DNA, 944 bp, Zea Mays
gccaggctcgggatccccgggtagctgagggttgatcgaccatggcctccccgacgcgacgaactctgttgtccacctcgcccactaaggtgtggacacggatcaccagatagaaggagatgaatgctccaaaccggggccgaggaccatcgcagaccgtcgttccgtttactccactctcaagggagaacgaaaaggaatgcaccgcctccacgccaaaacctttcttcctagatgttctcttcattcagggaagattggaagcgtcgcctatctccgacgatgaacccaccgtgctagggcaggagcccccagagcgatgtgcaatgatgacgaaacagacgtcgtaacgtatggcgtcaccacgaagctggagaacgcgattcggctcagcccgtcccttgggatgaagtttctgagacgggggagacccctgacgaaagaacacaccgagaacaccgcaactctcgctgctgtgatcgccgccatgctcaggaacatgagcgggagcaggcagagcaggacgctaggctctgacgtgagaacccgctcctcgcttggaacctataccctgactttgctcgaacactaaacacgccaagcgaggttggaggggtcctagcgcagatagccgacgacctgtcgtgcaccccagacgcggaaggctatcggcaagtgctcacccaggcggcaaatcatcttctacctcttgctcacccgccgaacgatctgtgtcatgccatcaacagccagcgagatgcgcgaagcaacatccacgcttcgcgtgatcgtcgacatgagaatgagataaggcgccgagaggaatacgatcggggtcatggagcaccagcacacagtcgtgcgaccaggactgagttagcggcagcttccaccagcagcccgaccctaggacggtcgaggcgacacgatgctcactcacctcc

SEQ ID NO: 169387 - DNA, 1492 bp, Zea Mays
attcaacggtatctacagtcgtaaaagcaagtgcattatgatggttttgaattttttcgtggggcatagagatcgccctgggatgaatagtcgcgaacgtgccgaatgtgtcgtgccaatttaagtcgttgccaacttaaatcgatcgttccgttgtcaggggtatagtgatcaccccgagtcgagtaagcgagagcatgtcgcactgtcttaagtcatcaccgacttgagccgattgctccattggcagggtatagtggtcaccccgagttaagtaagcgtgagcatgtcgcaccgtcttaagtcatcgccgacttaagacgattgctccgttagtagggtatagtggtcaccccgagttaagtaagcgtgagcatgtcgcaccgtcttaagtcatcgccgacttaagccgattgctccgttagtagggtatagtggtcaccccgagttgagcaagaatgtagattgacaatgaacaattcttgaagtctttttattgatgatgtatttcccggtttacagaatacattgtcgccccaatagcttttgaaatttagctaaggataaaacttcctgaggtgttctatgttccatgagttcccaatttccgtgccgtccatctgagtgaggcggtatgatcccggtcgagtgacctcagctactacgaatggtccttcccatagaggtgacaatttgtgccgtccttcccccgttagaattcggtggaggacgagatctcccactgcgaaggatcgaggtcgtatggccttatcgtgatagcgcctcagagtttgctgataccgtgctgattgaatcaccgtgttcagtcgttcttcttcgagtacatcaacatcctccagcctagtagcctcagcttctgctatgttttcaaagatcaaccttagtgccccaaacttgagatcagcaggtagcactgcctccgaaccatagaccatgaagaaaggagtgtttccatgcagggctcgactaggttgagttctcaggctccaaacgacgtacgacagttctctgatccactttcctgcgaacttttcatttttgtcgaaaactttctttctgagcgcctccaatatcatcctgttggctctttctacctgcccgttggctcttgggtgtgccaccgaggcatatttgatctaaatgctcttttgctcgcagaaattgaagaactctgagcttgtgaagttggatcctaggtcggttatgatgttatttggtattccaaacctgaatattatatcttgtatgaattctactgccttagctgaggttagcgaagcaatgggtttgaattctacccacttagtgaatttgtcgatggaaaccagtacatgagtgtatcctccttgagcttttttgaaaggtccaatcatatccaatccccagcatgcaaatggccaagttacggatatggtttgtagttgctgtgccggtagatgctgctgttttgacaagtactggcaagcttcgc

SEQ ID NO: 169388 - DNA, 283 bp, Zea Mays
gtgagttgtcgcgaagtgataggcgtcatcgtggtgagatggagggtggtcgtcttcgtgtggacgggactggcaaacgggaattgttgtcctcgccggctggggcaagtgtgggtgagggggagctgcgaagtctgtttgcgggtgaggaattgaggataatgttgttcaactatagggagatgggtatcatcctgaaggttgagccaatgtaatgtgtgatgccctcgctgtatgtatgtaaccatgattttgtgtgatgaagctgcacgctttcgttgat

SEQ ID NO: 169389 - DNA, 472 bp, Zea Mays
gcggagcctgatgtaaggcctctaggccgcgtggtctctgcatttattgaggagaggacgtgccgcctgtccaccctgctgacgggtgatgtgccccctcagcatttaatgcgtcctgtccactccgctggtaggtggcgccagggccatcctacagacggcgcgcctgtccagtccattatcaaacagtgcgcccgtgctgcgcggcgcactgcgtccatcatcccttatatgatactacgcagatctcagatgtcaaggcgcaagaagattgctcgagcggcgaacattagtagctccaagtactacatccgttatgttcctgggcccacatgtcggggctcagtacccttgtgcatgcccccttagctataaaaggggaggcatgcaacgttacaacacaggctcggggagaccaaacttagacccaactgagactctcagctctcaagcttccacaacaatccaacac

SEQ ID NO: 169390 - DNA, 696 bp, Zea Mays
acgaatgtgtaacaccccagttttacttagggttgttccctcagtacccaactgataaccattatcacatgtaaacataattgaccaaaagaccccaaaacttgagaagcaaaaatttgagtgagtctttttatcttaaagggcatacattaaccatatcatgcaccacaaagtgagaaaaatgcacaaaacctaaaataaccctaagtaagccacttaagtgcaaagagaaaaatttgtaaaaagattatgaaaaacataaaatcatgatgaggaccaaataatgtagtaaggaagatttattaaaggggttttgtaaaattcccaaaatagccccttaagtgaaaactcaatgggaaattcagaaaattcagaatctaaatttcgacctcttcataaagatcagccgtgttctctgttttccaaaactcaaatctgcaaagtccaaataccaagttggtgccaaattaccttaggcacgtcctggataagttttgaggcaaatcccagccgtttgacatggtttgacatggttttgcctcgggacacaccagtgagacactggcaacttgaggacacgacaactcactatacacggccggaaacccctcggctcccacacataaacgacaaagcttacatcagggaacaaatattgcatagcaatcttgcccaaattcgtgaagatatgaagcc

SEQ ID NO: 169391 - DNA, 487 bp, Zea Mays
aacacacttgttgcacacactcatagactacagatagatgatatctggtggagcataaggatcctagttgaggtctccaaacacatcactcgaatcatattcgatgatggcattgtccaagtccatgtaatcggtgtcggtcagaagcggaggattggtcgtgcttggttccattgtagccatgcttgagcaaccagctccatccttcaagttaggtggggtggtgaagcgagcttcatatccctgtccttcagcatttttgcccttaagagattgctggtacagtgccactaaatgacgaggaatgcgacactttttagtaggatggttgaagcatgcacacttcttacacttctcttgcttggaagtgggggtgtctttccttggagcctttgtattttgcttatctggacgcttgttgcgtttgcgcttctttgaattatcagagttcttgggatggtttttggggccatcccctttcttctca

SEQ ID NO: 169392 - DNA, 1021 bp, Zea Mays
cctcatgagtgcttcctattcctttaggaaaataatatatggttgtatatattgaaaaagtttatctagattgtagtgcactgttctgttcggaaccttttactgagttccatgtcctcttcaaatacattccatgtttatcatttgttgtcttaagatgtaatgtatagagtcagaaaactcaacatcaattagaggtgtacagcgagaaatcaacagtgtgtagattcagaacttcagctacagaaaatcactcatttccaaatagttttactttggactaggtctgaatgattttagctcaactgttcatagaaatgtcatctgggaaatcagagtcaatatcatgctgctaaaattttctcttataacacgagcaaccactcattgctccaagtaattactaaggcacttgctttaatactgaattaggttgacatgaatgatctttgttcaactcttatttagtcaatagaaatttcagttaataccttttctaacaaaatctgcattgtcggatctaattcaaatgtggtcagttagacattttaagttttctactattaagtaaagtagttgtgggacatgaagaataaagtgtaaagccaccgacacaacactgggtcacaccacacatgtctaagctttatggtagcatccacatgcaactgacctagactctgtatactctgactgaagtctgcatcatgaggtgatggcggcacctactaaaccgtgtacaatcatgtgttatcatttcacatccccgaccaggaattggatgttaaatttgtcttatcaagaacaccagaaaaagtgtaccatgtatgaccccattagataactggaaagaaacttctgctgtactttgtaaagtaactatggtccatggaagcaaggaatactttatggccacagaaggatacggggagaaaagggataagagccctaactttacatgcactccatgcataaacaacgtagcttcctatagaacaaacaatgccctaatatgtttttt

SEQ ID NO: 169393 - DNA, 759 bp, Zea Mays
agaccgctgtgacgagccaagagcaaaaggggagagtgccgccacacgggattcgcgtctacatgcaatagtcgccttggggggtacttggagggctttgtgggagcactgtggaggtatcttgggcaaccccgaggactgcgacaactcgagaccatgggaatttgtcatcgtgatcttcttctccaccgtggtgtgcctgttgccgggatcaagcctcatcgtcgtacagtcgcgggtaattatggtctaatcctattcatgatatcgtgtgcatcgcgtatgactacttgggggtaggtttggggaccctgggcgctcaacggagagaactccgccgcgggagggctcgccgtcgtcgttctgctatggcctgaggagggagatagggtttgaccattggatactcgttggacggtgttgatcagagtgatggataccccttcgaccgatagaaccctaaccgtagatttgtgatcttagggatacgagcgaacccggttgatttaaaatacgagttgttgatcattgatccactggcccgcatcccatactgctttagtaggatctagatctaatcctgaccgcagattcataatcgtgtggctcagattcaaagatatcgcttcgaccgcgtcgttttgcaaaagaaacctcgtaggaaacagaaattaacatgcggtccgtagagcgtagtgaagagtttaactccgagtcttgggaattttatgagttagcccccgaactccctgactattg

SEQ ID NO: 169394 - DNA, 403 bp, Zea Mays
cagttatttagttgggtaatccatttatttccactttcctctttatctgagaagctgtcagtgaagatggtcaattgttcagtgctacgaagattttctatacatcttttcttatgctgaaagactgcagagtcagatttcatatatgtgtgtgatttctacagatgcctgagaacatgcgtagaggtgcaaggcgtgcacagccagagcagcaggcaccccaagaggaggcagctctgcagcatttgccaccaccacccccgatgaccattgaccagatgttcttgatgcagacccaggtagttcaggcaattggtcagacattagcaacgatgcaacaagttcagcagcagccaccaccgcctcaacctccagtgcaagtccagatgccacaagtgcctag

SEQ ID NO: 169395 - DNA, 535 bp, Zea Mays
caggaaatgtaggactcctctattttggaccagactagaggaagacagttctttggacctgaacttattcaagaggcagaagaacaagtctgtataatctgagagaatttgagggtagcacagaccagacaaaagagctatgctgataatagaagaccactggaatttgaggatggtgatcatgtgtacctcaaagtatcaccacttcgtggaatgaggagattcaatgttaagggcaaattgttccctcactttattggaccattttgagtttttaggcgagttggagagatggcctatcaactcgagctacctgataatctatctgatgtgcacaatgtattccatgtgtctcaacttaagaggtgtctccgtgtccctaaggaacaattacaaatggaagaccttagtgttcaagatgatctaacttatgctgagtaccccatcaggattcttgatacattgactcgagttacaagaaataaggttataaggatgtgcaaagttcaatggagtcaccacggtgaagatgaag

SEQ ID NO: 169396 - DNA, 439 bp, Zea Mays
tataaggctatgttgatgttgatgttaggggcttaggccgcatccaatggtctagcttagacctagataaaacaatttttaaagtagatagtgcaaaagcaagagactagaatagactcaagagtcaatctcgcatttcacgatgcatccttttctcatagcatgatgttgatgtggtctctttttcctccatgcttattaacttagatctagtgctagctggtactgacgcccttaaccttctctttagttatagttatctagcatattcattcgttacacatctgttagttgttagtggtatggctgggattaaggctttaccttgtgatcgaaaagcaaaaggaaaccctaaaaggaagtcggggcctaaaagcaaaaagaaaccctattcaatccagatttccagaactgaatcagtaaggactaaggaagatga

SEQ ID NO: 169397 - DNA, 1122 bp, Zea Mays
taggtacttctttctaattacttcttgccataaaccttcctcattaattaacttaaacaaccatttactaagtaaacacttattctgggtgtcaatgttttttattcccagccctcccatgtccttaggttgacacaggatgtcccacttagctagtctatatttctttttttgggtatcagcttgccaaaaaaatctagacctcaagtagtccaacttcctgagtattacccgggggatttcaaagaaagacatcatgaacataggaagacttgttagaaccaaattaataagaactaagcgtccgccaaccgaaagatgtttacctttctagctgcttagtttcttctcaattctttccaacaatacattccaatcggcgttctttaattttgtaacttgcataggaatacctagatacttgaaagggtaagacccaaccttacacccaaagagctgcgaatacgtgtgctcaacctcctttgcctctccaaagcagaagatttcactcttatgaaagttgatcttaaggccggaaagttcctcaaacgcacaaagaatgaattttaagtttcgggccttctcaatatcatgctccataaacaaaatcgtgtcatctgcatactggagaatagaaaggccctcctccactaagtgaggtaccaccccaccgatctgaccctccctcttagctctattaacaagcactgctagcatatccactaccatgttaaataacacaggagaaagaggatctccctgtcgcagacctttttttgtttgaaaattattccccaacgtgtcatttattttaatattgacgtgacctttctgagtgaagctgtctctatccaatcacaccatctatcacaaaaccccttcaacttcaaggtctgtctcacaaacgaccatctaattttatcgtacgcttttacgaaatctattttaaacacaaccccactttgcttcttacgatgtaattcatgaatagtctcatgcagaataacaacaccttccatgatattacgcccaggtaagaaggtcgtctgggttgggctaataactttatgtgccacacctaccagcctattcattgttgttttagtaaagatcttgaagctc

SEQ ID NO: 169398 - DNA, 916 bp, Zea Mays
cttggggcaagcagttacaaaacagcgcagaaatgtctctagacactgattcacccgttctgtctgaccatccgtttgggggtggtaggaagaactcattcgcagctcagacccgaccaacttgaacagatgttgccaaaagtggttggtgaagacaggaccgtgatctgatataacagccaatggaaatccatggaggcgatacacattggaaagaaacaactgagcgacagaggcagcagtataaggatgagatagtggtatgaagtgggcaaatttggtgaacttttcaaccactaccattatacaatctgctgaacctaagcgagggagaccttccacaaagtcaagtgaaactatgtgccaagcagtaagaggaatggggagaggttgaagtttgccaggatacgtcgatctatccggtttagcttgcagacaaacttgacattgctgtacaaattcttggatgaattgcttcagtttcggccaggcaaacaaactcttaactcgacgatacgtggctggaatgcctgaatgaccgcctatagcagaggtgtgtaatgcggacaacaccttgttttttaactgaggatcatcgcccaaccatattccacccttgtagtgtatgataccctccttcaagataaagtgtggcgctgtcgttggatcaagcgacaatttagcgatcaaggacagagcctctagatccttatcatagttggtctaaacgtcgttcaccattgaggaactactgctgaaacaacctgacactccgcatcaactttacgcgacaaagcatccacaacacgattttcagagctcgaacgatactgaatcttgaattgcaggcctagcaacattgtgaacaccttgtgctgccaaggtgtgtggaggtgttgctcaataagctgcgtta

SEQ ID NO: 169399 - DNA, 471 bp, Zea Mays
gtgaagggtgttcgtacttcttcgcaaagatggacaaggtgtcctctaaggaggacttagatttctttgttgcgttagacggtgtgtctgcttcagaggctggagcaattgaagggccttcgaatagggccccgttacccacgataaacggtaagaggagttgtgttggtgtttcaaaatgaaggttgggtagtgtcgatgcgtctgtatgcggccgcgaaggtggtcgtaaacgacgtcgtatgggttgggcggactcgattctcgggtatcgctccacgaggtgttgggtatgacgcccttgaatatttgcgaaggcgagagggcagagttggaggaatctcgttggatgcttcttgcgaagacgactggcgaggtcctcggtccttgctgtttaggggaactagagcttagggcgctctttgagggtgaagagcttgagctcatattgtataactaccaggaagctag

SEQ ID NO: 169400 - DNA, 489 bp, Zea Mays
gtggagatggctgggcaatcaggtccatggagtggctgggtaaactctggtaattttaggagcatggacactgtagaaacaacggaataactttgtcttcgacagaactagacctaatgtggatcttgctgttaggatggctgatcaagagcgagagaagtggaagctggctggagcaagaaagctatccttgctaactagtcacatcccgggtcagtaggctgtgttagagttagtagttttgtgtgttttatacatggatgagtattagtgtgcctgtacttggcccccgtaaggtggctgttttgtattatctttgtatttcttcttaatggaatggtatgcagccctcctgcgtttttcgagaaaaaaacttcttgagctaaaacactatgtgatgctgtttggggggcatttgcaggatgttatactaccatgaatattggatgatgccactctagcaagtttaaacacaatgatacactcaaa

SEQ ID NO: 169401 - DNA, 424 bp, Zea Mays
cctaaaaaatagatcggttttgacccaacccactttgttccgaaaccaaacgcactactagagagtgggaggaggcggcaacggcaggcgacgcccgcgccagcatcacaacaacgtgcgggaggaaggaggggctcgtggcagcgtgcggctggcggtttgcgtagtctgttgtgtgagaaggtagtgacggtctcgctgggccgttgaaacgcaatcctacggcgggatattaaagagctacgtggataccaccaagattaggaacgcattcgagcgaagcgttagcggcaatatttcttcctcttttttcttctctacagccatacctcatttttaccttgcgctcgccactgatccttggtgtggtaatgtgatgaggaaggtgaccatattctgttcatccttcattcatcctccatca

SEQ ID NO: 169402 - DNA, 613 bp, Zea Mays
gcatcaatggccgggggcgatcagattccacccctccgattccgaatcagtgcaccggatttaatatcacaaaggggtaaccaaagatcaaatcgtagttgttcgtctagatcttactcgctaccgcatgtcttcttcccctcggctaaactccggtggccacgccgagttccagggcaccccaccatggccggagcgcccacagtgctcaacggtacacgaccactacgtatctcaggtgcaaaatgaaattgagaaggtggcaaacttggggagcgggttcttatagtaattttaggcagtgccctagtcaccccacgacgacccgcggattcacgacgacggcggtgaattgagcgcaccctggtcacgcacctatcccgctatcgccacccgaacgatctagggactcgggcagaaccttctggccgcacgcaatactccaattcggtgctgagcgcgatggacggtggtggggacgacgaccacccgatcggtcaccatggattccggctatctctctctcaaccccccttggtggacgcgcgccaggttagggatggaagggacacggtgcaacttgttttatgcgcaggggagttggtcagcacag

SEQ ID NO: 169403 - DNA, 575 bp, Zea Mays
tcaatggcataattacaacaaagaatggagttatgtcaaggcttacacgtggtaaggaagtggatattgccaagggtaagataagtaaaacatcgctctcaaattgggataggagatttaagatcttagagaacggacatagtgtaatcaccaaggtaagattaagagatgagaaaggtaaaggtaatacccaactggagcacgaccaaggatggagttaaaactcgcaagcgacaaggaatagaatacgaccaagggaaaataggtaaaacacaactataaaattgagatggaagagagaaggttttaatggacgggtataatataagcatcaaagtaagatgtagaggcgacaagggtaaagatgataatcgtgaaaagcataaccaaggatagagttaaagcaagactcgcgaagtggcgaagtggagaaataatcaagggtaagataggtaaggtcccaacagaatggttgaagtaacgaaaattattaccgagggaagttatgaggaaacagtgagatcatcaaggatgtgtgaaatagaatggtcgctcatggaccatcaagaagcaag

SEQ ID NO: 169404 - DNA, 581 bp, Zea Mays
gttgtgggttgcctggccgggtttgcttgttgagtaaagaggcggcgcgttgggggcatgtcgcgtctattggagccgggtgtcggcggcacgtcgggttggcgcagaggcgacggggagggcagcgagtcaaggtctttgaagcaggcatagcaaaacgctgtggcacgagttgggtgatggtgagttcgcccggaggagcagcgacggctgggcaggaggtctgatgaggccacaacaaggaggagctagggttcggagttcggacgagatggggctcgggaccgcgagggatgcccaaatgaatctgcttggggtcgcagcgaggatcgcaggttggtttgcaaaaaaattggagggctttctgaggctacggagtagatgttttgggccggaaatgtgggcatgagcggggttgaagttttaataactttcatagaatactcgaacggagagattccagaagccactccaccctttctccgtgggtagccaaacacacacaaaatataatagaacgactatgatttcatccgctcactgattaaacacatctttatagacttttaatgagcctagcg

SEQ ID NO: 169405 - DNA, 515 bp, Zea Mays
cttccactctggaatttccaatggcttcaataaacctgcaggcctcttatgttcggccttcacgcgctggcacacctcacaagctaccacatacttagaaatatcaaccttcattctcttccactagaagttttgcttcaaatccctgtacattttggtttcaccagggtggacagtgtaaggcattttatgagcttctctcaagatatccatcttcacctctgattcctgtggcacacaaagacggcccctaaaatgaaccaaatcattctcatcaatggtgaactcacgggttttaccatcgccgacccgctttcgagcttcctgcaacaaacgatcctactgttgtgccacgcgcactctctccagaagggaggattgaatgagcatccaagtctcctctctagcgatgccgacatagcacaaagcaacacccatacggtccagttctgcaatcaaaggcatagccacttttggaacaccagtcctgctaagggcatcagccaccacatttg

SEQ ID NO: 169406 - DNA, 919 bp, Zea Mays
gcgtacactcggccactgcggtgcgcccacacgcacctgacacatggggcccagacgttggtcgctgcggcaagcgcattcctctctctctcgctgacaaactgggccatgcgtccagttccacccacaactggcgcctccgctttctctgccaagcgggccccacggtgcagtgtcatgaaacggtgcaggttcggggactcctatgacgggtgggctccacttgtctggcgcgtactccagctaaatctgtgccgacctccagagatcatcgtcgtggttgtggcttgctccagcctggcgtaactgatcggtcgagtcgcagggcagggcgcacataaaaccccagagggactgttccgggcgcacatcgcatgctcggtcgagtctgggagggtgagcgaattgagttctgacgtgggctatagtgggagagatcgtcgccgtcgtcgctccttggctctatcaacgtttggaggcctcggagtggttgaaggcgttcgcacgggggcatcgatcgtgtacaagggaacgccgggagaacagtcaagcgaagggcctggaattccttgtcggcgtgaatctccatcgccaaatctgccctacgccgtggctgcgcatcaccatctctgtatccctggtaaaaactcgttcccctagtccgtgttggtctcctcttcgagtattggcgctgaatcgaggtgtcgggcacggaatcgcccagaatttcttgacgacggtgagatgtgggacacaccacgtgagacccgtgggcgggcccctgcgtgtgctaactgtagaaatcggtctccccaattcatggagcatcaaacggggtgtggcacagtctggcgggggaagtctttggcgcgggtcctccggggggcgcacgctgtcgtgcattgccgttgccgggggg

SEQ ID NO: 169407 - DNA, 1809 bp, Zea Mays
gccaaccgaaatgagcagatctcctcttggatttgtgaggccagcatgtgaaagacttgttccttatactgaaaaaccctacgacatcgctctttccaaatattccatatagtgtagatcatcacttgcagttgatgtgcgtcccgcgccgaccggaccaatgcctgccaccaatgcgatattccttgtgggacttgtgacggcagattaagatggaaacaatttgcaattagttgccagcaacggagggcataactgcaagatgccatcaagtgtatatgagattcaggatcattctggcaaagggtgcaggtaagaaccgcgtgtcccccatgcctgacaattctatccgcagtaggtagtcgactctgtaggagaagctagagaaaaatcttgcatttacttggcacctttgccttccaaatcttcatccacttgtgcttgtttatggtaccgaagaattggacttgatacgccgaactagccgtgtcgcaattggtgttcccaaaattccatgtgacagtgtcctgttggtcagttaactgaacagaccttacaacaagccaaaggtgaaggaactgacgagcctggtcattagtagtaagacggtgaagacccaccatccacatgttccttggaagagcattttttactgagtgattcttcctccttgcaagcctgaagcagctaggggctatgtccataggtgttgtaccattaatccacctatccttccagaaatttatcctttccccatttcctagagtgagaactgtacatggccggaagagtgccatttcagcttcggtggcggcatgaggtaaagtggcctatggtttgcatgtgtcagcccatttataccaaagccatcgaagcctgagtgctctgttgaagcgaggcagatgcttaactcccagcccgcctaatttttttggtcgacagacattgtcctagctcaccaggtagtggcccctcatatgatcatcattgttcttgaataggaaattcctcctcaagcggtcaattttcttgattgcccaattagacaaattcacagaggtcatccagtaaactggtattgcagataaaactgagtttactagaactagtttccctgccctgttcagtagtctccccttccacccagcaagcttgtgtgcaatcttgtcgaccacaagctgttcggcggcacgagtgactcgaccaaaatgcagaggcataccaagataagtagctaggaaagaacccaccgaaccctgaaactgttgggccactgagtgtagcacctgcggatctgtctgtatgctgaataaagtggattttgccatattcatgtttaggctcgatgccttgccgaagtgtatcaggatttgttgtacatttctcacatccggagttgtcggttttaagaaaagcccaacatcatcagcatagagactagtgcgaactacgatatggtcaggctacactggtgtaagcaaatgatgatcagtggcagcatctagtaaccgctgcaatgggtccatagccaatatgaacagcataggcgacagggggtcaccttgcctgagaccaaagtggtgcctgattggtttgcccggtatcccattcagaataatcttcgaggttgtagatccccagagcaagcacaatagatccctccatttttgcccaaagcccaaccgttgcattagctccagcataaagtcgcacctcacgctaagtggtttagatacacaagaaatgattttgctacacagatagaagttgctggttctatgactcagccttctttacctataggttttg

SEQ ID NO: 169408 - DNA, 306 bp, Zea Mays
gcttcacgcactggttaatttgactgatattcacttgggaggggagaatggagctcaccgaagcgacgggggagtgcggcggcgctagctcgattggctcggggagaagcggaggagttggccggagctggtgtggagagaacggggctcgggcggctccttttataggcgcccgggagagggagagggatggaggggacgacgagcgccgacgagctcgccatgatggcgagaatggagctaacggcgattgggacggctcgggcaggcgaggggtgaggggacggctcgggtacagtggcgggg

SEQ ID NO: 169409 - DNA, 387 bp, Zea Mays
cgttgtgcccgacctggttggtgaaggattggagcgtacgtcattgatacgtggcccaacgttcttcaggctgaacaacatggagacttagcagaatgtccaaaagggggtgatgaatgtcgtagagtgatggtcggcctccttcatagcgatctgatggtagcctgagtatgcatctaggaaagagaggagttcacacccagcggtggaatctactactcgaccgatacgtgggagaggaaaaggatcctttgggcatgccttgttcagccccgtgtaatcaacgcatgtcctccagctcccattcttcttttttatgagaacggggttcgtaacccatactaggtggttaatctctttcacaaacccaaccactaagagttttgt

SEQ ID NO: 169410 - DNA, 429 bp, Zea Mays
tgtcggtgactgagctttccattgccctcgcttttttatgagccccgcgcccccgcgctttgctccctgctggctggccaataggatcgcccctccgtgctcggctgtcagtaaagcagacccactattctactgtctgattggtgcctgcctgcctgaacacggtgaagggttggaaagctgactcttctcatcaatcctcaaaaccaacggaacggcactatcaccggctgcgtttctcgctgaccacttcgtcaggactgctaatcatgccggggcggggccgctgctggcgtgggattggtcgagtatctatcaagtcgttgatcctagctgtcatcgaatattttatgggtgcatgcacgtagtatattttttgcataaatgttcgggggaacgagcaaaatgcagtagtagtgttttacagag

SEQ ID NO: 169411 - DNA, 525 bp, Zea Mays
ctctgctagagacaccaacaaggatgttttaagaaacccatatctctcaaatgtttagaccaaacatggtgattaagcatcctatggaaagatgaagaaacatactacaaaacattctagataagtgaagcctgattcagcctccaactaatttaaaatgcctcctgaaaccaaacaacacattatcaacaataaaaaacaatataaaatgaaacccaagtcattggcaggtgcaatcaacactaggattttccactaccaaactgggatgcaactccacaaagtctttaaataacactctaccaaataggttagaacactaagcacaacaatcaatgaattcaatagcctcatttgttaatgccactaaggtcaaacatccatgtatcgacaatgtatgaaacacctgacatacccgtctccagcactataaaacatggttgttattacactagaatccaactactagaaatctccaaactattctgttgatgtgaagcaaatggtgctcatgtcatataacat

SEQ ID NO: 169412 - DNA, 730 bp, Zea Mays
caactctgctcgcagcctgcttcttcgctcacggctcatccgcttagccctgggccctggccataccttgtttcttggttgcgctctgccactggtttgagtgatcaagcagtggtaatagactttgtgtttcacaatattcaaccgttgaaggatcgagttcatccggcttatatgtatgctggagtgagggatccatcccaagttactaaccggcaaataactaaagaagatgtttcgcttcaagttggtaccatgctcaagggcgacgttttcaatgagggtgctcctctagcctatttggcatgaaaccttcctggtgaggtgagtttactctccttgtttccgtaatagaaaatgttgactaatatctttgtgttgatgcttgcaatattgctcttttgttacaaagatccatttctttatttgtttctgaccctcccctgcgtgagggaagtgtacctccacagaacaagatgcggcagattgaaagagaggttaaggcaaccatcgtggccaatgagggcttggccaacgagttgaaagtgactcacatgctgatcataaaacttgctggaagctctgagattgaggctatgtgggatgtgttggcgtgagagtcagaagctgaggatgtcggcgctgtgaatgaagccctagagcaatcaggcattgttgggggacaagatagagttcaaagtgacctttaagtgccgacatgtcagtaaac

SEQ ID NO: 169413 - DNA, 705 bp, Zea Mays
tttggttttgtccttaaaaccgggtgtgacagaagatttggaccggattgtgatttgaagctggaccgttgttccagaggcccatgaggaaaataggccagttaatccggctcgaatagttccttccttcgtgccagaaagaaatgcagggcgatggcaccgtgtccgagtgcaatagtctagcgtttaaacaagttgatcgaccgggggagtgatcagagatcctcctggtccgtccatcatgtgctgccagctacgaccgtggctgtcacctcacctggatcagcagcagctcatgtggctgccactggatcgaattctagaactgcctgctctcgctcgcatcgcacgcacgcacgctcacctcccggccccgtcaccatcatgtgctttcctccttctaatcacacatgcacatgcggcatgcatgcgcacagtagctttatttgtgccaatgcaagcaggtagagacgtagagtgcatgcatggccgccaaacctccatgagagaaacgaactaaacgatggggggcagcaggaggactggaggagaaagataaacagacagacacaccgaccgaccgaccgaccgacagacagggtaggtaagcttaagctaagcaggacgaccgacgacccacagtcgtcgcacaccagcagctagcaggcactaactaaccagcacgccaaccactaccgccagtcc

SEQ ID NO: 169414 - DNA, 637 bp, Zea Mays
acaggtgttggcttcctcgccttctgccatttttaggctgttttggagggctgcattctcttctttcagttccttgacccgctgctctaggctttctacccgggagtttaggtgggtgcaatgggagaagaggttatcaaagtgggtgtcaagactatggagatatccggccatgtagattacggtggggtcatccttattatgctttctccctgacaaagcttggagtcttttcctccaagcagggttatttttgttgttgggtggcaagtagcgaagaggtgtctcggtgacttcgttgttgtagttttggcatagctggcggagagcttttaaggcaacattttggcatgtgccttggaagcggtggccagtggtagtgatatggaaaggtgggtggtttgggtagcttcaactttcccctaggtagactgccatggagcacttctcaactccaatctctcggcactgcttccatacatactctggcttcctgcgaactcccaggcgaaccgcacaactccgaagaaggtaagagaatccttctacctccgagcaatatgatgttttaaggacaaaggcgccctccatctggtagtcaagagaagaagagctttgttaatattagggaaagaag

SEQ ID NO: 169415 - DNA, 485 bp, Zea Mays
gtaatgacccccaagggggaatattcccgggctaaagcaggtaaccgggggcataattatacttaggagggtgtgcccacccacatggttacctataaataccatcgcattgtacattgatgggtgcttaacaagacgctgcaattccctacccactgttttgttgagcacttgagcattcccacttagggcccactccaccacgtgtcaaacattcccaacatttggtgctcactattcgtgcttcgacaaaccaatcccgcaatggatcccaacaaagcgacatcgaaggccaccacctctccggacgacgtggcgaaggcagctctcgctgaaaagaaaggcaaggaaacccttgtcggcgaaattccctaagaggcacccgaggatggagcagtcaacagcaagcgacctcacacagaaaatccacccacacctgaaggcaccgttcgcacgtgtagctctgaaggcctccatcggaaccc

SEQ ID NO: 169416 - DNA, 665 bp, Zea Mays
gccaaactcgccagggatctcgggcaatggcgtcggcgagattctcggccatggactccttgaacgcggactctgcctcggtataaaaatccggccccgcttttcccctagccatcgtcatcacgggtgacccccccataaaccaagctcgcgggggaactcgtcggtgcgccatggaaccacgtccataccgtcgctcaggatccgattgctcgccctggggcttcaccatgttgggggaaggatctagttgtctagcggtccaagatatgtcaccatggcactagggattcctcgccgatatagatcttccatcgtcgggccacttctctccgaggtcgtgctccaccacccacgtccagccctcggggattgactcgggaggaagccaagcgcacacggatgctcgtcgcggcttcgcctgggtggaatcgcgctcctggccaccgggattcttcgccggaacgggtgctccgcctcccgcccgactccacgcttccattgtgtggcatgcctcaagtccactcagtgcctctagcgcccagcctccctcgaatccaagctcccttggatccatggcatcttccccctccacgacttcttccagctctgctggacacccctcttcctctgctagcgcaggggagcactcctccccttggcca

SEQ ID NO: 169417 - DNA, 595 bp, Zea Mays
cccggattcaaacagcgatatcttttaaaatataatttcgaatcgagcgcataagtacccgttggaaaggtatgacaaatctctacatgattctcatattgattaccactaatttcccacgaaaagtccccagaaactgctactactactgctgttcgcctacctgcaaaatttctggacagcacctctaccgattcgcatagataaacatataatcgattggattgcagcacaattaaacaagatacaaacacaaaagtcaccttaaatcctcccctttcctcccttcttcttccctccacgaaaaaccaccgggagacttgcaccaacgcgacgtagatccgagcgggaaaggaatgacaccttgaagagaaggacttgaggaggggcggctagggtttgatgggggagaggtgggtggcggctgcaaataggtggaggagtgagagggggtggcgtccaaggctagagagaggggattaggggaggacgactagggttaaggggaggctaatggaccggatcgagattcatggcccaactcgcccacacgacagctcccgacctcgtcgccagcgtctaaccaaagaaattc

SEQ ID NO: 169418 - DNA, 1035 bp, Zea Mays
atttgacaagagcgccctgcgaacggcctgtccacgttcacggcgagaaccgcggtgtcgatcccgtgttctcaattatccacgctcggattgattgaacggccactacgaggagtttcatgaacacacagagctgctaaaacaaggcttgaattggacagggacttaccagagtggcctagccacggacgggctgttctacgcgatgtggcggaccagttttgggggaaaatggtgttgcggcgtctctggacgaaattaggagatgggattggggctacgcggccgtaaagaaccactgattccccgtgcacaaccaatttggagagtgggagaagagacacggcgaattttgggttgcgatgggtttgtaggtgaagaggaagacacctcgccgtggaccaccgtgctatttatagccacggcgacccaatagtcgacctgcggccacggacagtaacacacacgcatgcttaccacgtcggtagaagacatagtgagggagatcgcggcatgggtgacaccgcggcaaagtcactgggtcacggtggccgccggtgaggtctccggctggactcagggaacggtgccacttatgcgctgtttaactccgactctatccatttccgatcgcgcacgaacacggacggcggcggcacggattttggcgcaaagaggtcgccgacggtgagcaagccgcgctggcgttctaatcctatccggctactgtaccatggcgaagttcagtttagatgcctgacagagccttttgaggcttagttttctctcaattttgtgtggcgactaagctagctccctgtaccaaaattatagcctgacaaaccagctacaactttgtcacagcaaccttgatcaacttctcaacaattcaggtttgaattcacacaccaagttggctctgttccactgagaatctgaatttcagaatggatcagcctgacagccaaacttgaggcttaattatctctgactttttcttattaactatgttttccttcttaagcaaggctattc

SEQ ID NO: 169419 - DNA, 316 bp, Zea Mays
tagaagaaagtggtcttcgcgctgctgtggttccagacactgtgcctgcccagggcacccctcaccctgttgacacgcctttgtccgttgagccgcaggacgttaccaattttagcggaggtggcacccctatccaccttcaagaccactctgacagcagattcaaagtaaagcctccctgtttcaaagtctactcgcgaagaaaagaagtccaggcagcggtggcccagatgacagatgttgagagggctgaaaaattacaagaattcatgcagattgttaccaagccagctacaaggctgttggctgccccccc

SEQ ID NO: 169420 - DNA, 412 bp, Zea Mays
gggatgggtgcattgcgatcgtgaggaattggcgcagctcaaacactagagcaattcgactgaaagctaccagagaggcgagaacgaagctcaccggagtgaagggggaacgcggcggcgctagctcaatcgggcttgggaaggagtggaggagatggccggggctggtgtggaggaaacggagctcgggcggtcccttttataggcgcccgggagggggaaggaagggaggggacggcgagcaccaacgagcccgccatgatggcggtgatggagcaaacggcgataggatggctcgggcaggcgaggggtgaggggacggctcgggtacagtggcggggaggtagctgaggctggtgcgagcgttaatggtgaagcgacggggcgggaggtggtcggcgacgaacgcgcc

SEQ ID NO: 169421 - DNA, 1213 bp, Zea Mays
gttataatatgctgccagtggggttgcatagtgctactatgatgggtgcaaagattatgcatattgtgcagctccgtgttttgcgtatgcatacccggagggtctagagtaaggggttggacggtccgcgactgggccgagcggtttggggttatacctaaatagtctggtcatatatgacacttcttgggtggtctgcgcgtggcttatgtagggtcggatggtccgataaaggatgtcgaacaatccgtgaggtagccagacggttcgattatgttcagagctgattgcatgctaggcagcgactgctgcggtgatgctatgaacatattcatcggcataccatacaatgcctgggtctaggatgacccatttgtagctgatgtgttaggtgtgggtggctccgtattaggttcatgccagggaaaactaggggcaatagatttttcatacgaacatgatcaccctttaacagattcatttatatattgttttaattgacccctcgttgttctatgaaagccttaaaagattgatttgatttacatatagtgggagcccgatgcgaagttaggagagatgctacgatcttgccttgaccgatgatcttctaatggcgatccactatggagtgtgataggtacttttccttcgccttctcgcgtcgttcggcgagttatcgcaacactatttcctcttcacgcatcatgaggtcctgacagtgctgctgatcatcagtagggagtgcttccatggtcagcttgatgatgttggcggcagagacgttggcatgctctttataaccggcatttggaggccgatttttagtagatctaaacaccctaatgtcccagcggagtcgccaaaagtatgttggcgccgattttgtaccaaacactagaatgaatcacctggcagtgctctctacaggagtgcagacgatccacgacctcgctgcaggagtgactcctttgcgtgcttccagatggtccatgatggcaggtcttcttcacataaccctgaatcttgtctccctggagggaccccatcgaggaggtgaaatcctagggttgcgttgggatcaacaggccacccaagacgcttctagatgctatcgaatcaaagagaggtgaagatccagatcgaggaagactaatactgaggctaggttactcctactcacaatgcatgaaagaacaatgcaaataagata

SEQ ID NO: 169422 - DNA, 456 bp, Zea Mays
gaaaatttcgtccggatataatcccagacttcctttgacgtcttggcatccaggacatcgcaaatcatctctttagtcaacgatgagaggagcccgctcaggacatgctggtcagtattgtaccattgctcataggcaggattgggaaccagctcaacgccagtttgtgcggacgccgcgatttgtgacgccggtgcgatgagggtgccgtcaaggtatccgataagcttggagctacgtaggtatggaagcagctgcgcacgccatataaagaagttgttttgttgagcttgatggtgacaacatggtggaggggaatgatagtggtggacatgatggacggcacaacagatgagacgacagtaggagaggaggaggatataacaatgaacatggatcgagtgattaagcccttggctccgataccatgttaattggcttagctcgatgccctat

SEQ ID NO: 169423 - DNA, 990 bp, Zea Mays
atttaggtagaagacatcaatgttgcaagggtcaactgcgataatagacaagcatatgagagaaaagatgaaggcattgaagagcagtggaatgagtacaacaaataatggagttgcgcccaagcttacacgcagtaaagaagaggatatagccaagggtaagataagtaaaacacagctctcaaattgaaataggagattggagattttagagaacggtcatagtataatcaccaaggtaagatcaagagataagaaaggtaaaggtaatacccaaccggagcacaacaaaggatggagttaaaaacttgcaagcgacaaagaagaggatacgaccaagggaaaagtagataaaatacaactataaaattgagatggaagagagaaggttttggagcacaagtataatataggcatcaaggtaagatatagaggtgtcaaaggcgaaggtgataataacgaaaggcataacaaaggatagagttaaggcaagactcgtaatggcgaagtggagaaaacaatcaaggtaagataggtgatgtttcaatagaatggttgaagtaagaattcattaccgagggaagttataaagaaacgatgagatcatcaaggatgtgtgaaatagattggtcgctcatggatcatcaagaaataagggtagtcaaaagcatgttaaccgaaatgtcttaaacaaacattgggatatgaaggtaagcatatataaaaataatagtatgcaagattccaaggatacgggtatacccagacaagggaaaagaaaaaggtaaaggatgacgacttaacagtggaataggaagggatctcagaagacaagaagttcatggacatataaactagagtgtttaagtaggcgggagaaattcagatgtaagtatttgaaacaagagtattaaagaattcagggatatgagtatgtcaataccaaaggattagagttcaccggatggtagcaacttaatgatggaagag

SEQ ID NO: 169424 - DNA, 456 bp, Zea Mays
gtggacagaggagtcttcggaagaggacttggattattttgtagcgttggatgtggctgtggcggagacttctccgcgtgtgatgggtgctgaggatcttccgggtgcgagtgctgggcgcaggcggcgaagggcggtggcgaaacggagagtgagtgagttgtcgcaaagtgataggcgtcatcgtggtgagatggagggtggtcgtcttcgtgtggatgtgactggcaagcgggaattgttgtcctcaccggctggggcgagtgtgggtgagggggagttgcgaagtctgtttgcgggtgaggaattgaggataatgttgttcaactatagggagatgggtatcatcccgaaggttgagccaatgtaaagtgtgatgccctcgctgtatgtatgtaaacatacttttgtgtgatgaagctgcgcgctttcgttgatcaggccgctcccgtaggc

SEQ ID NO: 169425 - DNA, 478 bp, Zea Mays
tttgtaatagattcatatataaacccttgtccgattcggtgaacagtaggctgtacgaatacggcgaactggcggcggccgcgatccctgatcgtcggtctgagataacgagtgaattaactcgtcgtgagagaaactaccttgtgtgatcgcgtgtgtttacatttggtattcagagctagagctggatccaccacacgagcactggacacggctccaagcgaagacgacggagatggctccaccgcgccccgacgacccagtgatgcagattctggcgaagcttgaagaagggaacagggagacgcatcggaggatggagaacatgcagaaaacgatggcgaacatggaaaccaccgtgaagactgtgatggccgaacaaggggagttccgaaagtggaagccagaggtggaggccaaggtacaagagatcgccgacgtgctgatcacgatccaaggcaaggttgatcggttcgtc

SEQ ID NO: 169426 - DNA, 587 bp, Zea Mays
acaccctgataaactccaccaggaccaacagatttcacagtgggttgggaagaagatgtccataaccttggtgcttcacctgcgacgtcgtatagagcccaggatagtgccagcaaccttcgcagtggcgcgtggaaggttttgggcacacccctaggtgggatgagcgatggggtcgctggaaatttctcgatggactttgtcgaaccgccgcgcagcatcggactacatcaccggtgagtgccctaattcagtttgcaggattcttggctaggtatttggtgctatgggtgtgagattggagcactcggtgccgcgatgcagtgctccagtgagcccttaaccgtacagggcggtggcgttgttgttgccggcgtttgtaggtggaagaagtagtgaaagtggtgaatcataagtttaacgactgggattgaagggtatacaggttgggttggattaaggctagtccgttggatcgagatcgggtgtacgagattccgtcttggctatttaaatcctgagcattgttatttgtttgggcggttaggatgacgttctagcttgagaccaatctgatctaatctgga

SEQ ID NO: 169427 - DNA, 668 bp, Zea Mays
ggtcgtggtcatgtcataaaggagtgtccaaataatcatgtgatccttgtgaatgatgatggagaatatacatcagctagtgaagaggaagctgaagcaggaaatgtagatgacactcataaaattgaggaacatactggatgtgaatttgagcatgtagtgctcttgtggttacacaaatcttgattgttcaaatgaaagaagttgaaattggacagcgacataatctttttcaaacgcgagcaaaagtgcaagacaaagtagtaaaggtgatcattgatggagggagctgccataatcttgtaagtcatgagatggttgaaaagcttggtttgaagttgcagcgacaccctcatccatatcatgtccaatggttgaatgaatcggaagatatcaaaattggttataaggtgaaagttccgttcaagattggagagtatgttgacacagtggagtgcgatgttgcacccatgtctgtgtgtcacttgctgctgggaagaccttggcaatatgaccggtattctcagcattgtggaagaacaaatcagtgcacactagacctgaaagggagaaagtttgtactcaagcctatgacccctcaacaaatcatggctgaacacttacaaaagaaaactgaaattagtgcagcaagtagaggaggagaagag

SEQ ID NO: 169428 - DNA, 525 bp, Zea Mays
tcagcgtcatcggtgctagctggcatttcaaagtgagtttgcctctcagcctcgggaagactccgaagtggagcaatcaaggtctcaatgtcctcgggagagggtcgcactctatgacccgggctaccatcacgagcaggagggttggagacaaattcagagaatggcctatttggtggtaggttccacgcagaataagctataggagcaccagcattcgagactctacccctcagaaccatatccagtcggctcagcaaatcctcattgggaatctttctatttgtaacccgggtggaatcactgatgccggtatataagtaagaggggtaaattttgttctttaagggttgaatgtttttgaagacgaagtcagcaaccacagcttcagcagtcagacccccatccttcagcaagcagatctcagcaagtagtactttggcctcggttatctctgaaaaggtgggagattctacccaactaggtgtgcgaacatctggttgcctccctggccgagggggagag

SEQ ID NO: 169429 - DNA, 348 bp, Zea Mays
cgtcagttttatcatatacaccaaactgcatcggtagctgagtatgtagagcaatttgaccaactgatgcatcaattgctagctcatgagaacagtctaactgcaaacatgataactgcacgttttgttgacggattaaaagatgagataaaaactgttgttaccattcatcgaccgtccgatttggatactgcttgttcccttgcaatattgcaggaggacgtgctgctgcacacgggtcgcagagaagtcagaagaccggagttcagcggtttagctagatcaccagccaaagcagttccaatgcctctaccgttgccaccggttattgtgactcggaccagtggt

SEQ ID NO: 169430 - DNA, 712 bp, Zea Mays
atttgtttaatgatatcatcgagaatttagaaatacgggaaatagaaatggtgggatgacaatttcactgccggacatagctactttaccgagtgcctgaagcactgggcaaagcctgaaaaacactcgacgaagtctttactgagtgtgacactcgacaaaagtcttggtgaactgtacattggcaacgacttctttgtcgagtactttttgttgggcactcggcaaacttggttcttggcaaagaaaagtcgccgtcatgacaagtgacagagactttgttgagtgccacggtgacacttaagaaaggccccctctttgccaagtgtcttctataccagccctcctcaaagaagtaccctgtggtcccttttgctagtttctttgccgagtgtattaggaggcactcataaaggctccatctttgccgagtaccaactagcctagctcttggcaacgggagcaccagcggccccctttgctagtttgccgagtgcatttggtggcactcgacaaaggttccttatttactgagtgtcgcgaccataacactcggcaaataaactttaccggttctcaagtgtgccttctttgctgagtgttatggtcatggcacttggcaaagtaccttgtcaggaaatggacccgagccgtttggctaagtgattttagagtttgatgatcaacataaccttgtagactaatgtgttta

SEQ ID NO: 169431 - DNA, 354 bp, Zea Mays
gccaggtgagtgcgccgcctccgcttctctagcagcgccaccggggtacgggccggtgcgccgctgtagatctagggtgtccaaattcgtcgtcgccgttagccaggctaggcggtactgtagatcccctgttgagctcgacgcgcgtcactgtcctccgctgcctatgcccatgacgttaggtgagggctgttcaccggatttacaaatcccacacatccgcgtgttgccttgcctccatcgcctgtgcttttccaacagcgtcggctcgctgttcttctgtacttgaacatagcgcccatcccgctgctaggtaatatatagagccccttcgctgctgtcttcctctttccg

SEQ ID NO: 169432 - DNA, 356 bp, Zea Mays
aaaggttattgccgacaggactttcgccgacacacattatctgtcggcaaagctctttaccgacggactgtgcgacgctatttaggtgttttaccatcagacaatctgttggcaatattgtgtcatggtgtagtgaatcataaataaattctgcattttgtatttgaccagttgcatccacgattttatgaaagaacatgcgaccattgcaacaaatcataaaattaataatgcacatcatggttggccctgtccattaatcacacataatagtgaccccaaagcgaccccaatcttccttgtattggtccatgcgagtttgtaggtcctcatagttcatatttagtaatggccca

SEQ ID NO: 169433 - DNA, 367 bp, Zea Mays
tgcactccttccttagatagctagaccgcattcctgtaatctcgtgcatactttatttcctacgatagctagactgcctaccagatatgcagacatgtaattctccctgtacattgcctatataaaggaatagcacagccctgagaagcaagacattacgcctaaccaaacatggtaacagagccaaggttttaatgtccacaataccttcttctcccacaaattcctccacccacgtcctcctccaccatggcgaattcatcttctgctgctcacattccaattcatcaagtcgtcaccattcgtctcactaaaacaaactttcttctctggcgtgctcagcttctccctcatctccgtggtgccc

SEQ ID NO: 169434 - DNA, 1967 bp, Zea Mays
ctctcttgcgttttcgagaaaagaagcattatactggcatcaaattagcaagggaagtaaaggcaaagaccagcaagtacaaatcactgctaagctttaattggagagaaattgaccttctttgacagctggactatgcattcatcaaaagccatgcggagtttgtcattccactttaccacctccaaatcgttgctgccaagagctaaatgcagtgtctttttcatatgcctcacaaggtcacttatagcaactatggttgctgctgaagcctgagctcttgattgttctgcaagagcagttatcacttcgacaatgctgagttgcatctcaggttgtttcagtatggccttgtgttcgagatgcttaactagtactgatatcatcaaattaatgtttgtccctgcaaaatccagttgtagacttgtagctaataaataaagtggtcatgttgataaaggtttactttgagttaatgtgaatagagcacctgacttttccatgaacatttgcatgtccaatagaacacaaagtgcaagaccatttttggatgaccatgaattagtattatcgaagtggcaaaatagggactccataacacggcggaatgtagttgcttccctggacagcttggccatgttatgcacacagacccttgaccaaaaataaggatccttggcatcatccctacaagacaggattcagttaagaactaaaaaaacaagaggaaataacaaacttaagttcaaagaatgttattacataagcagttgaattcctccatagtcactaactatgctgtcccaagaaggtatcacagaaaatataaatgtcgatggagaggcatgaccctcgggtttaaggacctcttcaaccaactgacaacctggattttcagtggcactattgtcactttgcacctgtcgaggctcatagctttccaatactacttggacaacctgacaatcgtagtgaaaaaaaaagtttaagagcacgatatattaacgcaaaaaaaaacatctgctcatagcaaacaagtatagcattcagcaaacatatagaaccaaaagtattattacaggtgtaggaattgtattacagcttgaaaacatgagcagatctgcgtaactaagcagcattcctagaatgtacagcatgatattctggtcgtcatacatgaccaaacatctaacacaaggtaaataatgacggtctgaagtttcaaggacacagataagtaaaacagagaaactacaagaactactgcaagatacttacgctatcaaactctgaggagatatgagagagctcacccataaaccagatctgttcagcatacaaaatgaacagtatgtcagcgctggagcatattttggcttgtactttgcattgcttttgggttaataactatatgtattgcaataaaaatacaaaagaaaaccaaaagtggagcaatctttggaaagacacaaaattactcaacatgtccccattattgtagtaagaatgcaagacaaacaaaactgcagcataaaaaatcaaggctgtaaagtgctagaatttcttattgggattcttagccagttttagcagaatggaaccacaggtaaataccaaccagatgaatccaaaaacttaagccattgggaacaggtggacaatccagttatacctcaacactctcacatgcagccgcagacaaggcgcaaacgtggaaataaaggagtgcatgacttaaataacgcctctgccaggactcaaactcaagatttttggtttgatacaatgttaggtttcatgtaccaaccacatgaacccaaaagcttaagtcattggaaagaggtgggtaaaccacttatacttgattacttgaacaccaaacaacgacgactataaatagtgctttaagaagggcatccaattgtgatgagaatcatacaatacgtttggttaggctatgttttaac

SEQ ID NO: 169435 - DNA, 523 bp, Zea Mays
gttaattctggccgttggatcctgcatcaagggccacgattagagcgaggaaggttataatccaatatgcgttcactgccctaggatcaaagatcaatggcccgaaatcgtccacactacagatttagcacgggcccattggtttagttatcgacggtccagatcaaccgcccgaagaggtatcctcggcttctaatctggcgcgctagtataagatccaatggtggctgatcaaccccccatcttcacctccccagactggaaacacggcggcacagacagcccccatggtggagccatggccggcgatgagctgtccgaccaaccaaggcccaatccgcacaccccagacgccctacgcgaggaggagaactaggcgaatcctatggttagcggatcaccgactatcctcaacctccagccgagctggacgacggcgctgacgcagaaccacggcggagccacgccggtgaagccttcccccacaatcagtgtccgaaagctaattccaagagaaatactc

SEQ ID NO: 169436 - DNA, 738 bp, Zea Mays
tcgatactatcaaggacgaagccatgctcgggcgagacagtagtcctcccgaggccatggtcaggcctgctctagggcatgcagtcgtgcagagaacaattgaagcagtggcctccggcgggatttgtgcggggcagttggccaaggtcgagctcgggcgaggcaaagttttctccgaggctgaggctaacttcgtgcgaggcgaagttccctcctgagggtgagaccatgctctgccatacgcacgtcccatccagagttgtttgaactcagcagacgacgtgggggagcagtgaccattattcctgggcatgcgtcatcatagttggcgaaagtggaagggaccgtggttctatcgctcttgtttgactgtctcgtcatgtggggtaggtatctgcattaaatgatcacatctccatggttcccgtgacctttgactgggccaggctcagggttatcctcctgtccgagataggctcgggtgatgcagaaactgttgttccgtggaggggggacctcgggagagacgaggatttccccgagtgctgccctcggctgagggcaggctcgggcgagacggagttttgagcgaccgccgagcggggtctcgggcaaatcatggctcatcctttcttgacctcgagggatgtgtcctatgatcttttttgggtagttagcggttaagcgtgtttagaggcgtaatctaggtacgcctaattacgatacccaataattttc

SEQ ID NO: 169437 - DNA, 821 bp, Zea Mays
gttgatttcagtaaagtagaggggctctttagcaatatgaactagcgaaagggtacaggtgattctcggccgttggatcaacagccgagggctcagatcagatctggattgcgccgaagcggtacgctcggctgactgttggatcaaagatctacggcaaggatttaattagtgcgagatctaaacctattcacgcgatgaagatccaacggtgtggatcaatccgagcgaagggaaaacgcagcgcctcatctcagccgttcactacgaatccaacgacacgcaaccgtctcctaccctggatcccgagcgcggcggcgcaccaaatctcacggcggagccccgccggagcacaccgcacgcgcactgtaggccgccaatcccaaagtttatccgcgcaatacaatgactagaacatggtgaactgaatggtactcgccatacctcggatgggggtgtagtttcttcggtccacgcgacgatgtggcttcacggcgaaattcaacgacggcgagcaattgccgtcgccagcggtccgcaccacccgattgcgggcgcagaaagcttccgccgacgactacggtcctccacgatccaactccgagagcggagatcccccgacggcggctatccccggtggcggccgattccccagtcgtaatggcggcggcacacggtttcctacggcggcggtggtcgaaagggttggagcgtgggacaaattagagtgcgctacgattccagggaaggcgaatgtagttatgcgccccgtgaccccgaaatccccggctcgatcgcgagcttgcgcggtcaaagcggag

SEQ ID NO: 169438 - DNA, 693 bp, Zea Mays
gaacaatgaagttagtgtccctattaggagaagtgttagtggaattggtcttgtctggatcaaggaaagggaattgtcaccaagtcaccactcgtattgaggagattaaaccatcagaggctatcggtgtagtatcagatttcacagatgtgtttcccgaggagttaccaggtatgccacctgaaaggaaggttgaatttgccatagagcttataccaggcaccgcccctatttccaagagagcctatcgagtgtccggaccagaattggtggaactcaagaagtagattgatgagttgtcggagaaaggttatatcagaccaagtacctcgccttgggcagccccagtgttgtttgtggagaagaaggatgggacgagaggatgtgcatcgattatcgagctttgaatgaagttactatcaagaacaagtaccccttgcctagaattgaagatttattcgatcggttgagaggagccagtgtgttctcaaagatagatctgaggtcaggctaccttcagctcagaatccgaccctcagatatatcgaagacaacattcatcaccaagtacagactgtatgagttcacgattatgtcattcggtttgacgaatgcgccagcatgtacttgatgaacaatgtgttcatggattatctcgacaagtttgtagtagtgtttattgatggtattctt

SEQ ID NO: 169439 - DNA, 802 bp, Zea Mays
cggaccctggggttcgggtgactaagggaatctctagaggagtagagggaatgccatgcttttccacaaaactagtggctatgaaggagtgggatgctccagaatcgaaaagtacggtagcaggagtaaattcaacaaggaactcaccgagcactactcccggagcctgctgagcttcctgggcatcgacgtgatttactcgtgcccttccttggtacggagccttgatctgctggctgacggcaaagggcgccttgggggcggatgctgaggtattcttggggacattcaccgagttagagtaggcgggtcctggtggcttcagctgcggacagttgttcttgaagtgactgggatcaccacagtgccaacacgcatttgtcgggggttggttgcttgccactgagggggaatggaaagagctctgactttgctggctgaatcgtgacggagtgggtccagctggtctactgaagtttggccccttgggtggaaacccaaatgatcgagtcttctggtgccggtcctgctgctgtgcccggagaacctggaacttccttttgagatgtcctttttcttcctccttagccctttcagcttgcatggccttgttggaaaggtgagagaagttgaggaagtcttggccagccagaattgtcttgagttctggcctgagtcccttcaggaaacaggccatcttcttgttctcggtactgacacatctggcgcgtagcgggctaattccgtgaacttgtgcacataatcgctgacagatcttccatcttgagtcaattctcggaac

SEQ ID NO: 169440 - DNA, 487 bp, Zea Mays
aactcaatagtgaagacgaaggcaagcaatctaggatagcctattctggaggcccacttatgtgtggggaagacctagtgatatccacataattgcctgaccatgagcttggccctcgtgtgggcatcattgcgaggggctcgaacaaggaccagagaaaatcttgagtgcttctcgataccttggtaaaaatactagagatgttgatgggagtttgtatctctatcaccttttagattttgcaattatggtgtgtgcctttgttgtgtgttttgcattcctaacttggttgataggctagttgttagtgtaagtccccttttcccaagaacatgatctaaatgtcatctaaatagggtgaataggcgaataaaaattatcacttaaaacctagaaattcttactctactcaaagactggatcgtagtggaatcaaagacacttcgactaggccacaacggaaatgaagttcctgtctcaaaatacc

SEQ ID NO: 169441 - DNA, 592 bp, Zea Mays
cgagaacgaaatggagaaatgctctatggcagtctacctgggagtaagtcgaaactatccaaaccacccttctttccaagtcacttttaccggataccgctttccagatacttgccagaatgttgcccgaacagccctctgacaactatgccagaactacaacaaggtgatctttgaaactccccttcgctactttccacccagcaacaagaatacccccacctggaggaaaagacttcaggccctgtcaggaggagatcctattgaggatgaccccaccatcgtatacatggctggataccttcacacccttgataaccaatatgatgacctcaccctccactgcacccacctaacctcccgggtggaaagcctggagcaaaaagtcagggaacttacaagggaaaaggcgtcccttcaagagagcctcgaaatagcagaaggcgaggaaaccaatacccgtgaggcctaccgcaccctaaagatggattacgacaagaaactgaagaagctcgcccccgcaagaaaaatccgcaagaagaccaaaagccaaggatgtcagacggagcagaaggaggaagcccctccagcc

SEQ ID NO: 169442 - DNA, 747 bp, Zea Mays
tggcacagaaggtctgaccctggggtctgggtgaccagagggacttctaatggtgtagtggggatgccatgcttttccacaaaactagtggcgatgaaagaatgagatgctccagaataaaaaagcacagcagcagaggtaaattctactaggaactcaccgagtactactccaggggcttgctgagcttcctgggcatcgacgtggttcactcaagccctaccgtggaactgagtcttgcttaactgactgttggtggagggtgccttggaagcgggtgccataacattcttggggccattcaccgagttggagtaagcaggtacggatgtcttcaggtgcggacaattattcttgaagtgaccggggtctccataatgccaacaagcattggctagaggttggctgcttgcaacgggctgggtgtggaaggaactttgaccagactggttgaaacgtgacggagaggatcctgctggcttgctgaggtttgacccttggaaggaaacccaaaaaatcgaaccctctagtgcctatcatgctgttgagctcggagaatttgaaactttctcttgaggtgacctttttcctcttctcgggctctttccacctggatggccttgtttgagaggtgcgagaagctgaggaagtcttggctggcaaggacagtcttgagttctggtcttaaccctttcaagaaatgggccatcttcttgacttctatgctaacatcatatggtgcataac

SEQ ID NO: 169443 - DNA, 1186 bp, Zea Mays
tctggatgctcttaggaagaatcaattctatggcaagttaaagaagtgtgccttttggctttctaaagttgcttttctgggtcatgtgattaatcagcatggcattgcagttgaccccaagaatgtcgctgctattgtggagtggaagaggccttctagcgtctctgaaatctgaagtttcttggggcttgctggatattatcagtgtttcatgccaaacttttccagcattactaagccattgactaaactcttggagaagggtgttccttttgtctagaccaatgattatgaggtcagctatcaggcattgaaggacaagttggtgaatgctcctatcttagccttgcctaagagtggtaagcgtttcacagtttatacagatgcttctcgtattagccttggttgggtgttcatgcaggaaggcagggtgattgcttatggctctaggtagttgaagaaacatgagaggaattatcctacccatgacctcgagttggccgctgttgtgtttgccctgaaatcgtggaggcattatctttatggtgagtcttgtgacatttacaccgatcataagaatctcaagtgcattttcactcagaaagagctgaattcaaggcagcgttggtggcttgagttgataaagaattatgatctatcaattcaatatcacccaggaaaagcaaatgtggtggctgatgcacttagtagggctggtatcccaaaagtgaccatgcctttgattgcagatctggaccatatgggagttgctttgtgctatgttggcaccgctagagaggagactcagatgctcattcaatcctcccttctggatagagtgtgtgtggcatagtagcaggatcatttgttgtaggaggctcgaaagagggtcgggatggtaaacctcgagagttcaccattgatgagaatgatttggttcattttagaggccgtctttgtgtgccacagaaatcagaggtgaagatggatatattgagagaagctcataaaacgccttacatcgttcacccttgcgaaaccaagatgtatagagatttgaagcaaaacttctggtggaagaggatgaaggttgatgtttctaagtatgtggcaacgtgtggggtctgttaggatgtgaaggctgaacataagaggcagcctcatagtggatccctagacattcacc
